United States Patent Application Publication US 2004/0052799 A1 - sequence listing, part 2

SEQ ID NO: 2319 - DNA (genomic), 474 bp, Helicobacter pylori; double-stranded, circular
  misc_feature (B) LOCATION 1...474
  hypothetical: NO
  anti-sense: NO
accatttttgaaggaacgctctattttaggataataacaataatgaaacaagaacccaccacctaccaaccagaagagatagaaaaaaagatttatgaaatttgctctcatagggggtattttgaaatcaatggcaatgaaaaaatccaagaaaaaggcaaacgattttgcttgatgatgccccctcctaatgtgaccggcatcttacacatagggcatgctttaactttaagcttgcaagatattttagtgcgctataaacgcatggacgggtataagaccttgtatcagcccgggctggatcacgccggcattgcgacgcaaaatgtcgtagaaaagcagcttttaagtcaaggggttaaaaaagaagatttagggcgtgaaaaatttatccaaaaagtgtgggagtggaaagaaaagagcgggggagcgattttagagcaaatgaagcgtttagcgtggcgcagctttttc

SEQ ID NO: 2320 - DNA (genomic), 471 bp, Helicobacter pylori; double-stranded, circular
  misc_feature (B) LOCATION 1...471
  hypothetical: NO
  anti-sense: NO
atttttgaaggaacgctctattttaggataataacaataatgaaacaagaacccaccacctaccaaccagaagagatagaaaaaaagatttatgaaatttgctctcatagggggtattttgaaatcaatggcaatgaaaaaatccaagaaaaaggcaaacgattttgcttgatgatgccccctcctaatgtgaccggcatcttacacatagggcatgctttaactttaagcttgcaagatattttagtgcgctataaacgcatggacgggtataagaccttgtatcagcccgggctggatcacgccggcattgcgacgcaaaatgtcgtagaaaagcagcttttaagtcaaggggttaaaaaagaagatttagggcgtgaaaaatttatccaaaaagtgtgggagtggaaagaaaagagcgggggagcgattttagagcaaatgaagcgtttagcgtggcgcagctttttc

SEQ ID NO: 2321 - DNA (genomic), 918 bp, Helicobacter pylori; double-stranded, circular
  misc_feature (B) LOCATION 1...918
  hypothetical: NO
  anti-sense: NO
gacattaagctttctactacgcatttagaaaataacaagaatttcgccaacaagctttttaatgcggcgagttacttgaaactcaaacaagaatctttcaaagataaagagcgtttgaatgaataccaaacggctttggggcgttatgcgaaatcgcgcttgaatcttgtcactaaagaggttcgtaacgctttagacaattatcgttttaatgacgccacgactttgttataccgctttttgtggggggaattttgcgattggttcattgaattttctaaagtggaaaatgaagcgatagacgagttagggagcgtgttaaaagaggctttaaaactcttgcaccctttcatgccctttatcagcgagtctttataccacaagctcagtaacacggaactagaaaacgctcattctatcatggtcatgccttaccctaaagaaatcgcgcaagatgaaaaactagagcatgaatttgaagtgattaaggattgcatcgtgtctttaaggcgtttgaaaatcatgctagaaaccccaccgattgttttaaaagaagcgagcgtgggattgagggagaaaatagaaaacacagagcgtttgcaaaattacgcccaaaaattagcgaaattagaaaaagtcagcgtgataacttataagcctttaaaaagcgtgagcgatgtgggtgaattttgccaaacttatgcggatttagaaaatcttgatttaagcccgctcattgctcgtttaaaaaagcaactagaaaaactggaaaaagaaaaactaaaactcaatttgcacaatgaaaattttgtcaaaaacgcgcctaaaagcgtgctagaaaaagccagagagagtttaaaaacgcttttagaaaaagagggtaagatccaacaagaattggatttgttagaacaacca

SEQ ID NO: 2322 - DNA (genomic), 1026 bp, Helicobacter pylori; double-stranded, circular
  misc_feature (B) LOCATION 1...1026
  hypothetical: NO
  anti-sense: NO
atgagcaaatctaaaggtaatgtgatcgatcctttagagatgatagaaaaatacggcgcggatagcctgcgcttcactttagccaatttgtgcgctacgggtagggacattaagctttctactacgcatttagaaaataacaagaatttcgccaacaagctttttaatgcggcgagttacttgaaactcaaacaagaatctttcaaagataaagagcgtttgaatgaataccaaacggctttggggcgttatgcgaaatcgcgcttgaatcttgtcactaaagaggttcgtaacgctttagacaattatcgttttaatgacgccacgactttgttataccgctttttgtggggggaattttgcgattggttcattgaattttctaaagtggaaaatgaagcgatagacgagttagggagcgtgttaaaagaggctttaaaactcttgcaccctttcatgccctttatcagcgagtctttataccacaagctcagtaacacggaactagaaaacgctcattctatcatggtcatgccttaccctaaagaaatcgcgcaagatgaaaaactagagcatgaatttgaagtgattaaggattgcatcgtgtctttaaggcgtttgaaaatcatgctagaaaccccaccgattgttttaaaagaagcgagcgtgggattgagggagaaaatagaaaacacagagcgtttgcaaaattacgcccaaaaattagcgaaattagaaaaagtcagcgtgataacttataagcctttaaaaagcgtgagcgatgtgggtgaattttgccaaacttatgcggatttagaaaatcttgatttaagcccgctcattgctcgtttaaaaaagcaactagaaaaactggaaaaagaaaaactaaaactcaatttgcacaatgaaaattttgtcaaaaacgcgcctaaaagcgtgctagaaaaagccagagagagtttaaaaacgcttttagaaaaagagggtaagatccaacaagaattggatttgttagaacaaccatga

SEQ ID NO: 2323 - DNA (genomic), 1035 bp, Helicobacter pylori; double-stranded, circular
  misc_feature (B) LOCATION 1...1035
  hypothetical: NO
  anti-sense: NO
cgtggcgcagctttttctaggactcgtttcacgatggataagggtttgcaaagagcggttaaattggcgtttttgaaatggtatgaaaaaggcctcatcgttcaagataactacatggtgaattggtgcactaaagatggggcgttgagcgatattgaagtggagtatgaagagcgtaaggaggcgttgtattatattagatattatttagaaaatcaaaaagattatttagtggtggataccacacgccctgaaactttgtttggcgatagcgcgattatggtcaatcctaatgatgagaggtacaagcatttagtggggcaacaagtaatgttgcctttaatcaatcgcacaatccctattatcgctgatgcgcatgtggaaatgggatttggcacagggtgtgtgaaggttacccctgggcatgattttaacgattatgaagtgggcaaacgccaccatttagaaacgattaaaatatttgatgaaaaagggattttgaacgcgcattgcggggagtttgagaatctggagcgattagaggctagagacaaggtcgtagcagcattaaaagaaaacgccttattagaaaagatagaagagcatgtgcatcaagtggggcattgctatcgttgtcataatgtggtagagccttatgtgtctaaacaatggtttgtcaagcctgaaatcgctcaaagttctattgaaaaaatccaacaaggtttggcgcgattttacccctctaattggatcaataattataacgcttggatgagggaattacgcccttggtgtatcagcaggcaattgttttgggggcatcaaataccggtattcacttgcgagaataaccaccagtttgtgagcctagacacccctttaagttgccctacttgcaagagtgaaaaactagagcaagataaagatgtgctagacacatggtttagttcagggctatgggggttttccactctagggtgggggcaagaaaaaagcgatttgtttaatgaaagcgaattgaataaatttctaccc

SEQ ID NO: 2324 - DNA (genomic), 1608 bp, Helicobacter pylori; double-stranded, circular
  misc_feature (B) LOCATION 1...1608
  hypothetical: NO
  anti-sense: NO
atgaaacaagaacccaccacctaccaaccagaagagatagaaaaaaagatttatgaaatttgctctcatagggggtattttgaaatcaatggcaatgaaaaaatccaagaaaaaggcaaacgattttgcttgatgatgccccctcctaatgtgaccggcatcttacacatagggcatgctttaactttaagcttgcaagatattttagtgcgctataaacgcatggacgggtataagaccttgtatcagcccgggctggatcacgccggcattgcgacgcaaaatgtcgtagaaaagcagcttttaagtcaaggggttaaaaaagaagatttagggcgtgaaaaatttatccaaaaagtgtgggagtggaaagaaaagagcgggggagcgattttagagcaaatgaagcgtttaggcgtcagcacagctttttctaggactcgtttcacgatggataagggtttgcaaagagcggttaaattggcgtttttgaaatggtatgaaaaaggcctcatcgttcaagataactacatggtgaattggtgcactaaagatggggcgttgagcgatattgaagtggagtatgaagagcgtaagggggcgttgtattatattagatattatttagaaaatcaaaaagattatttagtggtggctaccacacgccctgaaactttgtttggcgatagcgcgattatggtcaatcctaatgatgagaggtacaagcatttagtggggcaacaagtaatcttgcctttaatcaatcgcacaatccctattatcgctgatgcgcatgtggaaatgggatttggcacagggtgtgtgaaggttacccctgggcatgattttaacgattatgaagtgggcaaacgccaccatttagaaacgattaaaatctttgatgaaaaagggattttgaacgcgcattgcggggagtttgagaatctggagcgattagaggctagagacaaggtcgtagcagcattaaaagaaaacgccttattagaaaagatagaagagcatgtgcatcaagtggggcattgctatcgttgtcataatgtggtagagccttatgtgtctaaacaatggtttgtcaagcctgaaatcgctcaaagttctattgaaaaaatccaacaaggtttggcgcgattttacccctctaattggatcaataattataacgcttggatgagggaattacgcccttggtgtatcagcaggcaattgttttgggggcatcaaataccggtattcacttgcgagaataaccaccagtttgtgagcctagacacccctttaagttgccctacttgcaagagtgaaaaactagagcaagataaagatgtgctagacacatggtttagttcagggctatgggcgttttccactctagggtgggggcaagaaaaaagcgatttgtttaatgaaagcgatttgaaagatttctaccctaacacaacgctcattaccgggtttgacatcctctttttttgggtggccagaatgctcttttgcagcgagtcgcttttaggcgaattgccttttaaagacatttacttgcacgccttggttagggacgaaaaagggcgaaaaaatgagcaaatctaa

SEQ ID NO: 2325 - DNA (genomic), 2619 bp, Helicobacter pylori; double-stranded, circular
  misc_feature (B) LOCATION 1...2619
  hypothetical: NO
  anti-sense: NO
atgaaacaagaacccaccacctaccaaccagaagagatagaaaaaaagatttatgaaatttgctctcatagggggtattttgaaatcaatggcaatgaaaaaatccaagaaaaaggcaaacgattttgcttgatgatgccccctcctaatgtgaccggcatcttacacatagggcatgctttaactttaagcttgcaagatattttagtgcgctataaacgcatggacgggtataagaccttgtatcagcccgggctggatcacgccggcattgcgacgcaaaatgtcgtagaaaagcagcttttaagtcaaggggttaaaaaagaagatttagggcgtgaaaaatttatccaaaaagtgtgggagtggaaagaaaagagcgggggagcgattttagagcaaatgaagcgtttaggcgtcagcacagctttttctaggactcgtttcacgatggataagggtttgcaaagagcggttaaattggcgtttttgaaatggtatgaaaaaggcctcatcgttcaagataactacatggtgaattggtgcactaaagatggggcgttgagcgatattgaagtggagtatgaagagcgtaagggggcgttgtattatattagatattatttagaaaatcaaaaagattatttagtggtggctaccacacgccctgaaactttgtttggcgatagcgcgattatggtcaatcctaatgatgagaggtacaagcatttagtggggcaacaagtaatcttgcctttaatcaatcgcacaatccctattatcgctgatgcgcatgtggaaatgggatttggcacagggtgtgtgaaggttacccctgggcatgattttaacgattatgaagtgggcaaacgccaccatttagaaacgattaaaatctttgatgaaaaagggattttgaacgcgcattgcggggagtttgagaatctggagcgattagaggctagagacaaggtcgtagcagcattaaaagaaaacgccttattagaaaagatagaagagcatgtgcatcaagtggggcattgctatcgttgtcataatgtggtagagccttatgtgtctaaacaatggtttgtcaagcctgaaatcgctcaaagttctattgaaaaaatccaacaaggtttggcgcgattttacccctctaattggatcaataattataacgcttggatgagggaattacgcccttggtgtatcagcaggcaattgttttgggggcatcaaataccggtattcacttgcgagaataaccaccagtttgtgagcctagacacccctttaagttgccctacttgcaagagtgaaaaactagagcaagataaagatgtgctagacacatggtttagttcagggctatgggcgttttccactctagggtgggggcaagaaaaaagcgatttgtttaatgaaagcgatttgaaagatttctaccctaacacaacgctcattaccgggtttgacatcctctttttttgggtggccagaatgctcttttgcagcgagtcgcttttaggcgaattgccttttaaagacatttacttgcacgccttggttagggacgaaaagggcgaaaaaatgagcaaatctaaaggtaatgtgatcgatcctttagagatgatagaaaaatacggcgcggatagcctgcgcttcactttagccaatttgtgcgctacgggtagggacattaagctttctactacgcatttagaaaataacaagaatttcgccaacaagctttttaatgcggcgagttacttgaaactcaaacaagaatctttcaaagataaagagcgtttgaatgaataccaaacggctttggggcgttatgcgaaatcgcgcttgaatcttgtcactaaagaggttcgtaacgctttagacaattatcgttttaatgacgccacgactttgttataccgctttttgtggggggaattttgcgattggttcattgaattttctaaagtggaaaatgaagcgatagacgagttagggagcgtgttaaaagaggctttaaaactcttgcaccctttcatgccctttatcagcgagtctttataccacaagctcagtaacacggaactagaaaacgctcattctatcatggtcatgccttaccctaaagaaatcgcgcaagatgaaaaactagagcatgaatttgaagtgattaaggattgcatcgtgtctttaaggcgtttgaaaatcatgctagaaaccccaccgattgttttaaaagaagcgagcgtgggattgagggagaaaatagaaaacacagagcgtttgcaaaattacgcccaaaaattagcgaaattagaaaaagtcagcgtgataacttataagcctttaaaaagcgtgagcgatgtgggtgaattttgccaaacttatgcggatttagaaaatcttgatttaagcccgctcattgctcgtttaaaaaagcaactagaaaaactggaaaaagaaaaactaaaactcaatttgcacaatgaaaattttgtcaaaaacgcgcctaaaagcgtgctagaaaaagccagagagagtttaaaaacgcttttagaaaaagagggtaagatccaacaagaattggatttgttagaacaaccatga

SEQ ID NO: 2326 - DNA (genomic), 195 bp, Helicobacter pylori; double-stranded, circular
  misc_feature (B) LOCATION 1...195
  hypothetical: NO
  anti-sense: NO
gtgaaattcagcgttttaacccttttcccgcaactcatcttgccttattttgaagattctattttaaaaagagcgttagaaaaaaacctttttgaattggaagtgttaaaccttagagattttagcgctaacaaatatcaaaaagcggaktcacacgctcattggtgggggtgcggggcaaattttagaccctga

SEQ ID NO: 2327 - DNA (genomic), 690 bp, Helicobacter pylori; double-stranded, circular
  misc_feature (B) LOCATION 1...690
  hypothetical: NO
  anti-sense: NO
gtgaaattcagcgttttaacccttttcccgcaactcatcttgccttattttgaagattctattttaaaaagagcgttagaaaaaaacctttttgaattggaagtgttaaaccttagagattttagcgctaacaaatatcaaaaagcggatcacacgctcattggtgggggtgcggggcaaattttagaccctgagatgatagaaaacgcactccactctgttaaaaaccctaaacacacgatttttttaagcgcggtgggcaagcctttcaagcaaatagacgcgatgcgtttggctcaaaaaaagcatgtcgttttggtgtgcgggcgttatgagggctttgatgaacgctctattgaattgggtgctgatgaggttttttgtataggcgattttattttaacagggggcgagcttggggcgttgtgcttgatagatagtatcgctcgccacattcaaggggttttgggtaacgcccaatctttagaaaatgagagttttgaaaataattatttggagacccctaatttcgctaacgctgtttttaaatccaaagaaatcaataaaatccctgcacctttagaatattctaaaggaaatcatgctaaaatcaagcaactaaagcttgatttgtcaaaattaaggacaaaattttaccgccttgatttattcaaacagcacaaatcatga

SEQ ID NO: 2328 - DNA (genomic), 687 bp, Helicobacter pylori; double-stranded, circular
  misc_feature (B) LOCATION 1...687
  hypothetical: NO
  anti-sense: NO
gtgaaattcagcgttttaacccttttcccgcaactcatcttgccttattttgaagattctattttaaaaagagcgttagaaaaaaacctttttgaattggaagtgttaaaccttagagattttagcgctaacaaatatcaaaaagcggatcacacgctcattggtgggggtgcggggcaaattttagaccctgagatgatagaaaacgcactccactctgttaaaaaccctaaacacacgatttttttaagcgcggtgggcaagcctttcaagcaaatagacgcgatgcgtttggctcaaaaaaagcatgtcgttttggtgtgcgggcgttatgagggctttgatgaacgctctattgaattgggtgctgatgaggttttttgtataggcgattttattttaacagggggcgagcttggggcgttgtgcttgatagatagtatcgctcgccacattcaaggggttttgggtaacgcccaatctttagaaaatgagagttttgaaaataattatttggagacccctaatttcgctaacgctgtttttaaatccaaagaaatcaataaaatccctgcacctttagaatattctaaaggaaatcatgctaaaatcaagcaactaaagcttgatttgtcaaaattaaggacaaaattttaccgccttgatttattcaaacagcacaaatca

SEQ ID NO: 2329 - DNA (genomic), 357 bp, Helicobacter pylori; double-stranded, circular
  misc_feature (B) LOCATION 1...357
  hypothetical: NO
  anti-sense: NO
atgaaaaaccgctacattcagcagtttgaagacgctcagttaaaagacaagagcatgccaacatttaaagccggcgatactttgagattgggtattaccattaaagaaggcgaaaaaacacgaacccaatattttgaaggcgtgtgcattgcgattagaggcaatggcgtggataaaactttttgcgtgcgtaaaataggggctaacaatatcggcgtggagaaaattttccctttttatagcgaaagtttggcgagcgttgaggtgttgcgcgtgggtagggtgcgccgcgcgaagctctactatttgcgcgataggagaggtaaggcagcaaggattaaagaagtccgccattaa

SEQ ID NO: 2330 - DNA (genomic), 363 bp, Helicobacter pylori; double-stranded, circular
  misc_feature (B) LOCATION 1...363
  hypothetical: NO
  anti-sense: NO
ggaaaacacatgaaaaaccgctacattcagcagtttgaagacgctcagttaaaagacaagagcatgccaacatttaaagccggcgatactttgagattgggtattaccattaaagaaggcgaaaaaacacgaacccaatattttgaaggcgtgtgcattgcgattagaggcaatggcgtggataaaactttttgcgtgcgtaaaataggggctaacaatatcggcgtggagaaaattttccctttttatagcgaaagtttggcgagcgttgaggtgttgcgcgtgggtagggtgcgccgcgcgaagctctactatttgcgcgataggagaggtaaggcagcaaggattaaagaagtccgccat

SEQ ID NO: 2331 - DNA (genomic), 231 bp, Helicobacter pylori; double-stranded, circular
  misc_feature (B) LOCATION 1...231
  hypothetical: NO
  anti-sense: NO
atgacagtcattagactcactcgcattgggagaaagaaaaagcctttttatagggtggtggtaaccgattctaggaaaagaagagatggaggttggattgaatccattgggtattacaaccctttaagcgagcctaaagatgttagaattgataaggagcgcttgaattattggaaaggcgtgggggctaaaatgagcgagagggtggaaaaactttctcaaaaagcctaa

SEQ ID NO: 2332 - DNA (genomic), 240 bp, Helicobacter pylori; double-stranded, circular
  misc_feature (B) LOCATION 1...240
  hypothetical: NO
  anti-sense: NO
gagatttttgtaatgacagtcattagactcactcgcattgggagaaagaaaaagcctttttatagggtggtggtaaccgattctaggaaaagaagagatggaggttggattgaatccattgggtattacaaccctttaagcgagcctaaagatgttagaattgataaggagcgcttgaattattggaaaggcgtgggggctaaaatgagcgagagggtggaaaaactttctcaaaaagcc

SEQ ID NO: 2333 - DNA (genomic), 303 bp, Helicobacter pylori; double-stranded, circular
  misc_feature (B) LOCATION 1...303
  hypothetical: NO
  anti-sense: NO
agggtttttatgcttcgttttgcgccttcgcctacaggggatatgcacatagggaatttaagggcagccatttttaactacattgtggccaaacagcaaaataaaccctttctcattcgcattgaagacacggacaaagagcgcaacattgaaggcaaagaccgagaaattttagagattttaaagcttatggggataagctgggacaagctcgtgtatcaaagccataatatagattaccacagagaaatggcagaaaaattactgaaagaaaataaagcgttttgtatgcgagcgcgggat

SEQ ID NO: 2334 - DNA (genomic), 930 bp, Helicobacter pylori; double-stranded, circular
  misc_feature (B) LOCATION 1...930
  hypothetical: NO
  anti-sense: NO
gcccctgtggtgcgtttgaaagccccaaatcatgcggtgtctttcaatgatgcgattaaaaaagaagtgaaatttgagcctgatgaattggattcttttgtgcttttgagacaggataaaagccccacttataatttcgcttgcgcatgcgatgatttactttatgaaatcagtctcattattagaggtgaagatcatgtgagtaacacccccaaacaaattttaatccagcaagctttaggctcaaacgatccgattgtttatgcgcatttgcccattattttagacgaaacaagcggtaaaaagatgagcaaaagagacgaagcgtccagcgtgaaatggcttttgaatcaagggtttttgccggaggcgattgcgaattacctcatcactatcggtaataaagtgcctaaggaagtttttagccttgatgaagcgatagaatggtttagtttagaaaatctttccagttccccggctcattttaatttaaaatatttaaaacacttaaaccacgagcatttaaagcttttagacgatgacaagttattagaactcactttaataaaagataaaaacctcctagggcttttaagattgtttatagaagaatgcggcacgcttttagaattgaaagaaaaaatttcgttgtttttagagccaaaagatattgttaaaacttatgaaaatgaagattttaaagagcgttgtttaacgctttttaacgctctaaaaagcatggattttcaagcgtataaggattttgaaagttttaaaaaagaagccatgcgattgagccagcttaagggtaaggattttttcaaacctttgcgcattcttttgaccgggaactcgcatggcgttgaattgcctttgattttcccctatatccaaagccatcatcaagaagttttaaggttaaaagtatga

SEQ ID NO: 2335 - DNA (genomic), 924 bp, Helicobacter pylori; double-stranded, circular
  misc_feature (B) LOCATION 1...924
  hypothetical: NO
  anti-sense: NO
cctgtggtgcgtttgaaagccccaaatcatgcggtgtctttcaatgatgcgattaaaaaagaagtgaaatttgagcctgatgaattggattcttttgtgcttttgagacaggataaaagccccacttataatttcgcttgcgcatgcgatgatttactttatgaaatcagtctcattattagaggtgaagatcatgtgagtaacacccccaaacaaattttaatccagcaagctttaggctcaaacgatccgattgtttatgcgcatttgcccattattttagacgaaacaagcggtaaaaagatgagcaaaagagacgaagcgtccagcgtgaaatggcttttgaatcaagggtttttgccggaggcgattgcgaattacctcatcactatcggtaataaagtgcctaaggaagtttttagccttgatgaagcgatagaatggtttagtttagaaaatctttccagttccccggctcattttaatttaaaatatttaaaacacttaaaccacgagcatttaaagcttttagacgatgacaagttattagaactcactttaataaaagataaaaacctcctagggcttttaagattgtttatagaagaatgcggcacgcttttagaattgaaagaaaaaatttcgttgtttttagagccaaaagatattgttaaaacttatgaaaatgaagattttaaagagcgttgtttaacgctttttaacgctctaaaaagcatggattttcaagcgtataaggattttgaaagttttaaaaaagaagccatgcgattgagccagcttaagggtaaggattttttcaaacctttgcgcattcttttgaccgggaactcgcatggcgttgaattgcctttgattttcccctatatccaaagccatcatcaagaagttttaaggttaaaagta

SEQ ID NO: 2336 - DNA (genomic), 1320 bp, Helicobacter pylori; double-stranded, circular
  misc_feature (B) LOCATION 1...1320
  hypothetical: NO
  anti-sense: NO
atgcttcgttttgcgccttcgcctacaggggatatgcacatagggaatttaagggcagccatttttaactacattgtggccaaacagcaaaataaaccctttctcattcgcattgaagacacggacaaagagcgcaacattgaaggcaaagaccgagaaattttagagattttaaagcttatggggataagctgggacaagctcgtgtatcaaagccataatatagattaccacagagaaatggcagaaaaattactgaaagaaaataaagcgttttattgttatgcgagcgcggagtttttagaaagagaaaaagaaaaagccaaaaacgagaaacgccctttcaggtatttagacgagtgggccactttagaaaaagacaaaaaccatgcccctgtggtgcgtttgaaagccccaaatcatgcggtgtctttcaatgatgcgattaaaaaagaagtgaaatttgagcctgatgaattggattcttttgtgcttttgagacaggataaaagccccacttataatttcgcttgcgcatgcgatgatttactttatgaaatcagtctcattattagaggtgaagatcatgtgagtaacacccccaaacaaattttaatccagcaagctttaggctcaaacgatccgattgtttatgcgcatttgcccattattttagacgaaacaagcggtaaaaagatgagcaaaagagacgaagcgtccagcgtgaaatggcttttgaatcaagggtttttgccggaggcgattgcgaattacctcatcactatcggtaataaagtgcctaaggaagtttttagccttgatgaagcgatagaatggtttagtttagaaaatctttccagttccccggctcattttaatttaaaatatttaaaacacttaaaccacgagcatttaaagcttttagacgatgacaagttattagaactcactttaataaaagataaaaacctcctagggcttttaagattgtttatagaagaatgcggcacgcttttagaattgaaagaaaaaatttcgttgtttttagagccaaaagatattgttaaaacttatgaaaatgaagattttaaagagcgttgtttaacgctttttaacgctctaaaaagcatggattttcaagcgtataaggattttgaaagttttaaaaaagaagccatgcgattgagccagcttaagggtaaggattttttcaaacctttgcgcattcttttgaccgggaactcgcatggcgttgaattgcctttgattttcccctatatccaaagccatcatcaagaagttttaaggctaaaagcatga

SEQ ID NO: 2337 - DNA (genomic), 1104 bp, Helicobacter pylori; double-stranded, circular
  misc_feature (B) LOCATION 1...1104
  hypothetical: NO
  anti-sense: NO
gtgtttgagttagaaaaagaattaaaagaattgtttgacatttatgaaaaatccccttatgagctttacttggtaggggggtgcatgcgcgattgtttaatgggtattacccccaaagattacgatttgacctcaaacgctttagtgaatgaaagtaaagagcttcttttaaagcacgattttagggttctagaaaccggcatcaaacatggcacgatcacggctcttaaaaaccatcaaagctatgaaatcacaacttttagaatggaaaaggggcatatcaaacaccgaaagcctaaagaattggtttttagcgctcgtttaacagacgatttaaagcggcgcgattttagcatgaatgcgatcgcttatagccctacaaaagggctgattgatccttttaaagggcaaaatgcgattgaaaatcaaacgattgaatgcgtgggggaagcgcgattgaggttttttgaagacgctttaaggattttaagagcgctgcgatttagcgcgactttaggctttaagatagcagcgagcaccaaaagagcggtttttgcgtgtaaggatttgctaaaacacctttctaaagagcgcttacaaagtgaattgaataagcttcttatggggaaaaacgcctatgaagtggctaaagaatatcaagaaattttagagttggttactcaagaaaaaatagaaaatttagggtttttaaaaaacgcgcccttgaatttggaattaagattgttagggtttttcaagcatcaaaaaagtttagaaaatttacgctaccctaaaaaaacttgtgttttattcgctcaagccaaagaatgccataaagcttttttaaatattcatagcaaaacagagttaaaatttttattgaaagaccacgatttagagccttttaatttggctttagatttttatgcgctagaaaaccccaaacgcgctttaaaaatcaaaggcttgttaaaagaaatatttgattctaacgagccttttaaaaaagaacacctgcccttaaggcggcacgcttcaaagcttgggttaccagcaccaaaaaatcggcgaaattttaaacgcatgcttaaattcagtcattga

SEQ ID NO: 2338 - DNA (genomic), 1140 bp, Helicobacter pylori; double-stranded, circular
  misc_feature (B) LOCATION 1...1140
  hypothetical: NO
  anti-sense: NO
aaagatataataacacaaagaaattttaagagtaaaagcgtgtttgagttagaaaaagaattaaaagaattgtttgacatttatgaaaaatccccttatgagctttacttggtaggggggtgcatgcgcgattgtttaatgggtattacccccaaagattacgatttgacctcaaacgctttagtgaatgaaagtaaagagcttcttttaaagcacgattttagggttctagaaaccggcatcaaacatggcacgatcacggctcttaaaaaccatcaaagctatgaaatcacaacttttagaatggaaaaggggcatatcaaacaccgaaagcctaaagaattggtttttagcgctcgtttaacagacgatttaaagcggcgcgattttagcatgaatgcgatcgcttatagccctacaaaagggctgattgatccttttaaagggcaaaatgcgattgaaaatcaaacgattgaatgcgtgggggaagcgcgattgaggttttttgaagacgctttaaggattttaagagcgctgcgatttagcgcgactttaggctttaagatagcagcgagcaccaaaagagcggtttttgcgtgtaaggatttgctaaaacacctttctaaagagcgcttacaaagtgaattgaataagcttcttatggggaaaaacgcctatgaagtggctaaagaatatcaagaaattttagagttggttactcaagaaaaaatagaaaatttagggtttttaaaaaacgcgcccttgaatttggaattaagattgttagggtttttcaagcatcaaaaaagtttagaaaatttacgctaccctaaaaaaacttgtgttttattcgctcaagccaaagaatgccataaagcttttttaaatattcatagcaaaacagagttaaaatttttattgaaagaccacgatttagagccttttaatttggctttagatttttatgcgctagaaaaccccaaacgcgctttaaaaatcaaaggcttgttaaaagaaatatttgattctaacgagccttttaaaaaagaacacctgcccttaaggcggcacgcttcaaagcttgggttaccagcaccaaaaaatcggcgaaattttaaacgcatgcttaaattcagtcat

SEQ ID NO: 2339 - DNA (genomic), 405 bp, Helicobacter pylori; double-stranded, circular
  misc_feature (B) LOCATION 1...405
  hypothetical: NO
  anti-sense: NO
acgcaacaaaaagaaatcattgtttcttatggcgaattagtggggggggattttaaccttaaagatattttattgagtagtggggctaggctgcatttagtggggaataccaatcgcgcttatttaagggattaccgcttagccttgaatgaaaacagcaaaatgctctttaaaacccacaaccccactttcaaaaaagacacgtcctttaaagatctgcaagccctagctaaagagcatggtttgattgattattacaatttaggggatgtggatttgttaaatagaacggctttagaagagattttagccttaaaaccatcgcttgtaagctttagcgcggacaaatcctttaacagcgcgcaaggcgcattattatggggcaaaaagaatgggttgaaacct

SEQ ID NO: 2340 - DNA (genomic), 699 bp, Helicobacter pylori; double-stranded, circular
  misc_feature (B) LOCATION 1...699
  hypothetical: NO
  anti-sense: NO
atgaaaacagcaaaatgctcttttaaaacccacaaccccactttcaaaaaagacacgtcctttaaagatctgcaagccctagctaaagagcatggtttgattgattattacaatttaggggatgtggatttgttaaatagaacggctttagaagagattttagccttaaaaccatcgcttgtaagctttagcgcggacaaatcctttaacagcgcgcaagcgggcattattatggggcaaaaagaatgggttgaaaccttaaaaaaccaccccctttatagagctttgaggttgggtaaaatcacgctcaccttgctttttcacagcctaaacgcatgggtcaatcaccaagaagaaatcaccattcatgcgctactccaccaaactaaagacgccttattgcaaaaagccctcaaactctacgcccttttaaagcctttagaattgaacgtgagcatagcctctagcttttctaaaatagggaatttacccgacaaagaattagaatccttttgcgtgaaagtccagcccaaaaacacccgcgctttaaattgtgagaaactttatttaaagctttttcaaaaaggcgttattacaagaatttcatgcgcatttgtgtgttttgaagtctttagcttgaatggagaagatttggaaaaaatcgctctggttttaaaagaaatccttaacaaggcttaa

SEQ ID NO: 2341 - DNA (genomic), 294 bp, Helicobacter pylori; double-stranded, circular
  misc_feature (B) LOCATION 1...294
  hypothetical: NO
  anti-sense: NO
agaaaaaatcgctgtcgcgaagcgaggaaactccatatccctatcgtggcccccttagacactaactgcgaccctgatttagtggattaccccattcctggaaatgacgatgcgatccgctctatcaggctattttgtaaagaaatgagcgaggcgattttagaggggcgagaactcatgcaagaagaaatcgtccatgcggatgaaaatagcgaagaaatagagtccgtgagcaatgaagaaaaagaagaaatgctcgctgaaattcaaaaagaaatcactcaaggagccgaa

SEQ ID NO: 2342 - DNA (genomic), 594 bp, Helicobacter pylori; double-stranded, circular
  misc_feature (B) LOCATION 1...594
  hypothetical: NO
  anti-sense: NO
gcatggaggaagagaaccaaaataactttaaggagaattctcatggtaaccatgaaagatttattagaatgcggtgtgcattttggacaccaaacaaggcgttggaaccctaaaaccaaaaaattcatttttggcgttaggaaaaatatccatattattgatttgcaaaaaaccttgcgctactttagatacacttataacatcgtgcgcgatgcgagcgctcaaggcaagagcatcatgtttgtaggcactaaaaaacaagccaatgagactttgaaagaatttgctgaaagcattcaagtcccttacgtcaattaccgctggcttggtggcatgctgactaattttagcaccattagaaaatcggttaggaaattagaaatcattgaagaaatggaaaatagcggtcaaattgatctattgactaaaaaagaaaaactcatgattttaaggaaaaaagaaaagctagacaagtatcttggcggggtgcgccacatgaaaaaaatccctgatatgatttttgtgattgatgtggctaaagaaaaaatcgctgtcgcgaagcgaggaaactccatatccctatcgtggccccct

SEQ ID NO: 2343 - DNA (genomic), 795 bp, Helicobacter pylori; double-stranded, circular
  misc_feature (B) LOCATION 1...795
  hypothetical: NO
  anti-sense: NO
atggtaaccatgaaagatttattagaatgcggtgtgcattttggacaccaaacaaggcgttggaaccctaaaaccaaaaaattcatttttggcgttaggaaaaatatccatattattgatttgcaaaaaaccttgcgctactttagatacacttataacatcgtgcgcgatgcgagcgctcaaggcaagagcatcatgtttgtaggcactaaaaaacaagccaatgagactttgaaagaatttgctgaaagcattcaagtcccttacgtcaattaccgctggcttggtggcatgctgactaattttagcaccattagaaaatcggttaggaaattagaaatcattgaagaaatggaaaatagcggtcaaattgatctattgactaaaaaagaaaaactcatgattttaaggaaaaaagaaaagctagacaagtatcttggcggggtgcgccacatgaaaaaaatccctgatatgatttttgtgattgatgtggctaaagaaaaaatcgctgtcgctgaagcgaggaaactccatatccctatcgtggcccccttagacactaactgcgaccctgatttagtggattaccccattcctggaaatgacgatgcgatccgctctatcaggctattttgtaaagaaatgagcgaggcgattttagaggggcgagaactcatgcaagaagaaatcgtccatgcggatgaaaatagcgaagaaatagagtccgtgagcaatgaagaaaaagaagaaatgctcgctgaaattcaaaaagaaatcactcaaggagccgaataa

SEQ ID NO: 2344 - DNA (genomic), 795 bp, Helicobacter pylori; double-stranded, circular
  misc_feature (B) LOCATION 1...795
  hypothetical: NO
  anti-sense: NO
atggtaaccatgaaagatttattagaatgcggtgtgcattttggacaccaaacaaggcgttggaaccctaaaaccaaaaaattcatttttggcgttaggaaaaatatccatattattgatttgcaaaaaaccttgcgctactttagatacacttataacatcgtgcgcgatgcgagcgctcaaggcaagagcatcatgtttgtaggcactaaaaaacaagccaatgagactttgaaagaatttgctgaaagcattcaagtcccttacgtcaattaccgctggcttggtggcatgctgactaattttagcaccattagaaaatcggttaggaaattagaaatcattgaagaaatggaaaatagcggtcaaattgatctattgactaaaaaagaaaaactcatgattttaaggaaaaaagaaaagctagacaagtatcttggcggggtgcgccacatgaaaaaaatccctgatatgatttttgtgattgatgtggctaaagaaaaaatcgctgtcgctgaagcgaggaaactccatatccctatcgtggcccccttagacactaactgcgaccctgatttagtggattaccccattcctggaaatgacgatgcgatccgctctatcaggctattttgtaaagaaatgagcgaggcgattttagaggggcgagaactcatgcaagaagaaatcgtccatgcggatgaaaatagcgaagaaatagagttcgtgagcaatgaagaaaaagaagaaatgctcgctgaaattcaaaaagaaatcactcaaggagccgaataa

SEQ ID NO: 2345 - DNA (genomic), 273 bp, Helicobacter pylori; double-stranded, circular
  misc_feature (B) LOCATION 1...273
  hypothetical: NO
  anti-sense: NO
gagcagggcaagcctgaaaaaatttgggataaaatcgttcctggaaaaatggaaaggtttatcgctgataacacccttattgatcaacgcctaacccttttagggcaattctatgtcatggacgataaaaaaactatcgctcaagtcatcgctgattgttccaaagaatgggatgataatttaaaaatcactgagtatgtgcgttttgaattgggcgaaggcattgagaaaaaaacagagaatttcgctgaagaagtggctttgcaaatgaag

SEQ ID NO: 2346 - DNA (genomic), 840 bp, Helicobacter pylori; double-stranded, circular
  misc_feature (B) LOCATION 1...840
  hypothetical: NO
  anti-sense: NO
aattcaaaaagaaatcactcaaggagccgaataatgtcaggaattagcgctcaattagtcaaaaaattaagggacttaaccgatgcgggcatgatggattgcaaaaaagcccttgtggaagtggctggggatttgcaaaaggccattgatttcttgcgcgaaaaaggcttgagcaaagccgccaaaaaagccgataggatcgctgctgaaggcgtggtcgctttagaagtagcacctgattttaaaagcgcaatgatggtagaaatcaatagcgaaacggattttgtggctaaaaatgagggctttaaggaattggttaaaaaaactttagaaacgatcaaaacccataacattcataccacagaagaattgcttaaaagcccgttagacaacaagccttttgaagagtatttgcactctcaaatcgctgtgatcggtgaaaacattttagtgaggaaaatcgctcatttaaaagcccctagctctcatattatcaatggttatgcacattctaacgccagagtgggcgtgttaatcgccatagaatacaataatgagaaaaacgctccaaaagtggttgaactggcccgaaatatcgctatgcatgccgcagcgatgaaacctcaagtgctagattgcaaagactttagccttgattttgtcaaaaaagaaaccttagccttgatcgctgaaattgaaaaagacaacgaagaagccaaacgcttgggcaaacctttgaaaaacatccccacttttgggagtcgcattgaattgagcgatgaagttttagcccatcaaaaaaaggcttttgaagacgaaataataagagcagggcaagcc

SEQ ID NO: 2347 - DNA (genomic), 1068 bp, Helicobacter pylori; double-stranded, circular
  misc_feature (B) LOCATION 1...1068
  hypothetical: NO
  anti-sense: NO
atgtcaggaattagcgctcaattagtcaaaaaattaagggacttaaccgatgcgggcatgatggattgcaaaaaagcccttgtggaagtggctggggatttgcaaaaggccattgatttcttgcgcgaaaaaggcttgagcaaagccgccaaaaaagccgataggatcgctgctgaaggcgtggtcgctttagaagtagcacctgattttaaaagcgcaatgatggtagaaatcaatagcgaaacggattttgtggctaaaaatgagggctttaaggaattggttaaaaaaactttagaaacgatcaaaacccataacattcataccacagaagaattgcttaaaagcccgttagacaacaagccttttgaagagtatttgcactctcaaatcgctgtgatcggtgaaaacattttagtgaggaaaatcgctcatttaaaagcccctagctctcatattatcaatggttatgcacattctaacgccagagtgggcgtgttaatcgccatagaatacaataatgagaaaaacgctccaaaagtggttgaactggcccgaaatatcgctatgcatgccgcagcgatgaaacctcaagtgctagattgcaaagactttagccttgattttgtcaaaaaagaaaccttagccttgatcgctgaaattgaaaaagacaacgaagaagccaaacgcttgggcaaacctttgaaaaacatccccacttttgggagtcgcattgaattgagcgatgaagttttagcccatcaaaaaaaggcttttgaagacgaactaaaagagcagggcaagcctgaaaaaatctgggataaaatcgttcctggaaaaatggaaaggtttatcgctgataacacccttattgatcaacgcctaacccttttagggcaattctatgtcatggacgataaaaaaactatcgctcaagtcatcgctgattgttccaaagaatgggatgataatttaaaaatcactgagtatgtgcgttttgaattgggcgaaggcattgagaaaaaaacagagaatttcgctgaagaagtggctttgcaaatgaagtga

SEQ ID NO: 2348 - DNA (genomic), 924 bp, Helicobacter pylori; double-stranded, circular
  misc_feature (B) LOCATION 1...924
  hypothetical: NO
  anti-sense: NO
atggattttatcaatatagaaaaaaaatggcaagaattttggtggaaaaataagagttttgagcctaaagacgattttaatctccctaaaaaatacattctaagcatgctgccttatcctagtggggaaatccacatggggcatgtgcgtaattacaccattggcgacgcgttggcgcgctattatcgtttgcaccattacaatgtgttacaccctatggggtttgattcttttggaatgcctgcggaaaatgcggccattaagcatggtatccaccctaaaacctggacttatgaaaacattgaagccatgcaaaaagagtttgaagccttagggttttctttttctaaaaatagggaatttgctacttcagatccggattacacgaaatttgaacagcaatttttcattgacttgtgggaaaaagggctgatttatcgcaagaaagccatgctcaattggtgccctaacgacaaaaccgttttagctaatgagcaagtcattgatgggaggtgttggcgttgcgacacagaagtcattcaaaaagaactctatcaatattatttgaagatcacaaactacgctgaagaattgctaaaagacttagaaactttagaaaaccattggccttctcaagtcctaaccatgcaaaaaaattggatagggaaatctagtgggttgcaatttggttttaagatcgctgatgagtgcttgaaggcttgcaataacattcaagaaattgaagtttttaccacaagagcggatactatttatggtgtaacttacatcgccatcgccccagaacaccctttagtagagcatgccatcaagcgagtgagccaagaagatctaaagatgattaaagcgattttaaacacgactcaaagagaaagagcgcttagagaaaaaagggggcgtttttag

SEQ ID NO: 2349 - DNA (genomic), 927 bp, Helicobacter pylori; double-stranded, circular
  misc_feature (B) LOCATION 1...927
  hypothetical: NO
  anti-sense: NO
ggggtaacgatggattttatcaatatagaaaaaaaatggcaagaattttggtggagaaataagagttttgagcctaaagacgattttaatctccctaaaaaatacattctaagcatgctgccttatcctagtggggaaatccacatggggcatgtgcgtaattacaccattggcgacgcgttggcgcgctattatcgtttgcaccattacaatgtgttacaccctatggggtttgattcttttggaatgcctgcggaaaatgcggccattaagcatggtatccaccctaaaacctggacttatgaaaacattgaagccatgcaaaaagagtttgaagccttagggttttctttttctaaaaatagggaatttgctacttcagatccggattacacgaaatttgaacagcaatttttcattgacttgtgggaaaaagggctgatttatcgcaagaaagccatgctcaattggtgccctaacgacaaaaccgttttagctaatgagcaagtcattgatgggaggtgttggcgttgcgacacagaagtcattcaaaaagaactctatcaatattatttgaagatcacaaactacgctgaagaattgctaaaagacttagaaactttagaaaaccattggccttctcaagtcctaaccatgcaaaaaaattggatagggaaatctagtgggttgcaatttggttttaagatcgctgatgagtgcttgaaggcttgcaataacattcaagaaattgaagtttttaccacaagagcggatactatttatggtgtaacttacatcgccatcgccccagaacaccctttagtagagcatgccatcaagcgagtgagccaagaagatctaaagatgattaaagcgattttaaacacgactcaaagagaaagagccgttagagaaaaaaggggcgtt

SEQ ID NO: 2350 - DNA (genomic), 1380 bp, Helicobacter pylori; double-stranded, circular
  misc_feature (B) LOCATION 1...1380
  hypothetical: NO
  anti-sense: NO
gatattgaattcgccaatctttatcatattcctattaaagtgatcacgcaaagccctcaaaatttgccccacaccaaagaagagattttaaaaaatagcggggagtggagcgatctttctagctcactggccagaaaaaaaatcctcccttattttgacaaagaaaatctcggtaaaagggtcatcaactaccgcttgcaaaattggggggtgagccgtcaaaggtattggggagcgcccattcctatgattcattgcaaacattgcggaatcgtgcctgaaacccaactgccggtaactttacctgaagacattgtgattgatggggaaggcaatccattaaaaaagcatgcgagttggagattcgctcaatgccccagatgccataaagacgctttagtagaaacagacaccatggacacttttatccaatccagctggtatttcttgcgttataccacccccaaaaatcagcgtgaaaatcaagcgtttgatcaaaattacttgaagtatttcatgccggtggacacttatattggcggcattgaacatgcgattttgcacttgttatacgcgcgctttttcactaaggctttaagggatttgggctatcttcatttagatgagcctttcaaacagcttatcactcaaggcatggtcttaaaagatggtgctaagatgagcaaatctaaaggcaatgtcgttagccctaaagagatactcaaaaaatacggggctgatgccgtaaggctctttatcctttttgctgccccgccggctaaagaattggaatggaatgacaacgctttagaaggcgcgcaccggtttatcaagcgcttatacgataaagcgaacgccattacccctaccacttctaagcctgaatttaaagaagttggcctgaatgaagcgcaaaaattagcccgcaaaaaagtctatgaggcgttgaaaaaatcgcatgagattttcaataaggctgaaagcgcttacgcgtttaacactttgatcgcaagctgcatggaggctttaaacgctttgaacgcgcaaagtgatgagcaaattttatgcgagggttattttgtgttgttgcaaatcttagagcctatgatcccgcacacggcatgggaattgagcgagaggctttttaaaagagagaatttcaagcctatagaagtagatgaaagcgctttgatagaagactttatgactttagggcttaccattaatggcaaaaggcgcgcggaattgaaagtcaatattaacgctagcaaagaagagattattattttggctaaaaaagaattagagaaatatttagaaaacgcgagcgttaaaaaagaaatttatgtgcctaataaacttgttaattttgttaccgca

SEQ ID NO: 2351 - DNA (genomic), 1458 bp, Helicobacter pylori; double-stranded, circular
  misc_feature (B) LOCATION 1...1458
  hypothetical: NO
  anti-sense: NO
ttggggtggctaatttcgcgcctagctaattatggttctggggcgttaatgggcgtgccagcctgcgatgaaagggatttggaattcgccaatctttatcatattcctattaaagtgatcacgcaaagccctcaaaatttgccccacaccaaagaagagattttaaaaaatagcggggagtggagcgatctttctagctcagtggccagagaaaaaatcatcgcttattttgaaaaagaaaatctcggtaaaagggtcatcaactaccgcttgcaagattggggggtgagccgtcaaaggtattggggagcgcccattcctatgattcattgcaaacattgcggaatcgtgcctgaaacccaactgccggtaactttacctgaagacattgtgattgatggggagggcaatccattagaaaagcatgcgagttggaaattcgctcaatgccccaaatgccataaagacgctttaagagaaacagacaccatggacacttttatccaatccagctggtatttcttgcgttataccacccccaaaaatcagcgtgaaaatcaagcgtttgatcaaaattacttgaagtatttcatgccggtggacacttatattggcggcattgaacatgcgattttgcacttgttatacgcgcgctttttcactaaggctttaagggatttgggctatcttcatttagatgagcctttcaaacagcttatcactcaaggcatggtcttaaaagatggtgctaagatgagcaaatctaaaggcaatgtcgttagccctaaagagatactcaaaaaatacggggctgatgccgtaaggctctttatcctttttgctgccccgccggctaaagaattggaatggaatgacaacgctttagaaggcgcgcaccggtttatcaagcgcttatacgataaagcgaacgccattacccctaccacttctaagcctgaatttaaagaagttggcctgaatgaagcgcaaaaattagcccgcaaaaaagtctatgaggcgttgaaaaaatcgcatgagattttcaataaggctgaaagcgcttacgcgtttaacactttgatcgcaagctgcatggaggctttaaacgctttgaacgcgcaaagtgatgagcaaattttatgcgagggttattttgtgttgttgcaaatcttagagcctatgatcccgcacacggcatgggaattgagcgagaggctttttaaaagagagaatttcaagcctatagaagtagatgaaagcgctttgatagaagactttatgactttagggcttaccattaatggcaaaaggcgcgcggaattgaaagtcaatattaacgctagcaaagaagagattattattttggctaaaaaagaattagagaaatatttagaaaacgcgagcgttaaaaaagaaatttatgtgcctaataaacttgttaattttgttaccgcatga

SEQ ID NO: 2352 - DNA (genomic), 2421 bp, Helicobacter pylori; double-stranded, circular
  misc_feature (B) LOCATION 1...2421
  hypothetical: NO
  anti-sense: NO
atggattttatcaatatagaaaaaaaatggcaagaattttggtggaaaaataagagttttgagcctaaagacgattttaatctccctaaaaaatacattctaagcatgctgccttatcctagtggggaaatccacatggggcatgtgcgtaattacaccattggcgacgcgttggcgcgctattatcgtttgcaccattacaatgtgttacaccctatggggtttgattcttttggaatgcctgcggaaaatgcggccattaagcatggtatccaccctaaaacctggacttatgaaaacattgaagccatgcaaaaagagtttgaagccttagggttttctttttctaaaaatagggaatttgctacttcagatccggattacacgaaatttgaacagcaatttttcattgacttgtgggaaaaagggctgatttatcgcaagaaagccatgctcaattggtgccctaacgacaaaaccgttttagctaatgagcaagtcattgatgggaggtgttggcgttgcgacacagaagtcattcaaaaagaactctatcaatattatttgaagatcacaaactacgctgaagaattgctaaaagacttagaaactttagaaaaccattggccttctcaagtcctaaccatgcaaaaaaattggatagggaaatctagtgggttgcaatttggttttaagatcgctgatgagtgcttgaaggcttgcaataacattcaagaaattgaagtttttaccacaagagcggatactatttatggtgtaacttacatcgccatcgccccagaacaccctttagtagagcatgccatcaagcgagtgagccaagaagattcaaagatgattaaagcgattttaaacacgactcaaagagaaagagccttagagaaaaaaggggcgtttttaggaatttatgctatccaccctttaacgaagcaaaagatccctgtttgggtggctaatttcgccctagctaattatggttctggggcgttaatgggcgtgccagcctgcgatgaaagggatttggaattcgccaatctttatcatattcctattaaagtgatcacgcaaagccctcaaaatttgccccacaccaaagaagagattttaaaaaatagcggggagtggagcgatctttctagctcagtggccagagaaaaaatcatcgcttattttgaaaaagaaaatctcggtaaaagggtcatcaactaccgcttgcaagattggggggtgagccgtcaaaggtattggggagcgcccattcctatgattcattgcaaacattgcggaatcgtgcctgaaacccaactgccggtaactttacctgaagacattgtgattgatggggagggcaatccattagaaaagcatgcgagttggaaattcgctcaatgccccaaatgccataaagacgctttaagagaaacagacaccatggacacttttatccaatccagctggtatttcttgcgttataccacccccaaaaatcagcgtgaaaatcaagcgtttgatcaaaattacttgaagtatttcatgccggtggacacttatattggcggcattgaacatgcgattttgcacttgttatacgcgcgctttttcactaaggctttaagggatttgggctatcttcatttagatgagcctttcaaacagcttatcactcaaggcatggtcttaaaagatggtgctaagatgagcaaatctaaaggcaatgtcgttagccctaaagagatactcaaaaaatacggggctgatgccgtaaggctctttatcctttttgctgccccgccggctaaagaattggaatggaatgacaacgctttagaaggcgcgcaccggtttatcaagcgcttatacgataaagcgaacgccattacccctaccacttctaagcctgaatttaaagaagttggcctgaatgaagcgcaaaaattagcccgcaaaaaagtctatgaggcgttgaaaaaatcgcatgagattttcaataaggctgaaagcgcttacgcgtttaacactttgatcgcaagctgcatggaggctttaaacgctttgaacgcgcaaagtgatgagcaaattttatgcgagggttattttgtgttgttgcaaatcttagagcctatgatcccgcacacggcatgggaattgagcgagaggctttttaaaagagagaatttcaagcctatagaagtagatgaaagcgctttgatagaagactttatgactttagggcttaccattaatggcaaaaggcgcgcggaattgaaagtcaatattaacgctagcaaagaagagattattattttggctaaaaaagaattagagaaatatttagaaaacgcgagcgttaaaaaagaaatttatgtgcctaataaacttgttaattttgttaccgcatga

SEQ ID NO: 2353 - DNA (genomic), 222 bp, Helicobacter pylori; double-stranded, circular
  misc_feature (B) LOCATION 1...222
  hypothetical: NO
  anti-sense: NO
cgaaatccccaactacctagaaaaggcgtcaaagctaatagcggccctaaaatcaaagagggcatggtgttttgtttagagcctatggtgtgtcaaaaacaaggcgagcctaaaatactagcggataagtggagcgtggtttcagtggatggacttaacacaagccaccatgagcatactatcgccatagttggcaataaagcagtgattcttacggagcgt

SEQ ID NO: 2354 - DNA (genomic), 228 bp, Helicobacter pylori; double-stranded, circular
  misc_feature (B) LOCATION 1...228
  hypothetical: NO
  anti-sense: NO
aagagccgaaatccccaactacctagaaaaggcgtcaaagctaatagcggccctaaaatcaaagagggcatggtgttttgtttagagcctatggtgtgtcaaaaacaaggcgagcctaaaatactagcggataagtggagcgtggtttcagtggatggacttaacacaagccaccatgagcatactatcgccatagttggcaataaagcagtgattcttacggagcgt

SEQ ID NO: 2355 - DNA (genomic), 744 bp, Helicobacter pylori; double-stranded, circular
  misc_feature (B) LOCATION 1...744
  hypothetical: NO
  anti-sense: NO
aagcccaaaagaaatcaaagccctaagaaaagccgggaattaaccgctcaagcgttagcccttttagagcgagaagtaaggcctggggtttcacttttagagctggataaaatggctgaagattttatcaaatcctcgcatgctaggcctgcttttaaggggctctatggtttccctaactctgtgtgcatgtccttaaatgaggtggttattcatggtattcctacggattatgttttacaagaaggggatattataggcttggatttgggggtggaggtggatggctattatggcgattcagccctcacgcttcccataggcgcgataagcccgcaagatgaaaaattgctcgcttgctctaaagagagcttgatgcatgccattagctcaattagagtgggcatgcattttaaagagttgagtcagattttagagggcgctattacagaaaggggctttgtgcctttgaagggattttgcgggcatggcattggtaaaaagccccatgaagagccagaaatccccaactacctagaaaaaggcgtcaaagctaatagcggccctaaaatcaaagagggcatggtgttttgtttagagcctatggtgtgtcaaaaacaaggcgagcctaaaatactagcggataagtggagcgtggtttcagtggatggacttaacacaagccaccatgagcatactatcgccatagttggcaataaagcagtgattcttacggagcgttaa

SEQ ID NO: 2356 - DNA (genomic), 762 bp, Helicobacter pylori; double-stranded, circular
  misc_feature (B) LOCATION 1...762
  hypothetical: NO
  anti-sense: NO
atggcgatctctattaaaagcccaaaagaaatcaaagccctaagaaaagccggggaattaaccgctcaagcgttagcccttttagagcgagaagtaaggcctggggtttcacttttagagctggataaaatggctgaagattttatcaaatcctcgcatgctaggcctgcttttaaggggctctatggtttccctaactctgtgtgcatgtccttaaatgaggtggttattcatggtattcctacggattatgttttacaagaaggggatattataggcttggatttgggggtggaggtggatggctattatggcgattcagccctcacgcttcccataggcgcgataagcccgcaagatgaaaaattgctcgcttgctctaaagagagcttgatgcatgccattagctcaattagagtgggcatgcattttaaagagttgagtcagattttagagggcgctattacagaaaggggctttgtgcctttgaagggattttgcgggcatggcattggtaaaaagccccatgaagagccagaaatccccaactacctagaaaaaggcgtcaaagctaatagcggccctaaaatcaaagagggcatggtgttttgtttagagcctatggtgtgtcaaaaacaaggcgagcctaaaatactagcggataagtggagcgtggtttcagtggatggacttaacacaagccaccatgagcatactatcgccatagttggcaataaagcagtgattcttacggagcgttaa

SEQ ID NO: 2357 - DNA (genomic), 384 bp, Helicobacter pylori; double-stranded, circular
  misc_feature (B) LOCATION 1...384
  hypothetical: NO
  anti-sense: NO
gcagccccggcattaaatcaagttggatccgtgatgagcttggatgcgaccacttttcaaatcagcccatgggaaataaacctgctcaaagaaattgaaagatccattcaagaagtcaatattggcgtcaatcctaataacgacggcgaaacgatcaagcttttttttccgcccatgacaaccgagcaaaggaaactcatcgcaaaagacgccaaagcgatgggcgaaaaggctaaagtggctgtaaggaatacccgccaagacgctaacaacaaggtaaaaaaattagaaaaagacaaagagatcagcgaagatgaaagcaagaaagcccaagagcagattcaaaaaatcaccgatgaagcctttaaaaaaattgatgaaagc

SEQ ID NO: 2358 - DNA (genomic), 558 bp, Helicobacter pylori; double-stranded, circular
  misc_feature (B) LOCATION 1...558
  hypothetical: NO
  anti-sense: NO
atgttacaagccatctataacgaaaccaaagatctaatgcaaaaaagtattcaagctttaaacagagatttttccactctaaggagtgcgaaagtgtcagtcaatattttagatcacatcaaagtggattattacggcacgcccacggcattaaatcaagttggatccgtgatgagcttggatgcgaccactcttcaaatcagcccatgggaaaaaaacctgctcaaagaaattgaaagatccattcaagaagccaatattggcgtcaatcctaataacgacggcgaaacgatcaagcttttttttccgcccatgacaaccgagcaaaggaaactcatcgcaaaagacgccaaagcgatgggcgaaaaggctaaagtggctgtaaggaatacccgccaagacgctaacaacaaggtaaaaaaattagaaaaagacaaagagatcagcgaagatgaaagcaagaaagcccaagagcagatccaaaaaatcaccgatgaagccattaaaaaaattgatgaaagcgtgaaaaacaaagaagatgcgattttaaaggtctaa

SEQ ID NO: 2359 - DNA (genomic), 693 bp, Helicobacter pylori; double-stranded, circular
  misc_feature (B) LOCATION 1...693
  hypothetical: NO
  anti-sense: NO
gattgccaggtttctatgggggaaatgcaacgaatgacgcaattcaaagacaagtctttaaaaaaccctaaaagcgtgaacgtggggcttttcaattaccctattttgatggcgtcagacattttattataccaaagcgatttagtgccagtgggcgaagatcaaaaacagcatttagagctcacgagaaacgttgcagaaaaatttaacagggattttgggaactgctttaaagtgccagagcctttgatcgctaaagtgggggcaagggttatggggctagatgatccaaaagtgaagatgagtaaatcgcataagggggctaaccatgcgatttttcttttagatgagccggatgttattgtgaaaaaaatcaaaaaagcggccactgattctatgggcgttattgcctttgatgaaacaagagagggcgtttttaaccttttaaatatttacatgcttttaagcgatgaaagcccagaaaagatagaggagcgttttagaaataagggttatggggattttaaaaaggaattagctgaagtagtgattcaatctttaaagcctatccaagaaagataccaagaaatcagcgatgatgaggtgaaagccgttttaaattgcggagccgaaaaagccaggcctttagcgagggcgacttaccaaaaggctaaagaattgatggggttaatt

SEQ ID NO: 2360 - DNA (genomic), 690 bp, Helicobacter pylori; double-stranded, circular
  misc_feature (B) LOCATION 1...690
  hypothetical: NO
  anti-sense: NO
tgccaggtttctatgggggaaatgcaacgaatgacgcaattcaaagacaagtctttaaaaaaccctaaaagcgtgaacgtggggcttttcaattaccctattttgatggcgtcagacattttattataccaaagcgatttagtgccagtgggcgaagatcaaaaacagcatttagagctcacgagaaacgttgcagaaaaatttaacagggattttgggaactgctttaaagtgccagagcctttgatcgctaaagtgggggcaagggttatggggctagatgatccaaaagtgaagatgagtaaatcgcataagggggctaaccatgcgatttttcttttagatgagccggatgttattgtgaaaaaaatcaaaaaagcggccactgattctatgggcgttattgcctttgatgaaacaagagagggcgtttttaaccttttaaatatttacatgcttttaagcgatgaaagcccagaaaagatagaggagcgttttagaaataagggttatggggattttaaaaaggaattagctgaagtagtgattcaatctttaaagcctatccaagaaagataccaagaaatcagcgatgatgaggtgaaagccgttttaaattgcggagccgaaaaagccaggcctttagcgagggcgacttaccaaaaggctaaagaattgatggggttaatt

SEQ ID NO: 2361 - DNA (genomic), 981 bp, Helicobacter pylori; double-stranded, circular
  misc_feature (B) LOCATION 1...981
  hypothetical: NO
  anti-sense: NO
atgcaaaaaaaacgagtcttttcaggcatccaacctaccgggcaaatccacttgggcaactatctgggggcgatcaagcattgggtagaattgcaagatgagtatgaaaaccttttttgtatcgtcaattcgcatgcgatcaccctccccatagagcctatatttttaaaatcccaaacctatgagctggttaaactgcttttagcttgcgggattagtcctaagcaatcggggttattcattcaaagtgaagtggatgagcacccggccttggcatggctactagattgccaggtttctatgggggaaatgcaacgaatgacgcaattcaaagacaagtctttaaaaaaccctaaaagcgtgaacgtggggcttttcaattaccctattttgatggcgtcagacattttattataccaaagcgatttagtgccagtgggcgaagatcaaaaacagcatttagagctcacgagaaacgttgcagaaaaatttaacagggattttgggaactgctttaaagtgccagagcctttgatcgctaaagtgggggcaagggttatggggctagatgatccaaaagtgaagatgagtaaatcgcataagggggctaaccatgcgatttttcttttagatgagccggatgttattgtgaaaaaaatcaaaaaagcggccactgattctatgggcgttattgcctttgatgaaacaagagagggcgtttttaaccttttaaatatttacatgcttttaagcgatgaaagcccagaaaagatagaggagcgttttagaaataagggttatggggattttaaaaaggaattagctgaagtagtgatccaatctttaaagcctatccaagaaagataccaagaaatcagcgatgatgaggtgaaagccgttttaaattgcggagccgaaaaagccaggcctttagcgagggcgacttaccaaaaggctaaagaattgatggggttaatttga

SEQ ID NO: 2362 - DNA (genomic), 258 bp, Helicobacter pylori; double-stranded, circular
  misc_feature (B) LOCATION 1...258
  hypothetical: NO
  anti-sense: NO
atggaaagaaaacgctattcaaaacgctattgcaaatacactgaagctaaaatcagctttattgactataaagatttagacatgctcaagcacacgctatcagagcgctataaaatcatgccaaggaggttgacaggcaatagcaaaaagtggcaagagagggtggaagtggcgatcaaaagagcccgccacatggctttaatcccctacattgtggataggaaaaaggtcgtggatagcccttttaaacagcactga

SEQ ID NO: 2363 - DNA (genomic), 264 bp, Helicobacter pylori; double-stranded, circular
  misc_feature (B) LOCATION 1...264
  hypothetical: NO
  anti-sense: NO
ggagacattatggaaagaaaacgctattcaaaacgctattgcaaatacactgaagctaaaatcagctttattgactataaagatttagacatgctcaagcacacgctatcagagcgctataaaatcatgccaaggaggttgacaggcaatagcaaaaagtggcaagagagggtggaagtggcgatcaaaagagcccgccacatggctttaatcccctacattgtggataggaaaaaggtcgtggatagcccttttaaacagcac

SEQ ID NO: 2364 - DNA (genomic), 429 bp, Helicobacter pylori; double-stranded, circular
  misc_feature (B) LOCATION 1...429
  hypothetical: NO
  anti-sense: NO
atgaggcattatgaaacgatgtttattctcaaacctactttagtagaagaagagattaaatccaaaattgaattttacagagaagtgatcaccaagcaccatggcgtgattgaaacgagcctggatatgggcatgcgtaatttggcttatgaaatcaaaaagcacaaaagaggctattattatgtggcgtatttcaaagcagatccgtccatgattttagagcttgaacgattgtatcgcatcaatgaagacgtgttgcgtttcattgtgatcaaatacgaaagtaagaaagaagtggaagcgtggcatgcgttagtggatagggctaataaaaagccatcacacgccaaagaaaaacacgaaaaaaccgaacacacgcattctcaccacgcagaggaagcaaaaagcacagaatctcatagcgaataa

SEQ ID NO: 2365 - DNA (genomic), 477 bp, Helicobacter pylori; double-stranded, circular
  misc_feature (B) LOCATION 1...477
  hypothetical: NO
  anti-sense: NO
accttgctcttttttagtaaaaaaagggctatacaaccacaaggagaatggatgaggcattatgaaacgatgtttattctcaaacctactttagtagaagaagagattaaatccaaaattgaattttacagagaagtgatcaccaagcaccatggcgtgattgaaacgagcctggatatgggcatgcgtaatttggcttatgaaatcaaaaagcacaaaagaggctattattatgtggcgtatttcaaagcagatccgtccatgattttagagcttgaacgattgtatcgcatcaatgaagacgtgttgcgtttcattgtgatcaaatacgaaagtaagaaagaagtggaagcgtggcatgcgttagtggatagggctaataaaaagccatcacacgccaaagaaaaacacgaaaaaaccgaacacacgcattctcaccacgcagaggaagcaaaaagcacagaatctcatagcgaa

SEQ ID NO: 2366 - DNA (genomic), 414 bp, Helicobacter pylori; double-stranded, circular
  misc_feature (B) LOCATION 1...414
  hypothetical: NO
  anti-sense: NO
ggtagtggccgaatccgcaaggcggtagcgttcttactcgctcaagaggtgcatttcaataaagaaggccgtggctatgttttgaggcgcattttaaggcgggccttaaggcatgggtatttaatgggcttgaaagaagcgtttttatacaaagtcgtgggcgtggtgtgcgagcaattttctaacgtgcatgcgtatttgaaagagtctaaagaaatggtgatgaaagaatgctttgaagaagaagagcgctttttagagactttggaatcgggcatggaattgtttaacttgtctttaacgcatttgaatgaaaataaaatctttgatggcaagatcgctttcaagctttatgacacttttggttttcctttagacttgacaaacgacatgctaagaaccatgggacgtacg

SEQ ID NO: 2367 - DNA (genomic), 528 bp, Helicobacter pylori; double-stranded, circular
  misc_feature (B) LOCATION 1...528
  hypothetical: NO
  anti-sense: NO
gattgtaaaagaagcggggtgagtagtggggtcagacgcattgaagcggtgtgcgggaaagccttttaccaactgactaaagaagaaaataaagagcttaaaaacgctaagactttattgaaaaataacgatgtgatcgccggcatcaacaaacttaaagagagcgtgaaaaacagtcaaaaagcccccgtttctatggatttaccggttgaaaaaatccatggcgtgaatttggtggtgggcgtagtggagcaaggcgacattaaagaaatgattgaccggttgaaaagtaagcatgaaaaattgctcgctatagtgtttaaaaaagaaaatgagcgaatcactctcgcatgcggggtgaaaaacgtgcccataaaagcgaacgcatgggctaatgaagtggcgcaaattttagggggcaaagggggcgggagagatgattttgcgagcgctggaggtaaggatattgaaaatttgcaagccgcgctcaatttagcgaaaaataccgctctcaaagctttagaggga

SEQ ID NO: 2368 - DNA (genomic), 882 bp, Helicobacter pylori; double-stranded, circular
  misc_feature (B) LOCATION 1...882
  hypothetical: NO
  anti-sense: NO
aagagctataaaatagccttaaaatgcgcgataaaacaacaaaaaggaatacccatggacattcgcaacgaatttttacaattttttcaaaataaggggcatgagatctatcctagcatgcctttagtgcctaatgacgctaccttgcttttcactaatgccggcatggtgcaatttaaagatatttttactgggattgtgccacgccctagcattcctagagcggcaagttcgcaattgtgcatgcgtgcaggcggcaagcataacgatttagaaaatgtcggttataccgcaagacaccacacgctttttgaaatgctagggaatttctcttttggggattatttcaaagaagaagcgattttgtttgcgtgggaatttgtaaccaagaatttagggtttaagcctaaagatttgtatatcagcgtgcatgaaaaagacgatgaagccgttaaattatgggaaaagtttgtgcctgttgataggattaaaaaaatgggcgataaagataatttctggcaaatgggcgatagcggaccttgcgggccttgcagtgaaatttacattgatcaaggcgaaaaacactttaaggggagcgaggattattttgggggcgagggcgataggtttttagaaatttggaatctggtgttcatgcaatacgaacgctctaatgatggcgttttatcccccttgccaaagcctagcattgatacaggcatggggttagaaagggtgcaagcgctattagaacataagctcaataattttgattcttcactatttgcacccttaatggaagaaatcagcgagcttacaggtttggattatgcgagcgagttccagccaagttttagggtagtggccgaatccgcaaggcgg

SEQ ID NO: 2369 - DNA (genomic), 2544 bp, Helicobacter pylori; double-stranded, circular
  misc_feature (B) LOCATION 1...2544
  hypothetical: NO
  anti-sense: NO
atggacattcgcaacgaatttttacaattttttcaaaataaggggcatgagatctatcctagcatgcctttagtgcctaatgacgctaccttgcttttcactaatgccggcatggtgcaatttaaagatatttttactgggattgtgccacgccctagcattcctagagcggcaagttcgcaattgtgcatgcgtgcaggcggcaagcataacgatttagaaaatgtcggttataccgcaagacaccacacgctttttgaaatgctagggaatttctcttttggggattatttcaaagaagaagcgattttgtttgcgtgggaatttgtaaccaagaatttagggtttaagcctaaagatttgtatatcagcgtgcatgaaaaagacgatgaagccgttaaattatgggaaaagtttgtgcctgttgataggattaaaaaaatgggcgataaagataatttctggcaaatgggcgatagcggaccttgcgggccttgcagtgaaatttacattgatcaaggcgaaaaacactttaaggggagcgaggattattttgggggcgagggcgataggtttttagaaatttggaatctggtgttcatgcaatacgaacgctctaatgatggcgttttatcccccttgccaaagcctagcattgatacaggcatggggttagaaagggtgcaagcgctattagaacataagctcaataattttgattcttcactatttgcacccttaatggaagaaatcagcgagcttacaggtttggattatgcgagcgagttccagccaagttttagggtagtggccgatcacgcaagagcggtagcgttcttactcgctcaagaggtgcatttcaataaagaaggccgtggctatgttttgaggcgcattttaaggcgggccttaaggcatgggtatttaatgggcttgaaagaagcgtttttatacaaagtcgtgggcgtggtgtgcgagcaattttctaacgtgcatgcgtatttgaaagagtctaaagaaatggtgatgaaagaatgctttgaagaagaagagcgctttttagagactttggaatcgggcatggaattgtttaacttgtctttaacgcatttgaatgaaaataaaatctttgatggcaagatcgctttcaagctttatgacacttttggttttcctttagacttgacaaacgacatgctaagaagccatggggcgtgcgtggatatgcaaggctttgaaaattgcatgcaagagcaagtgaaacgctctaaagcttcatggaaaggcaaacaaaacaacgccgattttagcgctattttaaacgcttatgcacctaatgaatttgtagggtatgaaacgacagaatgtttggctaacgccttagggttttttgatagcgattttaaagaaataacagaggcaaatcctaaccaagaagtctgggtgttgttagaaaaaacccctttttatgcagaaggtgggggggctataggcgataggggcacgctttttaaagacaatgaagaagcggctttggtgttagatacaaaaaacttttttgggcttaatttttcactccttgaaatcaaaaaagcgctaaaaaaaggcgatcaagtgatcgcgcaagtgagcgatgagcgcttagaaatcgccaaacaccatagcgcgacgcatttattgcaaagcgctttaagagaagttttaggctcgcatgtgagtcaagcagggagtttagtggaatccaaacgattgcgctttgatttctcgcatgctaaagcgctcaatgatgaagagttagaaaaagtagaagatttggttaatgctcaaattttcaagcatttgacaagccaagtggagcatatgcctttaaatcaagccaaagataagggagcgttagcgttatttagcgagaaatacgctgaaaatgtgcgcgtggtgagctttaaagaagcgtccattgaattgtgtgggggcattcatgtggaaaataccgggctgattggggggtttaggattgtaaaagaaagcggggtgagtagtggggtcagacgcattgaagcggtgtgcgggaaagccttttaccaactgactaaagaagaaaataaagagcttaaaaacgctaagactttattgaaaaataacgatgtgatcgccggcatcaacaaacttaaagagagcgtgaaaaacagtcaaaaagcccccgtttctatggatttaccggttgaaaaaatccatggcgtgaatttggtggtgggcgtagtggagcaaggcgacattaaagaaatgattgaccggttgaaaagtaagcatgaaaaattgctcgctatagtgtttaaaaaagaaaatgagcgaatcactctcgcatgcggggtgaaaaacgtgcccataaaagcgaacgcatgggctaatgaagtggcgcaaattttagggggcaaagggggcgggagagatgattttgcgagcgctggaggtaaggatattgaaaatttgcaagccgcgctcaatttagcgaaaaataccgctctcaaagctttagagggataa

SEQ ID NO: 2370 - DNA (genomic), 186 bp, Helicobacter pylori; double-stranded, circular
  misc_feature (B) LOCATION 1...186
  hypothetical: NO
  anti-sense: NO
catcttgaaatccatgaaatgcttaaaaaaacgcttcataaatttaattttggggtttactttaaagggataaacatgcgaagtcatttctgcacagaaattagtgaaaaagatgtgggtaaaaccatcaaagtggccgggtggtgtaacacttatagagaccatggaggcgtggttttattgatt

SEQ ID NO: 2371 - DNA (genomic), 408 bp, Helicobacter pylori; double-stranded, circular
  misc_feature (B) LOCATION 1...408
  hypothetical: NO
  anti-sense: NO
atgcgaagtcatttctgcacagaaattagtgaaaaagatgtgggtaaaaccatcaaagtggccgggtggtgtaacacttatagagaccatggaggcgtggtttttattgatttaagggataagagcggtttagtgcaactcgtctgtgatcctagctctaaggcttatgaaaaggctttagaggttaggagcgaatttgtgttagtggctaaaggaaaagcgcgtttaaggggtgctgggttagaaaaccctaaactaaaaacgggtaaaattgaaatcgttttagaagaattagtcattgaaaataaaagcgctaccccaccgattgaaattggcaataaaagcgtgaatgaagatttgcgcttgaaataccgctatttggatttacgctgctttgaacgcttatga

SEQ ID NO: 2372 - DNA (genomic), 525 bp, Helicobacter pylori; double-stranded, circular
  misc_feature (B) LOCATION 1...525
  hypothetical: NO
  anti-sense: NO
ttgcgcttaaaagtggctgaaacgcttgatttgattgataaagacgctttgaattttttatgggtagtccatttccccatgtttgaaaaaaccgaaaacggctatcatgccgcgcaccacccctttacgatgcctaaaaatatagaatgcgaagacatagaagaaattgaagcgcatgcgtatgatgtggtgcttaatggcgtggagcttggtggggggagcataaggattcataaagaagaaatgcaaaaaaaagtctttgaaaaaatcaatatcaacgaagaagaagcgcaaaagaaatttggctttttactagaagcgctaaagtttggcgctcctcctcatggaggctttgcgataggctttgatcgcttgatcatgctaatgactaaatccaatagcattagagacgtgatcgctttccctaaaacgcaaaaagcttcatgcttattgactgatgcgcctagccccattaatgaagagcaattaagagaattgcacattcgcttgagaaaaccaatttaa

SEQ ID NO: 2373 - DNA (genomic), 705 bp, Helicobacter pylori; double-stranded, circular
  misc_feature (B) LOCATION 1...705
  hypothetical: NO
  anti-sense: NO
gcttatgaaatctttaaattgcgcagcgaagtggctttaatcactcgtaacgctctggtccaaaagggttttttagagattgaaacccccattttgtctaaaaccacgcctgagggggctagggattatttagtgccaagcagggtgcatgagggcgaatttttcgcgcttccccaaagcccgcaattattcaaacagcttttaatggtggggggaatggataggtattttcaaatcgctcgttgctttagagatgaagatttgagggcggacaggcagccagaattcacgcaaattgatgcggaaatgagtttttgcgatgaagatgatgtgatgggcgtggtggaagatttgttgcaagagatttttaaagcgattgggcatactatttctaaaccttttaaacgcatgccttataaggaagcgatggaaaattacgggagcgataagccggatttacgctttgaattgcccttaatagaagtgggggattgctttatggacagctcaaattctattttttctaatatcgcgcaagatcctaaagataaacgcattaaagctttgaacgttaagggggctgatgcggtttttagccgcagcgttttaaaagaattagaagaatttgtacgccaatttggggctaaaggcttagcgtatttgcagattaaagaagatgggattaaagggcctttagttaaattt

SEQ ID NO: 2374 - DNA (genomic), 702 bp, Helicobacter pylori; double-stranded, circular
  misc_feature (B) LOCATION 1...702
  hypothetical: NO
  anti-sense: NO
tatgaaatctttaaattgcgcagcgaagtggctttaatcactcgtaacgctctggtccaaaagggttttttagagattgaaacccccattttgtctaaaaccacgcctgagggggctagggattatttagtgccaagcagggtgcatgagggcgaatttttcgcgcttccccaaagcccgcaattattcaaacagcttttaatggtggggggaatggataggtattttcaaatcgctcgttgctttagagatgaagatttgagggcggacaggcagccagaattcacgcaaattgatgcggaaatgagtttttgcgatgaagatgatgtgatgggcgtggtggaagatttgttgcaagagatttttaaagcgattgggcatactatttctaaaccttttaaacgcatgccttataaggaagcgatggaaaattacgggagcgataagccggatttacgctttgaattgcccttaatagaagtgggggattgctttatggacagctcaaattctattttttctaatatcgcgcaagatcctaaagataaacgcattaaagctttgaacgttaagggggctgatgcggtttttagccgcagcgttttaaaagaattagaagaatttgtacgccaatttggggctaaaggcttagcgtatttgcagattaaagaagatgggattaaagggcctttagttaaattt

SEQ ID NO: 2375 - DNA (genomic), 840 bp, Helicobacter pylori; double-stranded, circular
  misc_feature (B) LOCATION 1...840
  hypothetical: NO
  anti-sense: NO
ttgaacgcttatgaaatctttaaattgcgcagcgaagtggctttaatcactcgtaacgctctggcccaaaagggttttttagagattgaaacccccattttgtctaaaaccacgcctgagggggctagggattatttagtgccaagcagggtgcatgagggcgaatttttcgcgcttccccaaagcccgcaattattcaaacagcttttaatggtggggggaatggataggtattttcaaatcgctcgttgctttagagatgaagatttgagggcggacaggcagccagaattcacgcaaattgatgcggaaatgagtttttgcgatgaagatgatgtgatgggcgtggtggaagatttgttgcaagagatttttaaagcgattgggcatactatttctaaaccttttaaacgcatgccttataaggaagcgatggaaaattacgggagcgataagccggatttacgctttgaattgcccttaatagaagtgggggattgctttatggacagctcaaattctattttttctaatatcgcgcaagatcctaaagataaacgcattaaagctttgaacgttaagggggctgatgcggtttttagccgcagcgttttaaaagaattagaagaatttgtacgccaatttggggctaaaggcttagcgtatttgcagattaaagaagatgggattaaagggcctttagttaaatttttaagcgaaaaggggcttaagaatattttagaaaggactgatgcgcaagttggggatattgtctttttggagcgggggataaaaaatcgtgttagattacatgaggcgcttgcgcttaaaagtggctga

SEQ ID NO: 2376 - DNA (genomic), 1347 bp, Helicobacter pylori; double-stranded, circular
  misc_feature (B) LOCATION 1...1347
  hypothetical: NO
  anti-sense: NO
ttgaacgcttatgaaatctttaaattgcgcagcgaagtggctttaatcactcgtaacgctctggcccaaaagggttttttagagattgaaacccccattttgtctaaaaccacgcctgagggggctagggattatttagtgccaagcagggtgcatgagggcgaatttttcgcgcttccccaaagcccgcaattattcaaacagcttttaatggtggggggaatggataggtattttcaaatcgctcgttgctttagagatgaagatttgagggcggacaggcagccagaattcacgcaaattgatgcggaaatgagtttttgcgatgaagatgatgtgatgggcgtggtggaagatttgttgcaagagatttttaaagcgattgggcatactatttctaaaccttttaaacgcatgccttataaggaagcgatggaaaattacgggagcgataagccggatttacgctttgaattgcccttaatagaagtgggggattgctttatggacagctcaaattctattttttctaatatcgcgcaagatcctaaagataaacgcattaaagctttgaacgttaagggggctgatgcggtttttagccgcagcgttttaaaagaattagaagaatttgtacgccaatttggggctaaaggcttagcgtatttgcagattaaagaagatgggattaaagggcctttagttaaatttttaagcgaaaaggggcttaagaatattttagaaaggactgatgcgcaagttggggatattgtcttttttggagcgggggataaaaaaatcgtgttagattacatggggcgcttgcgcttaaaagtggctgaaacgcttgatttgattgataaagacgctttgaattttttatgggtagtccatttccccatgtttgaaaaaaccgaaaacggctatcatgccgcgcaccacccctttacgatgcctaaaaatatagaatgcgaagacatagaagaaattgaagcgcatgcgtatgatgtggtgcttaatggcgtggagcttggtggggggagcataaggattcataaagaagaaatgcaaaaaaaagtctttgaaaaaatcaatatcaacgaagaagaagcgcaaaagaaatttggctttttactagaagcgctaaagtttggcgctcctcctcatggaggctttgcgataggctttgatcgcttgatcatgctaatgactaaatccaatagcattagagacgtgatcgctttccctaaaacgcaaaaagcttcatgcttattgactgatgcgcctagccccattaatgaagagcaattaagagaattgcacattcgcttgagaaaaccaatttaa

SEQ ID NO: 2377 - DNA (genomic), 1092 bp, Helicobacter pylori; double-stranded, circular
  misc_feature (B) LOCATION 1...1092
  hypothetical: NO
  anti-sense: NO
gtggataattacacctatagcgaattgttaaaaagcttgcaaaacaaatgcgataatatcgccttaatcatcaagcctgaaaagatcaagcaagaattagaacgcattgaaaaagagcaagaagaccctaatttttggcaagatgttttaaaagccagagacaccaataaagaaaaagtacgcttgaaccgcttgctagaaacctatcaaaaaatgaaaaattctttagatgaaagcgtggaattgtttgaactcgctcaaaacgatagcgatgaggttactttatccttgctctatgaagaggctcctactttagaacacagcgtgcaaaaagtggaaattgaaatcatgttaagcggtgaaaacgacgcttcaaacgccattattaccattcagcctggagcgggggggactgaaagccaggattgggcgagtattttgtatcgcatgtatttgaggtgggcagaaagaaagagttttaaaagcgagattttagattatcaagatggcgaagaagcgggcattaaaggggtcgcctttatcattaagggcgaaaacgcttatggctatttgaaaaatgaaaacggggtgcataggcttgtaaggatttcgccctttgatgcgaacgccaaacggcacacgagttttgcgagcgtgcaaattagccctgaattggacgatgatattgatatagaaattgatgaaaaagatgtccgttatgattattatagagccagtggggcaggcggtcagcatgtcaataaaacagaaagcgcggttagaatcacgcatttccctaccggtattgtggtgcaatgccaaaacgacaggagccagcataaaaacaaggcgagcgcgttaaaaatgcttaaatccaagctttatgaattggaattagaaaaacagcaaagcagtgccaaaaatgaagaaaaaagcgagatcggctgggggcatcaaataagaagttatgttctagccccctaccagcaagtcaaagacgcgcgctccaatatcgcttatagcaatgtggaagcgatattagacggcgatattgatgcgattttagagggcgttttgattgctaaagcttaa

SEQ ID NO: 2378 - DNA (genomic), 1137 bp, Helicobacter pylori; double-stranded, circular
  misc_feature (B) LOCATION 1...1137
  hypothetical: NO
  anti-sense: NO
caatgctataatggtgagtttaaaaccccactcataaaggttctgtttgtggataattacacctatagcgaattgttaaaaagcttgcaaaacaaatgcgataatatcgccttaatcatcaagcctgaaaagatcaagcaagaattagaacgcattgaaaaagagcaagaagaccctaatttttggcaagatgttttaaaagccagagacaccaataaagaaaaagtacgcttgaaccgcttgctagaaacctatcaaaaaatgaaaaattctttagatgaaagcgtggaattgtttgaactcgctcaaaacgatagcgatgaggttactttatccttgctctatgaagaggctcctactttagaacacagcgtgcaaaaagtggaaattgaaatcatgttaagcggtgaaaacgacgcttcaaacgccattattaccattcagcctggagcgggggggactgaaagccaggattgggcgagtattttgtatcgcatgtatttgaggtgggcagaaagaaagagttttaaaagcgagattttagattatcaagatggcgaagaagcgggcattaaaggggtcgcctttatcattaagggcgaaaacgcttatggctatttgaaaaatgaaaacggggtgcataggcttgtaaggatttcgccctttgatgcgaacgccaaacggcacacgagttttgcgagcgtgcaaattagccctgaattggacgatgatattgatatagaaattgatgaaaaagatgtccgttatgattattatagagccagtggggcaggcggtcagcatgtcaataaaacagaaagcgcggttagaatcacgcatttccctaccggtattgtggtgcaatgccaaaacgacaggagccagcataaaaacaaggcgagcgcgttaaaaatgcttaaatccaagctttatgaattggaattagaaaaacagcaaagcagtgccaaaaatgaagaaaaaagcgagatcggctgggggcatcaaataagaagttatgttctagccccctaccagcaagtcaaagacgcgcgctccaatatcgcttatagcaatgtggaagcgatattagacggcgatattgatgcgattttagagggcgttttgattgctaaagct

SEQ ID NO: 2379 - DNA (genomic), 564 bp, Helicobacter pylori; double-stranded, circular
  misc_feature (B) LOCATION 1...564
  hypothetical: NO
  anti-sense: NO
atggcaattgggatgagcgagctcaaaaagggtttaaaaattgaattgggcggtgtgccttatagaattgtagaataccagcatgtcaagcccggcaagggtgcggctttcgtgcgtgcgaaaatcaagtcgtttttagatggcaaggtgattgaaaagactttccatgcgggggataagtgcgaagaacctaacctggttgaaaaaacgatgcaatacctttatcatgatggcgatacataccaattcatggatatagagagctatgagcaaatcgctttgaacgactctcaagtgggtgaggcttctaaatggatgctagatggcatgcaagtgcaggttttattgcataatgacaaggcgatttcagtggatgtgccgcaagttgtggctttaaagattgtggaaacggctcctaattttaagggcgatacttctagtgcgagcaaaaagccagcgactttagaaaccggtgcggttgtgcaagtgcctttccatgttttagagggtgagacgattaaggtgaatacggaaacagaagagtatcttgaaaaagtgaagtga

SEQ ID NO: 2380 - DNA (genomic), 582 bp, Helicobacter pylori; double-stranded, circular
  misc_feature (B) LOCATION 1...582
  hypothetical: NO
  anti-sense: NO
tcaacaagggaagagtgtaacatgacaattgggatgagcgagctcaaaaagggtttaaaaattgaattgggcggtgtgccttatagaattgtagaataccagcatgtcaagcccgacaagggtgcggctttcgtgcgtgcgaaaatcaagtcgtttttagatgacaaggtgattgaaaagactttccatgcgggggataagtgcgaagaacctaacctggttgaaaaaacgatgcaatacctttatcatgatggcgatacataccaattcatggatatagagagctatgagcaaatcgctttgaacgactctcaagtgggtgaggcttctaaatggatgctagatggcatgcaagtgcaggttttattgcataatgacaaggcgatttcagtggatgtgccgcaagttgtggctttaaagattgtggaaacggctcctaattttaagggcgatacttctagtgcgagcaaaaagccagcgactttagaaaccggtgcggttgtgcaagtgcctttccatgttttagagggtgagacgattaaggtgaatacggaaacagaagagtatcttgaaaaagtgaag

SEQ ID NO: 2381 - DNA (genomic), 1506 bp, Helicobacter pylori; double-stranded, circular
  misc_feature (B) LOCATION 1...1506
  hypothetical: NO
  anti-sense: NO
atgttttctaaccaatacatccaacaacgcatccataaagccaatagcttgagagaagaaggcaaaaatccttataaaaatggcttgaaacggagccttaccaacgccgcttttttagaaaaatacgcttatgttaagggtttagaagagcctaaagacaaagaaaaatgcgagagcgttgtagggagggtcaagctcttgcgtttaatgggtaaggcatgttttattaaaattgaagatgaaagcgcgattttacaagcttatgtttcgcaaaatgaattgaatgatgagtttaaaagcttgaaaaagcatttagaagtgggcgatattgtgttggtgaaaggtttcccttttgctaccaaaaccggtgaattaagcattcatgccctagaatttcacattttaagcaaaaccatcgtgcctttgcctgagaaatttcatggactgagcgatatagaattgcgttaccgccagcgctacttggatttgatcgtcaatcctggcgttaaagatgtgtttaaaaagcgcagtttgattgtctctagcgtgcggaaattctttgaaatggaagggtttttagaagtggaaacccctatgatgcaccccattcctggcggggcgaacgcaaggcctttcatcacttatcataacgccttagaaattgaaaggtatttgagaatcgccccagaattataccttaaacgcttgattgtggggggttttgaagcggtgtttgaaatcaatcgtaatttcaggaatgagggcatggatcacagccataaccccgaatttacgatgattgagttttattgggcgtatcacacttatgaagatttgattgaactcagtaagaggttgtttgactacttgctaaagactttaaatttagattcaaaaatcatttataacgatatggaagtggatttcaaccaaacgagcgtgatttcctatttggacgctttagaaacaatagggggcatcagtaagggcattttagaaaaagaagacaggcttttggcttatttattagagcagggcattaaagtagagccaaacctcactcatggcaaattgctcgctgaagcgtttgatcattttgtagagcataagctcattaaccccacttttgtaaccgaataccctattgaaattagccccctagccagacgcaacgatagtaaccctaatattgctgacaggtttgaattgtttattgcaggtaaagaaatcgctaatggctttagcgagttgaatgaccctttagaccaactagagcgctttaaaaatcaagtggctgaaaaagaaaaaggcgatgaagaagcccaatacatggatgaagattatgtgtgggccctagcccatgaaatgccccccactgcagggcaaggcataggcattgaccgattagtgatgctactcactggagctaaaagcattaaagatgtgattttattcccagcgatgcgtcctgttaaaaacgattttaatgttgagggtgaagaataa

SEQ ID NO: 2382 - DNA (genomic), 1512 bp, Helicobacter pylori; double-stranded, circular
  misc_feature (B) LOCATION 1...1512
  hypothetical: NO
  anti-sense: NO
aggcacaacatgttttctaaccaatacatccaacaacgcatccataaagccaatagcttgagagaagaaggcaaaaatccttataaaaatggcttgaaacggagccttaccaacgccgcttttttagaaaaatacgcttatgttaagggtttagaagagcctaaagacaaagaaaaatgcgagagcgttgtagggagggtcaagctcttgcgtttaatgggtaaggcatgttttattaaaattgaagatgaaagcgcgattttacaagcttatgtttcgcaaaatgaattgaatgatgagtttaaaagcttgaaaaagcatttagaagtgggcgatattgtgttggtgaaaggtttcccttttgctaccaaaaccggtgaattaagcattcatgccctagaatttcacattttaagcaaaaccatcgtgcctttgcctgagaaatttcatggactgagcgatatagaattgcgttaccgccagcgctacttggatttgatcgtcaatcctggcgttaaagatgtgtttaaaaagcgcagtttgattgtctctagcgtgcggaaattctttgaaatggaagggtttttagaagtggaaacccctatgatgcaccccattcctggcggggcgaacgcaaggcctttcatcacttatcataacgccttagaaattgaaaggtatttgagaatcgccccagaattataccttaaacgcttgattgtggggggttttgaagcggtgtttgaaatcaatcgtaatttcaggaatgagggcatggatcacagccataaccccgaatttacgatgattgagttttattgggcgtatcacacttatgaagatttgattgaactcagtaagaggttgtttgactacttgctaaagactttaaatttagattcaaaaatcatttataacgatatggaagtggatttcaaccaaacgagcgtgatttcctatttggacgctttagaaacaatagggggcatcagtaagggcattttagaaaaagaagacaggcttttggcttatttattagagcagggcattaaagtagagccaaacctcactcatggcaaattgctcgctgaagcgtttgatcattttgtagagcataagctcattaaccccacttttgtaaccgaataccctattgaaattagccccctagccagacgcaacgatagtaaccctaatattgctgacaggtttgaattgtttattgcaggtaaagaaatcgctaatggctttagcgagttgaatgaccctttagaccaactagagcgctttaaaaatcaagtggctgaaaaagaaaaaggcgatgaagaagcccaatacatggatgaagattatgtgtgggccctagcccatgaaatgccccccactgcagggcaaggcataggcattgaccgattagtgatgctactcactggagctaaaagcattaaagatgtgattttattcccagcgatgcgtcctgttaaaaacgattttaatgttgagggtgaagaa

SEQ ID NO: 2383 - DNA (genomic), 234 bp, Helicobacter pylori; double-stranded, circular
  misc_feature (B) LOCATION 1...234
  hypothetical: NO
  anti-sense: NO
aatgctcatagggatctatggcatcgcttttgccaccaaagagggcttaaaagatatcttttccaaatagaagaagcgaaaatacgggatcacagaaagctaggcgtggaaatagggctttttagttttgatgatgagataggggcgggcttgcctttatggctacctaaaggggcaaggcttagaaaacgcattgaagatttgttgagtcaagggttgctttttaagaggcta

SEQ ID NO: 2384 - DNA (genomic), 633 bp, Helicobacter pylori; double-stranded, circular
  misc_feature (B) LOCATION 1...633
  hypothetical: NO
  anti-sense: NO
agaatgagtgcggaactgattgctgtttataaagacgagcaaataatagatttagagagcgcgaaagtcttagggctgagcgatgggattaaagcgttaaaagggacagagccgctatattttgctgattcgcctttggctttagaggtgatcaggcattcatgcgcgcatttgctcgcgcaaagcttgaaagccctttatccggacgcgaaattttttgtaggccctgtggtagaagaggggttttattacgatttcaagaccacttcaaaaatcagcgaagaggatttgcctaaaattgaagcgaaaatgaaagaatttgcgaagtcaaagctcgctatcactaaagagactttaaccagagagcaagctttggagcgttttaagggcgatgaattaaagcatgcggtcatgagtaaaatcagtggcgatatatttggcgtgtaccaacaaggcgagtttgaagatttgtgtaaggggccacacctcccaaacacccggtttttaaaccatttcaagctcactaaactggctggggcttatttgggtggcgatgaaaacaatgaaatgctcatagggatctatggcatcgcttttgccaccaaagagggcttaaaagatatcttttccaaa

SEQ ID NO: 2385 - DNA (genomic), 873 bp, Helicobacter pylori; double-stranded, circular
  misc_feature (B) LOCATION 1...873
  hypothetical: NO
  anti-sense: NO
gtcaagggttgctttttaagaggctatgagccggttaaaggccctgagattttaaagagcgatgtgtggaaaatcagcgggcattatgacaactataaagaaaacatgtatttcaccacgattgatgagcaagaatacggcataaagcctatgaactgcgtggggcatattaaagtctatcaaagtgctttgcacagctacagagatttgcccttaaggttttatgaatacggcgtggtgcatcggcatgaaaaaagcggcgtgttgcatgggcttttaagggttagggaatttacccaagatgatgcgcatattttttgctcttttgaacagatccaaagcgaagtgagtgcgattttagattttacgcacaaaatcatgcaagcgtttggttttagctatgaaatggaattatccacaaggccggctaaatccataggcgatgataaagtttgggaaaaggccactaacgctttaaaagaagccctaaaagagcaccgcattgattataagattgatgaagggggaggggctttctatgggcctaagattgacattaaaatcactgacgctttaaagcgtaaatggcagtgcggcacgattcaagtggatatgaatttgcctgaacgcttcaagctcgctttcactaatgagtataatcacgctgaacagccggtgatgatccacagagcgattttaggctcgtttgaaaggtttattgcgattttgagcgaacattttggggggaatttccctttctttgttgcgcccactcaaatcgctctcattcccattaacgaagagcatcatggtttttgctttgaaattaaaagaggcgctaaaaaagtgcgatatttttgtagaagtgttgga

SEQ ID NO: 2386 - DNA (genomic), 1839 bp, Helicobacter pylori; double-stranded, circular
  misc_feature (B) LOCATION 1...1839
  hypothetical: NO
  anti-sense: NO
atgagtgcggaactgattgctgtttataaagacgagcaaataatagatttagagagcgcgaaagtcttagggctgagcgatgggattaaagcgttaaaagggacagagccgatatattttgatgattcgcctttggctttagaggtgatcaggcattcatgcgcgcatttgctcgcgcaaagcttgaaagccctttatccggacgcgaaattttttgtaggccctgtggtagaagaggggttttattacgatttcaagaccacttcaaaaatcagcgaagaggatttgcctaaaattgaagcgaaaatgaaagaatttgcgaagtcaaagctcgctatcactaaagagactttaaccagagagcaagctttggagcgttttaagggcgatgaattaaagcatgcggtcatgagtaaaatcagtggcgatatatttggcgtgtaccaacaaggcgagtttgaagatttgtgtaaggggccacacctcccaaacacccgttttttaaaccatttcaagctcactaaactggctggggcttatttgggtggcgatgaaaacaatgaaatgctcattagaatctatggcatcgcttttgccaccaaagagggcttaaaagactatcttttccaaatagaagaagcgaaaaaacgggatcacagaaagctaggcgtggaactagggctttttagttttgatgatgagataggggcgggcttgcctttatggctacctaaaggggcaaggcttagaaaacgcattgaagatttgttgagtcaagcgttgcttttaagaggctatgagccggttaaaggccctgagattttaaagagcgatgtgtggaaaatcagcgggcattatgacaactataaagaaaacatgtatttcaccacgattgatgagcaagaatacggcataaagcctatgaactgcgtggggcatattaaagtctatcaaagtgctttgcacagctacagagatttgcccttaaggttttatgaatacggcgtggtgcatcggcatgaaaaaagcggcgtgttgcatgggcttttaagggttagggaatttacccaagatgatgcgcatattttttgctcttttgaacagatccaaagcgaagtgagtgcgattttagattttacgcacaaaatcatgcaagcgtttggttttagctatgaaatggaattatccacaaggccggctaaatccataggcgatgataaagtttgggaaaaggccactaacgctttaaaagaagccctaaaagagcaccgcattgattataagattgatgaagggggaggggctttctatgggcctaagattgacattaaaatcactgacgctttaaagcgtaaatggcagtgcggcacgattcaagtggatatgaatttgcctgaacgcttcaagctcgctttcactaatgagtataatcacgctgaacagccggtgatgatccacagagcgattttaggctcgtttgaaaggtttattgcgattttgagcgaacattttggggggaatttccctttctttgttgcgcccactcaaatcgctctcattcccattaacgaagagcatcatgtttttgctttgaaattaaaagaggcgctaaaaaagtgcgatatttttgtagaagtgttggataaaaacgacagcttgaataaaaaggtgcgattagccgaaaagcaaaaaatccctatgattttagtgttagggaatgaagaggtggagaccgaaattttatccattagagacagagaaaaacaagctcaatataaaatgcccttaaaggagtttttaaacatggttgaatctaagatgcaagaggttagtttttga

SEQ ID NO: 2387 - DNA (genomic), 351 bp, Helicobacter pylori; double-stranded, circular
  misc_feature (B) LOCATION 1...351
  hypothetical: NO
  anti-sense: NO
atgagagttaaaacaggcgttgtgcgcagaagacgccataaaaaagtcttaaagctcgctagagggttttatagtggcagaagaaagcattttagaaaggctaaagaacagcttgaaagaagcatgtattacgcctttagggatcgcaaacaaaagaaaagagagttcaggagtttgtgggtggtaaggatcaatgcggcttgcagaatgcacaatacaagttattcgcgcttcatgcatgccctaaaagtggctaacattgaattagaccgcaaggttttagcggacatggcgatgaatgacatgcaagcttttaagagcgtgttagagagcgtgaaagagcatctttga

SEQ ID NO: 2388 - DNA (genomic), 423 bp, Helicobacter pylori; double-stranded, circular
  misc_feature (B) LOCATION 1...423
  hypothetical: NO
  anti-sense: NO
tttttgagtagaaacgaagtgttgttaaacggagacattaattttaaagaagtgcgttgcgtgggcgataatggcgaagtgtatgggatcatttcttccaaagaagcgctaaaaatcgctcaaaatttaggtttggatttggttttgatttcagcgagcgcgaaacctcccgtgtgtaaggtgatggattataataaattccgctaccaaaatgaaaagaaaatcaaggaagccaagaaaaagcaaaagcaaattgaaatcaaagagatcaagctttccactcaaatcgcgcaaaacgatattaactataaagtcaagcgtgcgagagaatttattgaatccaataagcatgtcaaattcaaagtggttttaaagggtagggagagtcaaaactcaaaagccgggcttgatgtgctttttaga

SEQ ID NO: 2389 - DNA (genomic), 612 bp, Helicobacter pylori; double-stranded, circular
  misc_feature (B) LOCATION 1...612
  hypothetical: NO
  anti-sense: NO
ttgagtagaaacgaagtgttgttaaacggagacattaattttaaagaagtgcgttgcgtgggcgataatggcgaagtgtatgggatcatttcttccaaagaagcgctaaaaatcgctcaaaatttaggtttggatttggttttgatttcagcgagcgcgaaacctcccgtgtgtaaggtgatggattataataaattccgctaccaaaatgaaaagaaaatcaaggaagccaagaaaaagcaaaagcaaattgaaatcaaagagatcaagctttccactcaaatcgcgcaaaacgatattaactataaagtcaagcatgcgagagaatttattgaatccaataagcatgtcaaattcaaagtggttttaaagggtagggagagtcaaaactcaaaagccgggcttgatgtgctttttagagtccaaacgatgatgcaagatttagccaaccctgaaaaagagccaaaaaccgaggggcgttttgtttcgtggatgtttgtgcctaaggctaaagaagcccccaaaaatgaaaagaaaaccaaagaaaataacccgccttttaatcgtattaaccttatgaaaggagaaaatcatgccaaaaatgaagactaa

SEQ ID NO: 2390 - DNA (genomic), 195 bp, Helicobacter pylori; double-stranded, circular
  misc_feature (B) LOCATION 1...195
  hypothetical: NO
  anti-sense: NO
atgccaaaaatgaagactaatcgcggcgcgtctaagcgtttcaaagttaaaaaaaacttgattaagcgtggcagtgcttttaaaagccatattttgactaaaaaaagccctaagcgtaaagccaatctaaacgcgccaaaacatgtgcatcacactaacgcgcattctgtcatgtcgttgctttgcagggcttaa

SEQ ID NO: 2391 - DNA (genomic), 396 bp, Helicobacter pylori; double-stranded, circular
  misc_feature (B) LOCATION 1...396
  hypothetical: NO
  anti-sense: NO
atggctaagagaaatgtaacggctaaaaagaaagtagtcaaaaagaatattgcgagaggggttgtttatatttcagcgacctttaacaacaccaacatcactatcactgatgaaatgggcaatgtgatttgttggagcacggcgggcggtttagggtttaaaggctctaaaaaatccaccccttatgcggcccaacaagctgtagaaagcgctctaagcaaggctaaagagcatggcgttaaagaagtgggcattaaggttcaagggccaggcagtgggcgtgagaccgctattaagagcgtgggcgcgacagagggcgttaaagtgctttggattaaagacatcaccccgctccctcataatggttgcagaccccctaaaagaagaagagtgtaa

SEQ ID NO: 2392 - DNA (genomic), 174 bp, Helicobacter pylori; double-stranded, circular
  misc_feature (B) LOCATION 1...174
  hypothetical: NO
  anti-sense: NO
acggcgcaccgccatgtttttgcgtatttgcaaaacaaagaagccacccacaagcttgtaaccgaaatcgcacccaaatacgcgcaaaggaatggcggatactccaggatccaacgcaccactttagaagaggggacgcttccactctggccatcattgaatttgtgtgaaatt

SEQ ID NO: 2393 - DNA (genomic), 351 bp, Helicobacter pylori; double-stranded, circular
  misc_feature (B) LOCATION 1...351
  hypothetical: NO
  anti-sense: NO
atgagacacaaacacggataccgcaagcttgggagaactagctcgcacaggaaggcgttattaaagaatttagcgatcgctttgattgagcataacaaaattgaaacagggatttataaggctaaggaattgcgcagttatattgaaaaattgacgacagtggctcgtgtgggcgattttaacgcgcaccgccatgtttttgcgtatttgcaaaacaaagaagccacccacaagcttgtaaccgaaatcgcacccaaatacgcgcaaaggaatggcggatacaccaggatccaacgcaccacttttagaagaggggacgcttccactctggccaccattgaatttgtgtga

SEQ ID NO: 2394 - DNA (genomic), 186 bp, Helicobacter pylori; double-stranded, circular
  misc_feature (B) LOCATION 1...186
  hypothetical: NO
  anti-sense: NO
aaaaatccagcaaagcacttagtagagggcgatttgcgtaaaaaagttcaaatggatattaaatccttaatggacttagggaattatcgtgggattaggcatcgtaagggtcttcctgtaagaggccaaaccaccaaaaataacgctaggactcgtaagggtaagaaaaaaaccgtgggtagcaag

SEQ ID NO: 2395 - DNA (genomic), 255 bp, Helicobacter pylori; double-stranded, circular
  misc_feature (B) LOCATION 1...255
  hypothetical: NO
  anti-sense: NO
gtgggcatttcttttgacaaacgcgtgcatgaattgagcgaagatgaagtgtctagtatcgctaaaaaaatccagcaaagctacttagtagagggcgatttgcgtaaaaaagttcaaatggatattaaatccttaatggacttagggaattatcgtgggattaggcatcgtaagggtcttcctgtaagaggccaaaccaccaaaaataacgctaggactcgtaagggtaagaaaaaaaccgtgggtagcaagtag

SEQ ID NO: 2396 - DNA (genomic), 354 bp, Helicobacter pylori; double-stranded, circular
  misc_feature (B) LOCATION 1...354
  hypothetical: NO
  anti-sense: NO
aactacatcgttctgattgagagaagattggacaatgtattctatcgcatggggtgcgcgaccactagaagctctgctaggcaattggtgacgcatgagcatgtgcttgtggatggcaagcgtgtagatattccctcatatatcgcgcgttcagggcaaaaaatcgagatcaaagaaaaaaccaagagcaaccctcaagtggtgcgcgcgatggaattgacagctcaaacagggattgtgccatggattgatgtggaaaaagataaaaaatacggcatcttcacccgctaccctgaaagagaagaagtggttgtccctattgaagaaagactcattgtagaattgtattctaag

SEQ ID NO: 2397 - DNA (genomic), 627 bp, Helicobacter pylori; double-stranded, circular
  misc_feature (B) LOCATION 1...627
  hypothetical: NO
  anti-sense: NO
atggcaagatatagaggtgcagtagaaagactagaaaggcgttttggggtttctttagctttaaaaggtgaaaggcgattgagcgggaagagcgcgctagataaaagggcttatggaccaggccagcatgggcaaagacgcactaagacttctgattacgggttgcaattgaaagaaaagcaaaaagctaaaatgatgtatggcatttctgaaaagcaattcaggagtatttttgtggaagccaatcgcttggacggcaatacgggtgaaaaccttatccgtttgattgaaagaagattggacaatgttgtctatcgcatggggtttgcgaccactagaagctctgctaggcaattggtaacgcatgggcatgtgcttgtggatggcaagcgtttggatattccctcttatttcgtgcgttcagggcaaaaaattgagatcaaagaaaaaaccaagagcaaccctcaagtggtgcgcgcgatggaattgacagctcaaacagggattgtgccatggattgatgtggaaaaagataaaaaatacggcatcttcacccgctaccctgaaagagaagaagtggttgtccctattgaagaaagactcattgtagaattgtattctaagtaa

SEQ ID NO: 2398 - DNA (genomic), 138 bp, Helicobacter pylori; double-stranded, circular
  misc_feature (B) LOCATION 1...138
  hypothetical: NO
  anti-sense: NO
ttgggccttttaaccgcgttacgtaaactgggcgtggaagctgaagtgcatggcattattggggctacagaaaacatgataggtccggctgcttataagcctgatgatattttaatctctaaagaaggcaaaaggcat

SEQ ID NO: 2399 - DNA (genomic), 141 bp, Helicobacter pylori; double-stranded, circular
  misc_feature (B) LOCATION 1...141
  hypothetical: NO
  anti-sense: NO
tctctaaagaaggcaaaaggcattgaagtgcgtaataccgacgctgaagggcgtttggtcttagcggattgtttgagctacgctcaagatttaagccctgatgtgatcgtggattgggcgaccctactggggcatgcgttg

SEQ ID NO: 2400 - DNA (genomic), 213 bp, Helicobacter pylori; double-stranded, circular
  misc_feature (B) LOCATION 1...213
  hypothetical: NO
  anti-sense: NO
gcggtcaataaagcctctctggctgtcaatcccccccgcttgttccatttagtctataaacctaaaaaggcgaagaaaaaaatcgctttagtgggcaagggcttgacttatgattccggaggtttgagcttgaaaccggccgattatatggttaccatgaaagcggataaaggcggggcctctgcggtgattgggccttttaaccgcgttacg

SEQ ID NO: 2401 - DNA (genomic), 240 bp, Helicobacter pylori; double-stranded, circular
  misc_feature (B) LOCATION 1...240
  hypothetical: NO
  anti-sense: NO
ccgttcgcacccttaaaaaactcgcttttaaaaacggttaaagtgggcgtttatacttgcgacacacatgctaaagataacgcgcttttagagaatttgaaagcgttgtttttgggcttgaaattaggcttgtatgaatacgacacccttaaacccaacaaaaaagaaagcgccccaaaagaagtcattgccgccccagaattgcacaaacattgcgaaaaaaactcgcgcgaattcttt

SEQ ID NO: 2402 - DNA (genomic), 249 bp, Helicobacter pylori; double-stranded, circular
  misc_feature (B) LOCATION 1...249
  hypothetical: NO
  anti-sense: NO
caagaaaaaccgctagatttcaatacaattcttgaaagatatgaaattaaaaaaggagactttacgctaaaaatcaaattagaaaaaaccacttttgaaaacgcaaaagctgaatgcagtttagtttttattaccaataaggattttgatcatgtttgggtcaaaaataaaaaattgttagaaacctttaaatacgaaggcgaaggcgcgtttttagaccaagaaaataaaatcctgtctgtggggcgt

SEQ ID NO: 2403 - DNA (genomic), 402 bp, Helicobacter pylori; double-stranded, circular
  misc_feature (B) LOCATION 1...402
  hypothetical: NO
  anti-sense: NO
tcgtggattgggcgaccctactggggcatgcgttgtaggcttaggcgaattcactcagcgatcatggggcataatgaagagttaaaaaacctctttgaaacttcagggttagaatccggtgaattgttagccaaactcccctttaaccgccatttaaagaaattgattgaatctaaaatcgctgatgtgtgtaatatttcttcttcacgctatggcggtgcgatcacagcgggcttgtttttgaatgaatttattagagatgagtttaaggataagtggctacacattgacattgcaggcccagcttatgtggaaaaagaatgggatgtgaatagctttggagcgagtggggctggcgtgagagcttgcacagcttttgtggaagagcttttgaaaaaggct

SEQ ID NO: 2404 - DNA (genomic), 1380 bp, Helicobacter pylori; double-stranded, circular
  misc_feature (B) LOCATION 1...1380
  hypothetical: NO
  anti-sense: NO
ttgttagaaacctttaaatacgaaggcgaaggcgcgtttttagaccaagaaaataaaatcctgtatgtgggcgttaaagaagatgatgtgcatttattgagagagagtgcgtgtttagccgttcgcacccttaaaaaactcgcttttaaaagcgttaaagtgggcgtttatacttgcgacacacatgctaaagataacgcgcttttagagaatttgaaagcgttgtttttgggcttgaaattaggcttgtatgaatacgacacttttaaacccaacaaaaaagaaagcgttttaaaagaagtcattgtcgctttagaattgcacaaacattgcgaaaaaacttgcgcgaattctttagaaaagagcgctaaagaagctttaaaatacgctgaaatcatgacagaaagcttgaatatcgttagagatctagtcaataccccccctatgattggcaccccggtttatatggctgaagtggcacaaaaagtggctaaagaaaaccatttagaaatccatgtccatgacgaaaaatttttagaagaaaagaaaatgaacgcctttttagcggtcaataaagcctctctcgctgtcaatcccccccgcttgatccatttagtctataaacctaaaaaagcgaagaaaaaaatcgctttagtgggcaagggcttgacttatgattgcggaggtttgagcttgaaaccggccgattatatggttaccatgaaagcggataaaggcgggggctctgcggtgattgggcttttaaacgcgttagctaaactgggcgtggaagctgaagtgcatggcattattggggctacagaaaacatgataggtccggctgcttataagcctgatgatattttaatctctaaagaaggcaaaagcattgaagtgcgtaataccgacgctgaagggcgtttggtcttagcggattgtttgagctacgctcaagatttaagccctgatgtgatcgtggattttgcgacccttactggggcatgcgttgtaggcttaggcgaattcacttcagcgatcatggggcataatgaagagttaaaaaacctctttgaaacttcagggttagaatccggtgaattgttagccaaactcccctttaaccgccatttaaagaaattgattgaatctaaaatcgctgatgtgtgtaatatttcttcttcacgctatggcggtgcgatcacagcgggcttgtttttgaatgaatttattagagatgagtttaaggataagtggctacacattgacattgcaggcccagcttatgtggaaaaagaatgggatgtgaatagctttggagcgagtggggctggcgtgagagcttgcacagcttttgtggaagagcttttgaaaaaggcttga

SEQ ID NO: 2405 - DNA (genomic), 1059 bp, Helicobacter pylori; double-stranded, circular
  misc_feature (B) LOCATION 1...1059
  hypothetical: NO
  anti-sense: NO
atgtccattctagctgaaaagctttcttccattctcaaacgatacgacgaactcacagcgttgctttccagcgttgaagtggttagcgacattaaaaaactcaccgaattgagcaaagagcaaagctccattgaagaaatttctgtagcgagcaaagagtatttgagcgttttagagggcattaaagaaaataaggagcttttagaagacaaggaattgagcgaactggctaaagaagagctaaaaattttagaaatccaaaaaagcgagctagaaactgccattaagcaactccttattcctaaagatcctaatgacgataaaaacatttatttagagttaagggccggcacagggggcgatgaagcgggcatttttgtaggggatttgtttaaggcgtattgccgttatgcggatttgaaaaagtggaaagtagaaatagtaagctctagcgagaacagcgtagggggctataaagaaatcatcgttttgattaagggcaagggcgtgtattcaaggctcaaatttgaagcaggcacgcatcgagtccaaagagtccctgagacagaatctcaagggcgcatccacacttccgctatcacggtagcgatcatgcctgaagtggatgatgtggaagtttctatcaaccctagcgatttaaagattgaagtgtttcgcgctggcgggcatggggggcaatgcgtcaataccacagactccgccgttcgcatcacacacctccccaccaatatcagcgtgagcatgcaagatgaaaaatcccagcataaaaacaaggataaagccctaaaaatcctaaaagcgcgtctttatgaaaaacaaattgaagagcaacaactcgctaacgctaaagaccgaaaggagcaagtgggtagtggggacaggagcgaaaggatccgcacttataattatccgcaaaaccgcttgagcgagcatagaatcaatttaactctgtatagtttagaagaaatcatgctttcagggaatttagacgaagtgatcaaccctttaatcgctcatgctcaaagccagtttgaataa

SEQ ID NO: 2406 - DNA (genomic), 1062 bp, Helicobacter pylori; double-stranded, circular
  misc_feature (B) LOCATION 1...1062
  hypothetical: NO
  anti-sense: NO
tctcgcatgtccattctagctgaaaagctttcttccattctcaaacgatacgacgaactcacagcgttgctttccagcgttgaagtggttagcgacattaaaaaactcaccgaattgagcaaagagcaaagctccattgaagaaatttctgtagcgagcaaagagtatttgagcgttttagagggcattaaagaaaataaggagcttttagaagacaaggaattgagcgaactggctaaagaagagctaaaaattttagaaatccaaaaaagcgagctagaaactgccattaagcaactccttattcctaaagatcctaatgacgataaaaacatttatttagagttaagggccggcacagggggcgatgaagcgggcatttttgtaggggatttgtttaaggcgtattgccgttatgcggatttgaaaaagtggaaagtagaaatagtaagctctagcgagaacagcgtagggggctataaagaaatcatcgttttgattaagggcaagggcgtgtattcaaggctcaaatttgaagcaggcacgcatcgagtccaaagagtccctgagacagaatctcaagggcgcatccacacttccgctatcacggtagcgatcatgcctgaagtggatgatgtggaagtttctatcaaccctagcgatttaaagattgaagtgtttcgcgctggcgggcatggggggcaatgcgtcaataccacagactccgccgttcgcatcacacacctccccaccaatatcagcgtgagcatgcaagatgaaaaatcccagcataaaaacaaggataaagccctaaaaatcctaaaagcgcgtctttatgaaaaacaaattgaagagcaacaactcgctaacgctaaagaccgaaaggagcaagtgggtagtggggacaggagcgaaaggatccgcacttataattatccgcaaaaccgcttgagcgagcatagaatcaatttaactctgtatagtttagaagaaatcatgctttcagggaatttagacgaagtgatcaaccctttaatcgctcatgctcaaagccagtttgaa

SEQ ID NO: 2407 - DNA (genomic), 426 bp, Helicobacter pylori; double-stranded, circular
  misc_feature (B) LOCATION 1...426
  hypothetical: NO
  anti-sense: NO
atgacaaagactgctaaagtcaatgacatcgttcgtgattgggtcgttttagacgctaaagacaaagtttttggccgcttgatcactgaaatcgctgtgcttttaagaggcaaacaccgccctttttacactcctaatgtggattgtggggattttgtggtggttatcaacgccaataaggttaaattttcaggcatgaagttagaggataaagagtattttacccattcaggctattttggcagcactaagagcaagactctccaagaaatgctagaaaaaacccctgaaaagctctaccacttagccgttaggggcatgctccctaaaacgaaattagggaaagcgatgattaaaaaactcaaagtttatcgtgatgacaagcaccctcacaccgcacaaactagcaaaaaggacgctaaatga

SEQ ID NO: 2408 - DNA (genomic), 441 bp, Helicobacter pylori; double-stranded, circular
  misc_feature (B) LOCATION 1...441
  hypothetical: NO
  anti-sense: NO
ttttatcaaaggattcttatgacaaagactgctaaagtcaatgacatcgttcgtgattgggtcgttttagacgctaaagacaaagtttttggccgcttgatcactgaaatcgctgtgcttttaagaggcaaacaccgccctttttacactcctaatgtggattgtggggattttgtggtggttatcaacgccaataaggttaaattttcaggcatgaagttagaggataaagagtattttacccattcaggctattttggcagcactaagagcaagactctccaagaaatgctagaaaaaacccctgaaaagctctaccacttagccgttaggggcatgctccctaaaacgaaattagggaaagcgatgattaaaaaactcaaagtttatcgtgatgacaagcaccctcacaccgcacaaactagcaaaaaggacgctaaa

SEQ ID NO: 2409 - DNA (genomic), 270 bp, Helicobacter pylori; double-stranded, circular
  misc_feature (B) LOCATION 1...270
  hypothetical: NO
  anti-sense: NO
atggcaaatcataagtccgcagaaaagcgaatcagacagaccattaaaagaaccgaacgcaacaggttctataaaactaaagttaaaaatatcattaaggccgtgcgtgaagcggtcgccatcaatgatgtagcaaaagctcaagagcgtttgaaaatcgctaataaagagttgcataaatttgtcagcaaggggattttaaagaaaaacaccgcttctaggaaagtctcaaggcttaacgcttcagtgaaaaaaatcgctctcgcttag

SEQ ID NO: 2410 - DNA (genomic), 276 bp, Helicobacter pylori; double-stranded, circular
  misc_feature (B) LOCATION 1...276
  hypothetical: NO
  anti-sense: NO
aacaaggctatggcaaatcataagtccgcagaaaagcgaatcagacagaccattaaaagaaccgaacgcaacaggttctataaaactaaagttaaaaatatcattaaggccgtgcgtgaagcggtcgccatcaatgatgtagcaaaagctcaagagcgtttgaaaatcgctaataaagagttgcataaatttgtcagcaaggggattttaaagaaaaacaccgcttctaggaaagtctcaaggcttaacgcttcagtgaaaaaaatcgctctcgct

SEQ ID NO: 2411 - DNA (genomic), 390 bp, Helicobacter pylori; double-stranded, circular
  misc_feature (B) LOCATION 1...390
  hypothetical: NO
  anti-sense: NO
atgagaaaaatctatgctaccggtaaaagaaaaaccgctatcgctaaagtgtggctcactcccggtaaaggcgaattgagtatcaatgaacagagcttgaatcaatggttaggcgggcatgaagccattaaaatgaaagtcatgcagcccttgcttttaaccaaacaagagcaatctgtggatattaaagcggtggtttttggtgggggctactcagcgcaagcggaagccttaaggcatggcatttctaaagctttgaacgcttatgatattgcttttagagccattttaaaacctaaaggcttgctcactagggattcaagggtggttgaacgcaaaaaatatggtaaaagaaaggccagaagaagcccacaattctccaaaaggtaa

SEQ ID NO: 2412 - DNA (genomic), 387 bp, Helicobacter pylori; double-stranded, circular
  misc_feature (B) LOCATION 1...387
  hypothetical: NO
  anti-sense: NO
atgagaaaaatctatgctaccggtaaaagaaaaaccgctatcgctaaagtgtggctcactcccggtaaaggcgaattgagtatcaatgaacagagcttgaatcaatggttaggcgggcatgaagccattaaaatgaaagtcatgcagcccttgcttttaaccaaacaagagcaatctgtggatattaaagcggtggtttttggtgggggctactcagcgcaagcggaagccttaaggcatggcatttctaaagctttgaacgcttatgatattgcttttagagccattttaaaacctaaaggcttgctcactagggattcaagggtggttgaacgcaaaaaatatggtaaaagaaaggccagaagaagcccacaattctccaaaagg

SEQ ID NO: 2413 - DNA (genomic), 486 bp, Helicobacter pylori; double-stranded, circular
  misc_feature (B) LOCATION 1...486
  hypothetical: NO
  anti-sense: NO
atgccagacgagctaagggcagaaaaaagctttccgtctaaaccctatgactctttaaaaaacaaaagcgagtttgatagggtttatagaaaaggttttaaaaaacacaacccttttttttcgctctttgttttggatttatcaaaagagccaccaaaagaaaaagagggctttaaagatccgctctcttgtaggcttaaagaccgaaatacgctttgtttgttaggtttgagcgtgtccaaaaaagtcggcaacgccgtgaaacggaacctcatcaaacgccgtttgcgatcactggttacaaggcatgccgctctttgtcaagggtttgctttggtgtttgtgcctagaagcgattgttaccatttggatttttgggctttagaaaaacattttttagaaatgctaacttccattaaagactatatgaacaaagccttaaaagatttgaaaaaaggaatgactcatacccatgcgaaacaataa

SEQ ID NO: 2414 - DNA (genomic), 486 bp, Helicobacter pylori; double-stranded, circular
  misc_feature (B) LOCATION 1...486
  hypothetical: NO
  anti-sense: NO
ttaatgccagacgagctaagggcagaaaaaagctttccgtctaaaccctatgactctttaaaaaacaaaagcgagtttgatagggtttatagaaaaggttttaaaaaacacaacccttttttttcgctctttgttttggatttatcaaaagagccaccaaaagaaaaagagggctttaaagatccgctctcttgtaggcttaaagaccgaaatacgctttgtttgttaggtttgagcgtgtccaaaaaagtcggcaacgccgtgaaacggaacctcatcaaacgccgtttgcgatcactggttacaaggcatgccgctctttgtcaagggtttgctttggtgtttgtgcctagaagcgattgttaccatttggatttttgggctttagaaaaacattttttagaaatgctaacttccattaaagactatatgaacaaagccttaaaagatttgaaaaaaggaatgactcatacccatgcgaaacaa

SEQ ID NO: 2415 - DNA (genomic), 342 bp, Helicobacter pylori; double-stranded, circular
  misc_feature (B) LOCATION 1...342
  hypothetical: NO
  anti-sense: NO
atgaaacgagttcttttaggagagtttatggaaaaaatcaggttgaagctcaaagcttatgaccatagagtgttggatcgctctgttgtggctatcgtggaagccgtaaagcgctcaggttctgaaattagagggcctattcctttaccgactaagaataagcgttacaccgttttgcgctccccacatgtcaataaggattcaagagagcagtttgagattagggtttatagccgattgattgatattatctcggccaccccagaaaccgtggatagcttgatgaagttggacttagctcctgaagtggatgtagaagtaacctctatggaaacgaagtag

SEQ ID NO: 2416 - DNA (genomic), 342 bp, Helicobacter pylori; double-stranded, circular
  misc_feature (B) LOCATION 1...342
  hypothetical: NO
  anti-sense: NO
cgaatgatacgagttcttttaggagagtttatggaaaaaatcaggttgaagctcaaagcttatgaccatagagtgttggatcgctctgttgtggctatcgtggaagccgtaaagcgctcaggttttgaaattagagggcctattcctttaccgactaagaataagcgttacaccgttttgcgctccccacatgtcaataaggattcaagagagcagtttgagattagggtttatagccgattgattgatattatttcggccaccccagaaaccgtggatagcttgatgaagttggacttagctcctgaagtggatgtagaagtaacctctatggaaacgaag

SEQ ID NO: 2417 - DNA (genomic), 489 bp, Helicobacter pylori; double-stranded, circular
  misc_feature (B) LOCATION 1...489
  hypothetical: NO
  anti-sense: NO
atgaccgcacacacgccttgtttcaggagcgaagcagggagcgctggaaaggatacaagggggatgataagacagcaccagtttgataaagtagagcttgtggctatcacgcaccctaaagaaagcgatgcgatgcaagagcatatgctagagagcgcgagcgaaattttaaaggctttggaattaccgcaccggttcgtgcaattgtgcagcggggatttaggctttagcgcgagcaacacgatagacattgaagtgtggctgcctgggcaaaattgttacagagaaatcagctccgtgtctaacacgagggattttcaggctaggcgcgccaaaatccgcttcaaagaaaatcaaaaaaaccaattagtacacaccttaaacggctcttctttagcggtaggaaggacgatggtcgctttaatggaaaaccaccagcaagcggatgggagcatccacattcctaaggcgttagaaaaatacctttaa

SEQ ID NO: 2418 - DNA (genomic), 486 bp, Helicobacter pylori; double-stranded, circular
  misc_feature (B) LOCATION 1...486
  hypothetical: NO
  anti-sense: NO
atgaccgcacacacgccttgtttcaggagcgaagcagggagcgctggaaaggatacaagggggatgataagacagcaccagtttgataaagtagagcttgtggctatcacgcaccctaaagaaagcgatgcgatgcaagagcatatgctagagagcgcgagcgaaattttaaaggctttggaattaccgcaccggttcgtgcaattgtgcagcggggatttaggctttagcgcgagcaacacgatagacattgaagtgtggctgcctgggcaaaattgttacagagaaatcagctccgtgtctaacacgagggattttcaggctaggcgcgccaaaatccgcttcaaagaaaatcaaaaaaaccaattagtacacaccttaaacggctcttctttagcggtaggaaggacgatggtcgctttaatggaaaaccaccagcaagcggatgggagcatccacattcctaaggcgttagaaaaatacctt

SEQ ID NO: 2419 - DNA (genomic), 1071 bp, Helicobacter pylori; double-stranded, circular
  misc_feature (B) LOCATION 1...1071
  hypothetical: NO
  anti-sense: NO
ttggtattaaaatggctccaaaaaatggaaacaagcgatctcaaaaaagagctagaaaacaataaaatcaaactgaatgagctttccaaaagcgtgggcgaagcagaacaggaaatggatttaaagctttccataatccctaatttagtggatgaaaaaacccctttaggcgctagcgaagaagacaatatagaaattaaaaaaatcttaaccccaagaaattttactttcaaacccaaagagcattttgaactcgctcaacaaaacggttggattgattttgaaagcggcgtgaaactcgccaaaagccgtttttcggtcattaggggttttggggcgaaaatttatcgcgcgctcattcatttaatgttagattttaatgaaaaaaatggctttgaaatcatttacacgccggcgttagtgaatgaaaaaatgctttttgggaccgggcaattacccaaattcaaagaagatgttttcaaaatagaaaatgaaaatttgtatctgatccccaccgctgaagtaacgctcaccaatttatacaacgacaccattattagcgttgaaaacctccccattaaaatgaccgcacacacgccttgtttcaggagcgaagcagggagcgctggaaaggatacaagggggatgataagacagcaccagtttgataaagtagagcttgtggctatcacgcaccctaaagaaagcgatgcgatgcaagagcatatgctagagagcgcgagcgaaattttaaaggctttggaattaccgcaccggttcgtgcaattgtgcagcggggatttaggctttagcgcgagcaacacgatagacattgaagtgtggctgcctgggcaaaattgttacagagaaatcagctccgtgtctaacacgagggattttcaggctaggcgcgccaaaatccgcttcaaagaaaatcaaaaaaaccaattagtacacaccttaaacggctcttctttagcggtaggaaggacgatggtcgctttaatggaaaaccaccagcaagcggatgggagcatccacattcctaaggcgttagaaaaatacctttaa

SEQ ID NO: 2420 - DNA (genomic), 1248 bp, Helicobacter pylori; double-stranded, circular
  misc_feature (B) LOCATION 1...1248
  hypothetical: NO
  anti-sense: NO
atgattgatagaaaacttttattgcaagattttgacaaggtggctctttctttaaaaaagcgtaaccatgcgatggacgatgaattagagcgtttgcgcgaagccatcgcacattataaaaagcaactcattgaattagaaggcttgcaggcctttcaaaacaaggtttctaaagagtttggtattaaaatggctcaaaaaatggatacaagcgatctcaaaaaagagctagaaaacaataaaatcaaactgaatgagctttccaaaagcgtgggcgaagcagaacaggaaatggatttaaagctttccataatccctaatttagtggatgaaaaaacccctttaggcgctagcgaagaagacaatatagaaattaaaaaaatcttaaccccaagaaattttactttcaaacccaaagagcattttgaactcgctcaacaaaacggttggattgattttgaaagcggcgtgaaactcgccaaaagccgtttttcggtcattaggggttttggggcgaaaatttatcgcgcgctcattcatttaatgttagattttaatgaaaaaaatggctttgaaatcatttacacgccggcgttagtgaatgaaaaaatgctttttgggaccgggcaattacccaaattcaaagaagatgttttcaaaatagaaaatgaaaatttgtatctgatccccaccgctgaagtaacgctcaccaatttatacaacgacaccattattagcgttgaaaacctccccattaaaatgaccgcacacacgccttgtttcaggagcgaagcagggagcgctggaaaggatacaagggggatgataagacagcaccagtttgataaagtagagcttgtggctatcacgcaccctaaagaaagcgatgcgatgcaagagcatatgctagagagcgcgagcgaaattttaaaggctttggaattaccgcaccggttcgtgcaattgtgcagcggggatttaggctttagcgcgagcaacacgatagacattgaagtgtggctgcctgggcaaaattgttacagagaaatcagctccgtgtctaacacgagggattttcaggctaggcgcgccaaaatccgcttcaaagaaaatcaaaaaaaccaattagtacacaccttaaacggctcttctttagcggtaggaaggacgatggtcgctttaatggaaaaccaccagcaagcggatgggagcatccacattcctaaggcgttagaaaaatacctttaa

SEQ ID NO: 2421 - DNA (genomic), 480 bp, Helicobacter pylori; double-stranded, circular
  misc_feature (B) LOCATION 1...480
  hypothetical: NO
  anti-sense: NO
attcgctcgttagcgagctggatctttctttcattttttctcccaaacagcaacgcttatttgtgcgtttataaggattttatcttactcaagccccaaacttacatgaatttaagcggtgagagcgttttaagcgctaaaaatttttacaaaactaaagagcttttaattgtccatgacgacttggatttacctttaggcgttgtgaagtttaaaaagggtggggggaatggggggcataatggcctaaaatccattgatgccttatgttctaattcttattaccgcttgagagtggggatttctaaagggatcaatatcactgagcatgtgctttcaaaattccacaacaacgaagagcctttaaaaaacgctgcgtttgaacatgccaaaaacgccttaaaattttttatagaaagccatgattttaacgctacgcaaaatcgtttcacgcttaaaaaacctttacaaatagaaagt

SEQ ID NO: 2422 - DNA (genomic), 561 bp, Helicobacter pylori; double-stranded, circular
  misc_feature (B) LOCATION 1...561
  hypothetical: NO
  anti-sense: NO
atgacgcttttagtgggtttaggcaaccctactttgcgttacgatcacaccagacacaacgctggttttgatattttagattcgctcgttagcgagctggatctttctttcattttttctcccaaacacaacgcttatttgtgcgtttataaggattttatcttactcaagccccaaacttacatgaatttaagcggtgagagcgttttaagcgctaaaaatttttacaaaactaaagagcttttaattgtccatgacgacttggatttacctttaggcgttgtgaagtttaaaaagggtggggggaatggggggcataatggcctaaaatccattgatgccttatgttctaattcttattaccgcttgagagtggggatttctaaagggatcaatatcactgagcatgtgctttcaaaattccacaacaacgaagagcctttaaaaaacgctgcgtttgaacatgccaaaaacgccttaaaattttttatagaaagccatgattttaacgctacgcaaaatcgtttcacgcttaaaaaacctttacaaatagaaagttag

SEQ ID NO: 2423 - DNA (genomic), 438 bp, Helicobacter pylori; double-stranded, circular
  misc_feature (B) LOCATION 1...438
  hypothetical: NO
  anti-sense: NO
atgcgcatcgtatttatgggaacgcctagttttgctgaagtgatcttaagggcgttggttgaaaatgaagataaaaagatagaagtggtggggctattcactcaaagggacaaaccttttgggcgcaaaaaagaattgaaagccccagagactaaaacatacattttagaaaatcatttaaatattcccattttccagccgcaaagtttgaaagagcctgaagttcaaatcttaaaaggtttgaagcctgattttatcgtggtggtggcttatggtaagattttgcctaaagaggttttaaccatcgctccttgcattaatttgcatgcgtcgttattgcccaaatacaggggggcttcgcccattcatgagatgatactcaatgacgataggatttatggcataagcaccatgcttatggaktttggaattggatag

SEQ ID NO: 2424 - DNA (genomic), 918 bp, Helicobacter pylori; double-stranded, circular
  misc_feature (B) LOCATION 1...918
  hypothetical: NO
  anti-sense: NO
atgcgcatcgtatttatgggaacgcctagttttgctgaagtgatcttaagggcgttggttgaaaatgaagataaaaagatagaagtggtggggctattcactcaaagggacaaaccttttgggcgcaaaaaagaattgaaagccccagagactaaaacatacattttagaaaatcatttaaatattcccattttccagccgcaaagtttgaaagagcctgaagttcaaatcttaaaaggtttgaagcctgattttatcgtggtggtggcttatggtaagattttgcctaaagaggttttaaccatcgctccttgcattaatttgcatgcgtcgttattgcccaaatacaggggggcttcgcccattcatgagatgatactcaatgacgataggatttatggcataagcaccatgcttatggatttggaattggatagcggggatattttagaaagcgcttcttttttaagagaagattatttggatttagacgctttaagtttaaaattagcgcgcatgggggcgactctgcttctttcaacgctcaaaaattttcattccatcacaagaaagcctcaagatcacatgcaggctagtttttgtaaaaaaatcgccaaggccgatgggttagtgggttttaaagacgctaaaaacttgtttttaaaatcgcttgcgtttaaatcttggccagaaatctttttagaaaatagccttaaacttttagaagtggagttagtggagaatgaaaagagccacaaggaaggcgagattttagcaattgatgaaagaggcgttcttgtaggttgtttgaaaggcagcgtgcgtatagcaaggttgcaagcggtgggtaaaaagcctttgaaagcgaaggattatttgaatggcaggcgtttgaaagtgggcggtattctaacatga

SEQ ID NO: 2425 - DNA (genomic), 960 bp, Helicobacter pylori; double-stranded, circular
  misc_feature (B) LOCATION 1...960
  hypothetical: NO
  anti-sense: NO
aatgatgatgagaataaagtaattgaattaaaaacaaggaataacatgcgcatcgtatttatgggaacgcctagttttgctgaagtgatcttaagggcgttggttgaaaatgaagataaaaagatagaagtggtggggctattcactcaaagggacaaaccttttgggcgcaaaaaagaattgaaagccccagagactaaaacatacattttagaaaatcatttaaatattcccattttccagccgcaaagtttgaaagagcctgaagttcaaatcttaaaaggtttgaagcctgattttatcgtggtggtggcttatggtaagattttgcctaaagaggttttaaccatcgctccttgcattaatttgcatgcgtcgttattgcccaaatacaggggggcttcgcccattcatgagatgatactcaatgacgataggatttatggcataagcaccatgcttatggatttggaattggatagcggggatattttagaaagcgcttcttttttaagagaagattatttggatttagacgctttaagtttaaaattagcgcgcatgggggcgactctgcttctttcaacgctcaaaaattttcattccatcacaagaaagcctcaagatcacatgcaggctagtttttgtaaaaaaatcgccaaggccgatgggttagtgggttttaaagacgctaaaaacttgtttttaaaatcgcttgcgtttaaatcttggccagaaatctttttagaaaatagccttaaacttttagaagtggagttagtggagaatgaaaagagccacaaggaaggcgagattttagcaattgatgaaagaggcgttcttgtaggttgtttgaaaggcagcgtgcgtatagcaaggttgcaagcggtgggtaaaaagcctttgaaagcgaaggattatttgaatggcaggcgtttgaaagtgggcggtattctaaca

SEQ ID NO: 2426 - DNA (genomic), 195 bp, Helicobacter pylori; double-stranded, circular
  misc_feature (B) LOCATION 1...195
  hypothetical: NO
  anti-sense: NO
atgttcatgcccctgttggcaaggcgagttttcctgaagaaaaaatcgaagaaaacatgcttgagtgtggttaaaacgatcaaccgtctaaaacccagtagcgcgaaaggcgaatatattagaaatgccgctctctcgctcaccatgtcgccgtcagtgaatttggacgcacaggaattgatggacattaaatag

SEQ ID NO: 2427 - DNA (genomic), 198 bp, Helicobacter pylori; double-stranded, circular
  misc_feature (B) LOCATION 1...198
  hypothetical: NO
  anti-sense: NO
agggtaatgttcatgcccctgttggcaaggcgagttttcctgaagaaaaaatcgaagaaaacatgcttgagtgtggttaaaacgatcaaccgtctaaaacccagtagcgcgaaaggcgaatatattagaaatgccgctctctcgctcaccatgtcgccgtcagtgaatttggacgcacaggaattgatggacattaaa

SEQ ID NO: 2428 - DNA (genomic), 222 bp, Helicobacter pylori; double-stranded, circular
  misc_feature (B) LOCATION 1...222
  hypothetical: NO
  anti-sense: NO
ttgaattttagggtggataggacgggtaatgttcatgcccctattggcaaggcgagttttcctgaagaaaaaatcaaagaaaacatgcttgagttggttaaaacgatcaaccgtctaaaacccagtagcgcgaaaggcaaatatattagaaatgccgctctctcgctcaccatgtcgccttcagtgaatttggacgcacaggaattgatggacattaaatag

SEQ ID NO: 2429 - DNA (genomic), 378 bp, Helicobacter pylori; double-stranded, circular
  misc_feature (B) LOCATION 1...378
  hypothetical: NO
  anti-sense: NO
atggcaatttcaaaagaagaagtgttagagtatattggttcattgagcgttttggagctttctgaattggttaaaatgtttgaggaaaaatttggcgtgagtgcgactccaacggtcgtagcgggtgcggctgtagctggcggtgcagcggctgagagcgaagaaaaaaccgaatttaatgtgattttggccgatagcggcgctgaaaaaatcaaggtgattaaagtggttcgtgaaatcaccgggcttggcttgaaagaagctaaagacgctaccgaaaaaacccctcatgtgcttaaagagggcgtgaataaagaagaagctgaaaccatcaagaagaaacttgaagaagtaggtgctaaggttgaagtcaagtaa

SEQ ID NO: 2430 - DNA (genomic), 213 bp, Helicobacter pylori; double-stranded, circular
  misc_feature (B) LOCATION 1...213
  hypothetical: NO
  anti-sense: NO
cataaagtagagctagtcgctaacttaaaatcgcaatttgatagtgccaaagcccttttaatttgcgattataagggtcttagcgtgaaaaagttggaagctttaaggaataaggctcgcatccaaggcattaaagtgcaagtgattaaaaacacgcttgctcatattgccatgaaagaagtgggttgtgctgatttggatttgaaagaaacc

SEQ ID NO: 2431 - DNA (genomic), 495 bp, Helicobacter pylori; double-stranded, circular
  misc_feature (B) LOCATION 1...495
  hypothetical: NO
  anti-sense: NO
atgcaaaaacaacatcaaaggcagcataaagtagagctagtcgctaacttaaaatcgcaatttgatagtgccaaagcccttttaatttgcgattataagggtcttagcgtgaaaaagttggaagctttaaggaataaggctcgcattcaaggcattaaagtgcaagtgattaaaaacacgcttgctcatattgccatgaaagaagtgggttgtgctgatttggatttgaaagaaaccaatgtgtttttgtggggcgatgatcaaatcgctctctctaaactcgtgtttgatttccaaaaagagcataaagatcactttgtgttgaaagcgggcttgtttgataaagaaagcgttagcgtagctcatgtggaagcggtttcaaaactcccgagcaaagaagagcttatgggaatgttgctttctgtttggacggctccagcacgctattttgtgaccggtttagacaatttgcgtaaagcgaaagaagaaaactaa

SEQ ID NO: 2432 - DNA (genomic), 249 bp, Helicobacter pylori; double-stranded, circular
  misc_feature (B) LOCATION 1...249
  hypothetical: NO
  anti-sense: NO
ttgaaaaacatttatgtagggaatttggtttatagcgctactagtgagcaagttaaggagcttttcagtcaatttggcaaagtttttaatgtcaaactgatttatgacagagaaacgaagaaacctaaaggttttggctttgtagaaatgcaagaagagggcgttagggaagcgattgctaaattggacaatacggattttatgggcagaacgattagggtaaccgaagccaatcctaaaaagtcttaa

SEQ ID NO: 2433 - DNA (genomic), 318 bp, Helicobacter pylori; double-stranded, circular
  misc_feature (B) LOCATION 1...318
  hypothetical: NO
  anti-sense: NO
aagtgttacttctttataactttttcatattcttatgggtatgttgtcatttttttaccggagaattttatcttgaaaaacatttatgtagggaatttggtttatagcgctactagtgagcaagttaaggagcttttcagtcaatttggcaaagtttttaatgtcaaactgatttatgacagagaaacgaagaaacctaaaggttttggctttgtagaaatgcaagaagagggcgttagggaagcgattgctaaattggacaatacggattttatgggcagaacgattagggtaaccgaagccaatcctaaaaagtct

SEQ ID NO: 2434 - DNA (genomic), 315 bp, Helicobacter pylori; double-stranded, circular
  misc_feature (B) LOCATION 1...315
  hypothetical: NO
  anti-sense: NO
gtaacgctatcagtaaagacagatcaaaaaatcattttaggcaatcaaaaggttttaaaagcccgcttgagcgatgcggttttcttttatgaaaacgatctcaaaaagcctttagataacgcccctttagagagtgtggtttttgtgcaaggtttagggactttaaaagataaaatggagcgagaatcaatcatcgctcaatacttgacgcaaaaatatatttcatcttttagcatgcctttagaaaaagcccttagtttattagcccagccatttcaaatctctttagtcgaggtttctcatatttggtgggtt

SEQ ID NO: 2435 - DNA (genomic), 519 bp, Helicobacter pylori; double-stranded, circular
  misc_feature (B) LOCATION 1...519
  hypothetical: NO
  anti-sense: NO
gtgtttttagttcaatcgtgggctttgagcttgaaaatagacagcctgttttctctttttagcgtgggtaaaatccctagcggatctaaagatccctttgcgttaaggcgtttgagttttgggctattgaaaatcatcgcgcattacgggttagaatttgatttgaaagcggatttaaaaaacctctttgaaaaagtgggcgtttatcaaagctttgatttagaggttttagaaaagtttttactggagcgctttcataatttaatagattgtaacctctctattataagaagtgtgttaaacaccaacgagcgagacattgttaaaatcattcaaaaagtcaaagccttaaaacgctttttagacaatcctaagaacgctcaaaaaaaagagttgctttttagcgctttcaaacgattagctaatatcaataaagacagaaaccctaacgaatcaagcgggttttctacgagtcttttcaaagaattacaagagcatgccctttttgaagcgttcaac

SEQ ID NO: 2436 - DNA (genomic), 753 bp, Helicobacter pylori; double-stranded, circular
  misc_feature (B) LOCATION 1...753
  hypothetical: NO
  anti-sense: NO
tatttgcccgcaagcgaaaacgcccccttgccctctagtgtttttagttcaatcgtggctttgagcttgaaaatagacagcctgttttctctttttagcgtgggtaaaatccctagcggatctaaagatccctttgcgttaaggcgtttgagttttgggctattgaaaatcatcgcgcattacgggttagaatttgatttgaaagcggatttaaaaaacctctttgaaaaagtgggcgtttatcaaagctttgatttagaggttttagaaaagtttttactggagcgctttcataatttaatagattgtaacctctctattataagaagtgtgttaaacaccaacgagcgagacattgttaaaatcattcaaaaagtcaaagccttaaaacgctttttagacaatcctaagaacgctcaaaaaaaagagttgctttttagcgctttcaaacgattagctaatatcaataaagacagaaaccctaacgaatcaagcgggttttctacgagtcttttcaaagaattacaagagcatgccctttttgaagcgttcaacgcgatcaaaacaagcacttttgagagtttggatagcaaaatagaggcttattttggtttgcatgcgcctttagaagaatattttaaaagcgtgctagtcatggataaagatatagaaatccaaaaaaatcgtaaaaatttcttgtggggcgtgtatcaaagtttcttagagattggggatattaaagaaattgcgatt

SEQ ID NO: 2437 - DNA (genomic), 1062 bp, Helicobacter pylori; double-stranded, circular
  misc_feature (B) LOCATION 1...1062
  hypothetical: NO
  anti-sense: NO
ttttgttttttagggaggattgagattttgcattcagatgaattgttagtagaggttttagttgaagaattacccgcgcaagcgctattgaatgaatataaagaaatgcctaaaaaactccacgctctttttcaaaaacgcgctttagaagtgggaaatatagaggttttttacacccctaggcgcttgtgtttgttcgttaaagactttccccttttaacgcaagaaactaaagaggaattttttggccctcccgttaaaatcgcatgcaacaatcaagataaaacgcaagggttgaacgcactgggtttagggttttatcaaaaattaggactaaaagatcaccagcatttccaaacagcgtttaaaagcaataaagaagtgctttatcacgctaaaatccacgccaaacagcccacaaaagatctgatcatgcccattgtgttagagtttttagagggtttgaatttcgggaagtccatgcgttggggcaatgtggaaaaaagctttatcaggcccattcataatatttgcgtgttgtttaatggggaaaattttaacgatattgaaatcaaagagtatggttttaaaaccaagcaagccaccaaagcgcaccgacaagagggttttgattttattgaagtggatagccctaaagcgtattttgaagttttagaaaaaaaccatgtcattttagaccctaaaaagcgcgaagctaaaatcttgcaagaaattaaaggattggaaaaaaagcatgacattatcgtagaggttgatagggatttattagatgaggttgtagcgatcacggaataccccacggcgcttttgggggagtttgacaaggcgtttttaaaattacccagtgaaatcatcaccacttccatgaaagaaaaccaacgctattttgcgatcttcaatcaaaaaagccaagaagaaagcccaacattgcataacggctttattgtggtgagtaacgctatcagtaaagacagatcaaaaaatcattttaggcaatcaaaaggttttaaaagcccgcttgagcgatgcggttttctttta

SEQ ID NO: 2438 - DNA (genomic), 2106 bp, Helicobacter pylori; double-stranded, circular
  misc_feature (B) LOCATION 1...2106
  hypothetical: NO
  anti-sense: NO
ttgcattcagatgaattgttagtagaggttttagttgaagaattacccgcgcaagcgctattgaatgaatataaagaaatgcctaaaaaactccacgctctttttcaaaaacgcgctttagaagtgggaaatatagaggttttttacacccctaggcgcttgtgtttgttcgttaaagactttccccttttaacgcaagaaactaaagaggaattttttggccctcccgttaaaatcgcatgcaacaatcaagataaaacgcaagggttgaacgcactgggtttagggttttatcaaaaattaggactaaaagatcaccagcatttccaaacagcgtttaaaagcaataaagaagtgctttatcacgctaaaatccacgccaaacagcccacaaaagatctgatcatgcccattgtgttagagtttttagagggtttgaatttcgggaagtccatgcgttggggcaatgtggaaaaaagctttatcaggcccattcataatatttgcgtgttgtttaatggggaaaattttaacgatattgaaatcaaagagtatggttttaaaaccaagcaagccaccaaagcgcaccgacaagagggttttgattttattgaagtggatagccctaaagcgtattttgaagttttagaaaaaaaccatgtcattttagaccctaaaaagcgcgaagctaaaatcttgcaagaaattaaaggattggaaaaaaagcatgacattatcgtagaggttgatagggatttattagatgaggttgtagcgatcacggaataccccacggcgcttttgggggagtttgacaaggcgtttttaaaattacccagtgaaatcatcaccacttccatgaaagaaaaccaacgctattttgcgatcttcaatcaaaaaagccaagaagaaagcccaacattgcataacggctttattgtggtgagtaacgctatcagtaaagacaagcaaaaaatcattttaggcaatcaaaaggttttaaaagcccgcttgagcgatgcggttttcttttatgaaaacgatctcaaaaagcctttagataacgcccctttagagagtgtggtttttgtgcaaggtttagggactttaaaagataaaatggagcgagaatcaatcatcgctcaatacttgacgcaaaaatatatttcatctttaagcatgcctttagaaaaagcccttgagttaattagccgagccattcaaatcgctaaggcggatttactcagtgaagtggtgtatgaatttagcgagcttcaagggatcatgggctattactacgctttaaaacaaaatgaaaacgaattggtcgccttgagtgtgaaagagcagtatttgcccgcaagcgaaaacgcccccttgccctctagtgtttttagttcaatcgtggctttgagcttgaaaatagacagcctgttttctctttttagcgtgggtaaaatccctagcggatctaaagatccctttgcgttaaggcgtttgagttttgggctattgaaaatcatcgcgcattacgggttagaatttgatttgaaagcggatttaaaaaacctctttgaaaaagtgggcgtttatcaaagctttgatttagaggttttagaaaagtttttactggagcgctttcataatttaatagattgtaacctctctattataagaagtgtgttaaacaccaacgagcgagacattgttaaaatcattcaaaaagtcaaagccttaaaacgctttttagacaatcctaagaacgctcaaaaaaaagagttgctttttagcgctttcaaacgattagctaatatcaataaagacagaaaccctaacgaatcaagcgggttttctacgagtcttttcaaagaattacaagagcatgccctttttgaagcgttcaacgcgatcaaaacaagcacttttgagagtttggatagcaaaatagaggcttattttggtttgcatgcgcctttagaagaatattttaaaagcgtgctagtcatggataaagatatagaaatccaaaaaaatcgtaaaaatttcttgtggggcgtgtatcaaagtttcttagagattggggatattaaagaaattgcgatttag

SEQ ID NO: 2439 - DNA (genomic), 360 bp, Helicobacter pylori; double-stranded, circular
  misc_feature (B) LOCATION 1...360
  hypothetical: NO
  anti-sense: NO
atgaatacaagscccttaatcgctacgcttttgcaagcgcctttgcatgttttagggattagagagccagtttcttttcagcctttttaccccaaaacagaaaagcctaatcgccctcaaaagttcgcgcatgtttctagcatgcccagtttggaatttttagaaaaattggtgatccgctaccttttagaagacagaagcctattggatttagcggtgggttatatccatagtggggtattcttgcataaaaaacaagaatttgacgctttatgtcaagaaaaattggacgaccctaaattagttgcgttattattagatgcgaatttacccctaaaaaaagggggttttgaaaaggaa

SEQ ID NO: 2440 - DNA (genomic), 1587 bp, Helicobacter pylori; double-stranded, circular
  misc_feature (B) LOCATION 1...1587
  hypothetical: NO
  anti-sense: NO
aaaatgattcttaaaagttccattgatcgccttttacaaacgatagatattgtagaagtcattagctcttatgtggatttgaggaaatcaggttcgaattacatggcttgttgcccttttcatgaagaaaggagcgcgagttttagcgtcaatcaagttaaagggttttactattgctttgggtgtggggcgagcggggatagcattaaatttgtgatggcgtttgaaaaactttcgtttgtggaagcgcttgagaaattagcccaccgattcaatatagctttagagtatgacaaaggcgtttattacgatcataaagaagattaccaccttttagaaatggtgagttcgttgtatcaagaagagctttttaacgccccgttttttttgaattatttgcaaaaaagagggcttagcatggagagcatcaaagcgtttaagttaggcttatgcacgaataaaattgattacggcattgaaaataaaggcttgaataaggacaaattgattgaattgggcgtgctaggcaagagcgataaagaggataaaacctatttgcgctttttggatcgcatcatgttccctatttatagccctagtgctcaagtggtgggttttggagggcgcaccttaaaagaaaaagcggccaagtatatcaattcgccccaaaataagctttttgataaatccagcttgctctatggctatcatttggctaaagaacacatttataaacaaaagcaggtcattgtaacagaagggtatttggatgtgattttattgcaccaggcgggttttaaaaacgccatagccacgcttgggacagctttaacgccatcgcatttgcccttgcttaaaaaaggcgatccagaaatccttttgagctatgatggggataaggcagggcggaatgcggcttataaagcgagcttgatgttagctaaagagcaaaggaaagggggggtgattttgtttgaaaacaacctagacccagcggatatgatcgctaatcatcagattgaaactttaaaaaattggctatcgcgccccatagctttcattgaatttgttttaaggcacatggcgggttcttatcttttagacgatcctttagaaaaagataaggcccttaaagaaatgttagggtttttgaaaaacttttccttgcttttacaaaatgaatacaagcccttaatcgctacgcttttgcaagcgcctttgcatgttttagggattagagagccagtttcttttcagcctttttaccccaaaacagaaaagcctaatcgccctcaaaagttcgcgcatgtttctagcatgcccagtttggaatttttagaaaaattggtgatccgctaccttttagaagacagaagcctattggatttagcggtgggttatatccatagtggggtattcttgcataaaaaacaagaatttgacgctttatgtcaagaaaaattggacgaccctaaattagttgcgttattattagatgcgaatttacccctaaaaaaagggggttttgaaaaggaattgcgtttgttgattttgcgctactttgagccgccaactcaaagaaatccc

SEQ ID NO: 2441 - DNA (genomic), 1680 bp, Helicobacter pylori; double-stranded, circular
  misc_feature (B) LOCATION 1...1680
  hypothetical: NO
  anti-sense: NO
atgattcttaaaagttccattgatcgccttttacaaacgatagatattgtagaagtcattagctcttatgtggatttgaggaaatcaggttcgaattacatggcttgttgcccttttcatgaagaaaggagcgcgagttttagcgtcaatcaagttaaagggttttactattgctttgggtgtggggcgagcggggatagcattaaatttgtgatggcgtttgaaaaactttcgtttgtggaagcgcttgagaaattagcccaccgattcaatatagctttagagtatgacaaaggcgtttattacgatcataaagaagattaccaccttttagaaatggtgagttcgttgtatcaagaagagctttttaacgccccgttttttttgaattatttgcaaaaaagagggcttagcatggagagcatcaaagcgtttaagttaggcttatgcacgaataaaattgattacggcattgaaaataaaggcttgaataaggacaaattgattgaattgggcgtgctaggcaagagcgataaagaggataaaacctatttgcgctttttggatcgcatcatgttccctatttatagccctagtgctcaagtggtgggttttggagggcgcaccttaaaagaaaaagcggccaagtatatcaattcgccccaaaataagctttttgataaatccagcttgctctatggctatcatttggctaaagaacacatttataaacaaaagcaggtcattgtaacagaagggtatttggatgtgattttattgcaccaggcgggttttaaaaacgccatagccacgcttgggacagctttaacgccatcgcatttgcccttgcttaaaaaaggcgatccagaaatccttttgagctatgatggggataaggcagggcggaatgcggcttataaagcgagcttgatgttagctaaagagcaaaggaaagggggggtgattttgtttgaaaacaacctagacccagcggatatgatcgctaatcatcagattgaaactttaaaaaattggctatcgcgccccatagctttcattgaatttgttttaaggcacatggcgggttcttatcttttagacgatcctttagaaaaagataaggcccttaaagaaatgttagggtttttgaaaaacttttccttgcttttacaaaatgaatacaagcccttaatcgctacgcttttgcaagcgcctttgcatgttttagggattagagagccagtttcttttcagcctttttaccccaaaacagaaaagcctaatcgccctcaaaagttcgcgcatgtttctagcatgcccagtttggaatttttagaaaaattggtgatccgctaccttttagaagacagaagcctattggatttagcggtgggttatatccatagtggggtattcttgcataaaaaacaagaatttgacgctttatgtcaagaaaaattggacgaccctaaattagttgcgttattattagatgcgaatttacccctaaaaaaagggggttttgaaaaggaattgcgtttgttgattttgcgctattttgagcgccaactcaaagaaatccctaaaagcccgctttcttttagcgaaaaaatgatctttttaaaaagggctcgccaggccattatgaaattaaaacaaggagaattagtcgccatatga

SEQ ID NO: 2442 - DNA (genomic), 417 bp, Helicobacter pylori; double-stranded, circular
  misc_feature (B) LOCATION 1...417
  hypothetical: NO
  anti-sense: NO
atggcgacacgaactcaagccaggggggctgtggttgaattgttgtatgcgtttgagagcggtaatgaagaaattaaaaaaatcgcttccagcatgttagaagaaaaaaagattaaaaacaaccagctcgctttcgctttaagcctttttaatggcgtgttagaaaaaatcaatgagattgacgctctcatcgaaccgcatttaaaagactgggatttcaagcgattagggagcatggaaaaggcgattttacgcttaggagcgtatgaaattggcttcacgcccacacaaaaccctatcatcatcaatgaatgcatagagcttggcaaactctacgctgagcctaacacccctaaatttttaaacgctatcttggattctttgagcaaaaagctcgctcaaaaacccttgatttaa

SEQ ID NO: 2443 - DNA (genomic), 441 bp, Helicobacter pylori; double-stranded, circular
  misc_feature (B) LOCATION 1...441
  hypothetical: NO
  anti-sense: NO
gcttgtgccaaactctcaaggattaaaatggcgacacgaactcaagccaggggggctgtggttgaattgttgtatgcgtttgagagcggtaatgaagaaattaaaaaaatcgcttccagcatgttagaagaaaaaaagattaaaaacaaccagctcgctttcgctttaagcctttttaatggcgtgttagaaaaaatcaatgagattgacgctctcatcgaaccgcatttaaaagactgggatttcaagcgattagggagcatggaaaaggcgattttacgcttaggagcgtatgaaattggcttcacgcccacacaaaaccctatcatcatcaatgaatgcatagagcttggcaaactctacgctgagcctaacacccctaaatttttaaacgctatcttggattctttgagcaaaaagctcgctcaaaaacccttgatt

SEQ ID NO: 2444 - DNA (genomic), 693 bp, Helicobacter pylori; double-stranded, circular
  misc_feature (B) LOCATION 1...693
  hypothetical: NO
  anti-sense: NO
atgatacaaatccatcacgctaacgcctttgaaatcatcaaggatttccaccagcaaaatttaaaagtggatgcgatcatcacagatcctccttacaacatttcggttaaaaacaatttctccaccctaaagagcgctaaaagacagggcatagactttggggaatgggataaaaatttcaagcttttagaatggatcgcacgctacgcctccttaatcaatccaaacggctgcatggtgattttttgctcttacaggttcataagctatatcgctgattttttagaagaaaacggctttgtagtcaaagactttatccaatgggttaaaaataatcccatgccaagaaacatccaccggcgctatgtccaagacacagaatttgccctatgggcggttaaaaagaaagccaaatgggtgtttaacaaacctaaaaatgaaaaatatttacggcccttgatcttaaaaagccctgtggtgagcgggattgaaagagtgaaacaccccacgcaaaaaagcctaaccttaatggaaaaaatcatttctacccacacaaaccctaatgacacagtgttagatcctttcatggggagcggcaccactggtttagcgtgcaaaaatttaaagcgaaattttatcggtatagaatcagaaaaagaatattttcaaatcgcgcaaaagcgtttgagctag

SEQ ID NO: 2445 - DNA (genomic), 702 bp, Helicobacter pylori; double-stranded, circular
  misc_feature (B) LOCATION 1...702
  hypothetical: NO
  anti-sense: NO
aaagcgcaagaaatgatacaaatccatcacgctaacgcctttgaaatcatcaaggatttccaccagcaaaatttaaaagtggatgcgatcatcacagatcctccttacaacatttcggttaaaaacaatttctccaccctaaagagcgctaaaagacagggcatagactttggggaatgggataaaaatttcaagcttttagaatggatcgcacgctacgcctccttaatcaatccaaacggctgcatggtgattttttgctcttacaggttcataagctatatcgctgattttttagaagaaaacggctttgtagtcaaagactttatccaatgggttaaaaataatcccatgccaagaaacatccaccggcgctatgtccaagacacagaatttgccctatgggcggttaaaaagaaagccaaatgggtgtttaacaaacctaaaaatgaaaaatatttacggcccttgatcttaaaaagccctgtggtgagcgggattgaaagagtgaaacaccccacgcaaaaaagcctaaccttaatggaaaaaatcatttctacccacacaaaccctaatgacacagtgttagatcctttcatggggagcggcaccactggtttagcgtgcaaaaatttaaagcgaaattttatcggtatagaatcagaaaaagaatattttcaaatcgcgcaaaagcgtttgagc

SEQ ID NO: 2446 - DNA (genomic), 1032 bp, Helicobacter pylori; double-stranded, circular
  misc_feature (B) LOCATION 1...1032
  hypothetical: NO
  anti-sense: NO
atgcaaaacttattgatacaagcagaaaatgcaatcgctctactttttttgttaaatgacaaaaacctaaaaggaaaaatagatttgatatatattgaccctccatttgctacaaacaatcattttactatcacaaatggtagagcaaccacaattagcaattctaagaatggcgatattgcttatagtgataaagtagtgggtatggattttatggaatttttaaaacaacgcctggtattgcttaaagaattgctttcagaacaaggctctatctatgtgcatacagattacaagatagggcattatgtcaaggtaatgttagatgaaatatttggcatacaaaattttagaaatgaaatcacacgcataaagtgcaatcctaaaaattttaaaaggataggctatggtaacataaaagatatgattttattttactctaaaggaaaaaatcccatttttaacgaacctaagatcccttatacgccacaagatttagaaaaacgattccctaaaattgacaaagataaaaggcgttacactaccgttccaatacatgctccaggagaagtggaaagtggcgaatgttctaaagcatttaaaggtatgctacctccaaaagggcggcattggcgcactgatattgccacacttgagcgttgggataaagaaggtttgattgagtattctaacaataataaccctagaaaaaaaatttatgccttagaacaagttggcaaaagagtccaagacatctgggaatttaaagacccacaatatccaagctaccctacagaaaaaaacgctcaattattagacttaatcattaaaacctcttctaataaagatagtattgttttagattgtttttgtggttctggaacaaccttaaaatctgcgtttttattgcaacgaaaatttataggcattgataattccgatttggctatccaagcttgcaaaaacaagcttgaaacaataacaaaagacttgtttgtttctcaaaatttttatgatttccttgttttttaa

SEQ ID NO: 2447 - DNA (genomic), 1038 bp, Helicobacter pylori; double-stranded, circular
  misc_feature (B) LOCATION 1...1038
  hypothetical: NO
  anti-sense: NO
ataagagaaatgcaaaacttattgatacaagcagaaaatgcaatcgctctactttttttgttaaatgacaaaaacctaaaaggaaaaatagatttgatatatattgaccctccatttgctacaaacaatcattttactatcacaaatggtagagcaaccacaattagcaattctaagaatggcgatattgcttatagtgataaagtagtgggtatggattttatggaatttttaaaacaacgcctggtattgcttaaagaattgctttcagaacaaggctctatctatgtgcatacagattacaagatagggcattatgtcaaggtaatgttagatgaaatatttggcatacaaaattttagaaatgaaatcacacgcataaagtgcaatcctaaaaattttaaaaggataggctatggtaacataaaagatatgattttattttactctaaaggaaaaaatcccatttttaacgaacctaagatcccttatacgccacaagatttagaaaaacgattccctaaaattgacaaagataaaaggcgttacactaccgttccaatacatgctccaggagaagtggaaagtggcgaatgttctaaagcatttaaaggtatgctacctccaaaagggcggcattggcgcactgatattgccacacttgagcgttgggataaagaaggtttgattgagtattctaacaataataaccctagaaaaaaaatttatgccttagaacaagttggcaaaagagtccaagacatctgggaatttaaagacccacaatatccaagctaccctacagaaaaaaacgctcaattattagacttaatcattaaaacctcttctaataaagatagtattgttttagattgtttttgtggttctggaacaaccttaaaatctgcgtttttattgcaacgaaaatttataggcattgataattccgatttggctatccaagcttgcaaaaacaagcttgaaacaataacaaaagacttgtttgtttctcaaaatttttatgatttccttgttttt

SEQ ID NO: 2448 - DNA (genomic), 537 bp, Helicobacter pylori; double-stranded, circular
  misc_feature (B) LOCATION 1...537
  hypothetical: NO
  anti-sense: NO
tctttgggaagattttattcggtcaagaaaagattaaaagcaacttgcaaatttctatttgcgcggctaaaaaacgccaagagagtttggatcacatgctctttttttggcccgcccggtttgggtaaaacttcaatcagccatatcatcgctaaagaaatggaaaccaatatcaaaatcaccgccgctcccatgatagaaaaaagcggtgatttagccgccattttgactaatttgcaagctaaagacattctttttattgatgaaatccaccgacttagcccggcgattgaagaggttttatacccggctatggaagattttagattggatattatcataggctcaggcccagccgctcaaaccattaaaattgatttgccccctttcacccttattggcgctaccactagagccggaatgctctctaaccccctaagagacagatttggcatgagttttaggatgcaattttatagccctagcgaactttccctcatcatcaaaaaagccgctgccaaactcttcctttacatc

SEQ ID NO: 2449 - DNA (genomic), 1011 bp, Helicobacter pylori; double-stranded, circular
  misc_feature (B) LOCATION 1...1011
  hypothetical: NO
  anti-sense: NO
atgaaagaacggatagtcaatttagaaaccttggattttgaaacttctcaagaagtgagtttgcgccctaatctttgggaagattttatcggtcaagaaaagattaaaagcaacttgcaaatttctatttgcgcggctaaaaaacgccaagagagtttggatcacatgctcttttttggcccgcccggtttgggtaaaacttcaatcagccatatcatcgctaaagaaatggaaaccaatatcaaaatcaccgccgctcccatgatagaaaaaagcggtgatttagccgccattttgactaatttgcaagctaaagacattctttttattgatgaaatccaccgacttagcccggcgattgaagaggttttatacccggctatggaagattttagattggatattatcataggctcaggcccagccgctcaaaccattaaaattgatttaccccctttcacccttattggcgctaccactagagccggaatgctctctaaccccctaagagacagatttggcatgagttttaggatgcaattttatagccctagcgaactttccctcatcatcaaaaaagccgctgccaaactcaaccaagacatcaaagaagaaagcgctgatgaaatcgctaaaaggagtagaggcacgccaaggatcgctttaaggcttttaaaaagggtgcgcgattttgcgctcgttaaaaattcaagcttaatggatttaagcatcactttgcatgctttgaatgaattaggcgtgaatgaattgggctttgatgaagcggatttggcgtatttatctttgttagctaacgctcaaggacgaccggtaggtttgaacacgattgcagcgtctatgagagaagatgaaggcacgattgaagacgtgattgagccttttttactcgctaatggttatttagagcgcacggctaaaggcagaatcgccacgcctaaaacccacgcgcttttaaaaatccccactttaaacccccaaactttattttaa

SEQ ID NO: 2450 - DNA (genomic), 210 bp, Helicobacter pylori; double-stranded, circular
  misc_feature (B) LOCATION 1...210
  hypothetical: NO
  anti-sense: NO
ttgccaaggcatagggatcaaatcgtctccaaagaacagcttttagacgctatttgggaagagcctgaaatggttacccctaatgtgattgaagtggctatcaatcaaatccgccaaaaaatggataaacccttggggatttccacggttgaaaccgtaaggcgcagaggctatcgtttttgttaccccaaaccggcgtgtgaagaataa

SEQ ID NO: 2451 - DNA (genomic), 213 bp, Helicobacter pylori; double-stranded, circular
  misc_feature (B) LOCATION 1...213
  hypothetical: NO
  anti-sense: NO
cccatcttgccaaggcatagggatcaaatcgtctccaaagaacagcttttagacgctatttgggaagagcctgaaatggttacccctaatgtgattgaagtggctatcaatcaaatccgccaaaaaatggataaacccttggggatttccacggttgaaaccgtaaggcgcagaggctatcgtttttgttaccccaaaccggcgtgtgaagaa

SEQ ID NO: 2452 - DNA (genomic), 477 bp, Helicobacter pylori; double-stranded, circular
  misc_feature (B) LOCATION 1...477
  hypothetical: NO
  anti-sense: NO
atgcgcgttctactgattgaaaaaaattctgttttaggtggagaaattgaaaagggcttaaatgttaaaggctttatggctgatgtaacagagagtttagaggatggggaataccttatggatattaggaattatgacttagttatggttagcgataaaaacgctttaagttttgtttctagaatcaaggagaaacattcttctattgttgttttagtttcttctgataatcctacaagcgaagaagaagtccatgcgtttgagcaaggcgcggacgattatatcgctaagccttaccgcagcattaaagctttagtcgcaaggattgaggctcgtttgaggttttggggttctaatgtgattgaaattggggatttgaccattagccctgatgaagaaaagattatttacaaggggcgtgaagttgaggttaaagggaagccctttgaagtactgacccatcttgccaaggcatag

SEQ ID NO: 2453 - DNA (genomic), 528 bp, Helicobacter pylori; double-stranded, circular
  misc_feature (B) LOCATION 1...528
  hypothetical: NO
  anti-sense: NO
atttatgatataatcagtgttcgaattactcttaaatgcaggagtccatacaccatgcgcgttctactgattgaaaaaaattctgttttaggtggagaaattgaaaagggcttaaatgttaaaggctttatggctgatgtaacagagagtttagaggatggggaataccttatggatattaggaattatgacttagttatggttagcgataaaaacgctttaagttttgtttctagaatcaaggagaaacattcttctattgttgttttagtttcttctgataatcctacaagcgaagaagaagtccatgcgtttgagcaaggcgcggacgattatatcgctaagccttaccgcagcattaaagctttagtcgcaaggattgaggctcgtttgaggttttggggttctaatgtgattgaaattggggatttgaccattagccctgatgaagaaaagattatttacaaggggcgtgaagttgaggttaaagggaagccctttgaagtactgacccatcttgccaaggca

SEQ ID NO: 2454 - DNA (genomic), 672 bp, Helicobacter pylori; double-stranded, circular
  misc_feature (B) LOCATION 1...672
  hypothetical: NO
  anti-sense: NO
atgcgcgttctactgattgaaaaaaattctgttttaggtggagaaattgaaaagggcttaaatgttaaaggctttatggctgatgtaacagagagtttagaggatggggaataccttatggatattaggaattatgacttagttatggttagcgataaaaacgctttaagttttgtttctagaatcaaggagaaacattcttctattgttgttttagtttcttctgataatcctacaagcgaagaagaagtccatgcgtttgagcaaggcgcggacgattatatcgctaagccttaccgcagcattaaagctttagtcgcaaggattgaggctcgtttgaggttttggggttctaatgtgattgaaattggggatttgaccattagccctgatgaagaaaagattatttacaaggggcgtgaagttgaggttaaagggaagccctttgaagtactgacccatcttgccaggcatagggatcaaatcgtctccaaagaacagcttttagacgctatttgggaagagcctgaaatggttacccctaatgtgattgaagtggctatcaatcaaatccgccaaaaaatggataaacccttggggatttccacggttgaaaccgtaaggcgcagaggctatcgtttttgttaccccaaaccggcgtgtgaagaataa

SEQ ID NO: 2455 - DNA (genomic), 381 bp, Helicobacter pylori; double-stranded, circular
  misc_feature (B) LOCATION 1...381
  hypothetical: NO
  anti-sense: NO
aggagcgaaacaagcctcattcaaaccatggggcgagccgctagaaacgctaatggcaaggttttactatacgctaaaaaaactactcaaagcatgcaaaaagcctttgaaatcactagttacaggcgcgccaagcaagaagagtttaataaaatccataacatcacccccaaaaccgttacgcgcgctttagaagaggagttgaaattaagagacgatgaaatcaaaatcgctaaagctttaaaaaaggacaaaatgcctaaaagtgaaagggaaaaaatcattaaagaattggataaaaaaatgcgagagcgcgcgaaaaatttggattttgaagaagcgatgcgtttgagagacgaaatcgctcaattaagaacgctt

SEQ ID NO: 2456 - DNA (genomic), 1683 bp, Helicobacter pylori; double-stranded, circular
  misc_feature (B) LOCATION 1...1683
  hypothetical: NO
  anti-sense: NO
ggcttgttaaaaaccactataatacccctaaaaaatgcgagtttaaagatgcctttatttgatttaaaaagcccttatccaccagcaggcgatcagccccaagccatagaagctttaacgaaaagcttaaaaaataacaaccattatcaaactctagtgggcgttacagggagcggtaagacttacacgatggctaatatcatcgctcaaaccaataaacccgctttgatcatgagccataataagaccttatgcgcgcaactttatagcgaatttaaggcgtttttccctcataatagggtggagtattttatctcccactttgattactaccagcctgagagctatatccctaggagggatttatttattgaaaaagacagctctattaacgatgacttggagcgtttgagattgagtgcgaccacttcgcttttaggttatgatgatgtgatcgtgatagcgagcgtttcggctaattatggtttgggtaaccctgaagaatatttgaaagtcatggaaaaaatcaaagtgggcgagaagcgcgcttacaagagctttttattaaagctagtggaaatgggttatagccgtaatgaagtggtgtttgatagggggagctttagggcgactggggaatgcgtggatattttccccgcttataatgacgctgaatttatcaggattgaattttttggcgatgagatagaaaggattgctgtctttgacgccttagaaagaaatgaaatcaagcgcttggattctgtcatgctttatgcggccagtcagtttgccgtagggagtgagaggttgaatttagcggttaaaagcattgaagatgaactcgctttaagattgaaattttttaaagagcaggataaaatgcttgaatacaaccgcctcaaacaacgcaccgagtatgatttagaaatgattagcgcgaccggtgtgtgtaagggcattgaaaattacgcgcgccattttacgggtaaagcccctaacgaaacgcctttttgcttgtttgattatttagggatatttgagcgggagtttttagtcattgtggatgaaagccatgtgagtttgccacaatttggggggatgtatgcaggggatatgagcaggaaaagcgttttagtggaatatggttttagattgcctagcgctttagacaaccgccctttaaagtttgatgaatttatccataaaaattgccagttcctttttgtgtccgctacgcccaataagctagaattagagctttctcaaaagaatgtcgctgagcaaatcattcgccctacagggcttttagaccccaaatttgaagtgcgagacagcgataagcaagtccaggatttatttgatgagatcaagtcagtggtggccagaggtgaaagggtgctcatcaccacgctcactaagaaaatggcagaagaattgtgcaagtattatgctgaatggggcttgaaggtgcgttacatgcataatgaaattgatgcgattgaaaggaatcacattatccgctctttaaggcttaaggaatttgatgttttaatagggatcaatcttttaagagaggggctggatttgcctgaagtttctttagtagcgatcatggatgcggataaagaagggtttttaaaggagcgaaacaagcctcattcaaaccatggggcgagccgc

SEQ ID NO: 2457 - DNA (genomic), 1977 bp, Helicobacter pylori; double-stranded, circular
  misc_feature (B) LOCATION 1...1977
  hypothetical: NO
  anti-sense: NO
atgcctttatttgatttaaaaagcccttatccaccagcaggcgatcagccccaagccatagaagctttaacgaaaagcttaaaaaataacaaccattatcaaactctagtgggcgttacagggagcggtaagacttacacgatggctaatatcatcgctcaaaccaataaacccgctttgatcatgagccataataagaccttatgcgcgcaactttatagcgaatttaaggcgtttttccctcataatagggtggagtattttatctcccactttgattactaccagcctgagagctatatccctaggagggatttatttattgaaaaagacagctctattaacgatgacttggagcgtttgagattgagtgcgaccacttcgcttttaggttatgatgatgtgatcgtgatagcgagcgtttcggctaattatggtttgggtaaccctgaagaatatttgaaagtcatggaaaaaatcaaagtgggcgagaagcgcgcttacaagagctttttattaaagctagtggaaatgggttatagccgtaatgaagtggtgtttgatagggggagctttagggcgactggggaatgcgtggatattttccccgcttataatgacgctgaatttatcaggattgaattttttggcgatgagatagaaaggattgctgtctttgacgccttagaaagaaatgaaatcaagcgcttggattctgtcatgctttatgcggccagtcagtttgccgtagggagtgagaggttgaatttagcggttaaaagcattgaagatgaactcgctttaagattgaaattttttaaagagcaggataaaatgcttgaatacaaccgcctcaaacaacgcaccgagtatgatttagaaatgattagcgcgaccggtgtgtgtaagggcattgaaaattacgcgcgccattttacgggtaaagcccctaacgaaacgcctttttgcttgtttgattatttagggatatttgagcgggagtttttagtcattgtggatgaaagccatgtgagtttgccacaatttggggggatgtatgcaggggatatgagcaggaaaagcgttttagtggaatatggttttagattgcctagcgctttagacaaccgccctttaaagtttgatgaatttatccataaaaattgccagttcctttttgtgtccgctacgcccaataagctagaattagagctttctcaaaagaatgtcgctgagcaaatcattcgccctacagggcttttagaccccaaatttgaagtgcgagacagcgataagcaagtccaggatttatttgatgagatcaagtcagtggtggccagaggtgaaagggtgctcatcaccacgctcactaagaaaatggcagaagaattgtgcaagtattatgctgaatggggcttgaaggtgcgttacatgcatagtgaaattgatgcgattgaaaggaatcacattatccgctctttaaggcttaaggaatttgatgttttaatagggatcaatcttttaagagaggggctggatttgcctgaagtttctttagtagcgatcatggatgcggataaagaagggtttttaaggagcgaaacaagcctcattcaaaccatggggcgagccgctagaaacgctaatggcaaggttttactatacgctaaaaaaactactcaaagcatgcaaaaagcctttgaaatcactagttacaggcgcgccaagcaagaagagtttaataaaatccataacatcacccccaaaaccgttacgcgcgctttagaagaggagttgaaattaagagacgatgaaatcaaaatcgctaaagctttaaaaaaggacaaaatgcctaaaagtgaaagggaaaaaatcattaaagaattggataaaaaaatgcgagagcgcgcgaaaaatttggattttgaagaagcgatgcgtttgagagacgaaatcgctcaattaagaacgctttaa

SEQ ID NO: 2458 - DNA (genomic), 1026 bp, Helicobacter pylori; double-stranded, circular
  misc_feature (B) LOCATION 1...1026
  hypothetical: NO
  anti-sense: NO
ttgctatggattgggcgctttttgcgttataaatgcacgagcctgtctaattcccaagtgaaagaccaaaacaaggtttttgaatgcttgaacgaattcaatcatgcgtccatcaattcaaaccaattagaaaaagtttgcaaaaaagcccgtaatgccggattactaggtatcaacacctacgcactgcccctactcaaattttacgaatacgctcaaaaactttctttaaaatcgctcaaaaatatagatgaagtcatgttggctgaatttttgagtatttataccgggggtttgagtttagccactaagaaaaattacagaatcgccctgttagggctttttagctatatagacaagcaaaatcaagataaaaatgaaaaatcttatatttataatatcacgcttaaaaacatcagcggagtgaatcaaagcgcaggcaacaagctccctactcatttaaacaatgaagaattagaaaaatttttagagagcattgataaaatagagatgtccgctaaagtgcgcgcacgaaaccgcttgctcattaaaatcatcgtttttacaggcatgcgttctaatgaagccttgcagcttaaaataaaggatttcactttagaaaatggctgttatacgattttgattaaaggcaagggcgataaatacagagcggtgatgctcaaagctttccacattgagagccttttgaaagaatggctcacagaaagggaattgtatcctgttaaaaacgatttattgttttgcaaccaaaaaggcagtgctttaacgcaagcttatttgtataagcaagtggagcgcatcatcaattttgccggactcaggcgagagaaaaatggggcgcacatgttaaggcattcttttgcgaccttgctttatcaaaaacgccatgatttgattttagttcaagaagctctagggcatgcgagcttgaacacgagcaggatttacacgcattttgacaaagatcgtttaaaagaagcggcgagcatttgggaagaaaattaa

SEQ ID NO: 2459 - DNA (genomic), 1068 bp, Helicobacter pylori; double-stranded, circular
  misc_feature (B) LOCATION 1...1068
  hypothetical: NO
  anti-sense: NO
atgaaacaccccctagaagaattaaaagaccctgtagaaaatcttttgctatggattgggcgctttttgcgttataaatgcacgagcctgtctaattcccaagtgaaagaccaaaacaaggtttttgaatgcttgaacgaattcaatcatgcgtccatcaattcaaaccaattagaaaaagtttgcaaaaaagcccgtaatgccggattactaggtatcaacacctacgcactgcccctactcaaattttacgaatacgctcaaaaactttctttaaaatcgctcaaaaatatagatgaagtcatgttggctgaatttttgagtatttataccgggggtttgagtttagccactaagaaaaattacagaatcgccctgttagggctttttagctatatagacaagcaaaatcaagataaaaatgaaaaatcttatatttataatatcacgcttaaaaacatcagcggagtgaatcaaagcgcaggcaacaagctccctactcatttaaacaatgaagaattagaaaaatttttagagagcattgataaaatagagatgtccgctaaagtgcgcgcacgaaaccgcttgctcattaaaatcatcgtttttacaggcatgcgttctaatgaagccttgcagcttaaaataaaggatttcactttagaaaatggctgttatacgattttgattaaaggcaagggcgataaatacagagcggtgatgctcaaagctttccacattgagagccttttgaaagaatggctcacagaaagggaattgtatcctgttaaaaacgatttattgttttgcaaccaaaaaggcagtgctttaacgcaagcttatttgtataagcaagtggagcgcatcatcaattttgccggactcaggcgagagaaaaatggggcgcacatgttaaggcattcttttgcgaccttgctttatcaaaaacgccatgatttgattttagttcaagaagctctagggcatgcgagcttgaacacgagcaggatttacacgcattttgacaaagatcgtttaaaagaagcggcgagcatttgggaagaaaat

SEQ ID NO: 2460 - DNA (genomic), 720 bp, Helicobacter pylori; double-stranded, circular
  misc_feature (B) LOCATION 1...720
  hypothetical: NO
  anti-sense: NO
atgaaaaacaaacgctctcaaaatagcccttatgtaacgcctgacaacccttatctaacgctagaaaaagctttagggtattcttttaaagacaagcgtttattggagcaagccttaacgcataaatcatgtaagctcgctttaaacaatgagcgcttggaatttttgggcgatgcggtgttgggcttggtgataggggagctgctataccataaattctatcaatacgatgagggcaaactctctaaattaagggcttctattgtgagcgcgcatggtttcactaaattagcgaaagcgattgctttacaagattatttgcgcgtttcttcttctgaagaaatttctaaggggagggaaaaaccctctattctgtcaagcgcttttgaggctttaatggctggggtgtatttagaagcagggttagctaaggtgcgtaaaatcatacaaaatttactcaatcgtgcttacaagcgtttggatttggagcatttgtttatggattataaaaccgctttgcaggaattgacccaagcgcagttttgcgtgatccccacttaccaattactccaagaaaaaggccccgatcaccataaagaatttgaaatggctctatacattcaagataaaatgtatgcgaccgctaaaggcaagagtaaaaaagaagccgaacagcaatgcgcttatcaagcgcttcaaaaacttaaggaagccaaatga

SEQ ID NO: 2461 - DNA (genomic), 720 bp, Helicobacter pylori; double-stranded, circular
  misc_feature (B) LOCATION 1...720
  hypothetical: NO
  anti-sense: NO
atgatgaaaaacaaacgctctcaaaatagcccttatgtaacgcctgacaacccttatctaacgctagaaaaagctttagggtattcttttaaagacaagcgtttattggagcaagccttaacgcataaatcatgtaagctcgctttaaacaatgagcgcttggaatttttgggcgatgcggtgttgggcttggtgataggggagctgctataccataaattctrtcawtrcgatgggggcaaactctctaaattaagggcttctattgtgagcgcgcatggtttcactaaattagcgaaagcgattgctttacaagattatttgcgcgtttcttcttctgaagaaatttctaaggggagggaaaaaccctctattctrtcaagcgcttttgaggctttaatggctggggtgtatttagaagcagggttagctaaggtgcgtaaaatcatacaaaatttactcaatcgtgcttacaagcgtttggatttggagcatttgtttatggattataaaaccgctttgcaggaattgacccaakckcagttttgcgtgatccccacttaccaattactccaagaaaaaggccccgatcaccataaagaatttgaaatggctctatacattcaagataaaatgtatgcgaccgctaaaggcaagagtaaaaaagaagccgaacagcaatgcgcttatcaagcgcttcaaaacttaaggaagccaaat

SEQ ID NO: 2462 - DNA (genomic), 765 bp, Helicobacter pylori; double-stranded, circular
  misc_feature (B) LOCATION 1...765
  hypothetical: NO
  anti-sense: NO
attagaggcgcaaaaacgggtcaaaacgaccacttaaagggaaaaatgatgaaaaacaaacgctctcaaaatagcccttatgtaacgcctgacaacccttatctaacgctagaaaaagctttagggtattcttttaaagacaagcgtttattggagcaagccttaacgcataaatcatgtaagctcgctttaaacaatgagcgcttggaatttttgggcgatgcggtgttgggcttggtgataggggagctgctataccataaattctatcaatacgatgagggcaaactctctaaattaagggcttctattgtgagcgcgcatggtttcactaaattagcgaaagcgattgctttacaagattatttgcgcgtttcttcttctgaagaaatttctaaggggagggaaaaaccctctattctgtcaagcgcttttgaggctttaatggctggggtgtatttagaagcagggttagctaaggtgcgtaaaatcatacaaaatttactcaatcgtgcttacaagcgtttggatttggagcatttgtttatggattataaaaccgctttgcaggaattgacccaagcgcagttttgcgtgatccccacttaccaattactccaagaaaaaggccccgatcaccataaagaatttgaaatggctctatacattcaagataaaatgtatgcgaccgctaaaggcaagagtaaaaaagaagccgaacagcaatgcgcttatcaagcgcttcaaaaacttaaggaagtcaaa

SEQ ID NO: 2463 - DNA (genomic), 1860 bp, Helicobacter pylori; double-stranded, circular
  misc_feature (B) LOCATION 1...1860
  hypothetical: NO
  anti-sense: NO
atgttctatcacttaatcgctcctttaaaaaataaaaccccccctttaacttacttttctaaagagcgacaccttaaaggagcgttagtcaatatccctttaaggaataaaacgcttttgggcgttgtccttgaagaagtttcaaaaccctcttttgaatgcctggaattggaaaaaaccccttattttttactcccttttcaaatagagctcgctatttttatcgctcaatattactcggctaatctttcttcagtcttaagcctttttgccccttttaaagaatgcgatttagtggggttagaaaaaattgagcctacccttaatgcgttgagccaaacgcaaaccaacgccttaaaagaattgcaaaaacatccagcaagcttgctctttggcgatacgggcagcgggaaaaccgaaatttatatgcatgcaatcgctcaaactttagagcaaaaaaaaagcgctctgttgttagtgccagaaatcgctctcacccctcaaatgcaacaacgccttaaaaaagtttttaaagaaaatttaggcttgtggcatagcaaactctctcaaaatcaaaaaaaacaatttttagaaaagctttattcgcaagaaatcaaattagtggtaggcacacgaagcgcgttgtttttaccccttaaagagctgggtttgatcattgtagatgaagagcatgacttttcttataaatcccagcaaagccctatgtataacgctagggatttatgcttgtatttatcccataaattccctatccaagtgattttaggctctgctacgccaagtttgagtagttaccaacgctttaaagataaggctttagtgcgcctaaaggggcgctacacccccacgcaaaaaaacattatttttgaaaaaaccgagcgttttatcacgcccaaactcctagaagcgctcaaacaagtgatagacaaaaacgagcaagccattatttttgtgcctacaagggctaatttcaaaaccttgctgtgtccaaattgttacaaaagcgttcaatgccctttttgcagcgtgaatatgagtttgcatttaaagaccaacaaactcatgtgccattattgccatttttcaagccctatccctaaaatttgcaacgcatgccaaagcgaagttttagtgggtaaaaggataggcaccatgcaagtgctaaaggaattagagagccttttagagggggctaaaatagcgatcttagataaagatcacaccagcacgcccaaaaaactccacaatattttaaacgatttcaacgctcaaaaaaccaatatcttaatcggcactcaaatgataagcaaggggcatgattacgctaaagtgagtttagcggttgttttaggcatagacaatatcatcaaatccaatagttacagggctttagaagaaggcgtgtcgttactttatcaaatcgctgggaggagcgctaggcaaatttctggccaagtgttcattcaaagcaccgaaacggatctgttagaaaatttcttagaagattatgaagattttttacaatacgaattgcaagaaaggtgcgaactctacccgcctttttcaaggctgtgtttgttggagtttaagcataaaaacgaagaaaaggcccaacaattgagcctagaagcctctcaaaccctttctttgtgtttagaaaagggcgtaacgctctctaatttcaaagcccccattgaaaaaatcgcttcttcttaccgctaccttattttattgcgttccaaaaaccctttaagcctaatcaaaagcgtgcatgcgtttttaaaaaccgcccccaatatcccttgcagcgtgaacatggatcctgtggatattttttaa

SEQ ID NO: 2464 - DNA (genomic), 1887 bp, Helicobacter pylori; double-stranded, circular
  misc_feature (B) LOCATION 1...1887
  hypothetical: NO
  anti-sense: NO
actccaaaagcttttagaaaaaatctcatcatgttctatcacttaatcgctcctttaaaaaataaaaccccccctttaacttacttttctaaagagcgacaccttaaaggagcgttagtcaatatccctttaaggaataaaacgcttttgggcgttgtccttgaagaagtttcaaaaccctcttttgaatgcctggaattggaaaaaaccccttattttttactcccttttcaaatagagctcgctatttttatcgctcaatattactcggctaatctttcttcagtcttaagcctttttgtcccttttaaagaatgcgatttagtggggttagaaaaaattgagcctacccttaatgcgttgagccaaacgcaaaccaacgccttaaaagaattgcaaaaacatccagcaagcttgctctttggcgatacgggcagcgggaaaaccgaaatttatatgcatgcaatcgctcaaactttagagcaaaaaaaaagcgctctgttgttagtgccagaaatcgctctcacccctcaaatgcaacaacgccttaaaaaagtttttaaagaaaatttaggcttgtggcatagcaaactctctcaaaatcaaaaaaaacaatttttagaaaagctttattcgcaagaaatcaaattagtggtaggcacacgaagcgcgttgtttttaccccttaaagagctgggtttgatcattgtagatgaagagcatgacttttcttataaatcccagcaaagccctatgtataacgctagggatttatgcttgtatttatcccataaattccctatccaagtgattttaggctctgctacgccaagtttgagtagttaccaacgctttaaagataaggctttagtgcgcctaaaggggcgctacacccccacgcaaaaaaacattatttttgaaaaaaccgagcgttttatcacgcccaaactcctagaagcgctcaaacaagtgatagacaaaaacgagcaagccattatttttgtgcctacaagggctaatttcaaaaccttgctgtgtccaaattgttacaaaagcgttcaatgccctttttgcagcgtgaatatgagtttgcatttaaagaccaacaaactcatgtgccattattgccatttttcaagccctatccctaaaatttgcaacgcatgccaaagcgaagttttagtgggtaaaaggataggcaccatgcaagtgctaaaggaattagagagccttttagagggggctaaaatagcgatcttagataaagatcacaccagcacgcccaaaaaactccacaatattttaaacgatttcaacgctcaaaaaaccaatatcttaatcggcactcaaatgataagcaaggggcatgattacgctaaagtgagtttagcggttgttttaggcatagacaatatcatcaaatccaatagttacagggctttagaagaaggcgtgtcgttactttatcaaatcgctgggaggagcgctaggcaaatttctggccaagtgttcattcaaagcaccgaaacggatctgttagaaaatttcttagaagattatgaagattttttacaatacgaattgcaagaaaggtgcgaactctacccgcctttttcaaggctgtgtttgttggagtttaagcataaaaacgaagaaaaggcccaacaattgagcctagaagcctctcaaaccctttctttgtgtttagaaaagggcgtaacgctctctaatttcaaagcccccattgaaaaaatcgcttcttcttaccgctaccttattttattgcgttccaaaaaccctttaagcctaatcaaaagcgtgcatgcgtttttaaaaaccgcccccaatatcccttgcagcgtgaacatggatcctgtggatattttt

SEQ ID NO: 2465 - DNA (genomic), 447 bp, Helicobacter pylori; double-stranded, circular
  misc_feature (B) LOCATION 1...447
  hypothetical: NO
  anti-sense: NO
ttgtgcgctaatgagagtcatttattgagattggactttgatgcgaccaatttttctcatcacacccctatgaataccccattaaaactcagcgttcaagccttagagcgttatttcttgggacaactttttgaatttgatgcacccttagatttgatagggactttttttcaaaaacaagtttggtctgcgttaatgactatcccttatggcaaaacaaaaagttacgatgaaatcgcaaagctcattaataaccctaaatcgtgcagagctattggcaacgctaaccgcaataaccctatttctttgatcgtgccttgtcatagagtggtgcgtaaaaatggcgctttaggggggtataatgggggcatagaagtcaaaaagtggctgttagaatttgaaagcaaaattttaaatgagcgagctaaaaattttttaatttcttaa

SEQ ID NO: 2466 - DNA (genomic), 567 bp, Helicobacter pylori; double-stranded, circular
  misc_feature (B) LOCATION 1...567
  hypothetical: NO
  anti-sense: NO
agctttgattttaggggtgtatggtttgtcgctattgattgttttatacaaaatctttttttgatgactttataccactactatttcaagacccctaagagtttccctttagagtatttgcatttgtgcgctaatgagagtcatttattgagattggactttgatgcgaccaatttttctcatcacacccctatgaataccccattaaaactcagcgttcaagccttagagcgttatttcttgggacaactttttgaatttgatgcacccttagatttgatagggactttttttcaaaaacaagtttggtctgcgttaatgactatcccttatggcaaaacaaaaagttacgatgaaatcgcaaagctcattaataaccctaaatcgtgcagagctattggcaacgctaaccgcaataaccctatttctttgatcgtgccttgtcatagagtggtgcgtaaaaatggcgctttaggggggtataatgggggcatagaagtcaaaaagtggctgttagaatttgaaagcaaaattttaaatgagcgagctaaaaattttttaatttct

SEQ ID NO: 2467 - DNA (genomic), 204 bp, Helicobacter pylori; double-stranded, circular
  misc_feature (B) LOCATION 1...204
  hypothetical: NO
  anti-sense: NO
aagatcaaccggcagtattccctgaaagtctttgtgaaagagtgtctaaataactactcttttgaaaatgaagttgtatgcgaaccttttaccggtagtggcacttttggaatggttgcaaaatctatggggcgtattcctttattatgcgaacaacatccaaaatacgctcaaaatctaatcaaacttggttttaaggaaatc

SEQ ID NO: 2468 - DNA (genomic), 1026 bp, Helicobacter pylori; double-stranded, circular
  misc_feature (B) LOCATION 1...1026
  hypothetical: NO
  anti-sense: NO
tattttaataaagagttttttatgcccataatatcaaaaaataaaccatatagttttattaaaaaccttgagttttatacgattaaacgcattaaggatatgggttctcaccctagccaagaccatttaaatgaattgctagaattgtttaaacaagatttaagtattgatctaaaaagagagatagcaagctctattggcaggcaacttgatgatgatattatttataattttttaaagcaagaagcttttaaagaacattacatggaagttatttatcaatttttacgcaccgctttatataaatctaaggatatgcgattcgcaaaattatgcgatgacttgttgcaacactatcaaaatgaaaacatgcaaaaaatgaaacaatactatgactaccgccacaccaaaaaaccacctttaaaaattatagaaaatattattaaaaaaccttccttattagttggggataatgcgcaaacgctcaataaaatcgctcctagttctgtcaatcttattttcacttcaccaccttactataatgctagaatttatagcgattataaaaattacaaagattatctaagcgccatgtctcaaagtttaaaggcttgttttagagtgttagaagaggggcgttttattatcattaatgtttcacctataattaccaagagagctgggcgtgagtttgaaagcgtgcgttatcctattcattttgatttccatcaaattttaattgacaatggattttactttgtagatgaaatcctatggattaaacctgattttagtgtgcctaatcgtattggagggtatttgcaaaataaaaaacctttaggatacaaacctaattgtgtgagtgaaagtttgttagtctatcgtaaaaaagccccttttctactagataaaaatattaaaatagctgaaaaacgactaaaaccaattaaacaaaatcatactttatttggaaaaaaagaattgcctatagaaaccactagattgttggtatattactccaatgtc

SEQ ID NO: 2469 - DNA (genomic), 1215 bp, Helicobacter pylori; double-stranded, circular
  misc_feature (B) LOCATION 1...1215
  hypothetical: NO
  anti-sense: NO
atgcccataatatcaaaaaataaaccatatagttttattaaaaaccttgagttttatacgattaaacgcattaaggatatgggttctcaccctagccaagaccatttaaatgaattgctagaattgtttaaacaagatttaagtattgatctaaaaagagagatagcaagctctattggcaggcaacttgatgatgatattatttataattttttaaagcaagaagcttttaaagaacattacatggaagttatttatcaatttttacgcaccgctttatataaatctaaggatatgcgattcgcaaaattatgcgatgacttgttgcaacactatcaaaatgaaaacatgcaaaaaatgaaacaatactatgactaccgccacaccaaaaaaccacctttaaaaattatagaaaatattattaaaaaaccttccttattagttggggataatgcgcaaacgctcaataaaatcgctcctagttctgtcaatcttattttcacttcaccaccttactataatgctagaatttatagcgattataaaaattacaaagattatctaagcgccatgtctcaaagtttaaaggcttgttttagagtgttagaagaggggcgttttattatcattaatgtttcacctataattaccaagagagctgggcgtgagtttgaaagcgtgcgttatcctattcattttgatttccatcaaattttaattgacaatggattttactttgtagatgaaatcctatggattaaacctgattttagtgtgcctaatcgtattggagggtatttgcaaaataaaaaacctttaggatacaaacctaattgtgtgagtgaaagtttgttagtctatcgtaaaaaagccccttttctactagataaaaatattaaaatagctgaaaaacgactaaaaccaattaaacaaaatcatactttatttggaaaaaaagaattgcctatagaaaccactaattgttggtatattactccaaagtctagtaaagatcatccggcagtattccctgaaagtctttgtgaaagagtgctaaattactactcttttgaaaatgaagttgtatgcgacccttttgccggtagtggcacttttggaatggttgcaaaatctatggggcgtattcctttattatgcgaacaacatccaaaatacgctcaaaatctaatcaaacttggttttaaggaaatctaa

SEQ ID NO: 2470 - DNA (genomic), 474 bp, Helicobacter pylori; double-stranded, circular
  misc_feature (B) LOCATION 1...474
  hypothetical: NO
  anti-sense: NO
aaaaatgcgagtgcaggcacgatcccgtttttaaaaatcgctaatgatgtggcgattgcggttgatcaattaggcacacgaaagggcgcgattgcggtgtatttggaaatttggcacattgatgtgatggagttcattgatttaaggaaaaatagcggcgatgaaaggcgaagagcgcatgatttgttcccggctctttgggtgtgcgatctgtttatgaagagggttttagaagacgcgatgtggactttgtttgacccttatgagtgtaaggatttgactgagctttatgggcaggattttgaaaaacgctatttagagtatgaaaaagatcccaaaatcattaaagaatacattaacgctaaagatttatggaaaaaaatcttaatgaattattttgaagccggtttgcctttcttagcctttaaagacaacgccaatcggtgcaattcaaacgcccatgcaggaatcatt

SEQ ID NO: 2471 - DNA (genomic), 471 bp, Helicobacter pylori; double-stranded, circular
  misc_feature (B) LOCATION 1...471
  hypothetical: NO
  anti-sense: NO
aatgcgagtgcaggcacgatcccgtttttaaaaatcgctaatgatgtggcgattgcggttgatcaattaggcacacgaaagggcgcgattgcggtgtatttggaaatttggcacattgatgtgatggagttcattgatttaaggaaaaatagcggcgatgaaaggcgaagagcgcatgatttgttcccggctctttgggtgtgcgatctgtttatgaagagggttttagaagacgcgatgtggactttgtttgacccttatgagtgtaaggatttgactgagctttatgggcaggattttgaaaaacgctatttagagtatgaaaaagatcccaaaatcattaaagaatacattaacgctaaagatttatggaaaaaaatcttaatgaattattttgaagccggtttgcctttcttagcctttaaagacaacgccaatcggtgcaattcaaacgcccatgcaggaatcatt

SEQ ID NO: 2472 - DNA (genomic), 483 bp, Helicobacter pylori; double-stranded, circular
  misc_feature (B) LOCATION 1...483
  hypothetical: NO
  anti-sense: NO
tttagaggcgtgagccaaagtgagctggaagtggatgcaaggttgcaatttagggacaagatcactactgaagaaatccaacaaactttgattaaaaccgctgtggataagatagatattgacacgcctaattggagctttgtcgcctcaaggctttttttgtatgatttataccataaagtgagtggttttacagggtataggcatttgaaagagtattttgaaaacgctgaagaaaagggccgcatccttaagggctttaaggaaaaatttgatttagagtttttaaatagccagatcaagcctgaaagggatttccaattcaattatttagggattaaaaccttgtatgatcgctatttgttaaaagacgctaacaatcaccctattgaactgccccagcacatgtttatgagcattgcgatgttattagcgccttacgaacaagggcctgacgctctcgctctgagaaccgctgtatct

SEQ ID NO: 2473 - DNA (genomic), 582 bp, Helicobacter pylori; double-stranded, circular
  misc_feature (B) LOCATION 1...582
  hypothetical: NO
  anti-sense: NO
ttgattacggtggttaaacgaaacgggcgcattgagcctttggacattaccaaaatccaaaaatacactaaggacgctacggataatttagagggcgtgagccaaagtgagctggaagtggatgcaaggttgcaatttagggacaagatcactactgaagaaatccaacaaactttgattaaaaccgctgtggataagatagatattgacacgcctaattggagctttgtcgcctcaaggctttttttgtatgatttataccataaagtgagtggttttacagggtataggcatttgaaagagtattttgaaaacgctgaagaaaagggccgcatccttaagggctttaaggaaaaatttgatttagagtttttaaatagccagatcaagcctgaaagggatttccaattcaattatttagggattaaaaccttgtatgatcgctatttgttaaaagacgctaacaatcaccctattgaactgccccagcacatgtttatgagcattgcgatgtttttagcgcaaaacgaacaagaacttaacaaaatcgctttagaattttatgaaatgttaaacaaattt

SEQ ID NO: 2474 - DNA (genomic), 1035 bp, Helicobacter pylori; double-stranded, circular
  misc_feature (B) LOCATION 1...1035
  hypothetical: NO
  anti-sense: NO
ttcagcaatctatgcacggagatttttcaaaataccgcgcccaaccactattacatgcaaatagaatacaccgacggcgcgatagagttttttgaagaaaaagagttggtaacgacagatagtaatatcactaaatgcgctaacaagctcactagcaccgatattcttaaaggcaaaaaaatctatatcgctactaaagtcgctaaagatgggcaaacggcggtgtgcaatctagcgagcatcaatttaagcaagatcaacaccgaagaagacattaaaagggtcgtgccgatcatggtcaggcttttagacaatgtgattgatttgaatttctaccctaaccgcaaagtcaaagccactaatttgcaaaatagagccatagggttaggggttatgggtgaagcgcaaatgctcgcagaacaccaaatcgcttgggggtctaaagagcatttagaaaaaattgacgctttaatggagcaaatcagctaccatgcgattgacacgagtgcgaatttagcaaaagaaaaaggggtttataaggattttgaaaattcagaatggagtaaggggattttccccattgataaagccaataatgaagccttaaagctcacggaaaaagggctttttaaccacgcttgcgattggcaaggtttgagggaaaaagtcaaggctaatggcatgcgtaatggctatttaatggcgatcgctcctacaagctccatttctattttagtaggcacaacccaaacgattgaacccatttataagaaaaaatggtttgaagaaaatttgagcgggctaattcctgtggtagtgcctaatttgaatgtagaaacctggaatttttacacatcagcctatgatattgacgctaaagatttgattaaggcggcagcggtgcgccaaaaatggatcgatcaaggccaaagcatcaatgtgtttttacgcatagaaaacgctagcggtaaaaccttgcatgaaagtttacacgctcgcttggaaattaggactcaaatccacttattatttgcg

SEQ ID NO: 2475 - DNA (genomic), 2367 bp, Helicobacter pylori; double-stranded, circular
  misc_feature (B) LOCATION 1...2367
  hypothetical: NO
  anti-sense: NO
ttgattacggtggttaaacgaaacgggcgcattgagcctttggacattaccaaaatccaaaaatacactaaggacgctacggataatttagagggcgtgagccaaagtgagctggaagtggatgcaaggttgcaatttagggacaagatcactactgaagaaatccaacaaactttgattaaaaccgctgtggataagatagatattgacacgcctaattggagctttgtcgcctcaaggctttttttgtatgatttataccataaagtgagtggttttacagggtataggcatttgaaagagtattttgaaaacgctgaagaaaagggccgcatccttaagggctttaaggaaaaatttgatttagagtttttaaatagccagatcaagcctgaaagggatttccaattcaattatttagggattaaaaccttgtatgatcgctatttgttaaaagacgctaacaatcaccctattgaactgccccagcacatgtttatgagcattgcgatgtttttagcgcaaaacgaacaagaacttaacaaaatcgctttagaattttatgaagtgttaagcaagtttgaagcgatgtgcgcgacccccactctagcgaacgcgcgcaccaccaagcaccaattaagctcatgctatattggcagcacgccggataatattgaggggatttttgacagctataaggaaatggcgctattgtccaaatacggcggagggattggctgggatttttctttggtacgctctatcgggagctatattgatgggcataaaaatgcgagtgcaggcacgatcccgtttttaaaaatcgctaatgatgtggcgattgcggttgatcaattaggcacacgaaagggcgcgattgcggtgtatttggaaatttggcacattgatgtgatggagttcattgatttaaggaaaaatagcggcgatgaaaggcgaagagcgcatgatttgttcccggctctttgggtgtgcgatctgtttatgaagagggttttagaagacgcgatgtggactttgtttgacccttatgagtgtaaggatttgactgagctttatgggcaggattttgaaaaacgctatttagagtatgaaaaagatcccaaaatcattaaagaatacattaacgctaaagatttatggaaaaaaatcttaatgaattattttgaagccggtttgcctttcttagcctttaaagacaacgccaatcggtgcaatccaaacgcccatgcaggaatcattcgatccagcaatctatgcacggagatttttcaaaataccgcgcccaaccactattacatgcaaatagaatacaccgacggcgcgatagagttttttgaagaaaaagagttggtaacgacagatagtaatatcactaaatgcgctaacaagctcactagcaccgatattcttaaaggcaaaaaaatctatatcgctactaaagtcgctaaagatgggcaaacggcggtgtgcaatctagcgagcatcaatttaagcaagatcaacaccgaagaagacattaaaagggtcgtgccgatcatggtcaggcttttagacaatgtgattgatttgaatttctaccctaaccgcaaagtcaaagccactaatttgcaaaatagagccatagggttaggggttatgggtgaagcgcaaatgctcgcagaacaccaaatcgcttgggggtctaaagagcatttagaaaaaattgacgctttaatggagcaaatcagctaccatgcgattgacacgagtgcgaatttagcaaaagaaaaaggggtttataaggattttgaaaattcagaatggagtaaggggattttccccattgataaagccaataatgaagccttaaagctcacggaaaaagggctttttaaccacgcttgcgattggcaaggtttgagggaaaaagtcaaggctaatggcatgcgtaatggctatttaatggcgatcgctcctacaagctccatttctattttagtaggcacaacccaaacgattgaacccatttataagaaaaaatggtttgaagaaaatttgagcgggctaattcctgtggtagtgcctaatttgaatgtagaaacctggaatttttacacatcagcctatgatattgacgctaaagatttgattaaggcggcagcggtgcgccaaaaatggatcgatcaaggccaaagcatcaatgtgtttttacgcatagaaaacgctagcggtaaaaccttgcatgaaatttacacgctcgcttggaaattaggactcaaatccacttattatttgcgtagcgaaagccctagcatagatgaaaaaagcgtgttggatcgatcggtggagtgttttaattgccaataa

SEQ ID NO: 2476 - DNA (genomic), 921 bp, Helicobacter pylori; double-stranded, circular
  misc_feature (B) LOCATION 1...921
  hypothetical: NO
  anti-sense: NO
aaacatgatcacggcttttggtgcggcattcaagagagctttgatatagaaagattgcgctatcataaaatcattatcatgaccgatgctgatgtggatgggagccatatccaaaccttgctgatgacttttttctatcgttatttacgcccgctgattgaacaagggcatgtttttatcgctcaagcccctctttataaatacaagaaaggcaagacagaaatttatcttaaagacagcgtcgctttggatcattttttaattgagcatggcatcaattcggtggatattgaagggattggaaagaacgatttgatgaatttgttaaaagtggcgcgccattaccgctatacgcttttggaattagaaaaacgctacaacttgctagaagttttacgctttttgattgagactaaggacgccttaagccttgatatgaaagttttagaaaaaagcattttagaaaaattagagggcttgaattatcagatcttacgctcttttgctactgaagaaagcttgcatttgcacgcgcaaacccctaagggcttggtggaatttaacctagatgacaacctttttaaagatgtgttgtttgaagaagcgcattacacttaccaaaagcttatggaatataatttggatttcctagaaaataaggatattttggcgtttttagaagaagtggaaaattacgctaaaaagggagcgaatatccagcgctataaggggttaggcgagatgaaccctaatgatttatgggaaacgaccatgcataaagaaaaccgcagtctcatcaaactcaaaattgaagatttagaaaaaaccgatgcggtcttttcgctttgcatgggtgatgaagtagagcctagaagagcctttatccaagcgcatgccaaagatgtgaagcaactagatgtg

SEQ ID NO: 2477 - DNA (genomic), 1341 bp, Helicobacter pylori; double-stranded, circular
  misc_feature (B) LOCATION 1...1341
  hypothetical: NO
  anti-sense: NO
cgccctggaatgtatattggcgataccaatgtgggtgggttgcaccacatggtgtatgaagtcgtggataacgctgtagatgagagcatggcgggtttttgcgatacgatcaatatcactttgactgaggaggggtcatgcattgtagaagataacgggcgaggcattcctgtagacattcaccccacggaaaaaatccccgcttgcaccgtggttttaacgattttgcatgcagggggcaagtttgataatgacacttataaagtttcaggcggtttgcatggcgtgggcgtttcggttgtgaacgctttgagcaaacgcttgatcatgaccattaaaaaagagggtcaaatctatcgccaagagtttgaaaagggtattcccattagcgagcttgaaatcattggcaagactaaaagcgctaaagaaagtggcacgactattgaatttttccctgatgaaagcgtgatggaagtcgttgaatttcaagcgggtattttacaaaagcgctttaaagaaatggcgtatcttaacgatggcttaaaaatttctttcaaagaagaaaaaacccaactgcaagaaacttatttctataaagacggcttgaaacaattcgtgaaagacagcgctaaaaaagaattgctcacccccattattgcgtttaaaagcatggatgaagaaacgcgcacttctatagaggtcgctttagcgtatgctgacgattacaatgaaaacaccttaagctttgtgaataacattaaaacttctgagggtggcacgcatgaggcgggctttaaaatgggcttgtctaaagcgattttacaatacattgacaataacattaaaactaaagagtcgcgccccatctctgaagacattaaagagggtctgatcgctgttgtgagtttgaaaatgagcgagcctttgtttgaagggcagactaaatccaaactcggcagctcatatgcgcgcgcgttggtttcaaaattagtctatgacaaaatccaccaatttttagaggaaaaccctaacgaagctaaaatcatcgccaataaagccctactagccgcaaaagccagagaagccagcaagaaagccagagagcttacaaggaaaaaagacaatttgagtgtcggcactttgcctggaaaattagccgattgccagagcaaagacccgcttgagagtgaaatctttttagtggagggcgatagcgcgggcgggagcgctaaacaagggcgcgatagggtttttcaagcgattttacctctaaaaggtaagattttaaatgtggaaaaaagccatttgtcaaagatcctaaatcagaagaaattaaaaaca

SEQ ID NO: 2478 - DNA (genomic), 2322 bp, Helicobacter pylori; double-stranded, circular
  misc_feature (B) LOCATION 1...2322
  hypothetical: NO
  anti-sense: NO
atgcaaaattaccagagccatagtattaaggttttaaaaggcttagagggggttaggaaacgccctggaatgtatattggcgataccaatgtgggtgggttgcaccacatggtgtatgaagtcgtggataacgctgtagatgagagcatggcgggtttttgcgatacgatcaatatcactttgactgaggaggggtcatgcattgtagaagataacgggcgaggcattcctgtagacattcaccccacggaaaaaatccccgcttgcaccgtggttttaacgattttgcatgcagggggcaagtttgataatgacacttataaagtttcaggcggtttgcatggcgtgggcgtttcggttgtgaacgctttgagcaaacgcttgatcatgaccattaaaaaagagggtcaaatctatcgccaagagtttgaaaagggtattcccattagcgagcttgaaatcattggcaagactaaaagcgctaaagaaagtggcacgactattgaatttttccctgatgaaagcgtgatggaagtcgttgaatttcaagcgggtattttacaaaagcgctttaaagaaatggcgtatcttaacgatggcttaaaaatttctttcaaagaagaaaaaacccaactgcaagaaacttatttctataaagacggcttgaaacaattcgtgaaagacagcgctaaaaaagaattgctcacccccattattgcgtttaaaagcatggatgaagaaacgcgcacttctatagaggtcgctttagcgtatgctgacgattacaatgaaaacaccttaagctttgtgaataacattaaaacttctgagggtggcacgcatgaggcgggctttaaaatgggcttgtctaaagcgattttacaatacattgacaataacattaaaactaaagagtcgcgccccatctctgaagacattaaagagggtctgatcgctgttgtgagtttgaaaatgagcgagcctttgtttgaagggcagactaaatccaaactcggcagctcatatgcgcgcgcgttggtttcaaaattagtctatgacaaaatccaccaatttttagaggaaaaccctaacgaagctaaaatcatcgccaataaagccctactagccgcaaaagccagagaagccagcaagaaagccagagagcttacaaggaaaaaagacaatttgagtgtcggcactttgcctggaaaattagccgattgccagagcaaagacccgcttgagagtgaaatctttttagtggagggcgatagcgcgggcgggagcgctaaacaagggcgcgatagggtttttcaagcgattttacctctaaaaggtaagattttaaatgtggaaaaaagccatttgtcaaagatcctaaaatcagaagaaattaaaaacatgatcacggcttttgggtgcggcattcaagagagctttgatatagaaagattgcgctatcataaaatcattatcatgaccgatgctgatgtggatgggagccatatccaaaccttgctgatgacttttttctatcgttatttacgcccgctgattgaacaagggcatgtttttatcgctcaagcccctctttataaatacaagaaaggcaagacagaaatttatcttaaagacagcgtcgctttggatcattttttaattgagcatggcatcaattcggtggatattgaagggattggaaagaacgatttgatgaatttgttaaaagtggcgcgccattaccgctatacgcttttggaattagaaaaacgctacaacttgctagaagttttacgctttttgattgagactaaggacgccttaagccttgatatgaaagttttagaaaaaagcattttagaaaaattagagggcttgaattatcagatcttacgctcttttgctactgaagaaagcttgcatttgcacgcgcaaacccctaagggcttggtggaatttaacctagatgacaacctttttaaagatgtgttgtttgaagaagcgcattacacttaccaaaagcttatggaatataatttggatttcctagaaaataaggatattttggcgtttttagaagaagtggaaaattacgctaaaaagggagcgaatatccagcgctataaggggttaggcgagatgaaccctaatgatttatgggaaacgaccatgcataaagaaaaccgcagtctcatcaaactcaaaattgaagatttagaaaaaaccgatgcggtcttttcgctttgcatgggtgatgaagtagagcctagaagagcctttatccaagcgcatgccaaagatgtgaagcaactagatgtgtaa

SEQ ID NO: 2479 - DNA (genomic), 1056 bp, Helicobacter pylori; double-stranded, circular
  misc_feature (B) LOCATION 1...1056
  hypothetical: NO
  anti-sense: NO
ttgtataaagtagccgatattttttgtggtgctggagggttgagttatggcttttccacacacccctattttgaattgatatgggctaacgatatagacaaagacgctattttaagctatcaagctaatcataaagaaacgcaaaccattttatgcgatattgcgcaacttcattgccacaacttgccacgcgttccaattgacattctgctaggcggaccaccatgtcagagctattctacccttggcaaaagaaaaatggatgaaaaagcgaatctgtttaaagaatatttgcggatcttagatttagtgaaaccaaaaatatttgtttttgaaaatgtggtgggtttaatgtctatgcaaaaagggcaattgttccaacgaatttgtaacgcttttaaagagagaggttatattttagagcatgccattttaaacgctctagattatggtgtgcctcaagtaagagagcgagtgattttagtgggcgcgcttaaaagttttaaacaaaaattttacttccctaaacccataaaaacgcatttttctctaaaagacgctttaggggatttaccacccattcaaagcggtgaaaatggcgatgctttaggttatcttaaaaatgcggataatgtttttttggaatttgtgcgaaattctaaagaattaagcgagcatagcagtcctaaaaacaatgaaaaactgataaaaatcatgcaaacgctaaaagacggacagagtaaagatgatttgccagaaagtttacgccccaaaagcggttatattaatacctatgccaaaatgtggtgggaaaaaccagcccccaccattacgagaaatttttctaccccaagcagttctaggtgcatccatccaagagactctagagcgttaagcattagagagggagcaagattgcaaagctttcctgataattataaattctatgggagcgctaacgctaaaagattgcaaattggcaatgccgtgccgcctttattgagtgcagcgctcgctcatgctgtctttgattttttaaggggtaaaaatgtttga

SEQ ID NO: 2480 - DNA (genomic), 1056 bp, Helicobacter pylori; double-stranded, circular
  misc_feature (B) LOCATION 1...1056
  hypothetical: NO
  anti-sense: NO
aacttgtataaagtagccgatattttttgtggtgctggagggttgagttatggcttttccacacacccctattttgaattgatatgggctaacgatatagacaaagacgctattttaagctatcaagctaatcataaagaaacgcaaaccattttatgcgatattgcgcaacttcattgccacaacttgccacgcgttccaattgacattctgctaggcggaccaccatgtcagagctattctacccttggcaaaagaaaaatggatgaaaaagcgaatctgtttaaagaatatttgcggatcttagatttagtgaaaccaaaaatatttgtttttgaaaatgtggtgggtttaatgtctatgcaaaaagggcaattgttccaacgaatttgtaacgcttttaaagagagaggttatattttagagcatgccattttaaacgctctagattatggtgtgcctcaagtaagagagcgagtgattttagtgggcgcgcttaaaagttttaaacaaaaattttacttccctaaacccataaaaacgcatttttctctaaaagacgctttaggggatttaccacccattcaaagcggtgaaaatggcgatgctttaggttatcttaaaaatgcggataatgtttttttggaatttgtgcgaaattctaaagaattaagcgagcatagcagtcctaaaaacaatgaaaaactgataaaaatcatgcaaacgctaaaagacggacagagtaaagatgatttgccagaaagtttacgccccaaaagcggttatattaatacctatgccaaaatgtggtgggaaaaaccagcccccaccattacgagaaatttttctaccccaagcagttctaggtgcatccatccaagagactctagagcgttaagcattagagagggagcaagattgcaaagctttcctgataattataaattctatgggagcgctaacgctaaaagattgcaaattggcaatgccgtgccgcctttattgagtgcagcgctcgctcatgctgtctttgattttttaaggggtaaaaatgtt

SEQ ID NO: 2481 - DNA (genomic), 930 bp, Helicobacter pylori; double-stranded, circular
  misc_feature (B) LOCATION 1...930
  hypothetical: NO
  anti-sense: NO
atgcatgcgaatttattcaaccaaaacgctagtaaaaaagacatttttttgcacaatttgcgttctaataatgggcgttacaaacgctatgtaaaagcccctttaagatatggtgggggcaagtctttagctgtagggttaatagtggagtgtatacctaatggtgtgcgtagggttattagcccttttataggtggggggagcgtagaaattgcatgcgcgacagagttgggtttagaagtgttgggctttgatatttttgatattttagtgaatttttatcaagcgctactcaaagacaaacaagctctttatgataatttgttctctttagaacctaatcaagaaacttacagcattatcaagcaagagttaaaagcccattataaaaaagaatgcgttttagaccctttaattttggccagagattattactttaactttaatttaagttatggaccgggatttttggggtggatgagtaaaatttataccgataaacaacgctatctaaacacccttttaaaaattaaagattttaacgcccctagtttaaaagtggaatgctctagttttgaagaagtgttgatcgcttatcctaatgattttttctatcttgacccctcttatgtgttagaaaattctaaaatgtttaaggggatttaccctatgcgtaatttccctatccaccataatggttttaaacatgaagtattggctcacatgttaaaaaggcataaagggccatttattttaagctataatgactgcgaattggtaaggaatgcttataaggattttaaaattttagaaccctcttggcaatacactatgggacaaggcgaaaccagaatgggtaaaaaccgcttagaaagaggcgataataaccatgtcaaacaatctcatgagctattgatcattaaggagtaa

SEQ ID NO: 2482 - DNA (genomic), 942 bp, Helicobacter pylori; double-stranded, circular
  misc_feature (B) LOCATION 1...942
  hypothetical: NO
  anti-sense: NO
atagaattttttggaatgcatgcgaatttattcaaccaaaacgctagtaaaaaagacatttttttgcacaatttgcgttctaataatgggcgttacaaacgctatgtaaaagcccctttaagatatggtgggggcaagtctttagctgtagggttaatagtggagtgtatacctaatggtgtgcgtagggttattagcccttttataggtggggggagcgtagaaattgcatgcgcgacagagttgggtttagaagtgttgggctttgatatttttgatattttagtgaatttttatcaagcgctactcaaagacaaacaagctctttatgataatttgttctctttagaacctaatcaagaaacttacagcattatcaagcaagagttaaaagcccattataaaaaagaatgcgttttagaccctttaattttggccagagattattactttaactttaatttaagttatggaccgggatttttggggtggatgagtaaaatttataccgataaacaacgctatctaaacacccttttaaaaattaaagattttaacgcccctagtttaaaagtggaatgctctagttttgaagaagtgttgatcgcttatcctaatgattttttctatcttgacccctcttatgtgttagaaaattctaaaatgtttaaggggatttaccctatgcgtaatttccctatccaccataatggttttaaacatgaagtattggctcacatgttaaaaaggcataaagggccatttattttaagctataatgactgcgaattggtaaggaatgcttataaggattttaaaattttagaaccctcttggcaatacactatgggacaaggcgaaaccagaatgggtaaaaaccgcttagaaagaggcgataataaccatgtcaaacaatctcatgagctattgatcattaaggag

SEQ ID NO: 2483 - DNA (genomic), 273 bp, Helicobacter pylori; double-stranded, circular
  misc_feature (B) LOCATION 1...273
  hypothetical: NO
  anti-sense: NO
aaaaaaacacgcttgtttgaatctttggattctgagcatagcgaaaccgccaaaacctctgttgagattgaaaaaggtttggatattgaaaaagcctttcatttgggcgtgaacgcaaaatttttccttgaagccttaaacgctttagggacaacgcaatttgttttaaaatgcaatgagccttcttcgccttttttgattcaagaacctcttgatgaaaagcaaagccacttgaacgctaaaatttccactttgatgatgccaatcacacta

SEQ ID NO: 2484 - DNA (genomic), 318 bp, Helicobacter pylori; double-stranded, circular
  misc_feature (B) LOCATION 1...318
  hypothetical: NO
  anti-sense: NO
ttgtgcagttctttaagctccaccattaagctcactttagaaaaaaacaacgctttgtttgaatctttggattctgagcatagcgaaaccgccaaaacctctgttgagattgaaaaaggtttggatattgaaaaagcctttcatttgggcgtgaacgcaaaatttttccttgaagccttaaacgctttagggacaacgcaatttgttttaaaatgcaatgagccttcttcgccttttttgattcaagaacctcttgatgaaaagcaaagccacttgaacgctaaaatttccactttgatgatgccaatcacactataa

SEQ ID NO: 2485 - DNA (genomic), 795 bp, Helicobacter pylori; double-stranded, circular
  misc_feature (B) LOCATION 1...795
  hypothetical: NO
  anti-sense: NO
atgaaaatcagtgttagtaaaaacgatttagaaaacactttgcgctacttgcaagcttttttggataaaaaggacgcttcctctatcgcttcacacatccatttagaagtcattaaagaaaagctctttttaaaagccagcgattcagatattggactaaaaagctatatttctacgcaatctaccgataaagagggcgtaggcacgatcaacgggaagaagtttttagatattatctcatgtttgaaagactctaatattgttttagagactaaagatgacagcttggtgatcaaacaaaataaaagctctttcaaactccccatgtttgacgctgatgagttccctgaattccctgttattgatccaaaagtgagtttagaaatcaatgccccctttttggtggatgcgtttaaaaagatcgctcctgtgattgagcaaactagccataaaagggaattagccggtgttttaatgcaattcaatcaaaaacaccaaaccctttcagtggtaggcacggataccaagcggctctcttacacgcagttagaaaaaatctctatccattccaccgaagaagacatctcttgcattttgcctaaaagggctttattggaaatccttaaacttttttatgaaaatttcagttttaaaagcgacggcatgttagcggtggttgaaaacgaaacgcacgcttttttcaccaagctcattgatgggaattaccctgattatcaaaaaatcctccctaaagaatacacttcttctttcactttaggcaaggaagaattttaa

SEQ ID NO: 2486 - DNA (genomic), 804 bp, Helicobacter pylori; double-stranded, circular
  misc_feature (B) LOCATION 1...804
  hypothetical: NO
  anti-sense: NO
gaccaaaaattcaaggggattattttagctatgaaaatcagtgttagtaaaaacgatttagaaaacactttgcgctacttgcaagcttttttggataaaaaggacgcttcctctatcgcttcacacatccatttagaagtcattaaagaaaagctctttttaaaagccagcgattcagatattggactaaaaagctatatttctacgcaatctaccgataaagagggcgtaggcacgatcaacgggaagaagtttttagatattatctcatgtttgaaagactctaatattgttttagagactaaagatgacagcttggtgatcaaacaaaataaaagctctttcaaactccccatgtttgacgctgatgagttccctgaattccctgttattgatccaaaagtgagtttagaaatcaatgccccctttttggtggatgcgtttaaaaagatcgctcctgtgattgagcaaactagccataaaagggaattagccggtgttttaatgcaattcaatcaaaaacaccaaaccctttcagtggtaggcacggataccaagcggctctcttacacgcagttagaaaaaatctctatccattccaccgaagaagacatctcttgcattttgcctaaaagggctttattggaaatccttaaacttttttatgaaaatttcagttttaaaagcgacggcatgttagcggtggttgaaaacgaaacgcacgcttttttcaccaagctcattgatgggaattaccctgattatcaaaaaatcctccctaaagaatacacttctctctcactt

SEQ ID NO: 2487 - DNA (genomic), 1125 bp, Helicobacter pylori; double-stranded, circular
  misc_feature (B) LOCATION 1...1125
  hypothetical: NO
  anti-sense: NO
atgaaaatcagtgttagtaaaaacgatttagaaaacactttgcgctacttgcaagcttttttggataaaaaggacgcttcctctatcgcttcacacatccatttagaagtcattaaagaaaagctctttttaaaagccagcgattcagatattggactaaaaagctatatttctacgcaatctaccgataaagagggcgtaggcacgatcaacgggaagaagtttttagatattatctcatgtttgaaagactctaatattgttttagagactaaagatgacagcttggtgatcaaacaaaataaaagctctttcaaactccccatgtttgacgctgatgagttccctgaattccctgttattgatccaaaagtgagtttagaaatcaatgccccctttttggtggatgcgtttaaaaagatcgctcctgtgattgagcaaactagccataaaagggaattagccggtgttttaatgcaattcaatcaaaaacaccaaaccctttcagtggtaggcacggataccaagcggctctcttacacgcagttagaaaaaatctctatccattccaccgaagaagacatctcttgcattttgcctaaaagggctttattggaaatccttaaacttttttatgaaaatttcagttttaaaagcgacggcatgttagcggtggttgaaaacgaaacgcacgcttttttcaccaagctcattgatgggaattaccctgattatcaaaaaatcctccctaaagaatacacttcttctttcactttaggcaaggaagaatttaaagagggcattaagttgtgcagttctttaagctccaccattaagctcactttagaaaaaaacaacgctttgtttgaatctttggattctgagcatagcgaaaccgccaaaacctctgttgagattgaaaaaggtttggatattgaaaaagcctttcatttgggcgtgaacgcaaaatttttccttgaagccttaaacgctttagggacaacgcaatttgttttaaaatgcaatgagccttcttcgccttttttgattcaagaacctcttgatgaaaagcaaagccacttgaacgctaaaatttccactttgatgatgccaatcacactataa

SEQ ID NO: 2488 - DNA (genomic), 204 bp, Helicobacter pylori; double-stranded, circular
  misc_feature (B) LOCATION 1...204
  hypothetical: NO
  anti-sense: NO
ttgcataaaaccctttttaaagaataccccaaagcttttaatgttttaaatattctcattgctgtgagagataaagatgatatagtgcgtgatgctaatggcaatttttaccccttatattcttattttgaaaatgatgaaaaagtctatgagtttattcgccaatatggggttggagcaaattttttgcaacagagacattaa

SEQ ID NO: 2489 - DNA (genomic), 204 bp, Helicobacter pylori; double-stranded, circular
  misc_feature (B) LOCATION 1...204
  hypothetical: NO
  anti-sense: NO
aaattgcataaaaccctttttaaagaataccccaaagcttttaatgttttaaatattctcattgctgtgagagataaagatgatatagtgcgtgatgctaatggcaatttttaccccttatattcttattttgaaaatgatgaaaaagtctatgagtttattcgccaatatggggttggagcaaattttttgcaacagagacat

SEQ ID NO: 2490 - DNA (genomic), 834 bp, Helicobacter pylori; double-stranded, circular
  misc_feature (B) LOCATION 1...834
  hypothetical: NO
  anti-sense: NO
atgataatcgcgcattctaatgaaatcgcacaccccatttttaaaagcgcagacaagctttttactctttatcaaggggattgcaatgaggtgttgccccaatttgaaaatgcttttgatttgatttttgccgatccgccttatttcctttctaatgacggcttaagcatacagagcggtaaaatcgtgagcgtcaataaaggcgattgggataaagaaaatgggattaacgatattgatgaattcaattaccagtggatcaacaacgccaaaaaggctttaaaaaatacaggaagccttttaatcagcgggacttaccacaaccttttttctttggggcgtattttacaaaaactggattttaagattttaaatctcatcacttggcaaaaaaccaaccctccccccaatttcagctgccgttatttgacgcattccgctgagcaaatcatttgggcgaggaaaagctacaagcacaagcatgtttttaactatgagattttaaaaaagatcaataataataaacaaatgcgtgatgtgtggaatttcccagcgatcgctccttgggaaaaagcaaatggcaagcaccccactcaaaaacccctcgcactgttggtgcgcttgcttttaatggcgagcgatgataattccctcattggcgatccttttagcgggagctccaccacaggcattgcggctaatcttttgaaaagggagtttatcggtatagaaaaagaaagcaggtttatcaaaatatccatgaacagaaaattagaattagacgctcgccatcaagagatacgatctaaaatcaaagatttgaatttccaataa

SEQ ID NO: 2491 - DNA (genomic), 852 bp, Helicobacter pylori; double-stranded, circular
  misc_feature (B) LOCATION 1...852
  hypothetical: NO
  anti-sense: NO
ttttatatcaaaggtgcaaaaatgataatcgcgcattctaatgaaatcgcacaccccatttttaaaagcgcagacaagctttttactctttatcaaggggattgcaatgaggtgttgccccaatttgaaaatgcttttgatttgatttttgccgatccgccttatttcctttctaatgacggcttaagcatacagagcggtaaaatcgtgagcgtcaataaaggcgattgggataaagaaaatgggattaacgatattgatgaattcaattaccagtggatcaacaacgccaaaaaggctttaaaaaatacaggaagccttttaatcagcgggacttaccacaaccttttttctttggggcgtattttacaaaaactggattttaagattttaaatctcatcacttggcaaaaaaccaaccctccccccaatttcagctgccgttatttgacgcattccgctgagcaaatcatttgggcgaggaaaagctacaagcacaagcatgtttttaactatgagattttaaaaaagatcaataataataaacaaatgcgtgatgtgtggaatttcccagcgatcgctccttgggaaaaagcaaatggcaagcaccccactcaaaaacccctcgcactgttggtgcgcttgcttttaatggcgagcgatgataattccctcattggcgatccttttagcgggagctccaccacaggcattgcggctaatcttttgaaaagggagtttatcggtatagaaaaagaaagcaggtttatcaaaatatccatgaacagaaaattagaattagacgctcgccatcaagagatacgatctaaaatcaaagatttgaatttccaa

SEQ ID NO: 2492 - DNA (genomic), 219 bp, Helicobacter pylori; double-stranded, circular
  misc_feature (B) LOCATION 1...219
  hypothetical: NO
  anti-sense: NO
atgaaaaaccatctgccctttgatacttttttaaaaagccttaagacaagcaacaggactttagattttttcaccgattggcaaaagtgcctcaaaaataaaaatgaaataagtatcgctttaaaccacttgaattttttacttgggaaagatacaaaagagcttaaaaattgcataaaaccctttttaaagaataccccaaagcttttaatgttttaa

SEQ ID NO: 2493 - DNA (genomic), 228 bp, Helicobacter pylori; double-stranded, circular
  misc_feature (B) LOCATION 1...228
  hypothetical: NO
  anti-sense: NO
aacggagtaaaaatgaaaaaccatctgccctttgatacttttttaaaaagccttaagacaagcaacaggactttagattttttcaccgattggcaaaagtgcctcaaaaataaaaatgaaataagtatcgctttaaaccacttgaattttttacttgggaaagatacaaaagagcttaaaaattgcataaaaccctttttaaagaataccccaaagcttttaatgttt

SEQ ID NO: 2494 - DNA (genomic), 279 bp, Helicobacter pylori; double-stranded, circular
  misc_feature (B) LOCATION 1...279
  hypothetical: NO
  anti-sense: NO
atgatactaaaaaatttgattttgttatttttagcaaagagaaaacttattttcatagaagctaatttttataccattagtgggagcaagcttaatgaagtcgcaagatcctatcaagacttagctttaaaatttgaagcatttcctaattacgaatttatttggataactgatggcataggttggctagacgctaaaagcaagctccaagaagcttacaaatctgtagaaatctataacttaagctatgtgaatgattttatatcaaaggtgcaaaaa

SEQ ID NO: 2495 - DNA (genomic), 309 bp, Helicobacter pylori; double-stranded, circular
  misc_feature (B) LOCATION 1...309
  hypothetical: NO
  anti-sense: NO
ttgaggatttacgccaggcttttggaaatgatactaaaaaatttgattttgttatttttagcaaagagaaaacttattttcatagaagctaatttttataccattagtgggagcaagcttaatgaagtcgcaagatcctatcaagacttagctttaaaatttgaagcatttcctaattacgaatttatttggataactgatggcataggttggctagacgctaaaagcaagctccaagaagcttacaaatctgtagaaatctataacttaagctatgtgaatgattttatatcaaaggtgcaaaaatga

SEQ ID NO: 2496 - DNA (genomic), 318 bp, Helicobacter pylori; double-stranded, circular
  misc_feature (B) LOCATION 1...318
  hypothetical: NO
  anti-sense: NO
atattagagaatttgaggatttacgccaggcttttggaaatgatactaaaaaatttgattttgttatttttagcaaagagaaaacttattttcatagaagctaatttttataccattagtgggagcaagcttaatgaagtcgcaagatcctatcaagacttagctttaaaatttgaagcatttcctaattacgaatttatttggataactgatggcataggttggctagacgctaaaagcaagctccaagaagcttacaaatctgtagaaatctataacttaagctatgtgaatgattttatatcaaaggtgcaaaaa

SEQ ID NO: 2497 - DNA (genomic), 822 bp, Helicobacter pylori; double-stranded, circular
  misc_feature (B) LOCATION 1...822
  hypothetical: NO
  anti-sense: NO
cttttgattgaaagcatgggttcttattttatggagtgtccaatgaaaaagaaagctaacgaagaaaaagcccccaaaagagctaaacaggaagccaaaacagaagccacacaggaaaataaagctaaagagagtaataaggaaaacaaaaacaataaagccaaagagggcaaaattaaagaagccaaaaccaaagaaagtaaagtcaaagaaacagcgaaagagcctatccctgttaaaaagcttagttttaatgaagcgtttgtagaattgttcgctaattccttaagcgattgcgtttcttatgagtccatcattcaaatcagcgcgaaagtccccactctagcccaaatcaaaaaaatcaaagaattgtgccaaaaataccaaaaaaaattagtcagctcttcagaatacgctaaaaaactcaatgcgattgacaagattaaaaacaccgaagaaaagcaaaaagttttagacgaagaattagaagacggctatgactttttgaaagaaaaggattttttagagtggagcaggagcgatagcccggtacgcatgtatttgcgtgaaatgggggatataaaacttttaagcaaagatgaagagattgaattaagcaagcaaatccgcttgggtgaagacattattttagacgcgatttgctcggtgccgtatttgattgattttatctatgcgtataaagacgctttaatcaatcgtgaaagaagggttaaagagcttttcaggagctttgatgatgacgatgattataacgtgagcgatcctgctctatatgattaccgcgcagatgagcaagatcac

SEQ ID NO: 2498 - DNA (genomic), 978 bp, Helicobacter pylori; double-stranded, circular
  misc_feature (B) LOCATION 1...978
  hypothetical: NO
  anti-sense: NO
aacgcttggaaatacaaactgcccttattcaatgacactttgatcgctaaccataaaaaaatccttgccaatatcactaacatgactaaagaagacattatcgctcaagtgccagaagcgactatggtgagcgtgtatatggatctcaaaaaactctttttgactaaagaggcgagcgaagaaggctttgatttagcccctaacaaactaaaagagattttagagcaaatcaaaagagggaaattgatttccgatcgcgctaaaaacaaaatggctaaatccaatttaaggttggtagtgagcatcgctaaacgattcacgagcagaggcttacccttcttggatttgattcaagagggtaatatcggcttgatgaaagcggtggataagtttgagcatgaaaagggcttcaagttttctacctatgcgacctggtggatcaagcaggctatcagcagagccatagccgatcaagcccgcaccatccgcatccccattcacatgattgacacgatcaatcgcatcaataaagtcatgcgcaaacacattcaagaaaccggcaaagagcctgatttagaagtggtggctgaagaagtggggctttccttagataaagtgaagaatgtgattaaggtgactaaagagcctatcagtttagaaaccccagttgacaatgatgatgacggcaaatttggggatttcgtggaagataaaaatatcgttagctctatcgatcacatcatgcgagaagatttgaaagcccaaattgaaagcgttttggatcagttgaacgagcgagaaaaagcggtgatccgcatgcgttttgggcttttggacgatgaaagcgatcggactttagaagaaatcggcaaagaattgaatgttactagagaaagggtgcgccagattgaaagctctgcgatcaaaaaattgagaagcccgcaatacgggcgcattttgagaaactatttgcgcatt

SEQ ID NO: 2499 - DNA (genomic), 2046 bp, Helicobacter pylori; double-stranded, circular
  misc_feature (B) LOCATION 1...2046
  hypothetical: NO
  anti-sense: NO
atgaaaaagaaagctaacgaagaaaaagcccccaaaagagctaaacaggaagccaaaacagaagccacacaggaaaataaagctaaagagagtaataaggaaaacaaaaacaataaagccaaagagggcaaaattaaagaagccaaaaccaaagaaagtaaagtcaaagaaacagcgaaagagcctatccctgttaaaaagcttagttttaatgaagcgttagaagaattgttcgctaattccttaagcgattgcgtttcttatgagtccatcattcaaatcagcgcgaaagtccccactctagcccaaatcaaaaaaatcaaagaattgtgccaaaaataccaaaaaaaattagtcagctcttcagaatacgctaaaaaactcaatgcgattgacaagattaaaaacaccgaagaaaagcaaaaagttttagacgaagaattagaagacggctatgactttttgaaagaaaaggattttttagagtggagcaggagcgatagcccggtacgcatgtatttgcgtgaaatgggggatataaaacttttaagcaaagatgaagagattgaattaagcaagcaaatccgcttgggtgaagacattattttagacgcgatttgctcggtgccgtatttgattgattttatctatgcgtataaagacgctttaatcaatcgtgaaagaagggttaaagagcttttcaggagctttgatgatgacgatgaaaatagcgtgagcgatcctaaaaaagatgatgacagcgaagaagatgaagaaaacgaagaaaggaaaaaagtcgtttccgaaaaagacaagaagcgcgttgaaaaggtccaagagagttttaaagccctagacaaggctaaaaaagaatggcttaaagcccttgaagcccccatagatgaaaaagaagacgagttagtgcgttcattgaccctagcttacaaacgccaaacgctcaaagacagactctatgatttagagcctactagcaaactgattaatgaattagtcaaaacgatggagaccactttaaagagcggcgatgggtttgaaaaagagttgaaacgcttggaatacaaactgcccttattcaatgacactttgatcgctaaccataaaaaaatccttgccaatatcactaacatgactaaagaagacattatcgctcaagtgccagaagcgactatggtgagcgtgtatatggatctcaaaaaactctttttgactaaagaggcgagcgaagaaggctttgatttagcccctaacaaactaaaagagattttagagcaaatcaaaagagggaaattgatttccgatcgcgctaaaaacaaaatggctaaatccaatttaaggttggtagtgagcatcgctaaacgattcacgagcagaggcttacccttcttggatttgattcaagagggtaatatcggcttgatgaaagcggtggataagtttgagcatgaaaagggcttcaagttttctacctatgcgacctggtggatcaagcaggctatcagcagagccatagccgatcaagcccgcaccatccgcatccccattcacatgattgacacgatcaatcgcatcaataaagtcatgcgcaaacacattcaagaaaccggcaaagagcctgatttagaagtggtggctgaagaagtggggctttccttagataaagtgaagaatgtgattaaggtgactaaagagcctatcagtttagaaaccccagttggcaatgatgatgacggcaaatttggggatttcgtggaagataaaaatatcgttagctctatcgatcacatcatgcgagaagatttgaaagcccaaattgaaagcgttttggatcagttgaacgagcgagaaaaagcggtgatccgcatgcgttttgggcttttggacgatgaaagcgatcggactttagaagaaatcggcaaagaattgaatgttactagagaaagggtgcgccagattgaaagctctgcgatcaaaaaattgagaagcccgcaatacgggcgcattttgagaaactatttgcgcatttga

SEQ ID NO: 2500 - DNA (genomic), 543 bp, Helicobacter pylori; double-stranded, circular
  misc_feature (B) LOCATION 1...543
  hypothetical: NO
  anti-sense: NO
ataacgatgttaaaaagaattaaagtaggttctgatttgaataaaaaagagagtttgttagatgcgtttgttaaaacctatctgcagactttggaacccattagctctaaacgcttgaaagagttggcgaatttgaaagtgtcttgcgcgacgatcaggaattattttcaaatcctttctaaagaaggcatgctccatcaaacccattctaacggtgctagattgcctacttttaaggcgtttgaaaactattggcacaagtcgttgcgctttgaagttttaaaggtgaatgaaaaacgcttaaaaagcgcgagtgaaaactttgggctttttacgctgttaaaaaaacccagcttggagcgtttggaaagagtcattgagtgcgaaaaacgctttttgattttggattttttggcgttttcttgcgcggtgggttacagcgttaaaatggagaaatttttattggagcttgtgggcaggagcgttaaagaagtgcgtttaatcgctgcttctgtcaatgcgtttgaagtttggccaggcaat

SEQ ID NO: 2501 - DNA (genomic), 801 bp, Helicobacter pylori; double-stranded, circular
  misc_feature (B) LOCATION 1...801
  hypothetical: NO
  anti-sense: NO
atgttaaaaagaattaaagtaggttctgatttgaataaaaaagagagtttgttagatgcgtttgttaaaacctatctgcagactttagaacccattagctctaaacgcttgaaagagttggcgaatttgaaagtgtcttgcgcgacgatcaggaattattttcaaatcctttctaaagaaggcatgctccatcaagcccattctagcggtgctagattgcctacttttaaggcgtttgaaaactattggcacaagtcgttgcgctttgaagttttaaaggtgaatgaaaaacgcttaaaaagcgcgagtgaaaactttgggctttttacgctgttaaaaaaacccagcttggagcgtttggaaagagtcattgagtgcgaaaaacgctttttgattttggattttttggcgttttcttgcgcggtgggttacagcgttaaaatggagaaatttttattggagcttgtgggcaggagcgttaaagaagtgcgtttaatcgctgcttctgtcaatgcgttgagtttggccaggcaattagagcgtttggagtattccagcgcgcaaatcacgcgctttaatctcatggggttaaaaacgcttttaaacagtcctttattttttgacattttagagggtaaggttttggagcgtttcaaaaaggggttgcattttatagaacctgattgcatgctagtaacgcgccctatagaatttcaaaacgagcggatgcaactgctttgcgtggggaaattggaatgcgattatgaagggttttttcaaacgatttctaaggaggaataa

SEQ ID NO: 2502 - DNA (genomic), 2259 bp, Helicobacter pylori; double-stranded, circular
  misc_feature (B) LOCATION 1...2259
  hypothetical: NO
  anti-sense: NO
atgtttgcgagcttgaatgttttaaaagaattgcaaaagcattatgaaaataaccccaaagatcccctaaaaggcatcatctggcacacgcaaggcagcggtaaaaccgccttaacctaccatttaaccaaactcataagagacttttttagcccattagggaaaaagactaaattttattttattgtggacaggttggatttattagagcaagccaaaaacgagtttttaaaaagaggtctttgtgcgcatgaggcagaaaataaagaggatttgagccaaaaattaaaaagctctagcgtgtttgaaaaccctcaagggaatgatgaaatcatcgttgtgaatatccaaaaattcaaagcccccaatgaagacccctctaatagcgctcctaaagaaatcatttctaaaacagaattgcaagaatccattcaaaacagccgcaatttacaaagggtgtttatcatagatgaagcccacaggagctacgatcctaaaggttgcttttacgccaatttgatagaatgcgacaagacagcggttaaaatcgcccttacaggcacacccctattagaagacaacgcgcaagataaagccactaaaaacacttttggcaactacttgcacacctattcttatgcagaatccattaaagacagacacaccctaaaactccaattagaaatcattgaaaagagctataaagaaaaactacaagcaatctatcgccttttacaagaaagcatcactattgaagatgtagaggttaaaaaagaaatgatttttaatcatgaaaaatacattaaagaaatgctctattatatcatcagagatttattgaatttcaggcgtgtaaataatgatgaaaatttaaaggctatggtggtttgtttttcaagcgctcaagccaaattagctaattggctttttaatgaagtccaagaaagagtcttacaagaaaaccctaacttaagaattttaaaaaaactccaatccagcctgattttgcatgacgaacaagaagtcaaagaaaagatctattctttcaaacataaagatacggatatagtctttgtgtttaacatgcttttaaccggctttgatttacccaatctcaaacgcctttatatccacagagaattaaaagatcataatttgctccaagccctagccagagtgaatcgaccctataacaacatgccttttggctaccttatagattttgtagggattaaagaaaattatgacaaaacgactgatgattatttgaaagagttaaaccaattcaatcaaagcgattttaatatcaaagataatctcaaagacatgtttgcggatcgtgaggttttagaaaaagacattaaaaacgcctatgatgatctttttaattaccccattgatgatgtagaggacatgactagcgccattgttggtatcagcgaaatgaatgagcttttaaaagtctcacgcgccattaacacgcttaaagagcgctacaatttaatccgcacttctagcgatgaaaaaatcctttcattaaaagaaaaaattgatattgaaaagatcagcaaaatctcttcaatgctcagtaaaaaagccaaacaactccatgcgttaaaaaatatcaatgagcctaaaaacccaaacgatttaatgattttagaagacctcatcgctcttttagactttaaaatagattttaaggaaagcaaagaattgcattttaaagaaagagaagagattaacgccaaatacaagcaagctaaagagatgttagaaaaaatcccggacaaacaagacaaagaagttcaaaagatttctaaagagctttcaaaactgatccaagaacccctaaccaatgataattttgatggaatttctcattcttatagcgcaatcatttcacaactagaacaacataaggagcaaaccaccaacctattaaataaatacaataacgatcgagcttatgtgatcacgcataagcgacttcacaatcgtctcatggaagaaaacatttctaagggaattttcacgcttttaagcgcgctcaaaaaagctattgatgagcgtatttttaagcgtcaagaaatcttaaacgaagaagataccctaaaaactgccataaaagtagaattaagggacgctttcaacaaaaacccctccttaaaagatttagaaaaagaaacagaatttatcgctcaaaccctttttaacgaactcacgcaaaaccaccatcaaggaaatttgaatgcctaa

SEQ ID NO: 2503 - DNA (genomic), 2547 bp, Helicobacter pylori; double-stranded, circular
  misc_feature (B) LOCATION 1...2547
  hypothetical: NO
  anti-sense: NO
gctagatattaccccccccccgaaaatcatcaaaatcatcaaaatcatcaaaatcatcaaaatcatcaaaatcatcaaaaccacaaatcgcttgaagaaattcaagaaagcgtcttaaacgaattcaaccttaaaaacaccgactgcccaaaaagccctaaagacacccccacaaacgcccttttaacttcgttttgttccccaaaaaggctttgctttatcctaaaatacggcattagtttcttaaaagaaaaatcagagtttaaaaaacacatttggcgttacgcgcagatgtttgcgagcttgaatgttttaaaagaattgcaaaagcattatgaaaataaccccaaagatcccctaaaaggcatcatctggcacacgcaaggcagcggtaaaaccgccttaacctaccatttaaccaaactcataagagacttttttagcccattagggaaaaagactaaattttattttattgtggacaggttggatttattagagcaagccaaaaacgagtttttaaaaagaggtctttgtgcgcatgaggcagaaaataaagaggatttgagccaaaaattaaaaagctctagcgtgtttgaaaaccctcaagggaatgatgaaatcatcgttgtgaatatccaaaaattcaaagcccccaatgaagacccctctaatagcgctcctaaagaaatcatttctaaaacagaattgcaagaatccattcaaaacagccgcaatttacaaagggtgtttatcatagatgaagcccacaggagctacgatcctaaaggttgcttttacgccaatttgatagaatgcgacaagacagcggttaaaatcgcccttacaggcacacccctattagaagacaacgcgcaagataaagccactaaaaacacttttggcaactacttgcacacctattcttatgcagaatccattaaagacagacacaccctaaaactccaattagaaatcattgaaaagagctataaagaaaaactacaagcaatctatcgccttttacaagaaagcatcactattgaagatgtagaggttaaaaaagaaatgatttttaatcatgaaaaatacattaaagaaatgctctattatatcatcagagatttattgaatttcaggcgtgtaaataatgatgaaaatttaaaggctatggtggtttgtttttcaagcgctcaagccaaattagctaattggctttttaatgaagtccaagaaagagtcttacaagaaaaccctaacttaagaattttaaaaaaactccaatccagcctgattttgcatgacgaacaagaagtcaaagaaaagatctattctttcaaacataaagatacggatatagtctttgtgtttaacatgcttttaaccggctttgatttacccaatctcaaacgcctttatatccacagagaattaaaagatcataatttgctccaagccctagccagagtgaatcgaccctataacaacatgccttttggctaccttatagattttgtagggattaaagaaaattatgacaaaacgactgatgattatttgaaagagttaaaccaattcaatcaaagcgattttaatatcaaagataatctcaaagacatgtttgcggatcgtgaggttttagaaaaagacattaaaaacgcctatgatgatctttttaattaccccattgatgatgtagaggacatgactagcgccattgttggtatcagcgaaatgaatgagcttttaaaagtctcacgcgccattaacacgcttaaagagcgctacaatttaatccgcacttctagcgatgaaaaaatcctttcattaaaagaaaaaattgatattgaaaagatcagcaaaatctcttcaatgctcagtaaaaaagccaaacaactccatgcgttaaaaaatatcaatgagcctaaaaacccaaacgatttaatgattttagaagacctcatcgctcttttagactttaaaatagattttaaggaaagcaaagaattgcattttaaagaaagagaagagattaacgccaaatacaagcaagctaaagagatgttagaaaaaatcccggacaaacaagacaaagaagttcaaaagatttctaaagagctttcaaaactgatccaagaacccctaaccaatgataattttgatggaatttctcattcttatagcgcaatcatttcacaactagaacaacataaggagcaaaccaccaacctattaaataaatacaataacgatcgagcttatgtgatcacgcataagcgacttcacaatcgtctcatggaagaaaacatttctaagggaattttcacgcttttaagcgcgctcaaaaaagctattgatgagcgtatttttaagcgtcaagaaatcttaaacgaagaagataccctaaaaactgccataaaagtagaattaagggacgctttcaacaaaaacccctccttaaaagatttagaaaaagaaacagaatttatcgctcaaaccctttttaacgaactcacgcaaaaccaccatcaaggaaatttgaatgcc

SEQ ID NO: 2504 - DNA (genomic), 2550 bp, Helicobacter pylori; double-stranded, circular
  misc_feature (B) LOCATION 1...2550
  hypothetical: NO
  anti-sense: NO
gctagatattaccccccccccgaaaatcatcaaaatcatcaaaatcatcaaaatcatcaaaatcatcaaaatcatcaaaaccacaaatcgcttgaagaaattcaagaaagcgtcttaaacgaattcaaccttaaaaacaccgactgcccaaaaagccctaaagacacccccacaaacgcccttttaacttcgttttgttccccaaaaaggctttgctttatcctaaaatacggcattagtttcttaaaagaaaaatcagagtttaaaaaacacatttggcgttacgcgcagatgtttgcgagcttgaatgttttaaaagaattgcaaaagcattatgaaaataaccccaaagatcccctaaaaggcatcatctggcacacgcaaggcagcggtaaaaccgccttaacctaccatttaaccaaactcataagagacttttttagcccattagggaaaaagactaaattttattttattgtggacaggttggatttattagagcaagccaaaaacgagtttttaaaaagaggtctttgtgcgcatgaggcagaaaataaagaggatttgagccaaaaattaaaaagctctagcgtgtttgaaaaccctcaagggaatgatgaaatcatcgttgtgaatatccaaaaattcaaagcccccaatgaagacccctctaatagcgctcctaaagaaatcatttctaaaacagaattgcaagaatccattcaaaacagccgcaatttacaaagggtgtttatcatagatgaagcccacaggagctacgatcctaaaggttgcttttacgccaatttgatagaatgcgacaagacagcggttaaaatcgcccttacaggcacacccctattagaagacaacgcgcaagataaagccactaaaaacacttttggcaactacttgcacacctattcttatgcagaatccattaaagacagacacaccctaaaactccaattagaaatcattgaaaagagctataaagaaaaactacaagcaatctatcgccttttacaagaaagcatcactattgaagatgtagaggttaaaaaagaaatgatttttaatcatgaaaaatacattaaagaaatgctctattatatcatcagagatttattgaatttcaggcgtgtaaataatgatgaaaatttaaaggctatggtggtttgtttttcaagcgctcaagccaaattagctaattggctttttaatgaagtccaagaaagagtcttacaagaaaaccctaacttaagaattttaaaaaaactccaatccagcctgattttgcatgacgaacaagaagtcaaagaaaagatctattctttcaaacataaagatacggatatagtctttgtgtttaacatgcttttaaccggctttgatttacccaatctcaaacgcctttatatccacagagaattaaaagatcataatttgctccaagccctagccagagtgaatcgaccctataacaacatgccttttggctaccttatagattttgtagggattaaagaaaattatgacaaaacgactgatgattatttgaaagagttaaaccaattcaatcaaagcgattttaatatcaaagataatctcaaagacatgtttgcggatcgtgaggttttagaaaaagacattaaaaacgcctatgatgatctttttaattaccccattgatgatgtagaggacatgactagcgccattgttggtatcagcgaaatgaatgagcttttaaaagtctcacgcgccattaacacgcttaaagagcgctacaatttaatccgcacttctagcgatgaaaaaatcctttcattaaaagaaaaaattgatattgaaaagatcagcaaaatctcttcaatgctcagtaaaaaagccaaacaactccatgcgttaaaaaatatcaatgagcctaaaaacccaaacgatttaatgattttagaagacctcatcgctcttttagactttaaaatagattttaaggaaagcaaagaattgcattttaaagaaagagaagagattaacgccaaatacaagcaagctaaagagatgttagaaaaaatcccggacaaacaagacaaagaagttcaaaagatttctaaagagctttcaaaactgatccaagaacccctaaccaatgataattttgatggaatttctcattcttatagcgcaatcatttcacaactagaacaacataaggagcaaaccaccaacctattaaataaatacaataacgatcgagcttatgtgatcacgcataagcgacttcacaatcgtctcatggaagaaaacatttctaagggaattttcacgcttttaagcgcgctcaaaaaagctattgatgagcgtatttttaagcgtcaagaaatcttaaacgaagaagataccctaaaaactgccataaaagtagaattaagggacgctttcaacaaaaacccctccttaaaagatttagaaaaagaaacagaatttatcgctcaaaccctttttaacgaactcacgcaaaaccaccatcaaggaaatttgaatgcctaa

SEQ ID NO: 2505 - DNA (genomic), 456 bp, Helicobacter pylori; double-stranded, circular
  misc_feature (B) LOCATION 1...456
  hypothetical: NO
  anti-sense: NO
atggatgaaagsctcgtttatggggtgatttgcatgcccagtcaggtttttgccaacaccggcactaacgtgagcatcatcttttttcaaaaaacgccaagcgcaaaggaagtgatcttgattgacgcttccaaactcggcgaagaatacaccgaaaacaaaaacaaaaaaacgcgcttaaggccaagcgatatggatttgattttagaaactttccaaaataaagccccaaaatcggatttttgcgctctggtttcttttgatgaaattacagaaaaaaattattctctaaaccccgggcagtatttcactatagaagacacgagcgagacaatcagccaagcggagtttgaaaacttgatgcaacaatattcaagcgaactagcgagcctttttgatgaaagccaaaatttgcaacaagagattttagaaactttaaaaggggttaggtttgag

SEQ ID NO: 2506 - DNA (genomic), 1632 bp, Helicobacter pylori; double-stranded, circular
  misc_feature (B) LOCATION 1...1632
  hypothetical: NO
  anti-sense: NO
atgcctaataacgctttattgcaaatcaaacaagacaccctaagtctcattgacgatttaaaagtcatttgcaaggatgctggtttagcgggcgacggcaacggatacaagatcatcacgcaatgctttttgtataaattcttatgcgataagtttgaattcttttttgaacaaaaattccccaacaaaacgatacgagactacaaagactttaacgaggaagaaaaagaatattttttccttaccttaagcgataaaaaactccccaaactcgcttatgatgagcttttaaactatctttttgaaaaacatttttacgataacgatttacacctaaagctagatgctattttcaatcgcatttctagcaataatgccgagctttttaacaccaaaagcacggatgaaaccactatcgccttatttgaaagcgtctcacaatacattaatgaagggtctaaaagggctaattttacaagatctttattagacaaactcaaaaattttaatttcaaacaagcttttttaaatttacaaaaccaacaaggctatgactttttcgcccccatttttgaatacttactcaaagattacaataataacagcggagggacatacgccgaatactacacccctttaagcatcgctagcatcattgccaagcttttagtgaataaacccactcaaagcgtcaaaatctatgatccaagcgctggcacaggaacgcttttaatggcattagcccaccaaataggcaccgattcttgcaccctttatgcccaagacatttcgcaaaaatccttaagaatgctcaaactcaacctgattttaaacgacttgacccactctttaagacacgccattgagggaaacactttgactaacccctaccactccaaagaccacaaagggaaaatggatttcatcgtgagtaacccccctttcaaattggatttttccaacgagcatgccgagatttcgcaaaacaaaaacgattttttcttaggcgtgcctaatatccctaaaaacgataaaagcaaaatgcccatttacacgctctttttccagcattgcctgaacatgctcagtccaaaaggtaagggagctataatcgtgccaaccggattcattagtgctaaaagcggggtagaaaataagattgtccggcatttagtggatgaaaggctcgtttatggggtgatttgcatgcccagtcaggtttttgccaacaccggcactaacgtgagcatcatcttttttcaaaaaacgccaagcgcaaaggaagtgatcttgattgacgcttccaaactcggcgaagaatacaccgaaaacaaaaacaaaaaaacgcgcttaagaccaagcgatatggatttgattttagaaactttccaaaataaagccccaaaatcggatttttgcgctctggtttcttttgatgaaattacagaaaaaaattattctctaaaccccgggcagtatttcactatagaagacacgagcgagacaatcagccaagcggagtttgaaaacttgatgcaacaatattcaagcgaactagcgagcctttttgatgaaagccaaaatttgcaacaagagattttagaaactttaaaaggggttaggtttgagtga

SEQ ID NO: 2507 - DNA (genomic), 1629 bp, Helicobacter pylori; double-stranded, circular
  misc_feature (B) LOCATION 1...1629
  hypothetical: NO
  anti-sense: NO
atgcctaataacgctttattgcaaatcaaacaagacaccctaagtctcattgacgatttaaaagtcatttgcaaggatgctggtttagcgggcgacggcaacggatacaagatcatcacgcaatgctttttgtataaattcttatgcgataagtttgaattcttttttgaacaaaaattccccaacaaaacgatacgagactacaaagactttaacgaggaagaaaaagaatattttttccttaccttaagcgataaaaaactccccaaactcgcttatgatgagcttttaaactatctttttgaaaaacatttttacgataacgatttacacctaaagctagatgctattttcaatcgcatttctagcaataatgccgagctttttaacaccaaaagcacggatgaaaccactatcgccttatttgaaagcgtctcacaatacattaatgaagggtctaaaagggctaattttacaagatctttattagacaaactcaaaaattttaatttcaaacaagcttttttaaatttacaaaaccaacaaggctatgactttttcgcccccatttttgaatacttactcaaagattacaataataacagcggagggacatacgccgaatactacacccctttaagcatcgctagcatcattgccaagcttttagtgaataaacccactcaaagcgtcaaaatctatgatccaagcgctggcacaggaacgcttttaatggcattagcccaccaaataggcaccgattcttgcaccctttatgcccaagacatttcgcaaaaatccttaagaatgctcaaactcaacctgattttaaacgacttgacccactctttaagacacgccattgagggaaacactttgactaacccctaccactccaaagaccacaaagggaaaatggatttcatcgtgagtaacccccctttcaaattggatttttccaacgagcatgccgagatttcgcaaaacaaaaacgattttttcttaggcgtgcctaatatccctaaaaacgataaaagcaaaatgcccatttacacgctctttttccagcattgcctgaacatgctcagtccaaaaggtaagggagctataatcgtgccaaccggattcattagtgctaaaagcggggtaaataataagaatgtccggcatttagtggatgaaaggctcgtttatggggtgatttgcatgcccagtcaggtttttgccaacaccggcactaacgtgagcatcatcttttttcaaaaaacgccaagcgcaaaggaagtgatcttgattgacgcttccaaactcggcgaagaatacaccgaaaacaaaaacaaaaaaacgcgcttaagaccaagcgatatggatttgattttagaaactttccaaaataaagccccaaaatcggatttttgcgctctggtttcttttgatgaaattacagaaaaaaattattctctaaaccccgggcagtatttcactatagaagacacgagcgagacaatcagccaagcggagtttgaaaacttgatgcaacaatattcaagcgaactagcgagcctttttgatgaaagccaaaatttgcaacaagagattttagaaactttaaaaggggttaggtttgag

SEQ ID NO: 2508 - DNA (genomic), 909 bp, Helicobacter pylori; double-stranded, circular
  misc_feature (B) LOCATION 1...909
  hypothetical: NO
  anti-sense: NO
atgccttcaaacgctctttctgttggagaaatcgctcatttaatcaatgtttctcatagcagcgtgcataattggatcaaaaccaatcttttagagaaactagaaattgatcataaaatttatgtgaaaacaagctcttttttagatttttgccgcaaccatttagggaaaaacaagcttaacagatacgctaacaaatccttaaaaagcgcgcacaaccatcaagaattgattttaaaatacctagaaatgttagaaaatagctctgatttagaaaatctaggctcttattatgaaaaagagctttccaataccaccagaaatttagaaggcatttactacactcctaataggatagtagaacaacttttcactctccctaaagattttgataccactcaagcaattttttgcgatccggctgtggggagtgggaattttgtcatgcatgctttaaaactgggttttaaggttgaaaatatctatggctatgatacagacgcctttgctgtcgctttgactaaaaagcgtattaaagagcgttatcgtttagattgccctaatatcatgcaaaaagattttttgagtttaaaacatgccccgcaatttgattgcattttcactaacccgccatggggtaagaaatacaatcaaaaccaaaaagaaaatttcaaacagcaattcaacctccatcaaagcctagacagtgcgtcgctcttttttatggcgagtttgaattgcttaaaagaaaacgcttatttggggctattattgccggaaagttgtttgaatattgatgcgttcagtaaaatgcgagaaatggctttaaagtttcaaatgagaagcctgattgattttgacaaaccctttaaaaatctaatgactaaggctgtgggtttggcgcttaaa

SEQ ID NO: 2509 - DNA (genomic), 1638 bp, Helicobacter pylori; double-stranded, circular
  misc_feature (B) LOCATION 1...1638
  hypothetical: NO
  anti-sense: NO
atgccttcaaacgctctttctgttggagaaatcgctcatttaatcaatgtttctcatagcagcgtgcataattggatcaaaaccaatcttttagagaaactagaaattgatcataaaatttatgtgaaaacaagctcttttttagatttttgccgcaaccatttagggaaaaacaagcttaacagatacgctaacaaatccttaaaaagcgcgcacaaccatcaagaattgattttaaaatacctagaaatgttagaaaatagctctgatttagaaaatctaggctcttattatgaaaaagagctttccaataccaccagaaatttagaaggcatttactacactcctaataggatagtagaacaacttttcactctccctaaagattttgataccactcaagcaattttttgcgatccggctgtggggagtgggaattttgtcatgcatgctttaaaactgggttttaaggttgaaaatatctatggctatgatacagacgcctttgctgtcgctttgactaaaaagcgtattaaagagcgttatcgtttagattgccctaatatcatgcaaaaagattttttgagtttaaaacatgccccgcaatttgattgcattttcactaacccgccatggggtaagaaatacaatcaaaaccaaaaagaaaatttcaaacagcaattcaacctccatcaaagcctagacagtgcgtcgctcttttttatggcgagtttgaattgcttaaaagaaaacgcttatttggggctattattgccggaaagttgtttgaatattgatgcgttcagtaaaatgcgagaaatggctttaaagtttcaaatgagaagcctgattgattttgacaaaccctttaaaaatctaatgactaaggctgtgggtttggcgcttaaaaaaacccataataaggatcaaaaaatctcatgcttttatcaaaatagtgagttcaaacgctcaccctcttcttttttcaacaaccctaaaaagatttttaatatccattgctctcaccaaaaaaataaaattttagaccaccttttttcccttcctcatatcactttaaaaaataacgctcattttgctttagggattgttacaggcaacaataaagaaaaattacaccccaaacaagaaaaaaataccattcctatttttaggggttcagatattttaaaagacagattaaaagcccctagccaattcattaacgctgatttaaaagactgccagcaagtcgcccccttaagcctttatcaggctagagaaaaaatcgtgtataaattcatttcttcaaaactggtctttttttatgataataagcaacgcctttttttaaacagcgcgaacatgtttgttttaaaagaaaatttccccatcaacgctcatgcgttaaaagaattattaaacagcgatttaatgcaatttatttttgaatcgctttttaaaacgcataaaatcttaagaaaagatttggaatgcttgcccctatttgcgcaatttatcaacaatagttttgatgaaaaattttatttaaaaaatttagggatagaaaaaaaagaccctaaacatttcacaattaggaaaaaccatgcatgttgcttgtcttttggctttaggggataa

SEQ ID NO: 2510 - DNA (genomic), 1650 bp, Helicobacter pylori; double-stranded, circular
  misc_feature (B) LOCATION 1...1650
  hypothetical: NO
  anti-sense: NO
tttttaggggggaaaatgccttcaaacgctctttctgttggagaaatcgctcatttaatcaatgtttctcatagcagcgtgcataattggatcaaaaccaatcttttagagaaactagaaattgatcataaaatttatgtgaaaacaagctcttttttagatttttgccgcaaccatttagggaaaaacaagcttaacagatacgctaacaaatccttaaaaagcgcgcacaaccatcaagaattgattttaaaatacctagaaatgttagaaaatagctctgatttagaaaatctaggctcttattatgaaaaagagctttccaataccaccagaaatttagaaggcatttactacactcctaataggatagtagaacaacttttcactctccctaaagattttgataccactcaagcaattttttgcgatccggctgtggggagtgggaattttgtcatgcatgctttaaaactgggttttaaggttgaaaatatctatggctatgatacagacgcctttgctgtcgctttgactaaaaagcgtattaaagagcgttatcgtttagattgccctaatatcatgcaaaaagattttttgagtttaaaacatgccccgcaatttgattgcattttcactaaccggccatggggtaagaaatacaatcaaaaccaaaaagaaaatttcaaacagcaattcaacctccatcaaagcctagacagtgcgtcgctcttttttatggcgagtttgaattgcttaaaagaaaacgcttatttggggctattattgccggaaagttgtttgaatattgatgcgttcagtaaaatgcgagaaatggctttaaagtttcaaatgagaagcctgattgattttgacaaaccctttaaaaatctaatgactaaggctgtgggtttggcgcttaaaaaaacccataataaggatcaaaaaatctcatgcttttatcaaaatagtgagttcaaacgctcaccctcttcttttttcaacaaccctaaaaagatttttaatatccattgctctcaccaaaaaaataaaattttagaccaccttttttcccttcctcatatcactttaaaaaataacgctcattttgctttagggattgttacaggcaacaataaagaaaaattacaccccaaacaagaaaaaaataccattcctatttttaggggttcagatattttaaaagacagattaaaagcccctagccaattcattaacgctgatttaaaagactgccagcaagtcgcccccttaagcctttatcaggctagagaaaaaatcgtgtataaattcatttcttcaaaactggtctttttttatgataataagcaacgcctttttttaaacagcgcgaacatgtttgttttaaaagaaaatttccccatcaacgctcatgcgttaaaagaattattaaacagcgatttaatgcaatttatttttgaatcgctttttaaaacgcataaaatcttaagaaaagatttggaatgcttgcccctatttgcgcaatttatcaacaatagttttgatgaaaaattttatttaaaaaatttagggatagaaaaaaaagaccctaaacatttcacaattaggaaaaaccatgcatgttgcttgtcttttggctttagggga

SEQ ID NO: 2511 - DNA (genomic), 717 bp, Helicobacter pylori; double-stranded, circular
  misc_feature (B) LOCATION 1...717
  hypothetical: NO
  anti-sense: NO
gtgtgcatgccatacaatgaaatcacaagggttcaagtccctgccttaatgcatttagccgagttgggctataactttattcctcaaaaaaataagcctaacctagacaccgccaccaacattttaaccaatagtttcactcaatcctttgagcgattgaaccccactaaaaacgcaaaagatgcacttgctgaaatgaaaaaacgcttgaattacgatgatttaggcagaagcttttatgaatacttgctcaaaagcgaatatcaaatcatagactttgataaccctaacaacaacctttatgaaatgatgactgaattaccctaccaatccctaagaactgatataaccctttttatcaacggcttgcctttggtgaatatagaggttaagcagccttacgccaaaaaaggcattacagaggaaaaagttcgccatatccaacgctacgaaaaccccgaaaacaaagttttttataaccttgcgcaaatttggctctttagtgataacttgccctatgatgaaaacaaccccgatcaaggcgcgttttatagcgcttcttattcgcccattttccaacgctttgttgaagccaataagctagatattaccccccccccgaaaatcatcaaaatcatcaaaatcatcaaaatcatcaaaatcatcaaaatcatcaaaaccacaaatcgcttgaagaaattcaagaaagcgtcttaa

SEQ ID NO: 2512 - DNA (genomic), 723 bp, Helicobacter pylori; double-stranded, circular
  misc_feature (B) LOCATION 1...723
  hypothetical: NO
  anti-sense: NO
atcaaaggggtgtgcatgccatacaatgaaatcacaagggttcaagtccctgccttaatgcatttagccgagttgggctataactttattcctcaaaaaaataagcctaacctagacaccgccaccaacattttaaccaatagtttcactcaatcctttgagcgattgaaccccactaaaaacgcaaaagatgcacttgctgaaatgaaaaaacgcttgaattacgatgatttaggcagaagcttttatgaatacttgctcaaaagcgaatatcaaatcatagactttgataaccctaacaacaacctttatgaaatgatgactgaattaccctaccaatccctaagaactgatataaccctttttatcaacggcttgcctttggtgaatatagaggttaagcagccttacgccaaaaaaggcattacagaggaaaaagttcgccatatccaacgctacgaaaaccccgaaaacaaagttttttataaccttgcgcaaatttggctctttagtgataacttgccctatgatgaaaacaaccccgatcaaggcgcgttttatagcgcttcttattcgcccattttccaacgctttgttgaagccaataagctagatattaccccccccccgaaaatcatcaaaatcatcaaaatcatcaaaatcatcaaaatcatcaaaatcatcaaaaccacaaatcgcttgaagaaattcaagaaagcgtct

SEQ ID NO: 2513 - DNA (genomic), 2061 bp, Helicobacter pylori; double-stranded, circular
  misc_feature (B) LOCATION 1...2061
  hypothetical: NO
  anti-sense: NO
atgaataacagcgtcatcattattgaaagtcctaataaggtagctaagattagagaaatcacaggagctaaggtctttgctaccatagggcattttatgcaacttaaaagctatgatgaaaataatggctttaagccgacttttgattatgaccaagaaaagaaaaaacatatttttgagatgatagaggcgtgtaaaaacaaaaaggtttacatcgccactgaccctgatagagagggctatgctataggctatatgttttatcaaaaaatcaaaaatgtagctagttctatttatagggcggagttttttgaaatcacaccaagtgggattaacaagggcttacaaaacgcccttttatttgaaaacaccaataggcaaatgtatcaaagcgctttagcaagacgagttgcagatatgctcttaggttttacgctatccccttatttaggtaaggctttaggacaaatgaaaggtagtagtgctgggcgagtgcaaaccccttgtttaaaacttattgtagatagagacagagagattgaaaaatttaaggctttacctgaaaatgagaaagtaagctatcaaattcaagctaagattaacgatagtgctaacagagaagtaactatcaagcattgtgatgaaaagggcgaagagattaaattcaatgataaagaagaggctttaaaactctttgagagcttaaaggataataaagcttgtcttttaaaggatttaaaaaactctgttgtagagactaaacctaaaaagccctttatcacttctacgcttttagaaaaagcaagttctatgcttggtttaagtattagcgaagtgcaatcactagctcaaaatctctttgaggctggactgattacttacattaggacagatgcggaaagtttgagcgtggagtttttagatgagacagagagcttttatgcacctatttataaggacttgtatttaaaaagagaatacaaggctggcaagcaaagccaagcagaagcccatgaagcaattcgcatcacacacccccatactactgaagatttagaaagcatagtctataatgctaatattactaatcaagacgctttaaaactctatcaactcatttttgaaaggactattgaaagtcaaggcaagaatgccatttatgacaagcaagatttgctctttaaaatcaaaaacgagtattttaaatgttctgtaaagggtttaaaaagtgctggatttttagcaatgttttctaaaaaagagctagaaaatgatgaaagtaatgatgataaagacaataaagaaaaagaacaaaacgcacaatttaatctaaaaattgatgatgtgttaagtctaaatgacttagttttatccaccattaaaagaaatgccccaagtgcttataaagaggcagattttgtcaagcttttagaaaataaaggcataggcagacctagcacttatgcgagctatttgcctacgcttgtaaaaagagaatatatcagcattagccaagataaaaaacacattattacgcctacacataagggtaaaagagtggtagaagtgtttgaaaatgcttatcaattcattattgatttgacctatactaaacaaatggaagaagtgctagatgagattgtagaaaataaaagctcttatgtggattttatcagcaatttaaattctaaatgccctaagattgaaaagctagaaagaaatgatgatgagataaaacctagcagtgaaggacaaattacttatatagaaaatattttaagagatttgcaattaaatttaagcgaagagtttaaaaactacaaagaagacaacagagtggctaaggcgtttttagaccgatacattaaagagcatgagttttttaagaaaaacaacaaaaaggctagtagctctaataatgatgaaaatagacccgctacgcctaaacaaattagctttgctgagatattagctaaaaagcataatgtcaagctccccaaaggatttaaatatagtatgaaagtgtgtggggattttatcaatgagtatcataagaagtag

SEQ ID NO: 2514 - DNA (genomic), 2070 bp, Helicobacter pylori; double-stranded, circular
  misc_feature (B) LOCATION 1...2070
  hypothetical: NO
  anti-sense: NO
aggagcaatcaaatgaataacagcgtcatcattattgaaagtcctaataaggtagctaagattagagaaatcacaggagctaaggtctttgctaccatagggcattttatgcaacttaaaagctatgatgaaaataatggctttaagccgacttttgattatgaccaagaaaagaaaaaacatatttttgagatgatagaggcgtgtaaaaacaaaaaggtttacatcgccactgaccctgatagagagggctatgctataggctatatgttttatcaaaaaatcaaaaatgtagctagttctatttatagggcggagttttttgaaatcacaccaagtgggattaacaagggcttacaaaacgcccttttatttgaaaacaccaataggcaaatgtatcaaagcgctttagcaagacgagttgcagatatgctcttaggttttacgctatccccttatttaggtaaggctttaggacaaatgaaaggtagtagtgctgggcgagtgcaaaccccttgtttaaaacttattgtagatagagacagagagattgaaaaatttaaggctttacctgaaaatgagaaagtaagctatcaaattcaagctaagattaacgatagtgctaacagagaagtaactatcaagcattgtgatgaaaagggcgaagagattaaattcaatgataaagaagaggctttaaaactctttgagagcttaaaggataataaagcttgtcttttaaaggatttaaaaaactctgttgtagagactaaacctaaaaagccctttatcacttctacgcttttagaaaaagcaagttctatgcttggtttaagtattagcgaagtgcaatcactagctcaaaatctctttgaggctggactgattacttacattaggacagatgcggaaagtttgagcgtggagtttttagatgagacagagagcttttatgcacctatttataaggacttgtatttaaaaagagaatacaaggctggcaagcaaagccaagcagaagcccatgaagcaattcgcatcacacacccccatactactgaagatttagaaagcatagtctataatgctaatattactaatcaagacgctttaaaactctatcaactcatttttgaaaggactattgaaagtcaaggcaagaatgccatttatgacaagcaagatttgctctttaaaatcaaaaacgagtattttaaatgttctgtaaagggtttaaaaagtgctggatttttagcaatgttttctaaaaaagagctagaaaatgatgaaagtaatgatgataaagacaataaagaaaaagaacaaaacgcacaatttaatctaaaaattgatgatgtgttaagtctaaatgacttagttttatccaccattaaaagaaatgccccaagtgcttataaagaggcagattttgtcaagcttttagaaaataaaggcataggcagacctagcacttatgcgagctatttgcctacgcttgtaaaaagagaatatatcagcattagccaagataaaaaacacattattacgcctacacataagggtaaaagagtggtagaagtgtttgaaaatgcttatcaattcattattgatttgacctatactaaacaaatggaagaagtgctagatgagattgtagaaaataaaagctcttatgtggattttatcagcaatttaaattctaaatgccctaagattgaaaagctagaaagaaatgatgatgagataaaacctagcagtgaaggacaaattacttatatagaaaatattttaagagatttgcaattaaatttaagcgaagagtttaaaaactacaaagaagacaacagagtggctaaggcgtttttagaccgatacattaaagagcatgagttttttaagaaaaacaacaaaaaggctagtagctctaataatgatgaaaatagacccgctacgcctaaacaaattagctttgctgagatattagctaaaaagcataatgtcaagctccccaaaggatttaaatatagtatgaaagtgtgtggggattttatcaatgagtatcataagaag

SEQ ID NO: 2515 - DNA (genomic), 1278 bp, Helicobacter pylori; double-stranded, circular
  misc_feature (B) LOCATION 1...1278
  hypothetical: NO
  anti-sense: NO
atgtataaaaactgcgtatttatcatagaaagtcctaataaaatcgctaaaatcaaagaattaacaggaagttcatttgtttttgcaactggtgggcattttgttgagttagtcaatattgaagtgaataaagaatttaaccctatttttgaaatcaaaaaaagcacagataagaaaaaagatagatccactcatatcaaccacatgatcaatcaatgtaaagacaaagtggtctatattgctactgaccctgatagagaaggttatggcataggttataaattttatgaaaaaatcaaaaatctggctaaaacaatttatcgcacggagtttcatgaaatcacaaaaagcggtgtggaaaaaggcttgaataatgctgggctattttctcaaagcaatctcaatctctattatagctggctaggtaggattgtaagcgatcaatttataggttttactttaacgccttatttgcgcaaaaacattaagaattttgaagtgggtgctggtagggttcaaacccctgctctttccattttagtagaattagacagaaaaatccaagcctttgagcaaaagaataatgatgagaaattaagttatagcatagaagctattattgatgcgttaggttctcaaatctctattactttagtagaagagaataaaaggaaagcgtttgagactaaagaattagcccaaaattttttaaatgacttaaaaaacaatcttaacccattagcttttttagacgcaatagagcaaaaagataaagaaaaagctccacctaagcctttcaccacttccaatcttttaaaagatggggctagaattttagggatgggagttaagcaaatccaagaacacgctcaaaaactttttgaagctggattgattacttatattcgcaccgatagcgaagcgttaagtaaagaatacttgcaagaacatgaagcgttttttgaaggtatttatcctagcgtgtatgaatacagagaatatagggctggtaaaaattcgcaagctgaagcgcatgaggctataagaattacacaccctcactgctatgaagatcttaaaaaagtgtgtgaggaacacaatattacagatattgatgatttaaaagtttatacgcttatcttttttaacaccatttgttctcaaagtaaaaacgctatttatgaaaacacagttttaaattttaaagtaaaaacgcacagatttaatgcagttttagccaactcaaatctaaaggttttaaagcgattaaagacttag

SEQ ID NO: 2516 - DNA (genomic), 1311 bp, Helicobacter pylori; double-stranded, circular
  misc_feature (B) LOCATION 1...1311
  hypothetical: NO
  anti-sense: NO
aaactaaaattaaaaaagaaagcgagaaagttcaatatgtataaaaactgcgtatttatcatagaaagtcctaataaaatcgctaaaatcaaagaattaacaggaagttcatttgtttttgcaactggtgggcattttgttgagttagtcaatattgaagtgaataaagaatttaaccctatttttgaaatcaaaaaaagcacagataagaaaaaagatagatccactcatatcaaccacatgatcaatcaatgtaaagacaaagtggtctatattgctactgaccctgatagagaaggttatggcataggttataaattttatgaaaaaatcaaaaatctggctaaaacaatttatcgcacggagtttcatgaaatcacaaaaagcggtgtggaaaaaggcttgaataatgctgggctattttctcaaagcaatctcaatctctattatagctggctaggtaggattgtaagcgatcaatttataggttttactttaacgccttatttgcgcaaaaacattaagaattttgaagtgggtgctggtagggttcaaacccctgctctttccattttagtagaattagacagaaaaatccaagcctttgagcaaaagaataatgatgagaaattaagttatagcatagaagctattattgatgcgttaggttctcaaatctctattactttagtagaagagaataaaaggaaagcgtttgagactaaagaattagcccaaaattttttaaatgacttaaaaaacaatcttaacccattagcttttttagacgcaatagagcaaaaagataaagaaaaagctccacctaagcctttcaccacttccaatcttttaaaagatggggctagaattttagggatgggagttaagcaaatccaagaacacgctcaaaaactttttgaagctggattgattacttatattcgcaccgatagcgaagcgttaagtaaagaatacttgcaagaacatgaagcgttttttgaaggtatttatcctagcgtgtatgaatacagagaatatagggctggtaaaaattcgcaagctgaagcgcatgaggctataagaattacacaccctcactgctatgaagatcttaaaaaagtgtgtgaggaacacaatattacagatattgatgatttaaaagtttatacgcttatcttttttaacaccatttgttctcaaagtaaaaacgctatttatgaaaacacagttttaaattttaaagtaaaaacgcacagatttaatgcagttttagccaactcaaatctaaaggttttaaagcgattaaagact

SEQ ID NO: 2517 - DNA (genomic), 297 bp, Helicobacter pylori; double-stranded, circular
  misc_feature (B) LOCATION 1...297
  hypothetical: NO
  anti-sense: NO
ttggaaactttacacaacgcccttttaaaatggtatgaagaatttgggcgaaaggatttaccctttaggaatttaaagggcattaacgccccttatgaagtctatatcagcgaagtgatgagccaacaaacccaaatcagcacggtgattgagcgtttttatcccccttttttaaaagctttccccactttaaaagacttagcgaacgctccattagaggaggttttattgctctggagagggcttggttattattcaagggctaaaaatttaaaaaaagcgctgaaatttgcgtga

SEQ ID NO: 2518 - DNA (genomic), 294 bp, Helicobacter pylori; double-stranded, circular
  misc_feature (B) LOCATION 1...294
  hypothetical: NO
  anti-sense: NO
ttggaaactttacacaacgcccttttaaaatggtatgaagaatttgggcgaaaggatttaccctttaggaatttaaagggcattaacgccccttatgaagtctatatcagcgaagtgatgagccaacaaacccaaatcagcacggtgattgagcgtttttatcccccttttttaaaagctttccccactttaaaagacttagcgaacgctccattagaggaggttttattgctctggagagggcttggttattattcaagggctaaaaatttaaaaaaagcgctgaaatttgcg

SEQ ID NO: 2519 - DNA (genomic), 180 bp, Helicobacter pylori; double-stranded, circular
  misc_feature (B) LOCATION 1...180
  hypothetical: NO
  anti-sense: NO
ggcactatcaagcacagccacactaaattcaaactcaatttaaacctctaccttgccaccacaaaagatttaaaaaaccctattcgtttttatagccttaaagatttagagaccttacccataagctctatgacgcttaaaatcttgaattttttaaaacaaaaaaatttatttgggggt

SEQ ID NO: 2520 - DNA (genomic), 561 bp, Helicobacter pylori; double-stranded, circular
  misc_feature (B) LOCATION 1...561
  hypothetical: NO
  anti-sense: NO
aaatttaaaaaaagcgctgaaatttgcgtgaaagaacaccactcacagctacctaatgactatcaaagcctgttgaaactccctgggattggcgcatacacagctaacgcgattttatgttttggttttagagaaaagagcgcatgcgtggacgctaatgtcaagcgcgtacttttaaggctttttggtttggatcctaatatccacgctaaagacttacaaattaaagcgaatgactttctcaatcttaatgaaagctttaatcataaccaagccctaattgatctaggggctttaatctgctcccctaaacccaaatgcgcgatttgccctttcaatccttattgtttgggtaaaaaccacctagaaagacacacgcttaagaaaaaacaagagatcattcaagaagagcgttacttgggcgttgtgatccaaaataaccaaatcgctttagaaaaaatagagcaaaaactctatttggggatgcaccatttccccaatctaaaagaaaatttagaattcaaactcccctttttagggcactatcaagcacagccacac

SEQ ID NO: 2521 - DNA (genomic), 693 bp, Helicobacter pylori; double-stranded, circular
  misc_feature (B) LOCATION 1...693
  hypothetical: NO
  anti-sense: NO
gtgaaagaacaccactcacagctacctaatgactatcaaagcctgttgaaactccctgggattggcgcatacacagctaacgcgattttatgttttggttttagagaaaagagcgcatgcgtggacgctaatgtcaagcgcgtacttttaaggctttttggtttggatcctaatatccacgctaaagacttacaaattaaagcgaatgactttctcaatcttaatgaaagctttaatcataaccaagccctaattgatctaggggctttaatctgctcccctaaacccaaatgcgcgatttgccctttcaatccttattgtttgggtaaaaaccacctagaaagacacacgcttaagaaaaaacaagagatcattcaagaagagcgttacttgggcgttgtgatccaaaataaccaaatcgctttagaaaaaatagagcaaaaactctatttggggatgcaccatttccccaatctaaaagaaaatttagaattcaaactcccctttttaggcactatcaagcacagccacactaaattcaaactcaatttaaacctctaccttgccaccacaaaagatttaaaaaaccctattcgtttttatagccttaaagatttagagaccttacccataagctctatgacgcttaaaatcttgaattttttaaaacaaaaaaatttatttgggggttaa

SEQ ID NO: 2522 - DNA (genomic), 642 bp, Helicobacter pylori; double-stranded, circular
  misc_feature (B) LOCATION 1...642
  hypothetical: NO
  anti-sense: NO
tgcatgagcaatgttcttataagctttgtaggcggacaaggagctaaaagattattatacatactctacaagctcgcatttaatgctaagtctaataagattgccctagatagacattacgccaaaatgtttttgcaaattgtagcaagaactctaacaaagaatgtcaatatattagaagagcaaggttttattgaagtcattaaaggaaaacaaagatacttgtatgtgtatcttaaagattacagagaattagagggctataactccgtaggagctaataaaaagaacaatatcccatcgcctttttttttacagattatgagtttcttaaaaaagtctaccaaagatattgagagagtaaaaattaacaacaaagaatgtgttatgcatattcctagccaagagcttatgcaaagagttaataatgttgttttaaaattcacgcctatttctaatcctaataccacttacactttatcctacaaggatttaacaaacaaagacattccttctaatctttgtttctatcaaacagccattgtgaagaaaaatctcttaaaggctttaaaagacaaagaatgtgtaggcgaacctattaaaaactcacccaaagtttcagactactttcaagagagtgct

SEQ ID NO: 2523 - DNA (genomic), 639 bp, Helicobacter pylori; double-stranded, circular
  misc_feature (B) LOCATION 1...639
  hypothetical: NO
  anti-sense: NO
atgagcaatgttcttataagctttgtaggcggacaaggagctaaaagattattatacatactctacaagctcgcatttaatgctaagtctaataagattgccctagatagacattacgccaaaatgtttttgcaaattgtagcaagaactctaacaaagaatgtcaatatattagaagagcaaggttttattgaagtcattaaaggaaaacaaagatacttgtatgtgtatcttaaagattacagagaattagagggctataactccgtaggagctaataaaaagaacaatatcccatcgcctttttttttacagattatgagtttcttaaaaaagtctaccaaagatattgagagagtaaaaattaacaacaaagaatgtgttatgcatattcctagccaagagcttatgcaaagagttaataatgttgttttaaaattcacgcctatttctaatcctaataccacttacactttatcctacaaggatttaacaaacaaagacattccttctaatctttgtttctatcaaacagccattgtgaagaaaaatctcttaaaggctttaaaagacaaagaatgtgtaggcgaacctattaaaaactcacccaaagtttcagactactttcaagagagtgct

SEQ ID NO: 2524 - DNA (genomic), 738 bp, Helicobacter pylori; double-stranded, circular
  misc_feature (B) LOCATION 1...738
  hypothetical: NO
  anti-sense: NO
tttctgtctctaagtctcatagaaagggacttgaaaactatggcaaagatattaaaacctaatttagatagagatgagttaaacacactttataaggcaaatcttgcttatgctaaaaacacgcatgagcattatttcaaatttgaaaaagatttagactacaaactctttaatcctagcattatgcatgagcaatgttctataagctttgtaggcggacaaggagctaaaagattattatacatactctacaagctcgcatttaatgctaagtctaataagattgccctagatagacattacgccaaaatgtttttgcaagttgtagcaagaactctaataaagaatgtcaatatattagaagagcaaggttttattgaagtcattaaaggaaaacaaagatacttgtatgtgtatcttaaagattacagagaattagagggctataactccgtaggagctaatcaaaagaacaatatcccatcgccttttttcttacagattatgcgtttcttaaaaaagtttgccaaagatattgagagagtaaaaattaacaacaaagaatgtgttatgcatattcctagccaagagcttatgcaaagagttaataatgttgttttaaaattcacgcctatttctaatcctaataccacttacactttatcctacaaggatttaacaaacaaagacattccttctaatttttgtttctatcaaacagccatttcattttacgct

SEQ ID NO: 2525 - DNA (genomic), 900 bp, Helicobacter pylori; double-stranded, circular
  misc_feature (B) LOCATION 1...900
  hypothetical: NO
  anti-sense: NO
atggcaaagatattaaaacctaatttagatagagatgagttaaacacactttataaggcaaatcttgcttatgctaaaaacacgcatgagcattatttcaaatttaaaaaagatttagactacaaactctttaatcctagcattatgcatgagcaatgttctataagctttgtaggcggacaaggagctaaaagattattatacatactctacaagctcgcatttaatgctaagtctaataagattgccctagatagacattacgccaaaatgtttttgcaagttgtagcaagaactctaataaagaatgtcaatatattagaagagcaaggttttattgaagtcattaaaggaaaacaaagatacttgtatgtgtatcttaaagattacagagaattagaatgcttagtgaagagcaagatggctaagtatgtgatgtatttaagacaattctttgattatttggatagaaaaaggcgttatggctttgattttacgcttaaaaacctagcctttgctaagaccaaagaaagcttacccagacatttaaacgataaagacttaaagagttttttaaaaacactcttagactataagccagctacaagctttgaaaaacgcaataagtgtattctacttattgtaatacttgggggacttagaaaatgcgaagtgttaaacatagaattaaaacacattcaagtagaagagcaaaactactctattttaattcaaggtaaaggtagaaaagagagaaaagcttatattaaaaagagtttgttagaaccaagcttgaatgcttggattagtgatgattacagactaaaatatttcaatggagcatatctctttaaaaaggataagcaaaaatcacaaaattctttaacgctttataattaa

SEQ ID NO: 2526 - DNA (genomic), 1749 bp, Helicobacter pylori; double-stranded, circular
  misc_feature (B) LOCATION 1...1749
  hypothetical: NO
  anti-sense: NO
atgcaagttttagcgttaaaataccgccccaaacattttagcgagctagtcggtcaagagagcgtagccaaaacgctttctttagccctagacaaccagcgtttggctaacgcttatttattcagcgggttaagaggttcgggtaaaaccagctcttctaggatttttgctagggctttaatgtgtaaaacagggccaaaggctgtgccttgcgatacttgcatccaatgtcagagcgctttaaacaaccaccacatagatattatagaaatggatggggcgtctaatagggggattgatgatgtccgtaacctcatagagcaaacgcgctacaaaccaagctttgggcgctataaaatctttatcattgacgaagtgcatatgttcaccaccgaagcgtttaacgcgcttttaaagactttagaagagcctcctagccatgtgaaattccttttagcgacaacggacgctttgaaattgcccgctaccatactcagccgcacccagcatttcaggtttaaaaaaatccctgaaaattccgttatttctcatttaaaaaccattttagaaaaagaacaagtgagctatgaaagtagcgcgttagaaaaactcgctcacagcgggcaagggagtttgagggatacgatcactcttttagaacaagccatcaattattgcgataacgctatcacagaaagcaaagtggctgaaatgttaggggcgattgaccgaagcgttttggaagatttttttcaaagcctaatcaaccaagatgaagcgcgattgcaagagcgttatgccattttagaaaattatgaaaccgagggcgttttagaagaaatgatgctttttttgaaagcgaaattattaagccctgattcttattccattcttttgatagagcgcttttttaaaatcattatgagcagtctcagccttttaaaagaaggggcaaatgccagttttgtgctgttgttattgaaaatgaaattcaaagaagctttgaaactcaaagccctagacgatgcgattgtagaattagagcaaacccctttcaatcaaagccctagcataagctataacgcccctaaacaagaacccaaaagcacagaaagaatagagggaagagaaaaactagaaaaaagagaaagaatagaaaccccacaaactcccatgctttcagctaaagatcgtatttttcacaaccttttcaaacaagtccaaacattggtttatgagcgcaattacgagttaggggctgtgtttgaaaaaaatatccgtttcattgattttgacagccagactaaaaccttgacttgggagtctttggccactgataaggacaaagagcttttaagagaacgatttaaaatcgtgaaaagtatcgttgatggggtttttggcaagggcgaaaatatcaaaatcgctttaaaacatcatttggaaaataaaagcgctccagaagaaactaaagaagttaaagagtttaaattcccccctttaaagcccaaactaaccaccgaaacgacggctgaaatgcaagaaaaagaaactaaagaagcggttggaaaagcgcttcaaacgaaagaaaacgacactaaagaggttcaagaaaacgaaactaaagagactaaagaagcccaacccaaagaagccccaacagcgttgcaagaatttatggctaaccactctaatctcattgaagagattaagagcgagtttgaaatcaaaagcgtggaattgttatga

SEQ ID NO: 2527 - DNA (genomic), 1758 bp, Helicobacter pylori; double-stranded, circular
  misc_feature (B) LOCATION 1...1758
  hypothetical: NO
  anti-sense: NO
ggattaggatcaatgcaagttttagcgttaaaataccgccccaaacattttagcgagctagtcggtcaagagagcgtagccaaaacgctttctttagccctagacaaccagcgtttggctaacgcttatttattcagcgggttaagaggttcgggtaaaaccagctcttctaggatttttgctagggctttaatgtgtaaaacagggccaaaggctgtgccttgcgatacttgcatccaatgtcagagcgctttaaacaaccaccacatagatattatagaaatggatggggcgtctaatagggggattgatgatgtccgtaacctcatagagcaaacgcgctacaaaccaagctttgggcgctataaaatctttatcattgacgaagtgcatatgttcaccaccgaagcgtttaacgcgcttttaaagactttagaagagcctcctagccatgtgaaattccttttagcgacaacggacgctttgaaattgcccgctaccatactcagccgcacccagcatttcaggtttaaaaaaatccctgaaaattccgttatttctcatttaaaaaccattttagaaaaagaacaagtgagctatgaaagtagcgcgttagaaaaactcgctcacagcgggcaagggagtttgagggatacgatcactcttttagaacaagccatcaattattgcgataacgctatcacagaaagcaaagtggctgaaatgttaggggcgattgaccgaagcgttttggaagatttttttcaaagcctaatcaaccaagatgaagcgcgattgcaagagcgttatgccattttagaaaattatgaaaccgagggcgttttagaagaaatgatgctttttttgaaagcgaaattattaagccctgattcttattccattcttttgatagagcgcttttttaaaatcattatgagcagtctcagccttttaaaagaaggggcaaatgccagttttgtgctgttgttattgaaaatgaaattcaaagaagctttgaaactcaaagccctagacgatgcgattgtagaattagagcaaacccctttcaatcaaagccctagcataagctataacgcccctaaacaagaacccaaaagcacagaaagaatagagggaagagaaaaactagaaaaaagagaaagaatagaaaccccacaaactcccatgctttcagctaaagatcgtatttttcacaaccttttcaaacaagtccaaacattggtttatgagcgcaattacgagttaggggctgtgtttgaaaaaaatatccgtttcattgattttgacagccagactaaaaccttgacttgggagtctttggccactgataaggacaaagagcttttaagagaacgatttaaaatcgtgaaaagtatcgttgatggggtttttggcaagggcgaaaatatcaaaatcgctttaaaacatcatttggaaaataaaagcgctccagaagaaactaaagaagttaaagagtttaaattcccccctttaaagcccaaactaaccaccgaaacgacggctgaaatgcaagaaaaagaaactaaagaagcggttggaaaagcgcttcaaacgaaagaaaacgacactaaagaggttcaagaaaacgaaactaaagagactaaagaagcccaacccaaagaagccccaacagcgttgcaagaatttatggctaaccactctaatctcattgaagagattaagagcgagtttgaaatcaaaagcgtggaattgtta

SEQ ID NO: 2528 - DNA (genomic), 1146 bp, Helicobacter pylori; double-stranded, circular
  misc_feature (B) LOCATION 1...1146
  hypothetical: NO
  anti-sense: NO
atgaaaatcgccattgtagaagatgatattaacatgcgtaaaagtctggagcttttttttgagcttcaagacgatttagaaattgtgagttttaaaaaccctaaagacgcgctagcgaaacttgatgagagctttgatttagtcatcacggatattaacatgccccatatggacggcttggaatttttacgccttttagagggcaaatatgaatccattgtgattaccggtaacgcgaccttgaataaagccattgattccattcgtttgggcgtgaaagactttttccaaaaaccttttaaaccagaattgcttttagaatccatctaccgcactaaaaaagttttagaatttcaaaaaaaacaccctctagaaaaacctttaaaaaaagcccccaaacacagctttttagccacttcaaaagctttagaagaaaccaaacgacaggccttaaaagtcgcaagcacggacgctaatgtcatgctattaggcgaaagcggggtaggtaaggaagtttttgctcattttatccaccagcattctcagcgctccaagcacccttttatagcgatcaacatgtccgctatcccagagcatctattagaaagcgagctttttgggtatcaaaaaggggcgttcacggacgccacagctcctaaaatggggctttttgagagcgctaataaaggcacgatctttttagatgaaatcgctgaaatgccccttcaactgcaaagcaaacttttaagagtggttcaagaaaaagaaatcacgcgccttggggataataaaagcgttaaaattgatgttcgtttcatttccgccaccaacgccaacatgaaagaaaaaatcgcttcaaaagaattcagagaagatttgtttttccgcttgcaaatcgtgcctataactatcgcgcccttaagagagagggtagaagagattttgcccattgctgaaatcaagcttaaagaagtgtgcgaggcgtatcatttggggccaaaatctttttcaaaaaacgccgcaaaacgccttttagaatactcttggcatgggaatgtgcgagagcttttaggcgtcgtggaaagagcggcgattttaagcgaagaaacagaaatccaagagaaagatttgtttttggaaaggtag

SEQ ID NO: 2529 - DNA (genomic), 1155 bp, Helicobacter pylori; double-stranded, circular
  misc_feature (B) LOCATION 1...1155
  hypothetical: NO
  anti-sense: NO
aaaggaagaagaatgaaaatcgccattgtagaagatgatattaacatgcgtaaaagtctggagcttttttttgagcttcaagacgatttagaaattgtgagttttaaaaaccctaaagacgcgctagcgaaacttgatgagagctttgatttagtcatcacggatattaacatgccccatatggacggcttggaatttttacgccttttagagggcaaatatgaatccattgtgattaccggtaacgcgaccttgaataaagccattgattccattcgtttgggcgtgaaagactttttccaaaaaccttttaaaccagaattgcttttagaatccatctaccgcactaaaaaagttttagaatttcaaaaaaaacaccctctagaaaaacctttaaaaaaagcccccaaacacagctttttagccacttcaaaagctttagaagaaaccaaacgacaggccttaaaagtcgcaagcacggacgctaatgtcatgctattaggcgaaagcggggtaggtaaggaagtttttgctcattttatccaccagcattctcagcgctccaagcacccttttatagcgatcaacatgtccgctatcccagagcatctattagaaagcgagctttttgggtatcaaaaaggggcgttcacggacgccacagctcctaaaatggggctttttgagagcgctaataaaggcacgatctttttagatgaaatcgctgaaatgccccttcaactgcaaagcaaacttttaagagtggttcaagaaaaagaaatcacgcgccttggggataataaaagcgttaaaattgatgttcgtttcatttccgccaccaacgccaacatgaaagaaaaaatcgcttcaaaagaattcagagaagatttgtttttccgcttgcaaatcgtgcctataactatcgcgcccttaagagagagggtagaagagattttgcccattgctgaaatcaagcttaaagaagtgtgcgaggcgtatcatttggggccaaaatctttttcaaaaaacgccgcaaaacgccttttagaatactcttggcatgggaatgtgcgagagcttttaggcgtcgtggaaagagcggcgattttaagcgaagaaacagaaatccaagagaaagatttgtttttggaaagg

SEQ ID NO: 2530 - DNA (genomic), 138 bp, Helicobacter pylori; double-stranded, circular
  misc_feature (B) LOCATION 1...138
  hypothetical: NO
  anti-sense: NO
attttagggagacacatgcaagatcatttagtcaatgaaacaaaaaatattgtagaagtggggattgattcttctattgaagagagctatttggcttattccatgagcgtgatcatagggcgccgctttaccggacgc

SEQ ID NO: 2531 - DNA (genomic), 174 bp, Helicobacter pylori; double-stranded, circular
  misc_feature (B) LOCATION 1...174
  hypothetical: NO
  anti-sense: NO
acggggcgagggcgcgtgaaagtgcgggccaaagtgcatgtggaaaagacaaaaaataaagaaatcatcgttttaggtgaaatgccttttcaaaccaataaagccaaattagtggaacaaatcagcgatttagcgcgagaaaaacaaattgaaggcattagcgaagtgcgcgat

SEQ ID NO: 2532 - DNA (genomic), 189 bp, Helicobacter pylori; double-stranded, circular
  misc_feature (B) LOCATION 1...189
  hypothetical: NO
  anti-sense: NO
tcagtgggggctacatgggatcgcgtagggatggcgacttctatcccccctcataggattgatgaaatcatagacgctttagcgcatgtcttaggaaaccctaacgctgaattagataaaattttggaatttgtcaaaggacctgactttcctactggtgggatcatctatggcaaaggcgggtattgt

SEQ ID NO: 2533 - DNA (genomic), 441 bp, Helicobacter pylori; double-stranded, circular
  misc_feature (B) LOCATION 1...441
  hypothetical: NO
  anti-sense: NO
agacggcttaaagccgtgcataggcgtattttgtatgcgatgcatgaattaggccttacttccaaagtcgcttataaaaaaagcgctaggatcgtgggtgatgtgattggtaaataccacccccatggcgacaccgcagtttatgatgcgttagtgagaatggcgcaagatttttctatgcgcttggaattagtggatgggcagggcaactttggctctattgatggcgataacgccgcagcgatgcgttacactgaagccagaatgaccaaggcgagtgaagagattttaagagatattgataaagacaccattgattttgtgcctaattacgatgacaccttaaaagagccagatattttaccaagccgtctgactaaccttttagtcagtgggggctacatgggatcgcgtagggatggcgacttctatcccccctca

SEQ ID NO: 2534 - DNA (genomic), 528 bp, Helicobacter pylori; double-stranded, circular
  misc_feature (B) LOCATION 1...528
  hypothetical: NO
  anti-sense: NO
atgcaagatcatttagtcaatgaaacaaaaaatattgtagaagtggggattgattcttctattgaagagagctatttggcttattccatgagcgtgatcatagggcgcgctttaccggacgctagagacggcttaaagcctgtgcataggcgtattttgtatgcgatgcatgaattaggccttacttccaaagtcgcttataaaaaaagcgctaggatcgtgggtgatgtgattggtaaataccacccccatggcgacaccgcagtttatgatgcgttagtgagaatggcgcaagatttttctatgcgcttggaattagtggatgggcagggcaactttggctctattgatggcgataacgccgcagcgatgcgttacactgaagccagaatgaccaaggcgagtgaagagattttaagagatattgataaagacaccattgattttgtgcctaattacgatgacaccttaaaagagccagatattttaccaagccgtctgcctaaccttttagtcaatgggggctaa

SEQ ID NO: 2535 - DNA (genomic), 714 bp, Helicobacter pylori; double-stranded, circular
  misc_feature (B) LOCATION 1...714
  hypothetical: NO
  anti-sense: NO
atgcaagatcatttagtcaatgaaacaaaaaatattgtagaagtggggattgattcttctattgaagagagctatttggcttattccatgagcgtgatcatagggcgcgctttaccggacgctagagacggcttaaagcctgtgcataggcgtattttgtatgcgatgcatgaattaggccttacttccaaagtcgcttataaaaaaagcgctaggatcgtgggtgatgtgattggtaaataccacccccatggcgacaccgcagtttatgatgcgttagtgagaatggcgcaagatttttctatgcgcttggaattagtggatgggcagggcaactttggctctattgatggcgataacgccgcagcgatgcgttacactgaagccagaatgaccaaggcgagtgaagagattttaagagatattgataaagacaccattgattttgtgcctaattacgatgacaccttaaaagagccagatattttaccaagccgtctgcctaaccttttagtcaatggggctaatgggatcgccgtagggatggcgacttctatcccccctcataggattgatgaaatcatagacgctttagcgcatgtcttaggaaaccctaacgctgaattagataaaattttggaatttgtcaaaggacctgactttcctactggtgggatcatctatggcaaggcgggtattgttgaagcctattaa

SEQ ID NO: 2536 - DNA (genomic), 918 bp, Helicobacter pylori; double-stranded, circular
  misc_feature (B) LOCATION 1...918
  hypothetical: NO
  anti-sense: NO
aaaacagagcttttagaagtcaaagagcagttttcttctccaaggcgcactgaaattcaagaatcttatgaaagtattgatacagaagatttgatcgctaatgagcctatggtagtgagcatgagctataaaggctatgtgaaaagagtggatttaaaagcctatgaaaggcaaaatcgtggcggtaaaggcaagctttcaggcagcacttatgaagatgatttcattgaaaacttttttgtggctaacacgcatgatattttgctctttatcaccaataaggggcaattgtatcatttgaaagtctataaaatcccagaagcgagccggatcgctatgggtaaagctattgtgaatttaatctcactcgctcctaatgaaaagatcatggcaaccctaagcactaaagattttagcgatgaacgctctttagctttcttcacgaaaaatggcgtggtgaagcgcaccaatttgagcgaatttggcggtaataggagttatagcggtatcagagcgattgttttagatgaaggcgatgaattagtgggcgcaaaagttgtggataaaaacgctaagcatttgctcatcgcatcttatttgggcatgttcattaaattccctttagaagacgtgcgcgaaataggaagaactactcgtggggttatgggtattagactgaatgaaaatgattttgttgtcggcgcggttgtcattagcgatgatagcaacaagcttttgagcgtgagcgagaacgggcttggcaagcaaactctagccgaagcgtatagagagcaatctcgtggaggtaagggggtcattggcatgaagctcactcaaaagaccggtaatttggtgagcgttatcagcgtggatgatgagaacctgaatttgatgaatccttaccgccgaccgccaaaa

SEQ ID NO: 2537 - DNA (genomic), 915 bp, Helicobacter pylori; double-stranded, circular
  misc_feature (B) LOCATION 1...915
  hypothetical: NO
  anti-sense: NO
acagagcttttagaagtcaaagagcagttttcttctccaaggcgcactgaaattcaagaatcttatgaaagtattgatacagaagatttgatcgctaatgagcctatggtagtgagcatgagctataaaggctatgtgaaaagagtggatttaaaagcctatgaaaggcaaaatcgtggcggtaaaggcaagctttcaggcagcacttatgaagatgatttcattgaaaacttttttgtggctaacacgcatgatattttgctctttatcaccaataaggggcaattgtatcatttgaaagtctataaaatcccagaagcgagccggatcgctatgggtaaagctattgtgaatttaatctcactcgctcctaatgaaaagatcatggcaaccctaagcactaaagattttagcgatgaacgctctttagctttcttcacgaaaaatggcgtggtgaagcgcaccaatttgagcgaatttggcggtaataggagttatagcggtatcagagcgattgttttagatgaaggcgatgaattagtgggcgcaaaagttgtggataaaaacgctaagcatttgctcatcgcatcttatttgggcatgttcattaaattccctttagaagacgtgcgcgaaataggaagaactactcgtggggttatgggtattagactgaatgaaaatgattttgttgtcggcgcggttgtcattagcgatgatagcaacaagcttttgagcgtgagcgagaacgggcttggcaagcaaactctagccgaagcgtatagagagcaatctcgtggaggtaagggggtcattggcatgaagctcactcaaaagaccggtaatttggtgagcgttatcagcgtggatgatgagaacctgaatttgatgaatccttaccgccgaccgccaaaa

SEQ ID NO: 2538 - DNA (genomic), 1758 bp, Helicobacter pylori; double-stranded, circular
  misc_feature (B) LOCATION 1...1758
  hypothetical: NO
  anti-sense: NO
gtgaaagtgcgggccaaagtgcatgtggaaaagacaaaaaataaagaaatcatcgttttaggtgaaatgccttttcaaaccaataaagccaaattagtggaacaaatcagcgatttagcgcgagaaaaacaaattgaaggcattagcgaagtgcgcgatgaaagcgatagagagggcattagagtggtgattgaattaaaaagagacgcgatgagtgaaattgtcttaaaccacctttacaaactcaccactatggagaccacttttagcatcattttactcgctatttacaataaagagcctaagattttcacgcttttagagttgttgcgccttttcttaaaccatagaaagaccattattataagacgcacgatttttgaattagaaaaggctaaggccagagcgcatattttagagggctatttgatcgccttggacaatattgatgaaatcgtgcgactcattaaaacaagcccaagcccagaagcggctaaaaacgccttaatagagcgttttagtttgagcgagatccaaagcaaagccattttagaaatgcgtttgcaacgcttgacaggccttgaaagagataagatcaaagaagaataccaaaacttattagagcttattgatgatctcaatggcattttaaagagcgaagatcgcttgaatgaagtcgtcaaaacagagcttttagaagtcaaagagcagttttcttctccaaggcgcactgaaattcaagaatcttatgaaagtattgatacagaagatttgatcgctaatgagcctatggtagtgagcatgagctataaaggctatgtgaaaagagtggatttaaaagcctatgaaaggcaaaatcgtggcggtaaaggcaagctttcaggcagcacttatgaagatgatttcattgaaaacttttttgtggctaacacgcatgatattttgctctttatcaccaataaggggcaattgtatcatttgaaagtctataaaatcccagaagcgagccggatcgctatgggtaaagctattgtgaatttaatctcactcgctcctaatgaaaagatcatggcaaccctaagcactaaagattttagcgatgaacgctctttagctttcttcacgaaaaatggcgtggtgaagcgcaccaatttgagcgaatttggcggtaataggagttatagcggtatcagagcgattgttttagatgaaggcgatgaattagtgggcgcaaaagttgtggataaaaacgctaagcatttgctcatcgcatcttatttgggcatgttcattaaattccctttagaagacgtgcgcgaaataggaagaactactcgtggggttatgggtattagactgaatgaaaatgattttgttgtcggcgcggttgtcattagcgatgatagcaacaagcttttgagcgtgagcgagaacgggcttggcaagcaaactctagccgaagcgtatagagagcaatctcgtggaggtaagggggtcattggcatgaagctcactcaaaagaccggtaatttggtgagcgttatcagcgtggatgatgagaacctgaatttgatgatccttaccgcgagcgcgaaaatgattagagtttccattaaagatattagagaaaccggaagaaatgccagtggggtaaaactcataaacaccgctgataaagtcgtgtatgtcaattcttgccctaaagaagaagagccagaaaatttagaaacctcttcggtgcaaaatttgtttgagtga

SEQ ID NO: 2539 - DNA (genomic), 1758 bp, Helicobacter pylori; double-stranded, circular; identical to SEQ ID NO: 2538
  misc_feature (B) LOCATION 1...1758
  hypothetical: NO
  anti-sense: NO

SEQ ID NO: 2540 - DNA (genomic), 2487 bp, Helicobacter pylori; double-stranded, circular
  misc_feature (B) LOCATION 1...2487
  hypothetical: NO
  anti-sense: NO
atgcaagatcatttagtcaatgaaacaaaaaatattgtagaagtggggattgattcttctattgaagagagctatttggcttattccatgagcgtgatcatagggcgcgctttaccggacgctagagacggcttaaagcctgtgcataggcgtattttgtatgcgatgcatgaattaggccttacttccaaagtcgcttataaaaaaagcgctaggatcgtgggtgatgtgattggtaaataccacccccatggcgacaccgcagtttatgatgcgttagtgagaatggcgcaagatttttctatgcgcttggaattagtggatgggcagggcaactttggctctattgatggcgataacgccgcagcgatgcgttacactgaagccagaatgaccaaggcgagtgaagagattttaagagatattgataaagacaccattgattttgtgcctaattacgatgacaccttaaaagagccagatattttaccaagccgtctgcctaaccttttagtcaatggggctaatgggatcgccgtagggatggcgacttctatcccccctcataggattgatgaaatcatagacgctttagcgcatgtcttaggaaaccctaacgctgaattagataaaattttggaatttgtcaaaggacctgactttcctactggtgggatcatctatggcaaggcgggtattgttgaagcctataaaacggggcgagggcgcgtgaaagtgcgggccaaagtgcatgtggaaaagacaaaaaataaagaaatcatcgttttaggtgaaatgccttttcaaaccaataaagccaaattagtggaacaaatcagcgatttagcgcgagaaaaacaaattgaaggcattagcgaagtgcgcgatgaaagcgatagagagggcattagagtggtgattgaattaaaaagagacgcgatgagtgaaattgtcttaaaccacctttacaaactcaccactatggagaccacttttagcatcattttactcgctatttacaataaagagcctaagattttcacgcttttagagttgttgcgccttttcttaaaccatagaaagaccattattataagacgcacgatttttgaattagaaaaggctaaggccagagcgcatattttagagggctatttgatcgccttggacaatattgatgaaatcgtgcgactcattaaaacaagcccaagcccagaagcggctaaaaacgccttaatagagcgttttagtttgagcgagatccaaagcaaagccattttagaaatgcgtttgcaacgcttgacaggccttgaaagagataagatcaaagaagaataccaaaacttattagagcttattgatgatctcaatggcattttaaagagcgaagatcgcttgaatgaagtcgtcaaaacagagcttttagaagtcaaagagcagttttcttctccaaggcgcactgaaattcaagaatcttatgaaagtattgatacagaagatttgatcgctaatgagcctatggtagtgagcatgagctataaaggctatgtgaaaagagtggatttaaaagcctatgaaaggcaaaatcgtggcggtaaaggcaagctttcaggcagcacttatgaagatgatttcattgaaaacttttttgtggctaacacgcatgatattttgctctttatcaccaataaggggcaattgtatcatttgaaagtctataaaatcccagaagcgagccggatcgctatgggtaaagctattgtgaatttaatctcactcgctcctaatgaaaagatcatggcaaccctaagcactaaagattttagcgatgaacgctctttagctttcttcacgaaaaatggcgtggtgaagcgcaccaatttgagcgaatttggcggtaataggagttatagcggtatcagagcgattgttttagatgaaggcgatgaattagtgggcgcaaaagttgtggataaaaacgctaagcatttgctcatcgcatcttatttgggcatgttcattaaattccctttagaagacgtgcgcgaaataggaagaactactcgtggggttatgggtattagactgaatgaaaatgattttgttgtcggcgcggttgtcattagcgatgatagcaacaagcttttgagcgtgagcgagaacgggcttggcaagcaaactctagccgaagcgtatagagagcaatctcgtggaggtaagggggtcattggcatgaagctcactcaaaagaccggtaatttggtgagcgttatcagcgtggatgatgagaacctgaatttgatgatccttaccgcgagcgcgaaaatgattagagtttccattaaagatattagagaaaccggaagaaatgccagtggggtaaaactcataaacaccgctgataaagtcgtgtatgtcaattcttgccctaaagaagaagagccagaaaatttagaaacctcttcggtgcaaaatttgtttgagtga

SEQ ID NO: 2541 - DNA (genomic), 714 bp, Helicobacter pylori; double-stranded, circular
  misc_feature (B) LOCATION 1...714
  hypothetical: NO
  anti-sense: NO
ctccttttaatccactttcttattttaaggaaactcttgcaacataaaaccattatggataagatcattattcaaggggctagggaaaacaatctcaaaaatatctttttagaaatccctaaaaaccaatttgttgtttttaccggattaagcggttcgggtaaatccactctggcgtttgacactctatacgctgaagggcaaaggcgctatttagagagtttgtctagttatgcgaggcaatttttagacaaagtgggtaagcctaatgtggataaaattgaaggcctaaccccagcgatcgctattgatcaaaaaaccacttctaaaaaccctagatccactgtggggacgatcactgagatttatgattatttaaggttgttgcttgcaagggttggggagcaattttgccccacatgtttagagcctattagttctatgagcgcgagcgatatcatttctcaaatctgtcatttagaagaaaattctaaaatcattattctagcccccattattaaagataaaaaaggttcgtttaacgataaattagagagtttgcgtttgaaggggtatgtgagggcttttgttgatggggtgatggtgcgtttagatgaagaaatccatttgcacaaaaccaaaaaacacaccattgaagcggtggtggatagggtggttatcaatagcgaaaatgcttcacggatcgctagcgcg

SEQ ID NO: 2542 - DNA (genomic), 2028 bp, Helicobacter pylori; double-stranded, circular
  misc_feature (B) LOCATION 1...2028
  hypothetical: NO
  anti-sense: NO
gcttttgaagaattagagcctttgagtttttccttcaattcgcctaaaggggcgtgcgaaagttgtttgggtttagggacaaaatttagcttagatattagtaagattttagatcctaacacgcctttaaatcaaggagcgattaaagtgatttttgggtataaccgcagttattacgctcaaatgtttgaaggcttttgcacttataatggcattgacagcgcgctttgtttcaacgaattgaacaaagagcagcaagacgctcttttgtatgggaatggcactgaaatcagctttcattttaaaaacagccccttgaaacgcccctggaaaggcattatccaaatcgcttatgacatgtttaaagagcaaaaggatttgagcgattacatgagcgaaaaaacctgttcttcgtgtaatgggcatcgcttgaaagcctcaagtttgagcgtccaagtcgctggcttgaaaatggcggattttttaactaagcccattgaagaagtctatcatttttttaatgatcccacgcattttaactatcttaacgagcaagaaaaaaagatcgctgaacccattttaaaagagattttagaaagggtgttttttttatacgatgtggggctagggtatttgactttggggagggatgcgcgaacgattagcggaggggagagccaaaggatacgaatcgccagtcaaatcgggagcggtttgacaggggttttgtatgttttagacgagcctagcattggcttgcatgaaaaagacacgctcaaactcatcaacacccttaggaatttacaaaaaaaggggaacacgctcattgtcgtagagcatgataaagagacgattaagcatgcggattttgttgtggatattgggccaaaggctggaaggcatgggggtgaagtggtttttagcgggagcgtaaaagatttattgcaaaataaccattctaccgccttgtatctcaacggcactaaaaagattgagcgccccaaatttgaaccccctaaagaaaagcattttttagaaattaaaaatgtcaatatcaataacattaagaatttgagcgttcaaatccccttaaaacaattggtgtgcattacgggggtgagcgggagcggtaaaagctcgctgattttacaaacccttttacccaccgctcaaacccttttaaaccatgctaaaaaaaatcaaagcttgaatggggtggagattgtagggttggagtatttggataaagtgatttatttagatcaagcccccataggcaaaaccccacgaagcaaccccgccacttacacgggagtgatggatgaaatcaggattttatttgccgagcaaaaagaagctaaaattttaggctatagcacgagccgtttcagctttaatgttaaaggagggcggtgtgagaaatgccaaggcgatggggatattaaaatagaaatgcactttttgcctgatgtgttagtccaatgcgatagctgtaagggcgctaaatacaacccccaaactttagaaatcaaggtgaaaggcaaatccattgctgatgtgttgaacatgagcgtggaagaagcttatgaattttttgctaaattccctaaaatcgctgtgaagttaaaaacgcttatagatgtgggcttaggctatatcactttagggcaaaacgctacgactttaagtgggggggaggctcaaaggatcaaattggctaaagaattgagtaaaaaagacacaggcaaaaccctttatattttagatgagcctaccaccggtttgcattttgaagatgtgaatcaccttttacaagtcttgcattctttggtggcgttaggcaattccatgctagtgattgagcataatttagacatcatcaaaaacgctgactacattatagacatggggcctgatgggggggataagggcgggaaagtcattgcgagcggcacgcctttagaagtggcgcaaaattgcgaaaaaacccaaagctatacgggaaaatttttagctttggaattgaaa

SEQ ID NO: 2543 - DNA (genomic), 2826 bp, Helicobacter pylori; double-stranded, circular
  misc_feature (B) LOCATION 1...2826
  hypothetical: NO
  anti-sense: NO
ttgcaacataaaaccattatggataagatcattattcaaggggctagggaaaacaatctcaaaaatatctttttagaaatccctaaaaaccaatttgttgtttttaccggattaagcggttcgggtaaatccactctggcgtttgacactctatacgctgaagggcaaaggcgctatttagagagtttgtctagttatgcgaggcaatttttagacaaagtgggtaagcctaatgtggataaaattgaaggcctaaccccagcgatcgctattgatcaaaaaaccacttctaaaaaccctagatccactgtggggacgatcactgagatttatgattatttaaggttgttgtttgcaagggttggggagcaattttgccccacatgtttagagcctattagttctatgagcgcgagcgatatcatttctcaaatctgtcatttagaagaaaattctaaaatcattattctagcccccattattaaagataaaaaaggttcgtttaacgataaattagagagtttgcgtttgaaggggtatgtgagggcttttgttgatggggtgatggtgcgtttagatgaagaaatccatttgcacaaaaccaaaaaacacaccattgaagcggtggtggatagggtggttatcaatagcgaaaatgcttcacggatcgctagcgcggtagaaaaagcccttaaagaaagctatggggaattagaagtggaaatcttgcaagacaacgcaccaagtattaggaagcattacagcgagcataaggcatgttttaagtgcaagatgagttttgaagaattagagcctttgagtttttccttcaattcgcctaaaggggcgtgcgaaagttgtttgggtttagggacaaaatttagcttagatattagtaagattttagatcctaacacgcctttaaatcaaggagcgattaaagtgatttttgggtataaccgcagttattacgctcaaatgtttgaaggcttttgcacttataatggcattgacagcgcgctttgtttcaacgaattgaacaaagagcagcaagacgctcttttgtatgggaatggcactgaaatcagctttcattttaaaaacagccccttgaaacgcccctggaaaggcattatccaaatcgcttatgacatgtttaaagagcaaaaggatttgagcgattacatgagcgaaaaaacctgttcttcgtgtaatgggcatcgcttgaaagcctcaagtttgagcgtccaagtcgctggcttgaaaatggcggattttttaactaagcccattgaagaagtctatcatttttttaatgatcccacgcattttaactatcttaacgagcaagaaaaaaagatcgctgaacccattttaaaagagattttagaaagggtgttttttttatacgatgtggggctagggtatttgactttggggagggatgcgcgaacgattagcggaggggagagccaaaggatacgaatcgccagtcaaatcgggagcggtttgacaggggttttgtatgttttagacgagcctagcattggcttgcatgaaaaagacacgctcaaactcatcaacacccttaggaatttacaaaaaaaggggaacacgctcattgtcgtagagcatgataaagagacgattaagcatgcggattttgttgtggatattgggccaaaggctggaaggcatgggggtgaagtggtttttagcgggagcgtaaaagatttattgcaaaataaccattctaccgccttgtatctcaacggcactaaaaagattgagcgccccaaatttgaaccccctaaagaaaagcattttttagaaattaaaaatgtcaatatcaataacattaagaatttgagcgttcaaatccccttaaaacaattggtgtgcattacgggggtgagcgggagcggtaaaagctcgctgattttacaaacccttttacccaccgctcaaacccttttaaaccatgctaaaaaaaatcaaagcttgaatggggtggagattgtagggttggagtatttggataaagtgatttatttagatcaagcccccataggcaaaaccccacgaagcaaccccgccacttacacgggagtgatggatgaaatcaggattttatttgccgagcaaaaagaagctaaaattttaggctatagcacgagccgtttcagctttaatgttaaaggagggcggtgtgagaaatgccaaggcgatggggatattaaaatagaaatgcactttttgcctgatgtgttagtccaatgcgatagctgtaagggcgctaaatacaacccccaaactttagaaatcaaggtgaaaggcaaatccattgctgatgtgttgaacatgagcgtggaagaagcttatgaattttttgctaaattccctaaaatcgctgtgaagttaaaaacgcttatagatgtgggcttaggctatatcactttagggcaaaacgctacgactttaagtgggggggaggctcaaaggatcaaattggctaaagaattgagtaaaaaagacacaggcaaaaccctttatattttagatgagcctaccaccggtttgcattttgaagatgtgaatcaccttttacaagtcttgcattctttggtggcgttaggcaattccatgctagtgattgagcataatttagacatcatcaaaaacgctgactacattatagacatggggcctgatgggggggataagggcgggaaagtcattgcgagcggcacgcctttagaagtggcgcaaaattgcgaaaaaacccaaagctatacgggaaaatttttagctttggaattgaaatag

SEQ ID NO: 2544 - DNA (genomic), 246 bp, Helicobacter pylori; double-stranded, circular
  misc_feature (B) LOCATION 1...246
  hypothetical: NO
  anti-sense: NO
gcattcaatgcgattgagcaagatgaaatcactcaaaagattgaagcagaagagttgttagagcatatccaaaaagtattgaatcaaatgagcgaaagagagcaaatccttatccagctctattactttgaagagttgaatttgagcgagattaaagagattttaggcattactgaatcgcgcatttctcaaatcatcaaagaagtgattaaaaaggtgcgccaatccttaggagtgaatcatggc

SEQ ID NO: 2545 - DNA (genomic), 264 bp, Helicobacter pylori; double-stranded, circular
  misc_feature (B) LOCATION 1...264
  hypothetical: NO
  anti-sense: NO
gtgccaatagatgagcaattcaatgcgattgagcaagatgaaatcactcaaaagattgaagcagaagagttgttagagcatatccaaaaagtattgaatcaaatgagcgaaagagagcagatccttatccagctttattactttgaagagttgaatttgagcgagattaaagagattttaggcattactgaatcgcgcatttctcaaatcatcaaagaagtgattaaaaaggtgcgccaatccttaggagtgaatcatggctga

SEQ ID NO: 2546 - DNA (genomic), 396 bp, Helicobacter pylori; double-stranded, circular
  misc_feature (B) LOCATION 1...396
  hypothetical: NO
  anti-sense: NO
atgcccaaagaaattcaaaaaactgaagcgagcgaaaaaagtatagaaaaggttttgaacgcctacgacaagcaacaacaccaccatcaagacgcgctcgctatccagtatttaccagccgtgcgcgccatggcgtttcgtttaaaagagcgcttgcctagctctattgattttaacgatctggtttctattggcactgaagaattgattaaattagccaggcgttatgagagcgcgttaaacgattctttttgggggtatgctaaaacgcgcgtcaatggggcaatgttagattatttgcgttctttagatgtgatttctcgctctagcaggaagctcattaaaagcattgatattgaaatcaccaataccttaatgagcatggaaagagcctag

SEQ ID NO: 2547 - DNA (genomic), 411 bp, Helicobacter pylori; double-stranded, circular
  misc_feature (B) LOCATION 1...411
  hypothetical: NO
  anti-sense: NO
attacattagaaattatgattttgatgatggaaaatagaatgcccaaagaaattcaaaaaactgaagcgagcgaaaaaagtatagaaaaggttttgaacgcctacgacaagcaacaacaccaccatcaagacgcgctcgctatccagtatttaccagccgtgcgcgccatggcgtttcgtttaaaagagcgcttgcctagctctattgattttaacgatctggtttctattggcactgaagaattgattaaattagccaggcgttatgagagcgcgttaaacgattctttttgggggtatgctaaaacgcgcgtcaatggggcaatgttagattatttgcgttctttagatgtgatttctcgctctagcaggaagctcattaaaagcctgatattgaatcccccaaatcct

SEQ ID NO: 2548 - DNA (genomic), 768 bp, Helicobacter pylori; double-stranded, circular
  misc_feature (B) LOCATION 1...768
  hypothetical: NO
  anti-sense: NO
atgattttgatgatggaaaatagaatgcccaaagaaattcaaaaaactgaagcgagcgaaaaaagtatagaaaaggttttgaacgcctacgacaagcaacaacaccaccatcaagacgcgctcgctatccagtatttaccagccgtgcgcgccatggcgtttcgtttaaaagagcgcttgcctagctctattgattttaacgatctggtttctattggcactgaagaattgattaaattagccaggcgttatgagagcgcgttaaacgattctttttgggggtatgctaaaacgcgcgtcaatggggcaatgttagattatttgcgttctttagatgtgatttctcgctctagcaggaagctcattaaaagcattgatattgaaatcaccaaataccttaatgagcatgggaaagagcctagcgatgagcatttagcggaagctttaggcgagaatattgaaaagattagagaagccaaaacggcttcagatatttatgcactagtgccaatagatgagcaattcaatgcgattgagcaagatgaaatcactcaaaagattgaagcagaagagttgttagagcatatccaaaaagtattgaatcaaatgagcgaaagagagcaaatccttatccagctctattactttgaagagttgaatttgagcgagattaaagagattttaggcattactgaatcgcgcatttctcaaatcatcaaagaagtgattaaaaaggtgcgccaatccttaggagtgaatcatggctga

SEQ ID NO: 2549 - DNA (genomic), 360 bp, Helicobacter pylori; double-stranded, circular
  misc_feature (B) LOCATION 1...360
  hypothetical: NO
  anti-sense: NO
gtggtgagcgttttgtatcgcagcggcacacacttaagccctgaagaaatcacgcactctatccgccaaaaagacaaaaacaccagcatttcttctgtgtatcgcattttgaatttcttagaaaaagaaaattttatctgcgttttagagacttcaaagagcggccggcgttatgaaattgcggctaaagagcaccatgatcacatcatttgtttgcattgcggtaagatcattgaatttgcagaccctgaaattgaacaccgccagaacgaagtcgttaaaaaatatcaagccaagctgatcagccatgacatgaaaatgtttgtgtggtgcaaagaatgccaagagagcgatgattaa

SEQ ID NO: 2550 - DNA (genomic), 393 bp, Helicobacter pylori; double-stranded, circular
  misc_feature (B) LOCATION 1...393
  hypothetical: NO
  anti-sense: NO
aaaaacggactcaaaaattcaaagcagagggaagaagtggtgagcgttttgtatcgcagcggcacacacttaagccctgaagaaatcacgcactctatccgccaaaaagacaaaaacaccagcatttcttctgtgtatcgcattttgaatttcttagaaaaagaaaattttatctgcgttttagagacttcaaagagcggccggcgttatgaaattgcggctaaagagcaccatgatcacatcatttgtttgcattgcggtaagatcattgaatttgcagaccctgaaattgaacaccgccagaacgaagtcgttaaaaaatatcaagccaagctgatcagccatgacatgaaaatgtttgtgtggtgcaaagaatgccaagagagcgatgat

SEQ ID NO: 2551 - DNA (genomic), 390 bp, Helicobacter pylori; double-stranded, circular
  misc_feature (B) LOCATION 1...390
  hypothetical: NO
  anti-sense: NO
aacggactcaaaaattcaaagcagagggaagaagtggtgagcgttttgtatcgcagcggcacacacttaagccctgaagaaatcacgcactctatccgccaaaaagacaaaaacaccagcatttcttctgtgtatcgcattttgaatttcttagaaaaagaaaattttatctgcgttttagagacttcaaagagcggccggcgttatgaaattgcggctaaagagcaccatgatcacatcatttgtttgcattgcggtaagatcattgaatttgcagaccctgaaattgaacaccgccagaacgaagtcgttaaaaaatatcaagccaagctgatcagccatgacatgaaaatgtttgtgtggtgcaaagaatgccaagagagcgatgat

SEQ ID NO: 2552 - DNA (genomic), 648 bp, Helicobacter pylori; double-stranded, circular
  misc_feature (B) LOCATION 1...648
  hypothetical: NO
  anti-sense: NO
aaatttaaagggggcaaaatgaacaaaatagagttattactccaaactctagcgcctaagggagtggagtttaggaagttgggggatattggggaattttatggcggacttgttggaaaaagtaaaaaatctttctctcaagggaataaattttatgttccttatatcaatgtttttaataatccacaattagatctaaatgctttagaaagcgttcaaataggggataaagaaaaacaaaatacaattcaattaggcgatgtgctttttactggttcatctgaaaatttagaggattgtgcgatgtcttgcgtagttactcaaaagattgaggaagatatttatcttaatagtttttgttttggttttagattttttgataagaatttatttaatccatcatttcttaaacattttttaagagactacaattttaggaaaaatatttcaaaagttgctaatggtgtaacgcgcttcaatgtttcaaagcaattacttttaaaaataaccatccccatcccgcccctagagatccagcaagagatcgttacgattttggacgctttcacagaattaaacacagagttaaacacagaattaaacacagaattaaacgcgcgaaaaaagcaatatcagtattaccaaaac

SEQ ID NO: 2553 - DNA (genomic), 1365 bp, Helicobacter pylori; double-stranded, circular
  misc_feature (B) LOCATION 1...1365
  hypothetical: NO
  anti-sense: NO
atgaacaaaatagagttattactccacactctagcacctaagggggtggagtttaggaagttgggggatattggggaattttatggcggacttgttggaaaaagtaaaaaatctttctctcaagggaataaattttatgttccttatatcaatgtttttaataatccacaattagatctaaatgctttagaaagcgttcaaataggggataaagaaaaacaaaatacaattcaattaggcgatgtgctttttactggttcatctgaaaatttagaggattgtgcgatgtcttgcgtagttactcaaaagattgaggaagatatttatcttaatagtttttgttttggttttagattttttgataagaatttatttaatccatcatttcttaaacattttttaagagactacaattttaggaaaaatatttcaaaagttgctaatggtgtaacgcgcttcaatgtttcaaagcaattacttttaaaaataaccatccccatcccgcccctagagatccagcaagagatcgttacgattttggacgctttcacagaattaaacacagaattaaacacagaattaaacacagaattaaacgcgcgaaaaaagcaatatcagtattaccaaaacatgcttttagactttaacgacatcaaccaaagccgcaaagacgccaaagaaagattggcgcaaaaaccctaccccaaacgcttgaaacaactcctccacactctagcgcctaagggagtggagtttaggaagttgggggatattggggaatttactagaggtaatgggcttttgaaaagtgatttacaagacaaggggagacctgttgttcattatggacaaatacacactcaatacaatctttcaattgataagacaatttcatatgttaatgacgctttattccataaattaaaaaaagcaaagccaaacgatattctcatcgccacaacctcagaaaatgtaaaagatgtaggaaagagtattgcatggttaggaaatgaagaagttgccttttcgggtgaaatgtatagctattctacaaatgaaaaccctaaatttatcatttattactttcaaacttatttttttcaaaaagaaaaagaaaagaaaataacaggaactaaagttatgcgtatccatgaaaatgatttaaaacaaataacaatccccatcccacccctagagatccaacaagagatcgttacgattttggatcaattttcagccctaactactgatttgcaagccggtatccctgctgaaatcaaagccaggaaaaaacaatacgaatattaccgagaaaaattactgaccttcaaacccctaaccctcaataaagaagttaaaaaatga

SEQ ID NO: 2554 - DNA (genomic), 945 bp, Helicobacter pylori; double-stranded, circular
  misc_feature (B) LOCATION 1...945
  hypothetical: NO
  anti-sense: NO
atggcaaaagtagaagtggagttaaaaaaactctatcaaattttagtggatgctgaatatttttaccaagttcccaattaccaacgcccttatgtgtgggataaggatcatttaggggctttgattgatgatttggtggtcagctataccaacaacagagaagatgagtatttttgcggctctattgtgatcgctgaaaatccaaaagataaaagatgggatgttgtggatggccaacagaggctaacgagttttattatcttggcttgcacgattttaaggctttataaacacaggttagggcaaaaatctaaggcttttattgaagagagcatttatgacagacacgataaagaaaaagagcgtctgaaatttttaaccgctcaaaattacaacagcatttttgaaaacacggtgttaaagaatttagagtttgaagacaacattaaaaagagcgagtggaataagaagtttgatgaaaacacttatttgcgtaacgcttattattttagagagctattgaatgagagcatggaaaatggttccataagcgatatggatgattttgtcaagtggttttatgaacacattgctttgactaggatcatttgttttgagcaagacagcgcgatgcaaatctttcaagtgttaaacgacagaggccagcccttaagccctattgatattttaaaatccagtttgatgcaagaaatcaagcaagatagtgaaaagcgtaaggattttataaccacttgggacaaattggttgaagcttgcaagagcgttgaaggcatagatattgatttggaagacttttttaacatgtatttagaatacgctgatcctagttcttctaaaaagagagccgataagggattaaaaaggtgttcaaagacagcaaaaaagacgcttgcgagtttatttatggcattagcgagttcatga

SEQ ID NO: 2555 - DNA (genomic), 945 bp, Helicobacter pylori; double-stranded, circular
  misc_feature (B) LOCATION 1...945
  hypothetical: NO
  anti-sense: NO
atggcaaaagtagaagtggagttaaaaaaactctatcaaattttagtggatgctgaatattttaccaagttcccaattaccaacgcccttatgtgtgggataaggatcatttaggggctttgattgatgatttggtggtcagctataccaacaacagagaagatgagtatttttgcggctctattgtgatcgctgaaaatccaaaagataaaagatgggatgttgtggatggccaacagaggctaacgagttttattatcttggcttgcacgattttaaggctttataaacacaggttagggcaaaaatctaaggcttttattgaagagagcatttatgacagacacgataaagaaaaagagcgtctgaaatttttaaccgctcaaaattacaacagcatttttgaaaacacggtgttaaagaatttagagtttgaagacaacattaaaaagagcgagtggaataagaagtttgatgaaaacacttatttgcgtaacgcttattattttagagagctattgaatgagagcatggaaaatggttccataagcgatatggatgattttgtcaagtggttttatgaacacattgctttgactaggatcatttgttttgagcaagacagcgcgatgcaaatctttcaagtgttaaacgacagaggccagcccttaagccctattgatattttaaaatccagtttgatgcaagaaatcaagcaagatagtgaaaagcgtaaggattttataaccacttgggacaaattggttgaagcttgcaagagcgttgaaggcatagatattgatttggaagacttttttaacatgtatttagaatacgctgatcctagttcttctaaaaagagagccgataagggattaaaaaggtgttcaaagacagcaaaaaagacgcttgcgagtttatttatggcattagcgagttcatgat

SEQ ID NO: 2556 - DNA (genomic), 1092 bp, Helicobacter pylori; double-stranded, circular
  misc_feature (B) LOCATION 1...1092
  hypothetical: NO
  anti-sense: NO
attcaatacaaggagaagacgatggcaaaagtagaagtggagttaaaaaaactctatcaaattttagtggatgctgaatatttttaccaagttcccaattaccaacgcccttatgtgtgggataaggatcatttaggggctttgattgatgatttggtggtcagctataccaacaacagagaagatgagtatttttgcggctctattgtgatcgctgaaaatccaaaagataaaagatgggatgttgtggatggccaacagaggctaacgagttttattatcttggcttgcacgattttaaggctttataaacacaggttagggcaaaaatctaaggcttttattgaagagagcatttatgacagacacgataaagaaaaagagcgtctgaaatttttaaccgctcaaaattacaacagcatttttgaaaacacggtgttaaagaatttagagtttgaagacaacattaaaaagagcgagtggaataagaagtttgatgaaaacacttatttgcgtaacgcttattattttagagagctattgaatgagagcatggaaaatggttccataagcgatatggatgattttgtcaagtggttttatgaacacattgctttgactaggatcatttgttttgagcaagacagcgcgatgcaaatctttcaagtgttaaacgacagaggccagcccttaagccctattgatattttaaaatccagtttgatgcaagaaatcaagcaagatagtgaaaagcgtaaggattttataaccacttgggacaaattggttgaagcttgcaagagcgttgaaggcatagatattgatttggaagacttttttaacatgtatttagaatacgctgatcctagttcttctaaaaagagagccgataagggattaaaaaaggtgttcaaagacagcaaaaaagacgcttgcgagtttatttatggcattagcgagttcatgaagtcttataccgatttgttaaaaaaaccagaccgatacatttacttattaagataccttccctccagattttgggccagtatcttaacgacagccctttatgtcaaataccctgattttgagctt

SEQ ID NO: 2557 - DNA (genomic), 189 bp, Helicobacter pylori; double-stranded, circular
  misc_feature (B) LOCATION 1...189
  hypothetical: NO
  anti-sense: NO
gtgttcaaagacagcaaaaaagacgcttgcgagtttatttatggcattagcgagttcatgaagtcttataccgatttgttaaaaaaaccagaccgatacatttacttattaagataccttccctccagattttgggccagtatcttaacgacagccctttatgtcaaataccctgattttgagctttga

SEQ ID NO: 2558 - DNA (genomic), 267 bp, Helicobacter pylori; double-stranded, circular
  misc_feature (B) LOCATION 1...267
  hypothetical: NO
  anti-sense: NO
attttgggcgagattgataccaggaatgcagcactttttttgcgtttaggaaacaccgggcataagggcatgctctcaaccattcacgccaatagtgctcaaaacactttagaagccctttcactgaatttaagcatgcgttacacgcattcattagataaggatttgatgcgagcgtattttaagagtgcgattgatgtgatcgtgcatgtgaataaaatcaacaatgagcgccaaatcgctgaagtcttatggactaaagagctt

SEQ ID NO: 2559 - DNA (genomic), 264 bp, Helicobacter pylori; double-stranded, circular
  misc_feature (B) LOCATION 1...264
  hypothetical: NO
  anti-sense: NO
ttgggcgagattgataccaggaatgcagcactttttttgcgtttaggaaacaccgggcataagggcatgctctcaaccattcacgccaatagtgctcaaaacactttagaagccctttcactgaatttaagcatgcgttacacgcattcattagataaggatttgatgcgagcgtattttaagagtgcgattgatgtgatcgtgcatgtgaataaaatcaacaatgagcgccaaatcgctgaagtcttatggactaaagagctt

SEQ ID NO: 2560 - DNA (genomic), 432 bp, Helicobacter pylori; double-stranded, circular
  misc_feature (B) LOCATION 1...432
  hypothetical: NO
  anti-sense: NO
aagagcgatgataaaaggatagggcttttggaaactttacaaacccatagagttttacaagccctaattggccattttaccccttttttaagaagtgggatcacagagcttatcatcaataccgaacaggagctttggctttataagatcaataacacccgagaaaaaagagggcatgtgctttttgataaggcgtttttgctgaggttttgcgagcaattggccagttttagggggttgttttttgatgaagagcaccccactttaaattgctctatccctttcacgcgctatagggtgagcgcgaatcactttagcatcactaccaataatcaaatcacgctcaatatccgtgtgcctaggcttaagcccttaagtttagaggatttcactttcaaagtaagtaacccagaaagtttgaaaaatttgccc

SEQ ID NO: 2561 - DNA (genomic), 915 bp, Helicobacter pylori; double-stranded, circular
  misc_feature (B) LOCATION 1...915
  hypothetical: NO
  anti-sense: NO
ttggaaactttacaaacccatagagttttacaagccctaattggccattttaccccttttttagaaagtgggatcacagagcttatcatcaataccgaacaggagctttggctttataagatcaataacacccgagaaaaaagagggcatgtgctttttgataaggcgtttttgctgaggttttgcgagcaattggccagttttagggggttgttttttgatgaagagcaccccactttaaattgctctatccctttcacgcgctatagggtgagcgcgaatcactttagcatcactaccaataatcaaatcacgctcaatatccgtgtgcctaggcttaagcccttaagtttagaggatttcactttcaaagtaagtaacccagaaagtttgaaaaatttagccctaaaagggcataacattctcattagcggcgagacttcaagcggtaaaacaagcctattaaacgctcttttagattgcgtcaataaagatgaaagggtggtgagcgttgaagacagccaagaattggatttaaaagcgttcagtaattgcgtggggcttttagtgggcaagcaagaaaacacgcgctttaattatgaagacgctctcaatatggccatgcgcttaaatccggataggctcattgtgggcgagattgataccaggaatgcagcactttttttgcgtttaggaaacaccgggcataagggcatgctctcaaccattcacgccaatagtgctcaaaacactttagaagccctttcactgaatttaagcatgcgttacacgcattcattagataaggatttgatgcgagcgtattttaagagtgcgattgatgtgatcgtgcatgtgaataaaatcaacaatgagcgccaaatcgctgaagtcttatggactaaagagctttaa

SEQ ID NO: 2562 - DNA (genomic), 1074 bp, Helicobacter pylori; double-stranded, circular
  misc_feature (B) LOCATION 1...1074
  hypothetical: NO
  anti-sense: NO
atgagtgattgtaaaatgagtagggttagtagggaattgtttgataatattaagtcatttttgcactataagtttaaaacaatgatacgcatccaaagcgtgaatgatttggaattgatcttaaaatggcaagatagagttttagagtgccaaagttttatcgcattgaaagagctcaatcacaaactttataatcaaggcgttaggcatacgattatgatgcaaggcttgtttttgttctttgaatattttgataataggattaagctcaaatccttgcgcaatctagcagaagaacaggttatagacttcttatttggattagtcaaaaacaggaaaccaagctctatggctaaatatgtgatggttttaagacaattctttgattatttagacagaaaaagaaactatagctttgattttgaacttaaaaatctatcgtttgccaagaaagaaatgtatttgcctaaacatttgaataaaaatgattttaaggcttttattcaagctcttctaaaataccatcccaaaaccagttttgaaaaacgcaatcagtgtattttactgcttattgcattaggggggttaaggaagtttgaagccttagatttggagctaaaaaacattgctttagaaaataaccactaccgccttttaatcaaaggtaaaaacaacaaagagagatacgcttatattgaaaaagagtttttgcaagttcctttgaatgcgtggctaagcgatactaaacgattaaagagttttaaggggcgttttgtgtttaaaaaagcaaaaaacaacaccacgcaaaaaacttgctctttaaagggctttatcgctaaaatttttaagctctctaatattgatgtaaaatcttatggattaggtttgcatctttttaggcatagttttgctacttttatttatgatgaaacacaggatttggttttaacttcaagagcgttgggtcatagttctttgctttctactaaaatctatatccataccactcaagaacacaataaaaaagtgactcttgtgttaaaaggatggttaaaaaatgaaaaaagcgagtag

SEQ ID NO: 2563 - DNA (genomic), 1080 bp, Helicobacter pylori; double-stranded, circular
  misc_feature (B) LOCATION 1...1080
  hypothetical: NO
  anti-sense: NO
gggagaaagatgagtgattgtaaaatgagtagggttagtagggaattgtttgataatattaagtcatttttgcactataagtttaaaacaatgatacgcatccaaagcgtgaatgatttggaattgatcttaaaatggcaagatagagttttagagtgccaaagttttatcgcattgaaagagctcaatcacaaactttataatcaaggcgttaggcatacgattatgatgcaaggcttgtttttgttctttgaatattttgataataggattaagctcaaatccttgcgcaatctagcagaagaacaggttatagacttcttatttggattagtcaaaaacaggaaaccaagctctatggctaaatatgtgatggttttaagacaattctttgattatttagacagaaaaagaaactatagctttgattttgaacttaaaaatctatcgtttgccaagaaagaaatgtatttgcctaaacatttgaataaaaatgattttaaggcttttattcaagctcttctaaaataccatcccaaaaccagttttgaaaaacgcaatcagtgtattttactgcttattgcattaggggggttaaggaagtttgaagccttagatttggagctaaaaaacattgctttagaaaataaccactaccgccttttaatcaaaggtaaaaacaacaaagagagatacgcttatattgaaaaagagtttttgcaagttcctttgaatgcgtggctaagcgatactaaacgattaaagagttttaaggggcgttttgtgtttaaaaaagcaaaaaacaacaccacgcaaaaaacttgctctttaaagggctttatcgctaaaatttttaagctctctaatattgatgtaaaatcttatggattaggtttgcatctttttaggcatagttttgctacttttatttatgatgaaacacaggatttggttttaacttcaagagcgttgggtcatagttctttgctttctactaaaatctatatccataccactcaagaacacaataaaaaagtgactcttgtgttaaaaggatggttaaaaaatgaaaaaagcgag

SEQ ID NO: 2564 - DNA (genomic), 168 bp, Helicobacter pylori; double-stranded, circular
  misc_feature (B) LOCATION 1...168
  hypothetical: NO
  anti-sense: NO
atgtctttaggggcagtgatcaggcttattttttgttataagttagagggggtaatattagatttaaagcgcatcaatttcaaatcctattaccccaataataaaaatgcattatttatcaacaataagaaaaatccattatctagtrcttcaaagttcatattgctt

SEQ ID NO: 2565 - DNA (genomic), 543 bp, Helicobacter pylori; double-stranded, circular
  misc_feature (B) LOCATION 1...543
  hypothetical: NO
  anti-sense: NO
gaaaatactatgcaagatttacaacatttcaaaaatgatattacgctcattctgtctaaagacagattagatacttatgacagcctagagcaatacaaagaaaatttaaaactcatttctttcatcacgcctaaaatctctaacttagagatttatttacgcaacgctttagactattgcttaacccaaattaaggggagcgaatgggtgtttaatgaaaattctttaacagatttaattaacgaacaaaaagaaaagaaaaaagaaatcacgcattctttaatcttatctaaaatgtctttaggggcagtggttaggcttattttttgttataagttagagggggtaatattagatttgagagcgtatcgtttgagagcttattatcacgaaaataaagataccttgcttattaaaggcaaaaaacgccttctttacaattatattaaagcccatattgctttaaacttgctatggacaattagaaatcgcacgtatcattgggaaaatttactcaaaatccaaccgaacaaccgcccacaa

SEQ ID NO: 2566 - DNA (genomic), 684 bp, Helicobacter pylori; double-stranded, circular
  misc_feature (B) LOCATION 1...684
  hypothetical: NO
  anti-sense: NO
atgcaagatttacaacatttcaaaaatgatattacgctcattctatctaaagacagattagatacttatgacagcctagagcaatacaaagaaaatttaaaactcattgctttcatcacgcctaaaatttctaacttagaaatttatttacgcaacgctttagactattgcctgactcaaatgaaagggagtgaatgggtgtttaacgaaagcgttttaacccctttaatcaaagaattaaaagaaaagaaaaaagaaatcacgcattctttaatcttatctaaaatgtctttaggggcagtgatcaggcttattttttgttataagttagagggggtaatattagatttaaagcgcatcaatttcaaatcctattaccccaataataaaaatgcattatttatcaacaataagaaaaatccattatctagtgcttcaaaggttcatattgctttaaacttgctatggacaattagaaatcgtgcgtatcattgggaaaatttactcaaaatccaaccgaacaagcgcccacgcattacgacttatttcattgggttaaaagacaatgatagggcaagaattcctatgaatatcagtgtagaaccaagtaaaatcgtcttgtttttagatgatttaattaaaagcatcggaaataaagacttggaagatttaagtagtttgtga

SEQ ID NO: 2567 - DNA (genomic), 726 bp, Helicobacter pylori; double-stranded, circular
  misc_feature (B) LOCATION 1...726
  hypothetical: NO
  anti-sense: NO
aaattatttttagttataatttttcaaaaaaccttaagagaaatcatgcaagatttacaacatttcaaaaatgatattacgctcattctatctaaagacagattagatacttatgacagcctagagcaatacaaagaaaatttaaaactcattgctttcatcacgcctaaaatttctaacttagaaatttatttacgcaacgctttagactattgcctgactcaaatgaaagggagtgaatgggtgtttaacgaaagcgttttaacccctttaatcaaagaattaaaagaaaagaaaaaagaaatcacgcattctttaatcttatctaaaatgtctttaggggcagtgatcaggcttattttttgttataagttagagggggtaatattagatttaaagcgcatcaatttcaaatcctattaccccaataataaaaatgcattatttatcaacaataagaaaaatccattatctagtgcttcaaaggttcatattgctttaaacttgctatggacaattagaaatcgtgcgtatcattgggaaaatttactcaaaatccaaccgaacaagcgcccacgcattacgacttatttcattgggttaaaagacaatgatagggcaagaattcctatgaatatcagtgtagaaccaagtaaaatcgtcttgtttttagatgatttaattaaaagcatcggaaataaagacttggaagatttaagtagtttg

SEQ ID NO: 2568 - DNA (genomic), 606 bp, Helicobacter pylori; double-stranded, circular
  misc_feature (B) LOCATION 1...606
  hypothetical: NO
  anti-sense: NO
atgcgcatcaagcaaacgagtatcaacattatcaaaaatgttaaaagcaataaaggcattgaaaccattcaagagcttatactggacaacatagaatcttataacacctttaaccaataccactataacttatgggagagttcttctgtttatcctagcaaatggttacgccctgtcttagccctagctaattattttatgacagacgaagagaaaccccattttatcgctatggatgccgaaacccaagtggagcatattttaccccaaacgcccaaaagaggcagtcaatggaacgcggattttgataaagaaaaaagagaaaaatgggtgaatcatatcgcaaatttaacccttttaaagcgtaaaaagaacgcaaaagctttaaatggggattttgatgaaaaaagaaaaatttatggtggcaaagacccaagcaaagtgattagctgctatgacatcactaaagaattgtatagcgactataggaagtgggacgagaagtctctccaaaagcgatacgactttttgtatgaaattatcacgcctattttacacatagaagggcaagaagagaaatatgaagatgattttgatctagaatga

SEQ ID NO: 2569 - DNA (genomic), 663 bp, Helicobacter pylori; double-stranded, circular
  misc_feature (B) LOCATION 1...663
  hypothetical: NO
  anti-sense: NO
gctttgaaaaagcttttggtgtcttattattatcaaacttggattgcaggaggcacgatcatgcgcatcaagcaaacgagtatcaacattatcaaaaatgttaaaagcaataaaggcattgaaaccattcaagagcttatactggacaacatagaatcttataacacctttaaccaataccactataacttatgggagagttcttctgtttatcctagcaaatggttacgccctgtcttagccctagctaattattttatgacagacgaagagaaaccccattttatcgctatggatgccgaaacccaagtggagcatattttaccccaaacgcccaaaagaggcagtcaatggaacgcggattttgataaagaaaaaagagaaaaatgggtgaatcatatcgcaaatttaacccttttaaagcgtaaaaagaacgcaaaagctttaaatggggattttgatgaaaaaagaaaaatttatggtggcaaagacccaagcaaagtgattagctgctatgacatcactaaagaattgtatagcgactataggaagtgggacgagaagtctctccaaaagcgatacgactttttgtatgaaattatcacgcctattttacacatagaagggcaagaagagaaatatgaagatgattttgatctagaa

SEQ ID NO: 2570 - DNA (genomic), 552 bp, Helicobacter pylori; double-stranded, circular
  misc_feature (B) LOCATION 1...552
  hypothetical: NO
  anti-sense: NO
atgatagtgggtttgataggggttgtggaaaaaatctctgctttagaagcgcatatagaagtgcaaggggttgtttatggggtgcaagtttctatgcgaacggctgctttgctccaaacgggccaaaaagcgcgtttgaaaatcttacaagtgattaaagaagatgcgcatcttttatacgggtttttagaagagagcgaaaaaattctctttgaaaggcttttgaaaatcaatggggtaggggggcgtatcgctttagccattctttcaagcttttcgccgaatgaatttgaaaacattatcgctactaaagaagtcaaaagactccagcaagtcccaggcatagggaaaaagctcgccgataagatcatggtggatttgattggctttttcattcaagatgaaaacagacccgcgcgcaatgaagtctttttagccctagagagtttgggctttaaaagcgctgaaatcaatccagttttaaaaaccctaaaaccccatctcagcatagaggcagcgattaaagaagccttacagcaactgcgctcttaa

SEQ ID NO: 2571 - DNA (genomic), 549 bp, Helicobacter pylori; double-stranded, circular
  misc_feature (B) LOCATION 1...549
  hypothetical: NO
  anti-sense: NO
atgatagtgggtttgataggggttgtggaaaaaatctctgctttagaagcgcatatagaagtgcaaggggttgtttatggggtgcaagtttctatgcgaacggctgctttgctccaaacgggccaaaaagcgcgtttgaaaatcttacaagtgattaaagaagatgcgcatcttttatacgggtttttagaagagagcgaaaaaattctctttgaaaggcttttgaaaatcaatggggtaggggggcgtatcgctttagccattctttcaagcttttcgccgaatgaatttgaaaacattatcgctactaaagaagtcaaaagactccagcaagtcccaggcatagggaaaaagctcgccgataagatcatggtggatttgattggctttttcattcaagatgaaaacagacccgcgcgcaatgaagtctttttagccctagagagtttgggctttaaaagcgctgaaatcaatccagttttaaaaaccctaaaaccccatctcagcatagaggcagcgattaaagaagccttacagcaactgcgctct

SEQ ID NO: 2572 - DNA (genomic), 594 bp, Helicobacter pylori; double-stranded, circular
  misc_feature (B) LOCATION 1...594
  hypothetical: NO
  anti-sense: NO
aagcgctataaaaggctagagcaagaaataaaaaaaagggataaaatgatagtgggtttgataggggttgtggaaaaaatctctgctttagaagcgcatatagaagtgcaaggggttgtttatggggtgcaagtttctatgcgaacggctgctttgctccaaacgggccaaaaagcgcgtttgaaaatcttacaagtgattaaagaagatgcgcatcttttatacgggtttttagaagagagcgaaaaaattctctttgaaaggcttttgaaaatcaatggggtaggggggcgtatcgctttagccattctttcaagcttttcgccgaatgaatttgaaaacattatcgctactaaagaagtcaaaagactccagcaagtcccaggcatagggaaaaagctcgccgataagatcatggtggatttgattggctttttcattcaagatgaaaacagacccgcgcgcaatgaagtctttttagccctagagagtttgggctttaaaagcgctgaaatcaatccagttttaaaaaccctaaaaccccatctcagcatagaggcagcgattaaagaagccttacagcaactgcgctct

SEQ ID NO: 2573 - DNA (genomic), 300 bp, Helicobacter pylori; double-stranded, circular
  misc_feature (B) LOCATION 1...300
  hypothetical: NO
  anti-sense: NO
gtgatcaaacctcatagcgtgggattggtaaggattgggatttgtttgtctttagaagtggggtatgaactgcaggtacgcacccgtagcggcttggctttgaatcatcaggtgatggtgttaaattyccctggcacggtggataatgattataggggcgaaattaaggtcattttagcgaatttgagcgataaagattttaaagttcaagtaggggataggatcgctcaaggggtggttcaaaaaacttataaagccgaatttatagaatgcgaacaattagatgaaaccttcaagggg

SEQ ID NO: 2574 - DNA (genomic), 441 bp, Helicobacter pylori; double-stranded, circular
  misc_feature (B) LOCATION 1...441
  hypothetical: NO
  anti-sense: NO
ttgatgaaaattaaaatccaaaaaatccacccaaacgcccttatccctaaataccaaaccgaaggctcttcaggctttgatttgcacgctgtagaagaagtagtgatcaaacctcatagcgtgggattggtaaggattgggatttgtttgtctttagaagtggggtatgaactgcaggtacgcacccgtagcggcttggctttgaatcatcaggtgatggtgttaaattcccctggcacggtggataatgattataggggcgaaattaaggtcattttagcgaatttgagcgataaagattttaaagttcaagtaggggataggatcgctcaaggggtggttcaaaaaacttataaagccgaatttatagaatgcgaacaattagatgaaacttcaaggggtagcggggggtttggcagcacaggagtgagtaaggcatga

SEQ ID NO: 2575 - DNA (genomic), 462 bp, Helicobacter pylori; double-stranded, circular
  misc_feature (B) LOCATION 1...462
  hypothetical: NO
  anti-sense: NO
acatttactataaagagatttgttttgatgaaaattaaaatccaaaaaatccacccaaacgcccttatccctaaataccaaaccgaaggctcttcaggctttgatttgcacgctgtagaagaagtagtgatcaaacctcatagcgtgggattggtaaggattgggatttgtttgtctttagaagtggggtatgaactgcaggtacgcacccgtagcggcttggctttgaatcatcaggtgatggtgttaaattcccctggcacggtggataatgattataggggcgaaattaaggtcattttagcgaatttgagcgataaagattttaaagttcaagtaggggataggatcgctcaaggggtggttcaaaaaacttataaagccgaatttatagaatgcgaacaattagatgaaacttcaaggggtagcggggggtttggcagcacaggagtgagtaaggca

SEQ ID NO: 2576 - DNA (genomic), 474 bp, Helicobacter pylori; double-stranded, circular
  misc_feature (B) LOCATION 1...474
  hypothetical: NO
  anti-sense: NO
atgcgtattttaggaatagacccaggcagtaggaaatgcgggtatgctatcatttctcacgcttccaacaagctttctttaatcacggccgggttcattaatatcaccacgacacgcttgcaagaacagattttagacttgatagaagccttagattgtttattggatcgttacgaagtcaatgaagtagcgattgaagatattttctttgggtataaccctaaaagcgtgatcaaactcgcgcaattcaggggggcgttgtccttaaagattttagaaaggatcggtaattttagcgaatacacgcccttacaagtcaaaaaagcccttaccggtaacgggaaagccgctaaagagcaagtggcctttatggtcaaacgcttgcttaacatcacaagcgaaatcaagcctttggatattagcgatgcgatagccgttgctatcacgcatgcgcaacgcttaaagccccgctaa

SEQ ID NO: 2577 - DNA (genomic), 474 bp, Helicobacter pylori; double-stranded, circular
  misc_feature (B) LOCATION 1...474
  hypothetical: NO
  anti-sense: NO
ttgatgcgtattttaggaatagacccaggcagtaggaaatgcgggtatgctatcatttctcacgcttccaacaagctttctttaatcacggccgggttcattaatatcaccacgacacgcttgcaagaacagattttagacttgatagaagccttagattgtttattggatcgttacgaagtcaatgaagtagcgattgaagatattttctttgggtataaccctaaaagcgtgatcaaactcgcgcaattcaggggggcgttgtccttaaagattttagaaaggatcggtaattttagcgaatacacgcccttacaagtcaaaaaagcccttaccggtaacgggaaagccgctaaagagcaagtggcctttatggtcaaacgcttgcttaacatcacaagcgaaatcaagcctttggatattagcgatgcgatagccgttgctatcacgcatgcgcaacgcttaaagccccgc

SEQ ID NO: 2578 - DNA (genomic), 363 bp, Helicobacter pylori; double-stranded, circular
  misc_feature (B) LOCATION 1...363
  hypothetical: NO
  anti-sense: NO
atgcaaaaagaaattgattcagagattgagctttttgaaatccccaccattaatgaaaatcagatcatcaaaaccctacatgacgctaaagtgtctgaagggatcatcagcctttatgaacagcttaccgaaatttttgagccgtctcaattggttttaaaacttttgagtttgcagtttgaaaccagtaaaattggcttgaatcagcaagaaattgatgcgattcaaaaccctaaagaaaaaacgccaaaacccccaaacaaaaaaacgcagcacgagccagcgcactcttttaaaaagagccaccacagagacagacaccctaaaacgaatcgttattctaaaaaacacaaacgccgttaa

SEQ ID NO: 2579 - DNA (genomic), 390 bp, Helicobacter pylori; double-stranded, circular
  misc_feature (B) LOCATION 1...390
  hypothetical: NO
  anti-sense: NO
agcgatcatgcgcctttagacacccaagcgcctgaaaagagcattgttttcacgcgcaccaaaaagaggccgatgaattgcaccaattccttgcttctaaaaattacaaaagtaccgccttgcatggggatatggatcaaagggatcgccgctcttctatcatggcgtttaaaaaaaatgacgctgacgtgttggtggctacagattgttgcgagccgagggcttgatattagcggtgtaagccatgtgtttagttaccacttgcccctaaacactgagagctatatccatcgcattgggagaaccgggcgagcgggcaaaaaagggcatggcgatcactttagtaacccctttagaatacaaagagcttttacgcatgcaaaaagaaat

SEQ ID NO: 2580 - DNA (genomic), 666 bp, Helicobacter pylori; double-stranded, circular
  misc_feature (B) LOCATION 1...666
  hypothetical: NO
  anti-sense: NO
atgaattgcaccaattccttgcttctaaaaattacaaaagtaccgccttgcatggggatatggatcaaagggatcgccgctcttctatcatggcgtttaaaaaaaatgacgctgacgtgttggtggctacagattgttgcgagccgagggcttgatattagcggtgtaagccatgtgtttagttaccacttgcccctaaacactgagagctatatccatcgcattgggagaaccgggcgagcgggcaaaaaaggcatggcgatcactttagtaacccctttagaatacaaagagcttttacgcatgcaaaaagaaattgattcagagattgagctttttgaaatccccaccattaatgaaaatcagatcatcaaaaccctacatgacgctaaagtgtctgaagggatcatcagcctttatgaacagcttaccgaaatttttgagccgtctcaattggttttaaaacttttgagtttgcagtttgaaaccagtaaaattggcttgaatcagcaagaaattgatgcgattcaaaaccctaaagaaaaaacgccaaaacccccaaacaaaaaaacgcagcacgagccagcgcactcttttaaaaagagccaccacagagacagacaccctaaaacgaatcgttattctaaaaaacacaaacgccgttaa

SEQ ID NO: 2581 - DNA (genomic), 189 bp, Helicobacter pylori; double-stranded, circular
  misc_feature (B) LOCATION 1...189
  hypothetical: NO
  anti-sense: NO
aaagagcattgttttcacgcgcaccaaaaagaggccgatgaattgcaccaattccttgcttctaaaaattacaaaagtaccgccttgcatggggatatggatcaaagggatcgccgctcttctatcatggcgtttaaaaaaaatgacgctgacgtgttggtggctacagattgttgcgagccgagggct

SEQ ID NO: 2582 - DNA (genomic), 363 bp, Helicobacter pylori; double-stranded, circular
  misc_feature (B) LOCATION 1...363
  hypothetical: NO
  anti-sense: NO
atgccagagccgattaaaagattagcggataagattttagaaaaccctattaaaatccatatcgccccttctaatatcactaacactgacatcacccaacgcttttatgtgatcaatgagcatgagagggctgaagcgatcatgcgccttttagacacccaagcgcctgaaaagagcattgttttcacgcgcaccaaaaaagaggccgatgaattgcaccaattccttgcttctaaaaattacaaaagtaccgccttgcatggggatatggatcaaagggatcgccgctcttctatcatggcgtttaaaaaaaatgacgctgacgtgttggtggctacagattgttgcgagccgagggcttga

SEQ ID NO: 2583 - DNA (genomic), 606 bp, Helicobacter pylori; double-stranded, circular
  misc_feature (B) LOCATION 1...606
  hypothetical: NO
  anti-sense: NO
gtgtctccaggccagagcgttaaaaaacaatgcgaatttattaagaaaaacccccaagtgatgatcgccacgccaggaaggctgttggatcatttaaagaacgagcgcatccataaatttgtgcctaaagtggtcgtgttagatgaaagcgatgaaatgctggatatggggtttttagacgatattgaagagatttttgactacctccctagcgaagcgcagattttgcttttttcagccacgatgccagagccgattaaaagattagcggataagattttagaaaaccctattaaaatccatatcgccccttctaatatcactaacactgacatcacccaacgcttttatgtgatcaatgagcatgagagggctgaagcgatcatgcgccttttagacacccaagcgcctgaaaagagcattgttttcacgcgcaccaaaaaagaggccgatgaattgcaccaattccttgcttctaaaaattacaaaagtaccgccttgcatggggatatggatcaaagggatcgccgctcttctatcatggcgtttaaaaaaaatgacgctgacgtgttggtggctacagattgttgcgagccgagggcttga

SEQ ID NO: 2584 - DNA (genomic), 288 bp, Helicobacter pylori; double-stranded, circular
  misc_feature (B) LOCATION 1...288
  hypothetical: NO
  anti-sense: NO
ttgtcagacgcttcaaaaagatcccttaatccaaccttaatgatgaataataataataccctacccaaacccctagaagaaagcctagatttaaaagagtttatcgctctttttaaaacctttttcgcaaaagaaagaggttctattgctttagaaaacgatctcaaacaggctttcacttatttaaatgaagtggatgcgatcggtttgcctgcccccmaaaagcgtgaaagaaagcgatcttattgttgtcaaactcaccaaattagggacgctccatttagatga

SEQ ID NO: 2585 - DNA (genomic), 315 bp, Helicobacter pylori; double-stranded, circular
  misc_feature (B) LOCATION 1...315
  hypothetical: NO
  anti-sense: NO
ttggttgaaacaaatctgaaaccccctaaaaacaaattcaaaccccctaaaaccatcgttcctaaacctaaagaagcgagcttacgccttgatttaagggggcaacgcagcgaagaagccctggatttactagacgcttttttaaatgatgcgcttttagggggctttgaagaagtgcttatttgccatggcaaagggagcgggattttagaaaagtttgtgaaagaatttttaaaaaaccaccctaaagtggtgagctttagcgacgctcccattaatttaggtggcagtggggttaagatcgttaaattgtag

SEQ ID NO: 2586 - DNA (genomic), 393 bp, Helicobacter pylori; double-stranded, circular
  misc_feature (B) LOCATION 1...393
  hypothetical: NO
  anti-sense: NO
aagcgtgctggttatacaaattttagacaagggctattacctggtagaaaccgagattggaatgcgcttgaaagcgcatgggagttggttgaaacaaatctgaaaccccctaaacaatacaaaccccctttaaccatcgttcctaaacctaaagaagcgagcttacgccttgatttaagggggcaacgcagcgaagaagccctggatttactagacgcttttttaaatgatgcgcttttagggggctttgaagaagtgcttatttgccatggcaaagggagcgggattttagaaaagtttgtgaaagaatttttaaaaaaccaccctaaagtggtgagctttagcgacgctcccattaatttaggtggcagtggggttaagatcgttaaattg

SEQ ID NO: 2587 - DNA (genomic), 480 bp, Helicobacter pylori; double-stranded, circular
  misc_feature (B) LOCATION 1...480
  hypothetical: NO
  anti-sense: NO
aaagcgaaagccttctatggcgaagataaggaaaaattgaacgttttgattgaaaattccagcacgctagaaagggaattgaaacaaaaaaatgaacatttagagaatgctttaaaagagcaagaagatttaaaaaacgcatggcttttagaaatggaaaaacaaaaagaaatctttcaccataaaaaattggaattggaaaaatcctaccaacaagccttaaacatcttaaaaagcgaagtcgcttcaaaagataccagctccatgcataaagaaatccataaagcgagcgagattttaaacaagcataaaacagaccaagagatcccacaaatcataacaagctttcaaattaacgaaaaagcgcgttataaaaatgaaagcgtgctggttatacaaattttagacaagggctattacctggtagaaaccgagattggaatgcgcttgaaagcgcatgggagttggttgaaacaaatc

SEQ ID NO: 2588 - DNA (genomic), 1620 bp, Helicobacter pylori; double-stranded, circular
  misc_feature (B) LOCATION 1...1620
  hypothetical: NO
  anti-sense: NO
tttagtgagcgggactttgagctttttaggcaaaaaacaaacccctatgaaagatgttcttgtggatttggattcttgtcagacgcttcaaaaagatcccttaatccaaccttaatgatgaataataataataccctacccaaacccctagaagaaagcctagatttaaaagagtttatcgctctttttaaaacctttttcgcaaaagaaagaggttctattgctttagaaaacgatctcaaacaggctttcacttatttaaatgaagtggatgcgatcggtttgcctgcccccaaaagcgtgaaagaaagcgatcttattgttgtcaaactcaccaaattagggacgctccatttagatgaaatctatgagattgtcaaacgattgcgctacattgtcgttttacaaaacgcctttaaacctttcacgcatttaaaatttcatgaacgccttaacgccattattttaccccctttttttaatgatttgatccttttattggatgatgaagggcaaatcaaacaaggggcgaacgctaccctagacgctttgaatgaaagcttgaaccgccttaaaaaagagagcactaaaatcattcaccattacgcccactctaaagagcttgccccttatttagtggatacgcaaagccaccttaagcatggttatgaatgccttttattaaaaagcgggttttctagcgcgatcaaaggcgttgtgctagaaaggagtgctaatggttatttctatcttttgcctgaaagcgcgcaaaaaatcgcccaaaaaatcgcgcaaattggtaatgaaatagattgctgtatcgttgaaatgtgccaaactctaagccgtagcttgcaaaaacaccttttatttttaaaattcctttttaaagaatttgattttttagacagcttgcaagcacggcttaatttcgctaaagcctacaatttagaatttgtcatgccaagctttacgcaaaaaaaaatgattttagaaaacttttcgcaccccattttaaaagagccaaagcccttaaatttgaagtttgaaaaatccatgctcgctgttaccggcgtgaatgcgggcgggaaaaccatgctcttaaaatcgcttttaagcgcagcttttttgagcaagcatctcattcctatgaaaatcaacgcccatcattctactatcccctattttagagaaatccacgccattattaatgacccccaaaacagcgcgaacaatatctctacttttgcaggcagaatgaagcaatttagcgctcttttatccaaagaaaacatgctcttaggcgttgatgaaattgagctagggactgacgctgatgaagcgagcagtttgtataaaaccctgttagaaaaattgcttaagcaaaacaaccaaatcgttatcaccacgcaccacaaacgcctgagcgtgttaatggcagaaaacaaggaagtggaattactggccgctctttatgacgaggaaaaagaacggcccacttacacttttttaaaaggggttattggcaaaagctatgcgtttgaaaccgctttgcgctatggcgtgccgccttttttgattgaaaagcgaaagccttctatggcgaagataaggaaaaat

SEQ ID NO: 2589 - DNA (genomic), 1992 bp, Helicobacter pylori; double-stranded, circular
  misc_feature (B) LOCATION 1...1992
  hypothetical: NO
  anti-sense: NO
ttgtcagacgcttcaaaaagatcccttaatccaaccttaatgatgaataataataataccctacccaaacccctagaagaaagcctagatttaaaagagtttatcgctctttttaaaacctttttcgcaaaagaaagaggttctattgctttagaaaacgatctcaaacaggctttcacttatttaaatgaagtggatgcgatcggtttgcctgcccccaaaagcgtgaaagaaagcgatcttattgttgtcaaactcaccaaattagggacgctccatttagatgaaatctatgagattgtcaaacgattgcgctacattgtcgttttacaaaacgcctttaaacctttcacgcatttaaaatttcatgaacgccttaacgccattattttaccccctttttttaatgatttgatccttttattggatgatgaagggcaaatcaaacaaggggcgaacgctaccctagacgctttgaatgaaagcttgaaccgccttaaaaaagagagcactaaaatcattcaccattacgcccactctaaagagcttgccccttatttagtggatacgcaaagccaccttaagcatggttatgaatgccttttattaaaaagcgggttttctagcgcgatcaaaggcgttgtgctagaaaggagtgctaatggttatttctatcttttgcctgaaagcgcgcaaaaaatcgcccaaaaaatcgcgcaaattggtaatgaaatagattgctgtatcgttgaaatgtgccaaactctaagccgtagcttgcaaaaacaccttttatttttaaaattcctttttaaagaatttgattttttagacagcttgcaagcacggcttaatttcgctaaagcctacaatttagaatttgtcatgccaagctttacgcaaaaaaaaatgattttagaaaacttttcgcaccccattttaaaagagccaaagcccttaaatttgaagtttgaaaaatccatgctcgctgttaccggcgtgaatgcgggcgggaaaaccatgctcttaaaatcgcttttaagcgcagcttttttgagcaagcatctcattcctatgaaaatcaacgcccatcattctactatcccctattttagagaaatccacgccattattaatgacccccaaaacagcgcgaacaatatctctacttttgcaggcagaatgaagcaatttagcgctcttttatccaaagaaaacatgctcttaggcgttgatgaaattgagctagggactgacgctgatgaagcgagcagtttgtataaaaccctgttagaaaaattgcttaagcaaaacaaccaaatcgttatcaccacgcaccacaaacgcctgagcgtgttaatggcagaaaacaaggaagtggaattactggccgctctttatgacgaggaaaaagaacggcccacttacacttttttaaaaggggttattggcaaaagctatgcgtttgaaaccgctttgcgctatggcgtgccgccttttttgattgaaaaagcgaaagccttctatggcgaagataaggaaaaattgaacgttttgattgaaaattccagcacgctagaaagggaattgaaacaaaaaaatgaacatttagagaatgctttaaaagagcaagaagatttaaaaaacgcatggcttttagaaatggaaaaacaaaaagaaatctttcaccataaaaaattggaattggaaaaatcctaccaacaagccttaaacatcttaaaaagcgaagtcgcttcaaaagataccagctccatgcataaagaaatccataaagcgagcgagattttaaacaagcataaaacagaccaagagatcccacaaatcataacaagctttcaaattaacgaaaaagcgcgttataaaaatgaaagcgtgctggttatacaaattttagacgagggctattacctggtagaaaccgagattggcatgcgcttgaaagcgcatgggagttggttgaaacaaatctga

SEQ ID NO: 2590 - DNA (genomic), 2289 bp, Helicobacter pylori; double-stranded, circular
  misc_feature (B) LOCATION 1...2289
  hypothetical: NO
  anti-sense: NO
ttgtcagacgcttcaaaaagatcccttaatccaaccttaatgatgaataataataataccctacccaaacccctagaagaaagcctagatttaaaagagtttatcgctctttttaaaacctttttcgcaaaagaaagaggttctattgctttagaaaacgatctcaaacaggctttcacttatttaaatgaagtggatgcgatcggtttgcctgcccccaaaagcgtgaaagaaagcgatcttattgttgtcaaactcaccaaattagggacgctccatttagatgaaatctatgagattgtcaaacgattgcgctacattgtcgttttacaaaacgcctttaaacctttcacgcatttaaaatttcatgaacgccttaacgccattattttaccccctttttttaatgatttgatccttttattggatgatgaagggcaaatcaaacaaggggcgaacgctaccctagacgctttgaatgaaagcttgaaccgccttaaaaaagagagcactaaaatcattcaccattacgcccactctaaagagcttgccccttatttagtggatacgcaaagccaccttaagcatggttatgaatgccttttattaaaaagcgggttttctagcgcgatcaaaggcgttgtgctagaaaggagtgctaatggttatttctatcttttgcctgaaagcgcgcaaaaaatcgcccaaaaaatcgcgcaaattggtaatgaaatagattgctgtatcgttgaaatgtgccaaactctaagccgtagcttgcaaaaacaccttttatttttaaaattcctttttaaagaatttgattttttagacagcttgcaagcacggcttaatttcgctaaagcctacaatttagaatttgtcatgccaagctttacgcaaaaaaaaatgattttagaaaacttttcgcaccccattttaaaagagccaaagcccttaaatttgaagtttgaaaaatccatgctcgctgttaccggcgtgaatgcgggcgggaaaaccatgctcttaaaatcgcttttaagcgcagcttttttgagcaagcatctcattcctatgaaaatcaacgcccatcattctactatcccctattttagagaaatccacgccattattaatgacccccaaaacagcgcgaacaatatctctacttttgcaggcagaatgaagcaatttagcgctcttttatccaaagaaaacatgctcttaggcgttgatgaaattgagctagggactgacgctgatgaagcgagcagtttgtataaaaccctgttagaaaaattgcttaagcaaaacaaccaaatcgttatcaccacgcaccacaaacgcctgagcgtgttaatggcagaaaacaaggaagtggaattactggccgctctttatgacgaggaaaaagaacggcccacttacacttttttaaaaggggttattggcaaaagctatgcgtttgaaaccgctttgcgctatggcgtgccgccttttttgattgaaaaagcgaaagccttctatggcgaagataaggaaaaattgaacgttttgattgaaaattccagcacgctagaaagggaattgaaacaaaaaaatgaacatttagagaatgctttaaaagagcaagaagatttaaaaaacgcatggcttttagaaatggaaaaacaaaaagaaatctttcaccataaaaaattggaattggaaaaatcctaccaacaagccttaaacatcttaaaaagcgaagtcgcttcaaaagataccagctccatgcataaagaaatccataaagcgagcgagattttaaacaagcataaaacagaccaagagatcccacaaatcataacaagctttcaaattaacgaaaaagcgcgttataaaaatgaaagcgtgctggttatacaaattttagacaagggctattacctggtagaaaccgagcttggcatgcgcttgaaagcgcatgggagttggttgaaacaaatccaaaaaccccctaaaaacaaattcaaaccccctaaaaccatcgttcctaaacctaaagaagcgagcttacgccttgatttaagggggcaacgcagcgaagaagccctggatttactagacgcttttttaaatgatgcgcttttagggggctttgaagaagtgcttatttgccatggcaaagggagcgggattttagaaaagtttgtgaaagaatttttaaaaaaccaccctaaagtggtgagctttagcgacgctcccattaatttaggtggcagtggggttaagatcgttaaattgtag

SEQ ID NO: 2591 - DNA (genomic), 210 bp, Helicobacter pylori; double-stranded, circular
  misc_feature (B) LOCATION 1...210
  hypothetical: NO
  anti-sense: NO
atcaaacattacaaacaatatggcacaggcttacatctatttaggcatagttttgcaacactcatttatcaagaaacccaagacttagttttaacttcaagggcgttagggcatagctccttactctctactaagatttatattcataccacacaagagcataacaagaaagtggctcttgtgtttgatagtttgatagagaacaagaag

SEQ ID NO: 2592 - DNA (genomic), 363 bp, Helicobacter pylori; double-stranded, circular
  misc_feature (B) LOCATION 1...363
  hypothetical: NO
  anti-sense: NO
ttgttagaaccaagcttgaatgcttggattagtgatgattacagactaaaatatttcaatggagcatatctctttaaaaaggataagcaaaaatcacaaaattctttaacgctttataattttatccccttaatctttaaattagcccaaatcaaacattacaaacaatatggcacaggcttacatctatttaggcatagttttgcaacactcatttatcaagaaacccagaacttagttttaacttcaagggcgttagggcatagctccttactctctactaagatttatattcataccacacaagagcataacaagaaagtggctcttgtgtttgatagtttgatagagaacaagaagtaa

SEQ ID NO: 2593 - DNA (genomic), 429 bp, Helicobacter pylori; double-stranded, circular
  misc_feature (B) LOCATION 1...429
  hypothetical: NO
  anti-sense: NO
atgcttagtgaagagcaagtgattaactttctctttgaactcgctcaaaatagaaaacccagctctatggctaagtatgtgatgtatttaagacaattctttgattatttggatagaaaaaggcgttatggctttgattttacgcttaaaaacctagcctttgctaagaccaaagaaagcttacccagacatttaaacgataaagacttaaagagttttttaaaaacactcttagactataagccagctacaagctttgaaaaacgcaataagtgtattctacttattgtaatacttgggggacttagaaaatgcgaagtgttaaacatagaattaaaacacattcaagtagaagagcaaaactactctattttaattcaaggtaaaggtagaaagagagaaaagcttatattaaaaagagtttgttag

SEQ ID NO: 2594 - DNA (genomic), 762 bp, Helicobacter pylori; double-stranded, circular
  misc_feature (B) LOCATION 1...762
  hypothetical: NO
  anti-sense: NO
atgcatgagcaaggttctataagctttrtaggcgracagggagctaaaagattattatacatactctacaagctcgcatttaatgctaagtctaataagattgccctagatagacattacgccaaaatgtttttgcaagttgtagcaagaactctaataaagaatgtcaatatattagaagagcaaggttttattgaagtcattaaaggaaaacaaagatacttgtatgtgtatcttaaagattacagagaattagaatgcttagtgaagagcaagatggctaagtatgtgatgtatttaagacaattctttgattatttggatagaaaaaggcgttatggctttgattttacgcttaaaaacctagcctttgctaagaccaaagaaagcttacccagacatttaaacgataaagacttaaagagttttttaaaaacactcttagactataagccagctacaagctttgaaaaacgcaataagtgtattctacttattgtaatacttgggggacttagaaaatgcgaagtgttaaacatagaattaaaacacattcaagtagaagagcaaaactactctattttaattcaaggtaaaggtagaaaagagagaaaagcttatattaaaaagagtttgttagaaccaagcttgaatgcttggattagtgatgattacagactaaaatatttcaatggagcatatctctttaaaaaggataagcaaaaatcacaaaattctttaacgctttataatttatcccct

SEQ ID NO: 2595 - DNA (genomic), 834 bp, Helicobacter pylori; double-stranded, circular
  misc_feature (B) LOCATION 1...834
  hypothetical: NO
  anti-sense: NO
gggagcaatatgccacataacaaactcactaaatctcagagagaactcttttgcaatctcaaagcctttttatacactaaggctaaaaacttcacgcccattcaagatgtgaaggatatggctttaatcctagacacacaagataaaatcttaaaatgtcataatatagagcaattaaaacaactctgtcagattctttataatcaaggcattaaacacactataatgatgcaaggcttgtttttattctttaactattttaaagataatctcaaattaagaagttttagaatgcttagtgaagagcaagtgattaactttctctttgaactcgctcaaaatagaaaacccagctctatggctaagtatgtgatgtatttaagacaattctttgattatttggatagaaaaaggcgttatggctttgattttacgcttaaaaacctagcctttgctaagaccaaagaaagcttacccagacatttaaacgataaagacttaaagagttttttaaaaacactcttagactataagccagctacaagctttgaaaaacgcaataagtgtattctacttattgtaatacttgggggacttagaaaatgcgaagtgttaaacatagaattaaaacacattcaagtagaagagcaaaactactctattttaattcaaggtaaaggtagaaaagagagaaaagcttatattaaaaagagtttgttagaaccaagcttgaatgcttggattagtgatgattacagactaaaatatttcaatggagcatatctctttaaaaaggataagcaaaaatcacaaaattctttaacgctttataat

SEQ ID NO: 2596 - DNA (genomic), 1068 bp, Helicobacter pylori; double-stranded, circular
  misc_feature (B) LOCATION 1...1068
  hypothetical: NO
  anti-sense: NO
atgccacataacaaactcactaaatctcagagagaactcttttgcaatctcaaagcctttttatacactaaggctaaaaacttcacgcccattcaagatgtgaaggatatggctttaatcctagacacacaagataaaatcttaaaatgtcataatatagagcaattaaaacaactctgtcagattctttataatcaaggcattaaacacactataatgatgcaaggcttgtttttattctttaactattttaaagataatctcaaattaagaagttttagaatgcttagtgaagagcaagtgattaactttctctttgaactcgctcaaaatagaaaacccagctctatggctaagtatgtgatgtatttaagacaattctttgattatttggatagaaaaaggcgttatggctttgattttacgcttaaaaacctagcctttgctaagaccaaagaaagcttacccagacatttaaacgataaagacttaaagagttttttaaaaacactcttagactataagccagctacaagctttgaaaaacgcaataagtgtattctacttattgtaatacttgggggacttagaaaatgcgaagtgttaaacatagaattaaaacacattcaagtagaagagcaaaactactctattttaattcaaggtaaaggtagaaaagagagaaaagcttatattaaaaagagtttgttagaaccaagcttgaatgcttggattagtgatgattacagactaaaatatttcaatggagcatatctctttaaaaaggataagcaaaaatcacaaaattctttaacgctttataattttatccccttaatctttaaattagcccaaatcaaacattacaaacaatatggcacaggcttacatctatttaggcatagttttgcaacactcatttatcaagaaacccaagacttagttttaacttcaagggcgttagggcatagctccttactctctactaagatttatattcataccacacaagagcataacaagaaagtggctcttgtgtttgatagtttgatagagaacaagaagtaa

SEQ ID NO: 2597 - DNA (genomic), 1068 bp, Helicobacter pylori; double-stranded, circular; identical to SEQ ID NO: 2596
  misc_feature (B) LOCATION 1...1068
  hypothetical: NO
  anti-sense: NO

SEQ ID NO: 2598 - DNA (genomic), 1176 bp, Helicobacter pylori; double-stranded, circular
  misc_feature (B) LOCATION 1...1176
  hypothetical: NO
  anti-sense: NO
tttctgtctctaagtctcatagaaagggacttgaaaactatggcaaagatattaaaacctaatttagatagagatgagttaaacacactttataaggcaaatcttgcttatgctaaaaacacgcatgagcattatttcaaatttaaaaaagatgtagactacaaactctttaatcctagcattatgcatgagcaatgttctataagctttgtaggcggacaaggagctaaaagattattatacatactctacaagctcgcatttaatgctaagtctaataagattgccctagatagacattacgccaaaatgtttttgcaagttgtagcaagaactctaataaagaatgtcaatatattagaagagcaaggttttattgaagtcattaaaggaaaacaaagatacttgtatgtgtatcttaaagattacagagaattagaatgcttagtgaagagcaagatggctaagtatgtgatgtatttaagacaattctttgattatttggatagaaaaaggcgttatggctttgattttacgcttaaaaacctagcctttgctaagaccaaagaaagcttacccagacatttaaacgataaagacttaaagagttttttaaaaacactcttagactataagccagctacaagctttgaaaaacgcaataagtgtattctacttattgtaatacttgggggacttagaaaatgcgaagtgttaaacatagaattaaaacacattcaagtagaagagcaaaactactctattttaattcaaggtaaaggtagaaaagagagaaaagcttatattaaaaagagtttgttagaaccaagcttgaatgcttggattagtgatgattacagactaaaatatttcaatggagcatatctctttaaaaaggataagcaaaaatcacaaaattctttaacgctttataattttatccccttaatctttaaattagcccaaatcaaacattacaaacaatatggcacaggcttacatctatttaggcatagttttgcaacactcatttatcaagaaacccaagacttagttttaacttcaagggcgttagggcatagctccttactctctactaagatttatattcataccacacaagagcataacaagaaagtggctcttgtgtttgatagtttgatagagaacaagaag

SEQ ID NO: 2599 - DNA (genomic), 999 bp, Helicobacter pylori; double-stranded, circular
  misc_feature (B) LOCATION 1...999
  hypothetical: NO
  anti-sense: NO
ttgaattttgaaaaaatgaaattagagaggctggatttaaaagaagatgaatatgaacgccttttagagcaaaaaaaattgctctctagtaaggaaaaattgaacgataaaatcgctttagcgttagatgtgctagaaaatacccacaaaatcacgcatgctttagagagcgtgggccatagcgctgagtttttaaaaagcgctttattagaggcaggcgctttgttagaaaaagagcaggctaaattagaagagtgcgagcgtttggatattgaaaaagtgctagaaaaacttggcatgctgagcgggatcattaaggattacgggagcattgcgcatgctaaagaacgcttagggcatgttaaaaacgaactgcataacttaaaagagattgaccatcattgcgaaacttaccacaaagaaatagagcgattgaaaaccgaatgcttgaaattgtgcgaagaaataagcggctttagaaaagagtatttggccggttttaacgctcttttaagtgctaaagcgaaagatttgctcctaaaaagccctagtttggttttagaagaagcccccatgagcgaaaaaggcgctcaaaaactcgttttacatttgcaaaattcccaattagaaactttaagctctggagaatacagccgtttgaggctggcgttcatgcttttagaaatggagtttttaaaggattttaaaggcgtgttggtgttagatgaaatggattctaacttgagtggtgaagagagtttggcggtctctaaagcccttgaaaccttgagcagccattcacaaatctttgccatttcgcaccaagtccatatcccagccgttgctaaaaaccatattttggtgtttaaagaaaaccacaaaagccttgcaaaaacccttaataacgaagaaagggttttagaaatcgcgcgcatgataggggggagcgagaatatagagagcgcgatttctttcgctaaggaaaaattaaaggtgtga

SEQ ID NO: 2600 - DNA (genomic), 1113 bp, Helicobacter pylori; double-stranded, circular
  misc_feature (B) LOCATION 1...1113
  hypothetical: NO
  anti-sense: NO
gcgtttagcccccttttagacgcgcttgaaacaaaattcacccgtttagaaaagctagaaagagaaaggcgatcgttagaggataaaaagcgtttccaaaaggatttagaagagcgtttgaattttgaaaaaatgaaattagagaggctggatttaaaagaagatgaatatgaacgccttttagagcaaaaaaaattgctctctagtaaggaaaaattgaacgataaaatcgctttagcgttagatgtgctagaaaatacccacaaaatcacgcatgctttagagagcgtgggccatagcgctgagtttttaaaaagcgctttattagaggcaggcgctttgttagaaaaagagcaggctaaattagaagagtgcgagcgtttggatattgaaaaagtgctagaaaaacttggcatgctgagcgggatcattaaggattacgggagcattgcgcatgctaaagaacgcttagggcatgttaaaaacgaactgcataacttaaaagagattgaccatcattgcgaaacttaccacaaagaaatagagcgattgaaaaccgaatgcttgaaattgtgcgaagaaataagcggctttagaaaagagtatttggccggttttaacgctcttttaagtgctaaagcgaaagatttgctcctaaaaagccctagtttggttttagaagaagcccccatgagcgaaaaaggcgctcaaaaactcgttttacatttgcaaaattcccaattagaaactttaagctctggagaatacagccgtttgaggctggcgttcatgcttttagaaatggagtttttaaaggattttaaaggcgtgttggtgttagatgaaatggattctaacttgagtggtgaagagagtttggcggtctctaaagcccttgaaaccttgagcagccattcacaaatctttgccatttcgcaccaagtccatatcccagccgttgctaaaaaccatattttggtgtttaaagaaaaccacaaaagccttgcaaaaacccttaataacgaagaaagggttttagaaatcgcgcgcatgataggggggagcgagaatatagagagcgcgatttctttcgctaaggaaaaattaaaggtg

SEQ ID NO: 2601 - DNA (genomic), 642 bp, Helicobacter pylori; double-stranded, circular
  misc_feature (B) LOCATION 1...642
  hypothetical: NO
  anti-sense: NO
atgcaaaaaaagatttttttactagaagacgattaccttttaagcgagagtatcaaggagttcttggagcatttaggctatgaagtgttttgcgcttttaacgggaaagaggctcatgaaaggctctctgttgagcgctttaacctcttgcttttagacgtgcaagtgcctgaaatgaatagcttggaattattcaagcgcatcaaaaacgattttttaatctctacgcctgtgatttttatcaccgccttacaggataacgctaccttaaaaaacgcttttaatttaggggcgagcgattatttgaaaaagccttttgatttggacgaattggaagcgcgcattaaaaggtttttcaatgatgatccgatagaaatcatgcctaacattttttaccaccaacacgctttgaacgttaaagggaaaaaggaaatcttagcgcccaaaaccgcccaacttttagaatattttttagagcataaagggcaaatcatcagctctcaagcgttagaaaacaacttatgggagcaagcgattgatgattccaccttacgcacttacattaaagtgttgcgcaagcttttgggtaaaaattgcatagaaacgcataagggggtgggctatcgctttaacccactatga

SEQ ID NO: 2602 - DNA (genomic), 654 bp, Helicobacter pylori; double-stranded, circular
  misc_feature (B) LOCATION 1...654
  hypothetical: NO
  anti-sense: NO
cgctacaatacccccatgcaaaaaaagatttttttactagaagacgattaccttttaagcgagagtatcaaggagttcttggagcatttaggctatgaagtgttttgcgcttttaacgggaaagaggctcatgaaaggctctctgttgagcgctttaacctcttgcttttagacgtgcaagtgcctgaaatgaatagcttggaattattcaagcgcatcaaaaacgattttttaatctctacgcctgtgatttttatcaccgccttacaggataacgctaccttaaaaaacgcttttaatttaggggcgagcgattatttgaaaaagccttttgatttggacgaattggaagcgcgcattaaaaggtttttcaatgatgatccgatagaaatcatgcctaacattttttaccaccaacacgctttgaacgttaaagggaaaaaggaaatcttagcgcccaaaaccgcccaacttttagaatattttttagagcataaagggcaaatcatcagctctcaagcgttagaaaacaacttatgggagcaagcgattgatgattccaccttacgcacttacattaaagtgttgcgcaagcttttgggtaaaaattgcatagaaacgcataagggggtgggctatcgctttaacccacta

SEQ ID NO: 2603 - DNA (genomic), 393 bp, Helicobacter pylori; double-stranded, circular
  misc_feature (B) LOCATION 1...393
  hypothetical: NO
  anti-sense: NO
ggattgactaagaacaaattgcaagaaacagatgacttattaaaaacattgaacgtgaaatcgcttttagaagccttgcttgtttatacgcctaagggttataaggatttaagcttgttagagcgttttgaaacgggcttgagcggcgttttagaagtgggtattttagagaaaaaaaactacgccaaagttttaaagatttttgcctattctaaacgattttacaaaaatttagagcttgtttttttcaatcacagcgcgttttattacaaccagtttaaaaccggcgagagtttattcatttatggcaaattagagcaaagctctttaatcaagcttatatcattaacacgcctaaaatccttaccgagtttggcaagatttcttaatttt

SEQ ID NO: 2604 - DNA (genomic), 1527 bp, Helicobacter pylori; double-stranded, circular
  misc_feature (B) LOCATION 1...1527
  hypothetical: NO
  anti-sense: NO
aatccttaccgagtttggcaagatttcttaatttttaaaaaagttaaaaatcataaaaaaatacaagaaaatttacaaaaactcctttcattagaaaatttaaaaaaggaaggcgttaaagaaaatgtcgcgcgtttgttgttagaaatctttttccccacgccgcattttgtcaaagattttgaaacgaataaaaattttccttcgcaacatttaaatgcattaaaatacattgaaatgcttttttatatgaaaaatttagagcgcaaaaaattgcaattcaacgccaaaatcgcatgccctaataacagcgaacgcttgaaagcgtttatcgcttctttacccttcaaactcacgcgcgatcaacaaaacgccattaaagaaatccaaagcgatctcactagccccatagcgtgcaagcgtttgattataggcgatgtggggtgcgggaaaacgatggtgattttagcgagcatggtattagcctaccctaataaaacccttttaatggcgcccacttccattctcgctaaacagctttatcacgaagccttaaaatttttacccccttattttgaagtggaattactgctcggcgggagccataaaaagcgatccaatcatttgtttgaaaaaatcacgcatgttgtcataggcacgcaagcgttgttgtttgataagcgcgatttgaatgaattcgctctagtgatcactgatgagcagcaccgatttggcaccaagcagcgctaccaattagaaaaaatggcaagcagtaagggcaataaaccccattccttgcaattttccgctacccccattcctcgtactctggctttagccaaaagcgcgtttgtgaaaacgaccatgattagagaaatcccttaccctaaagagattgaaactctagttttgcataaaagggaatttaaaatagtgatggagaaaattagcgaagaaatcgctaaaaaccaccaagtcattgtcgtttacccgcttgtgaataagagcgaaaaaatcccgtatttatcgctcagtgagggggcgagtttttggcaaaaacgctttaaaaacatttataccacttcagggcaagataaaaataaagaggaagtgattgaagaatttagagagttagggagcattcttttagcgactacgctcattgaggtgggcatttctttaccacgattgagcgtgatagtgattttagcgcccgaaaggttaggcttagcgactttgcaccagttaagggggcgcgtgtctcgtaacggcttgaaaggctattgttttttatgcacgatccaagaagaaaacgaacgattggaaaagtttgctgatgaattggacggctttaaaatcgctgaattggatttacaatacagaaaaagcggggatttactccagggcggaaagcagagcgggaatagttttgaatacattgacttagccagagatgaaaacattatcgctgaagtgaaacaagattttttaaaaaacgctagcgtttcacaaggaacatttgaaaat

SEQ ID NO: 2605 - DNA (genomic), 1887 bp, Helicobacter pylori; double-stranded, circular
  misc_feature (B) LOCATION 1...1887
  hypothetical: NO
  anti-sense: NO
ttgactaagaacaaattgcaagaaacagatgacttattaaaaacattgaacgtgaaatcgcttttagaagccttgcttgtttatacgcctaagggttataaggatttaagcttgttagagcgttttgaaacgggcttgagcggcgttttagaagtgggtattttagagaaaaaaaactacgccaaagttttaaagatttttgcctattctaaacgattttacaaaaatttagagcttgtttttttcaatcacagcgcgttttattacaaccagtttaaaaccggcgagagtttattcatttatggcaaattagagcaaagctcttttaatcaagcttatatcattaacacgcctaaaatccttaccgagtttggcaagatttctttaatttttaaaaaagttaaaaatcataaaaaaatacaagaaaatttacaaaaactcctttcattagaaaatttaaaaaaggaaggcgttaaagaaaatgtcgcgcgtttgttgttagaaatctttttccccacgccgcattttgtcaaagattttgaaacgaataaaaattttccttcgcaacatttaaatgcattaaaatacattgaaatgcttttttatatgaaaaatttagagcgcaaaaaattgcaattcaacgccaaaatcgcatgccctaataacagcgaacgcttgaaagcgtttatcgcttctttacccttcaaactcacgcgcgatcaacaaaacgccattaaagaaatccaaagcgatctcactagccccatagcgtgcaagcgtttgattataggcgatgtggggtgcgggaaaacgatggtgattttagcgagcatggtattagcctaccctaataaaacccttttaatggcgcccacttccattctcgctaaacagctttatcacgaagccttaaaatttttacccccttattttgaagtggaattactgctcggcgggagccataaaaagcgatccaatcatttgtttgaaaaaatcacgcatgttgtcataggcacgcaagcgttgttgtttgataagcgcgatttgaatgaattcgctctagtgatcactgatgagcagcaccgatttggcaccaagcagcgctaccaattagaaaaaatggcaagcagtaagggcaataaaccccattccttgcaattttccgctacccccattcctcgtactctggctttagccaaaagcgcgtttgtgaaaacgaccatgattagagaaatcccttaccctaaagagattgaaactctagttttgcataaaagggaatttaaaatagtgatggagaaaattagcgaagaaatcgctaaaaaccaccaagtcattgtcgtttacccgcttgtgaataagagcgaaaaaatcccgtatttatcgctcagtgagggggcgagtttttggcaaaaacgctttaaaaacatttataccacttcagggcaagataaaaataaagaggaagtgattgaagaatttagagagttagggagcattcttttagcgactacgctcattgaggtgggcatttctttaccacgattgagcgtgatagtgattttagcgcccgaaaggttaggcttagcgactttgcaccagttaagggggcgcgtgtctcgtaacggcttgaaaggctattgttttttatgcacgatccaagaagaaaacgaacgattggaaaagtttgctgatgaattggacggctttaaaatcgctgaattggatttacaatacagaaaaagcggggatttactccagggcggaaagcagagcgggaatagttttgaatacattgacttagccagagatgaaaacattatcgctgaagtgaaacaagattttttaaaaaacgctagcgtttcacaaggaacatttgaaaattga

SEQ ID NO: 2606 - DNA (genomic), 753 bp, Helicobacter pylori; double-stranded, circular
  misc_feature (B) LOCATION 1...753
  hypothetical: NO
  anti-sense: NO
atgaaattgatctcatggaatgtgaacgggttaagagcttgcatgactaagggctttatggatttttttaatagcgttgatgcggatgttttttgcattcaagaatctaaaatgcagcaagaacaaaacacctttgaatttaaagggtattttgatttttggaattgcgcgattaaaaagggctattctggggtggtaactttcaccaaaaaagagcctttaagcgtgagctatggcattgatataaaagagcatgacaaagaagggcgcgtggtaacttgcgaatttgaatcgttttacttggtgaatgtttatacccctaattcccaacaagccctatccagactcagttatcgcatgagctgggaagtakaatttaaaaaatttttaaaagctttagaattgaaaaaaccggtcattgtgtgtggggatttgaatgtggcccacaatgaaattgatttagaaaaccctaaaaccaaccgaaaaaacgccggctttagcgatgaagagagagaaaaattcagcgagcttttgaacgccggttttattgacactttccgttatttttaccccaacaaagaaaargcttacacctggtggagttacatgcaacaagcgagggataaagacattggttggcgcattgattattttctatgctctaatcctttaaaaacgcgcttaaaagacgctttaatctataaagatattttagggagcgatcattgcccggtggggttggaattagtttaa

SEQ ID NO: 2607 - DNA (genomic), 753 bp, Helicobacter pylori; double-stranded, circular
  misc_feature (B) LOCATION 1...753
  hypothetical: NO
  anti-sense: NO
atgaaattgatctcatggaatgtgaacgggttaagagcttgcatgactaagggctttatggatttttttaatagcgttgatgcggatgttttttgcattcaagaatctaaaatgcagcaagaacaaaacacctttgaatttaaagggtattttgatttttggaattgcgcgattaaaaagggctattctggggtggtaactttcaccaaaaaagagcctttaagcgtgagctatggcattgatataaaagagcatgacaaagaagggcgcgtggtaacttgcgaatttgaatcgttttacttggtgaatgtttatacccctaattcccaacaagccctatccagactcagttatcgcatgagctgggaagtagaatttaaaaaatttttaaaagctttagaattgaaaaaaccggtcattgtgtgtggggatttgaatgtggcccacaatgaaattgatttagaaaaccctaaaaccaaccgaaaaaacgccggctttagcgatgaagagagagaaaaattcagcgagcttttgaacgccggttttattgacactttccgttatttttaccccaacaaagaaaaggcttacacctggtggagttacatgcaacaagcgagggataaagacattggttggcgcattgattattttctatgctctaatcctttaaaaacgcgcttaaaagacgctttaatctataaagatattttagggagcgatcattgcccggtggggttggaattagtttaa

SEQ ID NO: 2608 - DNA (genomic), 777 bp, Helicobacter pylori; double-stranded, circular
  misc_feature (B) LOCATION 1...777
  hypothetical: NO
  anti-sense: NO
ttcactcaaaatcaaacaaggattaaaatgaaattgatctcatggaatgtgaacgggttaagagcttgcatgactaagggctttatggatttttttaatagcgttgatgcggatgttttttgcattcaagaatctaaaatgcagcaagaacaaaacacctttgaatttaaagggtattttgatttttggaattgcgcgattaaaaagggctattctggggtggtaactttcaccaaaaaagagcctttaagcgtgagctatggcattgatataaaagagcatgacaaagaagggcgcgtggtaacttgcgaatttgaatcgttttacttggtgaatgtttatacccctaattcccaacaagccctatccagactcagttatcgcatgagctgggaagtagaatttaaaaaatttttaaaagctttagaattgaaaaaaccggtcattgtgtgtggggatttgaatgtggcccacaatgaaattgatttagaaaaccctaaaaccaaccgaaaaaacgccggctttagcgatgaagagagagaaaaattcagcgagcttttgaacgccggttttattgacactttccgttatttttaccccaacaaagaaaaggcttacacctggtggagttacatgcaacaagcgagggataaagacattggttggcgcattgattattttctatgctctaatcctttaaaaacgcgcttaaaagacgctttaatctataaagatattttagggagcgatcattgcccggtggggttggaattagtt

SEQ ID NO: 2609 - DNA (genomic), 294 bp, Helicobacter pylori; double-stranded, circular
  misc_feature (B) LOCATION 1...294
  hypothetical: NO
  anti-sense: NO
ttgcatcatattgtgcctttatgtttggctcgctctatagaagagtttgatcttttggataaatgggaaaacttaatctatattgacgcttttaaccatgcgaagatatctcaaacgcaaaataaacatctttgtttgtattttgaaaattgcgatgtgattttatctaaaggcttaaaagaagaacaagaaagcctttattttacttatattggaaatgtgttatataaacttgatttacaaaatatcatgctgaaatacaataaagatttattgcattctaaaaacggctga

SEQ ID NO: 2610 - DNA (genomic), 294 bp, Helicobacter pylori; double-stranded, circular; identical to SEQ ID NO: 2609
  misc_feature (B) LOCATION 1...294
  hypothetical: NO
  anti-sense: NO

SEQ ID NO: 2611 - DNA (genomic), 312 bp, Helicobacter pylori; double-stranded, circular
  misc_feature (B) LOCATION 1...312
  hypothetical: NO
  anti-sense: NO
aaaaaagaaaagggttttgagttgcatcatattgtgcctttatgtttggctcgctctatagaagagtttgatcttttggataaatgggaaaacttaatctatattgacgcttttaaccatgcgaagatatctcaaacgcaaaataaacatctttgtttgtattttgaaaattgcgatgtgattttatctaaaggcttaaaagaagaacaagaaagcctttattttacttatattggaaatgtgttatataaacttgatttacaaaatatcatgctgaaatacaataaagatttattgcattctaaaaacggc

SEQ ID NO: 2612 - DNA (genomic), 1374 bp, Helicobacter pylori; double-stranded, circular
  misc_feature (B) LOCATION 1...1374
  hypothetical: NO
  anti-sense: NO
atggataccaacaataatattgaaaaagaaatcttggcgctagtcaaacaaaatcctaaagttagcctcatagagtatgaaaattacttgagccaactcaaatacaaccctaacgcaagcaagagcgatattgcctttttttatgcccccaacaaattcttatgcaccacgattacggctaaatacggtgcgttgctcaaagaaattttaagccagaataaagtcggcatgcatttagcccacagcgtggatgtgcgtattgaagtagcacctaaaatccaggttaatgcccaatctaatatcaattacaaagccacaaaaacgagcgtcaaagactcttacacttttgaaaattttgtcgtaggctcatgcaacaacaccgtttatgaaatcgctaaaaaagtcgcccaaagcgatacccccccttataacccggtgcttttttatggcggcacagggttaggcaaaacgcacattttaaacgctatcggtaaccatgccctagaaaagcataaaaaagtcgtgttagtcacttcagaagattttttgacagactttctaaagcatttagacaacaaaaacatggattcttttaaaaaaaaataccgccattgcgactttttcttgttagatgacgcccaatttttgcaaggaaaacccaagctagaagaagaatttttccacacctttaacgaattgcacgccaacagcaaacagatcgtattgatttcagaccgatcgcctaaaaacatcgccggcttagaagatcgcttaaaatcgcgctttgaatgggggataaccgctaaagtcatgccccctgatttagaaaccaaactttccattgtcaaacaaaaatgccagctcaataaaatcactttgcctgaagaggtgatggaatacatcgcccaacacatcagcgacaatatccgccaaatggaaggcgcgatcattaaaatcagcgtgaacgcgaacttaatgaacgccaccattgatttgaacctcgctaaaaccgtcttagaagatttgcaaaaagatcatgctgaaggctcaagcctagaaaatatcttgctcgctgtcgcacaaagcttgaatctcaaatctagcgaaatcaaagtctcttcgcgccaaaaaaacgtcgctttagcgagaaaattagtcgtgtatttcgccaggctctacacccctaaccccacgctctcgctcgcccaatttttggatttaaaggatcattcaagcatttctaaaatgtattctagcgttaaaaaaatgcttgaagaagaaaaaagcccttttattttaagccttagagaagaaatcaaaaaccgcttgaacgaattgaacgacaaaaaaaccgctttcaattcaagtgaatga

SEQ ID NO: 2613 - DNA (genomic), 1461 bp, Helicobacter pylori; double-stranded, circular
  misc_feature (B) LOCATION 1...1461
  hypothetical: NO
  anti-sense: NO
aagaaacaccttaattttaaggcttcattcacatttcattcacatgctattcctttttcattcaccacttattcacgctataataacgccatggataccaacaacaatattgaaaaagaaatcttggcgctagtcaaacaaaatcctaaagttagcctcatagagtatgaaaattacttgagccaactcaaatacaaccctaacgcaagcaagagcgatattgcctttttttatgcccccaacaaattcttatgcaccacgattacggctaaatacggtgcgttgctcaaagaaattttaagccagaataaagtcggcatgcatttagcccacagcgtggatgtgcgtattgaagtagcacctaaaatccaggttaatgcccaatctaatatcaattacaaagccacaaaaacgagcgtcaaagactcttacacttttgaaaattttgtcgtaggctcatgcaacaacaccgtttatgaaatcgctaaaaaagtcgcccaaagcgatacccccccttataacccggtgcttttttatggcggcacagggttaggcaaaacgcacattttaaacgctatcggtaaccatgccctagaaaagcataaaaaagtcgtgttagtcacttcagaagattttttgacagactttctaaagcatttagacaacaaaaacatggattcttttaaaaaaaaataccgccattgcgactttttcttgttagatgacgcccaatttttgcaaggaaaacccaagctagaagaagaatttttccacacctttaacgaattgcacgccaacagcaaacagatcgtattgatttcagaccgatcgcctaaaaacatcgccggcttagaagatcgcttaaaatcgcgctttgaatgggggataaccgctaaagtcatgccccctgatttagaaaccaaactttccattgtcaaacaaaaatgccagctcaataaaatcactttgcctgaagaggtgatggaatacatcgcccaacacatcagcgacaatatccgccaaatggaaggcgcgatcattaaaatcagcgtgaacgcgaacttaatgaacgccaccattgatttgaacctcgctaaaaccgtcttagaagatttgcaaaaagatcatgctgaaggctcaagcctagaaaatatcttgctcgctgtcgcacaaagcttgaatctcaaatctagcgaaatcaaagtctcttcgcgccaaaaaaacgtcgctttagcgagaaaattagtcgtgtatttcgccaggctctacacccctaaccccacgctctcgctcgcccaatttttggatttaaaggatcattcaagcatttctaaaatgtattctagcgttaaaaaaatgcttgaagaagaaaaaagcccttttattttaagccttagagaagaaatcaaaaaccgcttgaacgaattgaacgacaaaaaaaccgctttcaattcaagtgaa

SEQ ID NO: 2614 - DNA (genomic), 1278 bp, Helicobacter pylori; double-stranded, circular
  misc_feature (B) LOCATION 1...1278
  hypothetical: NO
  anti-sense: NO
agatttggggttaatggggtgatggaacgcatggacgctttaataacgccctcaaattggcaaaaagtaaggcttggggatatattagaacttctaaccgactaccatgcaaatggatcttatgagatacttaaaaataatgtaacattattaaaaaatgtagattttgctattatgataagaactactaattttgaaaacaatgattttaaaaatgatttaatttatattgataaaaaagcctatgagtttttatcaaagtcaaaagtttttgctggagatattttagttaataaaattgccaatgctggaacagcatattttatgcctaaattaaatcagcctgtttctttaggtatgaatttatttttattacgaataaaaccaagttataacaatcttttcatctttaagcaaatagcaaattacgaaagggttttaaaaacttttgctaatggttcagcaacaaaaacaataacaaaaaatgttattaaaaatttactaatccccctaccccccctaaacgaacaaatcgctatcgctaatattttaagcgatgtggatcgttacctttgttctttagacgccctcattcttaaaaaagaaagcgttaaaaaagctttaagctttgaactattgagccaaagaaaacgcttgaaaggcttcaatcaaaattggcaaaaagtaaggcttggggatataggaataactataagtggattagcgggaaaaacaaagcaagattttatcaatggcaatgctaaatatattacatttttgaatgttttaaataatgtcataatagatacttctatactagaaaatgtaaaaatatacccaaatgaaaaacaaaattcctttaaaaaatatgatttattctttaatacttcttcagaaactccaaaagaagtaggcatgtgtgccgtgcttttagatgatatagaccaagtttttttgaatagtttttgttttggttttagaatatttgacaaggcagttgatagcttgtttttatcatacttaattaatagcgaaataggcagaaaagcttttgaaaatttagcgcaaggttcaacacgatacaatttatcaaagagtggttttaataatgtttgccttattttaccccctctaaacgaacaaatcgctatcgctaatattttaagcgatgtggatagtgaaatcattagccttaaaaacaaaaaacgccaatttgaaaatgtcaaaaaagccttaaaccacgatttaatgagcgctaaaatcagggttttaaacaaa

SEQ ID NO: 2615 - DNA (genomic), 1875 bp, Helicobacter pylori; double-stranded, circular
  misc_feature (B) LOCATION 1...1875
  hypothetical: NO
  anti-sense: NO
gtgatggaacgcatggacgctttaataacgccctcaaattggcaaaaagtaaggcttggggatatattagaacttctaaccgactaccatgcaaatggatcttatgagatacttaaaaataatgtaacattattaaaaaatgtagattttgctattatgataagaactactaattttgaaaacaatgattttaaaaatgatttaatttatattgataaaaaagcctatgagtttttatcaaagtcaaaagtttttgctggagatattttagttaataaaattgccaatgctggaacagcatattttatgcctaaattaaatcagcctgtttctttaggtatgaatttatttttattacgaataaaaccaagttataacaatcttttcatctttaagcaaatagcaaattacgaaagggttttaaaaacttttgctaatggttcagcaacaaaaacaataacaaaaaatgttattaaaaatttactaatccccctaccccccctaaacgaacaaatcgctatcgctaatattttaagcgatgtggatcgttacctttgttctttagacgccctcattcttaaaaaagaaagcgttaaaaaagctttaagctttgaactattgagccaaagaaaacgcttgaaaggcttcaatcaaaattggcaaaaagtaaggcttggggatataggaataactataagtggattagcgggaaaaacaaagcaagattttatcaatggcaatgctaaatatattacatttttgaatgttttaaataatgtcataatagatacttctatactagaaaatgtaaaaatatacccaaatgaaaaacaaaattcctttaaaaaatatgatttattctttaatacttcttcagaaactccaaaagaagtaggcatgtgtgccgtgcttttagatgatatagaccaagtttttttgaatagtttttgttttggttttagaatatttgacaaggcagttgatagcttgtttttatcatacttaattaatagcgaaataggcagaaaagcttttgaaaatttagcgcaaggttcaacacgatacaatttatcaaagagtggttttaataatgtttgccttattttaccccctctaaacgaacaaatcgctatcgctaatattttaagcgatgtggatagtgaaatcattagccttaaaaacaaaaaacgccaatttgaaaatgtcaaaaaagccttaagctttgaactattgagccaaagaaaacgcttgaaaggcttcaatcaaaattggcaaaaagtaaggcttggggatataggaataactataagtggattagcgggaaaaacaaagcaagattttatcaatggcaatgctaaatatattacatttttgaatgttttaaataatgtcataatagatacttctatactagaaaatgtaaaaatatacccaaatgaaaaacaaaattcctttaaaaaatatgatttattctttaatacttcttcagaaactccaaaagaagtaggcatgtgtgccgtgcttttagatgatatagaccaagtttttttgaatagtttttgttttggttttagaatatttgacaaggcagttgatagcttgtttttatcatacttaattaatagcgaaataggcagaaaagcttttgaaaatttagcgcaaggttcaacacgatacaatttatcaaagagtggttttaataatgtttgccttattttaccccctctaaacgaacaaatcgctatcgctaatattttaagcgatgtggatagtgaaatcattagccttaaaaacaaaaaacgccaatttgaaaatgtcaaaaaagccttaaaccacgatttaatgagcgctaaaatcagggttttaaacaaataa

SEQ ID NO: 2616 - DNA (genomic), 1875 bp, Helicobacter pylori; double-stranded, circular
  misc_feature (B) LOCATION 1...1875
  hypothetical: NO
  anti-sense: NO
gtgatggaacgcatggacgctttaataacgccctcaaattggcaaaaagtaaggcttggggatatattagaacttctaaccgactaccatgcaaatggatcttatgagatacttaaaaataatgtaacattattaaaaaatgtagattttgctattatgataagaactactaattttgaaaacaatgattttaaaaatgatttaatttatattgataaaaaagcctatgagtttttatcaaagtcaaaagtttttgctggagatattttagttaataaaattgccaatgctggaacagcatattttatgcctaaattaaatcagcctgtttctttaggtatgaatttatttttattacgaataaaaccaagttataacaatcttttcatctttaagcaaatagcaaattacgaaagggttttaaaaacttttgctaatggttcagcaacaaaaacaataacaaaaaatgttattaaaaatttactaatccccctaccccccctaaacgaacaaatcgctatcgctaatattttaagcgatgtggatcgttacctttgttctttagacgccctcattcttaaaaaagaaagcgttaaaaaagctttaagctttgaactattgagccaaagaaaacgcttgaaaggcttcaatcaaaattggcaaaaagtaaggcttggggatataggaataactataagtggattagcgggaaaaacaaagcaagattttatcaatggcaatgctaaatatattacatttttgaatgttttaaataatgtcataatagatacttctatactagaaaatgtaaaaatatacccaaatgaaaaacaaaattcctttaaaaaatatgatttattctttaatacttcttcagaaactccaaaagaagtaggcatgtgtgccgtgcttttagatgatatagaccaagtttttttgaatagtttttgttttggttttagaatatttgacaaggcagttgatagcttgtttttatcatacttaattaatagcgaaataggcagaaaagcttttgaaaatttagcgcaaggttcaacacgatacaatttatcaaagagtggttttaataatgtttgccttattttaccccctctaaacgaacaaatcgctatcgctaatattttaagcgatgtggatcgttacctttgttctttagacgccctcattcttaaaaaagaaagcgttaaaaaagctttaagctttgaactattgagccaaagaaaacgcttgaaaggcttcaatcaaaattggcaaaaagtaaggcttggggatataggaataactataagtggattagcgggaaaaacaaagcaagattttatcaatggcaatgctaaatatattacatttttgaatgttttaaataatgtcataatagatacttctatactagaaaatgtaaaaatatacccaaatgaaaaacaaaattcctttaaaaaatatgatttattctttaatacttcttcagaaactccaaaagaagtaggcatgtgtgccgtgcttttagatgatatagaccaagtttttttgaatagtttttgttttggttttagaatatttgacaaggcagttgatagcttgtttttatcatacttaattaatagcgaaataggcagaaaagcttttgaaaatttagcgcaaggttcaacacgatacaatttatcaaagagtggttttaataatgtttgccttattttaccccctctaaacgaacaaatcgctatcgctaatattttaagcgatgtggatagtgaaatcattagccttagaaacaaaagacgccaatttgaaaatgtcaaaaaagccttaaaccacgatttaatgagcgctaaaatcagggttttaaacaaataa

SEQ ID NO: 2617 - DNA (genomic), 258 bp, Helicobacter pylori; double-stranded, circular
  misc_feature (B) LOCATION 1...258
  hypothetical: NO
  anti-sense: NO
agtattctaatgtgcctgaaatttatatcactctcgcactgcgctccagccaaaattttaagcgttgaaattaaaaaaatccccatagaagaattgagtgctgaagaaaaagaatccattcaagagcgtttcattgtcaataaccatttgcaaaaggctaaagtacgtttattagacattgaaaaatctaaggctatcggtaaaggcggggtgaatgtgtgcttagcgtccatgccttacaggctatcacatagagtt

SEQ ID NO: 2618 - DNA (genomic), 417 bp, Helicobacter pylori; double-stranded, circular
  misc_feature (B) LOCATION 1...417
  hypothetical: NO
  anti-sense: NO
cacctaagaatcctttccatgcgccatcgcatcaatggcgaaagttttaaaataggcgatagcatcaaggcggttttaacgcaagtcaaacgcacgaaaaagggcttactattagagctgagtcgcaccacccctaaaatgcttgaagccttgttggaattagaagtccctgaaattaaagataaagagattgaaatcatccattgcgcgcgaatcccatgcaacagggcgaaagtgagctttttttcccataactctaggattgatcccatatgcgcatccgtgggggttaagggcgtgcgcatcaatgcgataagtaacgaattgaataaagaaaacattgattgcatagagtattctaatgtgcctgaaatttatatcactctcgcactgcgctccagccaaaattttaagcgt

SEQ ID NO: 2619 - DNA (genomic), 450 bp, Helicobacter pylori; double-stranded, circular
  misc_feature (B) LOCATION 1...450
  hypothetical: NO
  anti-sense: NO
ggacttagaatgaaaatcagcgaccttatagaatgcattgcgtatgaaaaaaatttgcctaaagagatgatttcaaaagtgattcaaggctgtttgttaaaaatggcgcaaaatgaattggaccccctagcgcgctacttggtggttgaagaaaacaagcagctccagcttatccagttggtggaagttttagaagacgatgatgaaaggttggttaacgatccttctaaatacatcagtctgtctaaagccaaagaaatggatccaagcgttaagattaaagacgaattgtcctatagtttgagtttggagagcatgaagcaaggagcgatcaaccgcctttttaaagatttgcaataccagctagaaaaggcgttagaagacagccactttgaagcgttccaaaagcgccttaacagcgttttaatggggcaagtgattttagttgga

SEQ ID NO: 2620 - DNA (genomic), 447 bp, Helicobacter pylori; double-stranded, circular
  misc_feature (B) LOCATION 1...447
  hypothetical: NO
  anti-sense: NO
ggacttagaatgaaaatcagcgaccttatagaatgcattgcgtatgaaaaaaatttgcctaaagagatgatttcaaaagtgattcaaggctgtttgttaaaaatggcgcaaaatgaattggaccccctagcgcgctacttggtggttgaagaaaacaagcagctccagcttatccagttggtggaagttttagaagacgatgatgaaaggttggttaacgatccttctaaatacatcagtctgtctaaagccaaagaaatggatccaagcgttaagattaaagacgaattgtcctatagtttgagtttggagagcatgaagcaaggagcgatcaaccgcctttttaaagatttgcaataccagctagaaaaggcgttagaagacagccactttgaagcgttccaaaagcgccttaacagcgttttaatggggcaagtgattttagtt

SEQ ID NO: 2621 - DNA (genomic), 690 bp, Helicobacter pylori; double-stranded, circular
  misc_feature (B) LOCATION 1...690
  hypothetical: NO
  anti-sense: NO
atgcgccatcgcatcaagggcgaaagttttaaaataggcgatagcatcaaggcggttttaacgcaagtcaaacgcacgaaaaagggcttactattagagctgagtcgcaccacccctaaaatgcttgaagccttgttggaattagaagtccctgaaattaaagataaagagattgaaatcatccattgcgcgcgaatcccaggcaacagggcgaaagtgagctttttttcccataactctaggattgatcccataggcgcagccgtgggggttaagggcgtgcgcatcaatgcgataagtaacgaattgaataaagaaaacattgattgcatagagtattctaatgtgcctgaaatttatatcactctcgcactcgctccagccaaaattttaagcgttgaaattaaaaaaatccccatagaagaattgagtgctgaagaaaaagaatccattcaagagcgtttcattgtcaataaccatttgcaaaaggctaaagtacgtttattagacattgaaaaatctaaggctatcggtaaaggcggggtgaatgtgtgcttagcgtccatgcttacaggctatcacatagagtttgaaaccattcctagcgtcaaggaaaacgcagaaaatgaaaacgaaaaagaaacgccaaaagtaggggtagaagctttagagtctttgtttaagaattga

SEQ ID NO: 2622 - DNA (genomic), 1188 bp, Helicobacter pylori; double-stranded, circular
  misc_feature (B) LOCATION 1...1188
  hypothetical: NO
  anti-sense: NO
atggaaaaaatcagcgaccttatagaatgcattgcgtatgaaaaaaatttgcctaaagagatgatttcaaaagtgattcaaggctgtttgttaaaaatggcgcaaaatgaattggaccccctagcgcgctacttggtggttgaagaaaacaagcagctccagcttatccagttggtggaagttttagaagacgatgatgaaaggttggttaacgatccttctaaatacatcagtctgtctaaagccaaagaaatggatccaagcgttaagattaaagacgaattgtcctatagtttgagtttggagagcatgaagcaaggagcgatcaaccgcctttttaaagatttgcaataccagctagaaaaggcgttagaagacagccactttgaagcgttccaaaagcgccttaacagcgttttaatggggcaagtgattttagtggatcacaatcaaaacacttttattgaaatcgagcagcaattccaaggcgttctttccatgcgccatcgcatcaagggcgaaagttttaaaataggcgatagcatcaaggcggttttaacgcaagtcaaacgcacgaaaaagggcttactattagagctgagtcgcaccacccctaaaatgcttgaagccttgttggaattagaagtccctgaaattaaagataaagagattgaaatcatccattgcgcgcgaatcccaggcaacagggcgaaagtgagctttttttcccataactctaggattgatcccataggcgcagccgtgggggttaagggcgtgcgcatcaatgcgataagtaacgaattgaataaagaaaacattgattgcatagagtattctaatgtgcctgaaatttatatcactctcgcactcgctccagccaaaattttaagcgttgaaattaaaaaaatccccatagaagaattgagtgctgaagaaaaagaatccattcaagagcgtttcattgtcaataaccatttgcaaaaggctaaagtacgtttattagacattgaaaaatctaaggctatcggtaaaggcggggtgaatgtgtgcttagcgtccatgcttacaggctatcacatagagtttgaaaccattcctagcgtcaaggaaaacgcagaaaatgaaaacgaaaaagaaacgccaaaagtaggggtagaagctttagagtctttgtttaagaattga

SEQ ID NO: 2623 - DNA (genomic), 420 bp, Helicobacter pylori; double-stranded, circular
  misc_feature (B) LOCATION 1...420
  hypothetical: NO
  anti-sense: NO
atgccgtttttgaaaaactggatctggagtttaaagatggctttgagcgcgattagtggggctagtggggtggggaaaagcgtccttattgcgagccttttaggggcgtttgggcttaaagagagcaacgcttcaaacattgaagtggaattgatcgcgccttttttagacacggaagaatacggcatttttagagaagatgagcatgaacccttagttattagcgtgattaaaaaagaaaaaacacgctattttttaaaccaaacaagcctatctaaaaacacgctcaaagcgttattaaaggggcttattaaacgcttatctaacgacagattcagccagaatgaactcaacgatattttaatgctctccttattagatggctatatccaaaataaaaatargcgtttagcccccttt

SEQ ID NO: 2624 - DNA (genomic), 471 bp, Helicobacter pylori; double-stranded, circular
  misc_feature (B) LOCATION 1...471
  hypothetical: NO
  anti-sense: NO
atgcgagatttcaataacattcaaatcacacgcttaaaagtgcgtcaaaatgccgtttttgaaaaactggatctggagtttaaagatggcttgagcgcgattagtggggctagtggggtggggaaaagcgtccttattgcgagccttttaggggcgtttgggcttaaagagagcaacgcttcaaacattgaagtggaattgatcgcgccttttttagacacggaagaatacggcatttttagagaagatgagcatgaacccttagttattagcgtgattaaaaaagaaaaaacacgctattttttaaaccaaacaagcctatctaaaaacacgctcaaagcgttattaaaggggcttattaaacgcttatctaacgacagattcagccagaatgaactcaacgatattttaatgctctccttattagatggctatatccaaaataaaaataggcgtttagcccccttttag

SEQ ID NO: 2625 - DNA (genomic), 489 bp, Helicobacter pylori; double-stranded, circular
  misc_feature (B) LOCATION 1...489
  hypothetical: NO
  anti-sense: NO
aagggtaaaagggtaaaaaacatgcgagatttcaataacattcaaatcacacgcttaaaagtgcgtcaaaatgccgtttttgaaaaactggatctggagtttaaagatggcttgagcgcgattagtggggctagtggggtggggaaaagcgtccttattgcgagccttttaggggcgtttgggcttaaagagagcaacgcttcaaacattgaagtggaattgatcgcgccttttttagacacggaagaatacggcatttttagagaagatgagcatgaacccttagttattagcgtgattaaaaaagaaaaaacacgctattttttaaaccaaacaagcctatctaaaaacacgctcaaagcgttattaaaggggcttattaaacgcttatctaacgacagattcagccagaatgaactcaacgatattttaatgctctccttattagatggctatatccaaaataaaaataggcgtttagcccccttt

SEQ ID NO: 2626 - DNA (genomic), 687 bp, Helicobacter pylori; double-stranded, circular
  misc_feature (B) LOCATION 1...687
  hypothetical: NO
  anti-sense: NO
atggcattagatttaagaaaaaagaatcaagtaacccaagacagcttgagaaaaaatctttttgtagatatgcatagaatggggttgattgagcgatacaataaaaataaagaacctacaaacccctacatccaaagcaatattaaatatatcagtttaactcccttagctatagaatttttaaacgcgcaggatttgttaagaaaaaatttttgttacacgcaagctttagaaaatcttttacagggttttggggcagaatgcagagaggtgatgatagagcttgaaaatcattatttagacattgaagaaatgatgttttttgttacatttttaaatattgaaaattttactagaagtgaaattatagaatatgttagagagtataggagtttaagccgtatccaaaaagaaaaattaaaagagttagcgcaagattattgcaatcctaatcattttaatgggaataagttagacaagagagattatcataattggaaaaatcaagcccaacaaatttttagcttgctagaacaaagcgtgttttttgaaaccaataaagagaggcttattttaaaaacgctcaatgaagaaaacaaacaaaacgataaaaagctcaaacgctccattaaagaaaaagccctttattttgaaaaacatggcgtaaaaaaaagaaaagggttttga

SEQ ID NO: 2627 - DNA (genomic), 693 bp, Helicobacter pylori; double-stranded, circular
  misc_feature (B) LOCATION 1...693
  hypothetical: NO
  anti-sense: NO
ggagacattatggcattagatttaagaaaaaagaatcaagtaacccaagacagcttgagaaaaaatctttttgtagatatgcatagaatggggttgattgagcgatacaataaaaataaagaacctacaaacccctacatccaaagcaatattaaatatatcagtttaactcccttagctatagaatttttaaacgcgcaggatttgttaagaaaaaatttttgttacacgcaagctttagaaaatcttttacagggttttggggcagaatgcagagaggtgatgatagagcttgaaaatcattatttagacattgaagaaatgatgttttttgttacatttttaaatattgaaaattttactagaagtgaaattatagaatatgttagagagtataggagtttaagccgtatccaaaaagaaaaattaaaagagttagcgcaagattattgcaatcctaatcattttaatgggaataagttagacaagagagattatcataattggaaaaatcaagcccaacaaatttttagcttgctagaacaaagcgtgttttttgaaaccaataaagagaggcttattttaaaaacgctcaatgaagaaaacaaacaaaacgataaaaagctcaaacgctccattaaagaaaaagccctttattttgaaaaacatggcgtaaaaaaaagaaaagggttt

SEQ ID NO: 2628 - DNA (genomic), 729 bp, Helicobacter pylori; double-stranded, circular
  misc_feature (B) LOCATION 1...729
  hypothetical: NO
  anti-sense: NO
atggcattagatttaagaaaaaagaatcaagtaacccaagacagcttgagaaaaaatctttttgtagatatgcatagaatggggttgattgagcgatacaataaaaataaagaacctacaaacccctacatccaaagcaatattaaatatatcagtttaactcccttagctatagaatttttaaacgcgcaggatttgttaagaaaaaatttttgttacacgcaagctttagaaaatcttttacagggttttggggcagaatgcagagaggtgatgatagagcttgaaaatcattatttagacattgaagaaatgatgttttttgttacatttttaaatattgaaaattttactagaagtgaaattatagaatatgttagagagtataggagtttaagccgtatccaaaaagaaaaattaaaagagttagcgcaagattattgcaatcctaatcattttaatgggaataagttagacaagagagattatcataattggaaaaatcaagcccaacaaatttttagcttgctagaacaaagcgtgttttttgaaaccaataaagagaggcttattttaaaaacgctcaatgaagaaaacaaacaaaacgataaaaagctcaaacgctccattaaagaaaaagccctttattttgaaaaacatggcgtaaaaaaaaagaaaagggttttgagttgcatcatattgtgcctttatgtttggctcgctctatag

SEQ ID NO: 2629 - DNA (genomic), 864 bp, Helicobacter pylori; double-stranded, circular
  misc_feature (B) LOCATION 1...864
  hypothetical: NO
  anti-sense: NO
atgtcagacaacctcttgcataaagacatccaagccctaatcgctcgcttaaagcaccaggacttaaacttgagtgcactagaaaaatcgctctctcgccttattcatgatgaaatcaatttggaatatttaaaagcgtgcgggcttaatttcgtagaaacgagcgaaaatttaatcacgctcaaaaaccttaaaaccccccttaaagatgaggttttttcctttgttgatttagagaccaccggctcttgccccctaaaacatgagattttagaaatcggggccgtgcaagtgaaggggggggaaattattaatcgttttgaaacccttgtgaaagtcaaaagcgtacctgattatatcgctgagcttacaggcatcacctatgaagacaccctaaacgccccaagcgcgcatgaagccttacaagaattgcgtatttttttaggcaatagcgtgtttgtggcccacaacgctaattttgattacaactttttagggcgttattttgtagaaaaattgcattgccccttattgaatttaaagctttgcactttggatttgtccaaacgcgctattttgtccatgcgttattctttgagctttttaaaagagcttttagggtttggtatagaagtcagccacagagcctatgcggacgctttagcgagctataagctctttgaaatatgcctgttaaacttgcccagttacatcaaaacgacgatggatttgattgatttttccaaatgcgctaacactttgatcaaaagacccccaagagccaaataccaagagatcccatcgccgttccctctttttgaaaggacaaagggtttgttagacattatgaaagcgaccagttaa

SEQ ID NO: 2630 - DNA (genomic), 972 bp, Helicobacter pylori; double-stranded, circular
  misc_feature (B) LOCATION 1...972
  hypothetical: NO
  anti-sense: NO
atgataaaaatatctttgaactccaacaagcgggcgtggatgtggtggtttcagggagttatatttttgaatccaaagatcgtaagctggctattgaaggcttacagaatgtcagacaacctcttgcataaagacatccaagccctaatcgctcgcttaaagcaccaggacttaaacttgagtgcactagaaaaatcgctctctcgccttattcatgatgaaatcaatttggaatatttaaaagcgtgcgggcttaatttcgtagaaacgagcgaaaatttaatcacgctcaaaaaccttaaaaccccccttaaagatgaggttttttcctttgttgatttagagaccaccggctcttgccccctaaaacatgagattttagaaatcggggccgtgcaagtgaaggggggggaaattattaatcgttttgaaacccttgtgaaagtcaaaagcgtacctgattatatcgctgagcttacaggcatcacctatgaagacaccctaaacgccccaagcgcgcatgaagccttacaagaattgcgtatttttttaggcaatagcgtgtttgtggcccacaacgctaattttgattacaactttttagggcgttattttgtagaaaaattgcattgccccttattgaatttaaagctttgcactttggatttgtccaaacgcgctattttgtccatgcgttattctttgagctttttaaaagagcttttagggtttggtatagaagtcagccacagagcctatgcggacgctttagcgagctataagctctttgaaatatgcctgttaaacttgcccagttacatcaaaacgacgatggatttgattgatttttccaaatgcgctaacactttgatcaaaagacccccaagagccaaataccaagagatcccatcgccgttccctctttttgaaaggacaaagggtttgttagacattatgaaagcgaccagttaa

SEQ ID NO: 2631 - DNA (genomic), 969 bp, Helicobacter pylori; double-stranded, circular
  misc_feature (B) LOCATION 1...969
  hypothetical: NO
  anti-sense: NO
atgataaaaatatctttgaactccaacaagcgggcgtggatgtggtggtttcagggagttatatttttgaatccaaagatcgtaagctggctattgaaggcttacagaatgtcagacaacctcttgcataaagacatccaagccctaatcgctcgcttaaagcaccaggacttaaacttgagtgcactagaaaaatcgctctctcgccttattcatgatgaaatcaatttggaatatttaaaagcgtgcgggcttaatttcgtagaaacgagcgaaaatttaatcacgctcaaaaaccttaaaaccccccttaaagatgaggttttttcctttgttgatttagagaccaccggctcttgccccctaaaacatgagattttagaaatcggggccgtgcaagtgaaggggggggaaattattaatcgttttgaaacccttgtgaaagtcaaaagcgtacctgattatatcgctgagcttacaggcatcacctatgaagacaccctaaacgccccaagcgcgcatgaagccttacaagaattgcgtatttttttaggcaatagcgtgtttgtggcccacaacgctaattttgattacaactttttagggcgttattttgtagaaaaattgcattgccccttattgaatttaaagctttgcactttggatttgtccaaacgcgctattttgtccatgcgttattctttgagctttttaaaagagcttttagggtttggtatagaagtcagccacagagcctatgcggacgctttagcgagctataagctctttgaaatatgcctgttaaacttgcccagttacatcaaaacgacgatggatttgattgatttttccaaatgcgctaacactttgatcaaaagacccccaagagccaaataccaagagatcccatcgccgttccctctttttgaaaggacaaagggtttgttagacattatgaaagcgaccagt

SEQ ID NO: 2632 - DNA (genomic), 345 bp, Helicobacter pylori; double-stranded, circular
  misc_feature (B) LOCATION 1...345
  hypothetical: NO
  anti-sense: NO
atgacgatctcaaaaagatccccaatatcaagcaaaaaaatccaagaatacaaagatctagtcgcccaatacaaagacccaaaccctctctatcccttaaataagcaagatcttatcaacaaaatccaagacttaaaaaacactttttccctcacgctcaaagcccctaaaaccaaagcagagcttgaaaaggctattgaaaaacacatcaaaaaatacaatttctttgctctagatgataagagtttgctagatgggttaaattattttatcccaaacctttttggcacgcttaaactaagccccaaagaagaggaagagggcttttgcttcttatgggcgtat

SEQ ID NO: 2633 - DNA (genomic), 1473 bp, Helicobacter pylori; double-stranded, circular
  misc_feature (B) LOCATION 1...1473
  hypothetical: NO
  anti-sense: NO
gccccaaagaagaggaagagggcttttgcttcttatgggcgtattagagctttaagaaaaaagcttgatgatgccttaagtggtggagagtatcaaaatgcgtttgaatggcgctttgaattccctgaagttttggacgatgagggggattttttaggctttgattgcatcattgggaatccgccttatatccgccaagaacaaatcaaagacttaaagcctttattagaaaagcaataccaagatttctacaacagcaccgctgacatttacacctacttttttgccctatctttccaccttttaagagaaaaaggctttagcgctttcatcacttccaacaaatacgcgcgagccaaatacggcgctaaattgagagaatggctgctcaaaaaaaccacccttgtcagctacatggaattaaacgccttaaaagtttttgaaagtgctgcagtggataccagcatcattcatttcatcaagcaaccgccccttaaagagagcgattttaaatattacgaacccaccccagacgataaagacgatttgaaaagcaccccctatctttccatgaaacaaaatgcgctttcaacagaaagctttatttttgccaacgccacgcttttagatttaagggacaaaatagagagtgttggcaccccgcttaaagactgggacattcaaatcaattatgggataaaaaccggcgcgaacgaagcctttatcattcccactgaaaaaagagacgagatcttaaacgcttgcaagacgcaagaagaaagggagcgcacagagaggcttattaagcctattttaagagggaaagacattaaaaggtattcttatgagtgggcgggggagtggttgattaacacccataacggctacacttctaatctcaaatccaaaatcccacccattgatatagaaaaataccccgcaacaaaagcgcatttagacgctcattacgatactattgcaacacgatgcgatcaaggagacaccccctatcacttaaggaattgcgcgtatttagaggattttgaaaaagagaaaattgtgtatccagagacttcacaaggggcgtattttatatatgaaaacagcggaatatttttagaaaaaaccgtatttatgattgttagtgatgcttataatcttaagcttttgactgctttactcaattctaaactgattacattctattttaaaaatttttgcggaggttgtattttaggcaaaagtggttatcaatacaataagcatgctttagaaaaaatacccattccccaaatcaccgaaaaaaaccaagaattagccgataaaatcaccgattgcgcggagcaaatcctagcgctaaaagcaaaagaccctaaagccaacactcaaaagttagaaaaagaaattgacgctttagtctatcagctctaccacctcaccgatgaagaaattaaaaccattgaagacgggcag

SEQ ID NO: 2634 - DNA (genomic), 1776 bp, Helicobacter pylori; double-stranded, circular
  misc_feature (B) LOCATION 1...1776
  hypothetical: NO
  anti-sense: NO
atgacgatctcaaaaagatccccaatatcaagcaaaaaaatccaagaatacaaagatctagtcgcccaatacaaagacccaaaccctctctatcccttaaataaagcagatcttatcaacaaaatccaagacttaaaaaacactttttccctcacgctcaaagmycctaaaaccaaagcagagcttgaaaaggctattgaaaaacacatcaaaaaatacaatttctttgctctagatgataagagtttgctagatgggttaaattattttatcccaaacctttttggcacgcttaaactaagccccaaagaagaggaagaggcttttgcttcttatgggcgtattagagctttaagaaaaaagcttgatgatgcyttaagtggtggagagtatcacaatgcgtttgaatggcgctttgaattccctgaagttttggacgatgagggggattttttaggctttgattgcatcattgggaatccgccttatatccgccaagaacaaatcaaagacttaaagcctttattagaaaagcaataccaagatttctacaacagcaccgctgacatttacacctacttttttgccctatctttccaccttttaagagaaaaaggctttagcgctttcatcacttccaacaaatacgcgcgagccaaatacggcgctaaattgagagaatggctgctcaaaaaaaccacccttgtcagctacatggaattaaacgccttaaaagtttttgaaagtgctgcagtggataccagcatcattcatttcatcaagcaaccgccccttaaagagagcgattttaaatattacgaacccaccccagacgataaagacgatttgaaaagcaccccctatctttccatgaaacaaaatgcgctttcaacagaaagctttatttttgccaacgccacgcttttagatttaagggacaaaatagagagtgttggcaccccgcttaaagactgggacattcaaatcaattatgggataaaaaccggcgcgaacgaagcctttatcattcccactgaaaaaagagacgagatcttaaacgcttgcaagacgcaagaagaaagggagcgcacagagaggcttattaagcctattttaagagggaaagacattaaaaggtattcttatgagtgggcgggggagtggttgattaacacccataacggctacacttctaatctcaaatccaaaatcccacccattgatatagaaaaataccccgcaacaaaagcgcatttagacgctcattacgatactattgcaacacgatgcgatcaaggagacaccccctatcacttaaggaattgcgcgtatttagaggattttgaaaaagagaaaattgtgtatccagagacttcacaaggggcgtattttatatatgaaaacagcggaatatttttagaaaaaaccgtatttatgattgttagtgatgcttataatcttaagcttttgactgctttactcaattctaaactgattacattctattttaaaaatttttgcggaggttgtattttaggcaaaagtggttatcaatacaataagcatgctttagaaaaaatacccattccccaaatcaccgaaaaaaaccaagaattagccgataaaatcaccgattgcgcggagcaaatcctagcgctaaaagcaaaagaccctaaagccaacactcaaaagttagaaaaagaaattgacgctttagtctatcagctctaccacctcaccgatgaagaaattaaaaccattgaagacgggcagtga

SEQ ID NO: 2635 - DNA (genomic), 2091 bp, Helicobacter pylori; double-stranded, circular
  misc_feature (B) LOCATION 1...2091
  hypothetical: NO
  anti-sense: NO
atgatgagtttcactcgcatcccccttaaagttttcattaaaaaatacaatccccaagaacccaaaaaggaaactatagaaaattttgaaaaagaaataaacagcttattagaaaacgtgccaagacaagatgatgaagaatttcaaaaaaatgaaatcaataagtttttaaaaaatgcctatggctatgactgcaacacctatgaaaaagtggatagcgtgatctatgtggataaagaagttcgggtgcttattgaagtcaaagccctaaataacaagacagaattccctaaaaacagagaaaacccgctcagtaaagccttttgtcaaatggttttgtattttttagaagagatagaaaaagaaaaaaacaactctctaaaacacaccattatttgcaacgcgcatgaatttttcctctttgattgtaaggatttactctctttaaaagaagataaacgcatcaaaaaattctataaaaattacgctaaaaaagaaggcacagactcttcaaaaccaaaattttacaaagatttagaacaatttttgcaagaagattttcaaggcgaactccgctacactcactttaatttgagcgatgattttaaagaacttcctttgatttatcaagttttaagccaagaagtccttttaaaacaaaagagaacccttgacgctaacacgcttaacaaagatttttatgaagaattgctttacattttagggttagaagagcaaaatgacaaagggaaaattttaatcaaacccagccgcaccaaaaactccctaagcggtgctttaaaagaaaaatacaaaaatttagacgatgaagaagtcatggcgttactcatcgcttggaataaccgcatcttgtttttacggcttttagaaagccttttgatctcgtttgagcattttgaaaaagaaagatctttcttaaccacaggaaactttaaagatttcaacgccctaaacacgctcttttttgaagtcctagccaagaaaaacagcgagcgtttaccagaaattaaagaaaacaagattttaggaaaaatcccttatttgaattctagtttgtttgataaaacgcctttagaattaaaggggcatgaaatcaagcttttagacaataaaaagctagaaatctataaaaattccgttctcaaaaaacatgaaaattaccaaaaagataaagcttctttgcccttgctggaatacctttttgaatttttgcgcgtttatgatttcaccaccacccctaaagacattaaagataatammgataccagcgaaagccgtttgattaaccctagcgttttggggcttgtttttgaaaagctcaacggctataaagaggggagcttttataccccaagcttcattacaagctacatgtgcaaagagagtatcacgacaatcgtgttggataaattcaatcaaaaatataatatagagtgtgataagttaaaagaattaaaaaattatctcaaaaatagctataaagaggataaacgcaaagaatacttgcaactccttctcactttacgcatttgcgatccggcggtggggagcgggcatttcttggtttcagcgctcaatgaaatggtgttaattgcttatgagctagggcttattgcttccttgcatcgttactctctcacattagaaaacgatgaaatcatcattcattacacgccaacgggtgaaatctttaactacaaaaaaccgcttagagaaaacgacccccaccaccacatccaaaaagaactttttgagcttaaaaaatccatcattgaaaactgcctttttggcgtggatattaaccccaattcttgcgaaatcaccaagctcaggctatggatagagcttttaaaatacagctattatatttttgaagagggcaagaacactaacgcgcttgaaaccctccccaacattgatattaacattaagtgcgctaattcgcttatctcacgctttaatttgaatgacgatctcaaaaagatccccaatatcaagcaaaaaaatccaagaatacaaagatctagtcgcccaatacaaagacccaaaccctctctatcccttaaataa

SEQ ID NO: 2636 - DNA (genomic), 2220 bp, Helicobacter pylori; double-stranded, circular
  misc_feature (B) LOCATION 1...2220
  hypothetical: NO
  anti-sense: NO
atcgtaaagattagagctaataagatcaattactctaatgtttcacatggaacaatttcaaagaaaagcgttttatttaaaattcatggcacttttgttataatcgtttttatcccatttcaaaggcgttttatgatgagtttcactcgcatcccccttaaagttttcattaaaaaatacaatccccaagaacccaaaaaggaaactatagaaaattttgaaaaagaaataaacagcttattagaaaacgtgccaagacaagatgatgaagaatttcaaaaaaatgaaatcaataagtttttaaaaaatgcctatggctatgactgcaacacctatgaaaaagtggatagcgtgatctatgtggataaagaagttcgggtgcttattgaagtcaaagccctaaataacaagacagaattccctaaaaacagagaaaacccgctcagtaaagccttttgtcaaatggttttgtattttttagaagagatagaaaaagaaaaaaacaactctctaaaacacaccattatttgcaacgcgcatgaatttttcctctttgattgtaaggatttactctctttaaaagaagataaacgcatcaaaaaattctataaaaattacgctaaaaaagaaggcacagactcttcaaaaccaaaattttacaaagatttagaacaatttttgcaagaagattttcaaggcgaactccgctacactcactttaatttgagcgatgattttaaagaacttcctttgatttatcaagttttaagccaagaagtccttttaaaacaaaagagaacccttgacgctaacacgcttaacaaagatttttatgaagaattgctttacattttagggttagaagagcaaaatgacaaagggaaaattttaatcaaacccagccgcaccaaaaactccctaagcggtgctttaaaagaaaaatacaaaaatttagacgatgaagaagtcatggcgttactcatcgcttggaataaccgcatcttgtttttacggcttttagaaagccttttgatctcgtttgagcattttgaaaaagaaagatctttcttaaccacaggaaactttaaagatttcaacgccctaaacacgctcttttttgaagtcctagccaagaaaaacagcgagcgtttaccagaaattaaagaaaacaagattttaggaaaaatcccttatttgaattctagtttgtttgataaaacgcctttagaattaaaggggcatgaaatcaagcttttagacaataaaaagctagaaatctataaaaattccgttctcaaaaaacatgaaaattaccaaaaagataaagcttctttgcccttgctggaatacttttttaaatttttgcgcgtttatgatttcaccaccacccctaaagacattaaagataataccgataccagcgaaagccgtttgattaaccctagcgttttggggcttgtttttgaaaagctcaacggctataaagaggggagcttttataccccaagttttattacaagctacatgtgcaaagagagtatcacgacaatcgtgttggataaattcaatcaaaaatataatatagagtgtgataagttaaaagaattaaaaaattatctcaaaaatagctataaagaggataaacgcaaagaatacttgcaactccttctcactttacgcatttgcgatccggcggtggggagcgggcatttcttggtttcagtgctcaatgaaatggtgtgggttgcttataagctagggcttattgcttccttgtatcgctacgatcttaaattagaaaacgatgaaattatcattcattacacgccaacgggtgaaatttttaactataccataccgcatagcgaaaacgacccccaccaccacatccaaaaagaactttttgagcttaaaaaatccatcattgaaaactgcctttttggcgtggatattaaccccaattcttgcgaaatcaccaagctcaggctatggatagagcttttaaaatacagctattatatttttgaagagggtaagaacactaacgcgcttgaaaccctccccaacattgatattaacattaagtgtgctaattcgctcatttcacgctttaatttgaatgacgatctcaaaaagatccccaatatcaagcaaaaaaatccaagaatacaaagatctagtcgcccaatacaaagacccaaaccctctctatcccttaaa

SEQ ID NO: 2637 - DNA (genomic), 3762 bp, Helicobacter pylori; double-stranded, circular
  misc_feature (B) LOCATION 1...3762
  hypothetical: NO
  anti-sense: NO
atgatgagtttcactcgcatcccccttaaagttttcattaaaaaatacaatccccaagaacccaaaaaggaaactatagaaaattttgaaaaagaaataaacagcttattagaaaacgtgccaagacaagatgatgaagaatttcaaaaaaatgaaatcaataagtttttaaaaaatgcctatggctatgactgcaacacctatgaaaaagtggatagcgtgatctatgtggataaagaagttcgggtgcttattgaagtcaaagccctaaataacaagacagaattccctaaaaacagagaaaacccgctcagtaaagccttttgtcaaatggttttgtattttttagaagagatagaaaaagaaaaaaacaactctctaaaacacaccattatttgcaacgcgcatgaatttttcctctttgattgtaaggatttactctctttaaaagaagataaacgcatcaaaaaattctataaaaattacgctaaaaaagaaggcacagactcttcaaaaccaaaattttacaaagatttagaacaatttttgcaagaagattttcaaggcgaactccgctacactcactttaatttgagcgatgattttaaagaacttcctttgatttatcaagttttaagccaagaagtccttttaaaacaaaagagaacccttgacgctaacacgcttaacaaagatttttatgaagaattgctttacattttagggttagaagagcaaaatgacaaagggaaaattttaatcaaacccagccgcaccaaaaactccctaagcggtgctttaaaagaaaaatacaaaaatttagacgatgaagaagtcatggcgttactcatcgcttggaataaccgcatcttgtttttacggcttttagaaagccttttgatctcgtttgagcattttgaaaaagaaagatctttcttaaccacaggaaactttaaagatttcaacgccctaaacacgctcttttttgaagtcctagccaagaaaaacagcgagcgtttaccagaaattaaagaaaacaagattttaggaaaaatcccttatttgaattctagtttgtttgataaaacgcctttagaattaaaggggcatgaaatcaagcttttagacaataaaaagctagaaatctataaaaattccgttctcaaaaaacatgaaaattaccaaaaagataaagcttctttgcccttgctggaatacttttttaaatttttgcacctttataaattcaccaccacccctaaggacattaaagataataccgataccagcgaaagccgtttgattaaccctagcgttttggggcttgtttttgaaaagctcaacggctataaagaggggagcttttataccccaagcttcattacaagctacatgtgcaaagagagtatcacgacaatcgtgttggataaattcaatcaaaaatataatatagagtgtgataagttaaaagaattaaaaaattatctcaaaaatagctataaagaggataaacgcaaagaatacttgcaactccttctcactttacgcatttgcgatccggcggtggggagcgggcatttcttggtttcagcgctcaatgaaatggtgttaattgcttatgagctagggcttattgcttccttgcatcgttactctctcacattagaaaacgatgaaatcatcattcattacacgccaacgggtgaaatctttaactacaaaaaaccgcttagagaaaacgacccccaccaccacatccaaaaagaactttttgagcttaaaaaatccatcattgaaaactgcctttttggcgtggatattaaccccaattcttgcgaaatcaccaagctcaggctatggatagagcttttaaaatacagctattatatttttgaagagggcaagaacactaacgcgcttgaaaccctccccaacattgatattaacattaagtgcgctaattcgcttatctcacgctttaatttgaatgacgatctcaaaaagatccccaatatcaagaaaaaaatccaagaatacaaagatctagtcgctcaatacaaagacccaaaccctctctatcccttaaataaagcagatcttatcaacaaaatccaagacttaaaaaacactttttccctcacgctcaaagatcctaaaaccaaagcagagcttgaaaagactattgaaaaacacatcaaaaaatacaatttctttgccctagacgataagagtttgctagatgggttaaattactttatcccaagcctttttggcacgcttaaactaagccctaaagaagaggaagaggcttttgcgtcttatgggcgtattagagctttaagaaaaaagcttgatgatgccttaagtggtggagagtatcaaaatgcgtttgaatggcgctttgaattccctgaagttttggacgatgagggggattttttaggctttgattgcatcattgggaatccgccttatatccgccaagaacaaatcaaagacttaaagcctttattagaaaagcaataccaagatttctacaacagcaccgctgacatttacacctacttttttgccctatctttccaccttttaagagaaaaaggctttagcgctttcatcacttccaacaaatacgcgcgagccaaatacggcgctaaattgagagaatggctgctcaaaaaaaccacccttgtcagctacatggaattaaacgccttaaaagtttttgaaagtgctgcagtggataccagcatcattcatttcatcaagcaaccgccccttaaagagagcgattttaaatattacgaacccaccccagacgataaagacgatttgaaaagcaccccctatctttccatgaaacaaaatgcgctttcaacagaaagctttatttttgccaacgccacgcttttagatttaagggacaaaatagagagtgttggcaccccgcttaaagactgggacattcaaatcaattatgggataaaaaccggcgcgaacgaagcctttatcattcccactgaaaaaagagacgagatcttaaacgcttgcaagacgcaagaagaaagggagcgcacagagaggcttattaagcctattttaagagggaaagacattaaaaggtattcttatgagtgggcgggggagtggttgattaacacccataacggctacacttctaatctcaaatccaaaatcccacccattgatatagaaaaataccccgcaacaaaagcgcatttagacgctcattacgatactattgcaacacgatgcgatcaaggagacaccccctatcacttaaggaattgcgcgtatttagaggattttgaaaaagagaaaattgtgtatccagagacttcacaaggggcgtattttatatatgaaaacagcggaatatttttagaaaaaaccgtatttatgattgttagtgatgcttataatcttaagcttttgactgctttactcaattctaaactgattacattctattttaaaaatttttgcggaggttgtattttaggcaaaagtggttatcaatacaataagcatgctttagaaaaaatacccattccccaaatcaccgaaaaaaaccaagaattagccgataaaatcaccgattgcgcggagcaaatcctagcgctaaaagcaaaagaccctaaagccaacactcaaaagttagaaaaagaaattgacgctttagtctatcagctctaccacctcaccgatgaagaaattaaaaccattgaagacgggcagtga

SEQ ID NO: 2638 - DNA (genomic), 1164 bp, Helicobacter pylori; double-stranded, circular
  misc_feature (B) LOCATION 1...1164
  hypothetical: NO
  anti-sense: NO
ttggattttgtgggtaagaaaatcgctttaaatcaagcttttaagaaaaatcataagattttaaagcctttaaacgaatccacgagcaagcacattctcatcaagggcgataatttagacgctctcaaaatcttaaaacaaagctatagtgaaaaaatcaaaatgatttacattgacccgccttacaacacgaaaaacgataattttatctatggcgatgatttctcacaatccaatgaagaggttttaaaaacattggattattctaaagaaaagctggattatatcaagaacctttttgggtcaaaatgccatagcgggtggcttagtttcatgtatcctagattgttgctcgctaaagatttgctcaaacaagacggcgtgatttttatcagcattgacgataacgagtgcgcccaactcaaacttttatgcgatgaaatttttggggaggggaattttatagaaacatttttatggaacaaaacacaaacgccaccatctgcttcaaataaaactagaaaaacgcatgaatttattttatgttatcaaaaaaataaagataataaaaaaatgattgcaaaattttctgatggaggagatgcccctctttggaatgaaacaaattctgaaagaattttaacttttcctgcaaattatgttttttcaaatttaaagaatggaatttataaaaaaggaattagagataaaattgaagttttagatgatattgaagtttataatgggaaaattataaatagttttagattaaaaggacattttcgttggaagcaagaaacattgaacgaggaaataatcaataatgtatttttagtcgtaaaaagtgacaaattttctattcgttattgtagagaaggcgaaagaattgttatgcctacaaatgaaatatcaaaaaaggataatgtaggaacaaatgaaacggcttcaaaggagttattcaaactatttgataataacaaaatttttaattttaataaacctgtaagtttaatcaaatatttaatttctatatgtagcaataataccaacgagggcgacatcatcttagattttttcgccgggagcgggacaaccgcgcatgccgtgttagagagtaataagagcgattatcaaaaattaagtgagggggggggggttatttaa

SEQ ID NO: 2639 - DNA (genomic), 1236 bp, Helicobacter pylori; double-stranded, circular
  misc_feature (B) LOCATION 1...1236
  hypothetical: NO
  anti-sense: NO
caagctcacgcggatacaggaaaattaaaagcgttactaggggattttagcgagataaaagaagagggctatgggttggattttgtgggtaagaaaatcgctttaaatcaagcttttaagaaaaatcataagattttaaagcctttaaacgaatccacgagcaagcacattctcatcaagggcgataatttagacgctctcaaaatcttaaaacaaagctatagtgaaaaaatcaaaatgatttacattgacccgccttacaacacgaaaaacgataattttatctatggcgatgatttctcacaatccaatgaagaggttttaaaaacattggattattctaaagaaaagctggattatatcaagaacctttttgggtcaaaatgccatagcgggtggcttagtttcatgtatcctagattgttgctcgctaaagatttgctcaaacaagacggcgtgatttttatcagcattgacgataacgagtgcgcccaactcaaacttttatgcgatgaaatttttggggaggggaattttatagaaacatttttatggaacaaaacacaaacgccaccatctgcttcaaataaaactagaaaaacgcatgaatttattttatgttatcaaaaaaataaagataataaaaaaatgattgcaaaattttctgatggaggagatgcccctctttggaatgaaacaaattctgaaagaattttaacttttcctgcaaattatgttttttcaaatttaaagaatggaatttataaaaaaggaattagagataaaattgaagttttagatgatattgaagtttataatgggaaaattataaatagttttagattaaaaggacattttcgttggaagcaagaaacattgaacgaggaaataatcaataatgtatttttagtcgtaaaaagtgacaaattttctattcgttattgtagagaaggcgaaagaattgttatgcctacaaatgaaatatcaaaaaaggataatgtaggaacaaatgaaacggcttcaaaggagttattcaaactatttgataataacaaaatttttaattttaataaacctgtaagtttaatcaaatatttaatttctatatgtagcaataataccaacgagggcgacatcatcttagattttttcgccgggagcgggacaaccgcgcatgccgtgttagagagtaataagagcgattatcaaaaattaagtgagggggggggggttatt

SEQ ID NO: 2640 - DNA (genomic), 1341 bp, Helicobacter pylori; double-stranded, circular
  misc_feature (B) LOCATION 1...1341
  hypothetical: NO
  anti-sense: NO
atgcaaaataaagaaattggtggagaaaaaagcgttaatgaaaaaaatgtagaggtttttaatcgttattttcccggttgcttgagtatagaaaatgataacaagctcacgctggatacaggaaaattaaaagcgttactaggggattttagcgagataaaagaagagggctatgggttggattttgtgggtaagaaaatcgctttaaatcaagcttttaagaaaaatcataagattttaaagcctttaaacgaatccacgagcaagcacattctcatcaagggcgataatttagacgctctcaaaatcttaaaacaaagctatagtgaaaaaatcaaaatgatttacattgacccgccttacaacacgaaaaacgataattttatctatggcgatgatttctcacaatccaatgaagaggttttaaaaacattggattattctaaagaaaagctggattatatcaagaacctttttgggtcaaaatgccatagcgggtggcttagtttcatgtatcctagattgttgctcgctaaagatttgctcaaacaagacggcgtgatttttatcagcattgacgataacgagtgcgcccaactcaaacttttatgcgatgaaatttttggggaggggaattttatagaaacatttttatggaacaaaacacaaacgccaccatctgcttcaaataaaactagaaaaacgcatgaatttattttatgttatcaaaaaaataaagataataaaaaaatgattgcaaaattttctgatggaggagatgcccctctttggaatgaaacaaattctgaaagaattttaacttttcctgcaaattatgttttttcaaatttaaagaatggaatttataaaaaaggaattagagataaaattgaagttttagatgatattgaagtttataatgggaaaattataaatagttttagattaaaaggacattttcgttggaagcaagaaacattgaacgaggaaataatcaataatgtatttttagtcgtaaaaagtgacaaattttctattcgttattgtagagaaggcgaaagaattgttatgcctacaaatgaaatatcaaaaaaggataatgtaggaacaaatgaaacggcttcaaaggagttattcaaactatttgataataacaaaatttttaattttaataaacctgtaagtttaatcaaatatttaatttctatatgtagcaataataccaacgagggcgacatcatcttagattttttcgccgggagcgggacaaccgcgcatgccgtgttagagagtaataagagcgattatcaaaaattaagtgagggggggggggttatttaa

SEQ ID NO: 2641 - DNA (genomic), 381 bp, Helicobacter pylori; double-stranded, circular
  misc_feature (B) LOCATION 1...381
  hypothetical: NO
  anti-sense: NO
tataaagcggtaaaaagcgttcttaaggggtttatgatgaaaacagaaagagaagttcaaaatcaagtcatagaaacttttaaagcaatgggctatgcgtatttgggggatttaacaaagagcgataatgaaaatatcaataaagaaagcctgaaagcatggctaattaaaaatcaaaaaattgagcctgaaaggtggcataaaattgagcaggaaattcataccgctttaaaaaacgatttatacgaagcgaatcaaaaattctacgagcttttgatttatggcgtgaaaactaaaataagcctgaatgaaaacactcaacgcattggctcattgattggaaagacgtttctaagaatgaatttagcgtggctgaagaag

SEQ ID NO: 2642 - DNA (genomic), 465 bp, Helicobacter pylori; double-stranded, circular
  misc_feature (B) LOCATION 1...465
  hypothetical: NO
  anti-sense: NO
aaacactcaacgcattggctcattgattggaaagacgtttctaagaatgaatttagcgtggctgaagaagtgagcgctaaagggccaaacatgaaacggccggacatcgtgctttacgttaatgggatcgctttaggggtgctagaattgaaaaaatccagcgtgagcgtggaaagcggtattaggcaaaatttagacaaccaaaagaaggaatttattagagatttttttaaaacgatccaattggttatggcgggtaatgaaagtcaagggctaaaatatggcgtcatagaaactgaagaaaaatactacctttcttggaaagaagagggcgttcaaaaaaatttgtttgagacgattgagtgttttttggataaaaaaaggtttttagaatttatccatgattttttgatttttgataaggggcaaaagaaagtgcgccagattccatcagtattttgcaat

SEQ ID NO: 2643 - DNA (genomic), 687 bp, Helicobacter pylori; double-stranded, circular
  misc_feature (B) LOCATION 1...687
  hypothetical: NO
  anti-sense: NO
agagaaacgcaacaaatcaaacaagaagcgggattttacaggcatttaccaaaggtggttggcttgagtagtggggatagcgtggatttaaaaagctacaatgaagacatgcgccggatcttagacgcttacattaaaaccacggatagcgaggtgttattccaaatagaagatcaagggctgtgcgaagttttagcccaaatggatattaatgattttaataaggcgttatctcaagtatttaaaaatgaaagctctatggcagaaagcatcgctaacaacaccagaaaacgcattatagaaaaagaagcgagcgaccctaagtattacgaaaaattatcttcgcttttaaacgatttgattctccaatttagagaaaagaaattaacctatttagaatacttgcaacaaatccaggacctagccaaaaaagttattgataaagaagatagaaattaccctaaaaagatcaacactaaggctttaaaaaccctctatgataatttagatgaaaatgaagccttagccctagaaacagacgcatgcattaggggtaataaaaaagatggttgggtggggcataatcaaaaagaaaaaaaccttaaaatcgctttaagaaaaatcataaacgatgaggttttgttagaaaatatctttaatttagccaaacacatagaggagtatcac

SEQ ID NO: 2644 - DNA (genomic), 780 bp, Helicobacter pylori; double-stranded, circular
  misc_feature (B) LOCATION 1...780
  hypothetical: NO
  anti-sense: NO
aaacagaatttaaaggataaggtggctgtgatcacaagctatgaacccaatatcgctgatcttaaagattgcgggagtaatgagagcgaagagagttacaaataccgcgcttattgcaaaatgctgcaaaacttttttaatgaaaaagatgagaaaaaagcccttaataaaatcaaagagtttgaagaagaagtcaaaaagcgtttcattaatgagcctgctagaatgaagctattgatcgtggtggataagctattgaccggttttgatgcgccaagcctcacttatttatacattgataagagaatgcaagatcatgggctttttcaagcggtgtgcagggtgaatagactggatggtgaggataaggattttggctgcatcatagactatagcgatttgtttgatagcttgcaagaagcgcacagcgattatactaatggggcgtttgaaaactatgaaagagaagacattcaagggctgatctctgacaaatcccaaaagattaagaaaaaattagaagaaactagagatcagttaaaatcgctttgtgaaagcgtgaaagagccaaaagatgaagaggattatatcgcttatttttgtggggataatttagaaaaaaacgctcaaaaaaggcggttgttttaccagcttgttggcgcgtttttaagaatgtttgtggaattgaataacttagaaaagcccatttattctaaagagaaacgcaacaaatcaaacaagaagcgggattttacaggcatttaccaaaggtggttggct

SEQ ID NO: 2645 - DNA (genomic), 900 bp, Helicobacter pylori; double-stranded, circular
  misc_feature (B) LOCATION 1...900
  hypothetical: NO
  anti-sense: NO
tttttgataaggggcaaaagaaagtgcgccagattccatcagtattttgcaattaagaaaacgcaagaatttatccaaagaaaagaaggggggattatctggcacacgcaaggcagcggtaagagcctgactatggtgtggcttactagatggataagaagaaatatcaaacaagcgagggttttaatcgttacggacaggagggaattagacgctcaaatccaaggcgtgtttcagggaataggcgagaagatttatcgcgccgacagcaagaaggatttattgagcgtgctgtttgaaaataagaaatttttagttggatcgcttgtgcataaatttgatgacaacgacttagaagatttaaaaaaacaacctgttttaaaggaatggattgttttagtggatgaatgccacagaacccaaagcggtaaattgcataaagccatgaaaagcctgctccctaatgcgatttttatcgcctttagcggcacgcctttattgaagcaagataaaaagacaagccaggaagtgtttggggattatatccattgctataaatttaatgaagccgttagcgataaagtggtgttagatttaaattatgaagccaggagcgtggaacaatatgtcagtagccctgaaaagctggacgaatattttgaattaaaaacccaaaacttgaatgaggcggctaaaacagagcttaaaaagaaatgggttaatttgcaaaaagttttttccactaaagacagattggaacatattgtgcaagatattgtattggatatggcaaaactcccacgattaagcaatggaaaggggaacgccatgctggtggctgaaagcgtgtataacgcatgccggtattttgaactctttttagaaacagaatttaaagga

SEQ ID NO: 2646 - DNA (genomic), 2979 bp, Helicobacter pylori; double-stranded, circular
  misc_feature (B) LOCATION 1...2979
  hypothetical: NO
  anti-sense: NO
atgatgaaaacagaaagagaagttcaaaatcaagtcatagaaacttttaaagcaatgggctatgcgtatttgggggatttaacaaagagcgataatgaaaatatcaataaagaaagcctgaaagcatggctaattaaaaatcaaaaaattgagcctgaaaggtggcataaaattgagcaggaaatccataccgctttaaaaaacgatttatacgaagcgaatcaaaaattctacgagcttttgatttatggcgtgaaaactaaaataagcctgaatgaaaacactcaaacgcattggctcattgattggaaagacgtttctaagaatgaatttagcgtggctgaagaagtgagcgctaaagggccaaacatgaaacggccggacatcgtgctttacgttaatgggatcgctttaggggtgctagaattgaaaaaatccagcgtgagcgtggaaagcggtattaggcaaaatttagacaaccaaaagaaggaatttattagagatttttttaaaacgatccaattggttatggcgggtaatgaaagtcaagggctaaaatatggcgtcatagaaactgaagaaaaatactacctttcttggaaagaagagggcgttcaaaaaaatttgtttgagacgattgagtgttttttggataaaaaaaggtttttagaatttatccatgattttttgatttttgataaggggcaaaagaaatgcgccagattccatcagtattttgcaattaagaaaacgcaagaatttatccaaagaaaagaaggggggattatctggcacacgcaaggcagcggtaagagcctgactatggtgtggcttactagatggataagaagaaatatcaaacaagcgagggttttaatcgttacggacaggagggaattagacgctcaaatccaaggcgtgtttcagggaataggcgagaagatttatcgcgccgacagcaagaaggatttattgagcgtgctgtttgaaaataagaaatttttagttggatcgcttgtgcataaatttgatgacaacgacttagaagatttaaaaaaacaacctgttttaaaggaatggattgttttagtggatgaatgccacagaacccaaagcggtaaattgcataaagccatgaaaagcctgctccctaatgcgatttttatcgcctttagcggcacgcctttattgaagcaagataaaaagacaagccaggaagtgtttggggattatatccattgctataaatttaatgaagccgttagcgataaagtggtgttagatttaaattatgaagccaggagcgtggaacaatatgtcagtagccctgaaaagctggacgaatattttgaattaaaaacccaaaacttgaatgaggcggctaaaacagagcttaaaaagaaatgggttaatttgcaaaaagttttttccactaaagacagattggaacatattgtgcaagatattgtattggatatggcaaaactcccacgattaagcaatggaaaggggaacgccatgctggtggctgaaagcgtgtataacgcatgccggtattttgaactctttttagaaacagaattaaaggataaggtggctgtgatcacaagctatgaacccaatatcgctgatcttaaagattgcgggagtaatgagagcgaagagagttacaaataccgcgcttattgcaaaatgctgcaaaacttttttaatgaaaaagatgagaaaaaagcccttaataaaatcaaagagtttgaagaagaagtcaaaaagcgtttcattaatgagcctgctagaatgaagctattgatcgtggtggataagctattgaccggttttgatgcgccaagcctcacttatttatacattgataagagaatgcaagatcatgggctttttcaagcggtgtgcagggtgaatagactggatggtgaggataaggattttggctgcatcatagactatagcgatttgtttgatagcttgcaagaagcgcacagcgattatactaatggggcgtttgaaaactatgaaagagaagacattcaagggctgatctctgacaaatcccaaaagattaagaaaaaattagaagaaactagagatcagttaaaatcgctttgtgaaagcgtgaaagagccaaaagatgaagaggattatatcgcttatttttgtggggataatttagaaaaaaacgctcaaaaaaggcggttgttttaccagcttgttggcgcgtttttaagaatgtttgtggaattgaataacttagaaaagcccatttattctaaagaagaaacgcaacaaatcaaacaagaagcgggattttacaggcatttacaaaaggtggttggcttgagtagtggggatagcgtggatttaaaaagctacaatgaagacatgcgccggatcttagacgcttacattaaaaccacggatagcgaggtgttattccaaatagaagatcaagggctgtgcgaagttttagcccaaatggatattaatgattttaataaggcgttatctcaagtatttaaaaatgaaagctctatggcagaaagcatcgctaacaacaccagaaaacgcattatagaaaaagaagcgagcgaccctaagtattacgaaaaattatcttcgcttttaaacgatttgattctccaatttagagaaaagaaattaacctatttagaatacttgcaacaaatccaggacctagccaaaaaagttattgataaagaagatagaaattaccctaaaaagatcaacactaaggctttaaaaaccctctatgataatttagatgaaaatgaagccttagccctagaaacagacgcatgcattaggggtaataaaaaagatggttgggtggggcataatcaaaaagaaaaaaaccttaaaatcgctttaagaaaaatcataaacgatgaggttttgttagaaaatatctttaatttagccaaacacatagaggagtatcactaa

SEQ ID NO: 2647 - DNA (genomic), 2910 bp, Helicobacter pylori; double-stranded, circular
  misc_feature (B) LOCATION 1...2910
  hypothetical: NO
  anti-sense: NO
gtgaaaatcaaattcaaacgattggattatcaggagcaatgccgggaccaaattttaggggtgtttaaggggattgatttaagagagccagaaaatgatattcaaaggattgctaaccctgtttttgaaataggggcgatcaaagatcttttattagaaaatattgagaatttgcgatcgaaacaaaaaataacccaggggagcgtggggattaatcagtcgttaaactgcgatattttaatggaaacaggcaccgggaagaccttttgctttttggaatgcgtttatgccttgcacaaaaactaccatttgtcaaaatttatcgttttagcgccaagcaacgccattaaattaggggttttaaagagtattgaaatcaccagagaattttttaaaagcgagtattctaacacgcatttagaaagctatgaagatgtagaaagattcattctagcgagtaaccacaaatgctgcgtgttggtgatgactttttctgcctttaataaagagaaaaacactatcaatcaatcatgcttagagaacacgaatctattcaatggcgcaaaaagttacatgcaagctttagcgagtatgcgccccatcgtaatcatggacgaaccgcaccgatttttaggcgataaaacaaaaaaatatttggaacaattaaacgctttaatcacgctcaggtttggggcgacttttaaagatgattatcataatttgatttatgcgctagatagcaaaaaagcgtttgattgcgccctagtgaaaagcattagcgtggcgtctgtgggggagagtgatgagtattttttagagcttaaagaggctaacaaaaaacaaaatgaagccacgatcaattacacgactttagaaaataaaattcaaagcgtcaaagtcaaaacgcatgataatttaggtgcgctaactcatatcagcgctttagaagattacattgtagaaaaaatcactaaaactgagattcgttttctcaatggctttaatttgttactggatcaaaaagagcctttttcccatcttttagagggcgagcaagaagtgatgctgaaagaagcgataaaaagccattttgaaagagaagaagggctttttaaaaaagggattaaagccttgtgcatggtgtttattaacggggtgaatagctatttaagcgaaaatgaaaagccggctaaattggcccttttatttgaaaaactctaccagcaaaagcttgaagaagtcttaaaaaagcctttagatgaaaattatagagcgtatttagagcgcaccaaagacgctattttaaaagtgcatggagggtattttgccaaaagcaagaaagagagcgatgaagtccaagtgatcgcactcattttaaaagaaaaagaaaaattgctgagttttgattccgatctcaggtttattttttcgcaatgggcgttgcaagaggggtgggataaccctaatgtgatgacgatttgcaaattagcccctagctcttctaatatcactaaattgcaacaaatcggtagggggttaaggctcgctgtgaatgataagggcgaacgcatcactaaagagcatgctgattttgattttgtcaatgaattggtggtgatcgtgccgcaagttgagggggattttgtgggagcgatccagcaagagataagcgaacatagcttgattaaacaagtatttagcgcagaagagttagaaaaaagcggcatggttaaaaaagggtattacggggttttgtttgaaacattagagggtttgggttttggagaaaaaacagatgatgaaaactttaaactcactctcaaccaaaacgaatttttaaaaaaagagccagaacttgaaaaattaaaagatgaaaaatacctggattttgaaaaattaaaagattttttaaaagatcgcttgattggccattttagagttaggaacaaaaacgagcgaaaaactgaaaaaatcaaaatcaataaagaaaattttaaaaaatttgaaaccttatgggcgggtttgaatcatcaagcccggatcgcttatgccattgatagcgagagtttgattgatgagattgtcaaaaatattaattcttcttttaatgtcagttcaaaaatcgtttcggttacgacgcataaaaaagtagaaacgatgggaaataacgccaaaacagagatttttgagcgaaaaagtgcatgcgtgtggagtttgcatgaatttatcagcgccttgtctaataaggtgaaattgagttttaaaagcgtggctaaagtgttggaaaacattgatgaaaacaagtttaatgaaattaaaaaaaacgaacaagagggcttaaagcgcttagaagagctgtttttggaaattatttatcaaaatattaaagataaaatctcctatcaaatgcgcgaaacgacgattaaaaacagaaaaaacgatgcgttttatgatgaaaaaggagaaatcagagagtttttagacgggagtttgggggcggataaatatgagattaaaaattcaagcgctcaagaaaaatgcctgtatgaaaatttcatgcaagtggatagcgagattgaaaaagacacgattgaagaatctaacgacactaaaatcattgtttttggcaagctccctagggttaagatcccaatagggttaaatcaaacttatagccctgattttgggtatgtggttgaaaataacgataaaaaagtgttgttagtggtggaaactaagggggttgataaaaaaagcgaattacgccctgaagaaaagcggaaaatttcaaccgctaagaaattttttgaagctttaaaaaagcaaggcgtgaatattgaatacaaaaccaagttgaataatgatcaattgagcgcgttgatcaatgaagttttaaatcgtaaagattag

SEQ ID NO: 2648 - DNA (genomic), 2916 bp, Helicobacter pylori; double-stranded, circular
  misc_feature (B) LOCATION 1...2916
  hypothetical: NO
  anti-sense: NO
ggggtagaggtgaaaatcaaattcaaacgattggattatcaggagcaatgccgggaccaaattttaggggtgtttaaggggattgatttaagagagccagaaaatgatattcaaaggattgctaaccctgtttttgaaataggggcgatcaaagatcttttattagaaaatattgagaatttgcgatcgaaacaaaaaataacccaggggagcgtggggattaatcagtcgttaaactgcgatattttaatggaaacaggcaccgggaagaccttttgctttttggaatgcgtttatgccttgcacaaaaactaccatttgtcaaaatttatcgttttagcgccaagcaacgccattaaattaggggttttaaagagtattgaaatcaccagagaattttttaaaagcgagtattctaacacgcatttagaaagctatgaagatgtagaaagattcattctagcgagtaaccacaaatgctgcgtgttggtgatgactttttctgcctttaataaagagaaaaacactatcaatcaatcatgcttagagaacacgaatctattcaatggcgcaaaaagttacatgcaagctttagcgagtatgcgccccatcgtaatcatggacgaaccgcaccgatttttaggcgataaaacaaaaaaatatttggaacaattaaacgctttaatcacgctcaggtttggggcgacttttaaagatgattatcataatttgatttatgcgctagatagcaaaaaagcgtttgattgcgccctagtgaaaagcattagcgtggcgtctgtgggggagagtgatgagtattttttagagcttaaagaggctaacaaaaaacaaaatgaagccacgatcaattacacgactttagaaaataaaattcaaagcgtcaaagtcaaaacgcatgataatttaggtgcgctaactcatatcagcgctttagaagattacattgtagaaaaaatcactaaaactgagattcgttttctcaatggctttaatttgttactggatcaaaaagagcctttttcccatcttttagagggcgagcaagaagtgatgctgaaagaagcgataaaaagccattttgaaagagaagaagggctttttaaaaaagggattaaagccttgtgcatggtgtttattaacggggtgaatagctatttaagcgaaaatgaaaagccggctaaattggcccttttatttgaaaaactctaccagcaaaagcttgaagaagtcttaaaaaagcctttagatgaaaattatagagcgtatttagagcgcaccaaagacgctattttaaaagtgcatggagggtattttgccaaaagcaagaaagagagcgatgaagtccaagtgatcgcactcattttaaaagaaaaagaaaaattgctgagttttgattccgatctcaggtttattttttcgcaatgggcgttgcaagaggggtgggataaccctaatgtgatgacgatttgcaaattagcccctagctcttctaatatcactaaattgcaacaaatcggtagggggttaaggctcgctgtgaatgataagggcgaacgcatcactaaagagcatgctgattttgattttgtcaatgaattggtggtgatcgtgccgcaagttgagggggattttgtgggagcgatccagcaagagataagcgaacatagcttgattaaacaagtatttagcgcagaagagttagaaaaaagcggcatggttaaaaaagggtattacggggttttgtttgaaacattagagggtttgggttttggagaaaaaacagatgatgaaaactttaaactcactctcaaccaaaacgaatttttaaaaaaagagccagaacttgaaaaattaaaagatgaaaaatacctggattttgaaaaattaaaagattttttaaaagatcgcttgattggccattttagagttaggaacaaaaacgagcgaaaaactgaaaaaatcaaaatcaataaagaaaattttaaaaaatttgaaaccttatgggcgggtttgaatcatcaagcccggatcgcttatgccattgatagcgagagtttgattgatgagattgtcaaaaatattaattcttcttttaatgtcagttcaaaaatcgtttcggttacgacgcataaaaaagtagaaacgatgggaaataacgccaaaacagagatttttgagcgaaaaagtgcatgcgtgtggagtttgcatgaatttatcagcgccttgtctaataaggtgaaattgagttttaaaagcgtggctaaagtgttggaaaacattgatgaaaacaagtttaatgaaattaaaaaaaacgaacaagagggcttaaagcgcttagaagagctgtttttggaaattatttatcaaaatattaaagataaaatctcctatcaaatgcgcgaaacgacgattaaaaacagaaaaaacgatgcgttttatgatgaaaaaggagaaatcagagagtttttagacgggagtttgggggcggataaatatgagattaaaaattcaagcgctcaagaaaaatgcctgtatgaaaatttcatgcaagtggatagcgagattgaaaaagacacgattgaagaatctaacgacactaaaatcattgtttttggcaagctccctagggttaagatcccaatagggttaaatcaaacttatagccctgattttgggtatgtggttgaaaataacgataaaaaagtgttgttagtggtggaaactaagggggttgataaaaaaagcgaattacgccctgaagaaaagcggaaaatttcaaccgctaagaaattttttgaagctttaaaaaagcaaggcgtgaatattgaatacaaaaccaagttgaataatgatcaattgagcgcgttgatcaatgaagttttaaatcgtaaagat

SEQ ID NO: 2649 - DNA (genomic), 2448 bp, Helicobacter pylori; double-stranded, circular
  misc_feature (B) LOCATION 1...2448
  hypothetical: NO
  anti-sense: NO
atggcgatcaaaaaaagcgaattgtatagctctttatgggctggggcggacagcttaaggggcggaatggatgcgagcgagtataaaaactatgttttgaacctgctttttttaaaatacatcagcgataaagccaaaaacaatatggatagcgaaatagaagtgccacaagggtgtttttatgaagacattctcgctttagagggcgataaggaaataggcgacaagctcaataaaatcatcgccaagatcgcagagcgaaacgacttaaagggcgtgattgacagcgtggattttaacgataacactaagcttggagagggtaaagcgatgatagacaccctttctaatttagtcaaaatctttgcggatttgagtttgggcgcgcatggggctttagacgatgatttattgggtgatgcttacgaatatttaatgcgccatttcgctagcgaatccggtaaatccaaagggcagttttacacccctagcgaagtttcgcttttattgtcccttttgcttggcattgatgaaaacaccaggcaggataaaagcatctatgatcccacttgcgggagcggttcgttattgttaaaagcttctagtttggccggcaaaaagggtttaactatctatggtcaagaaaaagacatttccaccacagccctttgtaaaatgaatatgatcttacacaatagcgctactgctgatattgctaaagggggttctagcaccctttctaaccccctttttactactgaaaatggcatgctaaaaacctttgattatgtcgtggctaaccctccctttagcttgaaaaattggactgacggcttaagcatagaccctaaaagcaagcaagtcattaacgatagtttcaatcgctttgaagacggcacgccccctgaaaaaaacggcgatttcgcttttttgctccacatcatcaaatccttaaaccccacaggcaaaggggcagtgattttaccccatggggtgctatttagggggaatgctgaggcgcagattagaaaaaatcttttaatgaaaggctacattaaaggcgtgataggcctagcccctaatcttttttatggcacttccattcctgcatgcgtgatcgttttagacaaagaaaacgcgcatgccagaaagggcgtttttgtgatcgatgcgagcaaggattttaaaaaagacggcaataaaaaccgcttaagggagcaagatgtccaaaaaatgatagacacttttaacgccttaaaagaaatcccttattattctaaaatggtgagcctagaagaaatcagtctaaacgactataacttgaatatcccgcgctacattgctgctaagcaagaattggaaaaagacttgttcgctttaatcaacagccctagttatttgcccaaaaacgaaataaaagcctacgacccttattttcaagtgtttaaagagcttaaaaacacgctgtttaaaaagagcgataaagagggttattacgctttaaaaacagaatgcgaaaacattaaagatttaatcacccaaagcctagaataccaaaccttccacgcttctgttttaagcgcttttgaaagcttggatctatttacaacttttaatgatttagagccaggttttaacccaaaaaccctcatagaaagcgtttgttcaaaggttttaaaagaatttgaaaaagtgggaattttagacaaatacggtgtgtatcagctcttcaaagattactataacgaagtcttgcaagacgattggttcctcatctcattcaatggctttagaagcgctaaagaattgaggaaattaacccccctaaaagacaaaaacaaaaaggccaactatttagaggagccggattttatcgttcaaaaaacctactacaaaagcgatctaatccctaaacatttgatcaaacaacgcttttttgaaaaagaaacaaaagaattagaagaattagaaaacgccctcaatgaaaaagaagctcttttagatgaatttatagaagagcattctaacgaagaggggctttttgatggattgaaaatcaatgaaagcgttttgaaaaaagagctaaaaaacgccaccgatttagaagataaacaaatcctaaaaaccgctttagaatggctagaagcgaaaaacaaggcgctaaaaatgaaaaataaagcttatgaggagctggaattaaaagcgttccaccagtataaaaaccttgaaatcaatgaaattaaggatctcatcatcaaagacaaatggctcaacagcttgaaaaacgccctagaaaacaagatccaaaaacgcaccaacgcttttgctagcgcccttaatgaaatcatttcaagctactctaacagcttgttagaactagacaaagaagtcaaagagagcgaatcaaaagttttagagcatttgaaagatttggggttaatggggtga

SEQ ID NO: 2650 - DNA (genomic), 2526 bp, Helicobacter pylori; double-stranded, circular
  misc_feature (B) LOCATION 1...2526
  hypothetical: NO
  anti-sense: NO
acttctctttctgttttcatcataaaccccttaagaacgctttttaccgctttatattataatcctaaaaacaaaatagggcggttaaaaatggcgatcaaaaaaagcgaattgtatagctctttatgggctggggcggacagcttaaggggcggaatggatgcgagcgagtataaaaactatgttttgaacctgctttttttaaaatacatcagcgataaagccaaaaacaatatggatagcgaaatagaagtgccacaagggtgtttttatgaagacattctcgctttagagggcgataaggaaataggcgacaagctcaataaaatcatcgccaagatcgcagagcgaaacgacttaaagggcgtgattgacagcgtggattttaacgataacactaagcttggagagggtaaagcgatgatagacaccctttctaatttagtcaaaatctttgcggatttgagtttgggcgcgcatggggctttagacgatgatttattgggtgatgcttacgaatatttaatgcgccatttcgctagcgaatccggtaaatccaaagggcagttttacacccctagcgaagtttcgcttttattgtcccttttgcttggcattgatgaaaacaccaggcaggataaaagcatctatgatcccacttgcgggagcggttcgttattgttaaaagcttctagtttggccggcaaaaagggtttaactatctatggtcaagaaaaagacatttccaccacagccctttgtaaaatgaatatgatcttacacaatagcgctactgctgatattgctaaagggggttctagcaccctttctaaccccctttttactactgaaaatggcatgctaaaaacctttgattatgtcgtggctaaccctccctttagcttgaaaaattggactgacggcttaagcatagaccctaaaagcaagcaagtcattaacgatagtttcaatcgctttgaagacggcacgccccctgaaaaaaacggcgatttcgcttttttgctccacatcatcaaatccttaaaccccacaggcaaaggggcagtgattttaccccatggggtgctatttagggggaatgctgaggcgcagattagaaaaaatcttttaatgaaaggctacattaaaggcgtgataggcctagcccctaatcttttttatggcacttccattcctgcatgcgtgatcgttttagacaaagaaaacgcgcatgccagaaagggcgtttttgtgatcgatgcgagcaaggattttaaaaaagacggcaataaaaaccgcttaagggagcaagatgtccaaaaaatgatagacacttttaacgccttaaaagaaatcccttattattctaaaatggtgagcctagaagaaatcagtctaaacgactataacttgaatatcccgcgctacattgctgctaagcaagaattggaaaaagacttgttcgctttaatcaacagccctagttatttgcccaaaaacgaaataaaagcctacgacccttattttcaagtgtttaaagagcttaaaaacacgctgtttaaaaagagcgataaagagggttattacgctttaaaaacagaatgcgaaaacattaaagatttaatcacccaaagcctagaataccaaaccttccacgcttctgttttaagcgcttttgaaagcttggatctatttacaacttttaatgatttagagccaggttttaacccaaaaaccctcatagaaagcgtttgttcaaaggttttaaaagaatttgaaaaagtgggaattttagacaaatacggtgtgtatcagctcttcaaagattactataacgaagtcttgcaagacgattggttcctcatctcattcaatggctttagaagcgctaaagaattgaggaaattaacccccctaaaagacaaaaacaaaaaggccaactatttagaggagccggattttatcgttcaaaaaacctactacaaaagcgatctaatccctaaacatttgatcaaacaacgcttttttgaaaaagaaacaaaagaattagaagaattagaaaacgccctcaatgaaaaagaagctcttttagatgaatttatagaagagcattctaacgaagaggggctttttgatggattgaaaatcaatgaaagcgttttgaaaaaagagctaaaaaacgccaccgatttagaagataaacaaatcctaaaaaccgctttagaatggctagaagcgaaaaacaaggcgctaaaaatgaaaaataaagcttatgaggagctggaattaaaagcgttccaccagtataaaaaccttgaaatcaatgaaattaaggatctcatcatcaaagacaaatggctcaacagcttgaaaaacgccctagaaaacaagatccaaaaacgcaccaacgcttttgctagcgcccttaatgaaatcatttcaagctactctaacagcttgttagaactagacaaagaagtcaaagagagcgaatcaaaagttttagagcatttgaagatttggggt

SEQ ID NO: 2651 - DNA (genomic), 495 bp, Helicobacter pylori; double-stranded, circular
  misc_feature (B) LOCATION 1...495
  hypothetical: NO
  anti-sense: NO
atgaagcaagaaaagtattttctgacttcttctttatcgcttttatcgtttttattgtgtcctgtagaagcttttgattatcggtttagtggtcgtgtggagaacttttctaaaattggttttaacaattctcaaatcaataccaaaaaagggatttatcctaccgaaagttttatagatattgtaactttagcgcaagtcaaagtcaatttactccctaaaggcaccgaaaaccacaggctttctgtttctttgggtggggcgattgcagccattccttacgataagactaagtattatattaaccaggctaacgggaaggtttttggctcaattgtagagaatttcattgggggctatcatggatacttttttaacaagtatcttggtcctgcttatgcggggacttctcaatcagcgagctatcatgcaaggccttatgtggtggataccgcttttttacgatacgattaccaaagatgtttttgggtttaa

SEQ ID NO: 2652 - DNA (genomic), 612 bp, Helicobacter pylori; double-stranded, circular
  misc_feature (B) LOCATION 1...612
  hypothetical: NO
  anti-sense: NO
aaagacaccgctttattttataaaaccaaagatctctattatgtgaaaagcgaaacgatttataaggatttttgctttgaattagagggcattctttttaactttgacacttctttactagaaagcaaaaagtataatgaaaaagtggatttaatctttgatttaaaaagtatagtaaaagataaagacacaaaaactaacaccctgaattttagcgttactcttagcagtaaggggactcaaacaaaaacgaatgaaatcctaaaagaatgctccaatcaaggcgtcaaacttgatgaagaaatcttaaaaaaagcgtttgtgaaattcaaaaagcaaggcagcatggattattttattcataaaaacgcgcaagggtttttaaaagagcagttggatttgtatctgtttgaatacctttttaaagaaatgaccgcatttgatcacaaacgccttaatggaatcaacaccattaaagaagtggctttagaagtgattgcattagtgagcgaatttgaaaacgaactttgtaagatttggaacaaaccccgcttggtgttaaactcgcatttcatcgtaagcctagacaaattgaaagccaaaactacgatt

SEQ ID NO: 2653 - DNA (genomic), 1455 bp, Helicobacter pylori; double-stranded, circular
  misc_feature (B) LOCATION 1...1455
  hypothetical: NO
  anti-sense: NO
gatttggaacaaaccccgcttggtgttaaactcgcatttcatcgtaagcctagacaaattgaaagccaaaactacgatttgagtaaaatcacaaaccacccaaactaccccaaacaagttaaagaatggcaagacttgaatttagagatcgcagactatcttttaggacgcgagttcttgcccctagacaccctctattttaaagatttagaagaagaggttaaaagcttattcaatgaaaatgaaatcaacggcacgctcattaaaagcgaaaactaccaagccctaaactcccttaaaaaccgctataaagaagccattgattgcatttatattgatccgccctttaataccggtagcgattttgcttacatagacaggtttcaagatagcacatggctaagccttatgcataaccgcttgcaactcgcttatgattttttaagccctcaagggaacttctatttgcatttggattatagggcgaattatttggggcgtatgctacttaatgatatttttagtaaagaaaattttaggaatgagataatttggcattttaggacttatcaaggacaaattcaaagtaattttccaagaaagcacgattcactattgtggtattcaaaaaattgcaatgtaaataatttttttaaaattacatattcagataattataaagatacggttgactatagaagatggagagagtttatcgttgataataataaaattgtatatccaaattatccaaaggcagatagtagatttgatgggtatttaaaaaggtatttacagtctacaaaagaaccaaagaatggagatattatcgcaactattaatggttatgtcatagatgatgtttggacagatattcaagcaatagatccaaaaaaggctgatgagcgcttacaagggactttaacccaaaaaccggaaaaattgctagaaaggataatcaaagcgagcagtaacgaaaactctatcgtgtgcgattttttcgctgggagcgggacgacttgcgcggtggcgcacaagttgaaaaggaagtatatcggtgttgaaatgggggagcattttgagagcgtgattttgcctcgccttaaaaaggttataggcggttttaaaagcggcgcgcttaaagaatttaatggaggtggggtaatcaaagtttatgaattggaaagctatgaagagattttaagaaaaatcaagtatgaagacaacgacaagcccctagcttatgaggaacaatacagcgatttagtggagcgcaaaaacgagtcttacacgctcaatatagaagcgctagaaaacatgggcgtggatattaaagagactttggaaaatttacacggcgttggagtggagtttttcaatgaaaaggtggtgaaatttaaagggaatgataaagaagtgagcattttaaaagccttaaaagaagcgctcatttgg

SEQ ID NO: 2654 - DNA (genomic), 1950 bp, Helicobacter pylori; double-stranded, circular
  misc_feature (B) LOCATION 1...1950
  hypothetical: NO
  anti-sense: NO
gtgaaaagcgaaacgatttataaggatttttgctttgaattagagggcattctttttaactttgacacttctttactagaaagcaaaaagtataatgaaaaagtggatttaatctttgatttaaaaagtatagtaaaagataaagacacaaaaactaacaccctgaattttagcgttactcttagcagtaaggggactcaaacaaaaacgaatgaaatcctaaaagaatgctccaatcaaggcgtcaaacttgatgaagaaatcttaaaaaaagcgtttgtgaaattcaaaaagcaaggcagcatggattattttattcataaaaacgcgcaagggtttttaaaagagcagttggatttgtatctgtttgaatacctttttaaagaaatgaccgcatttgatcacaaacgccttaatggaatcaacaccattaaagaagtggctttagaagtgattgcattagtgagcgaatttgaaaacgaactttgtaagatttggaacaaaccccgcttggtgttaaactcgcatttcatcgtaagcctagacaaattgaaagccaaaaactacgatttgagtaaaatcacaaaccacccaaactaccccaaacaagttaaagaatggcaagacttgaatttagagatcgcagacaatcttttaggaaacgagttcttgcccctagacaccctctattttaaagatttagaagaagaggttaaaagcttattcaatgaaaatgaaatcaacggcacgctcattaaaagcgaaaactaccaagccctaaactcccttaaaaaccgctataaagaagccattgattgcatttatattgatccgccctttaataccggtagcgattttgcttacatagacaggtttcaagatagcacatggctaagccttatgcataaccgcttgcaactcgcttatgattttttaagccctcaagggaacttctatttgcatttggattatagggcgaattatttggggcgtatgctacttaatgatatttttagtaaagaaaattttaggaatgagataatttggcattttaggacttatcaaggacaaattcaaagtaattttccaagaaagcacgattcactattgtggtattcaaaaaattgcaatgtaaataatttttttaaaattacatattcagataattataaagatacggttgactatagaagatggagagagtttatcgttgataataataaaattgtatatccaaattatccaaaggcagatagtagatttgatgggtatttaaaaaggtatttacagtctacaaaagaaccaaagaatggagatattatcgcaactattaatggttatgtcatagatgatgtttggacagatattcaagcaatagatccaaaaaaggctgatgagcgcttacaagggactttaacccaaaaaccggaaaaattgctagaaaggataatcaaagcgagcagtaacgaaaactctatcgtgtgcgattttttcgctgggagcgggacgacttgcgcggtggcgcacaagttgaaaaggaagtatatcggtgttgaaatgggggagcattttgagagcgtgattttgcctcgccttaaaaaggttataggcggttttaaaagcggcgcgcttaaagaatttaatggaggtggggtaatcaaagtttatgaattggaaagctatgaagagattttaagaaaaatcaagtatgaagacaacgacaagcccctagcttatgaggaacaatacagcgatttagtggagcgcaaaaacgagtcttacacgctcaatatagaagcgctagaaaacatgggcgtggatattaaagagactttggaaaatttacacggcgttggagtggagtttttcaatgaaaaggtggtgaaatttaaagggaatgataaagaagtgagcattttaaaagccttaaaagaagcgctcatttggtaa

SEQ ID NO: 2655 - DNA (genomic), 654 bp, Helicobacter pylori; double-stranded, circular
  misc_feature (B) LOCATION 1...654
  hypothetical: NO
  anti-sense: NO
aaaagatcaaacgactataaaaggataaaaatggatcatttaaagcatttgcaacaattgcaaaacattgaaaggatcgtgctttcaggcattgtgttagccaatcataagattgaagagatccatagcgttttagagcctagcgacttttactacccgccccatggcttgttttttgaaatcgctttgaaactccatgaagtgaattgccctattgatgagaattttatccgccaaaaaatgcccaaagacaagcaaatcagcgaagacgatctagtcgctatttttgcggcaagcccgatagacaatattgaagcctatgtggaagagatcaaaaacgcttccattaaacgaaagcttttcactttggccaacaccattagagagcaagctttagaaagcgcgcaaaaatccagcgatattttaaacgctgtggagcgagaagtctatgcgttattgaatggcagcacgattgagggctttaggggtattaaagaagtgcttgaaagcacaatgaatcttatcacagaaaaccaaagaaaagggagtttaaaagttaccggtataccgactggctttgtccaattggataattacacgagcggttttaatcaagggagtttagtcatttcaggggcaaggcccgttcatggg

SEQ ID NO: 2656 - DNA (genomic), 864 bp, Helicobacter pylori; double-stranded, circular
  misc_feature (B) LOCATION 1...864
  hypothetical: NO
  anti-sense: NO
tcatttcaggggcaaggcccgttcatgggtaaaaccagtttgatgatgaacatggtcttatccgcgctcaatgacgataggggggtagcggtttttagtttggaaatgtccgcagagcaactcgctttaagggcgctatcggatctcacttctattaacatgcatgatttagagagcgcaaggcttgatgatgatcaatgggaaaatttagccaaatgctttgatcacctttcgcaaaaaaaactctttttttatgataaaagttacgtgagaatggatcaaatccgcttgcaactacgaaagcttaaatcccaacacaaggaattgggtatcgcttttattgattatttgcagctcatgtcagggaacaaagccactaaagagcgccatgaacaaatcgctgaaatttcaagggagcttaaaactttagccagagaattagaaatccctatcatagcgttagtgcaactcaaccgcagcctagaaaatagggacgataaacggcccattctttcggatattaaagacagcggagggattgaacaggacgctgatattgttttatttttgtatagaggctatatctatcaaatgagggctgaagacaacaaaatagacaagctcaaaaaagaaggcaaggttgaagaggcgcaagagttacacctaaaagttaatgaagaaaggcgtatccacaagcaaaatggcagtattgaagaggctgaaatcattgtggctaaaaacatgaatggggctacaggaacggtttatacgcgctttaacgctcctttcacgcgctatgaagacatgcctgtggattctcatttagaagagggacaagaaactaaatttgaaatgcccacaact

SEQ ID NO: 2657 - DNA (genomic), 1461 bp, Helicobacter pylori; double-stranded, circular
  misc_feature (B) LOCATION 1...1461
  hypothetical: NO
  anti-sense: NO
atggatcatttaaagcatttgcaacaattgcaaaacattgaaaggatcgtgctttcaggcattgtgttagccaatcataagattgaagagatccatagcgttttagagcctagcgacttttactacccgccccatggcttgttttttgaaatcgctttgaaactccatgaagtgaattgccctattgatgagaattttatccgccaaaaaatgcccaaagacaagcaaatcagcgaagacgatctagtcgctatttttgcggcaagcccgatagacaatattgaagcctatgtggaagagatcaaaaacgcttccattaaacgaaagcttttcactttggccaacaccattagagagcaagctttagaaagcgcgcaaaaatccagcgatattttaaacgctgtggagcgagaagtctatgcgttattgaatggcagcacgattgagggctttaggggtattaaagaagtgcttgaaagcacaatgaatcttatcacagaaaaccaaagaaaagggagtttaaaagttaccggtataccgactggctttgtccaattggataattacacgagcggttttaatcaagggagtttagtcattctaggggcaaggccgtctatgggtaaaaccagtttgatgatgaacatggtcttatccgcgctcaatgacgataggggggtagcggtttttagtttggaaatgtccgcagagcaactcgccttaagggcgctatcggatctcacttctattaacatgcatgatttagagagcgcaaggcttgatgatgatcaatgggaaaatttagccaaatgctttgatcacctttcgcaaaaaaaactctttttttatgataaaagttacgtgagaatggatcaaatccgcttgcaactacgaaagcttaaatcccaacacaaggaattgggtatcgcttttattgattatttgcagctcatgtcagggaacaaagccactaaagagcgccatgaacaaatcgctgaaatttcaagggagcttaaaactttagccagagaattagaaatccctatcatagcgttagtgcaactcaaccgcagcctagaaaatagggacgataaacggcccattctttcggatattaaagacagcggagggattgaacaggacgctgatattgttttatttttgtatagaggctatatctatcaaatgagggctgaagacaacaaaatagacaagctcaaaaaagaaggcaaggttgaagaggcgcaagagttacacctaaaagttaatgaagaaaggcgtatccacaagcaaaatggcagtattgaagaggctgaaatcattgtggctaaaaacaggaatggggctacaggaacggtttatacgcgctttaacgctcctttcacgcgctatgaagacatgcctgtggattctcatttagaagagggacaagaaactaaatttgaaatgcccacaacttga

SEQ ID NO: 2658 - DNA (genomic), 1080 bp, Helicobacter pylori; double-stranded, circular
  misc_feature (B) LOCATION 1...1080
  hypothetical: NO
  anti-sense: NO
atggattttttaaaagaaaacttaaacactatcatagagggggattgtttagaaaaattgaaagattttcctaataaaagcgttgattttatctttgctgaccccccatattttatgcaaacagagggggaattgaagcgttttgaaggcacaaaatttcaaggcgttgaggatcattgggataaatttggctcttttgaagaatacgataccttttgtttgggttggttaaaagaatgccaaaggattttaaaagataatggcagtatttgtgtgatagggagttttcaaaatatttttagaattggttttcatttgcaaaatttagggttttggatactcaatgatattgtttggcacaagagcaatccggtgcctaattttgctggcaagagactatgcaacgcccatgaaacgcttatttggtgcgctaaacacaaaaatagcaaagttacctttaattataaaacaatgaagtacctcaataacgacaaacaagaaaaatcggtttggcaaatccctatttgcatgggtaacgaaaggctaaaagacgtgcaaggtaaaaaagtgcattccacgcaaaaaccagaagcactcttaaaaaaaatcattttaagcgcgactaaacctaaagacattattttagatcccttttttggcacaggcacaacaggggctgtggctaaatctatggataggtattttattggcattgaaaaagattctttttatattaaagaagcggcaaaacgccttaatagcactagggataaaagcgattttatcactaatttagaattagaaactaaacccccaaaaatccctatgagtcttttaatttctaaacaattattaaaaatcggggattttttatactcatctaacaaagaaaaaatttgtcaagttttagaaaacggacaagtgagggataatgaaaattatgaaacttctattcataaaatgagcgctaaatatttgaataaaaccaaccataatggctggaaatttttttatgcgtattatcaaaatcaatttttgttgctagatgaattgcgttatatctgccaaagggactcttaa

SEQ ID NO: 2659 - DNA (genomic), 1212 bp, Helicobacter pylori; double-stranded, circular
  misc_feature (B) LOCATION 1...1212
  hypothetical: NO
  anti-sense: NO
tcaatcatggattttttaaaagaaaacttaaacactatcatagagggggattgtttagaaaaattgaaagattttcctaataaaagcgttgattttatctttgctgaccccccatattttatgcaaacagagggggaattgaagcgttttgaaggcacaaaatttcaaggcgttgaggatcattgggataaatttggctcttttgaagaatacgataccttttgtttgggttggttaaaagaatgccaaaggattttaaaagataatggcagtatttgtgtgatagggagttttcaaaatatttttagaattggttttcatttgcaaaatttagggttttggatactcaatgatattgtttggcacaagagcaatccggtgcctaattttgctggcaagagactatgcaacgcccatgaaacgcttatttggtgcgctaaacacaaaaatagcaaagttacctttaattataaaacaatgaagtacctcaataacgacaaacaagaaaaatcggtttggcaaatccctatttgcatgggtaacgaaaggctaaaagacgtgcaaggtaaaaaagtgcattccacgcaaaaaccagaagcactcttaaaaaaaatcattttaagcgcgactaaacctaaagacattattttagatcccttttttggcacaggcacaacaggggctgtggctaaatctatggataggtattttattggcattgaaaaagattctttttatattaaagaagcggcaaaacgccttaatagcactagggataaaagcgattttatcactaatttagaattagaaactaaacccccaaaaatccctatgagtcttttaatttctaaacaattattaaaaatcggggattttttatactcatctaacaaagaaaaaatttgtcaagttttagaaaacggacaagtgagggataatgaaaatagggggaagcacaaacaacgagaccccccctctcccccccctctcttccgccgcccccccctctttttatttttccccccccacccccccccgccgggggggggttcttttttctcccacccccttttttttttttttataatgaaaaataccccccggggcgcgcgcagcggttctcgccccccccccaataatatttattttttttttggttggggcgcgcccccaacaaaaatttccaccccccccacccctggcgattttaac

SEQ ID NO: 2660 - DNA (genomic), 321 bp, Helicobacter pylori; double-stranded, circular
  misc_feature (B) LOCATION 1...321
  hypothetical: NO
  anti-sense: NO
agaattacaagaacgcatgcaaaaagaatatttaaaacactaccacgaactaaacgcatgaagctttttgactacgctcctttgagtttggcttggcgggagtttttgcaaagcgaatttaaaaagccttattttttagagatagaaaaacgctacttagaagccctaaaaagccctaaaaccattttccctaaaagctctaatctgttttgcgcgttcaatctaacgcccccttatgcggttaaaatcattcttttagggcaagacccctaccattccacctacctagaaaatgaacaagaatgccggtggcgatgggct

SEQ ID NO: 2661 - DNA (genomic), 561 bp, Helicobacter pylori; double-stranded, circular
  misc_feature (B) LOCATION 1...561
  hypothetical: NO
  anti-sense: NO
atgaagctttttgactacgctcctttgagtttggcttggcgggagtttttgcaaagcgaatttaaaaagccttattttttagagatagaaaaacgctacttagaagccctaaaaagccctaaaaccattttccctaaaagctctaatctgttttgcgcgttcaatctaacgcccccttatgcggttaaaatcattcttttagggcaagacccctaccattccacctacctagaaaatgaacaagaattgccggtggcgatgggcttgagctttagcgtggaaaaaaacgcccccatccccccaagcttaaaaaatatttttaaagaattgcatgcgaatttgggtgtgcctgtgccttgttgtggggatttgagcgcatgggctaaaaggggcatgctgttattgaatgccattttaagcgtggaaaaaaaccaagccgcttcgcacaaatatatcggctgggaagcttttagcgatcaaatactgattcgcctttttgaaacgaccacccctttaatcgtggtgttactagggaaagtcgcccaaaaaagatcgcgctaa

SEQ ID NO: 2662 - DNA (genomic), 702 bp, Helicobacter pylori; double-stranded, circular
  misc_feature (B) LOCATION 1...702
  hypothetical: NO
  anti-sense: NO
atgaagctttttgactacgctcctttgagtttggcttggcgggagtttttgcaaagcgaatttaaaaagccttattttttagagatagaaaaacgctacttagaagccctaaaaagccctaaaaccattttccctaaaagctctaatctgttttgcgcgttcaatctaacgcccccttatgcggttaaaatcattcttttagggcaagacccctaccattccacctacctagaaaatgaacaagaattgccggtggcgatgggcttgagctttagcgtggaaaaaaacgcccccatccccccaagcttaaaaaatatttttaaagaattgcatgcgaatttgggtgtgcctgtgccttgttgtggggatttgagcgcatgggctaaaaggggcatgctgttattgaatgccattttaagcgtggaaaaaaaccaagccgcttcgcacaaatatatcggctgggaagcttttagcgatcaaatactgattcgcctttttgaaacgaccacccctttaatcgtggtgttactagggaaagtcgcccaaaaaaagatcgcgctaatccctaaaaacaaacacatcatcatcacagcccctcaccccagtccattatctagggggtttttagggagtggggtttttacaagcgttcaaaaagcttatagagaggtttatcgtaaggattttgattttagtttgtga

SEQ ID NO: 2663 - DNA (genomic), 582 bp, Helicobacter pylori; double-stranded, circular
  misc_feature (B) LOCATION 1...582
  hypothetical: NO
  anti-sense: NO
atgaatacttataaaaacagcttgaatcactttttaaatttagtggattgtttagaaaaaatccccaatgtgggtaaaaagtccgcctttaaaatggcgtatcatttgggtttggaaaacccttatctggcgcttaagatcacgcacgctttaagaaacgccctagaaaaccttaaaacatgcgcatcttgtaacgcgctcagcgagactgaggttagtgagatttgctctgatgagagccggcaaaattctcagctttgcatggttttacacccaagagacgtgtttattttagaagacttaaaggactttttagggcgctattatgtgttaaattctatagaagacgtggattttaacgccctagaaaaacgcctgattggagaaaacattaaagaaatcatttttgctttccctcccactttagctaatgattctttaatgctctatattgaagataaattacaacacctccacctcactttcactaaaatcgctcaaggcgtgcctactggagtgaattttgaaaacattgactccgtttcgctctcaagggcgtttaattcaaggatcaaggcatga

SEQ ID NO: 2664 - DNA (genomic), 588 bp, Helicobacter pylori; double-stranded, circular
  misc_feature (B) LOCATION 1...588
  hypothetical: NO
  anti-sense: NO
tatactaacagaatgaatacttataaaaacagcttgaatcactttttaaatttagtggattgtttagaaaaaatccccaatgtgggtaaaaagtccgcctttaaaatggcgtatcatttgggtttggaaaacccttatctgccacttaatgatcacgcacgctttagaaacgcccaggagcctaatccattcgcatcttgtaacgcctcagcgagactgaggtcgtgtgagatttgctctgatgagagccgcccaaattctcagctttgcatggttttacacccaagagacgtgtttattttagaagacttaaaggactttttagggcgctattatgtgttaaattctatagaagacgtggattttaacgccctagaaaaacgcctgattggagaaaacattaaagaaatcatttttgctttccctcccactttagctaatgattctttaatgctctatattgaagataaattacaacacctccacctcactttcactaaaatcgctcaaggcgtgcctactggagtgaattttgaaaacattgactccgtttcgctctcaagggcgtttaattcaaggatcaaggca

SEQ ID NO: 2665 - DNA (genomic), 441 bp, Helicobacter pylori; double-stranded, circular
  misc_feature (B) LOCATION 1...441
  hypothetical: NO
  anti-sense: NO
ctcaccaaactccagtatgaggtgactcaaaacaaacactctgagaaaccttttgagaatgagtattacaaccaagaagaagagggtatttatgtggatattaccaccggcgagccgttattttcttcagcggataaatacgactccggttgcgggtggccaagcttttctaagcccatcaataaagatgtggtgaaatacgaagacgatgagagccttaacaggaaacgcattgaagtgttgagccgtattggtaaggcgcatttagggcatgtgtttaacgatgggcctaaagaattgggaggcttaaggtattgcatcaatagtgcggctttaaggtttatccctttaaaagacatggaaaaagagggctatggcgagttcatcccttatatcaaaaagggtgaattgaaaaaatacatccaagataaaaagtcgcat

SEQ ID NO: 2666 - DNA (genomic), 531 bp, Helicobacter pylori; double-stranded, circular
  misc_feature (B) LOCATION 1...531
  hypothetical: NO
  anti-sense: NO
ctccctaaaaccgatgaaagagtgatttacttggctggggggtgcttttgggggctagaggcgtatatggagaggatttatggcgttatagacgcaagctctggttacgctaacggcaaaacttcaagcacgaattatgaaaagttgcatgagagcgatcatgctgaaagcgtgaaagtgatctatgatcctaaaaagatcagtctggacaagttgctacgctattattttaaggtgattgatccagtgagcgtgaacaagcagggtaatgatgtgggcaggcagtatcgcacagggatttactatgtcaatagcgcggataaagaagtgatagacaacgccttaaaagcgttacaaaaagaagtgaaaggcaaaatcgccattgaggtagagccgttaaaaaattatgtgagggctgaagagtatcaccaggattatttgaaaaaacaccctggtggttattgccatattgatttgaaaaaggcggatgaagtgattgtggatgacgataaatacagtcttcaccacggg

SEQ ID NO: 2667 - DNA (genomic), 525 bp, Helicobacter pylori; double-stranded, circular
  misc_feature (B) LOCATION 1...525
  hypothetical: NO
  anti-sense: NO
cctaaaaccgatgaaagagtgatttacttggctggggggtgcttttgggggctagaggcgtatatggagaggatttatggcgttatagacgcaagctctggttacgctaacggcaaaacttcaagcacgaattatgaaaagttgcatgagagcgatcatgctgaaagcgtgaaagtgatctatgatcctaaaaagatcagtctggacaagttgctacgctattattttaaggtgattgatccagtgagcgtgaacaagcagggtaatgatgtgggcaggcagtatcgcacagggatttactatgtcaatagcgcggataaagaagtgatagacaacgccttaaaagcgttacaaaaagaagtgaaaggcaaaatcgccattgaggtagagccgttaaaaaattatgtgagggctgaagagtatcaccaggattatttgaaaaaacaccctggtggttattgccatattgatttgaaaaaggcggatgaagtgattgtggatgacgataaatacagtcttcaccac

SEQ ID NO: 2668 - DNA (genomic), 1086 bp, Helicobacter pylori; double-stranded, circular
  misc_feature (B) LOCATION 1...1086
  hypothetical: NO
  anti-sense: NO
ttgtcaatgaaaatattatcttatttgaaaaaattttatctttttctactaataggagcgatcatgcaagcgaatgaaagcatgggggctaaactccctaaaaccgatgaaagagtgatttacttggctggggggtgcttttgggggctagaggcgtatatggagaggatttatggcgttatagacgcaagctctggttacgctaacggcaaaacttcaagcacgaattatgaaaagttgcatgagagcgatcatgctgaaagcgtgaaagtgatctatgatcctaaaaagatcagtctggacaagttgctacgctattattttaaggtgattgatccagtgagcgtgaacaagcagggtaatgatgtgggcaggcagtatcgcacagggatttactatgtcaatagcgcggataaagaagtgatagacaacgccttaaaagcgttacaaaaagaagtgaaaggcaaaatcgccattgaggtagagccgttaaaaaattatgtgagggctgaagagtatcaccaggattatttgaaaaaacaccctggtggttattgccatattgatttgaaaaaggcggatgaagtgattgtggatgacgataaatacaccaaacccagcgatgaagttttaaagaaaaaactcaccaaactccagtatgaggtgactcaaaacaaacacactgagaaaccttttgagaatgagtattacaacaaagaagaagagggtatttatgtggatattaccaccggcgagccgttattttcttcagcggataaatacgactccggttgcgggtggccaagcttttctaagcccatcaataaagatgtggtgaaatacgaagacgatgagagccttaacaggaaacgcattgaagtgttgagccgtattggtaaggcgcatttagggcatgtgtttaacgatgggcctaaagaattgggaggcttaaggtattgcatcaatagtgcggctttaaggtttatccctttaaaagacatggaaaaagagggctatggcgagttcatcccttatatcaaaaagggtgaattgaaaaaatacatccaagataaaaagtcgcattaa

SEQ ID NO: 2669 - DNA (genomic), 519 bp, Helicobacter pylori; double-stranded, circular
  misc_feature (B) LOCATION 1...519
  hypothetical: NO
  anti-sense: NO
ggccgtttgactaggaatgtggagttgaaatatttgcctagcggttcggctgcggctacaataggtttagccacaagcaggcgttttaaaaagcaagacggcacgctaggcgaagaagtgtgctttatagatgcgcgtttgttgggccgaacggctgaaatcgctaaccagtatttgagcaagggttcaagcgttttgatagaaggccgtttgacttatgagagctggatggatcaaacgggcaaaaaaaattcccgccacactatcacagcggactcgttgcaatttatggataaaaagtcagacaatccccaagcaaactccatgcaagatagcatgacgcatgagaattttaacaacgcttatcccactaattataacgcccctagccaggatcctttcagccaagcccaaagctatccacaaaacgcttacactaaagaaaattcacaagcacagccgtccaagtatcaaaacagcgtgcctgaaatcaatattgatgaagaagaaatccccttt

SEQ ID NO: 2670 - DNA (genomic), 546 bp, Helicobacter pylori; double-stranded, circular
  misc_feature (B) LOCATION 1...546
  hypothetical: NO
  anti-sense: NO
atgtttaataaggtgattatggtagggcgtttgactaggaatgtggagttgaaatatttgcctagcggttcggctgcggctacaataggtttagccacaagcaggcgttttaaaaagcaagacggcacgctaggcgaagaagtgtgctttatagatgcgcgtttgttcgggcgaacggctgaaatcgctaaccagtatttgagcaagggttcaagcgttttgatagaaggccgtttgacttatgagagctggatggatcaaacgggcaaaaaaaattcccgccacactatcacagcggactcgttgcaatttatggataaaaagtcagacaatccccaagcaaactccatgcaagatagcatgacgcatgagaattttaacaacgcttatcccactaattataacgcccctagccaggatcctttcagccaagcccaaagctatccacaaaacgcttacactaaagaaaattcacaagcacagccgtccaagtatcaaaacagcgtgcctgaaatcaatattgatgaagaagaaatccccttttaa

SEQ ID NO: 2671 - DNA (genomic), 990 bp, Helicobacter pylori; double-stranded, circular
  misc_feature (B) LOCATION 1...990
  hypothetical: NO
  anti-sense: NO
atgaactatatcggctctaaatacaagctcattccctttattaaggaaaatatccatgcggttgcaggccatgatctctctggtgcgattttttgtgatctgttcgctgggacgggcattgtggggcgcacgtttaaaaaagccgttaataaggttatttctaatgacttggagtattatagctttgttttgaatcaaaattatatcggcaatatccaagaaatccccaataaagaagagcttattaataagattaatagcgttgctttaaaaaagggctttatctattcgcattattctttaggggggagttcaaggcagtattttagcgaaacaaacgctcaaaaaattgatgcgatgcgtctaaaaattgaagagcttaagctttctcaaaatattgataaccattcgtattactttttgctcgcatcgttattagagagcgcggacaaggtagctaacaccgcttcagtttatggggcttttttaaaacgccttaaaaaaagcgctcaaaaagaactcattttaaaaggcgctcattttgatgtgagtttaaacgctaatgaagtgtaccagcaggattctaatgatttgattggaaagatttcaggggatattttgtatttagaccctccttacaatgcgaggcaatatggggcgaattaccatttgttgaacacgattgctgcttatacgccctttactccaaaaggtaaaaccgacttgcccagttaccaaaaatcctctttttgctctcgttttcaaatcttaaacgcttttgaaaatttaatcaaaaaagcgcgattcaaatatatctttttaagctataacaatgaagggcttatgagcgagacagagattaaaaatatcttaaaaaaatacggtgcttactccttagttactaaaacttacatgcgttttaaagcggacaacaaacgcgcccataaagccgtgcacaccaaagagtgtttgcatgttcttatcaaataa

SEQ ID NO: 2672 - DNA (genomic), 1062 bp, Helicobacter pylori; double-stranded, circular
  misc_feature (B) LOCATION 1...1062
  hypothetical: NO
  anti-sense: NO
atgttacaatacataaaatttaattttaataatagccatatttattttaaagaagcatacaaacatagatcaatgaactatatcggctctaaatacaagctcattccctttattaaggaaaatatccatgcggttgcaggccatgatctctctggtgcgattttttgtgatctgttcgctgggacgggcattgtggggcgcacgtttaaaaaagccgttaataaggttatttctaatgacttggagtattatagctttgttttgaatcaaaattatatcggcaatatccaagaaatccccaataaagaagagcttattaataagattaatagcgttgctttaaaaaagggctttatctattcgcattattctttaggggggagttcaaggcagtattttagcgaaacaaacgctcaaaaaattgatgcgatgcgtctaaaaattgaagagcttaagctttctcaaaatattgataaccattcgtattactttttgctcgcatcgttattagagagcgcggacaaggtagctaacaccgcttcagtttatggggcttttttaaaacgccttaaaaaaagcgctcaaaaagaactcattttaaaaggcgctcattttgatgtgagtttaaacgctaatgaagtgtaccagcaggattctaatgatttgattggaaagatttcaggggatattttgtatttagaccctccttacaatgcgaggcaatatggggcgaattaccatttgttgaacacgattgctgcttatacgccctttactccaaaaggtaaaaccgacttgcccagttaccaaaaatcctctttttgctctcgttttcaaatcttaaacgcttttgaaaatttaatcaaaaaagcgcgattcaaatatatctttttaagctataacaatgaagggcttatgagcgagacagagattaaaaatatcttaaaaaaatacggtgcttactccttagttactaaaacttacatgcgttttaaagcggacaacaaacgcgcccataaagccgtgcacaccaaagagtgtttgcatgttcttatcaaataa

SEQ ID NO: 2673 - DNA (genomic), 1092 bp, Helicobacter pylori; double-stranded, circular
  misc_feature (B) LOCATION 1...1092
  hypothetical: NO
  anti-sense: NO
tcgtgggggttaagacttattcataatcaagttatgttacaatacataaaatttaattttaataatagccatatttattttaaagaagcatacaaacatagatcaatgaactatatcggctctaaatacaagctcattccctttattaaggaaaatatccatgcggttgcaggccatgatctctctggtgcgattttttgtgatctgttcgctgggacgggcattgtggggcgcacgtttaaaaaagccgttaataaggttatttctaatgacttggagtattatagctttgttttgaatcaaaattatatcggcaatatccaagaaatccccaataaagaagagcttattaataagattaatagcgttgctttaaaaaagggctttatctattcgcattattctttaggggggagttcaaggcagtattttagcgaaacaaacgctcaaaaaattgatgcgatgcgtctaaaaattgaagagcttaagctttctcaaaatattgataaccattcgtattactttttgctcgcatcgttattagagagcgcggacaaggtagctaacaccgcttcagtttatggggcttttttaaaacgccttaaaaaaagcgctcaaaaagaactcattttaaaaggcgctcattttgatgtgagtttaaacgctaatgaagtgtaccagcaggattctaatgatttgattggaaagatttcaggggatattttgtatttagaccctccttacaatgcgaggcaatatggggcgaattaccatttgttgaacacgattgctgcttatacgccctttactccaaaaggtaaaaccgacttgcccagttaccaaaaatcctctttttgctctcgttttcaaatcttaaacgcttttgaaaatttaatcaaaaaagcgcgattcaaatatatctttttaagctataacaatgaagggcttatgagcgagacagagattaaaaatatcttaaaaaaatacggtgcttactccttagttactaaaacttacatgcgttttaaagcggacaacaaacgcgcccataaagccgtgcacaccaaagagtgtttgcatgttcttatcaaa

SEQ ID NO: 2674 - DNA (genomic), 444 bp, Helicobacter pylori; double-stranded, circular
  misc_feature (B) LOCATION 1...444
  hypothetical: NO
  anti-sense: NO
gcaatgaagaaattgaaaaatacttgggcgctaacaacgcgcccaatctcaaaaaggaacattaaatatggattttatcaccatcaactctgtaacagaaccgaagagttcgctctcaaacaagtggccaaacaagccactagctctttaatgtatcgcttaggaaaaacccttattttagcgagcgtgtgcgtagaaagagagcctgtgagtgaagattttttgcctttagtggtgcagtttttagaaaaatcgtatgcagccggtaaaatcccgggcggttttgttaaaagagaaggcagggcgcaagattttgaaatcttaacctctaggctcatagacaggactttacgccctttattccctaaagattaccgctaccctacgcaaatcactttaatggttttaaaccatgatattgaaacgatttgcaagtttctgctt

SEQ ID NO: 2675 - DNA (genomic), 567 bp, Helicobacter pylori; double-stranded, circular
  misc_feature (B) LOCATION 1...567
  hypothetical: NO
  anti-sense: NO
ccctgcgcaagccttttgaatcaatccagtttggatctgttcgtgtccggcaccaaagagagtttgaacatgatagaaatgcgctctttggggcaaaaattaaacgctttagaagagcctttaatgttagaagctttagaattggctcaaaaaagtttgaaagaaacctgcgcgctttatgaagaggctttcacgccctatcaaaacgagttcctttttaaagagggcgaagggatagtccttaatgaaaggctgttggatttattaaaaaatcagtattttgatgaaatcatcaaaggcattgaaagttctgctttgagcgagcgagaaaatgttttcagagaagtggctaaaaaaatctgcgaagcccactcagaattcagtttagaagaaattgaattgtctttagaaaaagtgaaaaaaaccgagatcagacgcatgattattcaagataagatccgcccggataagcgcgcgttagaagaagtgcggcccatttcaatagagagcaacttgctccctatggcacacagctccattttattactagggggcaaactcaaagct

SEQ ID NO: 2676 - DNA (genomic), 591 bp, Helicobacter pylori; double-stranded, circular
  misc_feature (B) LOCATION 1...591
  hypothetical: NO
  anti-sense: NO
gcgcgcgttagaagaagtgcggcccatttcaatagagagcaacttgctccctatggcacacagctccattttattactagggggcaaactcaaagcttagtggtaggggttttaggcatggataatgacgctcaaacccatgagaatttggagcataaagcccctatcaaagaacgcttcatgtttcattacaatttccctcctttttgcgtgggcgaagcgagctctattggcgcgacttcaaggcgcgaattagggcatgggaatttagctaaaagagctttagaaacgagcattaaaaataaagagcaggtgatacgattggtttctgagattttagagagcaatggtccaagctcaatggcgagcgtgtgcgcagggtctttagccctttatgcaagcggtgtggaaattcatgatttagtcgctggggtggctatgggcatggtgagcgaaaggcaagatcacgccattttaagcgatattagcggtttagaagacgccgaaggcgatatggattttaagattgctgggaatttagaaggcattacggctatgcaaatggataccaaaatgagcggtatccaatgg

SEQ ID NO: 2677 - DNA (genomic), 1050 bp, Helicobacter pylori; double-stranded, circular
  misc_feature (B) LOCATION 1...1050
  hypothetical: NO
  anti-sense: NO
atggattttatcaccatcaactctggtaacagaaccgaagagttcgctctcaaacaagtggccaaacaagccactagctctttaatgtatcgcttaggaaaaacccttattttagcgagcgtgtgcgtagaaagagagcctgtgagtgaagattttttgcctttagtggtgcagtttttagaaaaatcgtatgcagccggtaaaatcccgggcggttttgttaaaagagaaggcagggcgcaagattttgaaatcttaacctctaggctcatagacaggactttacgccctttattccctaaagattaccgctaccctacgcaaatcactttaatggttttaaaccatgatattgaaaacgatttgcaagtttctgctttaaacgccgcttcagccaccctctttttagcccatatcgctcctattaaaagcgtgagcgcttgcaggatcgctagggtggataacgaatttatcattaaccctagcgcaagccttttgaatcaatccagtttggatctgttcgtgtccggcaccaaagagagtttgaacatgatagaaatgcgctctttggggcaaaaattaaacgctttagaagagcctttaatgttagaagctttagaattggctcaaaaaagtttgaaagaaacctgcgcgctttatgaagaggctttcacgccctatcaaaacgagctcctttttaaagagggcgaagggatagtccttaatgaaaggctgttggatttattaaaaaatcagtattttgatgaaatcatcaaaggcattgaaagttctgctttgagcgagcgagaaaatgttttcaaagaagtggctaaaaaaatcagcgaagcccactcagaattcagtttagaagaaattgaattgtctttagaaaaagtgaaaaaaaccgagatcagacgcatgattattcaagataagatccgcccggataagcgcgcgttagaagaagtgcggcccatttcaatagagagcaacttgctccctatggcacacagctccattttattactagggggcaaactcaaagcttag

SEQ ID NO: 2678 - DNA (genomic), 2100 bp, Helicobacter pylori; double-stranded, circular
  misc_feature (B) LOCATION 1...2100
  hypothetical: NO
  anti-sense: NO
caacgcgcccaatctcaaaaaggaacattaaatatggattttatcaccatcaactctggtaacagaaccgaagagttcgctctcaaacaagtggccaaacaagccactagctctttaatgtatcgcttaggaaaaacccttattttagcgagcgtgtgcgtagaaagagagcctgtgagtgaagattttttgcctttagtggtgcagtttttagaaaaatcgtatgcagccggtaaaatcccgggcggttttgttaaaagagaaggcagggcgcaagattttgaaatcttaacctctaggctcatagacaggactttacgccctttattccctaaagattaccgctaccctacgcaaatcactttaatggttttaaaccatgatattgaaaacgatttgcaagtttctgctttaaacgccgcttcagccaccctctttttagcccatatcgctcctattaaaagcgtgagcgcttgcaggatcgctagggtggataacgaatttatcattaaccctagcgcaagccttttgaatcaatccagtttggatctgttcgtgtccggcaccaaagagagtttgaacatgatagaaatgcgctctttggggcaaaaattaaacgctttagaagagcctttaatgttagaagctttagaattggctcaaaaaagtttgaaagaaacctgcgcgctttatgaagaggctttcacgccctatcaaaacgagctcctttttaaagagggcgaagggatagtccttaatgaaaggctgttggatttattaaaaaatcagtattttgatgaaatcatcaaaggcattgaaagttctgctttgagcgagcgagaaaatgttttcaaagaagtggctaaaaaaatcagcgaagcccactcagaattcagtttagaagaaattgaattgtctttagaaaaagtgaaaaaaaccgagatcagacgcatgattattcaagataagatccgcccggataagcgcgcgttagaagaagtgcggcccatttcaatagagagcaacttgctccctatggcacacagctccattttattcactagggggcaaactcaaagcttagtggtaggggttttaggcatggataatgacgctcaaacccatgagaatttggagcataaagcccctatcaaagaacgcttcatgtttcattacaatttccctcctttttgcgtgggcgaagcgagctctattggcgcgacttcaaggcgcgaattagggcatgggaatttagctaaaagagctttagaaacgagcattaaaaataaagagcaggtgatacgattggtttctgagattttagagagcaatggttcaagctcaatggcgagcgtgtgcgcagggtctttagccctttatgcaagcggtgtggaaattcatgatttagtcgctggggtggctatgggcatggtgagcgaaaggcaagatcacgccattttaagcgatattagcggtttagaagacgccgaaggcgatatggattttaagattgctgggaatttagaaggcattacggctatgcaaatggataccaaaatgagcggtatccaattagaggttttataccaagccttacttcaagccaaaagagcacggaaacacattttaaaaatcatgcatgaagcgaaagaaaagatcgtgatcaatttttcccatttgccccagactgaaatttttaatgtcgcaccagataaaattatagaaattatcggtcaaggggggcgtgtgattaaagagatagtggaaaaatttgaggttaagattgatttgaacacaccgagcggtgaagtgaaaatcatggggaataaagagcgtgttttaaaaactaaagaatttattttaaactatttgcattctttagatcaagaattggagcaatacgctattgatgaggtgctagaagctcaagtgaagagaatcgtggattttggggcgtttttaagcttgcctaaggggggcgaaggcttgttaagaaagcaaaacatggacaagtgtcaagtgatcttaaaagaaggcgatagcatcaggtgtagggtgattagtttcaataagggtaaaatcgctttggatttggcttaa

SEQ ID NO: 2679 - DNA (genomic), 327 bp, Helicobacter pylori; double-stranded, circular
  misc_feature (B) LOCATION 1...327
  hypothetical: NO
  anti-sense: NO
ggttgctttgtgaaaaactccaaccgccttatttatacggacaatcttgaagagagcctagaagaggccgcaagccttttcaaacaccacattaaattctacacggaaattattgaaaaagacaaaaaggtgatcaaaacttttaacaaggattttaaaatagagcatgccaaagaagtcatttcaaaggcccatctcaaacacagcgaactgaacgcctttttaatcgcagcgcccagttatggcgtagaagcccaaaaagcgctcttattaatgttagaggcacctccgatgagtcttagagacgcgtttctaacgttgtcgcca

SEQ ID NO: 2680 - DNA (genomic), 372 bp, Helicobacter pylori; double-stranded, circular
  misc_feature (B) LOCATION 1...372
  hypothetical: NO
  anti-sense: NO
aataacgtttgttttatcatgttcgctaaaagcccaaaccatgtgttagccaccattaaatcccgcctaatcaaagaagacaagcgccaaaaaatccccctaaaacctttagatttggatttatccaagttggatttgaaagacatttatgcgtttttgaaaaatttagacaaagaaaattttgattccagagaaaatcagagggaaaggattgaaagcctgttagagagtatccacaggcataagatccccttaaatgagcaagaattgcaagcctttgatttagcgatcaaggctaacagctcttattacaagctcagctataatcttttacccttgcttttaagccttttatctaaaaagaaaacgcca

SEQ ID NO: 2681 - DNA (genomic), 369 bp, Helicobacter pylori; double-stranded, circular
  misc_feature (B) LOCATION 1...369
  hypothetical: NO
  anti-sense: NO
aacgtttgttttatcatgttcgctaaaagcccaaaccatgtgttagccaccattaaatcccgcctaatcaaagaagacaagcgccaaaaaatccccctaaaacctttagatttggatttatccaagttggatttgaaagacatttatgcgtttttgaaaaatttagacaaagaaaattttgattccagagaaaatcagagggaaaggattgaaagcctgttagagagtatccacaggcataagatccccttaaatgagcaagaattgcaagcctttgatttagcgatcaaggctaacagctcttattacaagctcagctataatcttttacccttgcttttaagccttttatctaaaaagaaaacgcca

SEQ ID NO: 2682 - DNA (genomic), 657 bp, Helicobacter pylori; double-stranded, circular
  misc_feature (B) LOCATION 1...657
  hypothetical: NO
  anti-sense: NO
gtgaaaaactccaaccgccttatttatacggacaatcttgaagagagcctagaagaggccgcaagccttttcaaacaccacattaaattctacacggaaattattgaaaaagacaaaaaggtgatcaaaacttttaacaaggattttaaaatagagcatgccaaagaagtcatttcaaaggcccatctcaaacacagcgaactgaacgcctttttaatcgcagcgcccagttatggcgtagaagcccaaaacgcgctcttaaaaatcttagaagaacctccgaataacgtttgttttatcatgttcgctaaaagcccaaaccatgtgttagccaccattaaatcccgcctaatcaaagaagacaagcgccaaaaaatccccctaaaacctttagatttggatttatccaagttggatttgaaagacatttatgcgtttttgaaaaatttagacaaagaaaattttgattccagagaaaatcagagggaaaggattgaaagcctgttagagagtatccacaggcataagatccccttaaatgagcaagaattgcaagcctttgatttagcgatcaaggctaacagctcttattacaagctcagctataatcttttacccttgcttttaagccttttatctaaaaagaaaacgccatga

SEQ ID NO: 2683 - DNA (genomic), 705 bp, Helicobacter pylori; double-stranded, circular
  misc_feature (B) LOCATION 1...705
  hypothetical: NO
  anti-sense: NO
gtgagctttcgtgttagaatgcgtgttgaattgaattttaggagtgtaaaaatgcaagtttcacaatatctgtatcaaaatgcgcaatctatttggggggattgtatttcccatccgtttgttcaaggcatagggcgtgggactttagaaagagataaattccgtttttatatcattcaggattatttgttccttttagaatacgctaaggtgtttgctttgggcgtagttaaggcttgtgatgaagcggtgatgagggagttttctaacgctatacaggatattttgaataacgagatgagtatccataaccattacattagagagcttcaaatcactcaaaaagaattgcaaaacgcgtgccccactctagcgaataaatcctatacaagctacatgctcgctgaagggtttaaaggttctatcaaagaagttgcggtggctgttctagcttgtggctggagctatttagtgatcgcgcaaaatttgagccaaatccccaacgctttagaagatgccttttatgggcattggattaagggctatagttccaaagaatttcaagcgtgcgtaacttggaacattaatttgcttgattccctcgccctcgcttcttcaaaacaagaaattgaaaaattaaaggagatttttatcgctacaagcgaatacgagtaccagttttgggatatggcgtatcaaagttga

SEQ ID NO: 2684 - DNA (genomic), 285 bp, Helicobacter pylori; double-stranded, circular
  misc_feature (B) LOCATION 1...285
  hypothetical: NO
  anti-sense: NO
atgaacaaagcggaatttattgatttggttaaaaaagcgggtaaatacaacagcaaaagagaagctgaagaagcgatcaacgcctttactttggcggtagaaacagctttaagcaagggtgagagcgtggagttggttggttttggcaaatttgaaaccgcagagcaaaaaggcaaagagggtaaagttccaggaagcgataaaacttataaaaccgaagacaaacgagtgcctaaattcaaacccggcaaaatccttaaacaaaaagttgaagaaggcaagtga

SEQ ID NO: 2685 - DNA (genomic), 336 bp, Helicobacter pylori; double-stranded, circular
  misc_feature (B) LOCATION 1...336
  hypothetical: NO
  anti-sense: NO
gctaagcgattgaatcgcttggttttggcatccattagaaaaggggttatccacatgaacaaagcggaatttattgatttggttaaaaaagcgggtaaatacaacagcaaaagagaagctgaagaagcgatcaacgcctttactttggcggtagaaacagctttaagcaagggtgagagcgtggagttggttggttttggcaaatttgaaaccgcagagcaaaaaggcaaagagggtaaagttccaggaagcgataaaacttataaaaccgaagacaaacgagtgcctaaattcaaacccggcaaaatccttaaacaaaaagttgaagaaggcaag

SEQ ID NO: 2686 - DNA (genomic), 615 bp, Helicobacter pylori; double-stranded, circular
  misc_feature (B) LOCATION 1...615
  hypothetical: NO
  anti-sense: NO
aatgaatttgaaatattttttaaaaggaataacatgaattacgaaaccatcgcagaaagcaatgaaagcacggtagtagcggaatttcatagcgatagtgaaaggaaaagtgcttatgagagcgaagcgcagctagaaagggagtttatcgcgcttttacaaaaacaaggctatgaatttaaaaaaatccacaacgaaaaagaattaaaagacaatttaaaagagcagttagaaaagcttaacgatcattgtttcacgcccaaagaatgggacactctttattttcaattcatcgctaataaaaacgaagattacaaggctaaaacaagaaagatccaagaagatccgatttttaatctcgcgcttgagaacgggaaaaccaaaaacattaaaatcattgataagaaaaatatccatagaaacgccttgcaagtgatccaccaatacagcaataaaggggggaagtatgagaaccgctatgatgtgagtgtccttgtgaatggcttgcctttagtgcatgtggaattgaaaaaaagaggcgtggcgatcagagaggcgttcaatcagatcaagcgctataaaagggatagttttagcgctgaagcacgggctttt

SEQ ID NO: 2687 - DNA (genomic), 843 bp, Helicobacter pylori; double-stranded, circular
  misc_feature (B) LOCATION 1...843
  hypothetical: NO
  anti-sense: NO
gacagcgtcaaaacgcatgggaatatcgtgtgtttcagggatttggagcaagatctaaatgatgcgctcatgctttttgggaataaggacgctaggtctattgcgctattaagaaaatatgaagattatttgaaaggctatgcggataataacaaagaatacgagggttatgagggtttgattgaaaggcttttaacggagtttcccttaaaagagccgatcatttcagaaagccagaaaaaggatttcatcaagctttttggcaagattttgaaattagaaaatattttaaacagctttgaaaatttcaacaaagacgatcacatcaacccaagggattttcaagactatcaaagcaaataccttgatttttacgatgaaatgaggccagaaaaagggagggataaagaagagattaacgacgatttgatttttgaaattgaactcatcaagcaagtggaagtcaatattgactacattttgactttgattgaaaaatacgctaaagagcctgatctagaaattcaaggcgttaaaacccaaatagagccgatccttaactccagcatagaattaaggaataaaaaagatttgatcatgggtttcattgacaaatacaacaaagatgaagaagtccatgcgtattttcaaaactatatccaccaaaaaagagaagaggaattccaaaatatcatagaagaaaaccgtttgaatgaagaaaaagcctattcgttcatgcagcatgcctttagtgggggtgaaatcaatttcagcgggacggaatttcctgaaatcattgaagaaaaagtctctaggtttgacaaaattcgcgctatcaagagg

SEQ ID NO: 2688 - DNA (genomic), 840 bp, Helicobacter pylori; double-stranded, circular
  misc_feature (B) LOCATION 1...840
  hypothetical: NO
  anti-sense: NO
agcgtcaaaacgcatgggaatatcgtgtgtttcagggatttggagcaagatctaaatgatgcgctcatgctttttgggaataaggacgctaggtctattgcgctattaagaaaatatgaagattatttgaaaggctatgcggataataacaaagaatacgagggttatgagggtttgattgaaaggcttttaacggagtttcccttaaaagagccgatcatttcagaaagccagaaaaaggatttcatcaagctttttggcaagattttgaaattagaaaatattttaaacagctttgaaaatttcaacaaagacgatcacatcaacccaagggattttcaagactatcaaagcaaataccttgatttttacgatgaaatgaggccagaaaaagggagggataaagaagagattaacgacgatttgatttttgaaattgaactcatcaagcaagtggaagtcaatattgactacattttgactttgattgaaaaatacgctaaagagcctgatctagaaattcaaggcgttaaaacccaaatagagccgatccttaactccagcatagaattaaggaataaaaaagatttgatcatgggtttcattgacaaatacaacaaagatgaagaagtccatgcgtattttcaaaactatatccaccaaaaaagagaagaggaattccaaaatatcatagaagaaaaccgtttgaatgaagaaaaagcctattcgttcatgcagcatgcctttagtgggggtgaaatcaatttcagcgggacggaatttcctgaaatcattgaagaaaaagtctctaggtttgacaaaattcgcgctatcaagagg

SEQ ID NO: 2689 - DNA (genomic), 1002 bp, Helicobacter pylori; double-stranded, circular
  misc_feature (B) LOCATION 1...1002
  hypothetical: NO
  anti-sense: NO
ggatttaatggattttgccaagtcgtttttgcgcggcgcagccttttgaacgttttaacgcgctattgcgttttcacaagtgaagaggttttgttggtgatgcgaccttatcaaatcgtggcggcagaaaggattttggaaaaaatcaaagccacgcatgatagtaaaacttatgggaaaagccaaagcggaggctatatctggcacacgacagggagcggtaaaaccttaacaagctttaaaagcgcgactttagctaaagaattagaacatgtttcaaaggttttgtttgtggtggataggaaggatttagactatcaaaccatgaaagaatacgataaattccaaaaagattgcgccaattccaacacaagcaccaagattctaaaacaacagcttgaagattttaacgctaaaataattatcaccacgatccaaaaattagacaaattcgttatagcccaccttaaagggcatgcgatttttaatgaagaggtggtgatgattgttgatgaatgccacaggagccagttaggattgatgcaccaagccatcaccaaagcgtttaaaaaataccacctttttggattcaccggcacgcccattttcgcgcaaaattgcgataaaaacaaccctttaggcacaacggagcaaaaatttgggagatgcctccaccaatacaccattattgatgcgatcagggataaaaacgttttgccctttagagtggaataccacaacaccattaaagctaaagagggtattaaagataaagagggtattaaagataaagaggtgagggcggttgatgaaaaaaacgcccttttagatagtaggaggatcaaagaaatcgctaaatgcattttagagcgtttccatcaagccactaaaaataaaaaattcaattccattctggcatgctctggtatagaagcgttgaaaaaatactaccaagcctttaaagaagaaaaacacgaccttaaaatcgctaccatttttagt

SEQ ID NO: 2690 - DNA (genomic), 1818 bp, Helicobacter pylori; double-stranded, circular
  misc_feature (B) LOCATION 1...1818
  hypothetical: NO
  anti-sense: NO
atgaattacgaaaccatcgcagaaagcaatgaaagcacggtagtagcggaatttcatagcgatagtgaaaggaaaagtgcttatgagagcgaagcgcagctagaaagggagtttatcgcgcttttacaaaaacaaggctatgaatttaaaaaaatccacaacgaaaaagaattaaaagacaatttaaaagagcagttagaaaagcttaacgatcattgtttcacgcccaaagaatgggacactctttattttcaattcatcgctaataaaaacgaagattacaaggctaaaacaagaaagatccaagaagatccgatttttaatctcgcgcttgagaacgggaaaaccaaaaacattaaaatcattgataagaaaaatatccatagaaacgccttgcaagtgatccaccaatacagcaataaaggggggaagtatgagaaccgctatgatgtgagtgtccttgtgaatggcttgcctttagtgcatgtggaattgaaaaaaagaggcgtggcgatcagagaggcgttcaatcagatcaagcgctataaaagggatagttttagcgctgaagacgggctttttgagttcgtgcagatctttgtcatcagtaacggcacgagtagtaaatactattcaaacaccaccagaatagcccaaattgaaaaaaacaataaagccgatacttttgaattcacgaattattgggcggacagcaagaatcgcaatattgaggatttaatggattttgccaagtcgttttttgcgaagcgcagccttttgaacgttttaacgcgctattgcgttttcacaagtgaagaggttttgttggtgatgcggccttatcaaatcgtggcggcagaaaggattttggaaaaaatcaaagccacgcatgatagtaaaacttatgggaaaagccaaagcggaggctatatctggcacacgacagggagcggtaaaaccttaacaagctttaaaagcgcgactttagctaaagaattagaacatgtttcaaaggttttgtttgtggtggataggaaggatttagactatcaaaccatgaaagaatacgataaattccaaaaagattgcgccaattccaacacaagcaccaagattctaaaacaacagcttgaagattttaacgctaaaataattatcaccacgatccaaaaattagacaaattcgttaaagcccaccttaaagggcatgcgatttttaatgaagaggtggtgatgatttttgatgaatgccacaggagtcagttaggatcgatgcaccaagccatcactaaagcgtttaaaaaataccacctttttggattcaccggcacgcccattttcgcgcaaaattgcgataaaaacaaccctttaggcacaacggagcaaaaatttgggagatgcctccaccaatacaccattattgatgcgatcagggataaaaacgttttgccctttagagtggaataccacaacaccattaaagctaaagagggtattaaagataaagagggtattaaagataaagaggtgagggcggttgatgaaaaaaacgcccttttagatagtaggaggatcaaagaaatcgctaaatgcattttagagcgtttccatcaagccactaaaaataaaaaattcaattccattctggcatgctctggtatagaagcgttgaaaaaatactaccaagcctttaaagaagaaaaacacgaccttaaaatcgctaccatttttagttatagcgctaatgaagaaattgaagcgctagaagatgaaaacaatgaaagcactgccgggctagacaaaagctcaagggatttt

SEQ ID NO: 2691 - DNA (genomic), 2910 bp, Helicobacter pylori; double-stranded, circular
  misc_feature (B) LOCATION 1...2910
  hypothetical: NO
  anti-sense: NO
atgaattacgaaaccatcgcagaaagcaatgaaagcacggtagtagcggaatttcatagcgatagtgaaaggaaaagtgcttatgagagcgaagcgcagctagaaagggagtttatcgcgcttttacaaaaacaaggctatgaatttaaaaaaatccacaacgaaaaagaattaaaagacaatttaaaagagcagttagaaaagcttaacgatcattgtttcacgcccaaagaatgggacactctttattttcaattcatcgctaataaaaacgaagattacaaggctaaaacaagaaagatccaagaagatccgatttttaatctcgcgcttgagaacgggaaaaccaaaaacattaaaatcattgataagaaaaatatccatagaaacgccttgcaagtgatccaccaatacagcaataaaggggggaagtatgagaaccgctatgatgtgagtgtccttgtgaatggcttgcctttagtgcatgtggaattgaaaaaaagaggcgtggcgatcagagaggcgttcaatcagatcaagcgctataaaagggatagttttagcgctgaagacgggctttttgagttcgtgcagatctttgtcatcagtaacggcacgagtagtaaatactattcaaacaccaccagaatagcccaaattgaaaaaaacaataaagccgatacttttgaattcacgaattattgggcggacagcaagaatcgcaatattgaggatttaatggattttgccaagtcgttttttgcgaagcgcagccttttgaacgttttaacgcgctattgcgttttcacaagtgaagaggttttgttggtgatgcggccttatcaaatcgtggcggcagaaaggattttggaaaaaatcaaagccacgcatgatagtaaaacttatgggaaaagccaaagcggaggctatatctggcacacgacagggagcggtaaaaccttaacaagctttaaaagcgcgactttagctaaagaattagaacatgtttcaaaggttttgtttgtggtggataggaaggatttagactatcaaaccatgaaagaatacgataaattccaaaaagattgcgccaattccaacacaagcaccaagattctaaaacaacagcttgaagattttaacgctaaaataattatcaccacgatccaaaaattagacaaattcgttaaagcccaccttaaagggcatgcgatttttaatgaagaggtggtgatgatttttgatgaatgccacaggagtcagttaggatcgatgcaccaagccatcactaaagcgtttaaaaaataccacctttttggattcaccggcacgcccattttcgcgcaaaattgcgataaaaacaaccctttaggcacaacggagcaaaaatttgggagatgcctccaccaatacaccattattgatgcgatcagggataaaaacgttttgccctttagagtggaataccacaacaccattaaagctaaagagggtattaaagataaagagggtattaaagataaagaggtgagggcggttgatgaaaaaaacgcccttttagatagtaggaggatcaaagaaatcgctaaatgcattttagagcgtttccatcaagccactaaaaataaaaaattcaattccattctggcatgctctggtatagaagcgttgaaaaaatactaccaagcctttaaagaagaaaaacacgaccttaaaatcgctaccatttttagttatagcgctaatgaagaaattgaagcgctagaagatgaaaacaatgaaagcactgccgggctagacaaaagctcaagggattttttagagggcgcgattgcggattataacgggatgtttcaaatttcttttgacacttcggatcaaaaattccaaagctattataaggatctttctcaaaaaatgaaagagcgtgaaatcgatcttttactggtggcaaacatgttccttaccgggtttgacgctacaaggctcaacaccctttgggtggataaaaacttgaaataccatgggctaatccaagccttttcacgcaccaaccgtattttagacagcgtcaaaacgcatgggaatatcgtgtgtttcagggatttggagcaagatctaaatgatgcgctcatgctttttgggaataaggacgctaggtctattgcgctattaagaaaatatgaagattatttgaaaggctatgcggataataacaaagaatacgagggttatgagggtttgattgaaaggcttttaacggagtttcccttaaaagagccgatcatttcagaaagccagaaaaaggatttcatcaagctttttggcaagattttgaaattagaaaatattttaaacagctttgaaaatttcaacaaagacgatcacatcaacccaagggattttcaagactatcaaagcaaataccttgatttttacgatgaaatgaggccagaaaaagggagggataaagaagagattaacgacgatttgatttttgaaattgaactcatcaagcaagtggaagtcaatattgactacattttgactttgattgaaaaatacgctaaagagcctgatctagaaattcaaggcgttaaaacccaaatagagccgatccttaactccagcatagaattaaggaataaaaaagatttgatcatgggtttcattgacaaatacaacaaagatgaagaagtccatgcgtattttcaaaactatatccaccaaaaaagagaagaggaattccaaaatatcatagaagaaaaccgtttgaatgaagaaaaagcctattcgttcatgcagcatgcctttagtgggggtgaaatcaatttcagcgggacggaatttcctgaaatcattgaagaaaaagtctctaggtttgacaaaattcgcgctatcaagaggtga

SEQ ID NO: 2692 - DNA (genomic), 438 bp, Helicobacter pylori; double-stranded, circular
  misc_feature (B) LOCATION 1...438
  hypothetical: NO
  anti-sense: NO
gggagcggaccgttactctcacaactttctaaagtgttaggcgataaaaacgtcttaaaagggtattttgggcaagaaatcaatttgaccacttacaacctctgccgtatcaacatgtttttgcatgacatcaattattctaaattccacatcgcgctaggagacacgcttttagaccccaagcatgaagacgatgagccttttgatgcgatcgtttccaaccctccctattccactaaatggataggcgataacaacccccttttaatgaacgatgagcgttttaataaggccggtgcgctagcgccaaaaacgccgccgatctcgccttcaccatgcacatgctttcttatttatccaatcaaggcgctgctgcgatcgtggaatttcccggggtgctttatagaagcggtgccgaaaagaaaatcagagagtatt

SEQ ID NO: 2693 - DNA (genomic), 435 bp, Helicobacter pylori; double-stranded, circular
  misc_feature (B) LOCATION 1...435
  hypothetical: NO
  anti-sense: NO
agcggaccgttactctcacaactttctaaagtgttaggcgataaaaacgtcttaaaagggtattttgggcaagaaatcaatttgaccacttacaacctctgccgtatcaacatgtttttgcatgacatcaattattctaaattccacatcgcgctaggagacacgcttttagaccccaagcatgaagacgatgagccttttgatgcgatcgtttccaaccctccctattccactaaatggataggcgataacaacccccttttaatgaacgatgagcgttttaataaggccggtgcgctagcgccaaaaacgccgccgatctcgccttcaccatgcacatgctttcttatttatccaatcaaggcgctgctgcgatcgtggaatttcccggggtgctttatagaagcggtgccgaaaagaaaatcagagagtatt

SEQ ID NO: 2694 - DNA (genomic), 570 bp, Helicobacter pylori; double-stranded, circular
  misc_feature (B) LOCATION 1...570
  hypothetical: NO
  anti-sense: NO
ggccggtgcgctagcgccaaaaacgccgccgatctcgccttcaccatgcacatgctttcttatttatccaatcaaggcgctgctgcgatcgtggaatttcccggggtgctttatagaagcggtgccgaaaagaaaatcagagagtatttagtcaaagaaaatttcattgactgcgtgatcgctttacctgaaaacctcttttttggaacgaatatcgccacttgcattttagtgcttaagaaaaacaaaaaagacgacaccacgctttttattgatgcgagtaaggaattcctcaaagagggcaaaaaaaacaaactcaaagcgcataaccgagaaaagattttgcaaacctatattgaaaggaaagcgatcaagcatttttcggctctagccaatatagagaaaatccaagaaaacgattacaacctatccgtcaaccgctacgtggagcaagaagacacgaaagaaatcattgacattaaggcgcttaatggcgagatttctcaaatcgtaaaaaaacaaagcgttttaagaaacagccttgaatccatcatcaaagagctagaaatt

SEQ ID NO: 2695 - DNA (genomic), 582 bp, Helicobacter pylori; double-stranded, circular
  misc_feature (B) LOCATION 1...582
  hypothetical: NO
  anti-sense: NO
aaaaataatattctttgctataatgaaacctttaaggggcgtgctaaaaccgccaaacaaaaccgccaatcaaaacacaaaaaaggggcttatctcatggaaaacacaaacaaagcgagcgcgaaattgaataaccatgcttcattagcgcgtaacgaattgcacaacaccatttggaaagtggcgaacgaattgagaggctcagtggatggctgggatttcaaacaatacgttttaggcattcttttttaccgctacatttcagaaaacatggctaatcaccacaatgaatacgagcgaaagattgatcctaactttgattacgcttcattaagcgatgaagaggctgaaatcgtaagaaaatcaaccattgaagaaaaaggctttttcatcccgccaagcgctttattttgtaacgtgttaaaaaacgcgcccaataacgaagatctcaatgtaaccttacaaaatatttttaacgaaatagaaaaatccagccttggcactccatcaggaggaaatgttaaaggcttgtttgcggatttagaagtcaatagccaacaagttagggagctctcatcaaaa

SEQ ID NO: 2696 - DNA (genomic), 1587 bp, Helicobacter pylori; double-stranded, circular
  misc_feature (B) LOCATION 1...1587
  hypothetical: NO
  anti-sense: NO
atggaaaacacaaacaaagcgagcgcgaaattgaataaccatgcttcattagcgcgtaacgaattgcacaacaccatttggaaagtggcgaacgaattgagaggctcagtggatggctgggatttcaaacaatacgttttaggcattcttttttaccgctacatttcagaaaacatggctaatcaccacaatgaatacgagcgaaagattgatcctaactttgattacgcttcattaagcgatgaagaggctgaaatcgtaagaaaatcaaccattgaagaaaaaggctttttcatcccgccaagcgctttattttgtaacgtgttaaaaaacgcgcccaataacgaagatctcaatgtaaccttacaaaatatttttaacgaaatagaaaaatccagccttggcactccatcagaagaaaacgtcaaaggcttgtttgcggatttagacgtcaatagcaacaagttagggagctctcatcaaaatagggtggaaaaattgactaaaatccttcaagccatagggggcatgcaattaggcgattaccaacaaagcgggatcgatgtttttggcgacgcttatgaatatttaatggcgatgtatgcgagcaatgccggcaaaagcggaggggaatatttcaccccccaagaagtgagcgaactgctcgctaaaatcaccctgcacaaccaagagaacattaataaagtttatgacccatgttgcgggagcggatcgttactcttacaattttctaaagtgttaggcgataaaaacgtcttaaaagggtattttgggcaagaaatcaatttgaccacttacaacctctgccgtatcaacatgtttttgcatgacatcaattattctaaattccacatcgcgctaggagacacgcttttagaccccaagcatgaagacgatgagccttttgatgcgatcgtttccaaccctccctattccactaaatggataggcgataacaacccccttttaatgaacgatgagcgttttaataaggccggtgcgctagcgcccaaaaacgccgccgatctcgccttcaccatgcacatgctttcttatttatccaatcaaggcgctgctgcgatcgtggaatttcccggggtgctttatagaagcggtgccgaaaagaaaatcagagagtatttagtcaaagaaaatttcattgactgcgtgatcgctttacctgaaaacctcttttttggaacgaatatcgccacttgcattttagtgcttaagaaaaacaaaaaagacgacaccacgctttttattgatgcgagtaaggaattcctcaaagagggcaaaaaaaacaaactcaaagcgcataaccgagaaaagattttgcaaacctatattgaaaggaaagcgatcaagcatttttcggctctagccaatatagagaaaatccaagaaaacgattacaacctatccgtcaaccgctacgtggagcaagaagacacgaaagaaatcattgacattaaggcgcttaatggcgagatttctcaaatcgtaaaaaaacaaagcgttttaagaaacagccttgaatccatcatcaaagagctagaaatttaa

SEQ ID NO: 2697 - DNA (genomic), 261 bp, Helicobacter pylori; double-stranded, circular
  misc_feature (B) LOCATION 1...261
  hypothetical: NO
  anti-sense: NO
gggcgtcatcccctctacgcaaaaagaattgatgagcttagatgcgtagggcaaaaaaccgctaatgtggtgctttcagtgtgctttgatgcaaattatatagccgtagatacccatgtgttccgcacgacacaccgcttaggtttaagcaacgctaacacgcccattaaaactgaagaagaactcagcgatctttttaaagacaacctatccaaactccaccatgccttaatcttgtttggccgctatacttggcaaagc

SEQ ID NO: 2698 - DNA (genomic), 348 bp, Helicobacter pylori; double-stranded, circular
  misc_feature (B) LOCATION 1...348
  hypothetical: NO
  anti-sense: NO
agcgcaataccttatcatcaaagaaagcgcgcaagaatgagcttgaaacgcgctaaaacgaaagcccaacaaatcaaagagttgcttttaaaacattaccccaaccaaaccaccgaattgcgccataaaaacccctatgaattgctagtggcgaccattttaagcgcccaatgtacggacgctagagtgaatcaaataacgcccaagctgtttgaaaaatacccgagcgtgaacgatttagcgctcgcttctttagaagaggttaaagagatcatccaatccgtttcgtattccaacaataaaagcaagcatttaatcagtatgggcgcaaaaagtggtgtaagattt

SEQ ID NO: 2699 - DNA (genomic), 645 bp, Helicobacter pylori; double-stranded, circular
  misc_feature (B) LOCATION 1...645
  hypothetical: NO
  anti-sense: NO
atgagcttgaaacgcgctaaaacgaaagcccaacaaatcaaagagttgcttttaaaacattaccccaaccaaaccaccgaattgcgccataaaaacccctatgaattgctagtggcgaccattttaagcgcccaatgtacggacgctagagtgaatcaaataacgcccaagctgtttgaaaaatacccgagcgtgaacgatttagcgctcgcttctttagaagaggttaaagagatcatccaatccgtttcgtattccaacaataaaagcaagcatttaatcagtatgggcgcaaaagtggttaaggattttaagggcgttatcccctctacgcaaaaagaattgatgagcttagatggcgtagggcaaaaaaccgctaatgtggtgctttcagtgtgctttgatgcaaattatatagccgtagatacccatgtgttccgcacgacacaccgcttaggtttaagcaacgctaacacgcccattaaaactgaagaagaactcagcgatctttttaaagacaacctatccaaactccaccatgccttaatcttgtttggccgctatacttgcaaagctaaaaaccccttatgcgatgcgtgttttttaaaagaattttgcgtttctaaagctagctttaaggcgtag

SEQ ID NO: 2700 - DNA (genomic), 282 bp, Helicobacter pylori; double-stranded, circular
  misc_feature (B) LOCATION 1...282
  hypothetical: NO
  anti-sense: NO
gtgtcaaaccctaaaagtagcgatacggctgaagaaaagcaaaaaagctcttctgttttcagtgataaaacgattgttctaaccggcacgctttctaaaccacggcaagaatatgctcaaatgttagaaaatttaggggcaaaaattgcttcaagcgtgagcgctaaaaccgattttttaatcgctggagaaaacgccggctcaaaactcgctctggcacaaaaacatggcgtgagcgttttgaatgaagaagaattgttaaaacgccttaaggaattggat

SEQ ID NO: 2701 - DNA (genomic), 402 bp, Helicobacter pylori; double-stranded, circular
  misc_feature (B) LOCATION 1...402
  hypothetical: NO
  anti-sense: NO
gtgttagaaaaaagcgaacccgagtttttggaaatggaacgctttggggtggaaatggcgcattctttagtcaatttttatgcgagcaatcaggaatttatccgatcgttatttgagttgttaaaccctaaaagtagcgatacggctgaagaaaagcaaaaaagctcttctgttttcagtgataaaacgattgttctaaccggcacgctttctaaaccacggcaagaatatgctcaaatgttagaaaatttaggggcaaaaattgcttcaagcgtgagcgctaaaaccgattttttaatcgctggagaaaacgccggctcaaaactcgctctggcacaaaaacatggcgtgagcgttttgaatgaagaagaattgttaaaacgccttaaggaattggattaa

SEQ ID NO: 2702 - DNA (genomic), 1473 bp, Helicobacter pylori; double-stranded, circular
  misc_feature (B) LOCATION 1...1473
  hypothetical: NO
  anti-sense: NO
aaggtttttaatgataaaaagccaaaagaatatttagaaagaattgaatatttaaacaccctatcgcaccattattacaaccttgatgaacccatcgtaagcgatgcggtctatgatgaactttaccaagaattaaaagcttatgaagaagaaaaccctaatcgcattcaggctaactcccctacccaaaaagtgggggctactgccaccaatgagttcagtaaaaacccccatttaatgcggatgtggagcttagatgatgtgttcaatcaaaacgaattgcgagcgtggttgcaacgcattttaaaagtttatcctaacgcttcattcgtgtgttcgcccaaacttgatggggtttcgctcaatcttttgtatcaacatggcaagctaataagcgcgaccactaggggtaatggcttagaaggagagcttgttactaacaacgctaaacacatcgctaatatcccccattctatcgcttataatggagaaatagaaatcaggggcgaagtgatcatttctaaagaggattttgacgccttgaataaagagcgcctaaacgctaacgaacccctattcgctaaccccagaaatgctgcatcagggagtttaagacagcttgatagcaatatcactaaaaagcgcaaattgcaattcatcccttggggcgtgggcaagcattctttacatttcctaagatttaaggagtgtttggattttattgtctcgttaggttttagcgctattcaatatttaagcctgaacaaaaaccaccaagaaatagaagaaaattaccacaccctgattagagaaagggagggcttttttgcccttttagacggcatggtgatcgttgtggatgaattggatattcaaaaggagctaggctacacgcaaaaatcccctaaattcgcttgcgcttataaattcccggctctagaaaaacacaccaaaattgtaggagtcattaaccaagtggggcgcagtggggcgatcaccccggtcgctctcttagagcctgtggaaattgctggagctatggttaatagagcgaccttacacaattattctgaaattgaaaaaaagaatatcatgctcaatgatagggtggtcgtcattagaagcggcgatgtgatccctaaaatcatcaaacctttagaatcttatagagacggctcgcaacaaaaaatcatgcgccccaaagtttgccccatatgctcgcatgaacttttatgcgaagagatttttacctattgtcaaaaccttaattgcccggcaaggttgaaagaaagcttgattcatttcgcttctaaggacgctttaaacattcaaggcttgggcgataaagtcatagagcaactttttgaagaaaaactcattttcaacgccttggatctgtatgctttaaaattagaagacttaatgcggctagacaaattcaaaatcaaaaaaggtgaaaatgtattagacgct

SEQ ID NO: 2703 - DNA (genomic), 1470 bp, Helicobacter pylori; double-stranded, circular
  misc_feature (B) LOCATION 1...1470
  hypothetical: NO
  anti-sense: NO
aaggtttttaatgataaaaagccaaaagaatatttagaaagaattgaatatttaaacaccctatcgcaccattattacaaccttgatgaacccatcgtaagcgatgcggtctatgatgaactttaccaagaattaaaagcttatgaagaagaaaaccctaatcgcattcaggctaactcccctacccaaaaagtgggggctactgccaccaatgagttcagtaaaaacccccatttaatgcggatgtggagcttagatgatgtgttcaatcaaaacgaattgcgagcgtggttgcaacgcattttaaaagtttatcctaacgcttcattcgtgtgttcgcccaaacttgatggggtttcgctcaatcttttgtatcaacatggcaagctaataagcgcgaccactaggggtaatggcttagaaggagagcttgttactaacaacgctaaacacatcgctaatatcccccattctatcgcttataatggagaaatagaaatcaggggcgaagtgatcatttctaaagaggattttgacgccttgaataaagagcgcctaaacgctaacgaacccctattcgctaaccccagaaatgctgcatcagggagtttaagacagcttgatagcaatatcactaaaaagcgcaaattgcaattcatcccttggggcgtgggcaagcattctttacatttcctaagatttaaggagtgtttggattttattgtctcgttaggttttagcgctattcaatatttaagcctgaacaaaaaccaccaagaaatagaagaaaattaccacaccctgattagagaaagggagggcttttttgcccttttagacggcatggtgatcgttgtggatgaattggatattcaaaaggagctaggctacacgcaaaaatcccctaaattcgcttgcgcttataaattcccggctctagaaaaacacaccaaaattgtaggagtcattaaccaagtggggcgcagtggggcgatcaccccggtcgctctcttagagcctgtggaaattgctggagctatggttaatagagcgaccttacacaattattctgaaattgaaaaaaagaatatcatgctcaatgatagggtggtcgtcattagaagcggcgatgtgatccctaaaatcatcaaacctttagaatcttatagagacggctcgcaacaaaaaatcatgcgccccaaagtttgccccatatgctcgcatgaacttttatgcgaagagatttttacctattgtcaaaaccttaattgcccggcaaggttgaaagaaagcttgattcatttcgcttctaaggacgctttaaacattcaaggcttgggcgataaagtcatagagcaactttttgaagaaaaactcattttcaacgccttggatctgtatgctttaaaattagaagacttaatgcggctagacaaattcaaaatcaaaaaaggtgaaaatgtattagac

SEQ ID NO: 2704 - DNA (genomic), 1971 bp, Helicobacter pylori; double-stranded, circular
  misc_feature (B) LOCATION 1...1971
  hypothetical: NO
  anti-sense: NO
atgataaaaagccaaaaagaatatttagaaagaattgaatatttaaacaccctatcgcaccattattacaaccttgatgaacccatcgtaagcgatgcggtctatgatgaactttaccaagaattaaaagcttatgaagaagaaaaccctaatcgcattcaggctaactcccctacccaaaaagtgggggctactgccaccaatgagttcagtaaaaacccccatttaatgcggatgtggagcttagatgatgtgttcaatcaaaacgaattgcgagcgtggttgcaacgcattttaaaagtttatcctaacgcttcattcgtgtgttcgcccaaacttgatggggtttcgctcaatcttttgtatcaacatggcaagctaataagcgcgaccactaggggtaatggcttagaaggagagcttgttactaacaacgctaaacacatcgctaatatcccccattctatcgcttataatggagaaatagaaatcaggggcgaagtgatcatttctaaagaggattttgacgccttgaataaagagcgcctaaacgctaacgaacccctattcgctaaccccagaaatgctgcatcagggagtttaagacagcttgatagcaatatcactaaaaagcgcaaattgcaattcatcccttggggcgtgggcaagcattctttacatttcctaagatttaaggagtgtttggattttattgtctcgttaggttttagcgctattcaatatttaagcctgaacaaaaaccaccaagaaatagaagaaaattaccacaccctgattagagaaagggagggcttttttgcccttttagacggcatggtgatcgttgtggatgaattggatattcaaaaggagctaggctacacgcaaaaatcccctaaattcgcttgcgcttataaattcccggctctagaaaaacacaccaaaattgtaggagtcattaaccaagtggggcgcagtggggcgatcaccccggtcgctctcttagagcctgtggaaattgctggagctatggttaatagagcgaccttacacaattattctgaaattgaaaaaaagaatatcatgctcaatgatagggtggtcgtcattagaagcggcgatgtgatccctaaaatcatcaaacctttagaatcttatagagacggctcgcaacaaaaaatcatgcgccccaaagtttgccccatatgctcgcatgaacttttatgcgaagagatttttacctattgtcaaaaccttaattgcccggcaaggttgaaagaaagcttgattcatttcgcttctaaggacgctttaaacattcaaggcttgggcgataaagtcatagagcaactttttgaagaaaaactcattttcaacgccttggatctgtatgctttaaaattagaagacttaatgcggctagacaaattcaaaatcaaaaaagctcaaaatctattagacgctattcaaaagagcaaaaaccctcctttatggcgtttgatcaacgctttagggattgagcatattggtaaaggagcgagtaaaacgctagccaaatacggcttaaatgtgttagaaaaaagcgaagccgagtttttggaaatggaaggctttggggtggaaatggcgcattctttagtcaatttttatgcgagcaatcaggaatttatccgatcgttatttgagttgttaaaccctaaaagtagcgatacggctgaagaaaagcaaaaaagctcttctgttttcagtgataaaacgattgttctaaccggcacgctttctaaaccacggcaagaatatgctcaaatgttagaaaatttaggggcaaaaattgcttcaagcgtgagcgctaaaaccgattttttaatcgctggagaaaacgccggctcaaaactcgctctggcacaaaaacatggcgtgagcgttttgaatgaagaagaattgttaaaacgccttaaggaattggattaa

SEQ ID NO: 2705 - DNA (genomic), 657 bp, Helicobacter pylori; double-stranded, circular
  misc_feature (B) LOCATION 1...657
  hypothetical: NO
  anti-sense: NO
gtgttagatagttttgagattttaaaggctttaaagagcttggatttattgaaaaacgcccctgcttggtggtggcctaacgctttgaaatttgaagctctactaggagcggttttaacgcaaaatactaaatttgaagccgttttgaaatctttagaaaatctaaaaaacgctttcattttagaaaatgatgatgagatcaatcttaaaaaaatcgcttatatagagttttcaaagcttgcagagtgtgtccgccctagcgggttttataaccaaaaagccaaacgactgattgatttgagcaagaatattttaaaagactttcaaagttttgaaaattttaaacaagaagtaaccaaagagtggcttttagaccaaaagggcattggcaaagaaagcgcggatgcgattttatgctatgtgtgcgccaaagaagtgatggtggtggataaatacagctatctttttttaaaaaaattaggcatagagatagaagattatgatgaattgcagcatttttttgaaaaaggcgttcaagagaatttaaattccgccttagcgctttatgaaaacaccatttctttagcgcaactttatgcgagattccatggaaagatcgtggaattttccaaacaaaaattggaattgaagctttga

SEQ ID NO: 2706 - DNA (genomic), 693 bp, Helicobacter pylori; double-stranded, circular
  misc_feature (B) LOCATION 1...693
  hypothetical: NO
  anti-sense: NO
aatactcttttttatttctttttattacaggcggttattgtgttagatagttttgagattttaaaggctttaaagagcttggatttattgaaaaacgcccctgcttggtggtggcctaacgctttgaaatttgaagctctactaggagcggttttaacgcaaaatactaaatttgaagccgttttgaaatctttagaaaatctaaaaaacgctttcattttagaaaatgatgatgagatcaatcttaaaaaaatcgcttatatagagttttcaaagcttgcagagtgtgtccgccctagcgggttttataaccaaaaagccaaacgactgattgatttgagcaagaatattttaaaagactttcaaagttttgaaaattttaaacaagaagtaaccaaagagtggcttttagaccaaaagggcattggcaaagaaagcgcggatgcgattttatgctatgtgtgcgccaaagaagtgatggtggtggataaatacagctatctttttttaaaaaaattaggcatagagatagaagattatgatgaattgcagcatttttttgaaaaaggcgttcaagagaatttaaattccgccttagcgctttatgaaaacaccatttctttagcgcaactttatgcgagattccatggaaagatcgtggaattttccaaacaaaaattggaattgaagctt

SEQ ID NO: 2707 - DNA (genomic), 678 bp, Helicobacter pylori; double-stranded, circular
  misc_feature (B) LOCATION 1...678
  hypothetical: NO
  anti-sense: NO
atgatagaagttttaatgatagaagatgatatagaattagccgagtttttgagcgagtttttgctccaacatggcattcatgtaatcaattacgatgagccatacaccggcattagtgcggctaacacacaaaattatgatttgttgttattggatttgactttgcctaatttagacgggcttgaagtgtgtaggcgcatttccaaacaaaaacatatccctattattatttcttcagcgagaagtgatgtggaagataagattaaagcgctagattatggggctgatgattacctccctaaaccctatgatcctaaggaattattagctcgtatccaatccttgctcaggcgttctcataaaaaagaagaggtgagtgagccaggcgatgcgaatatctttagggtagataaggatagccgagaagtgtatatgcatgaaaaaaagctagacttaactagggctgaatatgaaatcctttcgcttctcatcagcaaaaaaggttatgtgtttagccgtgaaagcattgcgattgagagcgagagcatcaaccctgaaagctctaataaaagcattgatgtgatcattggccgtttgcgatccaagattgaaaaaaatcctaaacaaccgcaatacatcatctctgttagagggattggttataaattagaatactga

SEQ ID NO: 2708 - DNA (genomic), 678 bp, Helicobacter pylori; double-stranded, circular
  misc_feature (B) LOCATION 1...678
  hypothetical: NO
  anti-sense: NO
agtatgatagaagttttaatgatagaagatgatatagaattagccgagtttttgagcgagtttttgctccaacatggcattcatgtaatcaattacgatgagccatacaccggcattagtgcggctaacacacaaaattatgatttgttgttattggatttgactttgcctaatttagacgggcttgaagtgtgtaggcgcatttccaaacaaaaacatatccctattattatttcttcagcgagaagtgatgtggaagataagattaaagcgctagattatggggctgatgattacctccctaaaccctatgatcctaaggaattattagctcgtatccaatccttgctcaggcgttctcataaaaaagaagaggtgagtgagccaggcgatgcgaatatctttagggtagataaggatagccgagaagtgtatatgcatgaaaaaaagctagacttaactagggctgaatatgaaatcctttcgcttctcatcagcaaaaaaggttatgtgtttagccgtgaaagcattgcgattgagagcgagagcatcaaccctgaaagctctaataaaagcattgatgtgatcattggccgtttgcgatccaagattgaaaaaaatcctaaacaaccgcaatacatcatctctgttagagggattggttataaattagaatac

SEQ ID NO: 2709 - DNA (genomic), 507 bp, Helicobacter pylori; double-stranded, circular
  misc_feature (B) LOCATION 1...507
  hypothetical: NO
  anti-sense: NO
ggtgatttaatggcaatagatgaagacaaacaaaaagcgatttctttagcgatcaaacaaattgataaggtttttggtaagggggcgttggtgcgccttggggataagcaagtagaaaagattgacgctatttctacgggctcgttagggttggatttagctttagggattgggggcgttccaaagggcaggatcattgaaatttatgggccagagtcaagcgggaagaccactttaagcttgcacattatcgcagaatgccaaaaaaatggcggcgtgtgcgcattcattgacgctgaacatgccctagatgtgtattatgctaagagattgggcgtggatacggaaaatttactcgtttcccaaccaagcacgggcgaagaagccttagagattttagaaacgatcaccagaagcggagggattgatttagtggtggtggattcggtggaggctcttacgcctaaagcagagattgatggggatatgggcgatcagcatgtgggc

SEQ ID NO: 2710 - DNA (genomic), 1029 bp, Helicobacter pylori; double-stranded, circular
  misc_feature (B) LOCATION 1...1029
  hypothetical: NO
  anti-sense: NO
atggcaatagatgaagacaaacaaaaagcgatttctttagcgatcaaacaaattgataaggtttttggtaagggggcgttggtgcgccttggggataagcaagtagaaaagattgacgctatttctacgggctcgttagggttggatttagctttagggattgggggcgttccaaagggcaggatcattgaaatttatgggccagagtcaagcgggaagaccactttaagcttgcacattatcgcagaatgccaaaaaaatggcggcgtgtgcgcattcattgacgctgaacatgccctagatgtgtattatgctaagagattgggcgtggatacggaaaatttactcgtttcccaaccaagcacgggcgaagaagccttagagattttagaaacgatcaccagaagcggagggattgatttagtggtggtggattcggtggcggctcttacgcctaaagcagagattgatggggatatgggcgatcagcatgtgggcttgcaagcaagacttatgagccatgcgttaaggaaaatcaccggtgttttgcataagatgaacactactctcatttttatcaatcaaatcagaatgaaaattggcatgacgggctatgggagtccaaaaactacaaccggaggcaatgccttaaaattctatgcgagcgttaggattgatattagaaggattgcggctttaaaacaaaacgaacagcatatcggtaatagggctaaagccaaagtggttaaaaataaagtcgctccgccctttagagaagcggaatttgacatcatgtttggggaagggatttctaaagagggcgaaatcattgactatggcgtgaaattagacatcgtggataagagcggggcatggcttagctaccaggataaaaagctagggcaaggccgagaaaacgctaaagccttattgaaagaagataaagccctagcggatgaaatcacccttaagattaaagagagtatcggctccaatgaagagatcatgcccttacccagtgagccttta

SEQ ID NO: 2711 - DNA (genomic), 1044 bp, Helicobacter pylori; double-stranded, circular
  misc_feature (B) LOCATION 1...1044
  hypothetical: NO
  anti-sense: NO
atggcaatagatgaagacaaacaaaaagcgatttctttagcgatcaaacaaattgataaggtttttggtaagggggcgttggtgcgccttggggataagcaagtagaaaagattgacgctatttctacgggctcgttagggttggatttagctttagggattgggggcgttccaaagggcaggatcattgaaatttatgggccagagtcaagcgggaagaccactttaagcttgcacattatcgcagaatgccaaaaaaatggcggcgtgtgcgcattcattgacgctgaacatgccctagatgtgtattatgctaagagattgggcgtggatacggaaaatttactcgtttcccaaccaagcacgggcgaagaagccttagagattttagaaacgatcaccagaagcggagggattgatttagtggtggtggattcggtggcggctcttacgcctaaagcagagattgatggggatatgggcgatcagcatgtgggcttgcaagcaagacttatgagccatgcgttaaggaaaatcaccggtgttttgcataagatgaacactactctcatttttatcaatcaaatcagaatgaagattggcatgacgggctatgggagtccagagactacaaccggaggcaatgccttaaaattctatgcgagcgttaggattgatattagaaggattgcggctttaaaacaaaacgaacagcatatcggtaatagggctaaagccaaagtggttaaaaataaagtcgctccgccctttagagaagcggaatttgacatcatgtttggggaagggatttctaaagagggcgaaatcattgactatggcgtgaaattagacatcgtggataagagcggggcatggcttagctaccaggataaaaagctagggcaaggccgagaaaacgctaaagccttattgaaagaagataaagccctagcggatgaaatcactcttaagattaaagagagtatcggctctaatgaagagatcatgcccttacccgatgagcctttagaagaaatggagtaa

SEQ ID NO: 2712 - DNA (genomic), 801 bp, Helicobacter pylori; double-stranded, circular
  misc_feature (B) LOCATION 1...801
  hypothetical: NO
  anti-sense: NO
gcaggcccagcacctacgccccaacgattctcttttacaaaacagagactacatcaaggtagaaaaaaagcaaacagcgctttagagagcgcttttaaagtgatagaaattttagaaaagcatttggaagaaatcgtggattctaaattcagcgcttctttagaagaagagcttgataatatcgctcaaaataaagccgactaccagcaagtcttaaaggacttttactacccttttatggataaaattgaagccgggaaaaagaatatcatctctcaaaaagtgcatgaaaaaaccggccaatcatgccctaaatgcgggggggaattagtcaaaaaaaatagccgttatggggagtttatcgcttgcaacaattaccctaaatgcaaatacatcaaacagactgaaaacgctaatgatgaagccaagcaagaattgtgcgaaaaatgtggaggggaaatggtgcaaaaattcagcagaaacggggcgtttttagcttgcaacaactaccctgaatgcaaaaacaccaaatcgttaaaaaacacccctaacgccaaagaaacaatagaaggcgtgaaatgcccagaatgcggaggggatattgccttaaaaaggagtaagaaaggctcgttttatggctgcaacaattaccctaaatgcaattttttatccaaccataagcccatcaacaagcgttgtgagaaatgccattatttgatgagtgaaagaatctatcgcaaaaaaaaggcgcatgaatgcatccaatgcaaagagcgcgtgtttttagaggaagataatggc

SEQ ID NO: 2713 - DNA (genomic), 906 bp, Helicobacter pylori; double-stranded, circular
  misc_feature (B) LOCATION 1...906
  hypothetical: NO
  anti-sense: NO
cctttaacctacttcacgctagacgctttgtttgagccgcatttagaagcgcaactcatcagctataagggcaacaaactcaaagcccaagaactcattgatgaaaaaaaagcccaagagattaaaaacgaattagaaaaagaaagctatattatttctagcattattaaaaaatctaaaaaatcccccacaccgccccctttcatgacttctactttacagcaaagcgcttccagtcttttaggcttttcgcccacaaaaaccatgagcatcgctcaaaaattatatgaaggcgtagccaccccacaaggcgttatgggggtgatcacttacatgaggaccgatagcttgaatatcgctaaagaggctttagaagaagcgagggctaagattttaaaagactatggcaaagactacctaccccctaaagccaaagtctattccagcaagaataaaaacgcccaagaagcccatgaagcgatcaggcccacttctattattttagagccaaacgctttaaaagactaccttaagcctgaagaattaaagctctatactttaatttacaaacgctttttagcttctcaaatgcaagacgctctttttgaaagccaaagcgtggttgtggcttgcgaaaaaggcgagtttaaagcgagtggcagaaaactcctttttgatggccattataaaattttaggcaatgacgataaggacaaattgctccccaatttgaaagaaaatgatcccattaaattagaaaaattagagagcaacgcccatgttacagagcctccagcacgctattcagaagcgagtttgattaaagttttagaaagtttaggcataggcaggcccagcacctacgccccaacgattctcttttacaaaacagagactacatcaagg

SEQ ID NO: 2714 - DNA (genomic), 1626 bp, Helicobacter pylori; double-stranded, circular
  misc_feature (B) LOCATION 1...1626
  hypothetical: NO
  anti-sense: NO
ttgtttgagccgcatttagaagcgcaactcatcagctataagggcaacaaactcaaagcccaagaactcattgatgaaaaaaaagcccaagagattaaaaacgaattagaaaaagaaagctatattatttctagcattattaaaaaatctaaaaaatcccccacaccgccccctttcatgacttctactttacagcaaagcgcttccagtcttttaggcttttcgcccacaaaaaccatgagcatcgctcaaaaattatatgaaggcgtagccaccccacaaggcgttatgggggtgatcacttacatgaggaccgatagcttgaatatcgctaaagaggctttagaagaagcgagggctaagattttaaaagactatggcaaagactacctaccccctaaagccaaagtctattccagcaagaataaaaacgcccaagaagcccatgaagcgatcaggcccacttctattattttagagccaaacgctttaaaagactaccttaagcctgaagaattaaagctctatactttaatttacaaacgctttttagcttctcaaatgcaagacgctctttttgaaagccaaagcgtggttgtggcttgcgaaaaaggcgagtttaaagcgagtggcagaaaactcctttttgatggccattataaaattttaggcaatgacgataaggacaaattgctccccaatttgaaagaaaatgatcccattaaattagaaaaattagagagcaacgcccatgttacagagcctccagcacgctattcagaagcgagtttgattaaagttttagaaagtttaggcataggcaggcccagcacctacgccccaacgatttctcttttacaaaacagagactacatcaaggtagaaaaaaagcaaatcagcgctttagagagcgcttttaaagtgatagaaattttagaaaagcattttgaagaaatcgtggattctaaattcagcgcttctttagaagaagagcttgataatatcgctcaaaataaagccgactaccagcaagtcttaaaggacttttactacccttttatggataaaattgaagccgggaaaaagaatatcatctctcaaaaagtgcatgaaaaaaccggccaatcatgccctaaatgcgggggggaattagtcaaaaaaaatagccgttatggggagtttatcgcttgcaacaattaccctaaatgcaaatacatcaaacagactgaaaacgctaatgatgaagccaagcaagaattgtgcgaaaaatgtggaggggaaatggtgcaaaaattcagcagaaacggggcgtttttagcttgcaacaactaccctgaatgcaaaaacaccaaatcgttaaaaaacacccctaacgccaaagaaacaatagaaggcgtgaaatgcccagaatgcggaggggatattgccttaaaaaggagtaagaaaggctcgttttatggctgcaacaattaccctaaatgcaattttttatccaaccataagcccatcaacaagcgttgtgagaaatgccattatttgatgagtgaaagaatctatcgcaaaaaaaaggcgcatgaatgcatccaatgcaaagagcgcgtgtttttagaggaagataatggctaa

SEQ ID NO: 2715 - DNA (genomic), 771 bp, Helicobacter pylori; double-stranded, circular
  misc_feature (B) LOCATION 1...771
  hypothetical: NO
  anti-sense: NO
atgaaagttatcaaaacagcacctttgatcccatcagaaattaaggtgctagagaaagagggcaatcgggttaagatttctctggctccatttgagtttggttacgctgttacgctcgctcaccctattagaaggctcttgcttttaagctctgtggggtatgctcccgtaggtttaaagattgaaggtgtgcatcatgagtttgactctttaaggggggttactgaagatgtgtcgctttttatcatgaatttaaaaaatatccgctttatagccaaggcgttagtggggcaggatagctctttagaaaaccaatcggttgtggtggattattcttttaaagggcctatggagcttagggctagggatttgaattctgatcatatagaaatcgtcaatccggaaatgcccctagcgacaatcaacgaagacgctcaattgaatttttcgctcattatctataaaggaatggggtatgtcccaagcgaaaacacaagggaattgatgcctgagggctacatgccattagacggctctttcacgccgattaaaaatgtggtttatgagattgaaaacgttttagttgagggcgatcctaactatgaaaaaatcatttttgatattgaaacggacgggcagattgacccttataaagcgtttttatcagcggtgaaagtgatgagcaagcaactgggcgtttttggcgaaagacccattgctaacacggagtattcaggtgattacgctcaagagatgacgctaaagacttga

SEQ ID NO: 2716 - DNA (genomic), 1035 bp, Helicobacter pylori; double-stranded, circular
  misc_feature (B) LOCATION 1...1035
  hypothetical: NO
  anti-sense: NO
agcatgaaagttatcaaaacagcacctttgatcccatcagaaattaaggtgctagagaaagagggcaatcgggttaagatttctctggctccatttgagtttggttacgctgttacgctcgctcaccctattagaaggctcttgcttttaagctctgtggggtatgctcccgtaggtttaaagattgaaggtgtgcatcatgagtttgactctttaaggggggttactgaagatgtgtcgctttttatcatgaatttaaaaaatatccgctttatagccaaggcgttagtggggcaggatagctctttagaaaaccaatcggttgtggtggattattcttttaaagggcctatggagcttagggctagggatttgaattctgatcatatagaaatcgtcaatccggaaatgcccctagcgacaatcaacgaagacgctcaattgaatttttcgctcattatctataaaggaatggggtatgtcccaagcgaaaacacaagggaattgatgcctgagggctacatgccattagacggctctttcacgccgattaaaaatgtggtttatgagattgaaaacgttttagttgagggcgatcctaactatgaaaaaatcatttttgatattgaaacggacgggcagattgacccttataaagcgtttttatcagcggtgaaagtgatgagcaagcaactgggcgtttttggcgaaagacccattgctaacacggagtattcaggtgattacgctcaatggtatgacgctaaagacttgagtgctaagattgaaagcatgaatttgagcgttagttgttttaattgcttggataaaatcggcatcaagtatgtgggcgaattggttttgatgagcgaagaagagcttaagggcgtgaaaaacatgggtaaaaaatcctatgatgaaatcgctgaaaaattgaatgatttgggctatccggtaggcacagaattaagccctgaacaaagagagagtttaaagaaaagattagaaaaattagaagataaaggaggtaacgac

SEQ ID NO: 2717 - DNA (genomic), 1929 bp, Helicobacter pylori; double-stranded, circular
  misc_feature (B) LOCATION 1...1929
  hypothetical: NO
  anti-sense: NO
aacttgttagaaactttgcaattaaaccctgagcagctaaaagcggcttcggctttgcaagggcataatttaatcattgcgagcgctggcacgggaaaaacttctaccattgtggggcgcattttacacctgcttaataacggcatcaagcctgaagaaatcttgcttttgactttcaccaataaagcgagtaatgagatgatcgctagggtggctaaatattccaaattaagctccaaaattgaagcgggcactttccatgcggtggcgtatcgctatttgaaagagcattacccaaacttaagcctaaaacaacctaaggaattaagaaagcttttagaaagcattgtggacactaaaaacgcgctaacagatgaggataaaaagccctacacttcgcagcatttatacgccctttattcgctttacactaacgctctaaaacaagaagattttagcgcttggctttctagtaaaaaccctgaacacgcgccatacgccgccttttatgaaaacattttagaagagtttgaaaacactaaaaaaaagcatgattatattgactataacgacttactgctgctctttaaaaaagcgatgctagaaagatctagcccttataaagaagtgctttgcgatgaatttcaagacactaaccccttacaagaatccattttagacgctatcaacccccctagtttgttttgcgtgggcgattacgatcagagcatttacgcttttaacggggcggatatttctatcatttctaatttcactcaaaaatacaaaaacgcccgagttttcacgctcaccaaaaactaccgctcttctaaagagattttagatctcgccaatcaagtgatacagcacaaccaacgcatttaccctaaaaatttagaagtggtgaaatcagggaaattcaataaacccacgcttttaaattacaacgacaatatcgcgcaatgccaagacatcgccaaacgcattgtcatgcgaaaaaattttaaagaagtggcagtgatttttaggaataacgctagcgcggatcaattagaagccgctttaagatcccacaacgtgccaagcaaaagaaaagggagcgcgagtttttttgaatccaaagaagtggcgttagcgttagatatttgcgcgctcttatttaaccccaaagacattatggcagcgattcatattttaagctatatcagcgatattggctctaacaccgctaaagatattcatgaagccttaatgcttttaggcaatggcgatctcaaatcagccttaattcagcccaatcaagaagctaaaatttacacgaagaaaaaagaaatcacctccatggggctttttgaagaaatttttgccctagaaaacagctcaaggtttaacagcgtgatagacaaggcgtttcattcgcacccggtgttgatgcaccctaaaatctcgctcaatggggctaaaatgctgagcgattttttcattctctataccaaagcccctattcattcccctagcgctttaatcaaacacattctagaaagcgcgttttttcaaacctttaaaacacgcctattaaaagagcgttccaaaaatagggacgaatcttataacgagtttaaaaaactccaagcgcaaaaacgcttcaatgaaaaaatggacttgctgagttctttagcgaaaaattaccaaaatttagggcgttttttaaacggcactttaataggctcaagtgaagccacgcaaggcgagggcgtgaatctattgagcgtgcatgcttctaaaggcttagagtttaaagacgtttatattatagatttaatggagggccgtttccctaaccacaaactcatgaataccggtgggggcattgaagaagaaaggcggcttttttatgtcgctatcaatagcgcaagtttcccagtaggt

SEQ ID NO: 2718 - DNA (genomic), 2031 bp, Helicobacter pylori; double-stranded, circular
  misc_feature (B) LOCATION 1...2031
  hypothetical: NO
  anti-sense: NO
ttgttagaaactttgcaattaaaccctgagcagctaaaagcggcttcggctttgcaagggcataatttaatcattgcgagcgctggcacgggaaaaacttctaccattgtggggcgcattttacacctgcttaataacggcatcaagcctgaagaaatcttgcttttgactttcaccaataaagcgagtaatgagatgatcgctagggtggctaaatattccaaattaagctccaaaattgaagcgggcactttccatgcggtggcgtatcgctatttgaaagagcattacccaaacttaagcctaaaacaacctaaggaattaagaaagcttttagaaagcattgtggacactaaaaacgcgctaacagatgaggataaaaagccctacacttcgcagcatttatacgccctttattcgctttacactaacgctctaaaacaagaagattttagcgcttggctttctagtaaaaaccctgaacacgcgccatacgccgccttttatgaaaacattttagaagagtttgaaaacactaaaaaaaagcatgattatattgactataacgacttactgctgctctttaaaaaagcgatgctagaaagatctagcccttataaagaagtgctttgcgatgaatttcaagacactaaccccttacaagaatccattttagacgctatcaacccccctagtttgttttgcgtgggcgattacgatcagagcatttacgcttttaacggggcggatatttctatcatttctaatttcactcaaaaatacaaaaacgcccgagttttcacgctcaccaaaaactaccgctcttctaaagagattttagatctcgccaatcaagtgatacagcacaaccaacgcatttaccctaaaaatttagaagtggtgaaatcagggaaattcaataaacccacgcttttaaattacaacgacaatatcgcgcaatgccaagacatcgccaaacgcattgtcatgcgaaaaaattttaaagaagtggcagtgatttttaggaataacgctagcgcggatcaattagaagccgctttaagatcccacaacgtgccaagcaaaagaaaagggagcgcgagtttttttgaatccaaagaagtggcgttagcgttagatatttgcgcgctcttatttaaccccaaagacattatggcagcgattcatattttaagctatatcagcgatattggctctaacaccgctaaagatattcatgaagccttaatgcttttaggcaatggcgatctcaaatcagccttaattcagcccaatcaagaagctaaaatttacacgaagaaaaaagaaatcacctccatggggctttttgaagaaatttttgccctagaaaacagctcaaggtttaacagcgtgatagacaaggcgtttcattcgcacccggtgttgatgcaccctaaaatctcgctcaatggggctaaaatgctgagcgattttttcattctctataccaaagcccctattcattcccctagcgctttaatcaaacacattctagaaagcgcgttttttcaaacctttaaaacacgcctattaaaagagcgttccaaaaataaggacggatcttataacgagtttaaaaaactccaagcgcaaaaacgcttcaatgaaaaaatggacttgctgagttctttagcgaaaaattaccaaaatttagggcgttttttaaacggcactttaataggctcaagtgaagccacgcaaggcgagggcgtgaatctattgagcgtgcatgcttctaaaggcttagagtttaaagacgtttatattatagatttaatggagggccgtttccctaaccacaaactcatgaataccggtgggggcattgaagaagaaaggcggcttttttatgtcgctatcactagggctaaggaaaatttatggctttcttatgcgaaaaacgaattgagggaaaacgccaaacccaaagagcataagccttcggtgtttttgtatgaagcggggcttttgaagcttgattcaaaataa

SEQ ID NO: 2719 - DNA (genomic), 1146 bp, Helicobacter pylori; double-stranded, circular
  misc_feature (B) LOCATION 1...1146
  hypothetical: NO
  anti-sense: NO
ttggagaattttttgtatcaattagagattaaaactttagggcaggttttcacccctaaaaatatagtggatttcatgctcattctaaagcacaatcatgggagtgttttagagccgagtgcgggcgatgggagttttttaaagcgcttaaaaaaggctgtagggattgaaatcgatcctaaaatctgccctaaaaatgccctttgcatggacttttttgactaccctttagaaaaccaatttaacaccattatcggtaacccgccctatgtcaaacacaaggatattgcgccaagcacgaaagaaaaactccattacagcctttttgatgaaaggagtaacctctacttgtttttcatagaaaaagcgatcaagcatttaaagcctaaaggtgaattgattttcatcaccccaagggattttttaaaatccacttctagcgtgaaattaaacgaatggatttacaaagaaggcacgataacgcatttttttgaattaggcgatcaaaagattttcccaaacgccatgcctaattgcgtgatttttcgtttttgtaagggtgatttcagtagaatcaccaacgatggtttgcaattcgtgtgcaaaaaaggcattttgtatttcctcaaccaatcttacacgcaaaaattaagcgaggtttttaaggttaaagtgggggcagtgagcgggtgcgataagatttttaaaaatgaaacatacgggaatttagaatttgtcacctcaatcaccaaaagaaccaatgttttagaaaaaatggtttttgtcaataagcctaatgactatttactccagcataaagacagcttgatgcaaagaaagattaaaaagttcaatgaaaataattggtttgaatgggggagaatgcatcacatatcccctaaaaaacgcatttatgtcaacgccaaaacgcaccaaaaaaacccctttttcatccaccaatgccctaattatgacggctctattttagcgctattcccttataaccaaaacttagatttacaaaacctctgcgacaaactcaacgctatcaactggcaagaattaggctttgtgtgcgatgggcgttttttgttttcgcaacgctctttagaaaacgctcttttgcctaaagactttttaaactag

SEQ ID NO: 2720 - DNA (genomic), 1152 bp, Helicobacter pylori; double-stranded, circular
  misc_feature (B) LOCATION 1...1152
  hypothetical: NO
  anti-sense: NO
gagatttttttggagaattttttgtatcaattagagattaaaactttagggcaggttttcacccctaaaaatatagtggatttcatgctcattctaaagcacaatcatgggagtgttttagagccgagtgcgggcgatgggagttttttaaagcgcttaaaaaaggctgtagggattgaaatcgatcctaaaatctgccctaaaaatgccctttgcatggacttttttgactaccctttagaaaaccaatttaacaccattatcggtaacccgccttatgtcaaacacaaggatattgcgccaagcacgaaagaaaaactccattacagcctttttgatgaaaggagtaacctctacttgtttttcatagaaaaagcgatcaagcatttaaagcctaaaggtgaattgattttcatcaccccaagggattttttaaaatccacttctagcgtgaaattaaacgaatggatttacaaagaaggcacgataacgcatttttttgaattaggcgatcaaaagattttcccaaacgccatgcctaattgcgtgatttttcgtttttgtaagggtgatttcagtagaatcaccaacgatggtttgcaattcgtgtgcaaaaaaggcattttgtatttcctcaaccaatcttacacgcaaaaattaagcgaggtttttaaggttaaagtgggggcagtgagcgggtgcgataagatttttaaaaatgaaacatacgggaatttagaatttgtcacctcaatcaccaaaagaaccaatgttttagaaaaaatggtttttgtcaataagcctaatgactatttactccagcataaagacagcttgatgcaaagaaagattaaaaagttcaatgaaaataattggtttgaatgggggagaatgcatcacatatcccctaaaaaacgcatttatgtcaacgccaaaacgcaccaaaaaaacccctttttcatccaccaatgccctaattatgacggctctattttagcgctattcccttataaccaaaacttagatttacaaaacctctgcgacaaactcaacgctatcaactggcaagaattaggctttgtgtgcgatgggcgttttttgttttcgcaacgctctttagaaaacgctcttttgcctaaagactttttaaac

SEQ ID NO: 2721 - DNA (genomic), 1293 bp, Helicobacter pylori; double-stranded, circular
  misc_feature (B) LOCATION 1...1293
  hypothetical: NO
  anti-sense: NO
atgcaaaaaatcattgaggattcattagaattagctaaaaaactgcaagatagtatcagtaaccatttgagcgagcaagaaaaagcgttccattttaaaatgcaaaagcttttaaacaaccccgaaaacaaagtcatgcttatagagcttatggatcggagttttaggtgtttggacaataaagcccgctttgaaatgattgagcatgttttagacaaatacaaaagccgtgagattttttcttcgtttgaaaaatggcttttaatggggtttttaagctttgggaaaatgctgcctgatatgagcgtgcctttctttgtcaataaaatcagaagcgacacgaaagcaatggtcttggatcaagaagagagccaattaagagagcggattttaaaaagaaaaaatgagaaaatcattttgaacgtgaattttattggcgaggaagttttaggcgaagaagaagcgtctgcgcgttttgaaaaatactctcaagccctaaaatccaactacatccaatacatttccattaaaatcacaacgattttttctcaaatcaatatccttgattttgaatactctaaaaaagagattgtcaaacgcttagacgctctttatgctttagctttagaagaagaaaaaaagcaaggcatgcctaaattcatcaacttggatatggaggaatttagggatttagagcttacggtggaatcgtttatggagtctatcgccaaatttgatttgaacgccggtattgtgttgcaagcttatatccctgattcttatgaatatttgaaaaaactgcacgctttttctaaagaaagggttttaaaagggttaaagcctattaaaatccgctttgttaagggagcgaacatggagagcgaagagacgatcgcttctatgaaagactgggcgttacccacattttctagtaagcaagacaccgattctaattacaacaaaatgctggattttgttttagagggcgacaattataaatacattcatattggtgcagcgagccataatatttttgaaatcgcctatgtctatacgcgcatccatgcccttaatgaccctgttgtgttagagcattttagctttgaaatgctagagggcatgagcttgcaagcgagccaggaattaaaagagatgcacaaactcattctttatgcgccggtgtgcgatgaagcgcatttcaacaatgcaatcgcttacttggtgaggaggctagatgaaaacacttcaagcgataatttcatgaaagctttctttaacctcaaagtaggcacg

SEQ ID NO: 2722 - DNA (genomic), 1302 bp, Helicobacter pylori; double-stranded, circular
  misc_feature (B) LOCATION 1...1302
  hypothetical: NO
  anti-sense: NO
ataaaaggtaagctcatgcaaaaaatcattgaggattcattagaattagctaaaaaactgcaagatagtatcagtaaccatttgagcgagcaagaaaaagcgttccattttaaaatgcaaaagcttttaaacaaccccgaaaacaaagtcatgcttatagagcttatggatcggagttttaggtgtttggacaataaagcccgctttgaaatgattgagcatgttttagacaaatacaaaagccgtgagattttttcttcgtttgaaaaatggcttttaatggggtttttaagctttgggaaaatgctgcctgatatgagcgtgcctttctttgtcaataaaatcagaagcgacacgaaagcaatggtcttggatcaagaagagagccaattaagagagcggattttaaaaagaaaaaatgagaaaatcattttgaacgtgaattttattggcgaggaagttttaggcgaagaagaagcgtctgcgcgttttgaaaaatactctcaagccctaaaatccaactacatccaatacatttccattaaaatcacaacgattttttctcaaatcaatatccttgattttgaatactctaaaaaagagattgtcaaacgcttagacgctctttatgctttagctttagaagaagaaaaaaagcaaggcatgcctaaattcatcaacttggatatggaggaatttagggatttagagcttacggtggaatcgtttatggagtctatcgccaaatttgatttgaacgccggtattgtgttgcaagcttatatccctgattcttatgaatatttgaaaaaactgcacgctttttctaaagaaagggttttaaaagggttaaagcctattaaaatccgctttgttaagggagcgaacatggagagcgaagagacgatcgcttctatgaaagactgggcgttacccacattttctagtaagcaagacaccgattctaattacaacaaaatgctggattttgttttagagggcgacaattataaatacattcatattggtgcagcgagccataatatttttgaaatcgcctatgtctatacgcgcatccatgcccttaatgaccctgttgtgttagagcattttagctttgaaatgctagagggcatgagcttgcaagcgagccaggaattaaaagagatgcacaaactcattctttatgcgccggtgtgcgatgaagcgcatttcaacaatgcaatcgcttacttggtaagaaggctagatgaaaacacttcaagcgataatttcatgaaagctttctttaacctcaaagta

SEQ ID NO: 2723 - DNA (genomic), 216 bp, Helicobacter pylori; double-stranded, circular
  misc_feature (B) LOCATION 1...216
  hypothetical: NO
  anti-sense: NO
gatttacgcacttaccctactgaaaagcttttagaaatcgctaacaagctcaaagtggaaaacccccaagaattcaaacgacaagacttgatgtttgaaattttaaaaacccaagtcacgcaaggcggatacattctttttaccgggattttagaaatcatgccttttggcgatggctttttaagagggtttgacgggagtttttcagacagggca

SEQ ID NO: 2724 - DNA (genomic), 213 bp, Helicobacter pylori; double-stranded, circular
  misc_feature (B) LOCATION 1...213
  hypothetical: NO
  anti-sense: NO
ttacgcacttaccctactgaaaagcttttagaaatcgctaacaagctcaaagtggaaaacccccaagaattcaaacgacaagacttgatgtttgaaattttaaaaacccaagtcacgcaaggcggatacattctttttaccgggattttagaaatcatgccttttggcgatggctttttaagagggtttgacgggagtttttcagacagggca

SEQ ID NO: 2725 - DNA (genomic), 402 bp, Helicobacter pylori; double-stranded, circular
  misc_feature (B) LOCATION 1...402
  hypothetical: NO
  anti-sense: NO
gtgggggcgtggatgcaaacgccttgcacaggcccaagcgcttttttggagccgcaagggaatattgaagaaggcgggagcttgacgattatcgctacggcgttgattgaaacgggatctagaatggatgaggtgatttttgaagaatttaaaggcaccgggaatagcgaaatcgttttagcgagaaatattgcggacaggcgtatttacccggcctttgatattttaaaatccggcacacgaaaagataatatcttgcttggaaaagaccgcttgactaaagtgtgggttttaaggaatgtgatgcaacaaatggacgacatagaagccttaagctttgtgtattctaaaatgcaacaaactaaggacaatgaagaatttttaaatttaatgaatgaaaaa

SEQ ID NO: 2726 - DNA (genomic), 642 bp, Helicobacter pylori; double-stranded, circular
  misc_feature (B) LOCATION 1...642
  hypothetical: NO
  anti-sense: NO
ggaatgggcgatattgttaccggtccaaaggtgcgatcccccaaggatcaagaaaaatactacgcccttttaaaaatagaagccattaattacttgccttcagatgagattaaaaaccgccctttgtttgacaatctaacccccctattccctgatgaacagatcaaattagaatacgaacccactaaagttaccggcagaatgctagatttattcagccctgtggggaaaggtcaaagggctttgatcgttgcaccaccaaggactgggaaaacggaactgatgaaagaactcgcccaaggcatcacttctaaccaccctgaagtggaattgattatccttttagtggatgagcgccctgaagaagttacggacatgcaacgaagcgttaaaggtcaagtttttagctccacttttgatttgccagcaaacaaccacataagaatcgctgaattagtcttagaaagggcgaaaaggcgcgtggaaatgggcaaagatgtggtggttttattagattctatcacccgtttagccagagcgtataacgctgtaacgccttcaagcggtaaggttttaagtgggggcgtggatgcaaacgccttgcacaggcccaagcgcttttttggagccgcaagggaatat

SEQ ID NO: 2727 - DNA (genomic), 1317 bp, Helicobacter pylori; double-stranded, circular
  misc_feature (B) LOCATION 1...1317
  hypothetical: NO
  anti-sense: NO
atgaacgaaaacgcgcctacgcacaaaagttcgcacaaggtcaaaacccacacgccagtgagcggttatcacattgaagatttacgcacctaccctactgaaaagcttttagaaatcgctaacaagctcaaagtggaaaacccccaagaattcaaacgacaagacttgatgtttgaaattttaaaaacccaagtcacgcaaggcggatacattctttttaccgggattttagaaatcatgcctgatggctatggctttttaagagggtttgacgggagtttttcagacgggcataacgacacttatgtcagcccttctcaaatcaggcgttttgctttaaggaatggcgatattgttaccggtcaagtgcgatcccccaaggatcaagaaaaatactacgcccttttaaaaatagaagccattaattacttgccttcagatgagattaaaaaccgccctttgtttgacaatctaacccccctattccctgatgaacagatcaaattagaatacgaacccactaaagttaccggcagaatgctagatttattcagccctgtggggaaaggtcaaagggctttgatcgttgcaccaccaaggactgggaaaacggaactgatgaaagaactcgcccaaggcatcacttctaaccaccctgaagtggaattgattatccttttagtggatgagcgccctgaagaagttacggacatgcaacgaagcgttaaaggtcaagtttttagctccacttttgatttgccagcaaacaaccacataagaatcgctgaattagtcttagaaagggcgaaaaggcgcgtggaaatgggcaaagatgtggtggttttattagattctatcacccgtttagccagagcgtataacgctgtaacgccttcaagcggtaaggttttaagtgggggcgtggatgcaaacgccttgcacaggcccaagcgcttttttggagccgcaaggaatattgaagaaggcgggagcttgacgattatcgctacggcgttgattgaaacgggatctagaatggatgaggtgatttttgaagaatttaaaggcaccgggaatagcgaaatcgttttagcgagaaatattgcggacaggcgtatttacccggcctttgatattttaaaatccggcacacgaaaagataatatcttgcttggaaaagaccgcttgactaaagtgtgggttttaaggaatgtgatgcaacaaatggacgacatagaagccttaagctttgtgtattctaaaatgcaacaaactaaggacaatgaagaatttttaaatttaatgaatgaaaaataa

SEQ ID NO: 2728 - DNA (genomic), 165 bp, Helicobacter pylori; double-stranded, circular
  misc_feature (B) LOCATION 1...165
  hypothetical: NO
  anti-sense: NO
aaagaagacgtgcgcgaaatcccccccatggaaatgctcgcttctagctcttgctctttggcgatcgtgttagaaaacgatgtgaaaaaagagtttttaagacaaatcaaagagagcgctctaaaaccccagggtaaacggccccttgtatttgatcatcaaaga

SEQ ID NO: 2729 - DNA (genomic), 177 bp, Helicobacter pylori; double-stranded, circular
  misc_feature (B) LOCATION 1...177
  hypothetical: NO
  anti-sense: NO
gtgaaaaaagagtttttaagacaaatcaaagagagcgctctaaaacaccagggtaaacgccccttgtatttgatcatcaaagataaggataagcaattcaaaatccaaagcgatttaatggtaaatgaaaagattaaggacgattttaaagggttagagtggagggatttagcttga

SEQ ID NO: 2730 - DNA (genomic), 213 bp, Helicobacter pylori; double-stranded, circular
  misc_feature (B) LOCATION 1...213
  hypothetical: NO
  anti-sense: NO
atcgcaacgcaggcgtgcatgccgcagcgcttagtggtggatagccaaaaagaattgtggcacaaaacccctttatttgcctctgaaaaaaccggcggtatcgttacgcaatattccatgaagtatttagagccggtggatctgatcaagtttgatttcttggggcttaaaacgttgaccatgattgatgatgcgtttaaattcattaagacg

SEQ ID NO: 2731 - DNA (genomic), 234 bp, Helicobacter pylori; double-stranded, circular
  misc_feature (B) LOCATION 1...234
  hypothetical: NO
  anti-sense: NO
atgctcactagcgaatccaataagatcgaatccgcggcgcgctatattgatgaggttagggctttagaaattgaagtgatgcctccgcacatcaattcttctatgcaagatttcagcgtggcggagtttaaaaatcaaaagggcgaattagaaaagaaaatcgtgttcggtttgggagcggttaagggggttgggggtgagccgattaaaaacatcattgaagaaaggggctaa

SEQ ID NO: 2732 - DNA (genomic), 303 bp, Helicobacter pylori; double-stranded, circular
  misc_feature (B) LOCATION 1...303
  hypothetical: NO
  anti-sense: NO
gcgatgctcactagcgaatccaataagatcgaatccgcggcgcgctatattgatgaggttagggctttagaaattgaagtgatgcctccgcacatcaattcttctatgcaagatttcagcgtggcggagtttaaaaatcaaaagggcgaattagaaaagaaaatcgtgttcggtttgggagcggttaagggggttgggggtgagccgattaaaaacatcattgaagaaagggctaaaggggattataagaggtggaagatttcatttcacgggtggatttttctaaactcactaaaaaatctt

SEQ ID NO: 2733 - DNA (genomic), 300 bp, Helicobacter pylori; double-stranded, circular
  misc_feature (B) LOCATION 1...300
  hypothetical: NO
  anti-sense: NO
atgctcactagcgaatccaataagatcgaatccgcggcgcgctatattgatgaggttagggctttagaaattgaagtgatgcctccgcacatcaattcttctatgcaagatttcagcgtggcggagtttaaaaatcaaaagggcgaattagaaaagaaaatcgtgttcggtttgggagcggttaagggggttgggggtgagccgattaaaaacatcattgaagaaagggctaaaggggattataagaggtggaagatttcatttcacgggtggatttttctaaactcactaaaaaatctt

SEQ ID NO: 2734 - DNA (genomic), 468 bp, Helicobacter pylori; double-stranded, circular
  misc_feature (B) LOCATION 1...468
  hypothetical: NO
  anti-sense: NO
aaaaagagagcattaaacctatcatcggcatggaagcgtatatccataacgatgacaccctctctggcaaagaaaccggacaacgctttccatttgtgcttgttcgctaaaacccaagagggctacgaaaatttgatgtttttaagctctatggcgtatttagaagggttttattatttcccgcgcatcaataaaaagcttctaagggagcattctaaaggcattatcgcttctagcgcgtgcttgcaaggggaagtcaattatcatttgaatactaacaatgagagaaaccgcaagtatggggttaaaggctatgatgaagctaaaagaatcgcttgcgaataccaagagatttttgaagacgatttttatttagaaatcatgcgtcatggcattttggatcagcgattcattgatgaacaagtcattaaaatgtctttagaaacagggttaaaaatcattgccacc

SEQ ID NO: 2735 - DNA (genomic), 639 bp, Helicobacter pylori; double-stranded, circular
  misc_feature (B) LOCATION 1...639
  hypothetical: NO
  anti-sense: NO
ttttttccccccccccaaccaaaaagggaagggggaggggaggttgttcgccccaccaacccacaaaaaaacgaaagggcggaggccgccaggggcgaggaccgacccaccgcgccaaataaggacacagaaggtcccctggctctttacccagagcaaatagaaaaaaaaattgaagtcattacgaacatgaaattcccagggtatatgctgatcgtgtgggattttatccgttacgctaaagaaatgggcattcctgtagggcctggtagggggagtgcggccgggagtttggtggcttttgccttaaaaatcaccgatattgaccctttgaaatacgatttgctctttgaaaggtttttaaaccctgaacgagtcagcatgcctgatattgatacggatttttgccagcgccggcgtaaagaaatcatagaatacatggttgaaaaatacggcaaatacaatgtggcacaagtcatcacctttaataagatgttggctaagggcgtgatcagagatgtcgcaagggttttagacatgccttataaggaggctgatgattttgccaaactcatacctaatcgcttaggcatcacgcttaagggctatgaaaaaaatggcgagttcatagagggggcg

SEQ ID NO: 2736 - DNA (genomic), 768 bp, Helicobacter pylori; double-stranded, circular
  misc_feature (B) LOCATION 1...768
  hypothetical: NO
  anti-sense: NO
gtggaagatttcatttcacgggtggatttttctaaactcactaaaaaatctttagagccattggtgaaatcagggagcttggacaatttgggctacactagaaaaaccatgctcgctaacttggatttgatctgtgatgctgggcgcgctaaagacaaggctaatgaaatgatgcaagggggtaattctctttttggagccatggaaggcggaattaaagagcaggttgttttggacatggttgatttgggcgaacatgacgctaaaacgcttttagaatgcgaatacgagactttaggaatccatgtttcaggcaaccctttagacgagtttaaagaagaaattaagggctttaaaaatttagtcaaaagcattgatattgaagagctagagattggctcgcaggcttatttgctcggtaaaatcatggaagttaaaaagaaaattggcaaacgaagcggtaagccttatggcacagcggacattttggatcgatacggcaagtttgaactcatgctttttgaaaagcaattaaacgctttagaagagttggatattaataagcccttagtgtttaaatgcaagattgaagagcaagaagaagtggcgcgattaaggctttttgaaatcttggatttagagagtgctagggaggttaaaatccctaaagcccgctataaagacctgaaaagcaaaaagaagacgtgcgcgaaatcccccccatggaaatgctcgcttctagctcttgctctttggcgatcgtgttag

SEQ ID NO: 2737 - DNA (genomic), 1815 bp, Helicobacter pylori; double-stranded, circular
  misc_feature (B) LOCATION 1...1815
  hypothetical: NO
  anti-sense: NO
atgaaagagaataaagccttcacgcatttgcacttacacacagaatattcgcttttagacggggcgaataagattaaaatcttagccaaacgcattaaagaattgggcatgaaaagcgtgagcgtaaccgaccatgggaacatgtttggagcgattgatttttacacgagcatgaaaaaagaaggcattaagcctatcatcggcatggaagcgtatatccataacgatgacaacctctctagcaaagaaaccaagcaacgcttccatttgtgcttgttcgctaaaaaccaagagggctatgaaaatttgatgtttttaagctctatggcgtatttagaagggttttattatttcccgcgcatcaataaaaagcttctaagggagcattctaaaggcattatcgcttctagcgcgtgcttgcaaggggaagtcaattatcatttgaatactaacaatgagagaaaccgcaagtatggggctaaaggctatgatgaagctaaaagaatcgcttgcgaataccaagagatttttgaagacgatttttatttagaaatcatgcgtcatggcattttagatcagcgattcattgatgaacaagtcattaaaatgtctttagaaacagggttaaaaatcattgccaccaacgacacccactacaccatgcctaatgacgctaaggctcaagaagtagcgatgtgcgtagcgatgggtaaaaccctaaacgataaggggcgcttgaaacactccgtgcatgagttttacattaaatcccctgaagaaatggcgaagctgtttgcagatattccagaagctttagaaaacacccaagaaatcgctgataaatgcgttttagagattgatttaaaagacgataaaaagaatcccccaacccccccaagtttcaaattcactaaagcttacgctcaaaatgaggggctgagttttgaagatgacgcttcttatttcgcccataaggctagagagggcttgagagaacgcttaatcttagtgccagaagaaaagcatgaacaatacaaagagcggctagaaaaagaaattgaagtcattacgaacatgaaattcccagggtatatgctgatcgtgtgggattttatccgttacgctaaagaaatgggcattcctgtagggcctggtagggggagtgcggccgggagtttggtggcttttgccttaaaaatcaccgatattgaccctttgaaatacgatttgctctttgaaaggtttttaaaccctgaacgagtcagcatgcctgatattgatacggatttttgccagcgccggcgtaaagaaatcatagaatacatgattgaaaaatacggcaaatacaatgtggcacaagtcatcacctttaataagatgttggctaagggcgtgatcagagatgtcgcaagggttttggacatgccttataaggaggctgatgattttgccaaactcatacctaatcgcttaggcatcacgcttaagggctatgaaaaaaatggcgagttcatagagggggcgtgggaattagagcctaaaatcaaggaattggtggagagcaatgaagtagccaaacaagtgtgggaatattcgctcaatttagagaatttgaatcgcaacgcaggcgtgcatgccgcagccttagtggtggatagccaaaaagaattgtggcacaaaacccctttatttgcctctgaaaaaaccggcggtatcgttacgcaatattccatgaagtatttagagccggtggatttgatcaagtttgacttcttggggcttaaaaccttgaccgtgattgatgatgcgctttaa

SEQ ID NO: 2738 - DNA (genomic), 3636 bp, Helicobacter pylori; double-stranded, circular
  misc_feature (B) LOCATION 1...3636
  hypothetical: NO
  anti-sense: NO
atgaaagagaataaagccttcacgcatttgcacttacacacagaatattcgcttttagacggggcgaataagattaaaatcttagccaaacgcattaaagaattgggcatgaaaagcgtgagcgtaaccgaccatgggaacatgtttggagcgattgatttttacacgagcatgaaaaaagaaggcattaagcctatcatcggcatggaagcgtatatccataacgatgacaacctctctagcaaagaaaccaagcaacgcttccatttgtgcttgttcgctaaaaaccaagagggctatgaaaatttgatgtttttaagctctatggcgtatttagaagggttttattatttcccgcgcatcaataaaaagcttctaagggagcattctaaaggcattatcgcttctagcgcgtgcttgcaaggggaagtcaattatcatttgaatactaacaatgagagaaaccgcaagtatggggctaaaggctatgatgaagctaaaagaatcgcttgcgaataccaagagatttttgaagacgatttttatttagaaatcatgcgtcatggcattttagatcagcgattcattgatgaacaagtcattaaaatgtctttagaaacagggttaaaaatcattgccaccaacgacacccactacaccatgcctaatgacgctaaggctcaagaagtagcgatgtgcgtagcgatgggtaaaaccctaaacgataaggggcgcttgaaacactccgtgcatgagttttacattaaatcccctgaagaaatggcgaagctgtttgcagatattccagaagctttagaaaacacccaagaaatcgctgataaatgcgttttagagattgatttaaaagacgataaaaagaatcccccaacccccccaagtttcaaattcactaaagcttacgctcaaaatgaggggctgagttttgaagatgacgcttcttatttcgcccataaggctagagagggcttgagagaacgcttaatcttagtgccagaagaaaagcatgaacaatacaaagagcggctagaaaaagaaattgaagtcattacgaacatgaaattcccagggtatatgctgatcgtgtgggattttatccgttacgctaaagaaatgggcattcctgtagggcctggtagggggagtgcggccgggagtttggtggcttttgccttaaaaatcaccgatattgaccctttgaaatacgatttgctctttgaaaggtttttaaaccctgaacgagtcagcatgcctgatattgatacggatttttgccagcgccggcgtaaagaaatcatagaatacatgattgaaaaatacggcaaatacaatgtggcacaagtcatcacctttaataagatgttggctaagggcgtgatcagagatgtcgcaagggttttggacatgccttataaggaggctgatgattttgccaaactcatacctaatcgcttaggcatcacgcttaagggctatgaaaaaaatggcgagttcatagagggggcgtgggaattagagcctaaaatcaaggaattggtggagagcaatgaagtagccaaacaagtgtgggaatattcgctcaatttagagaatttgaatcgcaacgcaggcgtgcatgccgcagccttagtggtggatagccaaaaagaattgtggcacaaaacccctttatttgcctctgaaaaaaccggcggtatcgttacgcaatattccatgaagtatttagagccggtggatttgatcaagtttgacttcttggggcttaaaaccttgaccgtgattgatgatgcgcttaaaatcattaaaacgcaacataacattgatgtggattttttatcgttggatatggacgatccgaaagtgtataaaacgatccaaagtggggatacggtggggatattccagattgaatccgggatgtttcaagggcttaacaagcgcttaaggccttcaagctttgaagacattatcgccattatcgcgctaggcagaccaggacccatggaatcaggcatggtagatgattttgtgaacagaaagcatggcgttgagcctatcgcttatgcgtttaaagaattagagccgattttaaagcccacctacggcacgatcgtctatcaagagcaggtgatgcaaatcgtgcaaactatcggcggttttagtttgggtgaagcggatctcatccgccgcgctatggggaaaaaagacgctcaaatcatggcggacaataaggccaagtttgtagaaggcgctaaaaatttagggcatgatggccaaaaggcggctaatttgtgggatctgatcgttaaatttgccggctatggtttcaacaaatcgcattcagccgcttatgcgatgatcactttccaaacggcgtatttaaagacttattacaagcatgagttcatggcagcgatgctcactagcgaatccaataagatcgaatccgtggcgcgctatattgatgaggttagggctttagaaattgaagtgatgcctccgcacatcaattcttctatgcaagatttcagcgtggcggagtttaaaaatcaaaagggcgaattagaaaagaaaatcgtgttcggtttgggagcggttaagggggttgggggtgagccgattaaaaacatcattgaagaaagggctaaaggggattataagagtttggaagatttcatttcacgggtggatttttctaaactcactaaaaaatctttagagccattggtgaaatcagggagcttggacaatttgggctacactagaaaaaccatgctcgctaacttggatttgatctgtgatgctgggcgcgctaaagacaaggctaatgaaatgatgcaagggggtaattctctttttggagccatggaaggcggaattaaagagcaggttgttttggacatggttgatttgggcgaacatgacgctaaaacgcttttagaatgcgaatacgagactttaggaatccatgtttcaggcaaccctttagacgagtttaaagaagaaattaagggctttaaaaatttagtcaaaagcattgatattgaagagctagagattggctcgcaggcttatttgctcggtaaaatcatggaagttaaaaagaaaattggcaaacgaagcggtaagccttatggcacagcggacattttggatcgatacggcaagtttgaactcatgctttttgaaaagcaattaaacgctttagaagagttggatattaataagcccttagtgtttaaatgcaagattgaagagcaagaagaagtggcgcgattaaggctttttgaaatcttggatttagagagtgctagggaggttaaaatccctaaagcccgctataaagaccctgaaaagcaaaaagaagacgtgcgcgaaatcccccccatggaaatgctcgcttctagctcttgctctttggcgatcgtgttagaaaacgatgtgaaaaaagagtttttaagacaaatcaaagagagcgctctaaaacaccagggtaaacgccccttgtatttgatcatcaaagataaggataagcaattcaaaatccaaagcgatttaatggtaaatgaaaagattaaggacgattttaaagggttagagtggagggatttagcttga

SEQ ID NO: 2739 - DNA (genomic), 231 bp, Helicobacter pylori; double-stranded, circular
  misc_feature (B) LOCATION 1...231
  hypothetical: NO
  anti-sense: NO
atgctcatactcagccgcaaagttaatgaagggattgtcattgatgataacatccacattaaagtcatttctatagacagagggagcgtgcgtttggggtttgaagcacctgaaagcacccttattttgcgcactgaactcaaagaggccattgtgagcgaaaaccaaaaagcttctgcgtccgtagatgaaagcctgttggaaaacatcaaaaaggtcattaagccttga

SEQ ID NO: 2740 - DNA (genomic), 258 bp, Helicobacter pylori; double-stranded, circular
  misc_feature (B) LOCATION 1...258
  hypothetical: NO
  anti-sense: NO
cccttctctataaggaacaagagatcagacatgctcatactcagccgcaaagttaatgaagggattgtcattgatgataacatccacattaaagtcatttctatagacagagggagcgtgcgtttggggtttgaagcacctgaaagcacccttattttgcgcactgaactcaaagaggccattgtgagcgaaaaccaaaaagcttctgcgtccgtagatgaaagcctgttggaaaacatcaaaaaggtcattaagcct

SEQ ID NO: 2741 - DNA (genomic), 390 bp, Helicobacter pylori; double-stranded, circular
  misc_feature (B) LOCATION 1...390
  hypothetical: NO
  anti-sense: NO
tctaaaagaatgaaacaaaagcttaaagctcaaatcaaagagcgagtggcttctatcgcctataatgaaaaagggtttcctagcccctttttatttaaagacttgaaaaaagccgcgctcaaaatcatagaagccatgcgcgcaaacacagaaattttagtggtgggcgattatgacgctgacggcgtgattagctctgctatcatggcaaaattctttaaaagtttgaattacaagcatgttcgcgttgcaatccctaatcgcttcatggatggctatgggatttctaaaaagtttttagaaaaacaccacgcccctttaatcatcacggtggataacgggatcaacccctttgaagccgctcaattttgcaaggaaaaaactacaccc

SEQ ID NO: 2742 - DNA (genomic), 1197 bp, Helicobacter pylori; double-stranded, circular
  misc_feature (B) LOCATION 1...1197
  hypothetical: NO
  anti-sense: NO
agccgctcaattttgcaaggaaaaaactacaccctaatcatcccgatcaccattgcttacaccatgatgaaatcccagacccatgcggtgatcaaccccaagcaaccggattgtgattttatccaaaaggaagtgtgcggggcgttagtggcgttttatttgtgctatggaatccaccaacttttaggcaaagaaaaaagccattctagtgagttgttgtgcttagcgggcgtggcaactatcgctgatatgatgcctttgactttttttaaccgctttttggtttctaaagccttgtattttttgcaaaaagaatccttaggggcgatggggtttttacgccaaagagaagtttttagaaaacgctctttgaaagcgagcgatatttcttttaatatcgcccctttaatcaactccgcagggcgcatgcaagacgctaaaatggctttagattttttaagcgcgaataattttcaagatggttgttctttgtatgaacgcttgaaagcatgcaatatgaagcgtaaaatgatccaacagcaggtttttgaagaagcctttaggcatgcgatggttggagaaaaaatcatcgtcgcttttaaggataattggcatgaaggcgtgcttgggattgtggcttcaaagttagtggaagccacccaaaagccaagcttggttttcacttttaaagaaggggtgtataaagggagtgctcgcagctctccaaatattgacttgattgacgctttgaatggggtttcttctttattactcggctatggggggcataggcaagcgtgcgggttgagcgttggaaaaaacaatatcgtctcgctctttgaaactttagaaaattttgattttaaagtcttgcctttttatgaaacagaacctcctttaacgctcaatctaaaagacattgacagagagcttttagagattatagagatgggcgaaccttatgggcaagaaaaccctgagcctttattccaagcaaaaaatttagaagtcatagaagaaaaaatcattaaagaaagccaccaggttttgcgttttaaggataaagaatgcgtcaaagaagctatttattttaacgctgatcggtttttgaaagcgggcgaaagggtgagcgtgctttttagcgtggaattagatgagtgttctaatgagcctaaaatgtttgttaaaagtttgttg

SEQ ID NO: 2743 - DNA (genomic), 1551 bp, Helicobacter pylori; double-stranded, circular
  misc_feature (B) LOCATION 1...1551
  hypothetical: NO
  anti-sense: NO
atgaaacaaaagcttaaagctcaaatcaaagagcgagtggcttctatcgcctataatgaaaaagggtttcctagcccctttttatttaaagacttgaaaaaagccgcgctcaaaatcatagaagccatgcgcgcaaacacagaaattttagtggtgggcgattatgacgctgacggcgtgattagctctgctatcatggcaaaattctttaaaagtttgaattacaagcatgttcgcgttgcaatccctaatcgcttcatggatggctatgggatttctaaaaagtttttagaaaaacaccacgcccctttaatcatcacggtggataacgggatcaacgcctttgaagccgctcaattttgcaaggaaaaaaactacaccctaatcatcaccgatcaccattgcttacaccatgatgaaatcccagacgcctatgcggtgatcaaccccaagcaaccggattgtgattttatccaaaaggaagtgtgcggggcgttagtggcgttttatttgtgctatggaatccaccaacttttaggcaaagaaaaaagccattctagtgagttgttgtgcttagcgggcgtggcaactatcgctgatatgatgcctttgactttttttaaccgctttttggtttctaaagccttgtattttttgcaaaaagaatccttaggggcgatggggtttttacgccaaagagaagtttttagaaaacgctctttgaaagcgagcgatatttcttttaatatcgcccctttaatcaactccgcagggcgcatgcaagacgctaaaatggctttagattttttaagcgcgaataattttcaagatggttgttctttgtatgaacgcttgaaagcatgcaatatgaagcgtaaaatgatccaacagcaggtttttgaagaagcctttaggcatgcgatggttggagaaaaaatcatcgtcgcttttaaggataattggcatgaaggcgtgcttgggattgtggcttcaaagttagtggaagccacccaaaagccaagcttggttttcacttttaaagaaggggtgtataaagggagtgctcgcagctctccaaatattgacttgattgacgctttgaatggggtttcttctttattactcggctatggggggcataggcaagcgtgcgggttgagcgttggaaaaaacaatatcgtctcgctctttgaaactttagaaaattttgattttaaagtcttgcctttttatgaaacagaacctcctttaacgctcaatctaaaagacattgacagagagcttttagagattatagagatgggcgaaccttatgggcaagaaaaccctgagcctttattccaagcaaaaaatttagaagtcatagaagaaaaaatcattaaagaaagccaccaggttttgcgttttaaggataaagaatgcgtcaaagaagctatttattttaacgctgatcggtttttgaaagcgggcgaaagggtgagcgtgctttttagcgtggaattagatgagtgttctaatgagcctaaaatgtttgttaaaagtttgttgtag

SEQ ID NO: 2744 - DNA (genomic), 189 bp, Helicobacter pylori; double-stranded, circular
  misc_feature (B) LOCATION 1...189
  hypothetical: NO
  anti-sense: NO
agcaaaaaattcgcccacattaaagccaagcaacttttaggcatagaaatcttaccggatatccatattctagcggtgttaaacatgattaaaatgggcgatgggagcagtcaaatcttaaaccaagacagcttgagcggttttgatggcaaagtcaatgacaaagagtttaaagctaacgctttgttt

SEQ ID NO: 2745 - DNA (genomic), 198 bp, Helicobacter pylori; double-stranded, circular
  misc_feature (B) LOCATION 1...198
  hypothetical: NO
  anti-sense: NO
attaaacgatgggtgctcacacccccttatgtcgccacgcttttagccagactctccaaagtcaataaggatagtttcgtgtgggattttgctaccgggagtgctgggttattagtcgcaagcatgaatttgatgatagaagacgctaaaaagcgtatcaccagcccagaggaattagagcaaaaaattcgcccacat

SEQ ID NO: 2746 - DNA (genomic), 207 bp, Helicobacter pylori; double-stranded, circular
  misc_feature (B) LOCATION 1...207
  hypothetical: NO
  anti-sense: NO
aacgaaaacaacaacaaagccattaatggcgaaagccgtttgaagcgctgttttagtgagattgtagataatttgggcgtttattataaaatcggtcttagcacggattttaccggtaaattgttcaatgaaatgtatcgctggttgggtttcacgcaagataaattaaacgatgggtgctcacacccccttatgtcgccacgcttt

SEQ ID NO: 2747 - DNA (genomic), 597 bp, Helicobacter pylori; double-stranded, circular
  misc_feature (B) LOCATION 1...597
  hypothetical: NO
  anti-sense: NO
cgctttgttttaaacccgccttattccgctcccggtaatggcatggtgtttgtggagcaggctttagaaaaaatgcaaagcggttatgcgagcgtgatcatccaatcaagcgccggcagcggtaaagccaaagaatacaatgtaaggattttagaaaaacacacgcttttagcgagcattaaaatgcctttagatttatttatcggcaaaagcagcgttcaaacccacatctatgtttttagggtcaatgaaaagcatgatgctaagcaaagggtgaaatttattaatttcagtaacgacggctacgctagagcgaatcgcaaaaaagccaaagccagccacaatttaaaagacacgcataacgccaaagagcgctacaacgaagtcgtggatttagtccatattggccaatcatgtttgaaatttttaagcgaagatgactactatgaaaacaccatagaccccaaaaacgggagcgactggaaccaaaacaaacccaccgacaccaaacccgaattggaggattttaaaagaacgatagccgattacctttcttatgaagtgggtttgattttaaaaaaccaaacgcccccaaag

SEQ ID NO: 2748 - DNA (genomic), 870 bp, Helicobacter pylori; double-stranded, circular
  misc_feature (B) LOCATION 1...870
  hypothetical: NO
  anti-sense: NO
ttttattttttaaaaaggatacccatgaataaagttcaatctattgagcctctaattgctgataagttcaacaacgagttaagaagttataacctagaatacaaactagagcaagaaagcctgaatacagaaattgatgaagctttaaaaaattacgcttctaaaagttggggtttagggggtaaccgccctgatgtgaaacttttattaaacacacaataccctaacagaagaatccctgttttaatagaatacaaaggattaaaagacaagctcgttaaattagacaaaaacaaactggtagaaaattttaaaaaccatgagtctcattataaaaacattagagaatacgccctaaatggggctttgcattacgctaatgcgattttacaccacacggactacactgaatgcatcgccataggtatcacaggttataaagacaataaaggcgacatacgctctcaaatcgctgtctattatgtgaataaaagcaatttgggcatggggatagatgtttcaaaaggcgagcaagcttatagcgatctctcctttttaagccgtaagcattttaacgactttattaaacgagtagacaccctttctttaagcgatgaagatttagaacgcattagagaaaagaaaaaccaagaaatagaagactgcttaatgcagctcaataacaatatttatgacaaagaaaagaattttttaagcgaacacaatcgggtatatttagtgattgcgagcattatcgctaatttaggcatccctaatctggtagcccccctaaacaaagaagatttaaaatccagcgatgagaacggagaaagagatggtgataaaatacttagaaaatccgatcctttt

SEQ ID NO: 2749 - DNA (genomic), 1281 bp, Helicobacter pylori; double-stranded, circular
  misc_feature (B) LOCATION 1...1281
  hypothetical: NO
  anti-sense: NO
atgaataaagttcaatctattgagcctctaattgctgataagttcaacaacgagttaagaagttataacctagaatacaaactagagcaagaaagcctgaatacagaaattgatgaagctttaaaaaattacgcttctaaaagttggggtttagggggtaaccgccctgatgtgaaacttttattaaacacacaataccctaacagaagaatccctgttttaatagaatacaaaggattaaaagacaagctcgttaaattagacaaaaacaaactggtagaaaattttaaaaaccatgagtctcattataaaaacattagagaatacgccctaaatggggctttgcattacgctaatgcgattttacaccacacggactacactgaatgcatcgccataggtatcacaggttataaagacaataaaggcgacatacgctctcaaatcgctgtctattatgtgaataaaagcaatttgggcatggggatagatgtttcaaaaggcgagcaagcttatagcgatctctcctttttaagccgtaagcattttaacgactttattaaacgagtagacaccctttctttaagcgatgaagatttagaacgcattagagaaaagaaaaaccaagaaatagaagactgcttaatgcagctcaataacaatatttatgacaaagaaaagaattttttaagcgaacacaatcgggtatatttagtgattgcgagcattatcgctaatttaggcatccctaatctggtagcccccctaaacaaagaagatttaaaatccagcgatgagaacggagaaagagatggtgataaaatacttagaaaaatccgatcctttttagagcgtaagcagttgcctttagagaaaagggaaagcattatttcttcattagagcctttattaaaaaacgaaaacaacaacaaagccattaatggcgaaagccgtttgaagcgctgttttagtgagattgtagataatttgggcgtttattataaaatcggtcttagcacggattttaccggtaaattgttcaatgaaatgtatcgctggttgggtttcacgcaagataaattaaacgatgtggtgctcacacccccttatgtcgccacgcttttagccagactctccaaagtcaataaggatagtttcgtgtgggattttgctaccgggagtgctgggttattagtcgcaagcatgaatttgatgatagaagacgctaaaaagcgtatcaccagcccagaggaattagagcaaaaaattcgcccacattaa

SEQ ID NO: 2750 - DNA (genomic), 2037 bp, Helicobacter pylori; double-stranded, circular
  misc_feature (B) LOCATION 1...2037
  hypothetical: NO
  anti-sense: NO
atgaataaagttcaatctattgagcctctaattgctgataagttcaacaacgagttaagaagttataacctagaatacaaactagagcaagaaagcctgaatacagaaattgatgaagctttaaaaaattacgcttctaaaagttggggtttagggggtaaccgccctgatgtgaaacttttattaaacacacaataccctaacagaagaatccctgttttaatagaatacaaaggattaaaagacaagctcgttaaattagacaaaaacaaactggtagaaaattttaaaaaccatgagtctcattataaaaacattagagaatacgccctaaatggggctttgcattacgctaatgcgattttacaccacacggactacactgaatgcatcgccataggtatcacaggttataaagacaataaaggcgacatacgctctcaaatcgctgtctattatgtgaataaaagcaatttgggcatggggatagatgtttcaaaaggcgagcaagcttatagcgatctctcctttttaagccgtaagcattttaacgactttattaaacgagtagacaccctttctttaagcgatgaagatttagaacgcattagagaaaagaaaaaccaagaaatagaagactgcttaatgcagctcaataacaatatttatgacaaagaaaagaattttttaagcgaacacaatcgggtatatttagtgattgcgagcattatcgctaatttaggcatccctaatctggtagcccccctaaacaaagaagatttaaaatccagcgatgagaacggagaaagagatggtgataaaatacttagaaaaatccgatcctttttagagcgtaagcagttgcctttagagaaaagggaaagcattatttcttcattagagcctttattaaaaaacgaaaacaacaacaaagccattaatggcgaaagccgtttgaagcgctgttttagtgagattgtagataatttgggcgtttattataaaatcggtcttagcacggattttaccggtaaattgttcaatgaaatgtatcgctggttgggtttcacgcaagataaattaaacgatgtggtgctcacacccccttatgtcgccacgcttttagccagactctccaaagtcaataaggatagtttcgtgtgggattttgctaccgggagtgctgggttattagtcgcaagcatgaatttgatgatagaagacgctaaaaagcgtatcaccagcccagaggaattagagcaaaaaatcgcccacattaaagccaagcaacttttaggcatagaaatcttaccggatatccatattctagcggtgttaaacatgattttaatgggcgatgggagcagtcaaatcttaaaccaagacagcttgagcggttttgatggcaaagtcaatgacaaagagtttaaagctaacgcttttgttttaaacccgccttattccgctcccggtaatggcatggtgtttgtggagcaggctttagaaaaaatgcaaagcggttatgcgagcgtgatcatccaatcaagcgccggcagcggtaaagccaaagaatacaatgtaaggattttagaaaaacacacgcttttagcgagcattaaaatgcctttagatttatttatcggcaaaagcagcgttcaaacccacatctatgtttttagggtcaatgaaaagcatgatgctaagcaaagggtgaaatttattaatttcagtaacgacggctacgctagagcgaatcgcaaaaaagccaaagccagccacaatttaaaagacacgcataacgccaaagagcgctacaacgaagtcgtggatttagtccatattggccaatcatgtttgaaatttttaagcgaagatgactactatgaaaacaccatagaccccaaaaacgggagcgactggaaccaaaacaaacccaccgacaccaaacccgaattggaggattttaaaagaacgatagccgattacctttcttatgaagtgggtttgattttaaaaaaccaaacgcccccaaagtga

SEQ ID NO: 2751 - DNA (genomic), 228 bp, Helicobacter pylori; double-stranded, circular
  misc_feature (B) LOCATION 1...228
  hypothetical: NO
  anti-sense: NO
acttccctgtcgttgtttggagaagatttagccaaagaaaaacgatccatcgctaaaagcattaattttgggctggtgtatggcatggggagtaagaaattgagcgaaactttaagcatccctttaagtgaggctaaaagttacatagaagcgtatttcaagcgattccctagcattaaagattatttgaatggcatgcgagaagagattttaaaaacttctaaagct

SEQ ID NO: 2752 - DNA (genomic), 225 bp, Helicobacter pylori; double-stranded, circular
  misc_feature (B) LOCATION 1...225
  hypothetical: NO
  anti-sense: NO
acttccctgtcgttgtttggagaagatttagccaaagaaaaacgatccatcgctaaaagcattaattttgggctggtgtatggcatggggagtaagaaattgagcgaaactttaagcatccctttaagtgaggctaaaagttacatagaagcgtatttcaagcgattccctagcattaaagattatttgaatggcatgcgagaagagattttaaaaacttctaaa

SEQ ID NO: 2753 - DNA (genomic), 2163 bp, Helicobacter pylori; double-stranded, circular
  misc_feature (B) LOCATION 1...2163
  hypothetical: NO
  anti-sense: NO
atggagcagccagtcattaaagaagggactttagctttaattgatacctttgcgtatttgtttagaagctattacatgagcgctaaaaataagcctttaaccaacgataagggctttcctacagggcttttaacggggcttgtgggcatggttaaaaaattttataaagacagaaaaaacatgccttttatcgtgttcgccctagaaagccagactaaaactaaaagagctgaaaaactgggcgaatacaaacaaaatcgtaaagacgcccctaaagagatgcttttacaaatccctatcgccttagaatggttgcaaaaaatgggttttacttgcgtggaggtgggagggtttgaagccgatgatgtgatcgcaagtttagccacgctaagcccttataaaacccgcatttattctaaagataaggattttaaccagcttttgagcgataaaatcgcgctttttgatggcaaaacggagtttttggcgaaagattgcgtggaaaaatacgggattttgccgagtcaattcacggattatcagggcattgtgggggatagcagcgataattacaagggggttaaaggcattgggagcaagaacgctaaggaattgttgcagcgattagggagcttggaaaaaatctatgaaaatttagacttggcgaaaaatttactcagccctaaaatgtatcaagccttgatacaagacaaaggaagcgcctttttaagcaaagaattagccactttagaaagaggatgcattaaagaatttgattttttaagttgcgcttttccgagcgaaaaccccttgttgaaaatcaaagatgaattgaaagaatatggtttcatttctaccttaagggatttagaaaattcccctttcattgtagaaaacgtgcccatattaaacagcacgcctatattagacaatacccccgccttagacaacgcccctaaaaaatcgcgcatgattgttttagaaagcgctgagcctttgagcatgtttttagaaaaattagaaaaccctaacgctagggtttttatgcgtttggttttggataaagacaaaaaaattctagccctagcgtttttattacaagatcaaggctattttttacctttagaagaggcgttgttttcgcccttttctttggaatttttacaaaacgctttttctcaaatgttacagcatgcgtgtatcattgggcatgatttaaagcctttattaagctttttaaaagccaaatatcaggtgcctttggaaaatatccgcatccaagacactcagattttagcgtttttaaagaatccggaaaaagtggggtttgatgaggttttaaaggaatatttaaaagaagatttaatcccgcatgaaaagatcaaagattttaagacaaaaagtaaggcggaaaaatcagaacttttaagcatggaattaaacgccttaaagcgtttgtgcgaatactttgaaaaaggggggctagaagaggatttgctcactttagctagagacattgaaacgccgtttgtgaaagttttaatgggcatggaatttcaaggctttaagattgatgccgccttggaaaatatcgtcatcgcaggtgttacaaacaaacccaatggtgctggcgctatcacatccactggtcatgtaaccgactatgcggtgtttaacaacatcaaggcgatgctacctatcttgcaacaagcgcttacgctttctcaaagtaaccacaccctatccactcagttgcaagctcgagctatgggatctcaaacaaatcgtgaattcgctaaagacatctacgctttagctcaaaaccaaaagcaaatcctttctaacgcttcaagtatcttcaatctctttaattccattcctaaagaccaacttaagtatttggagaacgcttacttgaaagtgccacatttgggtaaaacccctactaacccttacagacagaatgtgaatttgaataaagaaattaatgcggttcaagacaatgtagctaattatggtaatcgtttggattcggctttaagcgtggctaaagatgtttataacctaaaatccaatcaaacagagatcgtaaccacttataacgatgctaagaatttgggcccaggggtttctaaacttccctgtcgttgtttggagaagatt

SEQ ID NO: 2754 - DNA (genomic), 2355 bp, Helicobacter pylori; double-stranded, circular
  misc_feature (B) LOCATION 1...2355
  hypothetical: NO
  anti-sense: NO
atggagcagccagtcattaaagaagggactttagctttaattgatacctttgcgtatttgtttagaagctattacatgagcgctaaaaataagcctttaaccaacgataagggctttcctacagggcttttaacggggcttgtgggcatggttaaaaaattttataaagacagaaaaaacatgccttttatcgtgttcgccctagaaagccagactaaaactaaaagagctgaaaaactgggcgaatacaaacaaaatcgtaaagacgcccctaaagagatgcttttacaaatccctatcgccttagaatggttgcaaaaaatgggttttacttgcgtggaggtgggagggtttgaagccgatgatgtgatcgcaagtttagccacgctaagcccttataaaacccgcatttattctaaagataaggattttaaccagcttttgagcgataaaatcgcgctttttgatggcaaaacggagtttttggcgaaagattgcgtggaaaaatacgggattttgccgagtcaattcacggattatcagggcattgtgggggatagcagcgataattacaagggggttaaaggcattgggagcaagaacgctaaggaattgttgcagcgattagggagcttggaaaaaatctatgaaaatttagacttggcgaaaaatttactcagccctaaaatgtatcaagccttgatacaagacaaaggaagcgcctttttaagcaaagaattagccactttagaaagaggatgcattaaagaatttgattttttaagttgcgcttttccgagcgaaaaccccttgttgaaaatcaaagatgaattgaaagaatatggtttcatttctaccttaagggatttagaaaattcccctttcattgtagaaaacgtgcccatattaaacagcacgcctatattagacaatacccccgccttagacaacgcccctaaaaaatcgcgcatgattgttttagaaagcgctgagcctttgagcatgtttttagaaaaattagaaaaccctaacgctagggtttttatgcgtttggttttggataaagacaaaaaaattctagccctagcgtttttattacaagatcaaggctattttttacctttagaagaggcgttgttttcgcccttttctttggaatttttacaaaacgctttttctcaaatgttacagcatgcgtgtatcattgggcatgatttaaagcctttattaagctttttaaaagccaaatatcaggtgcctttggaaaatatccgcatccaagacactcagattttagcgtttttaaagaatccggaaaaagtggggtttgatgaggttttaaaggaatatttaaaagaagatttaatcccgcatgaaaagatcaaagattttaagacaaaaagtaaggcggaaaaatcagaacttttaagcatggaattaaacgccttaaagcgtttgtgcgaatactttgaaaaaggggggctagaagaggatttgctcactttagctagagacattgaaacgccgtttgtgaaagttttaatgggcatggaatttcaaggctttaagattgatgcgccttatttcaagcgcttagagcaggagtttaagaatgaattaaacgttttagagcgccaaattttggatctaatcggcgtggatttcaacctcaattcgcccaagcaacttggcgaagtcttgtatgataaattagggcttcctaaaaataaaagccactctaccgatgaaaaaaacttgttaaaaatcctagacaagcacccaagcatccctttgattttagaatacagggaattgaataagctttttaacacttacacgacccccttattgcgcttaaaagacaaagacgataaaatccataccactttcatccaaaccggcacagctaccgggcgtttaagctcgcattcgcctaatttgcaaaatatcccggtgcgatcgcctaaaggcttactcattcgtaagggttttatcgctagctctaaagaatattgtttattaggggtggattattcgcagattgaattacgcttgttggcccatttcagccaggataaggatttaatggaagcgtttttaaaggggcgagacatccatttagaaacttctaaggcgttgtttggagaagatttagccaaagaaaaacgatccatcgctaaaagcattaattttgggctggtgtatggcatggggagtaagaaattgagcgaaactttaagcatccctttaagtgaggctaaaagttacatagaagcgtatttcaagcgattccctagcattaaagattatttgaatggcatgcgagaagagattttaaaaacttctaaagctttt

SEQ ID NO: 2755 - DNA (genomic), 2694 bp, Helicobacter pylori; double-stranded, circular
  misc_feature (B) LOCATION 1...2694
  hypothetical: NO
  anti-sense: NO
atggagcagccagtcattaaagaagggactttagctttaattgatacctttgcgtatttgtttagaagctattacatgagcgctaaaaataagcctttaaccaacgataagggctttcctacagggcttttaacggggcttgtgggcatggttaaaaaattttataaagacagaaaaaacatgccttttatcgtgttcgccctagaaagccagactaaaactaaaagagctgaaaaactgggcgaatacaaacaaaatcgtaaagacgcccctaaagagatgcttttacaaatccctatcgccttagaatggttgcaaaaaatgggttttacttgcgtggaggtgggagggtttgaagccgatgatgtgatcgcaagtttagccacgctaagcccttataaaacccgcatttattctaaagataaggattttaaccagcttttgagcgataaaatcgcgctttttgatggcaaaacggagtttttggcgaaagattgcgtggaaaaatacgggattttgccgagtcaattcacggattatcagggcattgtgggggatagcagcgataattacaagggggttaaaggcattgggagcaagaacgctaaggaattgttgcagcgattagggagcttggaaaaaatctatgaaaatttagacttggcgaaaaatttactcagccctaaaatgtatcaagccttgatacaagacaaaggaagcgcctttttaagcaaagaattagccactttagaaagaggatgcattaaagaatttgattttttaagttgcgcttttccgagcgaaaaccccttgttgaaaatcaaagatgaattgaaagaatatggtttcatttctaccttaagggatttagaaaattcccctttcattgtagaaaacgtgcccatattaaacagcacgcctatattagacaatacccccgccttagacaacgcccctaaaaaatcgcgcatgattgttttagaaagcgctgagcctttgagcatgtttttagaaaaattagaaaaccctaacgctagggtttttatgcgtttggttttggataaagacaaaaaaattctagccctagcgtttttattacaagatcaaggctattttttacctttagaagaggcgttgttttcgcccttttctttggaatttttacaaaacgctttttctcaaatgttacagcatgcgtgtatcattgggcatgatttaaagcctttattaagctttttaaaagccaaatatcaggtgcctttggaaaatatccgcatccaagacactcagattttagcgtttttaaagaatccggaaaaagtggggtttgatgaggttttaaaggaatatttaaaagaagatttaatcccgcatgaaaagatcaaagattttaagacaaaaagtaaggcggaaaaatcagaacttttaagcatggaattaaacgccttaaagcgtttgtgcgaatactttgaaaaaggggggctagaagaggatttgctcactttagctagagacattgaaacgccgtttgtgaaagttttaatgggcatggaatttcaaggctttaagattgatgcgccttatttcaagcgcttagagcaggagtttaagaatgaattaaacgttttagagcgccaaattttggatctaatcggcgtggatttcaacctcaattcgcccaagcaacttggcgaagtcttgtatgataaattagggcttcctaaaaataaaagccactctaccgatgaaaaaaacttgttaaaaatcctagacaagcacccaagcatccctttgattttagaatacagggaattgaataagctttttaacacttacacgacccccttattgcgcttaaaagacaaagacgataaaatccataccactttcatccaaaccggcacagctaccgggcgtttaagctcgcattcgcctaatttgcaaaatatcccggtgcgatcgcctaaaggcttactcattcgtaagggttttatcgctagctctaaagaatattgtttattaggggtggattattcgcagattgaattacgcttgttggcccatttcagccaggataaggatttaatggaagcgtttttaaaggggcgagacatccatttagaaacttctaaggcgttgtttggagaagatttagccaaagaaaaacgatccatcgctaaaagcattaattttgggctggtgtatggcatggggagtaagaaattgagcgaaactttaagcatccctttaagtgaggctaaaagttacatagaagcgtatttcaagcgattccctagcattaaagattatttgaatggcatgcgagaagagattttaaaaacttctaaagcttttactttgctggggcgttaccgggtgtttgattttaccggcgtgaatgattatgtcaagggcaattatttgcgagagggcgtgaatgcgatttttcaagggagtgccagcgatttattgaaattaggcatgcttaaagtgagcgagcgtttcaaaaacaacccttcggtgaggctgcttttgcaagtgcatgacgaattgatttttgaaattgaagaaaaaaacgccccagagttgcagcaagaaatccaacgcattcttaatgatgaagtctatcctttgagggtgccgttagaaacaagcgcgtttatcgctaagcgttggaatgaattaaaaggttag

SEQ ID NO: 2756 - DNA (genomic), 621 bp, Helicobacter pylori; double-stranded, circular
  misc_feature (B) LOCATION 1...621
  hypothetical: NO
  anti-sense: NO
gtgattggcccccttagcagccaactcaacgctattaagtggggcgagttcaaattaggggatttgtttgaagcgagtaacggcgattttgacattcaaaaacgccacatcaatcataagggcgaatttgtcatcaccgcagggcttagcaataatggcgttttagggcaaagcgatataaaagcaaaagtttttgaaagccataccattactattgacatgtttggttgcgcgttttatcgcagttttgcttataaaatggtaacacatgctagggtattttctctcaaacctaaatttgaaatcaaccataaaatcggcttgtttttatccacgctattttttggttaccataaaaaattcggctatgaaaacatgtgttcatgggcaaaaattaaaaacgataaagtcattctacccctaaaacccaccgctaacactcaaacccttgagggtattgattttgatttcatggaaaaattcatagccgaacttgagcagtgtcggctcgccgaacttcaggcttatttaaaagctacagggctagaaaacaccaccctttctaacgatgaagaaaatgcccttaatgttttcaataattctgggggggggggggggtaa

SEQ ID NO: 2757 - DNA (genomic), 636 bp, Helicobacter pylori; double-stranded, circular
  misc_feature (B) LOCATION 1...636
  hypothetical: NO
  anti-sense: NO
atgttttcaataattctgggggggggggggggtaataccccatgcggcttgacatggcaacacttcaaattaggggatttgtttgaaattgaaaaaaccttaagctttaataaagacgctttaacgcaaggacaagattacgattatattacaagaacttcgcaaaatcaaggcgttttgcaaactacaggatttgtcaatgcagaaaatttaaacccaccatttacttggagtttagggcttttgcaaatggattttttctatcgtaaaaagtcatggtatgcgggacaattcatgcgaaaaatcacaccaaaaactgaaattaaaaataaaattaattcacgcatagcccactatttcacaacgcttttaaacgccttaaaacgccctttattgagtgtattagttagggatattgataaaacttttagggagcaaaaaatccaactacccctaaaacccaccgctaaaactcaaagccttgatggtattgattttgatttcatgcacaccctaatcaacgccctgatgaagcaaaccattcaaggcgtggttcaatactgcgacgctaaaatacaggctacaaaagaagttatcagccaagaaacgcctattcaaaaagactcgttattttga

SEQ ID NO: 2758 - DNA (genomic), 654 bp, Helicobacter pylori; double-stranded, circular
  misc_feature (B) LOCATION 1...654
  hypothetical: NO
  anti-sense: NO
agtgggtttgattttaaaaaaccaaacgcccccaaagtgattggcccccttagcagccaactcaacgctattaagtggggcgagttcaaattaggggatttgtttgaagcgagtaacggcgattttgacattcaaaaacgccacatcaatcataagggcgaatttgtcatcaccgcagggcttagcaataatggcgttttagggcaaagcgatataaaagcaaaagtttttgaaagccataccattactattgacatgtttggttgcgcgttttatcgcagttttgcttataaaatggtaacacatgctagggtattttctctcaaacctaaatttgaaatcaaccataaaatcggcttgtttttatccacgctattttttggttaccataaaaaattcggctatgaaaacatgtgttcatgggcaaaaattaaaaacgataaagtcattctacccctaaaacccaccgctaacactcaaacccttgagggtattgattttgatttcatggaaaaattcatagccgaacttgagcagtgtcggctcgccgaacttcaggcttatttaaaagctacagggctagaaaacaccaccctttctaacgatgaagaaaatgcccttaatgttttcaataattctggggggggggggggg

SEQ ID NO: 2759 - DNA (genomic), 672 bp, Helicobacter pylori; double-stranded, circular
  misc_feature (B) LOCATION 1...672
  hypothetical: NO
  anti-sense: NO
aaaacaccaccctttctaacgatgaagaaaatgcccttaatgttttcaataattctgggggggggggggggtaataccccatgcggcttgacatggcaacacttcaaattaggggatttgtttgaaattgaaaaaaccttaagctttaataaagacgctttaacgcaaggacaagattacgattatattacaagaacttcgcaaaatcaaggcgttttgcaaactacaggatttgtcaatgcagaaaatttaaacccaccatttacttggagtttagggcttttgcaaatggattttttctatcgtaaaaagtcatggtatgcgggacaattcatgcgaaaaatcacaccaaaaactgaaattaaaaataaaattaattcacgcatagcccactatttcacaacgcttttaaacgccttaaaacgccctttattgagtgtattagttagggatattgataaaacttttagggagcaaaaaatccaactacccctaaaacccaccgctaaaactcaaagccttgatggtattgattttgatttcatgcacaccctaatcaacgccctgatgaagcaaaccattcaaggcgtggttcaatactgcgacgctaaaatacaggctacaaaagaagttatcagccaagaaacgcctattcaaaaagactcgttattt

SEQ ID NO: 2760 - DNA (genomic), 1221 bp, Helicobacter pylori; double-stranded, circular
  misc_feature (B) LOCATION 1...1221
  hypothetical: NO
  anti-sense: NO
gtgattggcccccttagcagccaactcaacgctattaagtggggcgagttcaaattaggggatttgtttgaagcgagtaacggcgattttgacattcaaaaacgccacatcaatcataagggcgaatttgtcatcaccgcagggcttagcaataatggcgttttagggcaaagcgatataaaagcaaaagtttttgaaagccataccattactattgacatgtttggttgcgcgttttatcgcagttttgcttataaaatggtaacacatgctagggtattttctctcaaacctaaatttgaaatcaaccataaaatcggcttgtttttatccacgctattttttggttaccataaaaaattcggctatgaaaacatgtgttcatgggcaaaaattaaaaacgataaagtcattctacccctaaaacccaccgctaacactcaaacccttgagggtattgattttgatttcatggaaaaattcatagccgaacttgagcagtgtcggctcgccgaacttcaggcttatttaaaagctacagggctagaaaacaccaccctttctaacgatgaagaaaatgcccttaatgttttcaataattctggggggggggggggtaataccccatgcggcttgacatggcaacacttcaaattaggggatttgtttgaaattgaaaaaaccttaagctttaataaagacgctttaacgcaaggacaagattacgattatattacaagaacttcgcaaaatcaaggcgttttgcaaactacaggatttgtcaatgcagaaaatttaaacccaccatttacttggagtttagggcttttgcaaatggattttttctatcgtaaaaagtcatggtatgcgggacaattcatgcgaaaaatcacaccaaaaactgaaattaaaaataaaattaattcacgcatagcccactatttcacaacgcttttaaacgccttaaaacgccctttattgagtgtattagttagggatattgataaaacttttagggagcaaaaaatccaactacccctaaaacccaccgctaaaactcaaagccttgatggtattgattttgatttcatgcacaccctaatcaacgccctgatgaagcaaaccattcaaggcgtggttcaatactgcgacgctaaaatacaggctacaaaagaagttatcagccaagaaacgcctattcaaaaagactcgttattttga

SEQ ID NO: 2761 - DNA (genomic), 852 bp, Helicobacter pylori; double-stranded, circular
  misc_feature (B) LOCATION 1...852
  hypothetical: NO
  anti-sense: NO
agacctttggcactcatcatgtggtggcgaaatatagacaatcgtatctctattaagcgcgttgtaaacaagcccccaagaggccttggcaagatcactcaagaatggattttttctcttttagatgaagagggtttgaatttagaagaagcgctaaaaattggggcgtttaaagacaaactcaaccctaaaaacgaatacgctttaaagaaattcaccgctatgatagggcgtttgagggaggcttttgaaatttcagtagagaagttttgcgagcggtttttagaagagactaaccttttaaaaagctatgaaaaagaagacaattacgaagaaagagagggctttgttaaagagcttttaagtttagtgaaagagcattttaaaactaaccccacgcattctttactggattttttgaatgaaagcgcactggatgtccataatacagaaaacgcgcaaaaagtgagttgcatgagcgtgcatatgagtaagggcttagagtttaagcatgtgtttgtgatcgggttagaagaggggtttttcccgcatagggggttcaatcaagaaagcgatttggaagaagaaaggcgcttggcttacgtggcgatcactagggctaaagaagaattacaactttcttatgtcaaagagcgttcgtattttgggaggaaaatttcttgctcgccctctgtgtttttagaagaagcccagttgctccaacaagacaagcctcctaaacaaaatcaccaaaaagatacgcccattaaagtgggggatttgatcaaacataagatttttggcaccggggagggttttaggcgtagaaaaaggcttgcagcggtttgtgct

SEQ ID NO: 2762 - DNA (genomic), 1083 bp, Helicobacter pylori; double-stranded, circular
  misc_feature (B) LOCATION 1...1083
  hypothetical: NO
  anti-sense: NO
caccaatcttttaaaagagcgtttgaaccaagaagaaaagggcgagtttttagaataatgggttttgaaaaaagcattttagacaatttgaacggagcgcaaaaaattgccgcatgccacattcaagggcctttattgattttagcgggagctgggagcggtaagactaagactttaacgagccgtttagcgtatttgattggcgcttgtggcgtgcctagcgaaaacactttaacgctcactttcaccaataaagcgagtaaagaaatgcaagaaagggctttgaaattgttgaaaaaccaagcccttatcccccccttgctttgcactttccatcgttttggtttgctgtttttaaggcaacacatgaatcttttaaaaagggcgtgcgatttttcggtgctagatagcgatgaagtgaaaacgctctgcaaacagctcaaaatttcaaatttcagggcgagcatttctcaaatcaaaaacggcatgatggatttgagcgtgcaagatagcgaatgttacaaagcgtatgagctttatcaaaacgcgctcaaaaaagacaatttagtggattttgacgatttgctttgtttgagccttaagattttacaagataatgaaaaactcgccaaagagaccagcgaacgctaccattacattatggtagatgagtatcaagacacgaacgccctgcaactggaatttttaaaacaattgagtttcacgcaccataatttgtgcgtggtgggcgatgacgatcagagcatttatgggtttaggggggctgatatttctaacattttaaatttttccaagcattttaaaggggctaaaatagtgaaattagagaccaactaccgctctagcgctgaaatcttagcgtgcgctaattccctgatcagccataaccaacaccgccacattaaaacgcttcaaagtttcaaaggttcgcacaaaagcgtgatttgtaaagaataccccacgcaaaaagaagagagcctggatgtggcttatcagattcaaagcccttttaaagaagggcgagaatttagaaaatatcgctattttgtatcgtttaaatgg

SEQ ID NO: 2763 - DNA (genomic), 2046 bp, Helicobacter pylori; double-stranded, circular
  misc_feature (B) LOCATION 1...2046
  hypothetical: NO
  anti-sense: NO
atgggttttgaaaaaagcattttagacaatttgaacggagcgcaaaaaattgccgcatgccacattcaagggcctttattgattttagcgggagctgggagcggtaagactaagactttaacgagccgtttagcgtatttgattggcgcttgtggcgtgcctagcgaaaacactttaacgctcactttcaccaataaagcgagtaaagaaatgcaagaaagggctttgaaattgttgaaaaaccaagcccttatcccccccttgctttgcactttccatcgttttggtttgctgtttttaaggcaacacatgaatcttttaaaaagggcgtgcgatttttcggtgctagatagcgatgaagtgaaaacgctctgcaaacagctcaaaatttcaaatttcagggcgagcatttctcaaatcaaaaacggcatgatggatttgagcgtgcaagatagcgaatgttacaaagcgtatgagctttatcaaaacgcgctcaaaaaagacaatttagtggattttgacgatttgctttgtttgagccttaagattttacaagataatgaaaaactcgccaaagagaccagcgaacgctaccattacattatggtagatgagtatcaagacacgaacgccctgcaactggaatttttaaaacaattgagtttcacgcaccataatttgtgcgtggtgggcgatgacgatcagagcatttatgggtttaggggggctgatatttctaacattttaaatttttccaagcattttaaaggggctaaaatagtgaaattagagaccaactaccgctctagcgctgaaatcttagcgtgcgctaattccctgatcagccataaccaacaccgccacattaaaacgcttcaaagtttcaaaggttcgcacaaaagcgtgatttgtaaagaataccccacgcaaaaagaagagagcctggatgtggcttatcagatcaaagcccttttaaagaagggcgagaatttagaaaatatcgctattttgtatcgtttaaatgggcttagccgcagcattgaagagagcttgaacgctttgaatatcccttataggctcattggtgcggtgagtttctatgaaagagccgaggttaaagacgctttggcactcatgcatgtggtggcgaaaaaagacgatcgcttttttattaaacgcgttttaaacaagcccccaagaggccttggcaagatcactcaagaatggattttttctcttttagatgaagagggtttgaatttagaagaagcgctaaaaattggggcgtttaaagacaaactcaaccctaaaaacgaatacgctttaaagaaattcaccgctatgatagggcgtttgagggaggcttttgaaatttcagtagagaagttttgcgagcggtttttagaagagactaaccttttaaaaagctatgaaaaagaagacaattacgaagaaagagagggctttgttaaagagcttttaagtttagtgaaagagcattttaaaactaaccccacgcattctttactggattttttgaatgaaagcgcactggatgtccataatacagaaaacgcgcaaaaagtgagttgcatgagcgtgcatatgagtaagggcttagagtttaagcatgtgtttgtgatcgggttagaagaggggtttttcccgcatagggggttcaatcaagaaagcgatttggaagaagaaaggcgcttggcttacgtggcgatcactagggctaaagaagaattacaactttcttatgtcaaagagcgttcgtattttgggaggaaaatttcttgctcgccctctgtgtttttagaagaagcccagttgctccaacaagacaagcctcctaaacaaaatcaccaaaaagatacgcccattaaagtgggggatttgatcaaacataagatttttggcaccgggagggttttaggcgtagaaaaaggcttgagcggtttgtgcttgaaaatcaattgcggagggaatgtctatgataaaatttcagaaaaatttgtagaaaaagtggataacgagttttga

SEQ ID NO: 2764 - DNA (genomic), 180 bp, Helicobacter pylori; double-stranded, circular
  misc_feature (B) LOCATION 1...180
  hypothetical: NO
  anti-sense: NO
agtaattctaggatgaaaaggcttttttttatcccttttatcactcccttttttctcaatggggagccttcagcgtttgatttgaaaagcggagctatccaaaaaagactcaagcagttgcaagtcaatagtaagaatttttctaatatttgggaccaaaatccattcggaagtggaggc

SEQ ID NO: 2765 - DNA (genomic), 921 bp, Helicobacter pylori; double-stranded, circular
  misc_feature (B) LOCATION 1...921
  hypothetical: NO
  anti-sense: NO
aaagcggagctatccaaaaaagactcaagcagttgcaagtcaatagtaagaatttttctaatatttgggaccaaaatccattcggaagtggaggctaatactcaagctcgagagggtttgaggagcgtttatgaggggcaggctaataagattaaagatctcaataacgctatcctttcccaagaagaatccttgcgagccttaaaagcctcgcaagaagtgcaagctaacacgctcaagcagcaatcgcaaactttagaggatttgaggaatgagattcacgctaaccaacaggccatccagcagttagacaagcaaaacaaagagatgagcgaattattgaccaagttaagccaggatctggtttcacaaatcgccttaatccaaaaagctctcaaagaacaagaggaaaaagctgaaaagccgctcaaatcaagcactccggccaataaaaacccccctttgaaagccgaaaccccaaaaaatcaagagaaaaaaactcaagaaaaggcgaaagttgagtttgataaagatttgtccaagcaaaaagagatctttcaagaagctctgtctttttttagaaacaaatcctatgcagaagccaaagagcgtttgttgtggttagaagccaatagttacagactttattatgtgcgttatgttcttggagaagtggcttatggggaaaagagatacagagaagcgatcaagtattacgaagagagcgctcttttaaatcaaaaagcgtcttacatgcctgtgcttttgtggcatacggcatggtcgtttaaaaaaatcaaagacgatcaaaactattataaatttttaaacactttgcaacgcttgtatccttcaagcgaacaagctaaaatggtgcaaaaaatcttagaaaacaaggagaaacaccaccatgcaaaacca

SEQ ID NO: 2766 - DNA (genomic), 996 bp, Helicobacter pylori; double-stranded, circular
  misc_feature (B) LOCATION 1...996
  hypothetical: NO
  anti-sense: NO
atgaaaaggcttttttttatcccttttatcactcccttttttctcaatggggagccttcagcgtttgatttgcaaagcggagctaccaaaaaagaactcaagcagttgcaagtcaatagtaagaatttttctaatattttgaccaaaatccattcgcaagtggaggctaatactctatctcaagagggtttgaggagcgtttatgaggggcaggctaataagattaaagatctcaataacgctatcctttcccaagaagaatccttgcgagccttaaaagcctcgcaagaagtgcaagctaacacgctcaagcagcaatcgcaaactttagaggatttgaggaatgagattcacgctaaccaacaggccatccagcagttagacaagcaaaacaaagagatgagcgaattattgaccaagttaagccaggatctggtttcacaaatcgccttaatccaaaaagctctcaaagaacaagaggaaaaagctgaaaagccgctcaaatcaagcactccggccaataaaaacccccctttgaaagccgaaaccccaaaaaatcaagagaaaaaaactcaagaaaaggcgaaagttgagtttgataaagatttgtccaagcaaaaagagatctttcaagaagctctgtctttttttagaaacaaatcctatgcagaagccaaagagcgtttgttgtggttagaagccaatagttacagactttattatgtgcgttatgttcttggagaagtggcttatggggaaaagagatacagagaagcgatcaagtattacaaagagagcgctcttttaaatcaaaaagcgtcttacatgcctgtgcttttgtggcatacggcatggtcgtttaaaaaaatcaaagacgatcaaaactattataaatttttaaacactttgcaacgcttgtatccttcaagcgaacaagctaaaatggtgcaaaaaatcttagaaaacaaggagaaacaccaccatgcaaaaccatga

SEQ ID NO: 2767 - DNA (genomic), 309 bp, Helicobacter pylori; double-stranded, circular
  misc_feature (B) LOCATION 1...309
  hypothetical: NO
  anti-sense: NO
gtaacgctactttccaaaggatacttgcgcaacccatacaaccataaccgggtttttttagaggatattttaactttagaaaacgccgttttagacacaagacaatctgatttaaggttgtattttaatgtttttcctactttaaggacttctcggcatggtttgttttatacccaaaaaggcaaaatcaaaagattaaacgctgttgaaagcctgcttttacaaggatttcctagagatttgatcgctaagattaaaaataatcctaactttaaagaaagccatttattatcccaagcggggaatgcc

SEQ ID NO: 2768 - DNA (genomic), 639 bp, Helicobacter pylori; double-stranded, circular
  misc_feature (B) LOCATION 1...639
  hypothetical: NO
  anti-sense: NO
ttggggattttaacttttatggatttttgctctggcattggtggaggccgtttgggcttggagcggtgccatttgaaatgcgtagggcatgcagaaatcaatcatgaagccattagaacttatgaactattttttaaggatacccataattttggggatttgatgcgaatcaaccctaatgacttacccaattttgatgttttggttagcgggtttccttgtcaagctttttctatcaatggcaaaaggaaagggcttgaagatgaaagagggactattatttatgggcttattcgtatcttaaaagtcaaacagcccaaatgtttcttgcttgaaaacgttaagggcttgatccatcataagcaacaagaaacttttaaaaccattatcaaagccttgcaagaagcgggatatacaactcattatcaaattttaaacagcgctgatttccaattagcccaaaagagagaacgcctttatatcgtagggtttaggaaggatttgaaacgcccatttaatttccctttaggtttagccaatgattattgttttaaggattttttagacgctgataatgaatgttatttggatgtgagtaacgctactttccaaaggatacttgcgcaacccatacaacca

SEQ ID NO: 2769 - DNA (genomic), 930 bp, Helicobacter pylori; double-stranded, circular
  misc_feature (B) LOCATION 1...930
  hypothetical: NO
  anti-sense: NO
ttggggattttaacttttatggatttttgctctggcattggtggaggccgtttgggcttggagcggtgccatttgaaatgcgtagggcatgcagaaatcaatcatgaagccattagaacttatgaactattttttaaggatacccataattttggggatttgatgcgaatcaaccctaatgacttacccaattttgatgttttggttagcgggtttccttgtcaagctttttctatcaatggcaaaaggaaagggcttgaagatgaaagagggactattatttatgggcttattcgtatcttaaaagtcaaacagcccaaatgtttcttgcttgaaaacgttaagggcttgatccatcataagcaacaagaaacttttaaaaccattatcaaagccttgcaagaagcgggatatacaactcattatcaaattttaaacagcgctgatttccaattagcccaaaagagagaacgcctttatatcgtagggtttaggaaggatttgaaacgcccatttaatttccctttaggtttagccaatgattattgttttaaggattttttagacgctgataatgaatgttatttggatgtgagtaacgctactttccaaagatacttgcgcaacccatacaaccataaccgggtttttttagaggatattttaactttagaaaacgccgttttagacacaagacaatctgatttaaggttgtattttaatgtttttcctactttaaggacttctcggcatggtttgttttatacccaaaaaggcaaaatcaaaagattaaacgctgttgaaagcctgcttttacaaggatttcctagagatttgatcgctaagattaaaaataatcctaactttaaagaaagccatttattatcccaagcggggaatgccatgagcgtgaatgtgattgccgctatc

SEQ ID NO: 2770 - DNA (genomic), 948 bp, Helicobacter pylori; double-stranded, circular
  misc_feature (B) LOCATION 1...948
  hypothetical: NO
  anti-sense: NO
atggatttttgctctggcattggtggaggccgtttgggcttggagcggtgccatttgaaatgcgtagggcatgcagaaatcaatcatgaagccattagaacttatgaactattttttaaggatacccataattttggggatttgatgcgaatcaaccctaatgacttacccaattttgatgttttggttagcgggtttccttgtcaagctttttctatcaatggcaaaaggaaagggcttgaagatgaaagagggactattatttatgggcttattcgtatcttaaaagtcaaacagcccaaatgtttcttgcttgaaaacgttaagggcttgatccatcataagcaacaagaaacttttaaaaccattatcaaagccttgcaagaagcgggatatacaactcattatcaaattttaaacagcgctgatttccaattagcccaaaagagagaacgcctttatatcgtagggtttaggaaggatttgaaacgcccatttaatttccctttaggtttagccaatgattattgttttaaggattttttagacgctgataatgaatgttatttggatgtgagtaacgctactttccaaagatacttgcgcaacccatacaaccataaccgggtttttttagaggatattttaactttagaaaacgccgttttagacacaagacaatctgatttaaggttgtattttaatgtttttcctactttaaggacttctcggcatggtttgttttatacccaaaaaggcaaaatcaaaagattaaacgctgttgaaagcctgcttttacaaggatttcctagagatttgatcgctaagattaaaaataatcctaactttaaagaaagccatttattatcccaagcggggaatgccatgagcgtgaatgtgattgccgctatcgccaaacaaatgttaaaggcgttcaataatgaataa

SEQ ID NO: 2771 - DNA (genomic), 897 bp, Helicobacter pylori; double-stranded, circular
  misc_feature (B) LOCATION 1...897
  hypothetical: NO
  anti-sense: NO
atgaaaatcttaatcattgaagatgatttagcactagctaggagtatctctcataatttgcatgatttagggcatttttgcgagatcatctctagcatttcagaggaaaataaagagccttatgatgtgattttagtttcttctaaagtttgcactcaagggcgttgcgaacattttgtgcgttataattccaagcaaatcattatcatgatggcttcgcatgtcaatgaagatggtgtgaataaacccattcaagcgggagcgagagattatattctaaagccttttaaaatggacgaattgttgcgtaagatccaataccacagagcctaccaagaaatgaccgctcgcttgggattttatgaaaattacttggactttatccatgcggaattgcccttgcctagagatttttcttacagaccgccttttatcatccacgcaccctctcaagagcttgcgaacgcttatttattgcaatacgctaaagaaaggcaaatggatttttcttttttctctttaaaggataccacttggaaagagctatacaagaataaagacaaattagaacgccctttttacatcatgcatttagaagagcttaagaaagacgagcaattgaaattgctagaattggcccgttcatgccccattgttttgtcctatacccataaagaaccattagaatttcctaaaattatgagcattgaatgcggcaatagacccctatctttgtttagcgataacacgactttcctttccattcaagagtatgaaaaagaagccattaggcatttttcttctacttgcacggacacagaattagccagcaagcttggcattagccgtaaaagcctttgggaaaaacgccggaaatataacttaccgcgcaagtag

SEQ ID NO: 2772 - DNA (genomic), 906 bp, Helicobacter pylori; double-stranded, circular
  misc_feature (B) LOCATION 1...906
  hypothetical: NO
  anti-sense: NO
aaggaagaattgatgaaaatcttaatcattgaagatgatttagcactagctaggagtatctctcataatttgcatgatttagggcatttttgcgagatcatctctagcatttcagaggaaaataaagagccttatgatgtgattttagtttcttctaaagtttgcactcaagggcgttgcgaacattttgtgcgttataattccaagcaaatcattatcatgatggcttcgcatgtcaatgaagatggtgtgaataaacccattcaagcgggagcgagagattatattctaaagccttttaaaatggacgaattgttgcgtaagatccaataccacagagcctaccaagaaatgaccgctcgcttgggattttatgaaaattacttggactttatccatgcggaattgcccttgcctagagatttttcttacagaccgccttttatcatccacgcaccctctcaagagcttgcgaacgcttatttattgcaatacgctaaagaaaggcaaatggatttttcttttttctctttaaaggataccacttggaaagagctatacaagaataaagacaaattagaacgccctttttacatcatgcatttagaagagcttaagaaagacgagcaattgaaattgctagaattggcccgttcatgccccattgttttgtcctatacccataaagaaccattagaatttcctaaaattatgagcattgaatgcggcaatagacccctatctttgtttagcgataacacgactttcctttccattcaagagtatgaaaaagaagccattaggcatttttcttctacttgcacggacacagaattagccagcaagcttggcattagccgtaaaagcctttgggaaaaacgccggaaatataacttaccgcgcaag

SEQ ID NO: 2773 - DNA (genomic), 147 bp, Helicobacter pylori; double-stranded, circular
  misc_feature (B) LOCATION 1...147
  hypothetical: NO
  anti-sense: NO
ggcaagtgcgcacttttagacagcggggatagcaagtttattgaaggggatttggtcagtaaaaaactcttcaaagaagaaaacactcgtgtgatcgctttaaaaggcgaaccaacgattgctgaaccggtgctttttagggatcac

SEQ ID NO: 2774 - DNA (genomic), 177 bp, Helicobacter pylori; double-stranded, circular
  misc_feature (B) LOCATION 1...177
  hypothetical: NO
  anti-sense: NO
attttgtggatgatcgcaggggttacggtcgctgaaaaagaagacagaaataccggtatcaccagtttagtggtgaatgattacatcccaagcggatacaaaccaagcttgtttttagagggggctaatggcgaagagatgcgttatttcctagagccaaaaaacttctatcgccat

SEQ ID NO: 2775 - DNA (genomic), 258 bp, Helicobacter pylori; double-stranded, circular
  misc_feature (B) LOCATION 1...258
  hypothetical: NO
  anti-sense: NO
tgctcacggttttaccggtattgccaccgagatttaaggcctttagtcgcgctagatggcgggaagtttgcggtcagcgatgtgaatgaattgtatcgtcgtgtcatcaatcgtaaccaacgcttgaaacgcctaatggagcttggagcgccagaaatcattgtgcgcaatgaaaaaaggatgttgcaagaagccgtggatgtgctttttgataacggccgtagcaccaatgcggttaaaggggctaacaaacggcct

SEQ ID NO: 2776 - DNA (genomic), 393 bp, Helicobacter pylori; double-stranded, circular
  misc_feature (B) LOCATION 1...393
  hypothetical: NO
  anti-sense: NO
tccattcaagcgttccgtccaaagcccattgacggcaaagcgatccagttgcacccgttagtgtgctcagcgtttaacgctgattttgacggggatcaaatggcggtgcatgtgcctttaagccaggaagcgatcgctgaatgcaaggtgctcatgctaagctctatgaatatccttttacccgctagcggtaaagccgtagccattcctagccaggatatggttttagggctttattatctttctttagaaaagagtggggtcaagggcgagcataagcttttctctagcgtgaatgaaatcatcaccgctattgacacgaaagaattagacatccacgcaaagattagggttttggatcaagggaatattatcgctacgagcgcggggcgc

SEQ ID NO: 2777 - DNA (genomic), 423 bp, Helicobacter pylori; double-stranded, circular
  misc_feature (B) LOCATION 1...423
  hypothetical: NO
  anti-sense: NO
gagtttgtattcccccccagtttggaaggcacggtgattgacgtgaaggtcttcactaaaaaaggctatgagaaagacgcgcgggttttgagcgcgtatgaagaagaaaaagccaagcttgatatggagcattttgaccgcttgaccatgctcaatagagaagaattgttgcgcgttagctcgctcctttctcaagcgattttagaagagcctttcagccataatggcaaggattataaagaaggcgatcagatccctaaagaagaagtcgcttcaatcaaccgcttcactttggctagcttagtcaaaaagtattctaaagaagtgcaaaaccactatgaaatcactaaaaacatttccttagagcaaaagaaagttttgggtgaagagcatgaagcaaaacccctctatttaggaaaagga

SEQ ID NO: 2778 - DNA (genomic), 504 bp, Helicobacter pylori; double-stranded, circular
  misc_feature (B) LOCATION 1...504
  hypothetical: NO
  anti-sense: NO
ggttttggatcaagggaatattatcgctacgagcgcggggcgctgatcatcaagtccattttgcctgattttatccctacggatttgtggaacagacccatgaagaaaaaagatattggcgtgcttgtggattatgtgcataaagtgggcggtatcggcattaccgcaacctttttggatcatttgaaaacgcttggctttaggtatgcgactaaggctggtatttctatctctatggaagatattatcacgccaaaagacaagcaaaaaatggtggaaaaagccaaagtagaagttaaaaaaatccaacaacaatacgatcaagggttgctcactgaccaagagcgttacaataaaatcattgacacttggactgaagtcaatgacagaatgagtaaggaaatgatgagcgctatcgcaaaagataaagagggctttaactctatttatatgatggcggatagtggcgcaagggggagcgcggcgcaaatcctcagttcagga

SEQ ID NO: 2779 - DNA (genomic), 591 bp, Helicobacter pylori; double-stranded, circular
  misc_feature (B) LOCATION 1...591
  hypothetical: NO
  anti-sense: NO
tggcgtgtccaaaaaagtcaagctctatatcgctacaaaacgaagcttaaagtgggcgataaaatggcaggaaggcatgggaataaagggtttttttctaatatcgtgccggttgcggatatgccttataccgctgatggcgagcctgtggatattgtcttaaaccctttaggcgtgccaagccgcatgaacatcgggcagattttagaaatgcatttaggcttagtggggaaagagtttgggaaacaaatcgctagcatgctagaggataaaaccaaagattttgccaaagaattacgcgctaaaatgctagaaatcgctaacgccattaatgaaaaagaccccttgacaatccatgttcttgagaattgctctgatgaagagcttttggaatacgctaaagattggagtaagggcgttaagatggctatccctgtgtttgaaggcatctcgcaagaaaaattttataagctgtttgagttagccaagatcgctatggatggcaaaatggatctgtatgatgggcgcaccggcgaaaaaatgagggaacgcgtgaatgtgggctatatgtatatgatcaacttcaccatt

SEQ ID NO: 2780 - DNA (genomic), 939 bp, Helicobacter pylori; double-stranded, circular
  misc_feature (B) LOCATION 1...939
  hypothetical: NO
  anti-sense: NO
aaaggcgtgtgcgcgaaatgctatggcttgaatttagacgaaggcaagatgagctatccgggtgaagcggtgggcgtggtagccgcgcaatctatcggggagcctggaacgcagctcactttaaggactttccatgtgggcgggacagcgagcaggagtcaggatgagcgcgaaatcgtggcgagcaaagaaggttttgtgcgtttctacaaccttaggacttacacgaataaagagggtaaaaacattatcgccaaccgccgtaacgcttctattttagtggtagagcctaagattaaagcgccttttgatggggaattacgcattgaaacggtctatgaagaagtcgttgtgagcgtgaaaaatggcgatcaagaagctaaattcgttttaagaagaagcgatattgtcaagccaagcgaattagccggcgttggcggtaagattgaggggaaagtgtatttgccttatgctagcgggcataaggtgcataaggggggaagtatcgctgatattatccaagagggctggaatgtgcctaatcgcatcccttatgcgagagaattgctggttaaagataatgaccctatcgcgcagaatgtgtatgccaaagaaaaaggtgtgatcaaatactatgttttagaggccaatcatttagagcgcacccatggagtcaaaaagggcgatattgtgagtgaaaaaggcttgtttgcagtggtagctgatgataatggtagggaagccgctcgccattatatcgctaggggttctgagatcttgattgatgataatagtgaagtgagcgctaatagtgtaatttctaaacccacgactaacactttcaaaacgattgccacatgggatccttacaacacccctatcattgcggactttaaaggtaaggtgaattttgtggatgatcgcaggggttacggtcgc

SEQ ID NO: 2781 - DNA (genomic), 936 bp, Helicobacter pylori; double-stranded, circular
  misc_feature (B) LOCATION 1...936
  hypothetical: NO
  anti-sense: NO
ggcgtgtgcgcgaaatgctatggcttgaatttagacgaaggcaagatgagctatccgggtgaagcggtgggcgtggtagccgcgcaatctatcggggagcctggaacgcagctcactttaaggactttccatgtgggcgggacagcgagcaggagtcaggatgagcgcgaaatcgtggcgagcaaagaaggttttgtgcgtttctacaaccttaggacttacacgaataaagagggtaaaaacattatcgccaaccgccgtaacgcttctattttagtggtagagcctaagattaaagcgccttttgatggggaattacgcattgaaacggtctatgaagaagtcgttgtgagcgtgaaaaatggcgatcaagaagctaaattcgttttaagaagaagcgatattgtcaagccaagcgaattagccggcgttggcggtaagattgaggggaaagtgtatttgccttatgctagcgggcataaggtgcataaggggggaagtatcgctgatattatccaagagggctggaatgtgcctaatcgcatcccttatgcgagagaattgctggttaaagataatgaccctatcgcgcagaatgtgtatgccaaagaaaaaggtgtgatcaaatactatgttttagaggccaatcatttagagcgcacccatggagtcaaaaagggcgatattgtgagtgaaaaaggcttgtttgcagtggtagctgatgataatggtagggaagccgctcgccattatatcgctaggggttctgagatcttgattgatgataatagtgaagtgagcgctaatagtgtaatttctaaacccacgactaacactttcaaaacgattgccacatgggatccttacaacacccctatcattgcggactttaaaggtaaggtgaattttgtggatgatcgcaggggttacggtcgc

SEQ ID NO: 2782 - DNA (genomic), 1050 bp, Helicobacter pylori; double-stranded, circular
  misc_feature (B) LOCATION 1...1050
  hypothetical: NO
  anti-sense: NO
ggtttgaagccagggatgtgcaccccacgtattatgtccggattggttcccattgaaaccccagtaggtcaatatatcggtttgatctacaccctttccactttcacaagagtgaatgatttaggctttattgaagccccttataaaaaggttgtggatggcaaggtggcgggcgagacgatttatttgaccgctattcaagaagacagccacatcatcgctcccgcaagcacccccattgatgaagaagggaatattttaggcgatttgattgaaacgcgagtggaaggcgagatcgttttaaacgaaaagagtaaagttaccttaatggatctaagctctagcatgctagtaggggtagccgcatcgctcattcctttcttagagcatgatgacgctaaccgcgctctaatggggactaacatgcagcgccaagccgtgcctttattaagaagcgacgcccccattgtaggcacagggattgaaaaaattatcgctagggattcttggggagcgatcaaggccaatcgcgcaggcgttgtagaaaaaattgattctaaaaacatttacattttaggcgaaggcaaagaagaagcctatattgacgcgtattctttgcaaaaaaacttgcgcaccaaccaaaacaccagtttcaatcaagtccctatcgttaaagtgggcgataaagtggaagccgggcaaatcatcgctgatggccctagcatggataggggcgagttagcgttagggaaaaatgtacgcgtggcgttcatgccttggaatggctataactttgaagacgcgatcgtggtgagtgagcgcatcactaaagacgatgttttcacttccacgcacatttatgaaaaagaagtggatgccagagagcttaagcatggcgtggaagaatttaccgctgatattcctgatgtgaaagaagaagcgctcgctcatcttgatgaaagcgggatcgttaaagtcggcacttacgtgagcgctggcatgattttagtgggcaagacttctcctaaggcgagattaaaagcacgcctg

SEQ ID NO: 2783 - DNA (genomic), 6876 bp, Helicobacter pylori; double-stranded, circular
  misc_feature (B) LOCATION 1...6876
  hypothetical: NO
  anti-sense: NO
atgtgccaccccacgtattatggccaatttggtcccattgaaaccccagaaggtcaaaatatcggtttgatcaacaccctttccactttcacaagagtgaatgatttaggctttattgaagccccttataaaaaggttgtggatggcaaggtggcgggcgagacgatttatttgaccgctattcaagaagacagccacatcatcgctcccgcaagcacccccattgatgaagaagggaatattttaggcgatttgattgaaacgcgagtggaaggcgagatcgttttaaacgaaaagagtaaagttaccttaatggatctaagctctagcatgctagtaggggtagccgcatcgctcattcctttcttagagcatgatgacgctaaccgcgctctaatggggactaacatgcagcgccaagccgtgcctttattaagaagcgacgcccccattgtaggcacagggattgaaaaaattatcgctagggattcttggggagcgatcaaggccaatcgcgcaggcgttgtagaaaaaattgattctaaaaacatttacattttaggcgaaggcaaagaagaagcctatattgacgcgtattctttgcaaaaaaacttgcgcaccaaccaaaacaccagtttcaatcaagtccctatcgttaaagtgggcgataaagtggaagccgggcaaatcatcgctgatggccctagcatggataggggcgagttagcgttagggaaaaatgtacgcgtggcgttcatgccttggaatggctataactttgaagacgcgatcgtggtgagtgagcgcatcactaaagacgatgttttcacttccacgcacatttatgaaaaagaagtggatgccagagagcttaagcatggcgtggaagaatttaccgctgatattcctgatgtgaaagaagaagcgctcgctcatcttgatgaaagcgggatcgttaaagtcggcacttacgtgagcgctggcatgattttagtgggcaagacttctcctaaaggcgagattaaaagcacgcctgaagaacggctcttaagggctatttttggggataaagccgggcatgtggtcaataagagtttgtattgcccccccagtttggaaggcacggtgattgacgtgaaggtcttcactaaaaaaggctatgagaaagacgcgcgggttttgagcgcgtatgaagaagaaaaagccaagcttgatatggagcattttgaccgcttgaccatgctcaatagagaagaattgttgcgcgttagctcgctcctttctcaagcgattttagaagagcctttcagccataatggcaaggattataaagaaggcgatcagatccctaaagaagaaatcgcttcaatcaaccgcttcactttggctagcttagtcaaaaagtattctaaagaagtgcaaaaccactatgaaatcactaaaaacaatttcttagagcaaaagaaagttttgggtgaagagcatgaagaaaagctctctattttagaaaaagatgatattttgcctaatggcgtgatcaaaaaagtcaagctctatatcgctacaaaacgaaagcttaaagtgggcgataaaatggcaggaaggcatgggaataaagggattgtgtctaatatcgtgccggttgcggatatgccttataccgctgatggcgagcctgtggatattgtcttaaaccctttaggcgtgccaagccgcatgaacatcgggcagattttagaaatgcatttaggcttagtggggaaagagtttgggaaacaaatcgctagcatgctagaggataaaaccaaagattttgccaaagaattacgcgctaaaatgctagaaatcgctaacgccattaatgaaaaagaccccttgacaatccatgttcttgagaattgctctgatgaagagcttttggaatacgctaaagattggagtaagggcgttaagatggctatccctgtgtttgaaggcatctcgcaagaaaaattttataagctgtttgagttagccaagatcgctatggatggcaaaatggatctgtatgatgggcgcaccggcgaaaaaatgagggaacgcgtgaatgtgggctatatgtatatgatcaaactccaccatttagtggatgaaaaagtccatgccagaagcacaggcccttatagtttagtaacgcaccaacccgttgggggtaaagcgctctttgggggtcaaaggtttggggaaatggaagtgtgggcgctagaagcttatggcgcagcgcacactctaaaagaaatgcttaccattaaatccgatgatattagaggcagagagaacgcttatagggctatcgctaaaggtgagcaagtgggcgagagcgaaatccctgagactttctatgtcttgactaaagaattgcagtcgctcgctttggatattaatatttttggggacgatgtggatgaagatggagcgcctagacccattatgatcaaagaagatgacaggcctaaagactttagctctttccagctcactctagctagccctgaaaagatccattcttggagctatggggaagttaaaaagccagaaacgatcaattatcgcaccctaaaacctgaacgagacggcttgttttgcatgaaaatctttggccctactaaagattatgaatgcttgtgtggtaaatacaaaaagcctcgcttcaaagacattggcacatgcgaaaaatgcggcgtggcgatcacgcattctaaagtcaggcgttttagaatggggcatattgaattggccactcctgtagcgcatatttggtatgtcaattccttacctagccgtatcggcacgcttttaggcgttaagatgaaagacttagagcgcgtgttgtattatgaagcttatatcgttaaagagccaggcgaagccgcttatgacaatgaaggcactaagcttgtgatgaaatacgatattttgaatgaagagcagtatcaaaatatctcacgaagatacgaagataggggctttgtggcacaaatgggcggcgaagcgatcaaggatttgttagaagaaattgatttgatcaccttattgcagagtttgaaagaagaagtgaaagacactaactctgatgcgaaaaagaaaaaactcattaagcgtttgaaagtggtagaaagctttttaaattccggtaacaggcctgaatggatgatgctcacggttttaccggtattgccaccagatttaaggcctttagtcgcgctagatggcgggaagtttgcggtcagcgatgtgaatgaattgtatcgtcgtgtcatcaatcgtaaccaacgcttgaaacgcctaatggagcttggagcgccagaaatcattgtgcgcaatgaaaaaaggatgttgcaagaagccgtggatgtgctttttgataacggccgtagcaccaatgcggttaaaggggctaacaaacggcctttaaaatcgctcagcgagatcattaaaggcaagcaagggcgtttcaggcaaaaccttttaggtaagcgcgtggatttttcaggcagaagcgtgattgtggtggggcctaaccttaaaatggatgaatgcggattgcctaaaaacatggcgttagaactcttcaaaccgcatctgttatccaagcttgaagagagaggctatgccaccacgctcaaacaggctaaacgcatgattgagcaaaagagcaatgaagtgtgggagtgcttgcaagaaatcacagaggggtatccggtgctactcaaccgcgcccctaccttgcacaagcaatccattcaagcgttccatccaaagctcattgacggcaaagcgatccagttgcacccgttagtgtgctcagcgtttaacgctgattttgacggggatcaaatggcggtgcatgtgcctttaagccaggaagcgatcgctgaatgcaaggtgctcatgctaagctctatgaatatccttttacccgctagcggtaaagccgtagccattcctagccaggatatggttttagggctttattatctttctttagaaaagagtggggtcaagggcgagcataagcttttctctagcgtgaatgaaatcatcaccgctattgacacgaaagaattagacatccacgcaaagattagggttttggatcaagggaatattatcgctacgagcgcggggcgcatgatcatcaagtccattttgcctgattttatccctacggatttgtggaacagacccatgaagaaaaaagatattggcgtgcttgtggattatgtgcataaagtgggcggtatcggcattaccgcaacctttttggatcatttgaaaacgcttggctttaggtatgcgactaaggctggtatttctatctctatggaagatattatcacgccaaaagacaagcaaaaaatggtggaaaaagccaaagtagaagttaaaaaaatccaacaacaatacgatcaagggttgctcactgaccaagagcgttacaataaaatcattgacacttggactgaagtcaatgacagaatgagtaaggaaatgatgagcgctatcgcaaaagataaagagggctttaactctatttatatgatggcggatagtggcgcaagggggagcgcggcgcaaatccgtcagctttcagcgatgagggggcttatgacaaagccggatggcagtatcattgacacgcccattatttctaactttaaagaggggttgaatgtcttagaatactttaactccacgcatggcgctagaaagggcttagcggatacagcgctaaaaacagccaatgcagggtatttgacaagaaaactcattgacgtttcgcaaaatgtcaaggtggtgtctgatgattgcggcacgcatgaagggattgaaatcacggatattgcggtggggagtgagctgattgaacctttagaagagcgtattttcgggcgcgttttattagaagatgtgatcgatcccattaccaatgaaatcttgctctatgcggacactttgattgacgaagagggtgctaaaaaggtggttgaagctgggattaaatccattacgatccgcaccccagtaacttgtaaagcgccaaagggcgtgtgcgcgaaatgctatggcttgaatttaggcgaaggcaagatgagctatccgggtgaagcggtgggcgtggtagccgcgcaatctatcggggagcctggaacgcagctcactttaaggactttccatgtgggcgggacagcgagcaggagtcaggatgagcgcgaaatcgtggcgagcaaagaaggttttgtgcgtttctacaaccttaggacttacacgaataaagagggtaaaaacattatcgccaaccgccgtaacgcttctattttagtggtagagcctaagattaaagcgccttttgatggggaattacgcattgaaacggtctatgaagaagtcgttgtgagcgtgaaaaatggcgatcaagaagctaaattcgttttaagaagaagcgatattgtcaagccaagcgaattagccggcgttggcggtaagattgaggggaaagtgtatttgccttatgctagcgggcataaggtgcataaggggggaagtatcgctgatattatccaagagggctggaatgtgcctaatcgcatcccttatgcgagcgaattgctggttaaagataatgaccctatcgcgcaagatgtgtatgccaaagaaaaaggtgtgatcaaatactatgttttagaggccaatcatttagagcgcacccatggagtcaaaaagggcgatattgtgagtgaaaaaggcttgtttgcagtggtagctgatgataatggtagggaagccgctcgccattatatcgctaggggttctgagatcttgattgatgataatagtgaagtgagcgctaatagtgtaatttctaaacccacgactaacactttcaaaacgattgccacatgggatccttacaacacccctatcattgcggactttaaaggtaaggtgaattttgtggatgttatcgcaggggttacggtcgctgaaaaagaagacgaaaataccggtatcaccagtttagtggtgaatgattacatcccaagcggatacaaaccaagcttgtttttagagggggctaatggcgaagagatgcgttatttcctagagccaaaaacttctatcgccattagcgatggctctagcgtggagcaggctgaagtgttagcgaaaatccctaaagcgaccgttaaatctagggatattaccgggggtctcccaagggtttctgaactctttgaagcgagaaaacccaagcctaaagatgtggcgatcctttctgaagtggatgggatagtgagttttggcaaacccattcgcaataaagaacacatcatcgtaacttccaaagatggtcgtctcacagattattttgtggataagggcaagcaaattctagtgcatgccgatgaatttgtgcatgcgggagaagcgatgacggacggagtggtttcaagccatgatattttaaggatcagcggcgaaaaagagctttataaatacattgtgagcgaagtccagcaagtgtatcgcaggcagggggtaagcattgccgacaagcacattgaaatcattgtgtctcaaatgttaaggcaagtgcgcattttagacagcggggatagcaagtttattgaaggggatttggtcagtaaaaaactcttcaaagaagaaaacactcgtgtgatcgctttaaaaggcgagccagcgattgctgaaccggtgcttttagggatcactagagcggctattgggagcgatagcatcatttcagcggcctctttccaagaaacgactaaagttttaacagaagccagtattgcgatgaaaaaagacttttta

SEQ ID NO: 2784 - DNA (genomic), 378 bp, Helicobacter pylori; double-stranded, circular
  misc_feature (B) LOCATION 1...378
  hypothetical: NO
  anti-sense: NO
cttgaaagaccgcaaggcaagattatccttttgacgggtaaaaagctcacttcaaggaaaattaaagaacttaaagaaaaccatttagaatgggtggaataccctatggatattttactcaatcgtcatttagctgagcctgttatggtagggaaagaagttttattgaacatgctcacacagttggataaaaacagactagaaaaaatccacgatctaggcgtgcaagaatttgtgatcatcaacgatttagcgttagggcatgacgcttccattatccattctttctcagccgatcatgagtctttgaaattgctcaagcaaactgaaaagattgatgatgaaaacgctctagcggcgattcgtatccataaggca

SEQ ID NO: 2785 - DNA (genomic), 378 bp, Helicobacter pylori; double-stranded, circular
  misc_feature (B) LOCATION 1...378
  hypothetical: NO
  anti-sense: NO
gatccctttgatgacagaacgcacttcgttatcattaatggggtggagcgcgtggtggtcaatcagctctacagaagccccggtgtgatttttaaagaagaagaatctagcacttcttcaaacaaactcatttacacaggacaaatcattcctgataggggttcgtggctgtattttgaatacgattctaaagatgttttgtacgctcgtatcaacaaacgccgtaaagtgcctgttaccattttattcagggcgatggattatcaaaaacaagacattatcaaaatgttctacccgcttgtgaaagtgcgttatgaaaacgataaatatttgaccccgtttgcttcattagacgccaatcaaagaatgcttgactgg

SEQ ID NO: 2786 - DNA (genomic), 474 bp, Helicobacter pylori; double-stranded, circular
  misc_feature (B) LOCATION 1...474
  hypothetical: NO
  anti-sense: NO
atgtcaaaaaaaattcccctaaaaaaccgcttgagagctgattttacaaaaaccccaacagatttagaagttcctaatttattattattgcaacgagacagctacgattctttcttgtattccaaagatggtaaagagagtgggattgaaaaggtttttaaatccattttccctatccaagatgagcataaccgcatcactttggaatacgcgggttgcgaatttggcaagtctaaatacactgttagagaagcgatggagaggggcattacctactctatccccctcaaaattaaagtgcgtttgatcttatgggaaaaagacaccaagagtggcgaaaagaacggcattaaggatattaaagagcaaagcattttcattcgtgagatccctttgatgacagaacgcacttcgttatcattaatggggtggagcgcgtggtggtcaatcagctctacagaagccccggtgtga

SEQ ID NO: 2787 - DNA (genomic), 474 bp, Helicobacter pylori; double-stranded, circular
  misc_feature (B) LOCATION 1...474
  hypothetical: NO
  anti-sense: NO
aatatgtcaaaaaaaattcccctaaaaaaccgcttgagagctgattttacaaaaaccccaacagatttagaagttcctaatttattattattgcaacgagacagctacgattctttcttgtattccaaagatggtaaagagagtgggattgaaaaggtttttaaatccattttccctatccaagatgagcataaccgcatcactttggaatacgcgggttgcgaatttggcaagtctaaatacactgttagagaagcgatggagaggggcattacctactctatccccctcaaaattaaagtgcgtttgatcttatgggaaaaagacaccaagagtggcgaaaagaacggcattaaggatattaaagagcaaagcattttcattcgtgagatccctttgatgacagaacgcacttcgttatcattaatggggtggagcgcgtggtggtcaatcagctctacagaagccccggtg

SEQ ID NO: 2788 - DNA (genomic), 1257 bp, Helicobacter pylori; double-stranded, circular
  misc_feature (B) LOCATION 1...1257
  hypothetical: NO
  anti-sense: NO
gtgatttttaaagaagaagaatctagcacttcttcaaacaaactcatttacacaggacaaatcattcctgataggggttcgtggctgtattttgaatacgattctaaagatgttttgtacgctcgtatcaacaaacgccgtaaagtgcctgttaccattttattcagggcgatggattatcaaaaacaagacattatcaaaatgttctacccgcttgtgaaagtgcgttatgaaaacgataaatatttgatcccgtttgcttcattagacgccaatcaaagaatggaatttgacttgaaagacccgcaaggcaagattatccttttggcgggtaaaaagctcacttcaaggaaaattaaagaacttaaagaaaaccatttagaatgggtggaataccctatggatattttactcaatcgtcatttagctgagcctgttatggtagggaaagaagttttattggacatgctcacacagttggataaaaacagactagaaaaaatccacgatctaggcgtgcaagaatttgtgatcatcaacgatttagcgttagggcatgacgcttccattatccattctttctcagccgatcatgagtctttgaaattgctcaagcaaactgaaaagattgatgatgaaaacgctctagcggcgattcgtatccataaggttatgaaaccaggtgatcctgttacgactgaagtggctaagcaatttgttaagaaacttttctttgaccctgaacgctatgatttgaccatggtgggccgtatgaaaatgaatcacaagttaggcttgcatgtgcctgattacatcacgactttaacgcatgaagatattatcaccaccgttaaatacctcatgaagatcaaaaacaatcagggcaagattgatgatagggatcacttaggcaatcgcaggatcagagccgttggggaactattggccaatgaattgcattcaggcttagtgaaaatgcaaaagaccattaaagacaaactcaccaccatgagcggggcttttgattcgctcatgccccatgatttagtcaattctaaaatgatcaccagcaccatcatggaatttttcatgggcggtcagctctcgcaattcatggatcaaaccaaccctttgagtgaagttacgcacaaacgacgcctttcagcgctcggtgaaggggggttagtcaaagacagggtagggtttgaagccagggatgtgccaccccacgtattatggccaatttggtcccattga

SEQ ID NO: 2789 - DNA (genomic), 1728 bp, Helicobacter pylori; double-stranded, circular
  misc_feature (B) LOCATION 1...1728
  hypothetical: NO
  anti-sense: NO
atgtcaaaaaaaattcccctaaaaaaccgcttgagagctgattttacaaaaaccccaacagatttagaagttcctaatttattattattgcaacgagacagctacgattctttcttgtattccaaagatggtaaagagagtgggattgaaaaggtttttaaatccattttccctatccaagatgagcataaccgcatcactttggaatacgcgggttgcgaatttggcaagtctaaatacactgttagagaagcgatggagaggggcattacctactctatccccctcaaaattaaagtgcgtttgatcttatgggaaaaagacaccaagagtggcgaaaagaacggcattaaggatattaaagagcaaagcattttcattcgtgagatccctttgatgacagaacgcacttcgtttatcattaatggggtggagcgcgtggtggtcaatcagctctacagaagccccggtgtgatttttaaagaagaagaatctagcacttcttcaaacaaactcatttacacaggacaaatcattcctgataggggttcgtggctgtattttgaatacgattctaaagatgttttgtacgctcgtatcaacaaacgccgtaaagtgcctgttaccattttattcagggcgatggattatcaaaaacaagacattatcaaaatgttctacccgcttgtgaaagtgcgttatgaaaacgataaatatttgatcccgtttgcttcattagacgccaatcaaagaatggaatttgacttgaaagacccgcaaggcaagattatccttttggcgggtaaaaagctcacttcaaggaaaattaaagaacttaaagaaaaccatttagaatgggtggaataccctatggatattttactcaatcgtcatttagctgagcctgttatggtagggaaagaagttttattggacatgctcacacagttggataaaaacagactagaaaaaatccacgatctaggcgtgcaagaatttgtgatcatcaacgatttagcgttagggcatgacgcttccattatccattctttctcagccgatcatgagtctttgaaattgctcaagcaaactgaaaagattgatgatgaaaacgctctagcggcgattcgtatccataaggttatgaaaccaggtgatcctgttacgactgaagtggctaagcaatttgttaagaaacttttctttgaccctgaacgctatgatttgaccatggtgggccgtatgaaaatgaatcacaagttaggcttgcatgtgcctgattacatcacgactttaacgcatgaagatattatcaccaccgttaaatacctcatgaagatcaaaaacaatcagggcaagattgatgatagggatcacttaggcaatcgcaggatcagagccgttggggaactattggccaatgaattgcattcaggcttagtgaaaatgcaaaagaccattaaagacaaactcaccaccatgagcggggcttttgattcgctcatgccccatgatttagtcaattctaaaatgatcaccagcaccatcatggaatttttcatgggcggtcagctctcgcaattcatggatcaaaccaaccctttgagtgaagttacgcacaaacgacgcctttcagcgctcggtgaaggggggttagtcaaagacagggtagggtttgaagccagggatgtgccaccccacgtattatggccaatttggtcccattga

SEQ ID NO: 2790 - DNA (genomic), 1863 bp, Helicobacter pylori; double-stranded, circular
  misc_feature (B) LOCATION 1...1863
  hypothetical: NO
  anti-sense: NO
atgttaaaaaccccactcaaaaccctactagatattttaatcaatcatttcactaaagagtgcttaatcactttaattacagagcatgatgaaaagcttttaattttcatgcttgagcatgaaaacgctaacgactataaaaaacacttttttaaaacgatcgccaattcgctcgtattcaatgaaaaagcgttattggaatgtttagaaataaaagaattagaaaaatctttcacaagatttaaaaataaaataggcttattttcacaagagggctttatcaaatccagcgaattagtcgttttgaatttcccttttaaagacaacgttttactcggtaacgctaaagataacagcaccaaatctaacgagcttttttaccatgaaatattgcataaaaacgaaattgacacgcttttaagtccgaaagcgttgtgccgttttgaaatgcatggacaaggcgatttacaaagcgctttaaaagatgaaaacacgaactaccttatcaaagggaataacttgatcgctctccattctttaaaaaagaaattcgctaaaaaagtgaaatgcatctacattgaccccccttataataccggtaatgacagctttaattacaacgataattttaaccacagctcttggctagtgtttatgaaaaacaggcttgaagcggctagggaatttttaagcgatgatggcgtgatttttgtgcaatgcgacgataacgaacaggcttatttaaaagttttaatggatgagatttttgggagagagaattttattgcttgttttgtgtgggaaaagacaagtaatagcttatcaagaatacgcataaaaacagagtatattttgtgctatgaacaaactaaatttgggcttattttcaatggggatatggctgaagaaggacaagattttcctattttaaatgaagtaaatgtaaagagaactttacaatttccaccaaattccatatattttaaaacttttaagggagtgattaagcctacaaaatttaataaaatggaattaattgatgatttaagaatagtaaataaaacaaattcaaacatggtaagaattaacgccaaatttaaatggacacaagacaagctggatgacgaaataaaagaaggcacaacttttgtgataaaaagcgatgagttttctatgagatatattagaaaaggcgatagggaagtaaaggcaagcaatgtttttaacgcagaatgtggggttaccacaaatataaaagctacaagtgaaataaaagtcctttttgcaaattcaaataccgatttattttcaacacccaaacccgaagccctactccaacgcattttagaaatttctaccaacgaaaacgacctcgtgttagacttttttgccgggagcgggacgacttgcgcggtggcgcacaaaatgaaacgccgctacattggcatcgagcaaatggactatatagaaactatcactaaagaaaggttaaaaaaagtcatagagggcgagcaagggggcatttctaaaaaatgcgattttaaagggggcgggagttttgtctatgctgaattgaaagaagtgaattcaggaattaaaaaacaaatccttaacgctaaaagcgcgagcgaatgcctaaaaatctttaacgatcttaataaacgcattttaaaacgcgccgataataagatggatgcaatccatagcgaagagttccaaaatttagatctcaatgagcaaaaaagaaaatgttgcgcttctttagacgctaatgaagactatttgaacttgggcgatattgacgaagacgcatgggagatagatgagatcaccaaaaaatacaatgaaattttttattcttaa

SEQ ID NO: 2791 - DNA (genomic), 1869 bp, Helicobacter pylori; double-stranded, circular
  misc_feature (B) LOCATION 1...1869
  hypothetical: NO
  anti-sense: NO
ggacaaagaatgttaaaaaccccactcaaaaccctactagatattttaatcaatcatttcactaaagagtgcttaatcactttaattacagagcatgatgaaaagcttttaattttcatgcttgagcatgaaaacgctaacgactataaaaaacacttttttaaaacgatcgccaattcgctcgtattcaatgaaaaagcgttattggaatgtttagaaataaaagaattagaaaaatctttcacaagatttaaaaataaaataggcttattttcacaagagggctttatcaaatccagcgaattagtcgttttgaatttcccttttaaagacaacgttttactcggtaacgctaaagataacagcaccaaatctaacgagcttttttaccatgaaatattgcataaaaacgaaattgacacgcttttaagtccgaaagcgttgtgccgttttgaaatgcatggacaaggcgatttacaaagcgctttaaaagatgaaaacacgaactaccttatcaaagggaataacttgatcgctctccattctttaaaaaagaaattcgctaaaaaagtgaaatgcatctacattgaccccccttataataccggtaatgacagctttaattacaacgataattttaaccacagctcttggctagtgtttatgaaaaacaggcttgaagcggctagggaatttttaagcgatgatggcgtgatttttgtgcaatgcgacgataacgaacaggcttatttaaaagttttaatggatgagatttttgggagagagaattttattgcttgttttgtgtgggaaaagacaagtaatagcttatcaagaatacgcataaaaacagagtatattttgtgctatgaacaaactaaatttgggcttattttcaatggggatatggctgaagaaggacaagattttcctattttaaatgaagtaaatgtaaagagaactttacaatttccaccaaattccatatattttaaaacttttaagggagtgattaagcctacaaaatttaataaaatggaattaattgatgatttaagaatagtaaataaaacaaattcaaacatggtaagaattaacgccaaatttaaatggacacaagacaagctggatgacgaaataaaagaaggcacaacttttgtgataaaaagcgatgagttttctatgagatatattagaaaaggcgatagggaagtaaaggcaagcaatgtttttaacgcagaatgtggggttaccacaaatataaaagctacaagtgaaataaaagtcctttttgcaaattcaaataccgatttattttcaacacccaaacccgaagccctactccaacgcattttagaaatttctaccaacgaaaacgacctcgtgttagacttttttgccgggagcgggacgacttgcgcggtggcgcacaaaatgaaacgccgctacattggcatcgagcaaatggactatatagaaactatcactaaagaaaggttaaaaaaagtcatagagggcgagcaagggggcatttctaaaaaatgcgattttaaagggggcgggagttttgtctatgctgaattgaaagaagtgaattcaggaattaaaaaacaaatccttaacgctaaaagcgcgagcgaatgcctaaaaatctttaacgatcttaataaacgcattttaaaacgcgccgataataagatggatgcaatccatagcgaagagttccaaaatttagatctcaatgagcaaaaaagaaaatgttgcgcttctttagacgctaatgaagactatttgaacttgggcgatattgacgaagacgcatgggagatagatgagatcaccaaaaaatacaatgaaattttttattct

SEQ ID NO: 2792 - DNA (genomic), 846 bp, Helicobacter pylori; double-stranded, circular
  misc_feature (B) LOCATION 1...846
  hypothetical: NO
  anti-sense: NO
atgcgtgtttttattattcatttaagccccaaaacctgtaaaaatttttctttaaaagaaactcatataaccccccttttagagagccttaaacttcaagggatctcttatgaaatttttgatgcgatctattctaaaatctctcccactcaattacaccccttgattttagagcatttgcacccttcttttatggttgaagatttattggctttttgtaaaaataaaaaacaccccccttgcgcgttaaaaaatttcttttacgcgctcaagcattgcgggaagaggatggggtttggggagcttgggtgctatgcgagccattattcgttgtggcaaaaatgcatagagctcaatgaagcgatctgtattttagaagacgatataaccctaaaagaacattttaaagaaagcctggaattttgccgccagcacatcaacgaattaggctatatccgcttgatgcatttagaagaaaatgtggctaaacaaaagactccagttaaaggggtttctcaaattttaaattttaaagatggcattggcactcaagggtatgttttagccccaaaagccgcgcaaaaattattgaaatacagcgcgaaagaatgggtgatgcctatagattgcgtgatggataggcattattggcatggggtcaaaaactatgtgttagaagaatttgcgatcgcttgcgacgggataaacgctcaaaattccaacacagaaaaacaaaggcctaaaagattacctttaagtatcaggattggccgttttttgcataaaagcgcgattcaacaatggaatattttgaaatcgttttttcctaatcatataatcaagtga

SEQ ID NO: 2793 - DNA (genomic), 888 bp, Helicobacter pylori; double-stranded, circular
  misc_feature (B) LOCATION 1...888
  hypothetical: NO
  anti-sense: NO
ggctgtttaacattgattttatttgtattaagaattaaggctaacatgcgtgtttttattattcatttaagccccaaaacctgtaaaaatttttctttaaaagaaactcatataaccccccttttagagagccttaaacttcaagggatctcttatgaaatttttgatgcgatctattctaaaatctctcccactcaattacaccccttgattttagagcatttgcacccttcttttatggttgaagatttattggctttttgtaaaaataaaaaacaccccccttgcgcgttaaaaaatttcttttacgcgctcaagcattgcgggaagaggatggggtttggggagcttgggtgctatgcgagccattattcgttgtggcaaaaatgcatagagctcaatgaagcgatctgtattttagaagacgatataaccctaaaagaacattttaaagaaagcctggaattttgccgccagcacatcaacgaattaggctatatccgcttgatgcatttagaagaaaatgtggctaaacaaaagactccagttaaaggggtttctcaaattttaaattttaaagatggcattggcactcaagggtatgttttagccccaaaagccgcgcaaaaattattgaaatacagcgcgaaagaatgggtgatgcctatagattgcgtgatggataggcattattggcatggggtcaaaaactatgtgttagaagaatttgcgatcgcttgcgacgggataaacgctcaaaattccaacacagaaaaacaaaggcctaaaagattacctttaagtatcaggattggccgttttttgcataaaagcgcgattcaacaatggaatattttgaaatcgttttttcctaatcatataatcaag

SEQ ID NO: 2794 - DNA (genomic), 1338 bp, Helicobacter pylori; double-stranded, circular
  misc_feature (B) LOCATION 1...1338
  hypothetical: NO
  anti-sense: NO
atgaaatcacgcccaatcctcgcacaagcttacgcgctccaaatgatggtcaaacagatcgcttttttagaaaccattttagtggaaaacgagcaagacgctttgattttggaaaattctttgatcaagcagctcaagcctaaatacaacattcttttaagagacgataaaacttacccttatatttacatggatttttctattgatttccctatccctttaatcacacgaaaaatcttaaaacagcctggcgttaaatattttggcccttttacgagcggggctaaggatattttggacagcttgtatgaattgctccctttggttcaaaagaaaaattgcatcaaggataaaaaggcatgcatgttttatcaaatagagcgttgtaaagccccatgcgaggataaaatcactaaagaagaatatttaaaaatcgctaaagaatgtttagaaatgattgaaaataaagacaggctcatcaaagagcttgaattgaaaatggagcgcctttctagtaacttgcgttttgaagaagccttaatttatagggataggattgcaaaaatccaaaaaatcgcccctttcacttgcatggatttagccaaactctacgatttggatatttttgctttttatggtgggaacaacaaggcggtgttagtgaaaatgttcatgcgtgggggtaaaatcatttcttcagcgtttgaaaaaatccactctctcaacgggtttgacactgatgaagcgatgaaacaagccattatcaatcattaccaatcgcatttgcctttgatgcctgaacaaatcttattgagcgcttgttctaatgaaacgcttaaagaattgcaagagtttatctctcaccaatattctaaaaaaatcgctcttagcattcctaaaaagggtgataagctcgctttaatagaaatcgctatgaaaaacgctcaagagatttttagccaagaaaaaacctctaatgaagatcggatcttagaagaagcgcgatcgctcttcaatttagagtgcgtgccttatagggtagaaatctttgacacaagccaccattcaaacagccaatgcgtggggggaatggtcgtgtatgaaaacaatgcatttcaaaaagactcttatcggcgctaccatctaaaaggctctaacgaatatgatcaaatgagcgaattgctcaccagaagggctttagactttgctaaagagccaccgcctaatttgtgggtgatagatggagggagggcgcaattaaacatcgctttagaaattttaaaaagcagcgggagttttgtagaagtgatcgctatttctaaagaaaaaaggggattc

SEQ ID NO: 2795 - DNA (genomic), 1785 bp, Helicobacter pylori; double-stranded, circular
  misc_feature (B) LOCATION 1...1785
  hypothetical: NO
  anti-sense: NO
atggctgatttattgtccagtttgaaaaacctttctagtagtagtggggtgtatcaatattttgataaaaaccgccaattactctacatcggtaaggcgaaaaatttaaaaaagcgcatcaaaagctatttttctgtccgtaataatgaaatcacgcccaatcctcgcacaagcttacgcgtccaaatgatggtcaaacagatcgcttttttagaaaccattttagtggaaaacgagcaagacgctttgattttggaaaattctttgatcaagcagctcaagcctaaatacaacattcttttaagagacgataaaacttacccttatatttacatggatttttctattgatttccctatccctttaatcacacgaaaaatcttaaaacagcctggcgttaaatattttggcccttttacgagcggggctaaggatattttggacagcttgtatgaattgctccctttggttcaaaagaaaaattgcatcaaggataaaaaggcatgcatgttttatcaaatagagcgttgtaaagccccatgcgaggataaaatcactaaagaagaatatttaaaaatcgctaaagaatgtttagaaatgattgaaaataaagacaggctcatcaaagagcttgaattgaaaatggagcgcctttctagtaacttgcgttttgaagaagccttaatttatagggataggattgcaaaaatccaaaaaatcgcccctttcacttgcatggatttagccaaactctacgatttggatatttttgctttttatggtgggaacaacaaggcggtgttagtgaaaatgttcatgcgtgggggtaaaatcatttcttcagcgtttgaaaaaatccactctctcaacgggtttgacactgatgaagcgatgaaacaagccattatcaatcattaccaatcgcatttgcctttgatgcctgaacaaatcttattgagcgcttgttctaatgaaacgcttaaagaattgcaagagtttatctctcaccaatattctaaaaaaatcgctcttagcattcctaaaaagggtgataagctcgctttaatagaaatcgctatgaaaaacgctcaagagatttttagccaagaaaaaacctctaatgaagatcggatcttagaagaagcgcgatcgctcttcaatttagagtgcgtgccttatagggtagaaatctttgacacaagccaccattcaaacagccaatgcgtggggggaatggtcgtgtatgaaaacaatgcatttcaaaaagactcttatcggcgctaccatctaaaaggctctaacgaatatgatcaaatgagcgaattgctcaccagaagggctttagactttgctaaagagccaccgcctaatttgtgggtgatagatggagggagggcgcaattaaacatcgctttagaaattttaaaaagcagcgggagttttgtagaagtgatcgctatttctaaagaaaaaagggattctaaggcttatcgttctaaagggggtgctaaagacattatccatacgattagtcatacttttaaattgctccctagcgacaaacgcttgcagtgggtgcaaaaattgcgcgatgaaagccaccggtatgcgataaacttccatagatccactaaacttaaaaacatgaaacaaatcgctcttttaaaagaaaagggcataggagaagccagcgtgaaaaaattgttggattattttgggagttttgaagcgatagaaaaagcgagcgatcaggaaaaaaacgccgttttaaaaaaacgaaaataa

SEQ ID NO: 2796 - DNA (genomic), 1782 bp, Helicobacter pylori; double-stranded, circular
  misc_feature (B) LOCATION 1...1782
  hypothetical: NO
  anti-sense: NO
atggctgatttattgtccagtttgaaaaacctttctagtagtagtggggtgtatcaatattttgataaaaaccgccaattactctacatcggtaaggcgaaaaatttaaaaaagcgcatcaaaagctatttttctgtccgtaataatgaaatcacgcccaatcctcgcacaagcttacgcgtccaaatgatggtcaaacagatcgcttttttagaaaccattttagtggaaaacgagcaagacgctttgattttggaaaattctttgatcaagcagctcaagcctaaatacaacattcttttaagagacgataaaacttacccttatatttacatggatttttctattgatttccctatccctttaatcacacgaaaaatcttaaaacagcctggcgttaaatattttggcccttttacgagcggggctaaggatattttggacagcttgtatgaattgctccctttggttcaaaagaaaaattgcatcaaggataaaaaggcatgcatgttttatcaaatagagcgttgtaaagccccatgcgaggataaaatcactaaagaagaatatttaaaaatcgctaaagaatgtttagaaatgattgaaaataaagacaggctcatcaaagagcttgaattgaaaatggagcgcctttctagtaacttgcgttttgaagaagccttaatttatagggataggattgcaaaaatccaaaaaatcgcccctttcacttgcatggatttagccaaactctacgatttggatatttttgctttttatggtgggaacaacaaggcggtgttagtgaaaatgttcatgcgtgggggtaaaatcatttcttcagcgtttgaaaaaatccactctctcaacgggtttgacactgatgaagcgatgaaacaagccattatcaatcattaccaatcgcatttgcctttgatgcctgaacaaatcttattgagcgcttgttctaatgaaacgcttaaagaattgcaagagtttatctctcaccaatattctaaaaaaatcgctcttagcattcctaaaaagggtgataagctcgctttaatagaaatcgctatgaaaaacgctcaagagatttttagccaagaaaaaacctctaatgaagatcggatcttagaagaagcgcgatcgctcttcaatttagagtgcgtgccttatagggtagaaatctttgacacaagccaccattcaaacagccaatgcgtggggggaatggtcgtgtatgaaaacaatgcatttcaaaaagactcttatcggcgctaccatctaaaaggctctaacgaatatgatcaaatgagcgaattgctcaccagaagggctttagactttgctaaagagccaccgcctaatttgtgggtgatagatggagggagggcgcaattaaacatcgctttagaaattttaaaaagcagcgggagttttgtagaagtgatcgctatttctaaagaaaaaagggattctaaggcttatcgttctaaagggggtgctaaagacattatccatacgattagtcatacttttaaattgctccctagcgacaaacgcttgcagtgggtgcaaaaattgcgcgatgaaagccaccggtatgcgataaacttccatagatccactaaacttaaaaacatgaaacaaatcgctcttttaaaagaaaagggcataggagaagccagcgtgaaaaaattgttggattattttgggagttttgaagcgatagaaaaagcgagcgatcaggaaaaaaacgccgttttaaaaaaacgaaaa

SEQ ID NO: 2797 - DNA (genomic), 165 bp, Helicobacter pylori; double-stranded, circular
  misc_feature (B) LOCATION 1...165
  hypothetical: NO
  anti-sense: NO
aacgatagaattgacgataaagagtattatttttcagacacctacgccttagattttaaggaagttaaggggcaagctgtcgctaaagaagccgctttgatcgctagcgctgggtttcataacttgattttagaggaagtccagggtcgggaaaagcatgatcat

SEQ ID NO: 2798 - DNA (genomic), 318 bp, Helicobacter pylori; double-stranded, circular
  misc_feature (B) LOCATION 1...318
  hypothetical: NO
  anti-sense: NO
gcgagccttttttggacaggattgatttgtttgtggaaatcgaagaggggaattataaagacacgccatcgcatttcttggacttcaaaagagatgcatgaattagtgttattagctttcaaacagcaaaagttaaggaaacagagcgcttttaatggtaagcttaatgaagagcagatcgaacgattttgccctttaaatactgaagcgcaaaagttgttaaagcaggcggttgaaaggtttaatctgtccatgcgctctgtcaataaggccaaaaaagtcgctaggacgattgcggatttaaagcttgcgagaata

SEQ ID NO: 2799 - DNA (genomic), 315 bp, Helicobacter pylori; double-stranded, circular
  misc_feature (B) LOCATION 1...315
  hypothetical: NO
  anti-sense: NO
gcgagccttttttggacaggattgatttgtttgtggaaatcgaagaggggaattataaagacacgccatcgcatttcttggacttcaaaagagatgcatgaattagtgttattagctttcaaacagcaaaagttaaggaaacagagcgcttttaatggtaagcttaatgaagagcagatcgaacgattttgccctttaaatactgaagcgcaaaagttgttaaagcaggcggttgaaaggtttaatctgtccatgcgctctgtcaataaggccaaaaaagtcgctaggacgattgcggatttaaagcttgcgaga

SEQ ID NO: 2800 - DNA (genomic), 462 bp, Helicobacter pylori; double-stranded, circular
  misc_feature (B) LOCATION 1...462
  hypothetical: NO
  anti-sense: NO
gcgagcagacagcgcctattaccctttagaagctttagaaaccctcaccaaagcgcttcaaaatccagcattttaggcttcagcttttttagagagccaaaacctggcgaaatcgcgctagcgcataacggcatgcttttttttgatgaattgcctcattttaaaaaggatattttagaagccttgagagagcctttagaaaacaataaattagtgatctcacgagtgcatagcaagattgaatacgaaacctcttttttatttgtgggggctcaaaacccttgcttgtgcgggaatttactcagcgctactaaaacatccgtttgccaagacagagagatcacgcagtataaaaaccgcttgagcgagccttttttggacaggattgatttgtttgtggaaatcgaagaggggaattataaagacacgccatcgcatttcttggacttcaaaagagatgca

SEQ ID NO: 2801 - DNA (genomic), 531 bp, Helicobacter pylori; double-stranded, circular
  misc_feature (B) LOCATION 1...531
  hypothetical: NO
  anti-sense: NO
aaaagaactcaaagagctgcaaaaaaaacaaaaacacaagtaacaaccatgatcaacacgatattttgcgcgaccatgcaaaggggggtggctgaaatcgtggctgtgaaggcgactttcacaagagctttgccggcgtttgtgatttcaggcctagccaataactctatccaagaagccaaacagcgggtccaatcggctttacagaataacgatttcactttcccgcctttaaaaatcaccatcaacctttccccctcagatttgcctaaatccggaagccattttgatttgcctatcgctcttttaatcgctttgcaaaaacaagaattggcttttaaagagtggtttgcttttggggagttggggcttgatggcaagatcaaacccaattctaacattttccccatgctcttagacattgccattaagcgcccccatgccaaaatcattgcgcctaaggcgaatgaagagcttttttcgcttatccctaatttcaatgtttttctgtggagcattttaaagaagcgt

SEQ ID NO: 2802 - DNA (genomic), 1473 bp, Helicobacter pylori; double-stranded, circular
  misc_feature (B) LOCATION 1...1473
  hypothetical: NO
  anti-sense: NO
atgatcaacacgatattttgcgcgaccatgcaaaggggggtggctgaaatcgtggctgtggaggcgactttcacaagagctttgccggcgtttgtgatttcaggcctagccaataactctatccaagaagccaaacagcgggtccaatcggctttacagaataacgatttcactttcccgcctttaaaaatcaccatcaacctttccccctcagatttgcctaaatccggaagccattttgatttgcctatcgctcttttaatcgctttgcaaaaacaagaattggcttttaaagagtggtttgcttttggggagttggggcttgatggcaagatcaaacccaattctaacattttccccatgctcttagacattgccattaagcgcccccatgccaaaatcattgcgcctaaggcgaatgaagagcttttttcgcttatccctaatttgcaatgtttttttgtggagcattttaaagaagcgttagaaatcttgcaaactcctgaaatcaaagcagacacccacacgaaaaaactaccttttaaaacgatagaattgaacgataaagagtattatttttcagacacctacgccttagattttaaggaagttaaggggcaagctgtcgctaaagaagccgctttgatcgctagcgctgggtttcataacttgattttagagggaagtccagggtgcgggaaaagcatgatcattaatcgcatgcgttatatcttgcctcccttaagcctgaatgaaatcttagaagcgacaaaattacgcattttaagcgagcaagacagcgcctattaccctttaagaagctttagaaaccctcaccaaagcgcttcaaaatccagcattttaggctcaagctctctaagagagccaaaacctggcgaaatcgcgctagcgcataacggcatgcttttttttgatgaattgcctcattttaaaaaggatattttagaagccttgagagagcctttagaaaacaataaattagtgatctcacgagtgcatagcaagattgaatacgaaacctcttttttatttgtgggggctcaaaacccttgcttgtgcgggaatttactcagcgctactaaagcatgccgttgccaagacagagagatcacgcagtataaaaaccgcttgagcgagccttttttggacaggattgatttgtttgtgcaaatggaagaggggaattataaagacacgccatcgcattcttggacttcaaaagagatgcatgaattagtgttattagctttcaaacagcaaaagttaaggaaacagagcgcttttaatggtaagcttaatgaagagcagatcgaacgattttgccctttaaatactgaagcgcaaaagttgttaaagcaggcggttgaaaggtttaatctgtccatgcgctctgtcaataaggccaaaaaagtcgctaggacgattgcggatttaaagcttgcgagaatatag

SEQ ID NO: 2803 - DNA (genomic), 603 bp, Helicobacter pylori; double-stranded, circular
  misc_feature (B) LOCATION 1...603
  hypothetical: NO
  anti-sense: NO
atgccaaatcatcagccagtaaaaaaatttaagattattgggggggcttgtaagggattaggcttgaatttgcctaacatttctagcacgcgccccaccaaagcgatcgtaagagagtcgttttttaacaccttgcaaacagaaattaatggagcgcattttatagaagtgttttcaggcagcgcttctatgggtttggaggctttgagtaggggggctaaaagcgcggtgttttttgagcaaaataaaaacgcttatgccacgcttttagaaaatatttccctttttaaaaaccgcctgaaaaaggaaattgaaattcaaacctttttagatgacgctttcaagcttttgcccacgctgcgtttaaaaaatggcgttttgaatattatttatttagatcctccttttgaaacaagcgggtttttagggatttatgaaaaatgttttcacgctttagaaaggttattaaaccgctctcattcaaaaaatctttttgtggtttttgagcatgaaagcctgcatgaaatgcctaaaagtctcgcaactttagctataatcaaacagaaaaaatttgggaaaaccactttaacttattttcagtag

SEQ ID NO: 2804 - DNA (genomic), 630 bp, Helicobacter pylori; double-stranded, circular
  misc_feature (B) LOCATION 1...630
  hypothetical: NO
  anti-sense: NO
gcaattactagaagaatacacccacaaattatgccaaatcatcagccagtaaaaaaatttaagattattgggggggcttgtaagggattaggcttgaatttgcctaacatttctagcacgcgccccaccaaagcgatcgtaagagagtcgttttttaacaccttgcaaacagaaattaatggagcgcattttatagaagtgttttcaggcagcgcttctatgggtttggaggctttgagtaggggggctaaaagcgcggtgttttttgagcaaaataaaaacgcttatgccacgcttttagaaaatatttccctttttaaaaaccgcctgaaaaaggaaattgaaattcaaacctttttagatgacgctttcaagcttttgcccacgctgcgtttaaaaaatggcgttttgaatattatttatttagatcctccttttgaaacaagcgggtttttagggatttatgaaaaatgttttcacgctttagaaaggttattaaaccgctctcattcaaaaaatctttttgtggtttttgagcatgaaagcctgcatgaaatgcctaaaagtctcgcaactttagctataatcaaacagaaaaaatttgggaaaaccactttaacttattttcag

SEQ ID NO: 2805 - DNA (genomic), 720 bp, Helicobacter pylori; double-stranded, circular
  misc_feature (B) LOCATION 1...720
  hypothetical: NO
  anti-sense: NO
agcattgatatgattctcatatcgccacgttatgataatgtgagaaattatcaaggatatacttttgcgtttgagaacattgctaatgagatttttagggttatcaaagaaggtggtgttgttgtttggattgtgggtggtgaagtaaaaaacggtaacaaaaacattactagttttagacaagcattgtattttcagcaaataggatttaatatgcacgatgtgatgatttatgcaaagaaaaatacgccctttatgcgctcaaatgcttacacaaatgcatatgaatatatgtttgtcttatccaaaggaaagccaaaaactttcaatccattaaaagaacccactgcaagaaatggaatggaaatgcttgtcactaataaaggtgcagatgcaaaaaacaataagatcctaaaagaactcaaaaaagaaaaaacaaaaaacaacatttggcattatgcagtcggactaggcggtagcacaaatgacaaaatcgcctttaatcacccagctatatttccagagcagttagcacttgatcatattttatcttggagcaatgagagagatatagtctttgatcctatgtgtggctcgggtacgacttgcaaaatggcgtttttgcacaatagaaatttcataggcgtagatataagcaaagaatacatacaaatagcccaaaaaagattacaacaatatcaacaaggcttattcgtatgc

SEQ ID NO: 2806 - DNA (genomic), 717 bp, Helicobacter pylori; double-stranded, circular
  misc_feature (B) LOCATION 1...717
  hypothetical: NO
  anti-sense: NO
attgatatgattctcatatcgccacgttatgataatgtgagaaattatcaaggatatacttttgcgtttgagaacattgctaatgagatttttagggttatcaaagaaggtggtgttgttgtttggattgtgggtggtgaagtaaaaaacggtaacaaaaacattactagttttagacaagcattgtattttcagcaaataggatttaatatgcacgatgtgatgatttatgcaaagaaaaatacgccctttatgcgctcaaatgcttacacaaatgcatatgaatatatgtttgtcttatccaaaggaaagccaaaaactttcaatccattaaaagaacccactgcaagaaatggaatggaaatgcttgtcactaataaaggtgcagatgcaaaaaacaataagatcctaaaagaactcaaaaaagaaaaaacaaaaaacaacatttggcattatgcagtcggactaggcggtagcacaaatgacaaaatcgcctttaatcacccagctatatttccagagcagttagcacttgatcatattttatcttggagcaatgagagagatatagtctttgatcctatgtgtggctcgggtacgacttgcaaaatggcgtttttgcacaatagaaatttcataggcgtagatataagcaaagaatacatacaaatagcccaaaaaagattacaacaatatcaacaaggcttattcgtatgc

SEQ ID NO: 2807 - DNA (genomic), 819 bp, Helicobacter pylori; double-stranded, circular
  misc_feature (B) LOCATION 1...819
  hypothetical: NO
  anti-sense: NO
atgaccgctaaaatcaaaccaaacatacaatcattgctaaataatttttatgtagatagttgtgtgaattttatgcagcataaattacaaaatgaaagcattgatatgattctcacttcgccaccttatgataatttgagaaattatcaaggctatacttttgcgtttgagaacattgctaatgagatttttagggttatcaaaaaaggtggtgttgttgtttggattgtgggtgataaaataaaaaacggtaacaaaagccttactagttttagacaagcattgtattttcagcaaataggatttaatatgcacgatgtgatgatttatgcaaagaaaaatacgccctttatgcgctcaaatgcttacacaaatgcatatgaatatatgtttgtcttatccaaaggaaagccaaaaactttcaatccattaaaagaacccactgcaagaaatggaatggaaatgcttgtcactaataaaggtgcagatgcaaaaaacaataagatcctaaaagaactcaaaaaagaaaaaacaaaaaacaacatttggcattatgcagtcggactaggcggtagcacaaatgacaaaatcgcctttaatcacccagctatatttccagagcagttagcacttgatcatattttatcttggagcaatgagagagatatagtctttgatcctatgtgtggctcgggtacgacttgcaaaatggcgtttttgcacaatagaaatttcataggcgtagatataagcaaagaatacatacaaatagcccaaaaaagattacaacaatatcaacaaggcttattcgtatgctaa

SEQ ID NO: 2808 - DNA (genomic), 273 bp, Helicobacter pylori; double-stranded, circular
  misc_feature (B) LOCATION 1...273
  hypothetical: NO
  anti-sense: NO
atgaataaaaccataaaagccgccgccctagcctataacatggggcaagatcatgccccaaaagtgatcgcaagcggggtgggcgaagtggctaaaaggatcattcaaaaagctaaggaatacgatatagcgctcttttctaaccccatgctggtggattcgctcttaaaggtggaattagactgcgcgatacctgaagaattgtatgaaagcgtggtgcaagtgtttttatggctcaacagcgtggaaaataacgcgcaaatgtccaagtaa

SEQ ID NO: 2809 - DNA (genomic), 270 bp, Helicobacter pylori; double-stranded, circular
  misc_feature (B) LOCATION 1...270
  hypothetical: NO
  anti-sense: NO
atgaataaaaccataaaagccgccgccctagcctataacatggggcaagatcatgccccaaaagtgatcgcaagcggggtgggcgaagtggctaaaaggatcattcaaaaagctaaggaatacgatatagcgctcttttctaaccccatgctggtggattcgctcttaaaggtggaattagactgcgcgatacctgaagaattgtatgaaagcgtggtgcaagtgtttttatggctcaacagcgtggaaaataacgcgcaaatgtccaag

SEQ ID NO: 2810 - DNA (genomic), 270 bp, Helicobacter pylori; double-stranded, circular; identical to SEQ ID NO: 2809
  misc_feature (B) LOCATION 1...270
  hypothetical: NO
  anti-sense: NO

SEQ ID NO: 2811 - DNA (genomic), 363 bp, Helicobacter pylori; double-stranded, circular
  misc_feature (B) LOCATION 1...363
  hypothetical: NO
  anti-sense: NO
gtggattccattttaattgatgaagcgagasctcctttaatcatttcagggcctgtggataggcgcatggaaaattacaacaaggctgatgaagtcgctaaaagcatgcaagtggaagtggatttcaccatagacgaaaaaaaccgcgcgattttaatcactgaagaggggattaaaaaagccgaaaatctctttggcgtggataatttatacaaaattgaaaacgccgccctatcgcaccatttagaccaagccttgaaagcgaattacctcttttttattgrtaaagattatattgtagccaataatgaagtggtgattgtagatrratttaccgrccgtttgyytgaaggggaggcgctt

SEQ ID NO: 2812 - DNA (genomic), 459 bp, Helicobacter pylori; double-stranded, circular
  misc_feature (B) LOCATION 1...459
  hypothetical: NO
  anti-sense: NO
cgaacaaagaagccggatcgaacgcatcgtgtatttgcagattttagacaacgcaggcgagagcacctttatatgatggatatctcaaaaaccggtatcaatttgagaggctataaccccaaaagacccccttgtagaatacaaattagagagttacaaccttttcttagactcattggagacattaaaatagagcgatcacaaaccttttctaagatccagtttggaaacgagcaagattctagcgatgccgagcgttatttggataactttagcgaagaaagagagcatgagagcgtaacttaccgccatgaagaagccttagatgaagatttgaatgtggccgtgaaagctttttctaaaacccctaaaagaaacgagccttgcccttgtgggagtggcaaaaaatataaagattgttgcgctaaaagcgggcctaaaaagggcttatttgccaaa

SEQ ID NO: 2813 - DNA (genomic), 594 bp, Helicobacter pylori; double-stranded, circular
  misc_feature (B) LOCATION 1...594
  hypothetical: NO
  anti-sense: NO
gtgagcattaaagaagagagccaaaccttagccgatattactttccaaaattatttcaggatgttttctaaactttcaggcatgacaggcacggctcaaaccgaagccacagaatttttagaaatctacaatttagaagtggtgtccatccctactaatctagcgatcaagcgaaaagatttgaacgatctgatctataagagtgaaaaagaaaaatttgacgctgtgatccttaaaattaaagaattacacgataagggtcagcccgttttagtcggcacggctagcattgaaaagagtgaaaccttgcacgctttactcaaaaaagagcgcatccctcacaccgttttaaacgccaagcaacacactaaagaagctgaaatcatcaaagacgccgggcttaaaggggcggttacgattgcgaccaacatggcaggcaggggcgttgatattaagctcactgatgaagttaaagaacttggggggctgtatatcattggcactgaaaggcatgagagccgtaggattgacaatcaattaagggggcgaagcgggcgtcaaggcgatccgggagtgagtcagttttatttgagc

SEQ ID NO: 2814 - DNA (genomic), 1062 bp, Helicobacter pylori; double-stranded, circular
  misc_feature (B) LOCATION 1...1062
  hypothetical: NO
  anti-sense: NO
agaggcgtgagcattaaagaagagagccaaaccttagccgatattactttccaaaattatttcaggatgttttctaaactttcaggcatgacaggcacggctcaaaccgaagccacagaatttttagaaatctacaatttagaagtggtgtccatccctactaatctagcgatcaagcgaaaagatttgaacgatctgatctataagagtgaaaaagaaaaatttgacgctgtgatccttaaaattaaagaattacacgataagggtcagcccgttttagtcggcacggctagcattgaaaagagtgaaaccttgcacgctttactcaaaaaagagcgcatccctcacaccgttttaaacgccaagcaacacactaaagaagctgaaatcatcaaagacgccgggcttaaaggggcggttacgattgcgaccaacatggcaggcaggggcgttgatattaagctcactgatgaagttaaagaacttggggggctgtatatcattggcactgaaaggcatgagagccgtaggattgacaatcaattaagggggcgaagcgggcgtcaaggcgatccgggagtgagtcagttttatttgagcttagaagacaatctgttacgcatttttgggagcgataggactaagggggtgatggaaaaattagggcctaaagacggcgaacacattgaattcaagctcgttacaagagcggtggaaaacgcgcaaaaaaaagtggagaacttgcattttgacagccgtaagcatttgttagaatacgatgatgtggctaatgagcaacgaacaagcgtgtataatcttagagatgaattattagacatcaattacgatattagcgctaaaatcgctgaaaacagagaatacgcgctcaatcaaatcttttctaaactcaaagcctttgaccatcaaaacctgtctgaagaggaacttttagggcttaaaaacattttaaaagaagattttaacgctagcgttgaattagaagatttagaaaaagcctcccctattgaaatatttgtggctgaaaaactcaaaagcggatta

SEQ ID NO: 2815 - DNA (genomic), 1068 bp, Helicobacter pylori; double-stranded, circular
  misc_feature (B) LOCATION 1...1068
  hypothetical: NO
  anti-sense: NO
aaggttactactaccatgataaaagcaatcattggaaaaatcatcggcactagaaacgatcgctggatcaaacaatacaaaaaaaaagtcctagccatcaacgccttagagcctacttatgaaaaaatgagcgatgttgagctgcaaaacgcttttgaagaattaaaaaaacgagtgcgatccgtagaaaaagatttgcaagaaaaaacccttttagaagttttaccagaaagctttgctatcactagagaagcgagcaaaaggatcttaaagatgcgccattttgatgtgcaactcattgggggcatggtcttaaacgatggcaagatcgctgaaatgaaaaccggagagggtaagactttggtcgctactttagcggtggctttgaacgctatgaaaggcgagagcgtgtatgtggtaaccgttaatgattacttagcccatagggattctaaagaaatggagccgttgtatcaattcttaggttatagcgtaggcacgatcactgcgagcgtgcgagatgatgatgagcgcttagaaatttattctaaagacattgtttatggcactaataatgaatttggctttgattatctaagggataacatgaaatattctttagagcataaagtgcaaaaatcccatgcgttcgccattgttgatgaagtggattccattttaattgatgaagcgagaactcctttaatcatttcagggcctgtggataggcgcatggaaaattacaacaaggctgatgaagtcgctaaaagcatgcaagtggaagtggatttcaccatagacgaaaaaaaccgcgcgattttaatcactgaagaggggattaaaaaagccgaaaatctctttggcgtggataatttatacaaaattgaaaacgccgccctatcgcaccatttagaccaagccttgaaagcgaattacctcttttttattgataaagattatattgtagccaataatgaagtggtgattgtagatgaatttaccggccgtttgtctgaggggaggcgctttagtgagggcttacaccaggctttagaggctaaagaggcg

SEQ ID NO: 2816 - DNA (genomic), 2598 bp, Helicobacter pylori; double-stranded, circular
  misc_feature (B) LOCATION 1...2598
  hypothetical: NO
  anti-sense: NO
atgataaaagcaatcattggaaaaatcatcggcactagaaacgatcgctggatcaaacaatacaaaaaaaaagtcctagccatcaacgccttagagcctacttatgaaaaaatgagcgatgttgagctgcaaaacgcttttgaagaattaaaaaaacgagtgcgatccgtagaaaaagatttgcaagaaaaaacccttttagaagttttaccagaaagctttgctatcactagagaagcgagcaaaaggatcttaaagatgcgccattttgatgtgcaactcattgggggcatggtcttaaacgatggcaagatcgctgaaatgaaaaccggagagggtaagactttggtcgctactttagcggtggctttgaacgctatgaaaggcgagagcgtgtatgtggtaaccgttaatgattacttagcccatagggattctaaagaaatggagccgttgtatcaattcttaggttatagcgtaggcacgatcactgcgagcgtgcgagatgatgatgagcgcttagaaatttattctaaagacattgtttatggcactaataatgaatttggctttgattatctaagggataacatgaaatattctttagagcataaagtgcaaaaatcccatgcgttcgccattgttgatgaagtggattccattttaattgatgaagcgagaactcctttaatcatttcagggcctgtggataggcgcatggaaaattacaacaaggctgatgaagtcgctaaaagcatgcaagtggaagtggatttcaccatagacgaaaaaaaccgcgcgattttaatcactgaagaggggattaaaaaagccgaaaatctctttggcgtggataatttatacaaaattgaaaacgccgccctatcgcaccatttagaccaagccttgaaagcgaattacctcttttttattgataaagattatattgtagccaataatgaagtggtgattgtagatgaatttaccggccgtttgtctgaggggaggcgctttagtgagggcttacaccaggctttagaggctaaagagggcgtgagcattaaagaagagagccaaaccttagccgatattactttccaaaattatttcaggatgttttctaaactttcaggcatgacaggcacggctcaaaccgaagccacagaatttttagaaatctacaatttagaagtggtgtccatccctactaatctagcgatcaagcgaaaagatttgaacgatctgatctataagagtgaaaaagaaaaatttgacgctgtgatccttaaaattaaagaattacacgataagggtcagcccgttttagtcggcacggctagcattgaaaagagtgaaaccttgcacgctttactcaaaaaagagcgcatccctcacaccgttttaaacgccaagcaacacactaaagaagctgaaatcatcaaagacgccgggcttaaaggggcggttacgattgcgaccaacatggcaggcaggggcgttgatattaagctcactgatgaagttaaagaacttggggggctgtatatcattggcactgaaaggcatgagagccgtaggattgacaatcaattaagggggcgaagcgggcgtcaaggcgatccgggagtgagtcagttttatttgagtttagaagacaatctgttacgcatttttgggagcgataggattaagggggtgatggaaaaattagggcttaaagacggcgaacacattgaatccaagctcgttacaagagcggtggaaaacgcgcaaaaaaaagtggagaacttgcattttgaaagccgtaagcatttgttagaatacgatgatgtggctaatgagcaacgaaaaagcgtgtataaatttagagatgaattattagacatcaattacgatattagcgctaaaatcgctgaaaacagagaatacgcgctcaatcaaatcttttctaaactcaaagcctttgaccatcaaaacctgtctgaagaggaacttttagggcttaaaaacattttaaaagaagattttaacgctagcgttgaattagaagatttagaaaaagcctcccctattgaaaaatttgtggctgaaaaactcaaaagcgattatgaaaacaaaatgaaagctttggatagcgaacaaagaagccggatcgaacgcatcgtgtatttgcagattttagacaacgcatggcgagagcacctttatacgatggataatctcaaaaccggtatcaatttgagaggctataaccaaaaagacccccttgtagaatacaaaaaagagagttacaaccttttcttagaactcattggagacattaaaatagaagcgatccaaaccttttctaagatccagtttgaaaacgagcaagattctagcgatgccgagcgttatttggataactttagcgaagaaagagagcatgagagcgtaacttaccgccatgaagaagccttagatgaagatttgaatgtggccgtgaaagctttttctaaaacccctaaaagaaacgagccttgcccttgtgggagtggcaaaaaatataaagattgttgcgctaaaagcgggcctaaaaagggcttatttgccaaatag

SEQ ID NO: 2817 - DNA (genomic), 243 bp, Helicobacter pylori; double-stranded, circular
  misc_feature (B) LOCATION 1...243
  hypothetical: NO
  anti-sense: NO
atccgctttcaagatgatgaaaaagcgctagacagagcgttagtcgaattgaaaaacgcttttacaaatgatgtgcatcataaagtcgctagagaattgctccaaaaagtggaaacccaaactaaagcgggtggcattggtaagcagcaatttttagacgctttagaaaagagtttgttagaaattttaagcgctaaagggagcagtggtttcactttcgctcaacgccccccaccgtggttt

SEQ ID NO: 2818 - DNA (genomic), 615 bp, Helicobacter pylori; double-stranded, circular
  misc_feature (B) LOCATION 1...615
  hypothetical: NO
  anti-sense: NO
gtgagcggggtggtgttaagcaaatttgatagcgattctaaagggggtatcgccttaggcatcacttatcaattgggcttacccttgcgttttattgggagtggggaaaaaatccctgatttagacgtgtttatgcctgaaaggattgtggggcgtttgatgggggctggagatattatctcgctcgctgaaaaaaccgccagcgttttaaaccctaatgaagccaaagatttaagcaaaaagctcaaaaaagggcaattcactttcaacgattttttaaaccaaattgaaaaagtgaaaaaattaggctctatgagttctctratctctatgattccaggtttagggaatatggcaagcgcgctaaaagacacggatttagaaagttctttagaagtgaaaaaaatcaaggccatggttaattccatgacgaaaaaagagcgagaaaaccccgagattttaaacggcagccgaagaaaaaggatcgctttagggarcggcttagaagygyctgaaatcaatcgcatcatcaaacgctttgatcaggcgagcaaaatggcgaaacgactcacgaataaaaagggtattagcgatytgatgaatctawcgakctag

SEQ ID NO: 2819 - DNA (genomic), 1098 bp, Helicobacter pylori; double-stranded, circular
  misc_feature (B) LOCATION 1...1098
  hypothetical: NO
  anti-sense: NO
agggagcagtggtttcactttcgctcaacgccccccaccgtggttttaatggcaggtttgcaagggagcgggaagacaaccaccaccgctaaactcgcccactatctcaaaaccaaaaataaaaaagtgcttttatgcgcatgcgatttgcaacgcttagcagcggtggagcaattaaaggttttgggcgaacaggtgggcgtggaagtttttcatgaagaaaataaaagcgtgaaagaaatcgccaacaacgctttaaaaagggctaaagaagcgcaatttgacgtgttaatcgtggatagcgcggggcgtttagcgattgataaagagcttatgcaagaattaaaggaagttaaagaagtcttaaatccccatgaagtgctgtatgtcgcagacgcgttgagcgggcaagatggggtcaaaagtgcgaacacctttaatgaagaaataggcgtgagcggggtggtgttaagcaaatttgatagcgattctaaagggggtatcgccttaggcatcacttatcaattgggcttacccttgcgttttattgggagtggggaaaaaatccctgatttagacgtgtttatgcctgaaaggattgtggggcgtttgatgggggctggagatattatctcgctcgctgaaaaaaccgccagcgttttaaaccctaatgaagccaaagatttaagcaaaaagctcaaaaaagggcaattcactttcaacgattttttaaaccaaattgaaaaagtgaaaaaattaggctctatgagttctctgatctctatgattccaggtttagggaatatggcaagcgcgctaaaagacacggatttagaaagttctttagaagtgaaaaaaatcaaggccatggttaattccatgacgaaaaaagagcgagaaaaccccgagattttaaacggcagccgaagaaaaaggatcgctttagggagcggcttagaagtgtctgaaatcaatcgcatcatcaaacgctttgatcaggcgagcaaaatggcgaaacgactcacgaataaaaagggtattagcgatttgatgaatctaatgagtcaggctaaaaatcaaacgccccctaaaatgcgc

SEQ ID NO: 2820 - DNA (genomic), 1347 bp, Helicobacter pylori; double-stranded, circular
  misc_feature (B) LOCATION 1...1347
  hypothetical: NO
  anti-sense: NO
atgtttcaagcgttaagcgatgggtttaaaaacgcgctcaataaaatccgctttcaagatgatgaaaaagcgctagacagagcgttagacgaattgaaaaaaacgcttttaaaaaatgatgtgcatcataaagtcgctagagaattgctcaaaaaagtggaaagccaaactaaagcgggtggcattggtaagcagcaatttttagacgctttagaaaagagtttgttagaaattttaagcgctaaagggagcagtggtttcactttcgctcaaacgccccccaccgtggttttaatggcaggtttgcaagggagcgggaagacaaccaccaccgctaaactcgcccactatctcaaaaccaaaaataaaaaagtgcttttatgcgcatgcgatttgcaacgcttagcagcggtggagcaattaaaggttttgggcgaacaggtgggcgtggaagtttttcatgaagaaaataaaagcgtgaaagaaatcgccaacaacgctttaaaaagggctaaagaagcgcaatttgacgtgttgatcgtggatagcgcggggcgtttagcgattgataaagagcttatgcaagaattaaaggaagttaaagaagtcttaaatccccatgaagtgctgtatgtcgcagacgcgttgagcgggcaagatggggtcaaaagtgcgaacacctttaatgaagaaataggcgtgagcggggtggtgttaagcaaatttgatagcgattctaaagggggtatcgccttaggcatcacttatcaattgggcttacccttgcgttttattgggagtggggaaaaaatccctgatttagacgtgtttatgcctgaaaggattgtggggcgtttgatgggggctggagatattatctcgctcgctgaaaaaaccgccagcgttttaaaccctaatgaagccaaagatttaagcaaaaagctcaaaaaagggcaattcactttcaacgattttttaaaccaaattgaaaaagtgaaaaaattaggctctatgagttctctgatctctatgattccaggtttagggaatatggcaagcgcgctaaaagacacggatttagaaagttctttagaagtgaaaaaaatcaaggccatggttaattccatgacgaaaaaagagcgagaaaaccccgagattttaaacggcagccgaagaaaaaggatcgctttagggagcggcttagaagtgtctgaaatcaatcgcatcatcaaacgctttgatcaggcgagcaaaatggcgaaacgactcacgaataaaaagggtattagcgatttgatgaatctaatgagtcaggctaaaaatcaaacgccccctaaaatgcgctga

SEQ ID NO: 2821 - DNA (genomic), 498 bp, Helicobacter pylori; double-stranded, circular
  misc_feature (B) LOCATION 1...498
  hypothetical: NO
  anti-sense: NO
gctaggctctataatgagaagctgaaagaaaaattgattgaaaatttagacgaaaagatcctttttgatttgcctaaaacgatcatagagcaagaaatggatttgttgttcaggaacgctctttattccatgcaagctgaggaagtcaaatccttacaagatagtcaagaaaaagccaaagaaaagcgtgaaagttttaggaatgatgcgacaaaaagcgtgaaaatcactttcgtcattgacgctctagcgaaggaagaaaagattggcgtgcatgataatgaagtctttcaaaccttgtattatgaagcgatgatgacagggcagaacccagaaaatctcattgaacaataccgcaaaaataacatgttagcggcggtgaaaatggcgatgattgaagatagggtgttagcttatttgttggataaaaacctgcctaaagagcaacaagaaattttggaaaaaatgaggcctaacgctcaaaaaactcaagtgggt

SEQ ID NO: 2822 - DNA (genomic), 783 bp, Helicobacter pylori; double-stranded, circular
  misc_feature (B) LOCATION 1...783
  hypothetical: NO
  anti-sense: NO
ccattaaggaaagaaatgaatcttgaagtgaaaaagattgacaccgctaacgcccgtttgagcgctaaaccttccattgaagatttagaaaagcgttatgataaaatcgctcaaaaaatcgcccaaaaagttaagattgatggctttagaagaggtaaagtcccccttagtttagtgaaaacccgctatcaagcccaaattgaacaagacgctcaagaagaaatgattcaagaggttttaaaaaacgctcttaaagaattaggggttgaaactaaggatctcattggtagccccaatttcactaaatttgaaaaaaaagacacgcattttgaaatagaagcggacatcggcttaaaacccacgattgttttagacaagatccaagagtgcgtgcctagcgtgggagtggaagttccaaatgaagaaaaagttaatgagcgtttgaaacagctcgctaaagactatgcgaaatttgtggatactgactctcaaagaaaagcacaaaacgacgataaattgacgattgattttgaaggctttatagacaatgcgccttttgaagggggcaaggctgagaatttcagtttgattttaggcagtaagcaaatgctagaagattttgaaaaggctcttttaggcatgcaagcgagcgaagaaaacgaattccctttgactttccctagcggataccacgcagaagcattagccgggcaagagaccctttttagagtgagattgcgccagattcaagtgcgtgaagcgttagagatcaatgacgaactc

SEQ ID NO: 2823 - DNA (genomic), 786 bp, Helicobacter pylori; double-stranded, circular
  misc_feature (B) LOCATION 1...786
  hypothetical: NO
  anti-sense: NO
ccattaaggaaagaaatgaatcttgaagtgaaaaagattgacaccgctaacgcccgtttgagcgctaaaccttccattgaagatttagaaaagcgttatgataaaatcgctcaaaaaatcgcccaaaaagttaagattgatggctttagaagaggtaaagtcccccttagtttagtgaaaacccgctatcaagcccaaattgaacaagacgctcaagaagaaatgattcaagaggttttaaaaaacgctcttaaagaattaggggttgaaactaaggatctcattggtagccccaatttcactaaatttgaaaaaaaagacacgcattttgaaatagaagcggacatcggcttaaaacccacgattgttttagacaagatccaagagtgcgtgcctagcgtgggagtggaagttccaaatgaagaaaaagttaatgagcgtttgaaacagctcgctaaagactatgcgaaatttgtggatactgactctcaaagaaaagcacaaaacgacgataaattgacgattgattttgaaggctttatagacaatgcgccttttgaagggggcaaggctgagaatttcagtttgattttaggcagtaagcaaatgctagaagattttgaaaaggctcttttaggcatgcaagcgagcgaagaaaacgaattccctttgactttccctagcggataccacgcagaagcattagccgggcaagagaccctttttagagtgagattgcgccagattcaagtgcgtgaagcgttagagatcaatgacgaactcgct

SEQ ID NO: 2824 - DNA (genomic), 1356 bp, Helicobacter pylori; double-stranded, circular
  misc_feature (B) LOCATION 1...1356
  hypothetical: NO
  anti-sense: NO
atgaatcttgaagtgaaaaagattgacaccgctaacgcccgtttgagcgctaaaccttccattgaagatttagaaaagcgttatgataaaatcgctcaaaaaatcgcccaaaaagttaagattgatggctttagaagaggtaaagtcccccttagtttagtgaaaacccgctatcaagcccaaattgaacaagacgctcaagaagaaatgattcaagaggttttaaaaaacgctcttaaagaattaggggttgaaactaaggatctcattggtagccccaatttcactaaatttgaaaaaaaagacacgcattttgaaatagaagcggacatcggcttaaaacccacgattgttttagacaagatccaagagtgcgtgcctagcgtgggagtggaagttccaaatgaagaaaaagttaatgagcgtttgaaacagctcgctaaagactatgcgaaatttgtggatactgactctcaaagaaaagcacaaaacgacgataaattgacgattgattttgaaggctttatagacaatgcgccttttgaagggggcaaggctgagaatttcagtttgattttaggcagtaagcaaatgctagaagattttgaaaaggctcttttaggcatgcaagcgagcgaagaaaaagaattccctttgactttccctagcggataccacgcagagcatttagccggcaaagaagccctttttaaagtgaaattgcgccagattcaagtgcgtgaagcgttagaaatcaatgacgaactcgctaaaatcgtcttagccaatgaggagaatgcgactttagagcttttgaaagaaagggttaaagggcagttgtttttagaaaataaagctaggctctataatgaagagctgaaagaaaaattgattgaaaatttagacgaaaagatcctttttgatttgcctaaaacgatcatagagcaagaaatggatttgttgttcaggaacgctctttattccatgcaagctgaggaagtcaaatccttacaagatagtcaagaaaaagccaaagaaaagcgtgaaagttttaggaatgatgcgacaaaaagcgtgaaaatcactttcgtcattgacgctctagcgaaggaagaaaagattggcgtgcatgataatgaagtctttcaaaccttgtattatgaagcgatgatgacagggcagaacccagaaaatctcattgaacaataccgcaaaaataacatgttagcggcggtgaaaatggcgatgattgaagatagggtgttagcttatttgttggataaaaacctgcctaaagagcaacaagaaattttggaaaaaatgaggcctaacgctcaaaaaactcaagtgggttaa

SEQ ID NO: 2825 - DNA (genomic), 216 bp, Helicobacter pylori; double-stranded, circular
  misc_feature (B) LOCATION 1...216
  hypothetical: NO
  anti-sense: NO
gttggaagtggatattatgatagtcgtggcggtaaacttcttaaaaacaaacagctcttaagcatcgccaaacagcattgcaaagacagctacttggtagaagatgaaaacgaattagagttagcgtggtttaaggataagaaattgtgtggattacgctgggcttccacgccggattggattatagaaaatgtcaagcaaaaaatcagcacgatt

SEQ ID NO: 2826 - DNA (genomic), 546 bp, Helicobacter pylori; double-stranded, circular
  misc_feature (B) LOCATION 1...546
  hypothetical: NO
  anti-sense: NO
atggaaattaaaatggctaaggattatggtttttgttttggcgtcaaaagagcgatacaaatcgctgaaaaaaatcaaaacagcttgatttttggctcgctcattcataacgctaaagaaatcaatcgtttggaaaaaaatttcaatgtgaaaattgaagaagatcctaaaaaaatccctaaaaataagagcgtgatcataagaacccatggcattcctaaacaggatttagaatacttgaaaaataagggggttaaaatcactgacgcgacttgcccgtatgtgatcaaacctcagcaaattgtggaatccatgagtaaagaagggtatcaaatcgtgctttttggggacattaaccaccctgaagtcaagggcgtgatcagctatgccactaaccaggctttagtcggcaattcgttagaagaattgcaagaaaaaaaattgcaacggaaagtggctttagtctctcaaaccacccaagcaaaccccaaaactcttgcaaatcgcttcttatttggtggargrtgcactgaagtgcgtattttt

SEQ ID NO: 2827 - DNA (genomic), 576 bp, Helicobacter pylori; double-stranded, circular
  misc_feature (B) LOCATION 1...576
  hypothetical: NO
  anti-sense: NO
aatgcgcgaacatttctttcccaacctttcagctttggctcaatctattcaaaaaaaggagtctcaatggaaattaaaatggctaaggattatggtttttgttttggcgtcaaaagagcgatacaaatcgctgaaaaaaatcaaaacagcttgatttttggctcgctcattcataacgctaaagaaatcaatcgtttggaaaaaaatttcaatgtgaaaattgaagaagatcctaaaaaaatccctaaaaataagagcgtgatcataagaacccatggcattcctaaacaggatttagaatacttgaaaaataagggggttaaaatcactgacgcgacttgcccgtatgtgatcaaacctcagcaaattgtggaatccatgagtaaagaagggtatcaaatcgtgctttttggggacattaaccaccctgaagtcaagggcgtgatcagctatgccactaaccaggctttagtcgtcaattcgttagaagaattgcaagaaaaaaaattgcaacggaaagtggctttagtctctcaaaccaccaagcaaaccccaaaactcttgcaaatcgcttct

SEQ ID NO: 2828 - DNA (genomic), 825 bp, Helicobacter pylori; double-stranded, circular
  misc_feature (B) LOCATION 1...825
  hypothetical: NO
  anti-sense: NO
atggaaattaaaatggctaaggattatggtttttgttttggcgtcaaaagagcgatacaaatcgctgaaaaaaatcaaaacagcttgatttttggctcgctcattcataacgctaaagaaatcaatcgtttggaaaaaaatttcaatgtgaaaattgaagaagatcctaaaaaaatccctaaaaataagagcgtgatcataagaacccatggcattcctaaacaggatttagaatacttgaaaaataagggggttaaaatcactgacgcgacttgcccgtatgtgatcaaacctcagcaaattgtggaatccatgagtaaagaagggtatcaaatcgtgctttttggggacattaaccaccctgaagtcaagggcgtgatcagctatgccactaaccaggctttagtcgtcaattcgttagaagaattgcaagaaaaaaaattgcaacggaaagtggctttagtctctcaaaccaccaagcaaaccccaaaactcttgcaaatcgcttcttatttggtggaaagatgcactgaagtgcgtatttttaacacgatttgtaacgccacttcctacaaccaaaaagccgctttggatttgagtaaggaagtggatattatgatagtcgtgggcggtaaaacttcttcaaacaccaaacagctcttaagcatcgccaaacagcattgcaaagacagctacttggtagaagatgaaaacgaattagagttagcgtggtttaaggataagaaattgtgtgggattaccgctggggcttccacgccggattggattatagaaaatgtcaagcaaaaaatcagcacgatttaa

SEQ ID NO: 2829 - DNA (genomic), 1143 bp, Helicobacter pylori; double-stranded, circular
  misc_feature (B) LOCATION 1...1143
  hypothetical: NO
  anti-sense: NO
ttgtatccctgctggggtgagtttgtattccatgctagtgcacgccaaacgagagagagagagagagtaaaactcttttatcaaatccattgtttggtggaggatttaagcctagaaaatatagccaaattagaagaaacgatcgctccttttagcgctttttctagcatagagtttttggatattaccgataaagaattagaaccacgccataattattacaaacttgatcctttaatagctggtgaaattaaaaaattgtatttaaaactcaatgctttttcacaaaaacgcttttctaaaatgatcatgtgccgtttcttttttgcctcccttttccctcaatacgataagatgatcatgtttgatgtggacactttgtttgtgggtgatattagcgagagcttttttatcccccttggaacgcattattttggggctgtgagggaaaaagatttgatcgctatggataggaattcggctaaggatttatacgaattacgccaaatgcacgcaaaatctatcggcatcgctgatgctttccctaacttagaagaaactcaaatcctttttgacaactactttaacgccgggtttttagccttaaatttaaaatcatggcgtaaagaaaatcttgaaaaccaattgatcgaatttttccttttgaaaaatgaaaaacttttatttaacgatcaagatgctttgtgttttgtgtgccgtggcaggattttagaattgccttattcatacaacgcccaccccagtttccttgatacgccatcattccctagcatcaaagaagcgtgcatgttgcatttttggggcgataaaccctggaagctcttaagcgtcattggcgcgaaaaaatggcatgaagcgttgattcaaacgccttttaaagacgcttattttaacgctccctttttagatcacctctttgaatcccttcaaaacaaagacaaagaaacccaagaaatccacgctttcaataaagccttatccttttcagacaaacgatattcttttgaatttcttctgcctaggctttcttctaaactccttgtaggattttcgctttttaaaatcaaacgaaaagcgaagcgattggttaaaaaaatgctaaaagtattttttaaaatttaa

SEQ ID NO: 2830 - DNA (genomic), 1143 bp, Helicobacter pylori; double-stranded, circular
  misc_feature (B) LOCATION 1...1143
  hypothetical: NO
  anti-sense: NO
ttattgtatccctgctggggtgagtttgtattccatgctagtgcacgccaaacgagagagagagagagagtaaaactcttttatcaaatccattgtttggtggaggatttaagcctagaaaatatagccaaattagaagaaacgatcgctccttttagcgctttttctagcatagagtttttggatattaccgataaagaattagaaccacgccataattattacaaacttgatcctttaatagctggtgaaattaaaaaattgtatttaaaactcaatgctttttcacaaaaacgcttttctaaaatgatcatgtgccgtttcttttttgcctcccttttccctcaatacgataagatgatcatgtttgatgtggacactttgtttgtgggtgatattagcgagagcttttttatcccccttggaacgcattattttggggctgtgagggaaaaagatttgatcgctatggataggaattcggctaaggatttatacgaattacgccaaatgcacgcaaaatctatcggcatcgctgatgctttccctaacttagaagaaactcaaatcctttttgacaactactttaacgccgggtttttagccttaaatttaaaatcatggcgtaaagaaaatcttgaaaaccaattgatcgaatttttccttttgaaaaatgaaaaacttttatttaacgatcaagatgctttgtgttttgtgtgccgtggcaggattttagaattgccttattcatacaacgcccaccccagtttccttgatacgccatcattccctagcatcaaagaagcgtgcatgttgcatttttggggcgataaaccctggaagctcttaagcgtcattggcgcgaaaaaatggcatgaagcgttgattcaaacgccttttaaagacgcttattttaacgctccctttttagatcacctctttgaatcccttcaaaacaaagacaaagaaacccaagaaatccacgctttcaataaagccttatccttttcagacaaacgatattcttttgaatttcttctgcctaggctttcttctaaactccttgtaggattttcgctttttaaaatcaaacgaaaagcgaagcgattggttaaaaaaatgctaaaagtattttttaaaatt

SEQ ID NO: 2831 - DNA (genomic), 393 bp, Helicobacter pylori; double-stranded, circular
  misc_feature (B) LOCATION 1...393
  hypothetical: NO
  anti-sense: NO
atggacgctttagaaatcacccaaaaactcatcagttaccctaccattacgcccaaagaatgcggtatttttgaatacattaaatcgctttttcctgcttttaaaaccctagaatgtgaaaaaaatggcgtgaaaaacctttttttataccgcatttttaaccccctcaaaaagcatgcagaaaaagaacatgcaaaagaaaagcatgtraaagaaaatgttawgcccttgcatttttgcttkgcagggcatattgrtgtcgtgcctcctgggrrcawtkggcrrrskgattcctttwwayccatcattaaagaggggtttttatacggtcgtggggcgcaagacatgaaggggggcgttgggssgtttttkaggtgcrrgttwaaattttaa

SEQ ID NO: 2832 - DNA (genomic), 1167 bp, Helicobacter pylori; double-stranded, circular
  misc_feature (B) LOCATION 1...1167
  hypothetical: NO
  anti-sense: NO
atggacgctttagaaatcacccaaaaactcatcagttaccctaccattacgcccaaagaatgcggtatttttgaatacattaaatcgctttttcctgcttttaaaaccctagaatgtgaaaaaaatggcgtgaaaaacctttttttataccgcatttttaaccccctcaaaaagcatgcagaaaaagaacatgcaaaagaaaagcatgtaaaagaaaatgttaagcccttgcatttttgctttgcagggcatattgatgtcgtgcctcctgggaacaattggcaaagtgatccctttaaacccatcattaaagaggggtttttatacggtcgtggggcgcaagacatgaaggggggcgttggggcgtttttgagtgcgagtttaaattttaaccctaaaaccccttttttgctttctattttactcacgagcgatgaagaagggccagggatttttggcactaggcttatgctagaaaaactcaaagaaaaggatttgctgcctcatatggcgattgtggctgaacccacttgcgaaaaagtcttaggcgatagcatcaaaattggccgaagaggctctattaatggcaaactcattttaaaaggcgttcaagggcatgtggcttacccgcaaaaatgccaaaaccctattgatacgctcgcttcagttttgcctctcatttcaggagttcatttagacaatggcgatgagtgttttgacccttcaaaattagtcatcaccaacttgcatgcagggttaggggctaataatgttacaccagggagcgtagaaattgcctttaatgcgcgccattctttaaaaaccacccaagagagtttgaaagaatatttggaaaaggttttgaaagatttgccttatactttagaattagaatcaagcagttcgcctttcatcacggcttcccattcaaagcttactagcgttttacaagaaaatattttaaaaacatgccacaccaccccccttttaaacaccaaaggcggcacgagcgatgcgcgattttttagcgctcatggtatagaagtggtggagtttggcgccattaatgacaggatccatgccgttgatgaaagggtgagcttgaaggaattagagcttttggaaaaagtgtttttgggggttttagagggcttgagcgagaaataa

SEQ ID NO: 2833 - DNA (genomic), 1173 bp, Helicobacter pylori; double-stranded, circular
  misc_feature (B) LOCATION 1...1173
  hypothetical: NO
  anti-sense: NO
aggattggcatggacgctttagaaatcacccaaaaactcatcagttaccctaccattacgcccaaagaatgcggtatttttgaatacattaaatcgctttttcctgcttttaaaaccctagaatgtgaaaaaaatggcgtgaaaaacctttttttataccgcatttttaaccccctcaaaaagcatgcagaaaaagaacatgcaaaagaaaagcatgtaaaagaaaatgttaagcccttgcatttttgctttgcagggcatattgatgtcgtgcctcctgggaacaattggcaaagtgatccctttaaacccatcattaaagaggggtttttatacggtcgtggggcgcaagacatgaaggggggcgttggggcgtttttgagtgcgagtttaaattttaaccctaaaaccccttttttgctttctattttactcacgagcgatgaagaagggccagggatttttggcactaggcttatgctagaaaaactcaaagaaaaggatttgctgcctcatatggcgattgtggctgaacccacttgcgaaaaagtcttaggcgatagcatcaaaattggccgaagaggctctattaatggcaaactcattttaaaaggcgttcaagggcatgtggcttacccgcaaaaatgccaaaaccctattgatacgctcgcttcagttttgcctctcatttcaggagttcatttagacaatggcgatgagtgttttgacccttcaaaattagtcatcaccaacttgcatgcagggttaggggctaataatgttacaccagggagcgtagaaattgcctttaatgcgcgccattctttaaaaaccacccaagagagtttgaaagaatatttggaaaaggttttgaaagatttgccttatactttagaattagaatcaagcagttcgcctttcatcacggcttcccattcaaagcttactagcgttttacaagaaaatattttaaaaacatgccacaccaccccccttttaaacaccaaaggcggcacgagcgatgcgcgattttttagcgctcatggtatagaagtggtggagtttggcgccattaatgacaggatccatgccgttgatgaaagggtgagcttgaaggaattagagcttttggaaaaagtgtttttgggggttttagagggcttgagcgagaaa

SEQ ID NO: 2834 - DNA (genomic), 1269 bp, Helicobacter pylori; double-stranded, circular
  misc_feature (B) LOCATION 1...1269
  hypothetical: NO
  anti-sense: NO
atgaaaatttctttattggggcatggaaaaaccactctagccctagggcgtttttttaaaaaaaaccataatgaagtcaaattttttgatgataaattccctgcattttttaaggatagcgagggttttctttgctaccctagtaaggattttaaccctaatgattcccaactagaaatcgtcagccctggcattagtttcacgcaccctttagtcatgaaagccaagcatttaatgagcgaatacgattatattgatagtttgtttgatcattctttcacgcctacgatgataagtattagcggcactaacgggaaaaccaccacgaccgaaatgctcaccacacttttagaagattttaaggctgtgagtggggggaatatcggcacgcccttgattgaattgtttgaaaaacgatcgcccttgtgggtgctagaaacaagctccttttctttgcattacactaataaggcttaccctttaatctacttgctcatcaatgtggaagccgatcatttgacttggcattgcaattttgaaaattatttgaacgctaaactcaaggttttaacattgatgcctaaaacttcgctcgctatcctccctttaaaattcaaagaacaccctattgttcaaaactcgcaagcgcaaaaaatcttttttgacaaaagcgaagaggttttagagtgtttaaaaatcccttctaacgcccttttttttaagggagcgtttttattagacgcggctttagcccttttagtttatgagcaatttttaaaaataaagaatttaaaatggcaagattatagagaaaacgcccttaaaagactgaacgcttttaaaatcggctcgcataaaatggaagaatttagggataaacaagggcgtttgtgggtagatgacagcaaagccacgaatattgatgccaccttacaagccctaaaaacctttaaaaaccaaaaaatccatttgattttagggggcgatattaaaggggtcaatttaacccccctttttgaagagtttaaaaactataaaataagcctttatgccataggatcaagcgcttctatcatacaagccttagcgttagaatttaatgtttcttgtcaggtttgtttgaagttagaaaaagcggttcaagaaattaaaagcgttttattacaaaatgaagtcgctttgctttcacctagcgcggccagtttggatcaattttcttcgtataaagaaaggggtgaaaaattcaaagcgtttgttttaaaagattaa

SEQ ID NO: 2835 - DNA (genomic), 1266 bp, Helicobacter pylori; double-stranded, circular
  misc_feature (B) LOCATION 1...1266
  hypothetical: NO
  anti-sense: NO
atgaaaatttctttattggggcatggaaaaaccactctagccctagggcgtttttttaaaaaaaaccataatgaagtcaaattttttgatgataaattccctgcattttttaaggatagcgagggttttctttgctaccctagtaaggattttaaccctaatgattcccaactagaaatcgtcagccctggcattagtttcacgcaccctttagtcatgaaagccaagcatttaatgagcgaatacgattatattgatagtttgtttgatcattctttcacgcctacgatgataagtattagcggcactaacgggaaaaccaccacgaccgaaatgctcaccacacttttagaagattttaaggctgtgagtggggggaatatcggcacgcccttgattgaattgtttgaaaaacgatcgcccttgtgggtgctagaaacaagctccttttctttgcattacactaataaggcttaccctttaatctacttgctcatcaatgtggaagccgatcatttgacttggcattgcaattttgaaaattatttgaacgctaaactcaaggttttaacattgatgcctaaaacttcgctcgctatcctccctttaaaattcaaagaacaccctattgttcaaaactcgcaagcgcaaaaaatcttttttgacaaaagcgaagaggttttagagtgtttaaaaatcccttctaacgcccttttttttaagggagcgtttttattagacgcggctttagcccttttagtttatgagcaatttttaaaaataaagaatttaaaatggcaagattatagagaaaacgcccttaaaagactgaacgcttttaaaatcggctcgcataaaatggaagaatttagggataaacaagggcgtttgtgggtagatgacagcaaagccacgaatattgatgccaccttacaagccctaaaaacctttaaaaaccaaaaaatccatttgattttagggggcgatattaaaggggtcaatttaacccccctttttgaagagtttaaaaactataaaataagcctttatgccataggatcaagcgcttctatcatacaagccttagcgttagaatttaatgtttcttgtcaggtttgtttgaagttagaaaaagcggttcaagaaattaaaagcgttttattacaaaatgaagtcgctttgctttcacctagcgcggccagtttggatcaattttcttcgtataaagaaaggggtgaaaaattcaaagcgtttgttttaaaagat

SEQ ID NO: 2836 - DNA (genomic), 1278 bp, Helicobacter pylori; double-stranded, circular
  misc_feature (B) LOCATION 1...1278
  hypothetical: NO
  anti-sense: NO
aggtgtgttaaaatgaaaatttctttattggggcatggaaaaaccactctagccctagggcgtttttttaaaaaaaaccataatgaagtcaaattttttgatgataaattccctgcattttttaaggatagcgagggttttctttgctaccctagtaaggattttaaccctaatgattcccaactagaaatcgtcagccctggcattagtttcacgcaccctttagtcatgaaagccaagcatttaatgagcgaatacgattatattgatagtttgtttgatcattctttcacgcctacgatgataagtattagcggcactaacgggaaaaccaccacgaccgaaatgctcaccacacttttagaagattttaaggctgtgagtggggggaatatcggcacgcccttgattgaattgtttgaaaaacgatcgcccttgtgggtgctagaaacaagctccttttctttgcattacactaataaggcttaccctttaatctacttgctcatcaatgtggaagccgatcatttgacttggcattgcaattttgaaaattatttgaacgctaaactcaaggttttaacattgatgcctaaaacttcgctcgctatcctccctttaaaattcaaagaacaccctattgttcaaaactcgcaagcgcaaaaaatcttttttgacaaaagcgaagaggttttagagtgtttaaaaatcccttctaacgcccttttttttaagggagcgtttttattagacgcggctttagcccttttagtttatgagcaatttttaaaaataaagaatttaaaatggcaagattatagagaaaacgcccttaaaagactgaacgcttttaaaatcggctcgcataaaatggaagaatttagggataaacaagggcgtttgtgggtagatgacagcaaagccacgaatattgatgccaccttacaagccctaaaaacctttaaaaaccaaaaaatccatttgattttagggggcgatattaaaggggtcaatttaacccccctttttgaagagtttaaaaactataaaataagcctttatgccataggatcaagcgcttctatcatacaagccttagcgttagaatttaatgtttcttgtcaggtttgtttgaagttagaaaaagcggttcaagaaattaaaagcgttttattacaaaatgaagtcgctttgctttcacctagcgcggccagtttggatcaattttcttcgtataaagaaaggggtgaaaaattcaaagcgtttgttttaaaagat

SEQ ID NO: 2837 - DNA (genomic), 159 bp, Helicobacter pylori; double-stranded, circular
  misc_feature (B) LOCATION 1...159
  hypothetical: NO
  anti-sense: NO
gataatagaattgccttggtgatcaatcttgtgcatgggggcgatggcgaagacgggaaattagcgagcttgttagaattttatcgtatcgcttccataggccctagggttgaagcgagcgtgctgaccttatacataatatttaaccaaactttacgc

SEQ ID NO: 2838 - DNA (genomic), 234 bp, Helicobacter pylori; double-stranded, circular
  misc_feature (B) LOCATION 1...234
  hypothetical: NO
  anti-sense: NO
aagaaaattttaaaaaactctataacgatttgtttgatggcgcgatcatccgttgcgattttttgtcatagaaatgaagtgtatcttaatgagatcaaccccattcctggcagtttggcgaattatttgtttgatgattttaaaacaacgctagaaaatttagcgcaatcgttacccaaaacccctaaaatccaagttaaaaactcttatttgttgcaaatccaaaagaataaa

SEQ ID NO: 2839 - DNA (genomic), 297 bp, Helicobacter pylori; double-stranded, circular
  misc_feature (B) LOCATION 1...297
  hypothetical: NO
  anti-sense: NO
ttgcaatcgtttttagggagtttgatcgtggagttttgcgttttatttggtggggcgagttttgagcatgaaatcagtattgtgagtgcgatcgcgcttaaaggagtgttaaaggataggattaaatattttatttttttagatgaaaaccactatttttatttgattgaagaatccaacatgcattcaaaatacttcgctcaaatcaaagaaaaaaaattaccccctctaatcctcacacacaatggcttgcttaaaaactcgtttttaggggctaagataatagaattgccttgg

SEQ ID NO: 2840 - DNA (genomic), 294 bp, Helicobacter pylori; double-stranded, circular
  misc_feature (B) LOCATION 1...294
  hypothetical: NO
  anti-sense: NO
ttggatagcgcgtttgaatattctaaagaagtcttaatagagcctttcattcagggcgtgaaagaatacaatctagccggctgtaagatcaaaaagggtttttgtttttcctatgttgaagagcctaacaaacaggaatttttagatttcaaacaaaaatatttggatttttcacgcaccaaagcccctaaagcgaatctttctaacgccctagaagaacaattaaaagaaaattttaaaaaactctataacgatttgtttgatggcgcgatcatccgttgcgattttttgtca

SEQ ID NO: 2841 - DNA (genomic), 1071 bp, Helicobacter pylori; double-stranded, circular
  misc_feature (B) LOCATION 1...1071
  hypothetical: NO
  anti-sense: NO
ttgcaatcgtttttagggagtttgatcgtggagttttgcgttttatttggtggggcgagttttgagcatgaaatcagtattgtgagtgcgatcgcgcttaaaggagtgttaaaggataggattaaatattttatttttttagatgaaaaccactatttttatttgattgaagaatccaacatgcattcaaaatacttcgctcaaatcaaagaaaaaaaattaccccctctaatcctcacacacaatggcttgcttaaaaactcgtttttaggggctaagataatagaattgcctttggtgatcaatcttgtgcatgggggcgatggcgaagacgggaaattagcgagcttgttagaattttatcgtatcgctttcataggccctagggttgaagcgagcgtgctgagttataacaaatatttaaccaaactttacgctaaagatttaggggtaaaggctttagattatgttcttttgaatgaaaaaaaccgcgctaacgccttggatttgattgggtttaatttccctttcattgtcaaacccagtaacgccgggagctctttaggggtgaatgttgtgaaagaagaaaaagaattgatttacgctttggatagcgcgtttgaatattctaaagaagtcttaatagagcctttcattcagggcgtgaaagaatacaatctagccggctgtaagatcaaaaagggtttttgtttttcctatgttgaagagcctaacaaacaggaatttttagatttcaaacaaaaatatttggatttttcacgcaccaaagcccctaaagcgaatctttctaacgccctagaagaacaattaaaagaaaattttaaaaaactctataacgatttgtttgatggcgcgatcatccgttgcgatttttttgtcatagaaaatgaagtgtatcttaatgagatcaaccccattcctggcagtttggcgaattatttgtttgatgattttaaaacaacgctagaaaatttagcgcaatcgttacccaaaacccctaaaatccaagttaaaaactcttatttgttgcaaatccaaaagaataaatga

SEQ ID NO: 2842 - DNA (genomic), 1062 bp, Helicobacter pylori; double-stranded, circular
  misc_feature (B) LOCATION 1...1062
  hypothetical: NO
  anti-sense: NO
atgaaattcgctcttacagggggaggcacaggggggcatctctctatcgctaaagccttagccatagaattagaaaagcaaggcatagaggctatttatttaggctccacttatgggcaagataaagaatggtttgaaaatagccccttatttagcgaacgctattttttcaacacgcaaggcgtggtcaataaaagcttttttaaaaaaataagatctttattcttgcaagctaaagccgcatttaaggctaaagaaatcttaaaaaaacaccagatcacgcacaccattagcgtgggagggtttagcgcagggccggcgagttttgcaagcttgcttaataaaatacccctttatatccatgagcaaaatgcgattaaaggctctcttaaccgctacctttcccccaaagctaaagcggtgttttcaagctacgcgtttaaagataaaggaaatcatgttttaacctcctatcccgtgcaaaacgctttttttgatcacgctaggactcgcacggaaatcaagcatattttatttttaggcggttcgcaaggggcaaaagcgatcaacgaatttgccctattaaacgctcctaaactcaccaaacaagggattaagatcacgcacatttgcggccccaattcttatgaacaagtgcgttttttttaccaggaattggggctgttggacaagatagaattgttcgctttccacaataacatcacagaagtcatgcacagagcggatttgtgtgtgagccgagcgggtgctagcagcgtgtgggaattgtgcgccaatggcttacccacgatttttatcccctacccttttgcgagcaataaccaccagtattacaatgtcttagaatttgaaaaagaaaacctatgctatgttgtgcctcaaaacgaattgttacccaaaaagctctttgaagtcattagaaagctcaaccaaaaagacgatcaaggcaataaaaacctaaccactatcagcgctaaattgcaacaaaaaatcgctaaagacggcgcaaaaaccatcattgaaacgattttaagcgcctaa

SEQ ID NO: 2843 - DNA (genomic), 1089 bp, Helicobacter pylori; double-stranded, circular
  misc_feature (B) LOCATION 1...1089
  hypothetical: NO
  anti-sense: NO
agaaagagaacgagcttaggggtttttagcatgaaattcgctcttacagggggaggcacaggggggcatctctctatcgctaaagccttagccatagaattagaaaagcaaggcatagaggctatttatttaggctccacttatgggcaagataaagaatggtttgaaaatagccccttatttagcgaacgctattttttcaacacgcaaggcgtggtcaataaaagcttttttaaaaaaataagatctttattcttgcaagctaaagccgcatttaaggctaaagaaatcttaaaaaaacaccagatcacgcacaccattagcgtgggagggtttagcgcagggccggcgagttttgcaagcttgcttaataaaatacccctttatatccatgagcaaaatgcgattaaaggctctcttaaccgctacctttcccccaaagctaaagcggtgttttcaagctacgcgtttaaagataaaggaaatcatgttttaacctcctatcccgtgcaaaacgctttttttgatcacgctaggactcgcacggaaatcaagcatattttatttttaggcggttcgcaaggggcaaaagcgatcaacgaatttgccctattaaacgctcctaaactcaccaaacaagggattaagatcacgcacatttgcggccccaattcttatgaacaagtgcgttttttttaccaggaattggggctgttggacaagatagaattgttcgctttccacaacaacatcacagaagtcatgcacagagcggatttgtgtgtgagccgagcgggtgctagcagcgtgtgggaattgtgcgccaatggcttacccacgatttttatcccctacccttttgcgagcaataaccaccagtattacaatgtcttagaatttgaaaaagaaaacctatgctatgttgtgcctcaaaacgaattgttacccaaaaagctctttgaagtcattagaaagctcaaccaaaaagacgatcaaggcaataaaaacctaaccactatcagcgctaaattgcaacaaaaaatcgctaaagacggcgcaaaaaccatcattgaaacgattttaagcgcc

SEQ ID NO: 2844 - DNA (genomic), 861 bp, Helicobacter pylori; double-stranded, circular
  misc_feature (B) LOCATION 1...861
  hypothetical: NO
  anti-sense: NO
ttgaasccgatgaaagtgattcaagtttttttattttccaaccctttttgcgcgattgtgcctaacacggagccagaacatttggagcattatgaccacgatttagaacgctttttcttcgcttataaatattttttagaccatgctcaaaaaagagtgatctataaagaagatccttttttaaaaaactattctaaagacgccattgttttagaaaaaaaagacatttataatatccaatacattttaaaagacggagagccttacacttcgtttgaattgaaaaatttgggggcttttttggtgtgggggttaggcgaacataacgccacgaatgcgagtttggcgattttaagcgctttagatgaattaaatttagaagaaattagaaataattyattgaattttaaaggcattaaaaaacgctttgatattttgcaaaaaaacaatctcattctcattgatgattacgcccaccaccctactgaaattggcrccactttaaaaagcgctaggatttatgccaatttattgaatacgcaagaaaaaattatagtgatctggcaagcgcacaaatactctcgcttaatggacaatttagaagaatttaaaaaatgttttttagagcattgcgacaggttgatcattttacccgtttatagcgcgagtgaagttaaaagagacattgatttgaaagcccattttaagcattataaccccacctttatagacagggtgcgtaaaaagggggattttttagagctgttagtcaatgataatgtggtagaaacgattgaaaaaggctttgtgataggctttggagcgggggatattacctatcagttgagaggcgaaatgtaa

SEQ ID NO: 2845 - DNA (genomic), 1350 bp, Helicobacter pylori; double-stranded, circular
  misc_feature (B) LOCATION 1...1350
  hypothetical: NO
  anti-sense: NO
atgcttgaaaccccaaaagttttactcaaaaacctgcaagattgcaagatccatttcatcggtataggggggattggcatttcaggcttagccaaataccttaaagcgcaaggggctaagatcagcggatctgatattgccataagccctagcgttaagtatttgaaagctttaggcgtagaaattaatatcccgcatgatccaaaagcgatcaaccatcaagatgtcatcatccattcagccattatcaaagaagacaataccgaaatacaaagggctaaggaattagaaatccctattttgtctcgtaaagacgctttgtattctatccttaaagacaagcgcgtttttagcgtgtgtggggctcatggaaagagcagtatcacggccatgttgagcgcgatttgccccgcttttggagcgattattggggcgcattctaaagagtttgattccaatgtgcgagagagcgcggatatgagtttggtttttgaagccgatgaaagcgattcaagttttttattttccaaccctttttgcgcgattgtgcctaacacggagccagaacatttggagcattatgaccacgatttagaacgctttttcttcgcttataaatattttttagaccatgctcaaaaaagagtgatctataaagaagatccttttttaaaaaactattctaaagacgccattgttttagaaaaaaaagacatttataatatccaatacattttaaaagacggagagccttacacttcgtttgaattgaaaaatttgggggcttttttggtgtgggggttaggcgaacataacgccacgaatgcgagtttggcgattttaagcgctttagatgaattaaatttagaagaaattagaaataatttattgaattttaaaggcattaaaaaacgctttgatattttgcaaaaaaacgatctcattctcattgatgattacgcccaccaccctactgaaattggcaccactttaaaaagcgctaggatttatgccaatttattgaatacgcaagaaaaaattatagtgatctggcaagcgcacaaatactctcgcttaatggacaatttagaagaatttaaaaaatgttttttagagcattgcgacaggttgatcattttacccgtttatagcgcgagtgaagttaaaagagacattgatttgaaagcccattttaagcattataaccccacctttatagacagggtgcgtaaaaagggggattttttagagctgttagtcaatgataatgtggtagaaacgattgaaaaaggctttgtgataggctttggagcgggggatattacctatcagttgagaggcgaaatgtaa

SEQ ID NO: 2846 - DNA (genomic), 1365 bp, Helicobacter pylori; double-stranded, circular
  misc_feature (B) LOCATION 1...1365
  hypothetical: NO
  anti-sense: NO
aagcttaccgagaaaattatgcttgaaaccccaaaagttttactcaaaaacctgcaagattgcaagatccatttcatcggtataggggggattggcatttcaggcttagccaaataccttaaagcgcaaggggctaagatcagcggatctgatattgccataagccctagcgttaagtatttgaaagctttaggcgtagaaattaatatcccgcatgatccaaaagcgatcaaccatcaagatgtcatcatccattcagccattatcaaagaagacaataccgaaatacaaagggctaaggaattagaaatccctattttgtctcgtaaagacgctttgtattctatccttaaagacaagcgcgtttttagcgtgtgtggggctcatggaaagagcagtatcacggccatgttgagcgcgatttgccccgcttttggagcgattattggggcgcattctaaagagtttgattccaatgtgcgagagagcgcggatatgagtttggtttttgaagccgatgaaagcgattcaagttttttattttccaaccctttttgcgcgattgtgcctaacacggagccagaacatttggagcattatgaccacgatttagaacgctttttcttcgcttataaatattttttagaccatgctcaaaaaagagtgatctataaagaagatccttttttaaaaaactattctaaagacgccattgttttagaaaaaaaagacatttataatatccaatacattttaaaagacggagagccttacacttcgtttgaattgaaaaatttgggggcttttttggtgtgggggttaggcgaacataacgccacgaatgcgagtttggcgattttaagcgctttagatgaattaaatttagaagaaattagaaataatttattgaattttaaaggcattaaaaaacgctttgatattttgcaaaaaaacgatctcattctcattgatgattacgcccaccaccctactgaaattggcaccactttaaaaagcgctaggatttatgccaatttattgaatacgcaagaaaaaattatagtgatctggcaagcgcacaaatactctcgcttaatggacaatttagaagaatttaaaaaatgttttttagagcattgcgacaggttgatcattttacccgtttatagcgcgagtgaagttaaaagagacattgatttgaaagcccattttaagcattataaccccacctttatagacagggtgcgtaaaaagggggattttttagagctgttagtcaatgataatgtggtagaaacgattgaaaaaggctttgtgataggctttggagcgggggatattacctatcagttgagaggcgaaatg

SEQ ID NO: 2847 - DNA (genomic), 186 bp, Helicobacter pylori; double-stranded, circular
  misc_feature (B) LOCATION 1...186
  hypothetical: NO
  anti-sense: NO
atccctgcaccacccgaagccacttacgatttggtgcgtaaaatgcgcgcttccattttggtgttaggcccactattagcgcgctttagagaatgcttggtgagtttgcccggtgggtgcgctataggagctaggcctgtggatttgcacttaaaagcgatgcaacaattagggctgaaatcaaat

SEQ ID NO: 2848 - DNA (genomic), 195 bp, Helicobacter pylori; double-stranded, circular
  misc_feature (B) LOCATION 1...195
  hypothetical: NO
  anti-sense: NO
aaaagaaaaaggatagaattggattttttagagattgtaggacaagtccctttaaaaggagaggtagaaatttcaggggcgaaaaattccgcgctccccattttagctgccacgcttttaagccaccaagaagtcaaaatcaaatccttgccccaagtgggggatataaaggcgatggcgttattgttgcacatt

SEQ ID NO: 2849 - DNA (genomic), 411 bp, Helicobacter pylori; double-stranded, circular
  misc_feature (B) LOCATION 1...411
  hypothetical: NO
  anti-sense: NO
gcaaggctatatccatgcaaagcccctaaaggcttgaaagggaatgatattttatttgataaaatcagcgttacaggcacagaaaacgccctcatggcagcaagtttagctaaagggatcacgcgcatcattaacgccgctaaagagccagaaatcgctcaattgtgcgcgtttttacaaagcggaggcgtagaaattgagggcgttgacagcagcgagctaaagattaggggggtagaaagcgacgctttaaatttgaaagacattcaaatcataccggacaggattgaagcaggcacttgtttgtgcgtgggggctatcactagcggccagcttaaagtcggtcgtgtcgtccctggccgtgttcaagcgatcgccggtaaactcatagaaattggtttcccgctagac

SEQ ID NO: 2850 - DNA (genomic), 837 bp, Helicobacter pylori; double-stranded, circular
  misc_feature (B) LOCATION 1...837
  hypothetical: NO
  anti-sense: NO
ttggattttttagagattgtaggacaagtccctttaaaaggagaggtagaaatttcaggggcgaaaaattccgcgctccccattttagctgccacgcttttaagccaccaagaagtcaaaatcaaatccttgccccaagtggtggatataaaggcgatggcgttattgttgcaaaatttaggcgcagaattagaatggcttaacccccacacgctccaactcagcgctaaatccctgcaccacaccgaagccacttacgatttggtgcgtaaaatgcgcgcttccattttggtgttaggcccactattagcgcgctttaaagaatgcttggtgagtttgcccggtgggtgcgctataggagctaggcctgtggatttgcacttaaaagcgatgcaacaattaggggctgaaatcaaaattgagcaaggctatatccatgcaaaagcccctaaaggcttgaaagggaatgatattttatttgataaaatcagcgttacaggcacagaaaacgccctcatggcagcaagtttagctaaagggatcacgcgcatcattaacgccgctaaagagccagaaatcgctcaattgtgcgcgtttttacaaagcggaggcgtagaaattgagggcgttgacagcagcgagctaaagattaggggggtagaaagcgacgctttaaatttgaaagacattcaaatcataccggacaggattgaagcaggcacttgtttgtgcgtgggggctatcactagcggccagcttaaagtcggtcgtgtcgtccctggccgtgttcaagcgatcgccggtaaactcatagaaattggtttcccgctagacatt

SEQ ID NO: 2851 - DNA (genomic), 228 bp, Helicobacter pylori; double-stranded, circular
  misc_feature (B) LOCATION 1...228
  hypothetical: NO
  anti-sense: NO
agccttggcatggataatgttgatctaaacgacatgtttaaccccaatatcgctctcaaatttggcaattattacttgaaccatttgaaaaaaggattcaaccaccccctttttgtcgcctacgcttataacgctgggcctgggtttttaaggaggtggttagaaagttccaaacggtttaaaggaaaaaatcattttgggccatggcttagcatggagcttatgcct

SEQ ID NO: 2852 - DNA (genomic), 225 bp, Helicobacter pylori; double-stranded, circular
  misc_feature (B) LOCATION 1...225
  hypothetical: NO
  anti-sense: NO
agccttggcatggataatgttgatctaaacgacatgtttaaccccaatatcgctctcaaatttggcaattattacttgaaccatttgaaaaaaggattcaaccaccccctttttgtcgcctacgcttataacgctgggcctgggtttttaaggaggtggttagaaagttccaaacggtttaaaggaaaaaatcattttgggccatggcttagcatggagcttatg

SEQ ID NO: 2853 - DNA (genomic), 348 bp, Helicobacter pylori; double-stranded, circular
  misc_feature (B) LOCATION 1...348
  hypothetical: NO
  anti-sense: NO
atggataatgttgatctaaacgacatgtttaaccccaatatcgctctcaaatttggcaattattacttgaaccatttgaaaaaaggattcaaccaccccctttttgtcgcctacgcttataacgctgggcctgggtttttaaggaggtggttagaaagttccaaacggtttaaaggaaaaaatcattttgagccatggcttagcatggagcttatgccttatagcgagactcgcatgtatggctttagagtcatgctcaattacttgatttatcaagaaatttttgggaatttcatccctattgatgcgtttttagaacaaactcttaactcaaaggacaaaccatga

SEQ ID NO: 2854 - DNA (genomic), 306 bp, Helicobacter pylori; double-stranded, circular
  misc_feature (B) LOCATION 1...306
  hypothetical: NO
  anti-sense: NO
ttgcacacgattgaattgagctctgatgatgtgtttgaagccattaaagatcaagtgagagagatttctagcgctttaaggagcgtgcttgaagaggtgaaaccggatttagtgagagacattgtgcaaaatggcgtggtgcttaccggcggtggggctttgattaagggattagacaagtatttaagcgatatggttaaactccctgtgtatgtgggcgatgagcctttattagcggtagccaaaggcacaggggaagccatacaagatttggatttactcagccgtgtgggttttagtgaataa

SEQ ID NO: 2855 - DNA (genomic), 303 bp, Helicobacter pylori; double-stranded, circular
  misc_feature (B) LOCATION 1...303
  hypothetical: NO
  anti-sense: NO
ttgcacacgattgaattgagctctgatgatgtgtttgaagccattaaagatcaagtgagagagatttctagcgctttaaggagcgtgcttgaagaggtgaaaccggatttagtgagagacattgtgcaaaatggcgtggtgcttaccggcggtggggctttgattaagggattagacaagtatttaagcgatatggttaaactccctgtgtatgtgggcgatgagcctttattagcggtagccaaaggcacaggggaagccatacaagatttggatttactcagccgtgtgggttttagtgaa

SEQ ID NO: 2856 - DNA (genomic), 300 bp, Helicobacter pylori; double-stranded, circular
  misc_feature (B) LOCATION 1...300
  hypothetical: NO
  anti-sense: NO
cacacgattgaattgagctctgatgatgtgtttgaagccattaaagatcaagtgagagagatttctagcgctttaaggagcgtgcttgaagaggtgaaaccggatttagtgagagacattgtgcaaaatggcgtggtgcttaccggcggtggggctttgattaagggattagacaagtatttaagcgatatggttaaactccctgtgtatgtgggcgatgagcctttattagcggtagccaaaggcacaggggaagccatacaagatttggatttactcagccgtgtgggttttagtgaa

SEQ ID NO: 2857 - DNA (genomic), 330 bp, Helicobacter pylori; double-stranded, circular
  misc_feature (B) LOCATION 1...330
  hypothetical: NO
  anti-sense: NO
ttgactacggcgagcatttttacaccaatgcaagagactttagtgggcgttttagctctagggtatgcggatgggttggtgcgcgctttgggcaatcgcattcaagtagcgatcaataaccaattagccccccttattggcaaggtgtgcatggatcaatgctttgtcaaactcaatgatattgaagccaaagagggcgatgaggtcattttgtttggggataaaagcactaaagctaatgacgcaagcgaaatcgccacgcttttaaacaccattccttatgaaaccatcagcactttgtccaaacgcttggagcgcgtttatgtgtga

SEQ ID NO: 2858 - DNA (genomic), 384 bp, Helicobacter pylori; double-stranded, circular
  misc_feature (B) LOCATION 1...384
  hypothetical: NO
  anti-sense: NO
tgttatcagtttaaaagcgcgaatcgttcaaatcaaacgagtaaaaaaaggcgaattattggctacggcgagcatttttacaccaatgaagagactttagtgggcgttttagctctagggtatgcggatgggttggtgcgcgctttgggcaatcgcattcaagtagcgatcaataaccaattagccccccttattggcaaggtgtgcatggatcaatgctttgtcaaactcaatgatattgaagccaaagagggcgatgaggtcattttgtttggggataaaagcactaaagctaatgacgcaagcgaaatcgccacgcttttaaacaccattccttatgaaaccatcagcactttgtccaaacgcttggagcgcgtttatgtg

SEQ ID NO: 2859 - DNA (genomic), 381 bp, Helicobacter pylori; double-stranded, circular
  misc_feature (B) LOCATION 1...381
  hypothetical: NO
  anti-sense: NO
tatcagtttaaaagcgcgaatcgttcaaatcaaacgagtaaaaaaaggcgaattattggctacggcgagcatttttacaccaatgaagagactttagtgggcgttttagctctagggtatgcggatgggttggtgcgcgctttgggcaatcgcattcaagtagcgatcaataaccaattagccccccttattggcaaggtgtgcatggatcaatgctttgtcaaactcaatgatattgaagccaaagagggcgatgaggtcattttgtttggggataaaagcactaaagctaatgacgcaagcgaaatcgccacgcttttaaacaccattccttatgaaaccatcagcactttgtccaaacgcttggagcgcgtttatgtg

SEQ ID NO: 2860 - DNA (genomic), 1134 bp, Helicobacter pylori; double-stranded, circular
  misc_feature (B) LOCATION 1...1134
  hypothetical: NO
  anti-sense: NO
atgttaaaaagggcgagttttgtagaagtgaatacccattctttaaggcataattttaatgcagtcaaaaatattgtccctaaagacgcttgtgtcatggcggttgtcaaggcaaacgcttatggggcaggggcgattaaagcgagcgaaatttttttacaagaaggggctaattatttaggggtagcgaccttagatgaagccttagaattgcgctctcatttttctcaaacccccattttgatcttaggttatagccctaatactaacgcttccatgctgattgataacgatttgagcgctatggtttttagccttgaacaagcggaagttttttctcaaatggctttaaagtctcaaaaacgcttaaaagtgcatctcaaaattgataccggcatgcaccgcttgggtttagagcctacttttaaaagcatagaaaccattaaaaaaatccgcgctttaaaaggcttggaagtggaagggatattcacgcatttaagcaacgctgattctaacattaaaacccatgctaaaaaccagatgaaagtctttaacgcttttttagagcagcttttggatcaaaaaatagaatttcaataccgccatgcctataattctgccggcatcctttctttgtgtaacgggaatgaaaatcgtttgttaaacctttatcgcccaggcatcatgctctatggtttttacccttctaatgaaatgaaagagtcgtctcaaacgatattaaaaaatgttatcagtttaaaagcgcgaatcgttcaaatcaaacgagtcaaaaaaggcgaatttattggctacggcgagcatttttacaccaatgaagagactttagtgggcgttttagctctagggtatgcggatgggttggtgcgcgctttgggcaatcgcattcaagtagcgatcaataaccaattagccccccttattggcaaggtgtgcatggatcaatgctttgtcaaactcaatgatattgaagccaaagagggcgatgaggtcattttgtttggggataaaagcactaaagctaatgacgcaagcgaaatcgccacgcttttaaacaccattccttatgaaaccatcagcactttgtccaaacgcttggagcgcgtttatgtgtga

SEQ ID NO: 2861 - DNA (genomic), 1095 bp, Helicobacter pylori; double-stranded, circular
  misc_feature (B) LOCATION 1...1095
  hypothetical: NO
  anti-sense: NO
caatcattacgccattccggctggcgtgagcctgtattccatgctggcttgcgcaaatcagaaaatcctaaatcgcaaaatccccaattacaaagtgataacaaaaaacttttttataaaatccactgcctggtggataatttaagccttgaaaaccaacaaaaattaaaagaaactccagtcccccttagtgcttttgcgagcgaggattttttagacatttcaacccctaatctttataccacttcagtagaaccctctgtcattgataaaatccatgaagcttttttgcaactcaatatttacgctaagactcgcttttctaaaatggtcatgtgccgtttgtttttggcttctttattcccgcaatacgacaaaatcatcatgtttgatgcggacactttgtttttaaacgatgtgagcgagagtttttttatcccgctagattcttattattttggagcggctaaggatttttcttctcctaaaagccttaaacattttcaaacagaaagggagagagagcctcgccaaaaattttccctctatgagcattaccttaaagaaaaagacatgcaaatcatttgtgaaaaccactataacgttgggtttttaatcgtgaatttaaagctatggcgggctgataaattagaagagcacttactcaatttaacccatcaaaaaggccagtgcgtgttttgccctgaacaggatcttttaacgctcgcatgctatcaaaaagttttacaattaccttatatttacaacgcccaccctttcatggccaatcaaaaacgcttcatccccaaccaacaagaaattatcatgctgcatttttattttgtagggaagccttggattttacccactgctttatattctaaagaatggcatgagattcttttaaaaacccctttttatgctgaatattccgtgaaattcctcaaacaaatgacagaatgtttaagccttcaagacaaacaaaaaacctttgaatttcttgcccccctactcaacccaaaaacccttttagaatatgtcttttttagattgagcaagattttcaaacgcttaaaagaaaggtttttaaactct

SEQ ID NO: 2862 - DNA (genomic), 1134 bp, Helicobacter pylori; double-stranded, circular
  misc_feature (B) LOCATION 1...1134
  hypothetical: NO
  anti-sense: NO
atgagtattactattcctattgttatcgcctttgacaatcattacgccattccggctggcgtgagcctgtattccatgctggcttgcgctaaatcagaaaatcctaaatcgcaaaatccccaattacaaagtgataacaaaaaacttttttataaaatccactgcctggtggataatttaagccttgaaaaccaacaaaaattaaaagaaactctagtcccctttagtgcttttgcgagcgtggattttttagacatttcaacccctaatctttataccacttcagtagaaccctctgtcattgataaaatccatgaagcttttttgcaactcaatatttacgctaagactcgcttttctaaaatggtcatgtgccgtttgtttttggcttctttattcccgcaatacgacaaaatcatcatgtttgatgcggacactttgtttttaaacgatgtgagcgagagtttttttatcccgctagattcttattattttggagcggctaaggatttttcttctcctaaaagccttaaacattttcaaacagaaagggagagagagcctcgccaaaaattttccctctatgagcattaccttaaagaaaaagacatgcaaatcatttgtgaaaaccactataacgttgggtttttaatcgtgaatttaaagctatggcgggctgataaattagaagagcacttactcaatttaacccatcaaaaaggccagtgcgtgttttgccctgaacaggatcttttaacgctcgcatgctatcaaaaagttttacaattaccttatatttacaacgcccaccctttcatggccaatcaaaaacgcttcatccccaaccaacaagaaattatcatgctgcatttttattttgtagggaagccttggattttacccactgctttatattctaaagaatggcatgagattcttttaaaaacccctttttatgctgaatattccgtgaaattcctcaaacaaatgacagaatgtttaagccttcaagacaaacaaaaaacctttgaatttcttgcccccctactcaacccaaaaacccttttagaatatgtcttttttagattgagcaagattttcaaacgcttaaaagaaaggtttttaaactcttag

SEQ ID NO: 2863 - DNA (genomic), 942 bp, Helicobacter pylori; double-stranded, circular
  misc_feature (B) LOCATION 1...942
  hypothetical: NO
  anti-sense: NO
ggaaaaataaaaatgttacaacgccctaaaattgtcgctgaattgagcgctaatcataaccaggatttaaatctcgccaaagaaagccttcatgccattaaggaaagcggcgcggattttgtcaagctccaaacctacacgccaagctgcatgactttagattctaaagaagatcctttcatcattcaaggcactttatgggataaagaaaatctgtatggattgtatcaaaaggcttctacccccctagagtggcatgctgaattgtttgagttggctaaaaagcttgatttaggcatttttagctcgccctttagctcaaaagctttagagcttttagagagcctagattgccccatgtataaaatcgctagttttgaaatcgttgatttggacttgattgaaaaggccgctcgcacacaaaagcccattatcctttctagcggtatcgccacacacgccgaattacaagacgccatctcattgtgcagaggagtgaataattttgacatcacccttttaaaatgcgtgagcgcttatcctagtaaaatagaagacgctcatttattgagcatggttaaattaggcgaaacctttggcgttaaatttggcttgagcgatcacacgattggctctctttgccccattctagccaccactttaggggcgagcatgatagaaaagcattttattttaaacaaatccttacaaaccccagacagcgcttttagcatggattttaacggatttaaaagcatggttggagccatcaagcaaagcgttttagctttaggcgaagaagagccaaaaatcaatccaaagactttagaggagcgaagattttttgcgcgctctctatttgtcattaaggacattcaaaaaggcgaagcattgactagcgataatatcaaagccttacgccccaaccttggcgttacaccc

SEQ ID NO: 2864 - DNA (genomic), 1023 bp, Helicobacter pylori; double-stranded, circular
  misc_feature (B) LOCATION 1...1023
  hypothetical: NO
  anti-sense: NO
atgttacaacgccctaaaattgtcgctgaattgagcgctaatcataaccaggatttaaatctcgccaaagaaagccttcatgccattaaggaaagcggcgcggattttgtcaagctccaaacctacacgccaagctgcatgactttagattctaaagaagatcctttcatcattcaaggcactttatgggataaagaaaatctgtatggattgtatcaaaaggcttctacccccctagagtggcatgctgaattgtttgagttggctaaaaagcttgatttaggcatttttagctcgccctttagctcaaaagctttagagcttttagagagcctagattgccccatgtataaaatcgctagttttgaaatcgttgatttggacttgattgaaaaggccgctcgcacacaaaagcccattatcctttctagcggtatcgccacacacgccgaattacaagacgccatctcattgtgcagaggagtgaataattttgacatcacccttttaaaatgcgtgagcgcttatcctagtaaaatagaagacgctcatttattgagcatggttaaattaggcgaaacctttggcgttaaatttggcttgagcgatcacacgattggctctctttgccccattctagccaccactttaggggcgagcatgatagaaaagcattttattttaaacaaatccttacaaaccccagacagcgcttttagcatggattttaacggatttaaaagcatggttggagccatcaagcaaagcgttttagctttaggcgaagaagagccaaaaatcaatccaaagactttagaggagcgaagattttttgcgcgctctctatttgtcattaaggacattcaaaaaggcgaagcattgactagcgataatatcaaagccttacgccccaaccttggcttacaccctaaattttataaagaaattttgggccaaaaggcatcaaaatttttaaaagccaacacccctttaagtgctgatgatatagaacgcgcattataa

SEQ ID NO: 2865 - DNA (genomic), 273 bp, Helicobacter pylori; double-stranded, circular
  misc_feature (B) LOCATION 1...273
  hypothetical: NO
  anti-sense: NO
gtgggcttgagcggttctacaaccaccggccgtaatgtggtttttggcggtcaagtgggcattggagggcatttgcatgtgggtgaattcactcaaattgggggtaaaagcgcggtgggtaaggacttgcctcctaacactaattttgccggagcgatccctgctatggaaatccatgagtggcaccatttcttagcccatttaagaacgaatttcaggaaacagcaaaaaacgagtttgttgcaaaaagctaaagggttttttaagtcttaa

SEQ ID NO: 2866 - DNA (genomic), 1011 bp, Helicobacter pylori; double-stranded, circular
  misc_feature (B) LOCATION 1...1011
  hypothetical: NO
  anti-sense: NO
atgaaattaagcgaattgttgagcgcctattctattgaaacggaattttcaaacgattttgaagtgcatgcattagcggaattggataaggccacgcctaatgatattagctatattgaccaggtatgctaccttaaacttttaaaagattcaaaagccggggcggtatttatccgcaaaaaagaatcttctaaagtgcctaaaagcatgcaagctttaatcgtggataacccgcatttagcctttgccaaagtttcgcatgcctttaaaatccctttttttaaaaacccacaaagcgtgaatgagcctaaacattttgaaaaagtaacgatcatgcctaatgttgtgattggagagggcgtagaaattggcgaaaattctttgatttatccgggcgtggtgatcgctgatggggtgaaaatcggtaaaaattgcattttgtatcctcgtgtgatcttgtatcaaaacacgattttagaggataatgttattatccatgcgggtagtgtgatcggaggcgatggctttggttatgcgcacaccgctttaggagagcatgtcaaaattgagcatgtggggattgttaggattcaaaaaaatgtggaaattggggctaacacggcgattgatagggcggtgtttggcgagactttgattaaagagggcgttaagattgataatctggttcaaatcgggcataattgcgttttaggcgaacatagcatcgttgtttctcaagtgggcttgagcggttctacaaccaccggccgtaatgtggtttttggcggtcaagtgggcattggagggcatttgcatgtgggtgaattcactcaaattgggggtaaaagcgcggtgggtaaggacttgcctcctaacactaattttgccggagcgatccctgctatggaaatccatgagtggcaccatttcttagcccatttaagaacgaatttcaggaaacagcaaaaaacgagtttgttgcaaaaagctaaagggttttttaagtcttaa

SEQ ID NO: 2867 - DNA (genomic), 396 bp, Helicobacter pylori; double-stranded, circular
  misc_feature (B) LOCATION 1...396
  hypothetical: NO
  anti-sense: NO
atgttctatcttatcaatacaggagtgcctcatttagtgggatttgtgaaaaataaagggttattaaattctcttaacacactggaattaagggctttaaggcatgaatttaacgctaatattaacatcgcttttatagaaaataaagagacgatttttttacaaacttatgagagaggggttgaagatttcacgctagcttgcgggacaggcatggcagcggtttttatcgccgcgcgcctttttcataacacccctaaaaaagccactctcatccctaaaagcaacgaatttttagagctttctttaaaaaatgatggaattttttataaaggagtcgcgcgttatatcggcatgagcgttttaggcatgggtgtttttaaaaatgggtgtttt

SEQ ID NO: 2868 - DNA (genomic), 822 bp, Helicobacter pylori; double-stranded, circular
  misc_feature (B) LOCATION 1...822
  hypothetical: NO
  anti-sense: NO
atggtgttttacaaatattcaggaagcgggaatgattttttaatcactcaaagtttcaaaaaaaaagatttttccaatttagcccaacaggtgtgccataggcatgagggttttggggcagatgggcttgtggtcgtcttaccgagtaaagattatgactacgaatgggatttttacaattcagacggctctaaagccggcatgtgtgggaatgcgagccgttgcgtggggttatttgcctaccaacatgctatagcccctaaagagcatgtttttttagccggaaaaagagagatttctatccgcatagaagagcccaacatcgtagagagcaatctcggtaattatcaaatcctagacaccatacccaatttaagatgcaaaaaattttttactaataacagcgttttagaaaatatccctatgttctatcttatcaatacaggagtgcctcatttagtgggatttgtgaaaaataaagggttattaaattctcttaacacactggaattaagggctttaaggcatgaatttaacgctaatattaacatcgcttttatagaaaataaagagacgatttttttacaaacttatgagagaggggttgaagatttcacgctagcttgcgggacaggcatggcagcggtttttatcgccgcgcgcctttttcataacacccctaaaaaagccactctcatccctaaaagcaacgaatttttagagctttctttaaaaaatgatggaattttttataaaggagtcgcgcgttatatcggcatgagcgttttaggcatgggtgtttttaaaaatgggtgtttttga

SEQ ID NO: 2869 - DNA (genomic), 819 bp, Helicobacter pylori; double-stranded, circular
  misc_feature (B) LOCATION 1...819
  hypothetical: NO
  anti-sense: NO
tggtgttttacaaatattcaggaaatcgggaatgattttttaatccctcaaagtttcaaaaaaaaagatttttccaatttagcccaacaggtgtgccataggcatgagggttttggggcagatgggcttgtggtcgtcttaccgagtaaagattatgactacgaatgggatttttacaattcagacggctctaaagccggcatgtgtgggaatgcgagccgttgcgtggggttatttgcctaccaacatgctatagcccctaaagagcatgtttttttagccggaaaaagagagatttctatccgcatagaagagcccaacatcgtagagagcaatctcggtaattatcaaatcctagacaccatacccaatttaagatgcaaaaaattttttactaataacagcgttttagaaaatatccctatgttctatcttatcaatacaggagtgcctcatttagtgggatttgtgaaaaataaagggttattaaattctcttaacacactggaattaagggctttaaggcatgaatttaacgctaatattaacatcgcttttatagaaaataaagagacgatttttttacaaacttatgagagaggggttgaagatttcacgctagcttgcgggacaggcatggcagcggtttttatcgccgcgcgcctttttcataacacccctaaaaaagccactctcatccctaaaagcaacgaatttttagagctttctttaaaaaatgatggaattttttataaaggagtcgcgcgttatatcggcatgagcgttttaggcatgggtgtttttaaaaatgggtgtttt

SEQ ID NO: 2870 - DNA (genomic), 168 bp, Helicobacter pylori; double-stranded, circular
  misc_feature (B) LOCATION 1...168
  hypothetical: NO
  anti-sense: NO
attaaaaatagtggcatgaaaataggcgtttttgatagcggtgtgggggggtttagcgttttaaaaagccttttaaaagcgcgattgtttgatgaaatcatctactatggcgatagcgctagagtgccttatggcacaaagaccccaccacgatcaagcaatttggct

SEQ ID NO: 2871 - DNA (genomic), 564 bp, Helicobacter pylori; double-stranded, circular
  misc_feature (B) LOCATION 1...564
  hypothetical: NO
  anti-sense: NO
gtggcatgcaacaccgcgagcgctctggctttagaagagatgcaaaagtattctaaaatccctattgtgggcgtgattgagccaagcattttagcgatcaagcggcaagtggaagataaaaacgcccctattttagtgctagggacaaaagcgacgattcaatccaacgcctatgacaacgccctgaaacaacaaggctatttgaacatttcgcatttagctacttctctttttgtgcctttgattgaagaaagtattttagagggcgaattgttagaaacttgcatgcattattatttcactcccttagagattttacccgaagtgatcattttaggttgcacgcattttcccttaatcgctcaaaaaattgagggctatttcatggggcattttgcccttccaacgccccccctactcatccattcgggcgatgctattgtagaatatttgcaacaaaaatacgcccttaaaaacaatgcatgcacattccctaaagtggaatttcatgcgagcggcgatgtgatctggctagaaagacaagctaaagaatggctcaaattg

SEQ ID NO: 2872 - DNA (genomic), 657 bp, Helicobacter pylori; double-stranded, circular
  misc_feature (B) LOCATION 1...657
  hypothetical: NO
  anti-sense: NO
agtgccttatggcacaaagaccccaccacgatcaagcaatttggcttagaggctttggattttttcaaaccgcatgagattgaattattgattgtggcatgcaacaccgcgagcgctctggctttagaagagatgcaaaagtattctaaaatccctattgtgggcgtgattgagccaagcattttagcgatcaagcggcaagtggaagataaaaacgcccctattttagtgctagggacaaaagcgacgattcaatccaacgcctatgacaacgccctgaaacaacaaggctatttgaacatttcgcatttagctacttctctttttgtgcctttgattgaagaaagtattttagagggcgaattgttagaaacttgcatgcattattatttcactcccttagagattttacccgaagtgatcattttaggttgcacgcattttcccttaatcgctcaaaaaattgagggctatttcatggggcattttgcccttccaacgccccccctactcatccattcgggcgatgctattgtagaatatttgcaacaaaaatacgcccttaaaaacaatgcatgcacattccctaaagtggaatttcatgcgagcggcgatgtgatctggctagaaagacaagctaaagaatggctcaaattg

SEQ ID NO: 2873 - DNA (genomic), 768 bp, Helicobacter pylori; double-stranded, circular
  misc_feature (B) LOCATION 1...768
  hypothetical: NO
  anti-sense: NO
atgaaaataggcgtttttgatagcggtgtgggggggtttagcgttttaaaaagccttttaaaagcgcgattgtttgatgaaatcatctactatggcgatagcgctagagtgccttatggcactaaagaccccaccacgatcaagcaatttggcttagaggctttggattttttcaaaccgcatgagattgaattattgattgtggcatgcaacaccgcgagcgctctggctttagaagagatgcaaaagtattctaaaatccctattgtgggcgtgattgagccaagcattttagcgatcaagcggcaagtggaagataaaaacgcccctattttagtgctagggacaaaagcgacgattcaatccaacgcctatgacaacgccctgaaacaacaaggctatttgaacatttcgcatttagctacttctctttttgtgcctttgattgaagaaagtattttagagggcgaattgttagaaacttgcatgcattattatttcactcccttagagattttacccgaagtgatcattttaggttgcacgcattttcccttaatcgctcaaaaaattgagggctatttcatggggcattttgcccttccaacgccccccctactcatccattcgggcgatgctattgtagaatatttgcaacaaaaatacgcccttaaaaacaatgcatgcacattccctaaagtggaatttcatgcgagcggcgatgtgatctggctagaaagacaagctaaagaatggctcaaattgtaa

SEQ ID NO: 2874 - DNA (genomic), 489 bp, Helicobacter pylori; double-stranded, circular
  misc_feature (B) LOCATION 1...489
  hypothetical: NO
  anti-sense: NO
atggggaatgaactgatgcaaaaaatcggcatttacccgggcacttttgatccggtcactaacgggcatatagacatcatccaccgatccagcgaattgtttgaaaagctcattgtggctgtggcgcactcaagcgctaaaaaccccatgtttagtttagatgagcgcttaaaaatgatgcaactggccactaaaagttttaaaaatgtagaatgcgttgcgtttgaggggctattagccgatctggctaaagagtatcattgcaaagtgctagttaggggcttaagggtggtgagcgattttgaatacgaattgcaaatgggctatgcgaacaaatccttaaaccacgaattagagaccttgtatttcatgcccactttacaaaacgctttcatcagctcttctatcgtgcgatccattatcgcgcataagggcgatgcgagccatttagtgcctaaagaaatttacccttttatttcaaaggtttaa

SEQ ID NO: 2875 - DNA (genomic), 258 bp, Helicobacter pylori; double-stranded, circular
  misc_feature (B) LOCATION 1...258
  hypothetical: NO
  anti-sense: NO
atgtattccttgctcttagatttgaataaaaagaccgctcttttaggcacaagagggttttttatcgacgacaaacacatcaaagaaaagggcttgaccacgcccactcttttagagctttatagcgatttggaagaagcgattcgtttaaaatgcgaatacttcattatggaggtgagctcccatgcgattgtccaaaacgcatcgctgggcttgatttcgctcttaaaattctcaccaatatcacaagcgatcatt

SEQ ID NO: 2876 - DNA (genomic), 1296 bp, Helicobacter pylori; double-stranded, circular
  misc_feature (B) LOCATION 1...1296
  hypothetical: NO
  anti-sense: NO
agaatgaagcttaaaaaaaccctgacttatcaacaccacgcctattcttttttaagcgataacacgaatgaagttttagaaaaccctaaagaaatcctttttgtcaaaacgcctttaaacgaaaaatacgcccctttaatcgcagaaaaaaacctggctattttggattttaacgagcttaaaaactactttgattttaagattaagattgtagggattacaggcactaatggtaaaacgaccacagcgagcttgatgtattccttgctcttagatttgaataaaaagaccgctcttttaggcacaagagggttttttatcgacgacaaacacatcaaagaaaagggcttgaccacgcccactcttttagagctttatagcgatttggaagaagcgattcgtttaaaatgcgaatacttcattatggaggtgagctcccatgcgattgtccaaaaacgcatcgctgggcttgatttcgctcttaaaattctcaccaatatcacaagcgatcatttagatttccatcaaaatatagaaaattacagggacgctaaaaacagcttttttaaagatgagggcttaaaagtcatcaacagagatgaaacaaacgccctttttaaccccattaacgcgcgcacttacgcactggataaaaaagcgcatttgaatgttcaagccttttcgctcaacccttccattagcgcgtctttatgctaccaacacgatttaagagatcccaatcttaaagaaaccgccctgatccattccccccttttagggcgttacaacctttataatattttagcgggcgttttaggggttaaattgctcactcaattgcctttagaaacgatcgcaccgttattggaaaacttttatggggttaaggggcgtttggaaattgtacattctaaacctttagtggtcgtggattttgcccacacaacagacggcatgcaacaagtttttgaaagctttaaaaatcaaaagatcaccgctctttttggggcagggggcgatagggataaaaccaagcgccctaaaatgggagcgatagcgagttgttacgcgcatcaaatcatcttaacttcagacaatcctagaagcgaaaacgaagaagacatcattaaggatattttaaaaggcatcaataattcttctaaagtcattgtagaaaaagaccgaaaaaaggccattttaaacgctttagaaaatttaaaagacgatgaggtgttgttgattttaggcaagggcgatgaaaacattcaaatctttaaagacaaaacgatttttttt

SEQ ID NO: 2877 - DNA (genomic), 1344 bp, Helicobacter pylori; double-stranded, circular
  misc_feature (B) LOCATION 1...1344
  hypothetical: NO
  anti-sense: NO
atgaagcttaaaaaaaccctgacttatcaacaccacgcctattcttttttaagcgataacacgaatgaagttttagaaaaccctaaagaaatcctttttgtcaaaacgcctttaaacgaaaaatacgcccctttaatcgcagaaaaaaacctggctattttggattttaacgagcttaaaaactactttgattttaagattaagattgtagggattacaggcactaatggtaaaacgaccacagcgagcttgatgtattccttgctcttagatttgaataaaaagaccgctcttttaggcacaagagggttttttatcgacgacaaacacatcaaagaaaagggcttgaccacgcccactcttttagagctttatagcgatttggaagaagcgattcgtttaaaatgcgaatacttcattatggaggtgagctcccatgcgattgtccaaaaacgcatcgctgggcttgatttcgctcttaaaattctcaccaatatcacaagcgatcatttagatttccatcaaaatatagaaaattacagggacgctaaaaacagcttttttaaagatgagggcttaaaagtcatcaacagagatgaaacaaacgccctttttaaccccattaacgcgcgcacttacgcactggataaaaaagcgcatttgaatgttcaagccttttcgctcaacccttccattagcgcgtctttatgctaccaacacgatttaagagatcccaatcttaaagaaaccgccctgatccattccccccttttagggcgttacaacctttataatattttagcgggcgttttaggggttaaattgctcactcaattgcctttagaaacgatcgcaccgttattggaaaacttttatggggttaaggggcgtttggaaattgtacattctaaacctttagtggtcgtggattttgcccacacaacagacggcatgcaacaagtttttgaaagctttaaaaatcaaaagatcaccgctctttttggggcagggggcgatagggataaaaccaagcgccctaaaatgggagcgatagcgagttgttacgcgcatcaaatcatcttaacttcagacaatcctagaagcgaaaacgaagaagacatcattaaggatattttaaaaggcatcaataattcttctaaagtcattgtagaaaaagaccgaaaaaaggccattttaaacgctttagaaaatttaaaagacgatgaggtgttgttgattttaggcaagggcgatgaaaacattcaaatctttaaagacaaaacgattttttttagcgaccaggaagtcgttaaagattattatctcaatttaaaacaaggataa

SEQ ID NO: 2878 - DNA (genomic), 147 bp, Helicobacter pylori; double-stranded, circular
  misc_feature (B) LOCATION 1...147
  hypothetical: NO
  anti-sense: NO
gcgttgagcgcgactaaagcggcggttgaagaaggcattgtgattgacgacggtgcggctcttattcgcgcggctcaaaaagtgcatttgaatttacacgatgatgaaaaagtgggctatgaaatcatcatgcgcgccattaaagcc

SEQ ID NO: 2879 - DNA (genomic), 294 bp, Helicobacter pylori; double-stranded, circular
  misc_feature (B) LOCATION 1...294
  hypothetical: NO
  anti-sense: NO
ggcatggataaagccgctgaagcgatcattaatgagcttaaaaaagcgagtaaaaaagtgggcggtaaagaagaaatcacccaagtggcgaccatttctgcaaactccgatcacaatatcgggaaactcatcgctgacgctatggaaaaagtgggcaaagacggcgtgatcaccgttgaagaagctaagggcattgaagatgaattggatgtcgtagagggcatgcaatttgatagagtctacctctccccttattttgtaaccaacgctgagaaaatgaccgctcaattaggt

SEQ ID NO: 2880 - DNA (genomic), 291 bp, Helicobacter pylori; double-stranded, circular
  misc_feature (B) LOCATION 1...291
  hypothetical: NO
  anti-sense: NO
atggataaagccgctgaagcgatcattaatgagcttaaaaaagcgagtaaaaaagtgggcggtaaagaagaaatcacccaagtggcgaccatttctgcaaactccgatcacaatatcgggaaactcatcgctgacgctatggaaaaagtgggcaaagacggcgtgatcaccgttgaagaagctaagggcattgaagatgaattggatgtcgtagagggcatgcaatttgatagagtctacctctccccttattttgtaaccaacgctgagaaaatgaccgctcaattaggt

SEQ ID NO: 2881 - DNA (genomic), 405 bp, Helicobacter pylori; double-stranded, circular
  misc_feature (B) LOCATION 1...405
  hypothetical: NO
  anti-sense: NO
gtggtgaataaattaagaggcgtgttgaatatcgcagcggttaaagctccaggctttggggacaggagaaaagaaatgctcaaagacatcgctattttaaccggcggtcaagtcatcagcgaagaattgggcttgagtctagaaaacgctgaagtggagtttttaggcaaagctggaaggattgtgattgacaaagacaacaccacgatcgtagatggcaaaggccatagcgatgacgttaaagacagagtcgcgcaaatcaaaacccaaattgcagacacgacaagcgattatgacaaagaaaaattgcaagaaaggttggctaaactctctggcggtgtggctgtgattaaagtggacgctgcgagtgaagtggaaatgaaagagaaaaaagaccgggtggat

SEQ ID NO: 2882 - DNA (genomic), 402 bp, Helicobacter pylori; double-stranded, circular
  misc_feature (B) LOCATION 1...402
  hypothetical: NO
  anti-sense: NO
gtgaataaattaagaggcgtgttgaatatcgcagcggttaaagctccaggctttggggacaggagaaaagaaatgctcaaagacatcgctattttaaccggcggtcaagtcatcagcgaagaattgggcttgagtctagaaaacgctgaagtggagtttttaggcaaagctggaaggattgtgattgacaaagacaacaccacgatcgtagatggcaaaggccatagcgatgacgttaaagacagagtcgcgcaaatcaaaacccaaattgcagacacgacaagcgattatgacaaagaaaaattgcaagaaaggttggctaaactctctggcggtgtggctgtgattaaagtggacgctgcgagtgaagtggaaatgaaagagaaaaaagaccgggtggat

SEQ ID NO: 2883 - DNA (genomic), 1641 bp, Helicobacter pylori; double-stranded, circular
  misc_feature (B) LOCATION 1...1641
  hypothetical: NO
  anti-sense: NO
atggcaaaagaaatcaaattttcagatagtgcgagaaaccttctatttgaaggcgtgagacaactccatgacgctgtcaaagtaaccatgggaccaagaggcaggaatgtgttgatccaaaaaagctatggcgctccaagcatcactaaagatggcgtgagcgtggctaaagagattgaattaagttgcccggtggctaacatgggcgctcaactcgttaaagaagtagcgagcaaaaccgctgatgcagccggcgatggcacgaccacagcaaccgtgctggcttatagcatttttaaagaaggtttgagaaatatcacggctggggctaaccctattgaagtgaaaagaggcatggataaagccgctgaagcgatcattaatgagcttaaaaaagcgagtaaaaaagtgggcggtaaagaagaaatcacccaagtggcgaccatttctgcaaactccgatcacaatatcgggaaactcatcgctgacgctatggaaaaagtgggcaaagacggcgtgatcaccgttgaagaagctaagggcattgaagatgaattggatgtcgtagagggcatgcaatttgatagaggctacctctccccttattttgtaaccaacgctgagaaaatgaccgctcaattggataacgcttacatccttttaacggataaaaaaatctctagcatgaaagacattctcccgctactagaaaaaaccatgaaagagggcaaaccgcttttaatcatcgctgaagacattgagggcgaagctttaacgactctggtggtgaataaattaagaggcgtgttgaatatcgcagcggttaaagctccaggctttggggacaggagaaaagaaatgctcaaagacatcgctattttaaccggcggtcaagtcatcagcgaagaattgggcttgagtctagaaaacgctgaagtggagtttttaggcaaagctggaaggattgtgattgacaaagacaacaccacgatcgtagatggcaaaggccatagcgatgacgttaaagacagagtcgcgcaaatcaaaacccaaattgcaagcacgacaagcgattatgacaaagaaaaattgcaagaaaggttggctaaactctctggcggtgtggctgtgattaaagtgggcgctgcgagtgaagtggaaatgaaagagaaaaaagaccgggtggatgacgcgttgagcgcgactaaagcggcggttgaagaaggcattgtgattggcggcggtgcggctcttattcgcgcggctcaaaaagtgcatttgaatttacacgatgatgaaaaagtgggctatgaaatcatcatgcgcgccattaaagccccattagctcaaatcgctatcaacgccggttatgatggtggcgtggtcgtgaatgaagtgcaaaaacacgaagggcattttggttttaacgctagcaatggcaagtatgtggacatgtttaaagaaggcattattgaccccttaaaagtagaaaggatcgctttacaaaatgcggtttcggtttcaagcctgcttttaaccacagaagccaccgtgcatgaaatcaaagaagaaaaagcggccccagcaatgcctgatatgggtggcatgggcggtatgggtggcatgggcggcatgatgtaa

SEQ ID NO: 2884 - DNA (genomic), 771 bp, Helicobacter pylori; double-stranded, circular
  misc_feature (B) LOCATION 1...771
  hypothetical: NO
  anti-sense: NO
ggcggtatgcgtgagggacaaagccagagcaagattccctttaagattaatggtacaagaggtaaaataatggacaaattcaataaagatttgaatgaagttttatctcatgctttagatttagccctagattttaaccatgtcctttgcaccacagagcatgtgctgttagccattttagagcatgggattggaataaggatttttaatactttagaagaagatggctaccataaaatggagcaaatccttaaagactacttgcaacaatacattcctttaaaaaacgatccaaccaaaataccagacaggagtcccgtattagcaagagtgtttaaaaaaatgtatgcgagttacttggatagcgtgggcgtggaagaattgcttattttcattttagaatacgatgattgttacgcttcaaaactcctggatagttttggcatcactcgttcgtatttcaagtccgctttattggattttgataaccctaatgatattaatgataacgacattaataatgaagaagcgcccaaaagcactcccctaaaaaaatacactaaaaacttgagcgctttagcccaaaataacgctttagatccagtcattggcagagaagaagagattttaagagtcatcgaaattttagggcgcaggaaaaagaataacccgcttttaattggcgaagcgggcgtagggaaaacttccatcgctgaagctttggctttaaaaatcgctcaaaaagaagtgccggagctttttgcaagaata

SEQ ID NO: 2885 - DNA (genomic), 1521 bp, Helicobacter pylori; double-stranded, circular
  misc_feature (B) LOCATION 1...1521
  hypothetical: NO
  anti-sense: NO
aaatcgctcaaaaagaagtgccggagctttttgcaagaatatgaggtttattctttggatttggctttaatggtagctggggcaaaatacagaggggattttgaaaagcgcctgaaaaaaacgctcaaagagatccagcaaaacggccgtatcattttattcattgatgaaatccacacccttttaggtgcagggagcagtaacgctgggagcttggatgcggcgaatatattaaaaccggttttaacggatgggagcttgaaatgtttgggggcgaccacttttgaagaataccgcagcgtgtttgaaaaagacaaggctttcaacaggcgcttttctatagtgaatgttgaagagccttctaaggaagcgtgttacttgattttaaagaatattgcccccctttatgaagaacaccaccaggtgcgttataatgaaagcgtgtttaaggcatgcgtggatttgacgagctattacatgcatgataaattcttgccggataaggcgattgaattattagatgaggtgggatcaaggaaaaagatcaaccctaaaaaaggcaaaaaaatcagcgttgatgacgtgcaagaaacgctcgctctcaagcttaaaatccctaaaatgcgtttaaatagcgataaaaaagcccttttaaggaatttggaaaaatcgctaaaaaataagatttttgcccaaaccgaagcgatcaaccttgtcagcaatgcgatcaaaatccagcattgcgggctttctgcaaaaaataagcctgtggggagctttttattcgtggggcctagtggggtagggaaaacagaattggctaaagaattggccttgaatttgaatttgcattttgaacgctttgacatgagcgaatacaaagaagcccatagcgtggcaaagctcatcggaagtcctagcggttatgtggggtttgagcaaggggggttattggtgaatgcgattaaaaagcacccgcattgtttgctgcttttagatgagatagaaaaggcccaccctaatgtgtatgatttgttgttgcaggtgatggataacgccactttgagcgataatttaggcaacaaggcgagttttaagcatgtgatactgattatgacttcaaatgtggggagtaaggataaggacacgctagggttttttagcactaaaaacgccaagtatgatagagccgttaaagagcttttaacccctgaattgcgatccagaattgatgcgatcgtgccgtttaacgcgctcagtttggaggattttgaacgcattgtttctgtggaattggacgggttaaaagccctagcaatagagcaaggcgtgatcttaaaattccataaagaagttgtgaaatgcatcgcgcaaaagagctaccagaggagttttggtgcgagagaaattaaaaaaatcattcagagggaaatcaacccccaattaagcgatatagtgcttaaacaatcgcttaaaaaaccaacaagatcgttgcgcatgaagagcacatttcacaaagtg

SEQ ID NO: 2886 - DNA (genomic), 1518 bp, Helicobacter pylori; double-stranded, circular
  misc_feature (B) LOCATION 1...1518
  hypothetical: NO
  anti-sense: NO
aaatcgctcaaaaagaagtgccggagctttttgcaagaatatgaggtttattctttggatttggctttaatggtagctggggcaaaatacagaggggattttgaaaagcgcctgaaaaaaacgctcaaagagatccagcaaaacggccgtatcattttattcattgatgaaatccacacccttttaggtgcagggagcagtaacgctgggagcttggatgcggcgaatatattaaaaccggttttaacggatgggagcttgaaatgtttgggggcgaccacttttgaagaataccgcagcgtgtttgaaaaagacaaggctttcaacaggcgcttttctatagtgaatgttgaagagccttctaaggaagcgtgttacttgattttaaagaatattgcccccctttatgaagaacaccaccaggtgcgttataatgaaagcgtgtttaaggcatgcgtggatttgacgagctattacatgcatgataaattcttgccggataaggcgattgaattattagatgaggtgggatcaaggaaaaagatcaaccctaaaaaaggcaaaaaaatcagcgttgatgacgtgcaagaaacgctcgctctcaagcttaaaatccctaaaatgcgtttaaatagcgataaaaaagcccttttaaggaatttggaaaaatcgctaaaaaataagatttttgcccaaaccgaagcgatcaaccttgtcagcaatgcgatcaaaatccagcattgcgggctttctgcaaaaaataagcctgtggggagctttttattcgtggggcctagtggggtagggaaaacagaattggctaaagaattggccttgaatttgaatttgcattttgaacgctttgacatgagcgaatacaaagaagcccatagcgtggcaaagctcatcggaagtcctagcggttatgtggggtttgagcaaggggggttattggtgaatgcgattaaaaagcacccgcattgtttgctgcttttagatgagatagaaaaggcccaccctaatgtgtatgatttgttgttgcaggtgatggataacgccactttgagcgataatttaggcaacaaggcgagttttaagcatgtgatactgattatgacttcaaatgtggggagtaaggataaggacacgctagggttttttagcactaaaaacgccaagtatgatagagccgttaaagagcttttaacccctgaattgcgatccagaattgatgcgatcgtgccgtttaacgcgctcagtttggaggattttgaacgcattgtttctgtggaattggacgggttaaaagccctagcaatagagcaaggcgtgatcttaaaattccataaagaagttgtgaaatgcatcgcgcaaaagagctaccagaggagttttggtgcgagagaaattaaaaaaatcattcagagggaaatcaacccccaattaagcgatatagtgcttaaacaatcgcttaaaaaaccaacaagatcgttgcgcatgaagagcacatttcacaaa

SEQ ID NO: 2887 - DNA (genomic), 2139 bp, Helicobacter pylori; double-stranded, circular
  misc_feature (B) LOCATION 1...2139
  hypothetical: NO
  anti-sense: NO
atggacaaattcaataaagatttgaatgaagttttatctcatgctttagatttagccctagattttaaccatgtcctttgcaccacagagcatgtgctgttagccattttagagcatgggattggaataaggatttttaatactttagaagaagatggctaccataaaatggagcaaatccttaaagactacttgcaacaatacattcctttaaaaaacgatccaaccaaaataccagacaggagtcccgtattagcaagagtgtttaaaaaaatgtatgcgagttacttggatagcgtgggcgtggaagaattgcttattttcattttagaatacgatgattgttacgcttcaaaactcctggatagttttggcatcactcgttcgtatttcaagtccgctttattggattttgataaccctaatgatattaatgataacgacattaataatgaagaagcgcccaaaagcactcccctaaaaaaatacactaaaaacttgagcgctttagcccaaaataacgctttagatccagtcattggcagagaagaagagattttaagagtcatcgaaattttagggcgcaggaaaaagaataacccgcttttaattggcgaagcgggcgtagggaaaacttccatcgctgaagctttggctttaaaaatcgctcaaaaagaagtgccggagtttttgcaagaatatgaggtttattctttggatttggctttaatggtagctggggcaaaatacagaggggattttgaaaagcgcctgaaaaaaacgctcaaagagatccagcaaaacggccgtatcattttattcattgatgaaatccacacccttttaggtgcagggagcagtaacgctgggagcttggatgcggcgaatatattaaaaccggttttaacggatgggagcttgaaatgtttgggggcgaccacttttgaagaataccgcagcgtgtttgaaaaagacaaggctttcaacaggcgcttttctatagtgaatgttgaagagccttctaaggaagcgtgttacttgattttaaagaatattgcccccctttatgaagaacaccaccaggtgcgttataatgaaagcgtgtttaaggcatgcgtggatttgacgagctattacatgcatgataaattcttgccggataaggcgattgaattattagatgaggtgggatcaaggaaaaagatcaaccctaaaaaaggcaaaaaaatcagcgttgatgacgtgcaagaaacgctcgctctcaagcttaaaatccctaaaatgcgtttaaatagcgataaaaaagcccttttaaggaatttggaaaaatcgctaaaaaataagatttttgcccaaaccgaagcgatcaaccttgtcagcaatgcgatcaaaatccagcattgcgggctttctgcaaaaaataagcctgtggggagctttttattcgtggggcctagtggggtagggaaaacagaattggctaaagaattggccttgaatttgaatttgcattttgaacgctttgacatgagcgaatacaaagaagcccatagcgtggcaaagctcatcggaagtcctagcggttatgtggggtttgagcaaggggggttattggtgaatgcgattaaaaagcacccgcattgtttgctgcttttagatgagatagaaaaggcccaccctaatgtgtatgatttgttgttgcaggtgatggataacgccactttgagcgataatttaggcaacaaggcgagttttaagcatgtgatactgattatgacttcaaatgtggggagtaaggataaggacacgctagggttttttagcactaaaaacgccaagtatgatagagccgttaaagagcttttaacccctgaattgcgatccagaattgatgcgatcgtgccgtttaacgcgctcagtttggaggattttgaacgcattgtttctgtggaattagacaaattaaaagccctagcactagagcaaggcgtgatcttaaaattccataaagaagttgtgaaatgcatcgcgcaaaagagctaccaaacgacttttggtgcgagagaaattaaaaaaatcattcagagggaaatcaacccccaattaagcgatatagtgcttaaacaatcgcttaaaaaa

SEQ ID NO: 2888 - DNA (genomic), 2229 bp, Helicobacter pylori; double-stranded, circular
  misc_feature (B) LOCATION 1...2229
  hypothetical: NO
  anti-sense: NO
atggacaaattcaataaagatttgaatgaagttttatctcatgctttagatttagccctagattttaaccatgtcctttgcaccacagagcatgtgctgttagccattttagagcatgggattggaataaggatttttaatactttagaagaagatggctaccataaaatggagcaaatccttaaagactacttgcaacaatacattcctttaaaaaacgatccaaccaaaataccagacaggagtcccgtattagcaagagtgtttaaaaaaatgtatgcgagttacttggatagcgtgggcgtggaagaattgcttattttcattttagaatacgatgattgttacgcttcaaaactcctggatagttttggcatcactcgttcgtatttcaagtccgctttattggattttgataaccctaatgatattaatgataacgacattaataatgaagaagcgcccaaaagcactcccctaaaaaaatacactaaaaacttgagcgctttagcccaaaataacgctttagatccagtcattggcagagaagaagagattttaagagtcatcgaaattttagggcgcaggaaaaagaataacccgcttttaattggcgaagcgggcgtagggaaaacttccatcgctgaagctttggctttaaaaatcgctcaaaaagaagtgccggagtttttgcaagaatatgaggtttattctttggatttggctttaatggtagctggggcaaaatacagaggggattttgaaaagcgcctgaaaaaaacgctcaaagagatccagcaaaacggccgtatcattttattcattgatgaaatccacacccttttaggtgcagggagcagtaacgctgggagcttggatgcggcgaatatattaaaaccggttttaacggatgggagcttgaaatgtttgggggcgaccacttttgaagaataccgcagcgtgtttgaaaaagacaaggctttcaacaggcgcttttctatagtgaatgttgaagagccttctaaggaagcgtgttacttgattttaaagaatattgcccccctttatgaagaacaccaccaggtgcgttataatgaaagcgtgtttaaggcatgcgtggatttgacgagctattacatgcatgataaattcttgccggataaggcgattgaattattagatgaggtgggatcaaggaaaaagatcaaccctaaaaaaggcaaaaaaatcagcgttgatgacgtgcaagaaacgctcgctctcaagcttaaaatccctaaaatgcgtttaaacagcgataaaaaagcccttttaaggaatttggaaaaatcgctaaaaaataagatttttgcccaaaccgaagcgatcaaccttgtcagcaatgcgatcaaaatccagcattgcgggctttctgcaaaaaataagcctgtggggagctttttattcgtggggcctagtggggtagggaaaacagaattggctaaagaattggccttgaatttgaatttgcattttgaacgctttgacatgagcgaatacaaagaagcccatagcgtggcaaagctcatcggaagtcctagcggttatgtggggtttgagcaaggggggttattggtgaatgcgattaaaaagcacccgcattgtttgctgcttttagatgagatagaaaaggcccaccctaatgtgtatgatttgttgttgcaggtgatggataacgccactttgagcgataatttaggcaacaaggcgagttttaagcatgtgatactgattatgacttcaaatgtggggagtaaggataaggacacgctagggttttttagcactaaaaacgccaagtatgatagagccgttaaagagcttttaacccctgaattgcgatccagaattgatgcgatcgtgccgtttaacgcgctcagtttggaggattttgaacgcattgtttctgtggaattagacaaattaaaagccctagcactagagcaaggcgtgatcttaaaattccataaagaagttgtgaaatgcatcgcgcaaaagagctaccaaacgactttaggagcgagagaaattaaaaaaatcattcataatgaaatcaaaacccaattaagcgatatactgctcttacaatcgtttaaaaaaccttgtaagatcgcttgcttattggaaaaaaaccaattggttctaaaagaaatcaagcgcgcacaaaaggtgaaagaaaatgacttttga

SEQ ID NO: 2889 - DNA (genomic), 249 bp, Helicobacter pylori; double-stranded, circular
  misc_feature (B) LOCATION 1...249
  hypothetical: NO
  anti-sense: NO
cgcatgggaaaagttattggaattgatttagggacaaccaactccgcaatggcggtttatgaaggcaatgaagcgaagattattgcgaataaagagggtaaaaacaccactccttctattgtagcctttacggataagggcgagattttagtgggcgagagcgccaaaagacaagcggtaaccaacccagaaaaaaccatttattctattaaaagaatcatgggtttgatgtttaatgaagataacggc

SEQ ID NO: 2890 - DNA (genomic), 1041 bp, Helicobacter pylori; double-stranded, circular
  misc_feature (B) LOCATION 1...1041
  hypothetical: NO
  anti-sense: NO
aacgaaacgggtattgaaattaaaaacgatgtgatggcgttgcaacgcctgaaagaagcggctgaaaacgctaaaaaagaactgagctctgcgatggagactgaaatcaatttgccctttatcacagcggacgctaccgggcctaaacacttggttaaaaaactcactagggctaaatttgaaagcttgacagaagatctcgtggaagaaacgatttctaaaattgaaagcgtgatcaaagacgcggggctaaccaaaaatgagatttcagaagtggtgatggtgggtggctctactcgtatccctaaagtccaagaaagggtgaaagcgtttattaataaagagttgaataaaagcgtcaaccctgatgaggtcgtagcggtgggagcgagcattcaagggggtgtgttaaaaggcgatgtgaaagatgtgcttttattagacgttacgcctttaagccttgggattgaaactttagggggcgtgatgactaaagtgattgatagaggcacgaccattcctgcgaaaaaatctcaagtgttctcaaccgctgaagacaaccagcccgccgtgtccattatggttttacaaggcgaaagggaattggcaagggataataaatctttgggtaaatttgatttgcaaggcatcgcgccagctccaagaggcatgccgcaaattgaagtaacctttgatattgacgctaatgggattttaaccgtgtcagcgcaagataaaaataccggcaaaagccaagagattaaaatttctggttctagcgggttgtctgatagcgagattgaaaaaatggttaaagacgctgaattgcacaaagaagaagacgccaggaaaaaagaagtgattgaagcgagaaaccatgccgatagtttggcacaccaaacccaaaagagccttgatgagcataaaacgaacttgaatgaaaacgacgctaacgagatccaaaacgccattaacgcccttaaagattgcatcaaaaacgataacgctactaagcggagcttgaagacaaaaccaaagcgt

SEQ ID NO: 2891 - DNA (genomic), 1038 bp, Helicobacter pylori; double-stranded, circular
  misc_feature (B) LOCATION 1...1038
  hypothetical: NO
  anti-sense: NO
gaaacgggtattgaaattaaaaacgatgtgatggcgttgcaacgcctgaaagaagcggctgaaaacgctaaaaaagaactgagctctgcgatggagactgaaatcaatttgccctttatcacagcggacgctaccgggcctaaacacttggttaaaaaactcactagggctaaatttgaaagcttgacagaagatctcgtggaagaaacgatttctaaaattgaaagcgtgatcaaagacgcggggctaaccaaaaatgagatttcagaagtggtgatggtgggtggctctactcgtatccctaaagtccaagaaagggtgaaagcgtttattaataaagagttgaataaaagcgtcaaccctgatgaggtcgtagcggtgggagcgagcattcaagggggtgtgttaaaaggcgatgtgaaagatgtgcttttattagacgttacgcctttaagccttgggattgaaactttagggggcgtgatgactaaagtgattgatagaggcacgaccattcctgcgaaaaaatctcaagtgttctcaaccgctgaagacaaccagcccgccgtgtccattatggttttacaaggcgaaagggaattggcaagggataataaatctttgggtaaatttgatttgcaaggcatcgcgccagctccaagaggcatgccgcaaattgaagtaacctttgatattgacgctaatgggattttaaccgtgtcagcgcaagataaaaataccggcaaaagccaagagattaaaatttctggttctagcgggttgtctgatagcgagattgaaaaaatggttaaagacgctgaattgcacaaagaagaagacgccaggaaaaaagaagtgattgaagcgagaaaccatgccgatagtttggcacaccaaacccaaaagagccttgatgagcataaaacgaacttgaatgaaaacgacgctaacgagatccaaaacgccattaacgcccttaaagattgcatcaaaaacgataacgctactaagcggagcttgaagacaaaaccaaagcgt

SEQ ID NO: 2892 - DNA (genomic), 1761 bp, Helicobacter pylori; double-stranded, circular
  misc_feature (B) LOCATION 1...1761
  hypothetical: NO
  anti-sense: NO
atgggaaaagttattggaattgatttagggacaaccaactccgcaatggcggtttatgaaggcaatgaagcgaagattattgcgaataaagagggtaaaaacaccactccttctattgtagcctttacggataagggcgagattttagtgggcgagagcgccaaaagacaagcggtaaccaacccagaaaaaaccatttattctattaaaagaatcatgggtttgatgtttaatgaagataaggctaaagaagctgaaaaacgcttgccttataagattgtggataggaatggggcttgcgcgattgagatttcaggtaaaatttatacccctcaagaaatttcagccaaaattttaatgaagctcaaagaagacgctgaaagttatttaggcgaaagcgttacggaagcggttatcacggttcctgcttattttaacgacagccaaaggaaggcgactaaagaagcgggcacgattgcagggcttaacgttttaaggatcatcaatgagcctaccagcgcggcgttagcttacggcttggataaaaaagagagcgaaaaaatcatggtttatgatttgggtggggggacttttgacgttaccgtgttggaaacgggcgataatgtcgtggaagttttagccacagggggcgatgcgtttttaggaggcgatgattttgacaatcgtgtgatcgatttcttagcggctgagtttaaaaacgaaacgggtattgaaattaaaaacgatgtgatggcgttgcaacgcctgaaagaagcggctgaaaacgctaaaaaagaactgagctctgcgatggagactgaaatcaatttgccctttatcacagcggacgctaccgggcctaaacacttggttaaaaaactcactagggctaaatttgaaagcttgacagaagatctcgtggaagaaacgatttctaaaattgaaagcgtgatcaaagacgcggggctaaccaaaaatgagatttcagaagtggtgatggtgggtggctctactcgtatccctaaagtccaagaaagggtgaaagcgtttattaataaagagttgaataaaagcgtcaaccctgatgaggtcgtagcggtgggagcgagcattcaagggggtgtgttaaaaggcgatgtgaaagatgtgcttttattagacgttacgcctttaagccttgggattgaaactttagggggcgtgatgactaaagtgattgatagaggcacgaccattcctgcgaaaaaatctcaagtgttctcaaccgctgaagacaaccagcccgccgtgtccattatggttttacaaggcgaaagggaattggcaagggataataaatctttgggtaaatttgatttgcaaggcatcgcgccagctccaagaggcatgccgcaaattgaagtaacctttgatattgacgctaatgggattttaaccgtgtcagcgcaagataaaaataccggcaaaagccaagagattaaaatttctggttctagcgggttgtctgatagcgagattgaaaaaatggttaaagacgctgaattgcacaaagaagaagacgccaggaaaaaagaagtgattgaagcgagaaaccatgccgatagtttggcacaccaaacccaaaagagccttgatgagcataaaacgaacttgaatgaaaacgacgctaacgagatccaaaacgccattaacgcccttaaagattgcatcaaaaacgataacgctactaagcggagcttgaagacaaaaccaaagcgttga

SEQ ID NO: 2893 - DNA (genomic), 576 bp, Helicobacter pylori; double-stranded, circular
  misc_feature (B) LOCATION 1...576
  hypothetical: NO
  anti-sense: NO
atgaaagatgaacacaaccaagaacacgatcatttaagcccaaaagagccagagtcttatcaaaaggcttacgcttgcaaagaacaacaaggtgaagaaaagcaagaagcgagcgaaaaagaaggcgagatcaaggaagattttgagcttaaataccaggaaatgcgcgaacaatatttaagagtgcatgcggattttgaaaacgtgaaaaagcgtttagaaagagacaagagcatggcgttagagtatgcgtatgaaaaaatcgcattggatctattgccggtgattgatgcgcttcttggggctcataagagtgctgtagaagtggataaagagagcgctttaaccaaaggcttggagcttacgatggaaaagttgcatgaagttttggcaaggcatggcattgaggggattgaatgcttagaagaatttgatcctaatttccacaatgcgatcatgcaagtcaaaagcgaagaaaaagaaaacgggaaaatcgtgcaggttttgcaacagggttacaagtataagggtagggttttgaggccggcaatggtgagcattgctaaaaacgattaa

SEQ ID NO: 2894 - DNA (genomic), 276 bp, Helicobacter pylori; double-stranded, circular
  misc_feature (B) LOCATION 1...276
  hypothetical: NO
  anti-sense: NO
atagtcatgctatcatctaatatcgtggggataccctttgaaaacgttcaaaaaaaagcgcttgaaaggggcattaatataaccctagacgaaaaagcaaaagaattgatcgccgaagcggggtttgacagattttatggcgctagacccctaaaacgcgcgctctatgaaatggtagaagacaagctcgctgaactcattttagaggataaaattaaagagaatgacagcgtggcgtttgtggtagaaaataacgagattgtgcctaagattaag

SEQ ID NO: 2895 - DNA (genomic), 294 bp, Helicobacter pylori; double-stranded, circular
  misc_feature (B) LOCATION 1...294
  hypothetical: NO
  anti-sense: NO
cgagcgcttaaactctctagccgttatatcaccgataggtttttacccgataaagcgattgatttgattgatgagggagcggcccaattaaaaatgcaaatggaatcagagccggccaaactctctagcgtgaagcgctccattcaaagactagaaatggaaaaacaagcccttgaaatggaaaacaaagagagcaaccacaaacgcatgcaagaaatccttaaagaattgagcgatttgaaagagggaaaaatccaattagaagcgcaatttgaaaaccgaaaaagaagtgtt

SEQ ID NO: 2896 - DNA (genomic), 708 bp, Helicobacter pylori; double-stranded, circular
  misc_feature (B) LOCATION 1...708
  hypothetical: NO
  anti-sense: NO
gaaatcgctgagatcgtgagccaatggacgcacatcccgttccaaaaaatgttccaaagcgaaaaaaatagggttttaaacattgaaagcgaattgcaaaaaagggtggtggggcaagaaaaagcgctcaaagcgatcgctaaagcgattaaaaggaataaggctgggcttagcgatagcaacaagcccatagggagtttcctctttttagggccaacaggcgtgggtaaaaccgagagcgctaaagctttggcgcaattcttgtttgatagcgataaaaatcttatacgaattgacatgagcgaatacatggaaaagcacgctatcagccgtcttattggggccgctcctgggtatgtgggctatgaagaaggcgggcaattgaccgaagcggtgcgcagaaaaccttatagcgtagtgttattagatgaagtggaaaaagcccatccggatgtgtttaacttcttgttacaggtttttgatgaggggcatttaaccgatagtaagggcgtgagggtggatttcaaaaacacgattttgattttaaccagcaatgtggctagcggcgcgcttttagaagaggatttgagtgaagccgataaacaaaaagcgatcaaagagagcctgagacaattcttcaagccggaatttttaaaccgcttagatgaaatcatctcctttaacgccctagatagtcatgctatcatc

SEQ ID NO: 2897 - DNA (genomic), 705 bp, Helicobacter pylori; double-stranded, circular
  misc_feature (B) LOCATION 1...705
  hypothetical: NO
  anti-sense: NO
atcgctgagatcgtgagccaatggacgcacatcccgttccaaaaaatgttccaaagcgaaaaaaatagggttttaaacattgaaagcgaattgcaaaaaagggtggtggggcaagaaaaagcgctcaaagcgatcgctaaagcgattaaaaggaataaggctgggcttagcgatagcaacaagcccatagggagtttcctctttttagggccaacaggcgtgggtaaaaccgagagcgctaaagctttggcgcaattcttgtttgatagcgataaaaatcttatacgaattgacatgagcgaatacatggaaaagcacgctatcagccgtcttattggggccgctcctgggtatgtgggctatgaagaaggcgggcaattgaccgaagcggtgcgcagaaaaccttatagcgtagtgttattagatgaagtggaaaaagcccatccggatgtgtttaacttcttgttacaggtttttgatgaggggcatttaaccgatagtaagggcgtgagggtggatttcaaaaacacgattttgattttaaccagcaatgtggctagcggcgcgcttttagaagaggatttgagtgaagccgataaacaaaaagcgatcaaagagagcctgagacaattcttcaagccggaatttttaaaccgcttagatgaaatcatctcctttaacgccctagatagtcatgctatcatc

SEQ ID NO: 2898 - DNA (genomic), 2571 bp, Helicobacter pylori; double-stranded, circular
  misc_feature (B) LOCATION 1...2571
  hypothetical: NO
  anti-sense: NO
atgaatttatttgaaaaaatgactgaccaattgcatgaaactttagacagcgcgatcgctttagccttacaccataaaaacgctgaagtaacgcccatgcacatgctttttgccatgctcaataactcccaaggcattctcattcaagccttacaaaaaatgcctgtggatattgaagctttaaaacttagcgttcaaagcgagttgaataagttcgctaaagtttcacaaatcagcaagcaaaacatccaattaaaccaagctctaatccaaagtttagaaaacgctcaaggcttgatggctaaaaggggcgattctttcatcgctaccgatgcgtatcttttggcgaatatgaatctttttgaaagcgttctaaagccttatttagacactaaggaattgcaaaaaactttagaatctttaagaaaaggcaggactatccaggataaaaacgacgattccaacttggaaagtttggaaaaatttggcattgatttgacgcaaaaagccctagaaaataagctggatcccgtgattggaagggatgaagaaatcattcgcatgatgcaaattttgatcagaaaaacaaaaaataaccctattttactgggcgagcctggagtggggaaaacggctgttgtggaagggttagcccaacgcattgtgaataaggaagtgcctaaaacgcttttaaacaaacgggttgtcgctttagatttgagcttattggtggctggggcgaaatacagaggcgagtttgaagagcgcctgaaaaaggtgattgaagaagttaaaaaaagcgcgaatgtgattttattcattgatgaaatccacacgattgtgggggctggggctagtgaggggggcatggatgcggccaatattttaaaacccgcgctcgctaggggggaattgcacacgattggagcgaccactctaaaagaataccgcaagtattttgaaaaagacatggcgctacaaaggcgtttccaacccattttactcaatgagcctagcatcaatgaagctttacagattttaagggggttgaaagaaactttagaaacgcaccataatatcactatcaatgactccgcgctcatagcgagcgctaaactctctagccgttatatcaccgataggtttttacccgataaagcgattgatttgattgatgagggagcggcccaattaaaaatgcaaatggaatcagagccggccaaactctctagcgtgaagcgctccattcaaagactagaaatggaaaaacaagcccttgaaatggaaaacaaagagagcaaccacaaacgcatgcaagaaatccttaaagaattgagcgatttgaaagaggaaaaaatccaattagaagcgcaatttgaaaacgaaaaagaagtgtttaaggaaatttcacgcttgaaaatggaaatggagggcttgaaaaaagaagccgaaaggtttaaacgcaatggggattaccagcaagcggctgaaattgaatactctaaaatccctgaaaaggaaaagaaagaaaaagaattgcagcataaatgggaaacgatgcaacaaaacggggcgttgttgcaaaacgctttaaccgaaaacaacatcgctgagatcgtgagccaatggacgcacatcccggtccaaaaaatgctccaaagcgaaaaaaatagggttttaaacattgaaagcgaattgcaaaaaagggtggtggggcaagaaaaagcgctcaaagcgatcgctaaagcgattaaaaggaataaggctgggcttagcgatagcaacaagcccatagggagtttcctctttttagggccaacaggcgtgggtaaaaccgagagcgctaaagctttggcgcaattcttgtttgatagcgataaaaatcttatacgaattgacatgagcgaatacatggaaaagcacgctatcagccgtcttattggggccgctcctgggtatgtgggctatgaagaaggcgggcaattgaccgaagcggtgcgcagaaaaccttatagcgtagtgttattagatgaagtggaaaaagcccatccggatgtgtttaacctcttgttacaggttttagatgaggggcatttaaccgatagtaagggcgtgagggtggatttcaaaaacacgattttgattttaaccagcaatgtggctagcggcgcgcttttagaagaggatttgagtgaagccgataaacaaaaagcgatcaaagagagcctgagacaattcttcaagccggaatttttaaaccgcttagatgaaatcatctcctttaacgccctagatagtcatgctatcatcaatatcgtggggatactctttgaaaacgttcaaaaaaaagcgcttgaaaggggcattaatataaccctagacgaaaaagcaaaagaattgatcgccgaagcggggtttgacagattttatggcgctagacccctaaaacgcgcgctctatgaaatggtagaagacaagctcgctgaactcattttagaggataaaattaaagagaatgacagcgtggcgtttgtggtagaaaataacgagattgtgcctaagattaagtga

SEQ ID NO: 2899 - DNA (genomic), 177 bp, Helicobacter pylori; double-stranded, circular
  misc_feature (B) LOCATION 1...177
  hypothetical: NO
  anti-sense: NO
gtggaattgagttattatgaaattttagaagtggaaaaacacagcaaccaagagaccattaaaaagtcttacagaaagttagctttaaaataccacccggaccgaaacgccggcgataaagaagccgaagaaaaattcaagctcatcaatgaagccttatggggtgctaggcgatga

SEQ ID NO: 2900 - DNA (genomic), 192 bp, Helicobacter pylori; double-stranded, circular
  misc_feature (B) LOCATION 1...192
  hypothetical: NO
  anti-sense: NO
aataccacccggaccgaaacgccggcgataaagaagccgaagaaaaattcaagctcatcaatgaagccttatggggtgctaggcgatgaaaagaagcgggccttatacgacaggtatggcaaaaaaggcttaaaccaagccggcacgagccaaagcgatttttctgatttttttgaagatttaggctcgttt

SEQ ID NO: 2901 - DNA (genomic), 207 bp, Helicobacter pylori; double-stranded, circular
  misc_feature (B) LOCATION 1...207
  hypothetical: NO
  anti-sense: NO
aataagcgttttgatgccatttttggagcgatcgtggaattgagttattatgaaattttagaagtggaaaaacacagcaaccaagagaccattaaaaagtcttacagaaagttagctttaaaataccacccggaccgaaacgccggcgataaagaagccgaagaaaaattcaagctcatcaatgaagccttatggggtgctaggcga

SEQ ID NO: 2902 - DNA (genomic), 828 bp, Helicobacter pylori; double-stranded, circular
  misc_feature (B) LOCATION 1...828
  hypothetical: NO
  anti-sense: NO
gaggacgcttttggctttggcgctagagggagtaaaaggcaaaaaagctctatcgcgccggattatttgcaaatgattgaattgagtttcaaagaagcggtttttggctgtaaaaaaaccattaaagcccaataccagagcgtctgtgaaagttgcgatggcacgggcgctaaagataaagccctagagaattgcaaacaatgcaacgggcaagggcaagtgtttatgcgtcaaggttttatgagttttgcgcaaacttgcggggcgtgtcaaggcaagggtaaaatcattaaaaccccatgccaagcgtgtaagggtaaaacctacattcttaaagatgaagaaattgatgcgataatccctgagggcattgatgatcaaaaccgcatggtgcttaaaaataagggcaatgaatacgagaaggggaaaagaggggatttgtatttagaagcgcgagtcaaagaagatgagcatttcaagcgcgaaggctgtgatctattcattaaagcgccggtgtttttcaccactatcgctttagggcatccgattaaagtgccatctttaagaggagacgaattggaattaaaaatccctagaaacgccaaagacaggcaagcttttgcgtttagaaacgagggcgtgaaacaccctgaaagctcttatagggggagtttgatcgtggagttgcaagtgatttatcctaaaagtttgaataaagagcagcaagggttattggaaaaattgcatgcgagttttggctatgaaggcgaaccgcataaaagcgttttagaaacttgcgtttctaaaattaaagactggtttaaataa

SEQ ID NO: 2903 - DNA (genomic), 822 bp, Helicobacter pylori; double-stranded, circular
  misc_feature (B) LOCATION 1...822
  hypothetical: NO
  anti-sense: NO
gacgcttttggctttggcgctagagggagtaaaaggcaaaaaagctctatcgcgccggattatttgcaaatgattgaattgagtttcaaagaagcggtttttggctgtaaaaaaaccattaaagcccaataccagagcgtctgtgaaagttgcgatggcacgggcgctaaagataaagccctagagaattgcaaacaatgcaacgggcaagggcaagtgtttatgcgtcaaggttttatgagttttgcgcaaacttgcggggcgtgtcaaggcaagggtaaaatcattaaaaccccatgccaagcgtgtaagggtaaaacctacattcttaaagatgaagaaattgatgcgataatccctgagggcattgatgatcaaaaccgcatggtgcttaaaaataagggcaatgaatacgagaaggggaaaagaggggatttgtatttagaagcgcgagtcaaagaagatgagcatttcaagcgcgaaggctgtgatctattcattaaagcgccggtgtttttcaccactatcgctttagggcatccgattaaagtgccatctttaagaggagacgaattggaattaaaaatccctagaaacgccaaagacaggcaagcttttgcgtttagaaacgagggcgtgaaacaccctgaaagctcttatagggggagtttgatcgtggagttgcaagtgatttatcctaaaagtttgaataaagagcagcaagggttattggaaaaattgcatgcgagttttggctatgaaggcgaaccgcataaaagcgttttagaaacttgcgtttctaaaattaaagactggtttaaa

SEQ ID NO: 2904 - DNA (genomic), 1110 bp, Helicobacter pylori; double-stranded, circular
  misc_feature (B) LOCATION 1...1110
  hypothetical: NO
  anti-sense: NO
gtggaattgagttattatgaaattttagaagtggaaaaacacagcaaccaagagaccattaaaaagtcttacagaaagttagctttaaaataccacccggaccgaaacgccggcgataaagaagccgaagaaaaattcaagctcatcaatgaagcttatggggtgctaggcgatgaaaagaagcgggccttatacgacaggtatggcaaaaaaggcttaaaccaagccggcacgagccaaagcgatttttctgatttttttgaagatttaggctcgttttttgaggacgcttttggctttggcgctagagggagtaaaaggcaaaaaagctctatcgcgccggattatttgcaaatgattgaattgagtttcaaagaagcggtttttggctgtaaaaaaaccattaaagcccaataccagagcgtctgtgaaagttgcgatggcacgggcgctaaagataaagccctagagaattgcaaacaatgcaacgggcaagggcaagtgtttatgcgtcaaggttttatgagttttgcgcaaacttgcggggcgtgtcaaggcaagggtaaaatcattaaaaccccatgccaagcgtgtaagggtaaaacctacattcttaaagatgaagaaattgatgcgataatccctgagggcattgatgatcaaaaccgcatggtgcttaaaaataagggcaatgaatacgagaaggggaaaagaggggatttgtatttagaagcgcgagtcaaagaagatgagcatttcaagcgcgaaggctgtgatctattcattaaagcgccggtgtttttcaccactatcgctttagggcatacgattaaagtgccatctttaagaggagacgaattggaattaaaaatccctagaaacgccaaagacaggcaagcttttgcgtttagaaacgagggcgtgaaacaccctgaaagctcttatagggggagtttgatcgtggagttgcaagtgatttatcctaaaagtttgaataaagagcagcaagggttattggaaaaattgcatgcgagttttggctatgaaggcgaaccgcataaaagcgttttagaaacttgcgtttctaaaattaaagactggtttaaataa

SEQ ID NO: 2905 - DNA (genomic), 234 bp, Helicobacter pylori; double-stranded, circular
  misc_feature (B) LOCATION 1...234
  hypothetical: NO
  anti-sense: NO
gtgccagctttagaaaaactgaaaaaccgcttcaatgagcgttttaaaatctgccctaaagacaaagaaaccctgtggctagaaacgatccaaaacttagtcgcttcagaattttttgaattagaagacgctattaattttgggcaagaattagaaaacgctaaccccaattaccgacaaaaaatcgctaacgctaccggcttagcccttaagaataaaaaagaaaaaggatag

SEQ ID NO: 2906 - DNA (genomic), 369 bp, Helicobacter pylori; double-stranded, circular
  misc_feature (B) LOCATION 1...369
  hypothetical: NO
  anti-sense: NO
tcctctttgtatgcctgttgcctgtgttattggtggggcttgcttggagggcttactcgcccccccttaaagcaaaatattcctaataaaagcctctctttgaaaaatttaaacgaacaaatcaaaaaccttcaaagcgtgccagctttagaaaaactgaaaaaccgcttcaatgagcgttttaaaatctgccctaaagacaaagaaaccctgtggctagaaacgatccaaaacttagtcgcttcagaattttttgaattagaagacgctattaattttgggcaagaattagaaaacgctaaccccaattaccgacaaaaaatcgctaacgctaccggcttagcccttaagaataaaaaagaaaaagga

SEQ ID NO: 2907 - DNA (genomic), 408 bp, Helicobacter pylori; double-stranded, circular
  misc_feature (B) LOCATION 1...408
  hypothetical: NO
  anti-sense: NO
atgggcaatttgacttattacgcttacatgtatttgatcctctttgtatgcctgttgcctgtgttattggtggggcttgcttggaggcttactcgcccccccttaaagcaaaatattcctaataaaagcctctctttagaaaatttaaacgaacaaatcaaaaaccttcaaagcgtgccagctttagaaaaactgaaaaaccgcttcaatgagcgttttaaaatctgccctaaagacaaagaaaccctgtggctagaaacgatccaaaacttagtcgcttcagaattttttgaattagaagacgctattaattttgggcaagaattagaaaacgctaaccccaattaccgacaaaaaatcgctaacgctaccggcttagcccttaagaataaaaaagaaaaaggatag

SEQ ID NO: 2908 - DNA (genomic), 237 bp, Helicobacter pylori; double-stranded, circular
  misc_feature (B) LOCATION 1...237
  hypothetical: NO
  anti-sense: NO
atttacatgatcggtgataatagggacaattctagcgactcgcgcttttgggggagtgtggcttataaaaacatcgtgggttcgccatggtttgtttatttcagtttgagtttaaaaaacagcctggaagtggatgcagaaaataaccccaaaaaacgctatctggtgcgttgggaacgcatgtttaaaagcgttgaaggcttagaaaaaatcattaaaaaagaaaaagcaacgcat

SEQ ID NO: 2909 - DNA (genomic), 396 bp, Helicobacter pylori; double-stranded, circular
  misc_feature (B) LOCATION 1...396
  hypothetical: NO
  anti-sense: NO
agggggaatcgccccaagcgtggcgaagtggtggtgtttatccctccccatgaaaaaaagtcttactatgtcaaaaggaattttgccattgggggcgatgaggtgctattcactaatgaggggttttatttgcacccttttgagagcggcaacgataaagattacatttccaaacattaccctaacgccttgactaaagaatttatgggtaaaatttttgttttaaacccttataaaagtaagcatccgggtatccattaccaaaaagataatgaaaccttccacttaatggagcagttagccactcaaggcgcagaggctaatatcagcatgcaactcattcaaatggagggcgataaggtgttttataagaaaatcaatcacgatgaatttaca

SEQ ID NO: 2910 - DNA (genomic), 603 bp, Helicobacter pylori; double-stranded, circular
  misc_feature (B) LOCATION 1...603
  hypothetical: NO
  anti-sense: NO
gtggtggtgtttatccctccccatgaaaaaaagtcttactatgtcaaaaggaattttgccattgggggcgatgaggtgctattcactaatgaggggttttatttgcacccttttgagagcggcaacgataaagattacatttccaaacattaccctaacgccttgactaaagaatttatgggtaaaatttttgttttaaacccttataaaagtaagcatccgggtatccattaccaaaaagataatgaaaccttccacttaatggagcagttagccactcaaggcgcagaggctaatatcagcatgcaactcattcaaatggagggcgaaaaggtgttttataagaaaatcaatcacgatgaatttttcatgatcggagataatagggacaattctagcgactcgcgcttttgggggagtgtggcttataaaaacatcgtgggttcgccatggtttgtttatttcagtttgagtttaaaaaacagcctggaagtggatgcagaaaataaccccaaaaaacgctatctggtgcgttgggaacgcatgtttaaaagcgttgaaggcttagaaaaaatcattaaaaaagaaaaagcaacgcattaa

SEQ ID NO: 2911 - DNA (genomic), 489 bp, Helicobacter pylori; double-stranded, circular
  misc_feature (B) LOCATION 1...489
  hypothetical: NO
  anti-sense: NO
atgaaaccaattaaaacttatgatattaaagaagaagagcttgcaaaaaccgcttacgccacgatcaaaaccaataaaggcaatatcactctagagcttttttacaaagacgcgccccaagcggtcagtaactttgtaactttggctaaagagggtttttataacgggcttaacttccatcgtgtgatcgccggctttgtggctcaaggaggttgcccttatggcacaggcacaggcgggccagagcaccgcatcaaatgcgaagtggctcataaccccaacaagcaccaaagaggctctatctctatggcgcatgccgggagagacacaggggggagtcagtttttcttgtgttttgtggatttgccccatttagatggcgaacacaccgtatttggcaaaatcactagtgcagaaagccttagcgttttggataagatcaagcagggcgatattatagagagcgttgtgtttagcccttctctataa

SEQ ID NO: 2912 - DNA (genomic), 540 bp, Helicobacter pylori; double-stranded, circular
  misc_feature (B) LOCATION 1...540
  hypothetical: NO
  anti-sense: NO
tttattgctataatagagcatttgaatgacaaaagcttatcgcaaaggtttatgatgaaaccaattaaaacttatgatattaaagaagaagagcttgcaaaaaccgcttacgccacgatcaaaaccaataaaggcaatatcactctagagcttttttacaaagacgcgccccaagcggtcagtaactttgtaactttggctaaagagggtttttataacgggcttaacttccatcgtgtgatcgccggctttgtggctcaaggaggttgcccttatggcacaggcacaggcgggccagagcaccgcatcaaatgcgaagtggctcataaccccaacaagcaccaaagaggctctatctctatggcgcatgccgggagagacacaggggggagtcagtttttcttgtgttttgtggatttgccccatttagatggcgaacacaccgtatttggcaaaatcactagtgcagaaagccttagcgttttggataagatcaagcagggcgatattatagagagcgttgtgtttagcccttctcta

SEQ ID NO: 2913 - DNA (genomic), 537 bp, Helicobacter pylori; double-stranded, circular
  misc_feature (B) LOCATION 1...537
  hypothetical: NO
  anti-sense: NO
atgttagaaggcgttattagagagagtattactaaagctaacgctaaagctttaaaaaaagatggctatctaatcgcaaacatttatggaaagggtgttgaaaacgtgaattgcgcgttcaaattaaaccctttcattaaataccttaaggaaaaaaagcatttgattttcccggtgaaattaggggataagacttttgaagtcgtggttcaagaataccaaaaaaaccccgttactaacgagcttatccatgtggatttactcgctgttactaagggcgtgaagtccaagtttaaagtccccgtcaaacaccaaggcactccagtgggcttgaaaaataaagggattttaatgctctctaaaaagcgtatcagcgtggaatgcgctccagagcatttgcccgatcactatttagtggatgtagcccctttagacgtgaatgagtctattttggtgcgcgatttagaaaaacacgaaaatgttaagattttagatcatgattctatcgctgtgatcggtgtgattaaagcgaagtga

SEQ ID NO: 2914 - DNA (genomic), 543 bp, Helicobacter pylori; double-stranded, circular
  misc_feature (B) LOCATION 1...543
  hypothetical: NO
  anti-sense: NO
aggattgacatgttagaaggcgttattagagagagtattactaaagctaacgctaaagctttaaaaaaagatggctatctaatcgcaaacatttatggaaagggtgttgaaaacgtgaattgcgcgttcaaattaaaccctttcattaaataccttaaggaaaaaaagcatttgattttcccggtgaaattaggggataagacttttgaagtcgtggttcaagaataccaaaaaaaccccgttactaacgagcttatccatgtggatttactcgctgttactaagggcgtgaagtccaagtttaaagtccccgtcaaacaccaaggcactccagtgggcttgaaaaataaagggattttaatgctctctaaaaagcgtatcagcgtggaatgcgctccagagcatttgcccgatcactatttagtggatgtagcccctttagacgtgaatgagtctattttggtgcgcgatttagaaaaacacgaaaatgttaagattttagatcatgattctatcgctgtgatcggtgtgattaaagcgaag

SEQ ID NO: 2915 - DNA (genomic), 558 bp, Helicobacter pylori; double-stranded, circular
  misc_feature (B) LOCATION 1...558
  hypothetical: NO
  anti-sense: NO
atgcaaaaccatgatttagaatcaatcaaacaagccgctttgattgaatatgaagtgagagaacaaggctctagcgatgtgctagacagtaatatttctaaagagcctttagagtttatcataggcgctaatcaaatcatagtagggttagaaaaggcggtattaaaggctcaaattggcgagtgggaagagattgttatcgccccagaggaggcttatggggtttatgaaagcggttatttgcaagaagtccctagggatcaatttgaaggcattgaattagaaaaaggcatgagcgtttttgggcaaactgaagacaatcaaaccattcaagccactatcaaagactttagcaacacgcatgtgatggtggattataaccacccgttagccgggaaaactttagcgtttcgtttcaaggttttaggctttagggaagtgagtgaagaagagattctagcttcacaccatgatagtgggacaggttgctgcggcggtcatgggggtcatggcggaaagaaaggtgggggttgtggttgctcatgttcgcatgggtag

SEQ ID NO: 2916 - DNA (genomic), 576 bp, Helicobacter pylori; double-stranded, circular
  misc_feature (B) LOCATION 1...576
  hypothetical: NO
  anti-sense: NO
aaaacaaggagaaacaccaccatgcaaaaccatgatttagaatcaatcaaacaagccgctttgattgaatatgaagtgagagaacaaggctctagcgatgtgctagacagtaatatttctaaagagcctttagagtttatcataggcgctaatcaaatcatagtagggttagaaaaggcggtattaaaggctcaaattggcgagtgggaagagattgttatcgccccagaggaggcttatggggtttatgaaagcggttatttgcaagaagtccctagggatcaatttgaaggcattgaattagaaaaaggcatgagcgtttttgggcaaactgaagacaatcaaaccattcaagccactatcaaagactttagcaacacgcatgtgatggtggattataaccacccgttagccgggaaaactttagcgtttcgtttcaaggttttaggctttagggaagtgagtgaagaagagattctagcttcacaccatgatagtgggacaggttgctgcggcgttcatgggggtcatggcggaaagaaaggtgggggttgtggttgctcatgttcgcatggg

SEQ ID NO: 2917 - DNA (genomic), 828 bp, Helicobacter pylori; double-stranded, circular
  misc_feature (B) LOCATION 1...828
  hypothetical: NO
  anti-sense: NO
atgagtaagagtttataccaaactttaaacgtgagcgaaaacgccagccaagatgaaatcaaaaaatcctaccgccgtttagccaggcaataccacccggatttgaataaaaccaaagaagccgaagagaaattcaaagaaatcaacgccgcttatgaaattttgagcgatgaagaaaaacgccgccaatacgatcaatttggcgacaacatgtttggcgggcagaatttcagcgattttgccagaagccgtggtcctagtgaagatttagatgatattttaagctctatttttgggaaaggaggcttttcgcaaagattttctcaaaattcgcaaggcttttctggctttaatttttccaatttcgcccctgaaaatttagatgtaaccgctattttaaatgtctctgttttagacacccttttaggcaataaaaaacaagtgagcgtcaataatgagacttttagccttaaaatccctatcggcgtggaagagggcgaaaagattagggttcgcaacaaagggaaaatggggcgaacgggtaggggcgatttgctcttacagatccatattgaagaagatgaaatgtataggcgcgaaaaagacgatattatccaaatctttgatttacccttaaaaacggctctttttggagggaaaattgaaatcgctacttggcataaaaccttaaccctaaccattccccctaacaccaaagccatgcaaaaattccgcatcaaagacaaagggatcaaaagcagaaaaacttcgcatgtgggggattgtattgcaagctcgtttgatctgctaaaattgaaacgcttctaa

SEQ ID NO: 2918 - DNA (genomic), 837 bp, Helicobacter pylori; double-stranded, circular
  misc_feature (B) LOCATION 1...837
  hypothetical: NO
  anti-sense: NO
atgagtaagagtttataccaaactttaaacgtgagcgaaaacgccagccaagatgaaatcaaaaaatcctaccgccgtttagccaggcaataccacccggatttgaataaaaccaaagaagccgaagagaaattcaaagaaatcaacgccgcttatgaaattttgagcgatgaagaaaaacgccgccaatacgatcaatttggcgacaacatgtttggcgggcagaatttcagcgattttgccagaagccgtggtcctagtgaagatttagatgatattttaagctctatttttgggaaaggaggcttttcgcaaagattttctcaaaattcgcaaggcttttctggctttaatttttccaatttcgcccctgaaaatttagatgtaaccgctattttaaatgtctctgttttagacacccttttaggcaataaaaaacaagtgagcgtcaataatgagacttttagccttaaaatccctatcggcgtggaagagggcgaaaagattagggttcgcaacaaagggaaaatggggcgaacgggtaggggcgatttgctcttacagatccatattgaagaagatgaaatgtataggcgcgaaaaagacgatattatccaaatctttgatttacccttaaaaacggctctttttggagggaaaattgaaatcgctacttggcataaaaccttaaccctaaccattccccctaacaccaaagccatgcaaaaattccgcatcaaagacaaagggatcaaaagcagaaaaacttcgcatgtgggggattgtattgcaagctcgtttgatctgcctaaaattgaaacgcttctaatgagttga

SEQ ID NO: 2919 - DNA (genomic), 264 bp, Helicobacter pylori; double-stranded, circular
  misc_feature (B) LOCATION 1...264
  hypothetical: NO
  anti-sense: NO
atgattatcctctcagcgagcgtgaagaatttgcgtgaaatttcggttaaagaaaaatttttatggctgaacgctaaatcttatttgatctctgtttttgcgccttttattttgctcccttggattgatttattgagcgcttttttattgtatttagggtttttagcactctttagcgtgctggaattttttgatgaagatattgcagatattattatcgctaaaagcaaaataaagactaaaaccaaatgttatagagcgtag

SEQ ID NO: 2920 - DNA (genomic), 300 bp, Helicobacter pylori; double-stranded, circular
  misc_feature (B) LOCATION 1...300
  hypothetical: NO
  anti-sense: NO
agccccgagtttggcgaattggtttatgggagttttttaatgattatcctctcagcgagcgtgaagaatttgcgtgaaatttcggttaaagaaaaatttttatggctgaacgctaaatcttatttgatctctgtttttgcgccttttattttgctcccttggattgatttattgagcgcttttttattgtatttagggtttttagcactctttagcgtgctggaattttttgatgaagatattgcagatattattatcgctaaaagcaaaataaagactaaaaccaaatgttatagagcg

SEQ ID NO: 2921 - DNA (genomic), 138 bp, Helicobacter pylori; double-stranded, circular
  misc_feature (B) LOCATION 1...138
  hypothetical: NO
  anti-sense: NO
atgggtatttttatcaattcacttttttataccaataaactttgttcaataagatttctaatagtcagcaagctagttttgaaagatgacaactttttaggcttggctagttgcgaaacgatgaaacaaattgcctaa

SEQ ID NO: 2922 - DNA (genomic), 180 bp, Helicobacter pylori; double-stranded, circular
  misc_feature (B) LOCATION 1...180
  hypothetical: NO
  anti-sense: NO
atctcatctctttattctttatgccaagtatttaatttcccattcatgggtatttttatcaattcacttttttataccaataaactttgttcaataagatttctaatagtcagcaagctagttttgaaagatgacaactttttaggcttggctagttgcgaaacgatgaaacaaattgcc

SEQ ID NO: 2923 - DNA (genomic), 255 bp, Helicobacter pylori; double-stranded, circular
  misc_feature (B) LOCATION 1...255
  hypothetical: NO
  anti-sense: NO
attagtatcaagtttttcactaaccaaatcgtcaaaaacgctaaaaaggattttccatcaaaccccccccaaaaaaacaaagaatttaaaaacaaagaatttaaaaacaaagaatttaaaaacaaagaatttaaaaacaaagaatttaaaaacaaagaatttaaaaacaaagaatttaaaaacaaagaatttaaaaacaaggcttcaaaacaaaacccccccaaaaaaaaagagagtttaaaagaaagactttaa

SEQ ID NO: 2924 - DNA (genomic), 246 bp, Helicobacter pylori; double-stranded, circular
  misc_feature (B) LOCATION 1...246
  hypothetical: NO
  anti-sense: NO
gagacggctaaaaagaacttgcaattgagcgcgcaagaaactgcatgcgtgggcgatgattataacgatttaggcatgtttaaggcatgcactttgagtttcgccccttttgatgcgcaccccttgcttaaaagcaaggcctataaagtgttgcaaaactcaggaggtaagggggctgttagggaagcgattgattatctcttagaattagaaggcttgcaagatgaagtgctcaagctttacctc

SEQ ID NO: 2925 - DNA (genomic), 243 bp, Helicobacter pylori; double-stranded, circular
  misc_feature (B) LOCATION 1...243
  hypothetical: NO
  anti-sense: NO
acggctaaaaagaacttgcaattgagcgcgcaagaaactgcatgcgtgggcgatgattataacgatttaggcatgtttaaggcatgcactttgagtttcgccccttttgatgcgcaccccttgcttaaaagcaaggcctataaagtgttgcaaaactcaggaggtaagggggctgttagggaagcgattgattatctcttagaattagaaggcttgcaagatgaagtgctcaagctttacctc

SEQ ID NO: 2926 - DNA (genomic), 270 bp, Helicobacter pylori; double-stranded, circular
  misc_feature (B) LOCATION 1...270
  hypothetical: NO
  anti-sense: NO
ggattttatgaaaaaatacaaccagaatgcggttttaacgagagaatgattaagttattgcttttagatgtggatggcacgctcacagacgggtcgttgtattttgatgagaattttcacgaaatcaaggcttttaatgtcaaagacgggcttggcatgacgctatggcaaaaattaggcaaaaaaatcgctatcattacaggaagaacttcaatcatggtgaaaaaacgcatggagagcttgggtgttcagtttgtttttatgggaggt

SEQ ID NO: 2927 - DNA (genomic), 495 bp, Helicobacter pylori; double-stranded, circular
  misc_feature (B) LOCATION 1...495
  hypothetical: NO
  anti-sense: NO
atgattaagttattgcttttagatgtggatggcacgctcacagacgggtcgttgtattttgatgagaattttcacgaaatcaaggcttttaatgtcaaagacgggcttggcatgacgctatggcaaaaattaggcaaaaaaatcgctatcattacaggaagaacttcaatcatggtgaaaaaacgcatggagagcttgggtgttcagtttgtttttatgggagttgaaaataaaaacgccgttatagagcggctcaaaaaagacttgcaattgagcgcgcaagaaatcgcatgcgtgggcgatgattataacgatttaggcatgtttaaggcatgcactttgagtttcgccccttttgatgcgcaccccttgcttaaaagcaaggcctataaagtgttgcaaaactcaggaggtaagggggctgttagggaagcgattgattatctcttagaattagaaggcttgcaagatgaagtgctcaagctttacctctaa

SEQ ID NO: 2928 - DNA (genomic), 162 bp, Helicobacter pylori; double-stranded, circular
  misc_feature (B) LOCATION 1...162
  hypothetical: NO
  anti-sense: NO
aaaaaatggcgaaagaaagtgaaaactaaagcgttttacacaagcttccgccaacattacaatacgctttttaatgaagtcaaacaaatcaaacctatccaatcagaacaaaaaaacgcactaaatgttggctacaaccctatatcacgctttctgtttgtt

SEQ ID NO: 2929 - DNA (genomic), 399 bp, Helicobacter pylori; double-stranded, circular
  misc_feature (B) LOCATION 1...399
  hypothetical: NO
  anti-sense: NO
aggctgatgcgagaaaagttcgtttatgtggagggcgaatcagacaaaatctttttaacgattttaaatgaggttaaaaatttaggccttaaagattctaatattatcaattgtgggagcaaggataagctttctgaagaagccgagagtattaaaggaaacctaaaagctaaggatatttacatcgtttttgattcagacaaccaaacaaaagagactaaaattcaagaaataaagaaacaactccaagaaaacacaaaacaagaacaccgcttaaatgatgaagagtttaaccagattaagatttttttattgccagaaaatgatgagactaaacaccaccccaattattgcgaattagagcctttactagaaaaaatggcgaaagaaagtgaaaac

SEQ ID NO: 2930 - DNA (genomic), 531 bp, Helicobacter pylori; double-stranded, circular
  misc_feature (B) LOCATION 1...531
  hypothetical: NO
  anti-sense: NO
atgcgagaaaagttcgtttatgtggagggcgaatcagacaaaatctttttaacgattttaaatgaggttaaaaatttaggccttaaagattctaatattatcaattgtgggagcaaggataagctttctgaagaagccgagagtattaaaggaaacctaaaagctaaggatatttacatcgtttttgattcagacaaccaaacaaaagagactaaaattcaagaaataaagaaacaactccaagaaaacacaaaacaagaacaccgcttaaatgatgaagagtttaaccagattaagatttttttattgccagaaaatgatgagactaaacaccaccccaattattgcgaattagagcctttactagaaaaaatggcgaaagaaagtgaaaataaagcgttttacacaagcttccgccaacattacaatacgctttttaatgaagtcaaacaaatcaaacctatccaatcagaacaaaaaaacgcactaaatgttggctacaaccctatatcacgctttctgtttgtttag

SEQ ID NO: 2931 - DNA (genomic), 327 bp, Helicobacter pylori; double-stranded, circular
  misc_feature (B) LOCATION 1...327
  hypothetical: NO
  anti-sense: NO
aaatcaccttatcgccatagtatatcttcacaggtttctgtagaaaacgatgaggaaattattgaagttgaaaagggcgaaaatcaaggggcgttttcttactttttaggcggccccacttgtttggcgggggattttatggggagttttagctttgaaacgcctttaaaaaggggcgataaaatcgtgtttcaagacatgctccattatacgatcgtgaaaaacaactcgtttaatggcgtgccactgccaagcctggctaaaatagattcgcaaggttttaagatcctcaaaagcttttcttatgaagattataaaaacaggaat

SEQ ID NO: 2932 - DNA (genomic), 432 bp, Helicobacter pylori; double-stranded, circular
  misc_feature (B) LOCATION 1...432
  hypothetical: NO
  anti-sense: NO
atgaccggtatgtggattacgcctagcggatttgaaaaaggagtcaaagagcatggcttagagggggtgagcgggttgcatttccatacgcattgcgagcaaaacgccgacgctttgtgccggactttagagcatgtggaaaggcatttcaagccttatttagaaaacatggcgtgggtgaattttggtggggggcatcatatcaccaggagcgattatgatgtgaatttgctcattcaaacgattaaggattttaaagaacgctaccacaatacagaagtgatcttagagcctggggaagtcatagggtggcaatgcgggttttcaatcgcaagcgtgatagatatcgttcaaaacgatcaagaaattgcgattttagacgcttcttttagcgctcacatgcccgattgcctagaaatcaccttatcgcca

SEQ ID NO: 2933 - DNA (genomic), 1218 bp, Helicobacter pylori; double-stranded, circular
  misc_feature (B) LOCATION 1...1218
  hypothetical: NO
  anti-sense: NO
atgaaaaaatacagcgctatccccaccccttgctatgcgctagagagcgaacgcttagaaaaaaacgccaagattttagaaatcgtgcgccagcaaagcggggcaaaggttttgctcgctttaaaagggtatgcgttttggcgtgagtttgggattttgaggcaaaaattgaacgggtgttgcgcgagcggtctttatgaggctaagctcgcttttgaagaatttggggggcgagagagccataaggaaatttgcgtttatagcccggcctttaaagaggctgaaatgagcgcgattttacccctagcgacaagcatcattttcaactcttttcaccaatacgccacctacaaagacaggattttagacaaaaacaagcagttagaaaacttgggcttaagccccattaaaatgggtttgaggattaaccccctttatagcgaagtaaccccagcgatctataacccatgctctaaaatgagccggttagggattacgcctagcggatttgaaaaaggagtcaaagagcatggcttagagggggtgagcgggttgcatttccatacgcattgcgagcaaaacgccgacgctttgtgccggactttagagcatgtggaaaggcatttcaagccttatttagaaaacatggcgtgggtgaattttggtggggggcatcatatcaccaggagcgattatgatgtgaatttgctcattcaaacgattaaggattttaaagaacgctaccacaatacagaagtgatcttagagcctggggaagccatagggtggcaatgcgggtttttaatcgcaagcgtgatagatatcgttcaaaacgatcaagaaattgcgattttagacgcttcttttagcgctcacatgcccgattgcctagaaatgccttatcgccctagtattcttaaggtttctgtagaaaacgatgaggaaattattgaagttgaaaagggcgaaaatcaaggggcgttttcttactttttaggcggccccacttgtttggcgggggattttatggggagttttagctttgaaacgcctttaaaaaggggcgataaaatcgtgtttcaagacatgctccattatacgatcgtgaaaaacaactcgtttaatggcgtgccactgccaagcctggctaaaatagattcgcaaggttttaagatcctcaaaagcttttcttatgaagattataaaaacaggaattaa

SEQ ID NO: 2934 - DNA (genomic), 273 bp, Helicobacter pylori; double-stranded, circular
  misc_feature (B) LOCATION 1...273
  hypothetical: NO
  anti-sense: NO
ttgatcaccaaagaaaaccctattagcagcaccacgcccacgcagaatagcgaatattttggctctttcaagcggttagcgatcctaaaaatcaaaacaatcatgacagaaaacaaaataaaacaaacgcataaccccaaaaacccccattcttcggcgatcccagctaaaaccatgtccgtatgcacttcgctcaaaaacccaagcttgatttgccctagcccaagcccttgccctaataaccccccattatgcatggcattgcctgcatga

SEQ ID NO: 2935 - DNA (genomic), 327 bp, Helicobacter pylori; double-stranded, circular
  misc_feature (B) LOCATION 1...327
  hypothetical: NO
  anti-sense: NO
ctcaaaaacggcaccgctaggcccttaaccggaaaaatcccacccaccccaaaggcgttgatcaccaaagaaaaccctattagcagcaccacgcccacgcagaatagcgaatattttggctctttcaagcggttagcgatcctaaaaatcaaaacaatcatgacagaaaacaaaataaaacaaacgcataaccccaaaaacccccattcttcggcgatcccagctaaaaccatgtccgtatgcacttcgctcaaaaacccaagcttgatttgccctagcccaagcccttgccctaataaccccccattatgcatggcattgcctgca

SEQ ID NO: 2936 - DNA (genomic), 714 bp, Helicobacter pylori; double-stranded, circular
  misc_feature (B) LOCATION 1...714
  hypothetical: NO
  anti-sense: NO
ttggaatttttaaagcgattaagctctagcgatttgaaagatttgtttgatgcgcttgtctatgatgaagatggcacactaagaatgaatgaagaattgacaagtttaacagaataccaaaggtatggccatgattacgccaaatacccaagaaggatcgctgaagaattgcagcgttatgggggcaatagttttgcgaatttttttagagatgaaggggtcttatacaaagagattttgtgcgatgcgtgcgatcatttggatattaattacaatgaaagatctgcaacctctttgattgagcaaaacatgctttctaaacttttgaaagatagtttagaaaaaatgagtgggagagagattaaagaactctgcgatggattgggcatgccaaatattgataaagtgattggtgaaaacaaacaagtcctaatcgcatctgttttaacgctgtttaaagcgggcggctctcattcttatgcgttggctgtagctgttgcagatgcaatggtaagacaaactctagggcatggtttatcgtctgtggtgggtaaagtagcgcttaaaaaaactctagacattttagctggccctattggttgggtcattacgggcgcgttagtgagcatcaatcttgctgggccggcttatagggtgaccgtgcctgcatgcgttttagttgccaccttacgcaaaaaattaaaagcagaataa

SEQ ID NO: 2937 - DNA (genomic), 744 bp, Helicobacter pylori; double-stranded, circular
  misc_feature (B) LOCATION 1...744
  hypothetical: NO
  anti-sense: NO
aggaataatataatatggcatacaaatagcgacttggaatttttaaagcgattaagctctagcgatttgaaagatttgtttgatgcgcttgtctatgatgaagatggcacactaagaatgaatgaagaattgacaagtttaacagaataccaaaggtatggccatgattacgccaaatacccaagaaggatcgctgaagaattgcagcgttatgggggcaatagttttgcgaatttttttagagatgaaggggtcttatacaaagagattttgtgcgatgcgtgcgatcatttggatattaattacaatgaaagatctgcaacctctttgattgagcaaaacatgctttctaaacttttgaaagatagtttagaaaaaatgagtgggagagagattaaagaactctgcgatggattgggcatgccaaatattgataaagtgattggtgaaaacaaacaagtcctaatcgcatctgttttaacgctgtttaaagcgggcggctctcattcttatgcgttggctgtagctgttgcagatgcaatggtaagacaaactctagggcatggtttatcgtctgtggtgggtaaagtagcgcttaaaaaaactctagacattttagctggccctattggttgggtcattacgggcgcgttagtgagcatcaatcttgctgggccggcttatagggtgaccgtgcctgcatgcgttttagttgccaccttacgcaaaaaattaaaagcagaa

SEQ ID NO: 2938 - DNA (genomic), 906 bp, Helicobacter pylori; double-stranded, circular
  misc_feature (B) LOCATION 1...906
  hypothetical: NO
  anti-sense: NO
ggggaagtcatggctgatagtttagcgggcattgatcaagttacgagtttacataaaaataacgagttgcaattgttgtgtttcaggctgggtaaaaacaaggatttgtatgcggtcaatgtctttaagatccgtgaagtggtgaaataccatggcaatctcactatcattagccacgaaaacaattcgctcgttgagggcttgatcattataagagagctcaccattcctttgattgacatgaaaaaatggttttattatgacagccaaaacaagagcaaggatttacgcccttacaggatacaaaaagaaaaaagcgaagacgatattgtcatgatttgtgagttttctcgctggaccataggggttaggatttatgaagcggataggatttcgagcaagaaatggactgagatggagcaaagcgctgggctacggggatctgctgggaataacaaactcgtgagccgcacgcgctattttgacgggcgcttggtgcaagtggtggatattgaaaaaatgcttatagacgtgttcccttggattgaagatgaaaaacacaacgatgtagagacgctttctaaaatccattctaaccaatgcgttttgctcgctgatgattccccaagcgtcttaaaaaccatgcaaatgattttagacaagctgggcgtcaagcacattgactttatcaatggtaaaaccttattagagcatttgttcaacccaacaaccgatgtgagtaatattgacctgattattaccgatttagaaatgccagaagcgagcggttttgaagtgatcaaccaggttaaaaacactcctttgacttcaacaatccccattgtggtcaattcttctatgagcgggagctcttatgaaaaaaatggcaagaatttgaatggccaa

SEQ ID NO: 2939 - DNA (genomic), 966 bp, Helicobacter pylori; double-stranded, circular
  misc_feature (B) LOCATION 1...966
  hypothetical: NO
  anti-sense: NO
atggctgatagtttagcgggcattgatcaagttacgagtttacataaaaataacgagttgcaattgttgtgtttcaggctgggtaaaaacaaggatttgtatgcggtcaatgtctttaagatccgtgaagtggtgaaataccatggcaatctcactatcattagccacgaaaacaattcgctcgttgagggcttgatcattataagagagctcaccattcctttgattgacatgaaaaaatggttttattatgacagccaaaacaagagcaaggatttacgcccttacaggatagaaaaagaaaaaggcgaagacgatattgtcatgatttgtgagttttctcgctggaccataggggttaggatctatgaagcggataggattttgagcaagaaatggactgaaatggagcaaagcgctgggctagggggatctgctgggaataacaaactcgtgagccgcacgcgctattttgacgggcgcttggtgcaagtggtggatattgaaaaaatgcttatagacgtgttcccttggattgaagatgaaaaacacaacgatttagagacgctttctaaaatccattctaaccaatgcgttttgctcgctgatgattccccaagcgtcttaaaaaccatgcaaatgattttagacaagctgggcgtcaagcacattgactttatcaatggtaaaaccttattagagcatttgttcaacccaacaaccgatgtgagtaatattggcctgattattaccgatttagaaatgccagaagcgagcggttttgaagtgatcaaacaggttaaaaacaatcctttgacttcaaaaatccccattgtggtcaattcttctatgagcggcagctctaatgaagacatggccaggagtttgaaggccgatgatttcatctccaagtctaaccctaaagacatccagcgggtggttaagcaatttttggaattagcatga

SEQ ID NO: 2940 - DNA (genomic), 333 bp, Helicobacter pylori; double-stranded, circular
  misc_feature (B) LOCATION 1...333
  hypothetical: NO
  anti-sense: NO
ctttcgaaatgccctgcgagcctgacttctgaaatggtcattttagggcgcagcaatgtaggcaaaagcacctttatcaatactctattaggaaaaaaccttgctaaaagctcagcgacgccgggaaaaacccgtttagcgaattttttttccaccacttgggaagataaagaaaacgccttaacgaccacttttaatgtgattgatttgcccgggtttggctacgctaaagtttctaaaagcttgaaaaaagaatgggaggggtttttatgggaattgttgagcgttaggttttctatcaagctttttatccatttgatagatgcgcgccat

SEQ ID NO: 2941 - DNA (genomic), 330 bp, Helicobacter pylori; double-stranded, circular
  misc_feature (B) LOCATION 1...330
  hypothetical: NO
  anti-sense: NO
tcgaaatgccctgcgagcctgacttctgaaatggtcattttagggcgcagcaatgtaggcaaaagcacctttatcaatactctattaggaaaaaaccttgctaaaagctcagcgacgccgggaaaaacccgtttagcgaattttttttccaccacttgggaagataaagaaaacgccttaacgaccacttttaatgtgattgatttgcccgggtttggctacgctaaagtttctaaaagcttgaaaaaagaatgggaggggtttttatgggaattgttgagcgttaggttttctatcaagctttttatccatttgatagatgcgcgccat

SEQ ID NO: 2942 - DNA (genomic), 627 bp, Helicobacter pylori; double-stranded, circular
  misc_feature (B) LOCATION 1...627
  hypothetical: NO
  anti-sense: NO
atgattgtcattaaagacgctcattttctcacttcttctaacaatctttcgcaatgccctgcgagcctgacttctgaaatggtcattttagggcgcagcaatgtaggcaaaagcacctttatcaatactctattaggaaaaaaccttgctaaaagctcagcgacgccgggaaaaacccgtttagcgaattttttttccaccacttgggaagataaagaaaacgccttaacgaccacttttaatgtgattgatttgcccgggtttggctacgctaaagtttctaaaagcttgaaaaaagaatgggaggggtttttatgggaattgttgagcgttagggtttctatcaagctttttatccatttgatagatgcgcgccatttggatttagaaattgacaaaaacgctaaagaaaacattcaagcccttttaaggcccgatcaagcttacctttctctttttacgaaatttgacaagttgaataaaaacgagcaacaccgcctttttttaaacgctcctaaaccttttttaatcaatactatccattttaacgccctttcttcaaaatacccaacccttgaaatagtgcgccaaaccctattaaaatacttgctcactaaccctttataa

SEQ ID NO: 2943 - DNA (genomic), 828 bp, Helicobacter pylori; double-stranded, circular
  misc_feature (B) LOCATION 1...828
  hypothetical: NO
  anti-sense: NO
atgcaagagtttttaggttttggtgtggtggggaattttgcagggcatttggagcaagcaggagagagtcatagttttattaacatgaaaagcgaagaaaaggacgcccctaaggggttgttccctttttatatcccgtatgagaattgctatttggggcgttgttgcattaataaccataagattattttgcctagtgatccagatttaagggtgcaagcagagccagaaatcgctttagaatgcgatgttaaatatgatgaaaaacatttggtaaccaagcttgtgcctaattttttcatggcgtttaatgacgcttctgtgcgcaatttagaagccacaaagctctcccaaaaaaagaatttttcaccagcttctaaaggtatagggcagaaattgcctattgacaggtttgtttatgggggggtgtgtaacaatttttctatcgcgtcttttttgaaatacgacaatgtttggcacatctatggggaaaacagcaaattgctcaaatacgagtttttttatcaaaagcttttagattggatcaaaaaccaactaaaccaccaacaagatggcgattctttagaggctctaagaccttttttagagcgccataatttccctaccaaaatgatttttgcgattggggctaccccttatatgccttttgcgcaagagcattttttacaaaaaggcgatgaggtggtgattgttgcttacaaccatttacaatatagttttgaaaagattcaaaacctcttagaagaggacgccctacaaaccaaagaacacgctaatctttcttatgtctatcaaatcgtagagtag

SEQ ID NO: 2944 - DNA (genomic), 834 bp, Helicobacter pylori; double-stranded, circular
  misc_feature (B) LOCATION 1...834
  hypothetical: NO
  anti-sense: NO
gaggtttgcatgcaagagtttttaggttttggtgtggtggggaattttgcagggcatttggagcaagcaggagagagtcatagttttattaacatgaaaagcgaagaaaaggacgcccctaaggggttgttccctttttatatcccgtatgagaattgctatttggggcgttgttgcattaataaccataagattattttgcctagtgatccagatttaagggtgcaagcagagccagaaatcgctttagaatgcgatgttaaatatgatgaaaaacatttggtaaccaagcttgtgcctaattttttcatggcgtttaatgacgcttctgtgcgcaatttagaagccacaaagctctcccaaaaaaagaatttttcaccagcttctaaaggtatagggcagaaattgcctattgacaggtttgtttatgggggggtgtgtaacaatttttctatcgcgtcttttttgaaatacgacaatgtttggcacatctatggggaaaacagcaaattgctcaaatacgagtttttttatcaaaagcttttagattggatcaaaaaccaactaaaccaccaacaagatggcgattctttagaggctctaagaccttttttagagcgccataatttccctaccaaaatgatttttgcgattggggctaccccttatatgccttttgcgcaagagcattttttacaaaaaggcgatgaggtggtgattgttgcttacaaccatttacaatatagttttgaaaagattcaaaacctcttagaagaggacgccctacaaaccaaagaacacgctaatctttcttatgtctatcaaatcgtagag

SEQ ID NO: 2945 - DNA (genomic), 765 bp, Helicobacter pylori; double-stranded, circular
  misc_feature (B) LOCATION 1...765
  hypothetical: NO
  anti-sense: NO
atgtttattgatacgcattgccatttggatcacaaggactatgaaaacgatttagatgaagtgttaaaagagagtttagaaaaaggcgttacccaatgcgtgattccgggcgcggacatgaaagatttgaatagagcggtaggaattagcgaaaaatttgaaggcgtgttttttgccataggcgctcacccttatgatgtggaaagctttgatgaaggcttgtttgaaaagtttgtcagccatcaaaaatgcgtggcgataggcgaatgcggactggattactaccgcttgcctgaattgagcgaaagagaaaattataaaagcaaacaaaaagaaattttcaccaaacagattgaattttctatccaacacaacaagcccttgattatccacatcagagaggcgagttttgatagtttgaatcttttaaaaagctatcctaaagcttttggggtgttgcattgctttaacgctgatagcatgcttttggaattaagcgatcgtttttactatgggataggaggggttagcacttttaaaaacgctaaaagactggtagagatcctccctaaaatccctaaaaacaggcttcttttagaaacggattcgccttatctaaccccacacccttttagaggcactaggaatagccccacttatatccctttaatcgctcaaaaaattgccgaaattatccacatagaaactgaagagctcgcttctttaagcacgcataacgctcaaacgctctttaacttcccctaa

SEQ ID NO: 2946 - DNA (genomic), 771 bp, Helicobacter pylori; double-stranded, circular
  misc_feature (B) LOCATION 1...771
  hypothetical: NO
  anti-sense: NO
gataaaagcatgtttattgatacgcattgccatttggatcacaaggaccatgaaaacgatttagatgaagtgttaaaagagagtttagaaaaaggcgttacccaatgcgtgattccgggcgcggacatgaaagatttgaatagagcggtaggaattagcgaaaaatttgaaggcgtgttttttgccataggcgctcacccttatgatgtggaaagctttgatgaaggcttgtttgaaaagtttgtcagccatcaaaaatgcgtggcgataggcgaatgcggactggattactaccgcttgcctgaattgagcgaaagagaaaattataaaagcaaacaaaaagaaattttcaccaaacagattgaattttctatccaacacaacaagcccttgattatccacatcagagaggcgagttttgatagtttgaatcttttaaaaagctatcctaaagcttttggggtgttgcattgctttaacgctgatagcatgcttttggaattaagcgatcgtttttactatgggataggaggggttagcacttttaaaaacgctaaaagactggtagagatcctccctaaaatccctaaaaacaggcttcttttagaaacggattcgccttatctaaccccacacccttttagaggcactaggaatagccccacttatatccctttaatcgctcaaaaaattgccgaaattatccacatagaaactgaagagctcgcttctttaagcacgcataacgctcaaacgctctttaacttcccc

SEQ ID NO: 2947 - DNA (genomic), 234 bp, Helicobacter pylori; double-stranded, circular
  misc_feature (B) LOCATION 1...234
  hypothetical: NO
  anti-sense: NO
atgcaaaaagaagtcttagtagaaaaacctaatccattaaccatttcttacaacttagaacaagctatctctaaattgaaagagagtgtggttttattagagaaaaacgagcaatataatgatgcttatgcccttgtttgtggtatcaaaaacactgtagatgaatttcataaagatgtaactttgcatgtaagtaataattctaagccccctaaaagaaaaagaaagtcttaa

SEQ ID NO: 2948 - DNA (genomic), 234 bp, Helicobacter pylori; double-stranded, circular
  misc_feature (B) LOCATION 1...234
  hypothetical: NO
  anti-sense: NO
atgcaaaaagaagtcttagtagaaaaacctaatccattaaccatttcttacaacttagaacaagctatctctaaattgaaagagagtgtggttttattagagaaaaacgagcaatataatgatgcttatgcccttgtttgtggtatcaaaatcattgtagatgaatttcataaagatgtaactttgcatgtaagtaataattctaagccccctaaaagaaaaagaaagtcttaa

SEQ ID NO: 2949 - DNA (genomic), 234 bp, Helicobacter pylori; double-stranded, circular
  misc_feature (B) LOCATION 1...234
  hypothetical: NO
  anti-sense: NO
atgcaaaaagaagtcttagtagaaaaacctaatccattaaccatttcttacaacttagaacaagctatctctaaattgaaagagagtgtggttttattagagaaaaacgagcaatataatgatgcttatgcccttgtttgtggtatcaaaagcattgtagatgaatttcataaagatgtaactttgcatgtaagtaataattctaagccccctaaaagaaaaagaaagtcttaa

SEQ ID NO: 2950 - DNA (genomic), 258 bp, Helicobacter pylori; double-stranded, circular
  misc_feature (B) LOCATION 1...258
  hypothetical: NO
  anti-sense: NO
ttcattttacgcttaaaaggaaaaaatatgcaaaaagaagtcttagtagaaaaacctaatccattaaccatttcttacaacttagaacaagctatctctaaattgaaagagagtgtggttttattagagaaaaacgagcaatataatgatgcttatgcccttgtttgtggtatcaaaatcattgtagatgaatttcataaagatgtaactttgcatgtaagtaataattctaagccccctaaaagaaaaagaaagtct

SEQ ID NO: 2951 - DNA (genomic), 282 bp, Helicobacter pylori; double-stranded, circular
  misc_feature (B) LOCATION 1...282
  hypothetical: NO
  anti-sense: NO
tttttgtttctatcaaacagccatttcattttacgcttaaaaggaaaaaatatgcaaaaagaagtcttagtagaaaaacctaatccattaaccatttcttacaacttagaacaagctatctctaaattgaaagagagtgtggttttattagagaaaaacgagcaatataatgatgcttatgcccttgtttgtggtatcaaaagcattgtagatgaatttcataaagatgtaactttgcatgtaagtaataattctaagccccctaaaagaaaaagaaagtct

SEQ ID NO: 2952 - DNA (genomic), 786 bp, Helicobacter pylori; double-stranded, circular
  misc_feature (B) LOCATION 1...786
  hypothetical: NO
  anti-sense: NO
ttggtgaattattggacaaagctaagcatagaatacgctaatcaacgctcctatttggatgacttgtttcaagtatatcctacaattccagaaggtttgagagagattgattcaaaaatttggtctaatgttgaatatcattttaaacgaaaagataatttagccttaataactgaattgcttaatttagatttattccctattaaagatagttatatggcttatttaaaacgggataaaagtgccttagaacgcaatccaagaacaattaatcgtatttgtgggagattgtatgaaatggggcttaataaaatttttgaaaaatgcagtgaaccaaaagaaacaaaccgccaaatcggtcctatgtttaaagattggatcaataataaatctttaggtgttgagcctgtagatttaaatgattttatagcgaatgaaaacgatgccattttaaaagcaagcgataatgtcatggcagaatttgccaaatctcatttaaattatcaccatcataaagggctagactttgtggcaaggtttaacaaaaaatacattattggcgaagccaaatttttaactgattttggaggacaccaaaacgctcaatttaacgacgctatcaacacaattgaaacgcccaacatcaaagcgattaaagtagctattttagatggcgtattatatattgaaagcaataataaaatgcgtaaattgctagatactacttatagaaactatcatattatgagcgcgttagtgctacgagaatttttataccaaatttaa

SEQ ID NO: 2953 - DNA (genomic), 843 bp, Helicobacter pylori; double-stranded, circular
  misc_feature (B) LOCATION 1...843
  hypothetical: NO
  anti-sense: NO
aaatttaagcaatatttttgttacaatccatgcagtgaaactattttcaaaaaggttaaattggtgaattattggacaaagctaagcatagaatacgctaatcaacgctcctatttggatgacttgtttcaagtatatcctacaattccagaaggtttgagagagattgattcaaaaatttggtctaatgttgaatatcattttaaacgaaaagataatttagccttaataactgaattgcttaatttagatttattccctattaaagatagttatatggcttatttaaaacgggataaaagtgccttagaacgcaatccaagaacaattaatcgtatttgtgggagattgtatgaaatggggcttaataaaatttttgaaaaatgcagtgaaccaaaagaaacaaaccgccaaatcggtcctatgtttaaagattggatcaataataaatctttaggtgttgagcctgtagatttaaatgattttatagcgaatgaaaacgatgccattttaaaagcaagcgataatgtcatggcagaatttgccaaatctcatttaaattatcaccatcataaagggctagactttgtggcaaggtttaacaaaaaatacattattggcgaagccaaatttttaactgattttggaggacaccaaaacgctcaatttaacgacgctatcaacacaattgaaacgcccaacatcaaagcgattaaagtagctattttagatggcgtattatatattgaaagcaataataaaatgcgtaaattgctagatactacttatagaaactatcatattatgagcgcgttagtgctacgagaatttttataccaaatt

SEQ ID NO: 2954 - DNA (genomic), 303 bp, Helicobacter pylori; double-stranded, circular
  misc_feature (B) LOCATION 1...303
  hypothetical: NO
  anti-sense: NO
atggattttagtcaattgggcgggttaagcgggttattagacggcgtgaaaaaagatttttcccaactagaagaaaagaataaagacacgatccacacttccaaaagcggtgggggaatggtgagcgtgagttttaatgggttgggggagttggtggatttgcaaattgatgacagcctgttagaagataaagaagcgatgcaaatctatttgatgagcgctttgaatgacgggtataaagccgtagaagaaaaccgaaagaatttagcctttaacatgctagggaattttgccaagttgtga

SEQ ID NO: 2955 - DNA (genomic), 1698 bp, Helicobacter pylori; double-stranded, circular
  misc_feature (B) LOCATION 1...1698
  hypothetical: NO
  anti-sense: NO
atgttattgaattacgattttttagaattggttgatgatgagccacaaaggaacacttccttgacatcagctattgataaggcgttagcggacaagaaattagctagacaaaataaacctagagtgagagtgaaagataacttatctttaagcgaaactttagacgcttatggcagagaactctcacgacttaaaaaccaacaagagactattaaagcttccacgattgaaagctctaatctcaatagcattgtcaataaaatcaaaagcggactaccttttgggactatctcggcgtttagaccttttaaggaagcttttattaaagactttacacaagatgaacgagaattattggtagaagcttataaaagcggttataaggcatctcaattagacaaagtatctaaaaaatggagggacgaccctaaccccatagacgcttcttatcttgctgacgcctttttgagagagtataggactatcgctctcaaactatccacagcattaggtaagccttttgttaataaattcttaaatcctaaaagtgaaaccacaatgaaagactttatgtctagtgagaaatttgttaaaaaataccgcttcactcaaaaagacaatattaaaaggacacaagagctaaaatctctattagaccaaaagagacactttttaggttatctacaagtaacaggttattggaaagataagttaaatgacccattattaccaagcaaagaagttagtttctttgtgtttcaaaacgaacctagtaactcctttaacttgaaagaccaattattagatttggcaaagtatttcaatcaagaggcgatttgttattgtcaaaacgccgagactggaaaagtagatttagtattagcgacagaaaaggattttggtaaagtggatatgactttcacagggattacattcactatccctttaacccaatctatcacacgcttacacaataaagtctatacattctttgataaacaaggtaaggacaattatggcgtattctttgatgagctttctacgacaaaattaaaagcgatgagtattccaaagattgctgatgagttttatagacaccttgaaaacagggttaaaagttttattagagcaaggcaatatcatggcagtcctagaacttttgatgctgatgacatagagaaatacgagctacaagcgattaaaagactagatttacaaagatgcgctaaaagtaaaagttttaaagcaagctataaccacaatattaaaatcaataaccttgccaacgctttacgacaaggcaaagaagtgagtaagacattgattactaaagtgcttgctaacaccatagacaccgatgcggggtattgctttatctcagatttagcgacacagcttggtaacatcagtcctagactatccaagagtatcgtaaccgccatagagcaagcagagggcattagactactctatgcgttaattgacaaggtatcgtataactcgctccacaataccttgaatttcatctttgatattgataaccctatgagcgaccaatcattaaacgagttagtggttgaagtcccaagagaagcgttaaagaatgtgaagttaccacaaatcaaaaatgaattgacttctcaaatctttgatggggcttatcagtttagaggtaacgactatcaatttaaaggttaa

SEQ ID NO: 2956 - DNA (genomic), 1746 bp, Helicobacter pylori; double-stranded, circular
  misc_feature (B) LOCATION 1...1746
  hypothetical: NO
  anti-sense: NO
aggctcaaagataaagcgctacaatctcgcttaaagcaaaaggacacgataatgttattgaattacgattttttagaattggttgatgatgagccacaaaggaacacttccttgacatcagctattgataaggcgttagcggacaagaaattagctagacaaaataaacctagagtgagagtgaaagataacttatctttaagcgaaactttagacgcttatggcagagaactctcacgacttaaaaaccaacaagagactattaaagcttccacgattgaaagctctaatctcaatagcattgtcaataaaatcaaaagcggactaccttttgggactatctcggcgtttagaccttttaaggaagcttttattaaagactttacacaagatgaacgagaattattggtagaagcttataaaagcggttataaggcatctcaattagacaaagtatctaaaaaatggagggacgaccctaaccccatagacgcttcttatcttgctgacgcctttttgagagagtataggactatcgctctcaaactatccacagcattaggtaagccttttgttaataaattcttaaatcctaaaagtgaaaccacaatgaaagactttatgtctagtgagaaatttgttaaaaaataccgcttcactcaaaaagacaatattaaaaggacacaagagctaaaatctctattagaccaaaagagacactttttaggttatctacaagtaacaggttattggaaagataagttaaatgacccattattaccaagcaaagaagttagtttctttgtgtttcaaaacgaacctagtaactcctttaacttgaaagaccaattattagatttggcaaagtatttcaatcaagaggcgatttgttattgtcaaaacgccgagactggaaaagtagatttagtattagcgacagaaaaggattttggtaaagtggatatgactttcacagggattacattcactatccctttaacccaatctatcacacgcttacacaataaagtctatacattctttgataaacaaggtaaggacaattatggcgtattctttgatgagctttctacgacaaaattaaaagcgatgagtattccaaagattgctgatgagttttatagacaccttgaaaacagggttaaaagttttattagagcaaggcaatatcatggcagtcctagaacttttgatgctgatgacatagagaaatacgagctacaagcgattaaaagactagatttacaaagatgcgctaaaagtaaaagttttaaagcaagctataaccacaatattaaaatcaataaccttgccaacgctttacgacaaggcaaagaagtgagtaagacattgattactaaagtgcttgctaacaccatagacaccgatgcggggtattgctttatctcagatttagcgacacagcttggtaacatcagtcctagactatccaagagtatcgtaaccgccatagagcaagcagagggcattagactactctatgcgttaattgacaaggtatcgtataactcgctccacaataccttgaatttcatctttgatattgataaccctatgagcgaccaatcattaaacgagttagtggttgaagtcccaagagaagcgttaaagaatgtgaagttaccacaaatcaaaaatgaattgacttctcaaatctttgatggggcttatcagtttagaggtaacgactatcaatttaaaggt

SEQ ID NO: 2957 - DNA (genomic), 273 bp, Helicobacter pylori; double-stranded, circular
  misc_feature (B) LOCATION 1...273
  hypothetical: NO
  anti-sense: NO
atgaaaatgcatcaaatacccacccccaccatgtcgcaagtgatcatgcttaatgactccattacgacagcggaatttatggtttctgctttaagggatttttttgacaagcctttagaagaagctcaaaaactcatgctaagcatccatcgtgatggcgatggggtttgtggcgtttatccttatgaaatcgccatatataaggcggtatgcgtgagggacaaagccagagcaagattccctttaagattaatggtacaagaggtaaaataa

SEQ ID NO: 2958 - DNA (genomic), 282 bp, Helicobacter pylori; double-stranded, circular
  misc_feature (B) LOCATION 1...282
  hypothetical: NO
  anti-sense: NO
tcgctaagtagcatgaaaatgcatcaaatacccacccccaccatgtcgcaagtgatcatgcttaatgactccattacgacagcggaatttatggtttctgctttaagggatttttttgacaagcctttagaagaagctcaaaaactcatgctaagcatccatcgtgatggcgatggggtttgtggcgtttatccttatgaaatcgccatatataaggcggtatgcgtgagggacaaagccagagcaagattccctttaagattaatggtacaagaggtaaaa

SEQ ID NO: 2959 - DNA (genomic), 993 bp, Helicobacter pylori; double-stranded, circular
  misc_feature (B) LOCATION 1...993
  hypothetical: NO
  anti-sense: NO
atgaaaagaatgttagcggagtttgaaaaaatccaagcgatcttaatggcgttcccccatgagtttggcgactgggcgtattgtattgaagaggccagggagagctttttacacatcattcaaaccatagccaaacacgctaaagtgttggtgtgcgtccatactaacgacactatcggttatgaaacgcttaaaaacttacccggtgtagagatcgcaagaattgacaccaacgacacatgggctagggattttggagcgatcagcgttgaaaatcatggcgttttagagtgcttggattttggctttaatggctgggggttaaaatacccgtccaatttagacaatcaagtgaatttcaagctcaaacatttaggttttttaaaacaccctttaaaaacgatgccctatattttagagggcgggagcatagaaagcgatggggccgggagcattttaaccaacacccaatgcctgctagaaaaaaatcgtaacccccatttgaatcaaaatggaatagaaaccatgcttaaaaaggaattaggggctaaacaagtgctgtggtattcttatggctatctaaaaggcgatgatacggatagccataccgacacgctcgctcgttttttaaataaagacaccattgtttatagcgcatgcgaagatgaaaacgatgagcattacacagccttaaaaaaaatgcaagaagaattaaaaacctttaaaaaactagacggcacgccttataaactcatccccctagaaatccctaaagccgtttataatgaaaaccaacaacgcttaccggcaacttatgtgaattttttattgtgcaataacgctctgattgtccccacttacaacgaccctaatgatacgctcattttagaaaccttaagacaacacacgcccttagaagtgataggggttgattgtaatactttaatcaaacagcatgggagtttgcattgtgtaacgatgcaactttattga

SEQ ID NO: 2960 - DNA (genomic), 1011 bp, Helicobacter pylori; double-stranded, circular
  misc_feature (B) LOCATION 1...1011
  hypothetical: NO
  anti-sense: NO
ttgcttaaaaggatatttttaatgaaaagaatgttagcggagtttgaaaaaatccaagcgatcttaatggcgttcccccatgagtttggcgactgggcgtattgtattgaagaggccagggagagctttttacacatcattcaaaccatagccaaacacgctaaagtgttggtgtgcgtccatactaacgacactatcggttatgaaacgcttaaaaacttacccggtgtagagatcgcaagaattgacaccaacgacacatgggctagggattttggagcgatcagcgttgaaaatcatggcgttttagagtgcttggattttggctttaatggctgggggttaaaatacccgtccaatttagacaatcaagtgaatttcaagctcaaacatttaggttttttaaaacaccctttaaaaacgatgccctatattttagagggcgggagcatagaaagcgatggggccgggagcattttaaccaacacccaatgcctgctagaaaaaaatcgtaacccccatttgaatcaaaatggaatagaaaccatgcttaaaaaggaattaggggctaaacaagtgctgtggtattcttatggctatctaaaaggcgatgatacggatagccataccgacacgctcgctcgttttttaaataaagacaccattgtttatagcgcatgcgaagatgaaaacgatgagcattacacagccttaaaaaaaatgcaagaagaattaaaaacctttaaaaaactagacggcacgccttataaactcatccccctagaaatccctaaagccgtttataatgaaaaccaacaacgcttaccggcaacttatgtgaattttttattgtgcaataacgctctgattgtccccacttacaacgaccctaatgatacgctcattttagaaaccttaagacaacacacgcccttagaagtgataggggttgattgtaatactttaatcaaacagcatgggagtttgcattgtgtaacgatgcaactttat

SEQ ID NO: 2961 - DNA (genomic), 297 bp, Helicobacter pylori; double-stranded, circular
  misc_feature (B) LOCATION 1...297
  hypothetical: NO
  anti-sense: NO
gtgttttttgtggggtgtagtggtagtgaaaaacccccaatagacattgaagtaactttcagtaggtatggtcacggtctttattggatagacatcatttcaaatgttgatagtatcactatattattgagcgcaaaaatcaatcgtgggaattgtgataacgatagacttccttatttcaagattaataaaacgctaaaatttggcgatagctatcaattttatatacttcgttgtcagcatataaaggaagttagtataaagactgataaagggacttggaattttggaaagtaa

SEQ ID NO: 2962 - DNA (genomic), 315 bp, Helicobacter pylori; double-stranded, circular
  misc_feature (B) LOCATION 1...315
  hypothetical: NO
  anti-sense: NO
gcggtcatttttgggtttgctgtgttttttgtggggtgtagtggtagtgaaaaacccccaatagacattgaagtaactttcagtaggtatggtcacggtctttattggatagacatcatttcaaatgttgatagtatcactatattattgagcgcaaaaatcaatcgtgggaattgtgataacgatagacttccttatttcaagattaataaaacgctaaaatttggcgatagctatcaattttatatacttcgttgtcagcatataaaggaagttagtataaagactgataaagggacttggaattttggaaag

SEQ ID NO: 2963 - DNA (genomic), 414 bp, Helicobacter pylori; double-stranded, circular
  misc_feature (B) LOCATION 1...414
  hypothetical: NO
  anti-sense: NO
atgaatattttatttgggattagcgacacgcaagaatgctacaacgctattaaattcgctgtcaaattagcccattcgcttaaagaggttcgtttcactctattgcatgtgagcatggaagtgtttatttatagcgaaagcgggatgatggattatggccaaacagaagccttagaagaagaaaaggctaaggctttgttaaagcaatttgaagacgctttcaaaaaagaaaatatagagtgtgagagcgttttaaagagcggtgatttgattgatgtggtcttggatatggctaaggattatgatttgttattgatcggggcgagcgagtctaatttattgtatcgtttgttcatttcgcaccaaaatagccttgttgagcaatccagtatccctgttgtgatcgctaagtag

SEQ ID NO: 2964 - DNA (genomic), 456 bp, Helicobacter pylori; double-stranded, circular
  misc_feature (B) LOCATION 1...456
  hypothetical: NO
  anti-sense: NO
ggtttatttggtataatatcaaaacttcatttaaggttggttcttatgaatattttatttgggattagcgacacgcaagaatgctacaacgctattaaattcgctgtcaaattagcccattcgcttaaagaggttcgtttcactctattgcatgtgagcatggaagtgtttatttatagcgaaagcgggatgatggattatagccaaacagaagccttagaagaagaaaaggctaaggctttgttaaagcaatttgaagacgctttcaaaaaagaaaatatagagtgtgagagcgttttaaagagcggtgatttgattgatgtggtcttggatatggctaaggattatgatttgttattgatcggggcgagcgagtctaatttattgtatcgtttgttcatttcgcaccaaaatagccttgttgagcaatccagtatccctgttgtgatcgctaag

SEQ ID NO: 2965 - DNA (genomic), 471 bp, Helicobacter pylori; double-stranded, circular
  misc_feature (B) LOCATION 1...471
  hypothetical: NO
  anti-sense: NO
atgctttatattccacccacttcaaaagaagtctatgttagctctattgtggctttaaatatccatagcccacaaggcacaggagattggcatagtagctatgctttaatggagaatgcgtttgatgatataggggtttatatctatggtgaaaaacaagctcataatactaataaactactaggcaatctaggcattatagatggcacagcaaggctcaataaaatgggctattaccctaaacatactcccacttatattgcagagcatccaagagcttgtgtagattgtctctatgtttctgtattgcaaactggaaagctaggggttgttatgctagatgaatggtttcctagtattgaagataaagagagtgtctatgctcttatagaagtgatgaaacccaaattaaacaagcaagaaagagagaatttggataaatggatagcaaaaaaccccattatagagtga

SEQ ID NO: 2966 - DNA (genomic), 492 bp, Helicobacter pylori; double-stranded, circular
  misc_feature (B) LOCATION 1...492
  hypothetical: NO
  anti-sense: NO
ttaaaactaatgagggagtttagcatgctttatattccacccacttcaaaagaagtctatgttagctctattgtggctttaaatatccatagcccacaaggcacaggagattggcatagtagctatgctttaatggagaatgcgtttgatgatataggggtttatatctatggtgaaaaacaagctcataatactaataaactactaggcaatctaggcattatagatggcacagcaaggctcaataaaatgggctattaccctaaacatactcccacttatattgcagagcatccaagagcttgtgtagattgtctctatgtttctgtattgcaaactggaaagctaggggttgttatgctagatgaatggtttcctagtattgaagataaagagagtgtctatgctcttatagaagtgatgaaacccaaattaaacaagcaagaaagagagaatttggataaatggatagcaaaaaaccccattatagag

SEQ ID NO: 2967 - DNA (genomic), 849 bp, Helicobacter pylori; double-stranded, circular
  misc_feature (B) LOCATION 1...849
  hypothetical: NO
  anti-sense: NO
atgccaaccattgattttactttttgtgagattaaccctaaaaaaggttttgggggagcaaatggaaataaaattagcttattttataataatgaactctacatggtcaaattcccccctaagccttctacacataaagaaatgtcctataccaatggttgttttagtgaatatgtagcatgtcatatagtcaatagcttaggcttaaaggttcaagaaacattgctaggcacttataaaaataaaatcgtggttgcttgtaaagattttaccacccatcaatacgagcttgtagattttctaagtctaaaaaatactatgattgaattagaaaaatcaggcaaagacactaatttgaatgatgtgctttatgccatagataaccagcattttattgagccaaaagttttaaaatgtttcttttgggatatgtttgtagcagatacattgctaggtaattttgataggcataatggtaattgggggttcttaagagcctcaaattcaaaagaatatcaaatagctcccatttttgattgtggctcttgtctatacccccaagctgatgatgtggtatgccaaaaagttttaagtaatattgatgaactcaatgcaaggatttataatttcccccaatctatcttaaaagatgacaacgataaaaaaattaactactatgatttcttaactcaaaccaataataaagattgccttgatgcactacttaggatatacccacgcatagatatgaataaaatccattcaattattgataacacaccctttatgagcgaaatacacaaagaatttttacctacaatgcttgatgaaagaaaatcaagattatag

SEQ ID NO: 2968 - DNA (genomic), 978 bp, Helicobacter pylori; double-stranded, circular
  misc_feature (B) LOCATION 1...978
  hypothetical: NO
  anti-sense: NO
atgccaaccattgattttactttttgtgagattaaccctaaaaaaggttttgggggagcaaatggaaataaaattagcttattttataataatgaactctacatggtcaaattcccccctaagccttctacacataaagaaatgtcctataccaatggttgttttagtgaatatgtagcatgtcatatagtcaatagcttaggcttaaaggttcaagaaacattgctaggcacttataaaaataaaatcgtggttgcttgtaaagattttaccacccatcaatacgagcttgtagattttctaagtctaaaaaatactatgattgaattagaaaaatcaggcaaagacactaatttgaatgatgtgctttatgccatagataaccagcattttattgagccaaaagttttaaaatgtttcttttgggatatgtttgtagcagatacattgctaggtaattttgataggcataatggtaattgggggttcttaagagcctcaaattcaaaagaatatcaaatagctcccatttttgattgtggctcttgtctatacccccaagctgatgatgtggtatgccaaaaagttttaagtaatattgatgaactcaatgcaaggatttataatttcccccaatctatcttaaaagatgacaacgataaaaaaattaactactatgatttcttaactcaaaccaataataaagattgccttgatgcactacttaggatatacccacgcatagatatgaataaaatccattcaattattgataacacaccctttatgagcgaaatacacaaagaatttttacatacaatgcttgatgaaagaaaatcaaagattatagatgtagcacacactagagctattgagttatccttacaacacaaacaagctcactcaaacccttatgacaacgcagatgatttagacaattccaatgaatacacccccacacctaagcgtagacgataa

SEQ ID NO: 2969 - DNA (genomic), 978 bp, Helicobacter pylori; double-stranded, circular; identical to SEQ ID NO: 2968
  misc_feature (B) LOCATION 1...978
  hypothetical: NO
  anti-sense: NO

SEQ ID NO: 2970 - DNA (genomic), 1056 bp, Helicobacter pylori; double-stranded, circular
  misc_feature (B) LOCATION 1...1056
  hypothetical: NO
  anti-sense: NO
caaataataataatctcttatagctcatgtttgtgttataatctatctaataatccattactaataataaaaggacagcttatgccaaccattgattttactttttgtgagattaaccctaaaaaaggttttgggggagcaaatggaaataaaattagcttattttataataatgaactctacatggtcaaattcccccctaagccttctacacataaagaaatgtcctataccaatggttgttttagtgaatatgtagcatgtcatatagtcaatagcttaggcttaaaggttcaagaaacattgctaggcacttataaaaataaaatcgtggttgcttgtaaagattttaccacccatcaatacgagcttgtagattttctaagtctaaaaaatactatgattgaattagaaaaatcaggcaaagacactaatttgaatgatgtgctttatgccatagataaccagcattttattgagccaaaagttttaaaatgtttcttttgggatatgtttgtagcagatacattgctaggtaattttgataggcataatggtaattgggggttcttaagagcctcaaattcaaaagaatatcaaatagctcccatttttgattgtggctcttgtctatacccccaagctgatgatgtggtatgccaaaaagttttaagtaatattgatgaactcaatgcaaggatttataatttcccccaatctatcttaaaagatgacaacgataaaaaaattaactactatgatttcttaactcaaaccaataataaagattgccttgatgcactacttaggatatacccacgcatagatatgaataaaatccattcaattattgataacacaccctttatgagcgaaatacacaaagaatttttacatacaatgcttgatgaaagaaaatcaaagattatagatgtagcacacactagagctattgagttatccttacaacacaaacaagctcactcaaacccttatgacaacgcagatgatttagacaattccaatgaatacacccccacacctaagcgtagacga

SEQ ID NO: 2971 - DNA (genomic), 726 bp, Helicobacter pylori; double-stranded, circular
  misc_feature (B) LOCATION 1...726
  hypothetical: NO
  anti-sense: NO
ttgagcgattcgctttttccggcgttagaagcgttttgtttgaacttaaagcaaagcttgcaaagcgagtttgattttttctacctttcacgcaatctggcttcaaaagactggctagaaccctacaaacaagctgttttaccggtgcgatgcgccaaattttacatacaccctagctggcatcaaaaaccaagccatgccgctatagacgattgcataatgatcgatccggctttggcctttggatcaggccatcatgaaagcacttccatgtgtttggaattgctctctagccttgatttaaaacgcaaaaacgctttagatgtgggctgtgggagcgggattttaagcatcgccttaaaaaaacaaggcgttagcgctttaaccgcttgcgatacggatagtttggccgttgaagaaaccctaaaaaattttagcctgaatcaaatacccctattagcgcaagataaagtcatttatggatccacgcaaaaaattgaagggcgttttgatataattgtggcgaatcttgtcgctgatgtgattaagagtttgtatagtgaatttgtgcggctttgtaaccacactcttattttatcagggattttagaaacccatttaaactctgttttacagatctattataatggatttgaggttttagagcaacgacagcgtaacgaatgggtcgctctaaaattgcttaaaaaacaatcaataaattaa

SEQ ID NO: 2972 - DNA (genomic), 726 bp, Helicobacter pylori; double-stranded, circular
  misc_feature (B) LOCATION 1...726
  hypothetical: NO
  anti-sense: NO
ttgagcgattcgctttttccggcgttagaagcgttttgtttgaacttaaagcaaagcttgcaaagcgagtttgattttttctacctttcacgcaatctggcttcaaaagactggctagaagcctacaaacaagctgttttaccggtgcgatgcgccaaattttacatacaccctagctggcatcaaaaaccaagccatgccgctatagacgattgcataatgatcgatccggctttggcctttggatcaggccatcatgaaagcacttccatgtgtttggaattgctctctagccttgatttaaaacgcaaaaacgctttagatgtgggctgtgggagcgggattttaagcatcgccttaaaaaaacaaggcgttagcgctttaaccgcttgcgatacggatagtttggccgttgaagaaaccctaaaaaattttagcctgaatcaaatacccctattagcgcaagataaagtcatttatggatccacgcaaaaaattgaagggcgttttgatataattgtggcgaatcttgtcgctgatgtgattaagagtttgtatagtgaatttgtgcggctttgtaaccacactcttattttatcagggattttagaaacccatttaaactctgttttacagatctattataatggatttgaggttttagagcaacgacagcgtaacgaatgggtcgctctaaaattgcttaaaaaacaatcaataaattaa

SEQ ID NO: 2973 - DNA (genomic), 942 bp, Helicobacter pylori; double-stranded, circular
  misc_feature (B) LOCATION 1...942
  hypothetical: NO
  anti-sense: NO
gggcgagagctttttgagagctttcttttagacaccacacacctagccttagaagaatcaagcttagaaaatttaaaagcgtttgacgataaagaaaccattgaatttgtaagccaatccagttggcgttatttcgccactcatgaccccctaaaagaaaatttaaaagaaaaacccccacacctcaagaatttcgttattttacgctctgaaaaaaatttgagcgattcgctttttccggcgttagaagcgttttgtttgaacttaaagcaaagcttgcaaagcgagtttgattttttctacctttcacgcaatctggcttcaaaagactggctagaaccctacaaacaagctgttttaccggtgcgatgcgccaaattttacatacaccctagctggcatcaaaaaccaagccatgccgctatagacgattgcataatgatcgatccggctttggcctttggatcaggccatcatgaaagcacttccatgtgtttggaattgctctctagccttgatttaaaacgcaaaaacgctttagatgtgggctgtgggagcgggattttaagcatcgccttaaaaaaacaaggcgttagcgctttaaccgcttgcgatacggatagtttggccgttgaagaaaccctaaaaaattttagcctgaatcaaatacccctattagcgcaagataaagtcatttatggatccacgcaaaaaattgaagggcgttttgatataattgtggcgaatcttgtcgctgatgtgattaagagtttgtatagtgaatttgtgcgactttgtaaccacactcttattttatcagggattttagaaacccatttaaactctgttttacagatctattataatggatttgaggttttagagcaacgacagcgtaacgaatgggtcgctctaaaattgcttaaaaaacaatcaataaat

SEQ ID NO: 2974 - DNA (genomic), 978 bp, Helicobacter pylori; double-stranded, circular
  misc_feature (B) LOCATION 1...978
  hypothetical: NO
  anti-sense: NO
atgtattatgagtttttctttatcttccctaaggagcgagagctttttgagagctttcttttagacaccacacacctagccttagaagaatcaagcttagaaaatttaaaagcgtttgacgataaagaaaccattgaatttgtaagccaatccagttggcgttatttcgccactcatgaccccctaaaagaaaatttaaaagaaaaacccccacacctcaagaatttcgttattttacgctctgaaaaaaatttgagcgattcgctttttccggcgttagaagcgttttgtttgaacttaaagcaaagcttgcaaagcgagtttgattttttctacctttcacgcaatctggcttcaaaagactggctagaagcctacaaacaagctgttttaccggtgcgatgcgccaaattttacatacaccctagctggcatcaaaaaccaagccatgccgctatagacgattgcataatgatcgatccggctttggcctttggatcaggccatcatgaaagcacttccatgtgtttggaattgctctctagccttgatttaaaacgcaaaaacgctttagatgtgggctgtgggagcgggattttaagcatcgccttaaaaaaacaaggcgttagcgctttaaccgcttgcgatacggatagtttggccgttgaagaaaccctaaaaaattttagcctgaatcaaatacccctattagcgcaagataaagtcatttatggatccacgcaaaaaattgaagggcgttttgatataattgtggcgaatcttgtcgctgatgtgattaagagtttgtatagtgaatttgtgcggctttgtaaccacactcttattttatcagggattttagaaacccatttaaactctgttttacagatctattataatggatttgaggttttagagcaacgacagcgtaacgaatgggtcgctctaaaattgcttaaaaaacaatcaataaattaa

SEQ ID NO: 2975 - DNA (genomic), 195 bp, Helicobacter pylori; double-stranded, circular
  misc_feature (B) LOCATION 1...195
  hypothetical: NO
  anti-sense: NO
ttgtgctttcatcagatacataaaatcctttccaaattgaaaaaagctgagggtttgattaggcagtttgtttttcaggcgagcgggtggtttaaatgcccaaaactcagttttgttttagatgatagcttagaaaagcagctccgcttagacgccatattcaatgaaatcgctaaagggaaagataatgactaa

SEQ ID NO: 2976 - DNA (genomic), 240 bp, Helicobacter pylori; double-stranded, circular
  misc_feature (B) LOCATION 1...240
  hypothetical: NO
  anti-sense: NO
gcgttactaaagtggaatgctctaaagggaagcaccacgctttggtgtttgtgctttcatcagatacataaaatcctttccaaattgaaaaaagctgagggtttgattaggcagtttgtttttcaggcgagcgggtggtttaaatgcccaaaactcagttttgttttagatgatagcttagaaaagcagctccgcttagacgccatattcaatgaaatcgctaaagggaaagataatgac

SEQ ID NO: 2977 - DNA (genomic), 336 bp, Helicobacter pylori; double-stranded, circular
  misc_feature (B) LOCATION 1...336
  hypothetical: NO
  anti-sense: NO
atgaacgctcataaagaacgcttagaatccaatcttttagaattactgcaagaggctttagcgagtttgaacgacagcgagttgaattctttaagcgttactaaagtggaatgctctaaagggaagcaccacgctttggtgtttgtgctttcatcagatcataaaatcctttccaaattgaaaaaagctgagggtttgattaggcagtttgttttgcaggcgagcgggtggtttaaatgcccaaaactcagttttgttttagatgatagcttagaaaagcagctccgcttagacgccatattcaatgaaatcgctaaagggaaagataatgactaa

SEQ ID NO: 2978 - DNA (genomic), 708 bp, Helicobacter pylori; double-stranded, circular
  misc_feature (B) LOCATION 1...708
  hypothetical: NO
  anti-sense: NO
atgcgcctagattacgccctattcaaccagcatttagcaaatagcagagaaaaagctaaagcgttggttttaaaaaaacaggttttagtcaataaaatggtggtttctaaaccctcttttatcgttaaagagggcgatcaaattgaactcatcgctcccaatctattcgttagcagggctggggaaaaattaggggcttttttagaagatcattttatagattttaaagaaaaggttgttttagatgtgggagcgagtaagggaggctttagtcaagtggctcttttaaaaggggctaaaaaggtgctttgcgtggatgtggggaaaatgcaattagatgaaagtttgaaaaacgaccaacgcatagaatgttacgaagaatgcgatattagagggtttaaaacgccagaaaaaattgatttagcactttgtgatgtgagctttatttctttatattgtattttagaagcgattttgcctttaagcggtgaatttttaacgcttttcaaaccgcaatttgaagtgggcagaacaataaaacgcaataaaaagggggtggtgatggataaagaagccattttgaacgctttagaaaactttaaaaaccatttaaaaacaaaggattttcaaatcttaacgatccaagaaagcttagtgaaagggaaaaacgggaatgttgaattttttatccatttcaagcgagcctga

SEQ ID NO: 2979 - DNA (genomic), 705 bp, Helicobacter pylori; double-stranded, circular
  misc_feature (B) LOCATION 1...705
  hypothetical: NO
  anti-sense: NO
atgcgcctagattacgccctattcaaccagcatttagcaaatagcagagaaaaagctaaagcgttggttttaaaaaaacaggttttagtcaataaaatggtggtttctaaaccctcttttatcgttaaagagggcgatcaaattgaactcatcgctcccaatctattcgttagcagggctggggaaaaattaggggcttttttagaagatcattttatagattttaaagaaaaggttgttttagatgtgggagcgagtaagggaggctttagtcaagtggctcttttaaaaggggctaaaaaggtgctttgcgtggatgtggggaaaatgcaattagatgaaagtttgaaaaacgaccaacgcatagaatgttacgaagaatgcgatattagagggtttaaaacgccagaaaaaattgatttagcactttgtgatgtgagctttatttctttatattgtattttagaagcgattttgcctttaagcggtgaatttttaacgcttttcaaaccgcaatttgaagtgggcagaacaataaaacgcaataaaaagggggtggtgatggataaagaagccattttgaacgctttagaaaactttaaaaaccatttaaaaacaaaggattttcaaatcttaacgatccaagaaagcttagtgaaagggaaaaacgggaatgttgaattttttatccatttcaagcgagcc

SEQ ID NO: 2980 - DNA (genomic), 738 bp, Helicobacter pylori; double-stranded, circular
  misc_feature (B) LOCATION 1...738
  hypothetical: NO
  anti-sense: NO
tttcgcttaccaagtccccttacctcaattttaatgcgcctagattacgccctattcaaccagcatttagcaaatagcagagaaaaagctaaagcgttggttttaaaaaaacaggttttagtcaataaaatggtggtttctaaaccctcttttatcgttaaagagggcgatcaaattgaactcatcgctcccaatctattcgttagcagggctggggaaaaattaggggcttttttagaagatcattttatagattttaaagaaaaggttgttttagatgtgggagcgagtaagggaggctttagtcaagtggctcttttaaaaggggctaaaaaggtgctttgcgtggatgtggggaaaatgcaattagatgaaagtttgaaaaacgaccaacgcatagaatgttacgaagaatgcgatattagagggtttaaaacgccagaaaaaattgatttagcactttgtgatgtgagctttatttctttatattgtattttagaagcgattttgcctttaagcggtgaatttttaacgcttttcaaaccgcaatttgaagtgggcagaacaataaaacgcaataaaaagggggtggtgatggataaagaagccattttgaacgctttagaaaactttaaaaaccatttaaaaacaaaggattttcaaatcttaacgatccaagaaagcttagtgaaagggaaaaacgggaatgttgaattttttatccatttcaagcgagcc

SEQ ID NO: 2981 - DNA (genomic), 135 bp, Helicobacter pylori; double-stranded, circular
  misc_feature (B) LOCATION 1...135
  hypothetical: NO
  anti-sense: NO
ttgctctttaatgtccttataattaaagctttctttaaagccatcaatcttgcccccgctcgcattcctatgcccgcccccattgaaacacatttgactgagttcgcacacatcgcaattcccgttcgcccttaa

SEQ ID NO: 2982 - DNA (genomic), 270 bp, Helicobacter pylori; double-stranded, circular
  misc_feature (B) LOCATION 1...270
  hypothetical: NO
  anti-sense: NO
aggaatgagtttatacaaaatgataaaatagaagtttttaaacctttccaaaagagttttaaactcttagtttttataaccaacgctttttacaaacagctaactttagttttaagcgttattgaaaatttcttcaacttgctctttaatgtccttataattaaagctttctttaaagccatcaatcttgcccccgctcgcattcctatgcccgcccccattgaaacacatttgactgagttcgcacacatcgcaattcccgttcgccct

SEQ ID NO: 2983 - DNA (genomic), 303 bp, Helicobacter pylori; double-stranded, circular
  misc_feature (B) LOCATION 1...303
  hypothetical: NO
  anti-sense: NO
gtggcgaccacgccatattctcctcccacgctaaagccctgtaaaagcctggctaacaataaaaacaagaacgcccattcccctacgatttctttagtggggagcaatgcgagcatgaaagagcctagcgccataaggataatggaatacaccatggaagttttacgcccctttttatcccccaatttaccaaaaaacaaactccccaaagggcgcatgaaaaaccctagcataaaaactaaaaaagctgagatgagcgctagagtagggtcattggtgtgggtaaattccttagcgaaataa

SEQ ID NO: 2984 - DNA (genomic), 300 bp, Helicobacter pylori; double-stranded, circular
  misc_feature (B) LOCATION 1...300
  hypothetical: NO
  anti-sense: NO
gtggcgaccacgccatattctcctcccacgctaaagccctgtaaaagcctggctaacaataaaaacaagaacgcccattcccctacgatttctttagtggggagcaatgcgagcatgaaagagcctagcgccataaggataatggaatacaccatggaagttttacgcccctttttatcccccaatttaccaaaaaacaaactccccaaagggcgcatgaaaaaccctagcataaaaactaaaaaagctgagatgagcgctagagtagggtcattggtgtgggtaaattccttagcgaaa

SEQ ID NO: 2985 - DNA (genomic), 201 bp, Helicobacter pylori; double-stranded, circular
  misc_feature (B) LOCATION 1...201
  hypothetical: NO
  anti-sense: NO
atgaaagtaacttttcaagtgccaagcattacttgtaaccattgcgtggataaaattgaaaaatttgtgggcgaaattgaaggcgtgagctttattgatgcgagcgtggaaaaaaagagcgtggttgtagaatttgacaccccagcgacacaggatttgattaaggaagccttattggatgcggggcaagaagtggtgtga

SEQ ID NO: 2986 - DNA (genomic), 198 bp, Helicobacter pylori; double-stranded, circular
  misc_feature (B) LOCATION 1...198
  hypothetical: NO
  anti-sense: NO
atgaaagtaacttttcaagtgccaagcattacttgtaaccattgcgtggataaaattgaaaaatttgtgggcgaaattgaaggcgtgagctttattgatgcgagcgtggaaaaaaagagcgtggttgtagaatttgacaccccagcgacacaggatttgattaaggaagccttattggatgcggggcaagaagtggtg

SEQ ID NO: 2987 - DNA (genomic), 843 bp, Helicobacter pylori; double-stranded, circular
  misc_feature (B) LOCATION 1...843
  hypothetical: NO
  anti-sense: NO
atgttgaattttttatccatttcaagcgagcctgagattaaaagcctagctatcggtaaatttgatggcttgcatctagggcatcaagccctttttaaggaattaaaagatcccaaagcccttttaatcatagaaaaaaagcattacactaagggctatttaacccccttaaaataccgcgccaaactcgttaagatgcctttattttttgtgtatttagaagagatttcacaattaaacgccctagaatttttagatcttttaaaaaagaaattccccaacttagaacgcctggtcgtgggctatgatttcaggtttgggcatgaaagacaaaatgacgctttatttttaaaagagcgttttgaaaaaaccattattgtgcctgaagtgaaaatccaaaacatcagcgtgcattctaaaatcatcaaactagccctaagtcatggcgacttatctttggctaataagctcttaggccgatattatgaagtgtgtggggaagtcattagcgatcaaggattagggcataaagaattagcgcctactttaaatatcaaaaccaaagattttatcctccctagctttggggtgtatgcgagtttagtgaaaataaaagatcagatttatcaaaaaagcgtgagttttataggcaatcgcttaagcacggatcacaatttcgccatagaatgccatgttcttgatactatcatagaaaatccgcccaaagaaatcgctttgcgttgggttcaaaaaatacgagacaacatgcgttttaattcgttaaaagagcttaaaaaccagatccaacaagacatcttaatggccaaagagattttgagataa

SEQ ID NO: 2988 - DNA (genomic), 855 bp, Helicobacter pylori; double-stranded, circular
  misc_feature (B) LOCATION 1...855
  hypothetical: NO
  anti-sense: NO
aagggaaaaacgggaatgttgaattttttatccatttcaagcgagcctgagattaaaagcctagctatcggtaaatttgatggcttgcatctagggcatcaagccctttttaaggaattaaaagatcccaaagcccttttaatcatagaaaaaaagcattacactaagggctatttaacccccttaaaataccgcgccaaactcgttaagatgcctttattttttgtgtatttagaagagatttcacaattaaacgccctagaatttttagatcttttaaaaaagaaattccccaacttagaacgcctggtcgtgggctatgatttcaggtttgggcatgaaagacaaaatgacgctttatttttaaaagagcgttttgaaaaaaccattattgtgcctgaagtgaaaatccaaaacatcagcgtgcattctaaaatcatcaaactagccctaagtcatggcgacttatctttggctaataagctcttaggccgatattatgaagtgtgtggggaagtcattagcgatcaaggattagggcataaagaattagcgcctactttaaatatcaaaaccaaagattttatcctccctagctttggggtgtatgcgagtttagtgaaaataaaagatcagatttatcaaaaaagcgtgagttttataggcaatcgcttaagcacggatcacaatttcgccatagaatgccatgttcttgatactatcatagaaaatccgcccaaagaaatcgctttgcgttgggttcaaaaaatacgagacaacatgcgttttaattcgttaaaagagcttaaaaaccagatccaacaagacatcttaatggccaaagagattttgaga

SEQ ID NO: 2989 - DNA (genomic), 210 bp, Helicobacter pylori; double-stranded, circular
  misc_feature (B) LOCATION 1...210
  hypothetical: NO
  anti-sense: NO
ctctattcaaccacaggctttgattttaacgacaacacgcccattttagcgtatgccaataaatactttgtttccaaagaaagggaaagcttgacagactttaaagatctgaaaattttgcccaaagatttcatgttgccctcttttttagagaaagacaaatttactcaattgaacacgccgttttacatttgcctcctatttagtgta

SEQ ID NO: 2990 - DNA (genomic), 498 bp, Helicobacter pylori; double-stranded, circular
  misc_feature (B) LOCATION 1...498
  hypothetical: NO
  anti-sense: NO
ttggaattggatttagcgcttatctctttaggcgagagagttttgcttggtgtgtatcaaaacgattttttatgtaattcctacacttccaaatcaaaaacaagcgaagctttagtgggagttttttcacaattatttgaagattttaaaaaccctaccatttaccccacgatctaccctgatttaccggcgattaaaggggtttattacgctaaggggccagggagtttcactagcttaaagctcacgcatgttttcttgcacactttggctttgatccatgactttgaactctattcaaccacaggctttgattttaacgacaacacgcccattttagcgtatgccaataaatactttgtttcaaaagaaagggaaagcttgacagactttaaagatctgaaaattttgccaaaagatttcatgttgccctcttttttagagaaagacaaatttactcaattgaacacgccgttttacattttgcctcctatttag

SEQ ID NO: 2991 - DNA (genomic), 411 bp, Helicobacter pylori; double-stranded, circular
  misc_feature (B) LOCATION 1...411
  hypothetical: NO
  anti-sense: NO
ggagagaagcatagcatgagtgatatggttgatttaaaaaaatttgtaaccgagcttggcaagacccaaaaagagcttaaaaatgtgatcgagcaagccaaagacattggtttagagcttaagacaaattctaaaatgaccccagagcaagccggcaagctatacaaatacattgtggatggcattaaagaacaaatacaagccaatcaacccactaaaaatcctaaacaagacaataaagacgatttgaatacagccgcaacgcctaagccacttgctaaaaaggcttccaaaacgcctaaaaaagaagaaacaaaagcccagtcaaagtccaaaaaaactaaagaaaagaaaaaagagggctcctgcgcctattatcaaaaagaaagaaatagagattgtcaatacttt

SEQ ID NO: 2992 - DNA (genomic), 576 bp, Helicobacter pylori; double-stranded, circular
  misc_feature (B) LOCATION 1...576
  hypothetical: NO
  anti-sense: NO
acaaactccaccaagggcaacgccaataccactaacaacgctaacagcgctagtaatgtcagcaacgctaaaaaagaaatcagcgaagttaaaaagcaagagcaagagatcaaacgccatgaaaacattaaaagacgcacgggttttagggtgattaaacgcaacgatgaaactgaaaatgaaactgaaaacagtgtaacagaaagcaaaaaacccactcaaagcgcggcggctatttttgaagatattaaaaaagaatggcaagaaaaagacaagcaagagactaaaaaaactaaaaaacccagtaagcccaaagccacccccaccgccaaaaacaacaaatcccataaaattgattttagcgatgtaagggattttaagggcaatgatatttatgatgatgaaaccgatgaaatcttattgtttgatttgcatgaacaagataatctcaataaggaagaagaagaaaaagaagcacgccaaaatatcaacgacagggtgcgcgtccaaaggaaaaacccttggatgaatgagggcggggatcaaacgacaatccaaggaaaagcgcgtattccg

SEQ ID NO: 2993 - DNA (genomic), 1083 bp, Helicobacter pylori; double-stranded, circular
  misc_feature (B) LOCATION 1...1083
  hypothetical: NO
  anti-sense: NO
atgagtgatatggttgatttaaaaaaatttgtaaccgagcttggcaagacccaaaaagagcttaaaaatgtgatcgagcaagccaaagacattggtttagagcttaagacaaattttaaaatgaccccagagcaagccggcaagctatacaaatacattgtggatggcattaaagaacaaatacaagccaatcaacccactaaaaatcctaaacaagacaataaagacgatttgaatacagccgcaacgcctaagccacttgctaaaaaggcttccaaaacgcctaaaaaagaagaaacaaaagcccagccaaagcccaaaaaaactaaagaaaagaaaaaagaggctcctgcgcctattatcaaaaagaaagaaatagagattgtcaatacttttgaaaaccaaacaccccttgtagaaaacacccctaaagcggttagccactctcaaatagaaaaagccaagcaaaagctccaagaaatccaaaaaagccgagaagccctaaacaaactcacccaaagcaacaccaataccactaacaacgctaacagcgctagtaatgtcagcaacgctaaaaaagaaatcagcgaagttaaaaagcaagagcaagagatcaaacgccatgaaaacattaaaagacgcacgggttttagggtgattaaacgcaacgatgaaactgaaaatgaaactgaaaacagtgtaacagaaagcaaaaaacccactcaaagcgcggcggctatttttgaagatattaaaaaagaatggcaagaaaaagacaagcaagagactaaaaaaactaaaaaacccagtaagcccaaagccacccccaccgccaaaaacaacaaatcccataaaattgattttagcgatgtaagggattttaagggcaatgatatttatgatgatgaaaccgatgaaatcttattgtttgatttgcatgaacaagataatctcaataaggaagaagaagaaaaagaagcacgccaaaatatcaacgacagggtgcgcgtccaaaggaaaaacccttggatgaatgagggcggggatcaaacgacaatccaagaaaaagcgcgtattccgtaa

SEQ ID NO: 2994 - DNA (genomic), 585 bp, Helicobacter pylori; double-stranded, circular
  misc_feature (B) LOCATION 1...585
  hypothetical: NO
  anti-sense: NO
atgttaaaaaccaatcaaaaaaacgtgcatgcgtttgaaattgaaaagcaagagcctgaggcggtcatggaatttttagaaaaaaaccatgcccttttgcaatattttcttattatttttaaatacgatattgaatcagaagtcaaagccgttttgcataaacaccagcttttatttttagaaacgaatcgcgctttaaacgggcgttatatcaaaaccacagaaaaagacgctaaccttttaaagcaaaatagccctaatgcgatagaacccaaaacaacgatttatgagcgcaatatcaggagcggggaagagatttatagcactaaccaccttatttttttgggtaatatccacaacggggcgaagatcatttcagaaggttctgtgtcagtttatggggtttgcgaaggggcgattgtgtgctttggagagtatttgatcttaaaagaagttaagagcgctcaaatcgtttttcaaaacaaaattttgtctctaaaagaggttgaacggcttttagtaaacaaaaatattaaaataatcactaaaaatgacgatatactagacataaaggaagtattatga

SEQ ID NO: 2995 - DNA (genomic), 651 bp, Helicobacter pylori; double-stranded, circular
  misc_feature (B) LOCATION 1...651
  hypothetical: NO
  anti-sense: NO
gcaatggataaaaaccaatatcattgcccccatagagcaagccaaacggcttttaatgaaaggatagtcatgttaaaaaccaatcaaaaaaacgtgcatgcgtttgaaattgaaaagcaagagcctgaggcggtcatggaatttttagaaaaaaaccatgcccttttgcaatattttcttattatttttaaatacgatattgaatcagaagtcaaacccgttttgcataaacaccagcttttatttttagaaacgaatcgcgctttaaacgggcgttatatcaaaaccacagaaaaagacgctaaccttttaaagcaaaatagccctaatgcgatagaacccaaaacaacgatttatgagcgcaatatcaggagcggggaagagatttatgacactaaccaccttatttttttgggtaatatccacaacggggcgaagatcatttcagaaggttctgtgtcagtttatggggtttgcgaaggggcgattgtgtgctttggagagtatttgatcttaaaagaagttaagagcgctcaaatcgtttttcaaaacaaaattttgtctctaaaagaggttgaacggcttttagtaaacaaaaatattaaaataatcactaaaaatgacgatatactagacataaaggaagtatta

SEQ ID NO: 2996 - DNA (genomic), 339 bp, Helicobacter pylori; double-stranded, circular
  misc_feature (B) LOCATION 1...339
  hypothetical: NO
  anti-sense: NO
atgagaagaattattaaaaacacactttcacgcttaggctatgaagatgttttagaagctgagcatggggtggaagcttgggaaaaactagacgctaatgcggacactaaggtgcttattacggattggaacatgcctgaaatgaacgggttggatctcgttaaaaaggtgcgtgcggataaccgatttaaggaaatccctatcattatgatcaccacagagggcggtaaagctgaggtcattacgactttaaaagcgggcgtgaataactacattgtgaaaccttttaccccccaagttttgaaagaaaaattagaggttgttttagggacaaacgat

SEQ ID NO: 2997 - DNA (genomic), 375 bp, Helicobacter pylori; double-stranded, circular
  misc_feature (B) LOCATION 1...375
  hypothetical: NO
  anti-sense: NO
ttgaaactactggtagtagatgatagctcaactatgagaagaattattaaaaacacactttcacgcttaggctatgaagatgttttagaagctgagcatggggtggaagcttgggaaaaactagacgctaatgcggacactaaggtgcttattacggattggaacatgcctgaaatgaacgggttggatctcgttaaaaaggtgcgtgcggataaccgatttaaggaaatccctatcattatgatcaccacagagggcggtaaagctgaggtcattacgactttaaaagcgggcgtgaataactacattgtgaaaccttttaccccccaagttttgaaagaaaaattagaggttgttttagggacaaacgattga

SEQ ID NO: 2998 - DNA (genomic), 375 bp, Helicobacter pylori; double-stranded, circular
  misc_feature (B) LOCATION 1...375
  hypothetical: NO
  anti-sense: NO
ttgaaactactggtagtagatgatagctcaactatgagaagaattattaaaaacacactttcacgcttaggctatgaagatgttttagaagctgagcatggggtggaagcttgggaaaaactagacgctaatgcggacactaaggtgcttattacggattggaacatgcctgaaatgaacgggttggatctcgttaaaaaggtgcgtgcggataaccgatttaaggaaatccctatcattatgatcaccacagagggcggtaaagctgaggtcattacggctttaaaagcgggcgtgaataactacattgtgaaaccttttaccccccaagttttgaaagaaaaattagaggttgttttagggacaaacgattga

SEQ ID NO: 2999 - DNA (genomic), 402 bp, Helicobacter pylori; double-stranded, circular
  misc_feature (B) LOCATION 1...402
  hypothetical: NO
  anti-sense: NO
tttaaatgcaatcttaaaaggagaagtgctttgaaactactggtagtagatgatagctcaactatgagaagaattattaaaaacacactttcacgcttaggctatgaagatgttttagaagctgagcatggggtggaagcttgggaaaaactagacgctaatgcggacactaaggtgcttattacggattggaacatgcctgaaatgaacgggttggatctcgttaaaaaggtgcgtgcggataaccgatttaaggaaatccctatcattatgatcaccacagagggcggtaaagctgaggtcattacgactttaaaagcgggcgtgaataactacattgtgaaaccttttaccccccaagttttgaaagaaaaattagaggttgttttagggacaaacgat

SEQ ID NO: 3000 - DNA (genomic), 297 bp, Helicobacter pylori; double-stranded, circular
  misc_feature (B) LOCATION 1...297
  hypothetical: NO
  anti-sense: NO
atgcgagaggaagcaaaaaagcattttagaataccacttaatagggcaaataaaataactttgaattttacagggggctataggagtggggttcaaattgataggaatgcccccaaacgcgtttacaaatacaccaaaaaagattgcgatttgattttagggatagacactcgcacgatcgaatgctatattatccctattgaagacacacaagaatggggcaacacaaagagcttgtcgcaactccaatactataaagagaattggcaaattttgattgacttggcgttggagtaa

SEQ ID NO: 3001 - DNA (genomic), 297 bp, Helicobacter pylori; double-stranded, circular
  misc_feature (B) LOCATION 1...297
  hypothetical: NO
  anti-sense: NO
ggcatgcgagaggaagcaaaaaagcattttagaataccacttaatagggcaaataaaataactttgaattttacagggggctataggagtggggttcaaattgataggaatgcccccaaacgcgtttacaaatacaccaaaaaagattgcgatttgattttagggatagacactcgcacgatcgaatgctatattatccctattgaagacacacaagaatggggcaacacaaagagcttgtcgcaactccaatactataaagagaattggcaaattttgattgacttggcgttggag

SEQ ID NO: 3002 - DNA (genomic), 2337 bp, Helicobacter pylori; double-stranded, circular
  misc_feature (B) LOCATION 1...2337
  hypothetical: NO
  anti-sense: NO
atgaatttagaaaaactttttttagaaaaagcccccttgtttgtttttagctccaccaggcgtttaaagcatttctatttagagcaaggcgaagggtttttgcctaacgcaatgagcatggggagcttttttgaacaggctttttacatccccaatcaaaagaaaatccctaaaagtgcgcgccaaattttaatgatagacaccattaaagctatcgctaaagaaaaaaaattcattcttgaagggcttttgctttttgaaaacagctttttagggtatttggaaagcacttcttttttgtttgatttgtttgatgagttaagttctgcttgtatcaagctcaatgaactttcttttaaagacatttacttggattatgaaaagcatttagaagtcttagaaatgatttatgatcgctatgttaaaaagctagaagaattaggcttttatgacaaaatcatgcaaaaaaaacccacgattttaaaagaattttttgagcatttttcctccattgaatggcatttagacggctttatgagcgtttttgaaaggcaatgcctattagaagtggccgagttagtgcctatcactttatacttatcatgcgataaatacaaccaaaaattcttggaatttttaaatctcaagttggagacggattgcgattattccattgattttaaaacccaaaagatcctttctcaaacttttaatgatcaaaaaatagagccaaagctttatgctaactccagttatttaaaacaaggcgctttagttttacaaaccatagaagaatatttgcaagaaaataacgaccctaataaaatggcgatcatcacgcctaatgcggattttttaccttttttaaaactcttagacagaaacaacaatttgaattttgcgatgggattaggggctaaaaacagcccttattatacagagcttgtcaaaatcttagaagatttacaaacaagcgattgtaatttaagcggatctgctctattagatttagaaaatattacccttgcgcttttagaacaacaaagctctaaagaaaaagcgcccttaaaagaagcgcattctcaaatcatgcaccagtatcatcttttaaaagacacgcttaaaaactacagccttaaagatttattgcatttgtatttgcaagaatttgaagccaacttccgcttagacgattctagtgggggcaaaatacgagtcatggacactttagagacaaggggcatgcaatttgataaagtggttattgcggatttcaatgaaacatgcgtgccaaaccttaaagattgcgatttgtttttaaactctgctttaagacaatcgctcaacctccccactttgttggataagaaaaatttgcaaaaacactattactaccagctctttaaaaactctaaagaagtggcgctttcttatatagagagcgaaaccttaaaagcctccaacatgcttttagagttggatttacacacagagcctatcaaagacgcttacacgctttttgaaacaagccctattaaagagtatcaagaagaagaaatcaaagccgctatccctaaagattttagctttagcgctagctcattaaacgcctttttaacttgcaagcgccgtttttattaccactacatcaagcgcttcaaagaaacccctaaagatgaaagcaatagcgctgtgggcagtttgatccatgaactcttaaaagaagcttatgaaaaagacaaaaacccccatgcattagaagaaaggctcatttggctgtcagaaacaagagaaaacgttacccctaaagagcgtttagacactcttgtagcgctcaaaaaaatccaggctttttataaaaaagagcgagaacgctttaatgcagaaatcaccattcttgatcttgaaaaaagctttgaaacgattattcaaggcgttatttttaaggggcgcatagacaggattgacaaaaccgctgacaatgagatcattctattagattacaaattcaaaagcgatttgaaattagacagcatgagcgaaaaacaaagaaaaggcttaagccccatagaaatcgctcaaatcagcacggattatcaaatggctatctatgtgcgtgctcttaaaaatttgggctacaaagagcctataaaagcctttttttatgatttaagaaagggcgaattactagaagaagacgagcttactttacaggctaaaatggatcatttggaattttctcttatccccaagctcaaacaagaaattgattttgaaaaaactttagaggttaaagattgtgaatactgctcttttaaagacatgtgcaaccgatga

SEQ ID NO: 3003 - DNA (genomic), 2370 bp, Helicobacter pylori; double-stranded, circular
  misc_feature (B) LOCATION 1...2370
  hypothetical: NO
  anti-sense: NO
aaacattaccgctcaagcgaaaaggttactcaacgcatgaatttagaaaaactttttttagaaaaagcccccttgtttgtttttagctccaccaggcgtttaaagcatttctatttagagcaaggcgaagggtttttgcctaacgcaatgagcatggggagcttttttgaacaggctttttacatccccaatcaaaagaaaatccctaaaagtgcgcgccaaattttaatgatagacaccattaaagctatcgctaaagaaaaaaaattcattcttgaagggcttttgctttttgaaaacagctttttagggtatttggaaagcacttcttttttgtttgatttgtttgatgagttaagttctgcttgtatcaagctcaatgaactttcttttaaagacatttacttggattatgaaaagcatttagaagtcttagaaatgatttatgatcgctatgttaaaaagctagaagaattaggcttttatgacaaaatcatgcaaaaaaaacccacgattttaaaagaattttttgagcatttttcctccattgaatggcatttagacggctttatgagcgtttttgaaaggcaatgcctattagaagtggccgagttagtgcctatcactttatacttatcatgcgataaatacaaccaaaaattcttggaatttttaaatctcaagttggagacggattgcgattattccattgattttaaaacccaaaagatcctttctcaaacttttaatgatcaaaaaatagagccaaagctttatgctaactccagttatttaaaacaaggcgctttagttttacaaaccatagaagaatatttgcaagaaaataacgaccctaataaaatggcgatcatcacgcctaatgcggattttttaccttttttaaaactcttagacagaaacaacaatttgaattttgcgatgggattaggggctaaaaacagcccttattatacagagcttgtcaaaatcttagaagatttacaaacaagcgattgtaatttaagcggatctgctctattagatttagaaaatattacccttgcgcttttagaacaacaaagctctaaagaaaaagcgcccttaaaagaagcgcattctcaaatcatgcaccagtatcatcttttaaaagacacgcttaaaaactacagccttaaagatttattgcatttgtatttgcaagaatttgaagccaacttccgcttagacgattctagtgggggcaaaatacgagtcatggacactttagagacaaggggcatgcaatttgataaagtggttattgcggatttcaatgaaacatgcgtgccaaaccttaaagattgcgatttgtttttaaactctgctttaagacaatcgctcaacctccccactttgttggataagaaaaatttgcaaaaacactattactaccagctctttaaaaactctaaagaagtggcgctttcttatatagagagcgaaaccttaaaagcctccaacatgcttttagagttggatttacacacagagcctatcaaagacgcttacacgctttttgaaacaagccctattaaagagtatcaagaagaagaaatcaaagccgctatccctaaagattttagctttagcgctagctcattaaacgcctttttaacttgcaagcgccgtttttattaccactacatcaagcgcttcaaagaaacccctaaagatgaaagcaatagcgctgtgggcagtttgatccatgaactcttaaaagaagcttatgaaaaagacaaaaacccccatgcattagaagaaaggctcatttggctgtcagaaacaagagaaaacgttacccctaaagagcgtttagacactcttgtagcgctcaaaaaaatccaggctttttataaaaaagagcgagaacgctttaatgcagaaatcaccattcttgatcttgaaaaaagctttgaaacgattattcaaggcgttatttttaaggggcgcatagacaggattgacaaaaccgctgacaatgagatcattctattagattacaaattcaaaagcgatttgaaattagacagcatgagcgaaaaacaaagaaaaggcttaagccccatagaaatcgctcaaatcagcacggattatcaaatggctatctatgtgcgtgctcttaaaaatttgggctacaaagagcctataaaagcctttttttatgatttaagaaagggcgaattactagaagaagacgagcttactttacaggctaaaatggatcatttggaattttctcttatccccaagctcaaacaagaaattgattttgaaaaaactttagaggttaaagattgtgaatactgctcttttaaagacatgtgcaaccga

SEQ ID NO: 3004 - DNA (genomic), 600 bp, Helicobacter pylori; double-stranded, circular
  misc_feature (B) LOCATION 1...600
  hypothetical: NO
  anti-sense: NO
cgatatactagacataaaggaagtattatgaaacaaacaaccattaaccactctgtagaattagtagggataggcttacacaagggcgttcctgtgaagcttgttttagagccattagaagaaaatcaaggcatcgttttttaccgctctgatttgggcgtgaagctccccttaaaacctgaaaacatcgtggataccaaaatggcaaccgtgttgggtaaagataacgctaggatttctacaattgagcatttgctttcagctgtccatgcgtatggtattgacaatcttaaaatctctgtggataacgaagaaatccctatcatggatgggagtgctttgacttattgcatgcttttagatgaagcggggattaaagaattagacgctcctaaaaaagtgatggaaatcaagcaagccgttgaggttagagagggcgataagtttgttaaaattgagccagacagccagctttctttgaatttcacgattgattttaaccatccggtatcgctaagcaagcccatcatttcgtctttagtaaaaccgcttacaaagagcaagtcgctaaagcccgcacctttgggtttttgcaagaag

SEQ ID NO: 3005 - DNA (genomic), 888 bp, Helicobacter pylori; double-stranded, circular
  misc_feature (B) LOCATION 1...888
  hypothetical: NO
  anti-sense: NO
atgaaacaaacaaccattaaccactctgtagaattagtagggataggcttacacaagggcgttcctgtgaagcttgttttagagccattagaagaaaatcaaggcatcgttttttaccgctctgatttgggcgtgaagctccccttaaaacctgaaaacatcgtggataccaaaatggcaaccgtgttgggtaaagataacgctaggatttctacaattgagcatttgctttcagctgtccatgcgtatggtattgacaatcttaaaatctctgtggataacgaagaaatccctatcatggatgggagtgctttgacttattgcatgcttttagatgaagcggggattaaagaattagacgctcctaaaaaagtgatggaaatcaagcaagccgttgaggttagagagggcgataagtttgttaaaattgagccagacagccagctttctttgaatttcacgattgattttaaccatccggttatcgctaagcaagcccatcatttcgtctttagtaaaaccgcttacaaagagcaagtcgctaaagcccgcacctttgggtttttgcaagaagtgaattacttgcgatccattggtttggctaaaggggggagcttgaataattgcatcgttctagatgaaaacagcattttgaataaagagggtttgaggtgcgaaaaggaattcgtgtgccacaagattttggacgctatgggggatctaatggtcttaggcatgcctgtgatgggcaaatacacttctttttcaggtagccacaagctcaattccatgctggttaaagccattttagcagacgctaaaaattatgaagttttgatcgcttcagatccggctaaagagtttgcgttgcaaaaggctttcgcttaa

SEQ ID NO: 3006 - DNA (genomic), 819 bp, Helicobacter pylori; double-stranded, circular
  misc_feature (B) LOCATION 1...819
  hypothetical: NO
  anti-sense: NO
atgggcatcaaagaaaaggaaattgagcttgaaaccttgaaacgagagatcgcgcaagcggaggcgagtttggaacaggatttcattaagcacatggtggataagactaacgagaaagtggaagatttgttttttagcaacaagcccgagttttaccggtttgttttcacggagcaaaacaactacttgagagaaaagctaacggacaaagtgggcagagcgatggatctaatcgatgaaatccaaagagataaaacagaaaacgaatctttagaaaatggtgcgaaattcaaaaagaggtttgtgtttgaattgcaaaatgatttaatatttttgagaacaaaaaggaatacctatagcgctaaaaccgagcatgaaaattttcaagaaaaattgttagcagctaaagacacttttagattgatcaaagcaaatgattttaaaactaaaatttacccctatcaaatcatcctacgcttaaaaacaaaacacatcattgtttttaaatggttgaaaaaagaaatcatcaaacgctttgttaaaaaagatcttttcaccgagaccctatccataaaaataacggataaaaaagggcgaaaatacgccttaatcgcaaactataaccatgcaagcgatattattgagctaatgcttgatgataaaacctacaccaccaccctctactatcaaaaaccgctttttgacctgattaaaaattctaattttaatttgacaatcaaagacaacacactagaaataaatcaagctaaaaacgcctattcgtttaaagcgaaaaataccaaaacccttgaatattaa

SEQ ID NO: 3007 - DNA (genomic), 891 bp, Helicobacter pylori; double-stranded, circular
  misc_feature (B) LOCATION 1...891
  hypothetical: NO
  anti-sense: NO
aaaaggggaggagttttaggtaataacactcgtaatctaaaatcaaaaagaagctatcaaatacaaaggataagcatgggcatcaaagaaaaggaaattgagcttgaaaccttgaaacgagagatcgcgcaagcggaggcgagtttggaacaggatttcattaagcacatggtggataagactaacgagaaagtggaagatttgttttttagcaacaagcccgagttttaccggtttgttttcacggagcaaaacaactacttgagagaaaagctaacggacaaagtgggcagagcgatggatctaatcgatgaaatccaaagagataaaacagaaaacgaatctttagaaaatggtgcgaaattcaaaaagaggtttgtgtttgaattgcaaaatgatttaatatttttgagaacaaaaaggaatacctatagcgctaaaaccgagcatgaaaattttcaagaaaaattgttagcagctaaagacacttttagattgatcaaagcaaatgattttaaaactaaaatttacccctatcaaatcatcctacgcttaaaaacaaaacacatcattgtttttaaatggttgaaaaaagaaatcatcaaacgctttgttaaaaaagatcttttcaccgagaccctatccataaaaataacggataaaaaagggcgaaaatacgccttaatcgcaaactataaccatgcaagcgatattattgagctaatgcttgatgataaaacctacaccaccaccctctactatcaaaaaccgctttttgacctgattaaaaattctaattttaatttgacaatcaaagacaacacactagaaataaatcaagctaaaaacgcctattcgtttaaagcgaaaaataccaaaacccttgaatat

SEQ ID NO: 3008 - DNA (genomic), 195 bp, Helicobacter pylori; double-stranded, circular
  misc_feature (B) LOCATION 1...195
  hypothetical: NO
  anti-sense: NO
cgaccagagcagacttttattcatagggacgggtacaaaacacgcgttttagggctatactaccccaaccctttgaaaaaaatccccaccaagagtttagaatgcggcgagattggcattgtgagtttggggctaaagagcgttactgatattgcggtgggcgacacgctcacagacgctgaaaaccctacctct

SEQ ID NO: 3009 - DNA (genomic), 771 bp, Helicobacter pylori; double-stranded, circular
  misc_feature (B) LOCATION 1...771
  hypothetical: NO
  anti-sense: NO
gtgggctttttaaggctattgcacatggaagtgatcaaagaaagactggaaagggaatttagccttaacttaatcgctaccgctcccacggtggtgtatgaagtgcatttaaccgataatagcatcaaatacgtccaaaaccctagcgatttgccccctgaaaatcatatcgtttgcatcaaagagcctttttttagggcgacaatcatcacgccgagcaatttttggggtaatttaatgcagttattgaacaataaaagaggcattcaagaaaaaatggaatatttgaaccaatctcgtgtcatgctcacttattccttgccgagcaatgaaattgtgatggatttttacgacaaactcaaatcttgcacgaaagggtatgcgagccttgattatgaacctatagaaaacagagaggctaacttggtgaaattagacgtgagggtggcaggcgatgtggtggatgcgctttctatcattatagataagaataaggcgtatgaaaaggggcgtgctttagtggaaacgatgaaagagcttatcccaagacagctttttgaagtcgctatccaagcgagcgtggggaataaaatcatcgccagagagacgattaaatctgtcggtaagaatgtaacggctaagtgctatgggggcgatattacacgaaaaagaaaactcttagaaaagcaaaaagagggcaaaaaacgcatgaaagctatcggtaaagtggagcttccccaagaagcgtttttagcgatattaaagatcgat

SEQ ID NO: 3010 - DNA (genomic), 1122 bp, Helicobacter pylori; double-stranded, circular
  misc_feature (B) LOCATION 1...1122
  hypothetical: NO
  anti-sense: NO
gtgatggggacgggtaaaaaacacggcgttttagggctatactaccccaaccctttgaaaaaaatccccaccaagagtttagaatgcggcgagattggcattgtgagtttggggctaaagagcgttactgatattgcggtgggcgacacgctcacagacgctgaaaaccctacctctaaacccattgagggctttatgccggctaaaccctttgtttttgcggggctttaccctatagaaacggaccggtttgaagatttaagagaagcgctattgaaactccagcttaacgattgcgctttgaattttgagcctgaaagctccgtggcgcttggctttggctttagggtgggctttttagggctattgcacatggaagtgatcaaagaaagactggaaagggaatttagccttaacttaatcgctaccgctcccacggtggtgtatgaagtgcatttaaccgataatagcatcaaatacgtccaaaaccctagcgaattgccccctgaaaatcatatcgcttgcatcaaagagccttttgttagggcgacaatcatcacgccgagcgaatttttgggtaatttaatgcagttattgaacaataaaagaggcattcaagaaaaaatggaatatttgaaccaatctcgtgtcatgctcacttattccttgccgagcaatgaaattgtgatggatttttacgacaaactcaaatcttgcacgaaagggtatgcgagctttgattatgaacctatagaaaacagagaggctaacttggtgaaattagacgtgagggtggcaggcgatgtggtggatgcgctttctatcattatagataagaataaggcgtatgaaaaggggcgtgctttagtggaaacgatgaaagagcttatcccaagacagctttttgaagtcgctatccaagcgagcgtggggaataaaatcatcgccagagagacgattaaatctgtcggtaagaatgtaacggctaagtgctatgggggcgatattacacgaaaaagaaaactcttagaaaagcaaaaagagggcaaaaaacgcatgaaagctatcggtaaagtggagcttccccaagaagcgtttttagcgatattaaagatcgattag

SEQ ID NO: 3011 - DNA (genomic), 378 bp, Helicobacter pylori; double-stranded, circular
  misc_feature (B) LOCATION 1...378
  hypothetical: NO
  anti-sense: NO
gaggcgaccctactacgaataacgatggacaatatctcttcaaacgtgcaaacgcatttgctctctttaaaaaagcatgattgcagcgtttattaccaggataaaaaagggtttttaagctattctatggggggtattagcgtgttggctaacctttttttaacgcaaaatccggattttgatttttatatagatgtgaactctaaagggaatgtgagtttaagggcgaacgggaattgcgatgtgtgcgaactcagtcaaatgtgtttcaatgggggcgggcataggaatgcgagcgggggcaagattgatggctttaaagaaagctttaattataaggacattaaagagcaagttgaagaaattttcaataacgct

SEQ ID NO: 3012 - DNA (genomic), 387 bp, Helicobacter pylori; double-stranded, circular
  misc_feature (B) LOCATION 1...387
  hypothetical: NO
  anti-sense: NO
tttaatttaatttataaaataaaaaggaaaatgatgcaagtttatcacctttcacacattgatttagacggctatgcatgccagcttgtttcaaaacaattttttaaaaatatccaatgctataacgctaattacgggcgtgaagtctcagcgagaatttatgaaattttaaacgcaatcgctcaatctaaagagagtgaattccttattttggttagcgatttgaatttgaacttaaacgaagcagagtatttgcaagataaaatccaagaacaccgcttgcaaaataaagacattcaaatccagcttttggatcaccatatcagtggtaaagaggtggctgagagtttccattggtattttttagacacgaaccgctgcgcgacc

SEQ ID NO: 3013 - DNA (genomic), 408 bp, Helicobacter pylori; double-stranded, circular
  misc_feature (B) LOCATION 1...408
  hypothetical: NO
  anti-sense: NO
acacgaaccgctgcgcgacctaaaatcgtgtatgaatttttgaaaaaatattacgctattttagagtcaaaaaacacactatggctagagcctttggtggaaatggtcaattctgtggatatttgggacacgcaaggttatggctttgaattaggcaaggtgtgcatgcgcatgatcactcaaagctctgaattgaaccgcttcatgtttgatgatgaaaaccgcaactataagttaaagcttttagaagaagttaaaaactatttgtttttagaaaacgcccctgtagcctacgataacgatttgttcaaactcaaaaaaatcgctctaggaggcgaccctactacgaataacgatggacaatatctcttcaaacgtgcaaacgcatttgctctctttaaaaaagca

SEQ ID NO: 3014 - DNA (genomic), 1044 bp, Helicobacter pylori; double-stranded, circular
  misc_feature (B) LOCATION 1...1044
  hypothetical: NO
  anti-sense: NO
atgcaagtttatcacctttcacacattgatttagacggctatgcatgccagcttgtttcaaaacaattttttaaaaatatccaatgctataacgctaattacgggcgtgaagtctcagcgagaatttatgaaattttaaacgcaatcgctcaatctaaagagagtgaattccttattttggttagcgatttgaatttgaacttaaacgaagcagagtatttgcaagataaaatccaagaacaccgcttgcaaaataaagacattcaaatccagcttttggatcaccatatcagtggtaaagaggtggctgagagtttccattggtattttttagacacgaaccgctgcgcgactaaaatcgtgtatgaatttttgaaaaaatattacgctattttagagtcaaaaaacacactatggctagagcctttggtggaaatggtcaattctgtggatatttgggacacgcaaggttatggctttgaattaggcaaggtgtgcatgcgcatgatcactcaaagctctgaattgaaccgcttcatgtttgatgatgaaaaccgcaactataagttaaagcttttagaagaagttaaaaactatttgtttttagaaaacgcccctgtagcctacgataacgatttgttcaaactcaaaaaaatcgctctaggaggcgaccctactacagaaacgatggacaatatctcttcaaacgtgcaaacgcatttgctctctttaaaaaagcatgattgcagcgtttattaccaggataaaaaagggtttttaagctattctatggggggtattagcgtgttggctaacctttttttaacgcaaaatccggattttgatttttatatagatgtgaactctaaagggaatgtgagtttaagggcgaacgggaattgcgatgtgtgcgaactcagtcaaatgtgtttcaatgggggcgggcataggaatgcgagcgggggcaagattgatggctttaaagaaagctttaattataaggacattaaagagcaagttgaagaaattttcaataacgcttaa

SEQ ID NO: 3015 - DNA (genomic), 1047 bp, Helicobacter pylori; double-stranded, circular
  misc_feature (B) LOCATION 1...1047
  hypothetical: NO
  anti-sense: NO
atgatgcaagtttatcacctttcacacattgatttagacggctatgcatgccagcttgtttcaaaacaattttttaaaaatatccaatgctataacgctaattacgggcgtgaagtctcagcgagaatttatgaaattttaaacgcaatcgctcaatctaaagagagtgaattccttattttggttagcgatttgaatttgaacttaaacgaagcagagtatttgcaagataaaatccaagaacaccgcttgcaaaataaagacattcaaatccagcttttggatcaccatatcagtggtaaagaggtggctgagagtttccattggtattttttagacacgaaccgctgcgcgactaaaatcgtgtatgaatttttgaaaaaatattacgctattttagagtcaaaaaacacactatggctagagcctttggtggaaatggtcaattctgtggatatttgggacacgcaaggttatggctttgaattaggcaaggtgtgcatgcgcatgatcactcaaagctctgaattgaaccgcttcatgtttgatgatgaaaaccgcaactataagttaaagcttttagaagaagttaaaaactatttgtttttagaaaacgcccctgtagcctacgataacgatttgttcaaactcaaaaaaatcgctctaggaggcgaccctactacagaaacgatggacaatatctcttcaaacgtgcaaacgcatttgctctctttaaaaaagcatgattgcagcgtttattaccaggataaaaaagggtttttaagctattctatggggggtattagcgtgttggctaacctttttttaacgcaaaatccggattttgatttttatatagatgtgaactctaaagggaatgtgagtttaagggcgaacgggaattgcgatgtgtgcgaactcagtcaaatgtgtttcaatgggggcgggcataggaatgcgagcgggggcaagattgatggctttaaagaaagctttaattataaggacattaaagagcaagttgaagaaattttcaataacgcttaa

SEQ ID NO: 3016 - DNA (genomic), 1146 bp, Helicobacter pylori; double-stranded, circular
  misc_feature (B) LOCATION 1...1146
  hypothetical: NO
  anti-sense: NO
atgattcagtctgttcgcattaaaaattttaagacttttaaggacactcaaattgatggttttaccaaacttaatattatcaccggccaaaacaatgcgggcaaatccaatttgttagaagcattgtattatttggtaggtaaatccatgcacccatgcactaatgtattagaaatttatgacaatatacgcaaagagcctttaacatcagaatcaaaaaacttgatgttttatggtttagacactgagaaaaaaatacaaatcaccacaactttagacaacaatcaaaccttagacttacaaataaaattcatagccaatgaaaaccaaaaggtaatagagtcgcaaataatacccacagcagaacaaactcaaatgtcttctcagcttaatttcactcttaaaaaaaataatgaagaaatttataacgatcatttaaatattgctaaagttcctaatttcccaccaattcctaatcagtcaggctacaataggcaatttaagaattttgatcctaatcaattgcaaaaacttttaccctttgaaagcgctaccataatacctagcgatgttgtttacaggcaagctcatatgattcaagcagtgagtaaaatttgcagtaacaaccaattagaagaagaattaaataaacatcttaatcaatttgataacaatatccaatctattagctttaataccaacaaccaactcaaattaaaagtgaaaaatatcaaagaaaaagtcccactatctgtatttggcgatggtttgaagaaatatttgcatattgtaagcgcttttatggctgataacgcaaaaacgatttatattgatgaagtggagaatggcttacacttttctcgcatggaattattattaaggtgtgttattgattttatcaacgacaacaaagatggtaatttgcaagtgtttatgactacccacaaccaagaatttatagaaattctagatcaagttatcagagaaaaggattttgcgcatcaaactaagttgttttgcttagaacaatacaatggttcaatcgttgcagagccttattatggagaaaatttatctctttatttcaagaatagcgccaatctttttggaggtaaagaaaggtttaaagaaaataactatgagtaa

SEQ ID NO: 3017 - DNA (genomic), 1152 bp, Helicobacter pylori; double-stranded, circular
  misc_feature (B) LOCATION 1...1152
  hypothetical: NO
  anti-sense: NO
aggggttcaatgattcagtctgttcgcattaaaaattttaagacttttaaggacactcaaattgatggttttaccaaacttaatattatcaccggccaaaacaatgcgggcaaatccaatttgttagaagcattgtattatttggtaggtaaatccatgcacccatgcactaatgtattagaaatttatgacaatatacgcaaagagcctttaacatcagaatcaaaaaacttgatgttttatggtttagacactgagaaaaaaatacaaatcaccacaactttagacaacaatcaaaccttagacttacaaataaaattcatagccaatgaaaaccaaaaggtaatagagtcgcaaataatacccacagcagaacaaactcaaatgtcttctcagcttaatttcactcttaaaaaaaataatgaagaaatttataacgatcatttaaatattgctaaagttcctaatttcccaccaattcctaatcagtcaggctacaataggcaatttaagaattttgatcctaatcaattgcaaaaacttttaccctttgaaagcgctaccataatacctagcgatgttgtttacaggcaagctcatatgattcaagcagtgagtaaaatttgcagtaacaaccaattagaagaagaattaaataaacatcttaatcaatttgataacaatatccaatctattagctttaataccaacaaccaactcaaattaaaagtgaaaaatatcaaagaaaaagtcccactatctgtatttggcgatggtttgaagaaatatttgcatattgtaagcgcttttatggctgataacgcaaaaacgatttatattgatgaagtggagaatggcttacacttttctcgcatggaattattattaaggtgtgttattgattttatcaacgacaacaaagatggtaatttgcaagtgtttatgactacccacaaccaagaatttatagaaattctagatcaagttatcagagaaaaggattttgcgcatcaaactaagttgttttgcttagaacaatacaatggttcaatcgttgcagagccttattatggagaaaatttatctctttatttcaagaatagcgccaatctttttggaggtaaagaaaggtttaaagaaaataactatgag

SEQ ID NO: 3018 - DNA (genomic), 522 bp, Helicobacter pylori; double-stranded, circular
  misc_feature (B) LOCATION 1...522
  hypothetical: NO
  anti-sense: NO
atggatattttaaaaactcttcaaaagcatttgggcgatgttgaaacaagcgattttaaaaccaatgcgatagaaaaatcccaacaaatcgccaaattcagtagggacatgaaaaatataaacgagagcgttggggcgttgcaagtcttgcagatcgcttgtaaaaaactcctgaataagagcatgggtttggaagataaagacgctttgcaagcttctatcattaaacaagaattgcgagaaattgtagaaaattgccagtttttagcctcccctttgtttgacacccagctcaacattgccattaacgatgaggttttttccatgattgtggataatcctttgaatttattggaaaatgtgggtgggtttcaagcttatttggaagaaaaattaaacgaaattaaggaattattaggctatttgagtgaaagcctttcaaaccccaaagctttcatgccaaaacaaagtttttcaaataaaagccttaaagatttgttgagcgatgatttgagggcttaa

SEQ ID NO: 3019 - DNA (genomic), 543 bp, Helicobacter pylori; double-stranded, circular
  misc_feature (B) LOCATION 1...543
  hypothetical: NO
  anti-sense: NO
tcaattctatttaaaaggttttttatggatattttaaaaactcttcaaaagcatttgggcgatgttgaaacaagcgattttaaaaccaatgcgatagaaaaatcccaacaaatcgccaaattcagtagggacatgaaaaatataaacgagagcgttggggcgttgcaagtcttgcagatcgcttgtaaaaaactcctgaataagagcatgggtttggaagataaagacgctttgcaagcttctatcattaaacaagaattgcgagaaattgtagaaaattgccagtttttagcctcccctttgtttgacacccagctcaacattgccattaacgatgaggttttttccatgattgtggataatcctttgaatttattggaaaatgtgggtgggtttcaagcttatttggaagaaaaattaaacgaaattaaggaattattaggctatttgagtgaaagcctttcaaaccccaaagctttcatgccaaaacaaagtttttcaaataaaagccttaaagatttgttgagcgatgatttgagggct

SEQ ID NO: 3020 - DNA (genomic), 261 bp, Helicobacter pylori; double-stranded, circular
  misc_feature (B) LOCATION 1...261
  hypothetical: NO
  anti-sense: NO
ttgataataaaaaagcttgattttaacggggcgataaaaacattaagggaattagagaccattaggacactctctaaccattacagagacggcaccaactatagcgtttcaaacctttatgggaataccctatcacaaacgagtttaaaacacaaaagccacaacgaactgaacaataaaaaaaataaacatgcaaacacacgcatgcatggaaatttttcacaagtcaaagagacaaaaaaattcttacagactcactag

SEQ ID NO: 3021 - DNA (genomic), 267 bp, Helicobacter pylori; double-stranded, circular
  misc_feature (B) LOCATION 1...267
  hypothetical: NO
  anti-sense: NO
gcaagaaaattgataataaaaaagcttgattttaacggggcgataaaaacattaagggaattagagaccattaggacactctctaaccattacagagacggcaccaactatagcgtttcaaacctttatgggaataccctatcacaaacgagtttaaaacacaaaagccacaacgaactgaacaataaaaaaaataaacatgcaaacacacgcatgcatggaaatttttcacaagtcaaagagacaaaaaaattcttacagactcac

SEQ ID NO: 3022 - DNA (genomic), 759 bp, Helicobacter pylori; double-stranded, circular
  misc_feature (B) LOCATION 1...759
  hypothetical: NO
  anti-sense: NO
atgacaaaacatgaaaactatgaaattttaaatctcataggctatgctttggcaaaatttgataatgactttattaaagaatttggtttttctactaaaaatgctttttttgaatattgcgtccaaatcggcttggctgaaacgactggcgttatcaaaaatcgcatggatttatttgattatttttttcctaataaacgcaaaggctggtggcaaaaaggcgatgcctatatccatagaaaattatggattgatagtttgtttggaaatgaaagcgttaagggttttagtcatattgtgaaatggtttttgcaagaacaatacggaatcaaagatttaggcgttacccctaacgcttaccttaaaacccgctataaaagcatgcaagaaacaggtttagaagccgaattgtatttcttaaaccactataagaacatcaaaacattctcttgtgggcatttaaaagacatgcgtctttttggcgatgggtatgacttctatattcaaatcaacaagcaagcgtttttagtggaagttaaggggattagagaaaaacaaggaacattgagattgacccaaaaagaatacgagcaagcgcaaacttataaccatgattatgtgcttgtagtggtattgaatttgagtgaaaaaccctatcttttatctatcgctaaccctttaaagcatttagagtttaaggcatgcgagaggaagcaaaaaagcattttagaataccacttaatagggcaaataaaataa

SEQ ID NO: 3023 - DNA (genomic), 819 bp, Helicobacter pylori; double-stranded, circular
  misc_feature (B) LOCATION 1...819
  hypothetical: NO
  anti-sense: NO
agtggagcttccccaagaagcgtttttagcgatattaaagatcgattagggcgtttagcttctatgacaaaacatgaaaactatgaaattttaaatctcataggctatgctttggcaaaatttgataatgactttattaaagaatttggtttttctactaaaaatgctttttttgaatattgcgtccaaatcggcttggctgaaacgactggcgttatcaaaaatcgcatggatttatttgattatttttttcctaataaacgcaaaggctggtggcaaaagagcgatgcctatatccatagaaaattatggattgatagtttgtctggaaatgaaagcgttaagggttttagtcatattgtgaaatggtttttgcaagaacaatacggaatcaaagatttaggcgttacccctaacgcttaccttaaaacccgctataaaagcatgcaagaaacaggtttagaagccgaattgtatttcttaaaccactataagaacatcaaaacattctcttgtgggcatttaaaagacatgcgtctttttggcgatgggtatgacttctatattcaaatcaacaagcaagcgtttttagtggaagttaaggggattagagaaaaacaaggaacattgagattgacccaaaaagaatacgagcaagcgcaaacttataaccatgattatgtgcttgtagtggtattgaatttgagtgaaaaaccctatcttttatctatcgctaaccctttaaagcatttagagtttaaggcatgcgagaggaagcaaaaaagcattttagaataccacttaatagggcaaataaaa

SEQ ID NO: 3024 - DNA (genomic), 534 bp, Helicobacter pylori; double-stranded, circular
  misc_feature (B) LOCATION 1...534
  hypothetical: NO
  anti-sense: NO
ttggatgcgcatgaataccagagcgtgttcgctaaacacatcggcgcggtggctgcccctacggcgtcattgcatttttctcaaaatgccttagaaaaattattgaaagatttcaagcacgcttttttaaccttgcatgtgggggctgggacttttcttagcgtagaaactaaggatattagagagcatcaaatccatacagaagttttgcatattcctaaaaagagccaagaaattttgcaagaatcccaagaggttttatgcatcggcacgaccgctttaaggagcgtggaatactttaagcgtttaaaaaaccctaatcaagaatcgtttgaatgcgacatttttttgcatcttgccaatcctatccaacatgtcaatcacttgctcactaatttccatttgcccaaatcaagccttttaatgcttgtaagcgcgatgataggcttagaaaaaaccaaagaaatctacaaaatagccatagaaaagaagtatcgtttttattcttatggcgatgggatgctgattttatga

SEQ ID NO: 3025 - DNA (genomic), 597 bp, Helicobacter pylori; double-stranded, circular
  misc_feature (B) LOCATION 1...597
  hypothetical: NO
  anti-sense: NO
ttgaaagaatttgatttagaaagctatgattatcatttgcctaaggaattgatcgcaaattaccctgttttgcccaaagaaaaagctaaattgctcgtctatgaaaggcgttcgcaaacaatcacgcacaccacttttgagcatgttttagattttttccctaaaaacgcccttgtggtgttgaacgacactaaagtgattaaggctaggctttttggatctaagcatgcctttttaccatcaaaaacgactgaagtgtttttccaccgcttttttaaaggcaacaccgccctaactcaaatcaaaggtaagatcaaagtgggggataagatcttttttgatgcaaattattacgccgaagtcttagaattgcttcataacggtcagcgcttgatcgctttttatgacaatcaaacccccttaaatcaagaaaatatcttaaagcttttagagcaatacgggcatatgccctacctccttatattaaaagagcggatgaaagtttggatgcgcatgaataccagagcgtgttcgctaaacacatcggcgcggtggctgcccctacggcgtcattgcatttttctcaaaatgccttag

SEQ ID NO: 3026 - DNA (genomic), 594 bp, Helicobacter pylori; double-stranded, circular
  misc_feature (B) LOCATION 1...594
  hypothetical: NO
  anti-sense: NO
ttgaaagaatttgatttagaaagctatgattatcatttgcctaaggaattgatcgcaaattaccctgttttgcccaaagaaaaagctaaattgctcgtctatgaaaggcgttcgcaaacaatcacgcacaccacttttgagcatgttttagattttttccctaaaaacgcccttgtggtgttgaacgacactaaagtgattaaggctaggctttttggatctaagcatgcctttttaccatcaaaaacgactgaagtgtttttccaccgcttttttaaaggcaacaccgccctaactcaaatcaaaggtaagatcaaagtgggggataagatcttttttgatgcaaattattacgccgaagtcttagaattgcttcataacggtcagcgcttgatcgctttttatgacaatcaaacccccttaaatcaagaaaatatcttaaagcttttagagcaatacgggcatatgccctacctccttatattaaaagagcggatgaaagtttggatgcgcatgaataccagagcgtgttcgctaaacacatcggcgcggtggctgcccctacggcgtcattgcatttttctcaaaatgcct

SEQ ID NO: 3027 - DNA (genomic), 627 bp, Helicobacter pylori; double-stranded, circular
  misc_feature (B) LOCATION 1...627
  hypothetical: NO
  anti-sense: NO
caatcaaacccccttaaatcaagaaaatatcttaaagcttttagagcaatacgggcatatgccctacctccttatattaaaagagcggatgaaagtttggatgcgcatgaataccagagcgtgttcgctaaacacatcggcgcggtggctgcccctacggcgtcattgcatttttctcaaaatgccttagaaaaattattgaaagatttcaagcacgcttttttaaccttgcatgtgggggctgggacttttcttagcgtagaaactaaggatattagagagcatcaaatccatacagaagttttgcatattcctaaaaagagccaagaaattttgcaagaatcccaagaggttttatgcatcggcacgaccgctttaaggagcgtggaatactttaagcgtttaaaaaaccctaatcaagaatcgtttgaatgcgacatttttttgcatcttgccaatcctatccaacatgtcaatcacttgctcactaatttccatttgcccaaatcaagccttttaatgcttgtaagcgcgatgataggcttagaaaaaaccaaagaaatctacaaaatagccatagaaaagaagtatcgtttttattcttatggcgatgggatgctgatttta

SEQ ID NO: 3028 - DNA (genomic), 1038 bp, Helicobacter pylori; double-stranded, circular
  misc_feature (B) LOCATION 1...1038
  hypothetical: NO
  anti-sense: NO
ttgaaagaatttgatttagaaagctatgattatcatttgcctaaggaattgatcgcaaattaccctgttttgcccaaagaaaaagctaaattgctcgtctatgaaaggcgttcgcaaacaatcacgcacaccacttttgagcatgttttagattttttccctaaaaacgcccttgtggtgttgaacgacactaaagtgattaaggctaggctttttggatctaagcatgcctttttaccatcaaaaacgactgaagtgtttttccaccgcttttttaaaggcaacaccgccctaactcaaatcaaaggtaagatcaaagtgggggataagatcttttttgatgcaaattattacgccgaagtcttagaattgcttcataacggtcagcgcttgatcgctttttatgacaatcaaacccccttaaatcaagaaaatatcttaaagcttttagagcaatacgggcatatgcccttacctccttatattaaaagagcggatgaaagtttggatgcgcatgaataccagagcgtgttcgctaaacacatcggcgcggtggctgcccctacggcgtcattgcatttttctcaaaatgccttagaaaaattattgaaagatttcaagcacgcttttttaaccttgcatgtgggggctgggacttttcttagcgtagaaactaaggatattagagagcatcaaatccatacagaagttttgcatattcctaaaaagagccaagaaattttgcaagaatcccaagaggttttatgcatcggcacgaccgctttaaggagcgtggaatactttaagcgtttaaaaaaccctaatcaagaatcgtttgaatgcgacatttttttgcatcttgccaatcctatccaacatgtcaatcacttgctcactaatttccatttgcccaaatcaagccttttaatgcttgtaagcgcgatgataggcttagaaaaaaccaaagaaatctacaaaatagccatagaaaagaagtatcgtttttattcttatggcgatgggatgctgattttatga

SEQ ID NO: 3029 - DNA (genomic), 315 bp, Helicobacter pylori; double-stranded, circular
  misc_feature (B) LOCATION 1...315
  hypothetical: NO
  anti-sense: NO
atgactaaaaaaatagaagagaaaatagagggcgtgattgaaagtttgggttatttgctttatgatgtgagtttggttaaagaaaatgagcagcatgttttaagggtgagccttaaaaaccctaatggagcggttagtttggacatttgccaacaagtgagcgagatcatttcgcccttattagatgtgtgcgattttattcaagacgcttatattttggaagtgagctctatggggttagaaagaacgcttaaaacccccaaacacttcaagctttctttaggtcgaaaaagtggaagtcaaactcatcaataa

SEQ ID NO: 3030 - DNA (genomic), 339 bp, Helicobacter pylori; double-stranded, circular
  misc_feature (B) LOCATION 1...339
  hypothetical: NO
  anti-sense: NO
atgaaatcgctaaagggaaagataatgactaaaaaaatagaagagaaaatagagggcgtgattgaaagtttgggttatttgctttatgatgtgagtttggttaaagaaaatgagcagcatgttttaagggtgagccttaaaaaccctaatggagcggttagtttggacatttgccaacaagtgagcgagatcatttcgcccttattagatgtgtgcgattttattcaagacgcttatattttggaagtgagctctatggggttagaaagaacgcttaaaacccccaaacacttcaagctttctttaggtcgaaaaagtggaagtcaaactcatcaataa

SEQ ID NO: 3031 - DNA (genomic), 348 bp, Helicobacter pylori; double-stranded, circular
  misc_feature (B) LOCATION 1...348
  hypothetical: NO
  anti-sense: NO
acgccatattcaatgaaatcgctaaagggaaagataatgactaaaaaaatagaagagaaaatagagggcgtgattgaaagtttgggttatttgctttatgatgtgagtttggttaaagaaaatgagcagcatgttttaagggtgagccttaaaaaccctaatggagcggttagtttggacatttgccaacaagtgagcgagatcatttcgcccttattagatgtgtgcgattttattcaagacgcttatattttggaagtgagctctatggggttagaaagaacgcttaaaacccccaaacacttcaagctttctttaggtcgaaaaagtggaagtcaaactcatcaa

SEQ ID NO: 3032 - DNA (genomic), 945 bp, Helicobacter pylori; double-stranded, circular
  misc_feature (B) LOCATION 1...945
  hypothetical: NO
  anti-sense: NO
aaaaacgggttgcaagtcgtaagcgtccccctagaaaataaaaccggggttatagaagtggatgtgctttataaagtcggctctagaaacgaagtcatgggcaagagcgggatcgctcacatgttagagcatttgaattttaaaagcaccaaaaaccttaaagccggcgaatttgataagatcgtgaagcgttttgggggcgtgagtaacgcttctacgagctttgatattacgcgctacttcattaaaaccagtgaagctaacttggataagtctttagaattgttcgctgaaaccatgggttctttgaatttaaaagaagatgagtttttgcctgagcgtcaaaggtgggtcgctgaagaaaggcgatggcgcaccgataattcccctatcggcatgctttatttccgcttttttaacaccgttatgtctatcacccctaccatggacgccattggttttatggacgatattcaaaactggactttaaagacattaaaattcattcgctctattatcagcctaaaatgctatcgttttagtggtggcgatgtcaattcccaaaaggtttttgaattgactaaaaagcattttgaatccttaaaaaaccttgatgaaaaagctatccccaccccttacatgaaagagcctaaacaagatggggcgagaacggcagtcgtgcataaagatggggtccatttagaatgggtagcgttagggtataaagtgcctgctttcaagcataaagatcaagtcgccctagacgcgttaagcaagcttttaggcgaaggtaaaagctcgtggttacaaagcgaattagtggataaaaagcgcctagcttctcaagccttctcgcacaacatgcaattacaagatgaaagcgtgtttttattcatcgctggggtaatcctaatatcaaagctgaagccttacaaaaagaaatcg

SEQ ID NO: 3033 - DNA (genomic), 942 bp, Helicobacter pylori; double-stranded, circular
  misc_feature (B) LOCATION 1...942
  hypothetical: NO
  anti-sense: NO
aacgggttgcaagtcgtaagcgtccccctagaaaataaaaccggggttatagaagtggatgtgctttataaagtcggctctagaaacgaagtcatgggcaagagcgggatcgctcacatgttagagcatttgaattttaaaagcaccaaaaaccttaaagccggcgaatttgataagatcgtgaagcgttttgggggcgtgagtaacgcttctacgagctttgatattacgcgctacttcattaaaaccagtgaagctaacttggataagtctttagaattgttcgctgaaaccatgggttctttgaatttaaaagaagatgagtttttgcctgagcgtcaaaggtgggtcgctgaagaaaggcgatggcgcaccgataattcccctatcggcatgctttatttccgcttttttaacaccgttatgtctatcacccctaccatggacgccattggttttatggacgatattcaaaactggactttaaagacattaaaattcattcgctctattatcagcctaaaatgctatcgttttagtggtggcgatgtcaattcccaaaaggtttttgaattgactaaaaagcattttgaatccttaaaaaaccttgatgaaaaagctatccccaccccttacatgaaagagcctaaacaagatggggcgagaacggcagtcgtgcataaagatggggtccatttagaatgggtagcgttagggtataaagtgcctgctttcaagcataaagatcaagtcgccctagacgcgttaagcaagcttttaggcgaaggtaaaagctcgtggttacaaagcgaattagtggataaaaagcgcctagcttctcaagccttctcgcacaacatgcaattacaagatgaaagcgtgtttttattcatcgctggggtaatcctaatatcaaagctgaagccttacaaaaagaaatcg

SEQ ID NO: 3034 - DNA (genomic), 1209 bp, Helicobacter pylori; double-stranded, circular
  misc_feature (B) LOCATION 1...1209
  hypothetical: NO
  anti-sense: NO
ttgcaagtcgtaagcgtccccctagaaaataaaaccggggttatagaagtggatgtgctttataaagtcggctctagaaacgaagtcatgggcaagagcgggatcgctcacatgttagagcatttgaattttaaaagcaccaaaaaccttaaagccggcgaatttgataagatcgtgaagcgttttgggggcgtgagtaacgcttctacgagctttgatattacgcgctacttcattaaaaccagtgaagctaacttggataagtctttagaattgttcgctgaaaccatgggttctttgaatttaaaagaagatgagtttttgcctgagcgtcaagtggtcgctgaagaaaggcgatggcgcaccgataattcccctatcggcatgctttatttccgcttttttaacaccgttatgtctatcacccctaccatggacgccattggttttatggacgatattcaaaactggactttaaaagacattaaaaaattccattcgctctattatcagcctaaaaatgctatcgttttagtggtgggcgatgtcaattcccaaaaggtttttgaattgactaaaaagcattttgaatccttaaaaaaccttgatgaaaaagctatccccaccccttacatgaaagagcctaaacaagatggggcgagaacggcagtcgtgcataaagatggggtccatttagaatgggtagcgttagggtataaagtgcctgctttcaagcataaagatcaagtcgccctagacgcgttaagcaagcttttaggcgaaggtaaaagctcgtggttacaaagcgaattagtggataaaaagcgcctagcttctcaagccttctcgcacaacatgcaattacaagatgaaagcgtgtttttattcatcgctgggggtaatcctaatatcaaagctgaagccttacaaaaagaaatcgtagcacttttagaaaagctgaaaaaaggcgaaatcactcaagcggaattagacaaaatcaaaatcaatcaaaaagctgactttatttccaacttagaaagttctagcgatgtggcggggctttttgcggactatttagtgcaaaacgatcttcaaggcttgaccgattatcagcaacaatttttggatttgaaagtgagcgatttggtgcgcgtggctaatgaatattttaaagacacccaatcaaccaccgtgtttttgaaaccttaa

SEQ ID NO: 3035 - DNA (genomic), 219 bp, Helicobacter pylori; double-stranded, circular
  misc_feature (B) LOCATION 1...219
  hypothetical: NO
  anti-sense: NO
aacctaggggttaaacaacatttacacagccactgtgtagcgtttgtggtaggggctcaagaaacggcaaaacgcatgcaaaaaataggcggtggggcgatcgtgagcttaagctctaccgggaatttggtctatatgcctaattacgccgggcatggcaattccaaaaccgccgtagaagaccatggtcaaatacgctgccgtggatttaggcgaatt

SEQ ID NO: 3036 - DNA (genomic), 267 bp, Helicobacter pylori; double-stranded, circular
  misc_feature (B) LOCATION 1...267
  hypothetical: NO
  anti-sense: NO
aagaccatggtcaaatacgctgccgtggatttaggcgaatttaacattagagtgaatgcggttagtggcgggcctattgatacggacgctttgaaagccttccctgattatgtagaaattaaagaaaaagtagaagagcaatcgcccctaaaacgcatgggcaatcctaacgatctagccggggcggcttattttttatgcgatgagacccaaagcggttggcttacagggcaaacgatcgttgtggatggtgggactacttttaaa

SEQ ID NO: 3037 - DNA (genomic), 360 bp, Helicobacter pylori; double-stranded, circular
  misc_feature (B) LOCATION 1...360
  hypothetical: NO
  anti-sense: NO
ggtaattgcatgaatggttccaatcacatgaaaaataaaaccctagtgattagcggtacgacgagagggattggcaaggcgatattgtatcgtttcgctcaaagcggcgtgaatatcgctttcacttacaataaaaatgttgaagaagcgaataaaattatagaagatgtggagcaaaaatattccattaaagccaaagcctacccccttaatgttttagagcctgagcaatacacagagctttttaagcaagttgacgctgatttcgacagagtggatttttttatttccaacgctattatttatgggcgctctgtcgtggggggatttgcgccgtctatgcgattaaaacctaggggt

SEQ ID NO: 3038 - DNA (genomic), 789 bp, Helicobacter pylori; double-stranded, circular
  misc_feature (B) LOCATION 1...789
  hypothetical: NO
  anti-sense: NO
atgaatggttccaatcacatgaaaaataaaaccctagtgattagcggtgcgacgagagggattggcaaggcgatattgtatcgtttcgctcaaagcggcgtgaatatcgctttcacttacaataaaaatgttgaagaagcgaataaaattatagaagatgtggagcaaaaatattccattaaagccaaagcctacccccttaatgttttagagcctgagcaatacacagagctttttaagcaagttgacgctgattttgacagagtggatttttttatttctaacgctattatttatgggcgctctgtcgtggggggatttgcgccgtttatgcgattaaaacctaaggggttaaacaacatttacacagccactgtgttagcgtttgtggtaggggctcaagaagcggcaaaacgcatgcaaaaaataggcggtggggcgatcgtgagcttaagctctaccgggaatttggtctatatgcctaattacgccgggcatggcaattccaaaaacgccgtagaaaccatggtcaaatacgctgccgtggatttaggcgaatttaacattagagtgaatgcggttagtggcgggcctattgatacggacgctttgaaagccttccctgattatgtagaaattaaagaaaaagtagaagagcaatcgcccctaaaacgcatgggcaatcctaacgatctagccggggcggcttattttttatgcgatgagacccaaagcggttggcttacagggcaaacgatcgttgtggatggtgggactacttttaaataa

SEQ ID NO: 3039 - DNA (genomic), 549 bp, Helicobacter pylori; double-stranded, circular
  misc_feature (B) LOCATION 1...549
  hypothetical: NO
  anti-sense: NO
atggatttggaacaagcttttttaaaaattattgaaaaaaaacataaagaattgaatttagggcaagattacaacgctattttttcaaaaattagagattttgaagccaatgctatagggcagattggcgaagagtttttaaaaagtgtgcttaacgctatagatgaagtgatcaatgatggcattattcatgatgaatacgatattatgacaaaaagcggtgtgtcttttgaggtcaaaacagcgcaaaaaggcagaaccaacaacacttttcagttcaatggtataaacccacgatacaactatgattttttgatttgcttaggagtgtgcgaagaccaattgctttatagaatttttaaaaaagatgaaatccattacattcataaagaaagaaaatattttatgaaacaaaatgagtttaaaaagcaattggtgccaatgaatcctgataatcaagtcaatgataagctcactctcaatcttaaagaactgaaagaaattacaaacctcatcaaagagttagagaggattttagagttagattaa

SEQ ID NO: 3040 - DNA (genomic), 549 bp, Helicobacter pylori; double-stranded, circular
  misc_feature (B) LOCATION 1...549
  hypothetical: NO
  anti-sense: NO
ttgatggatttggaacaagcttttttaaaaattattgaaaaaaaacataaagaattgaatttagggcaagattacaacgctattttttcaaaaattagagattttgaagccaatgctatagggcagattggcgaagagtttttaaaaagtgtgcttaacgctatagatgaagtgatcaatgatggcattattcatgatgaatacgatattatgacaaaaagcggtgtgtcttttgaggtcaaaacagcgcaaaaaggcagaaccaacaacacttttcagttcaatggtataaacccacgatacaactatgattttttgatttgcttaggagtgtgcgaagaccaattgctttatagaatttttaaaaaagatgaaatccattacattcataaagaaagaaaatattttatgaaacaaaatgagtttaaaaagcaattggtgccaatgaatcctgataatcaagtcaatgataagctcactctcaatcttaaagaactgaaagaaattacaaacctcatcaaagagttagagaggattttagagttagat

SEQ ID NO: 3041 - DNA (genomic), 312 bp, Helicobacter pylori; double-stranded, circular
  misc_feature (B) LOCATION 1...312
  hypothetical: NO
  anti-sense: NO
agcgttattaaaatgcgttgttttaaagccattgtggcttatgatggggcgtattttttaggctatgccaaacagcctaacaaacttggcgttcaggataaaatagaaagcgctttaaacgcgctagggattaaaagcggcgtaattgcggctggacgcacggataaaggcgtgcatgcgaacaaccaagcgttgtcttttcacgctccaaaacactggaatgccgctaaattgtttcattatctagcccccaaactcgcccccgcacattgtcttaaaaaagctagaagaaaaaaacttccatgcgcgttt

SEQ ID NO: 3042 - DNA (genomic), 492 bp, Helicobacter pylori; double-stranded, circular
  misc_feature (B) LOCATION 1...492
  hypothetical: NO
  anti-sense: NO
cccccaaactcgcccccgcacattgtcttaaaaaagctagaagaaaaaaacttccatgcgcgttttgacgctcaaaaaagagcgtatcgttaccttttgacgaagaatttaaaaacgccttttttagcgccttatatcgcttgcggggattatggctcactagatgcgctaaacattgctttaaagcaatttataggtaagcatgatttttccatgtttaaaaaagaaggcggcgccacaaccaaccctaatcgcatcatctttaacgctttggcttataaaacctttatcatggggcatgaatgcgtggtgtttaaaatcattggcgatgcgtttttacgctccagcgtgcgtttgatcattcaagcatgcgttcaatattccttagaaaaaatcacgctcgctgaaattcaagcgcaaatccataacctcaaagccactataagaacgcccataatggctaatggcttgtatttgcacagggtgtattat

SEQ ID NO: 3043 - DNA (genomic), 729 bp, Helicobacter pylori; double-stranded, circular
  misc_feature (B) LOCATION 1...729
  hypothetical: NO
  anti-sense: NO
atgcgttgttttaaagccattgtggcttatgatggggcgtattttttaggctatgccaaacagcctaacaaacttggcgttcaggataaaatagaaagcgctttaaacgcgctagggattaaaagcggcgtaattgcggctggacgcacggataaaggcgtgcatgcgaacaaccaagcgttgtcttttcacgctccaaaacactggaatgccgctaaattgtttcattatctagcccccaaactcgccccgcacattgtcttaaaaaagctagaagaaaaaaacttccatgcgcgttttgacgctcaaaaaagagcgtatcgttaccttttgacgaagaatttaaaaacgccttttttagcgccttatatcgcttgcggggattatggctcactagatgcgctaaacattgctttaaagcaatttataggtaagcatgatttttccatgtttaaaaaagaaggcggcgccacaaccaaccctaatcgcatcatctttaacgctttggcttataaaacctttatcatggggcatgaatgcgtggtgtttaaaatcattggcgatgcgtttttacgctccagcgtgcgtttgatcattcaagcatgcgttcaatattccttagaaaaaatcacgctcgctgaaattcaagcgcaaatccataacctcaaagccactataagaacgcccataatggctaatggcttgtatttgcacagggtgtattattga

SEQ ID NO: 3044 - DNA (genomic), 1137 bp, Helicobacter pylori; double-stranded, circular
  misc_feature (B) LOCATION 1...1137
  hypothetical: NO
  anti-sense: NO
ttgaaaaagtttgcttatagcgagccttgtttagacgaagaggataaaaaggctgttttagaagttttaaattccaaacaactcacgcagggcaaatattctctcttatttgaagaagctttatgcgagtttttgggcgttaagcatgcgttagcgtttaatagcgcgacttcagcccttttaacgctctataggaattttagcgattttaacgctgatcgtaatgaaataatcaccacccctataagctttgtagcgacggctaacatgctcttagagagcggctatacacccgtatttgccgaagttaaaaacgatggcaatatagatgaattggccctagaaaagcttattactaaaaaaaccaaagccatagtgagcgtggattatgccggtaaaagcgtggaaatagaaagcattcaaaggctttgcaaaaaatattctttgagttttctttctgacagctcgcatgctttagggagcgagtatcaaaacaaaaaagtaggaggctttgcgttagcgagcgtgttcagtttccatgctattaagcctatcaccacggctgaggggggagcggtcgttactaataatagcgaattatatgaaaaaatgaaattgtttcgctctcatggcatgctcaaaaaagatttttttgaaggcgaagtcaaaagcgtagggtataacttccgcttgaatgaaatccaaagcgctttgggtttgagccagcttaaaaaagccccccttttaaggcaaaaaagagaagaagtcgctctaatttatgatgagatttttaaagataacccttatttcacccctttacaccccttgttaaaacaccaaagctctaaccacctttaccctattttaatgcaccaaaaattttttacatgcaaaaaactcattttagaaagtttgcacaaacttggcattttagttcaagtgcattacaagcccatttaccaataccaattgtaccaacagctcttcaacacagccccattaaaaagcgcagaggatttttatagtgctgaaatttccttgccctgtcatgcgaatttagatttagagagcgttcaaaacatcgctcatggcgttttaaaaacttttgagggttttaataggatgggtttcatttag

SEQ ID NO: 3045 - DNA (genomic), 1176 bp, Helicobacter pylori; double-stranded, circular
  misc_feature (B) LOCATION 1...1176
  hypothetical: NO
  anti-sense: NO
cacaagcaaaatcaccccatctcgcttgcaagacttgctcgcttgaaaaagtttgcttatagcgagccttgtttagacgaagaggataaaaaggctgttttagaagttttaaattccaaacaactcacgcagggcaaatattctctcttatttgaagaagctttatgcgagtttttgggcgttaagcatgcgttagcgtttaatagcgcgacttcagcccttttaacgctctataggaattttagcgattttaacgctgatcgtaatgaaataatcaccacccctataagctttgtagcgacggctaacatgctcttagagagcggctatacacccgtatttgccgaagttaaaaacgatggcaatatagatgaattggccctagaaaagcttattactaaaaaaaccaaagccatagtgagcgtggattatgccggtaaaagcgtggaaatagaaagcattcaaaggctttgcaaaaaatattctttgagttttctttctgacagctcgcatgctttagggagcgagtatcaaaacaaaaaagtaggaggctttgcgttagcgagcgtgttcagtttccatgctattaagcctatcaccacggctgaggggggagcggtcgttactaataatagcgaattatatgaaaaaatgaaattgtttcgctctcatggcatgctcaaaaaagatttttttgaaggcgaagtcaaaagcgtagggtataacttccgcttgaatgaaatccaaagcgctttgggtttgagccagcttaaaaaagccccccttttaaggcaaaaaagagaagaagtcgctctaatttatgatgagatttttaaagataacccttatttcacccctttacaccccttgttaaaacaccaaagctctaaccacctttaccctattttaatgcaccaaaaattttttacatgcaaaaaactcattttagaaagtttgcacaaacttggcattttagttcaagtgcattacaagcccatttaccaataccaattgtaccaacagctcttcaacacagccccattaaaaagcgcagaggatttttatagtgctgaaatttccttgccctgtcatgcgaatttagatttagagagcgttcaaaacatcgctcatggcgttttaaaaacttttgagggttttaataggatgggtttcatt

SEQ ID NO: 3046 - DNA (genomic), 348 bp, Helicobacter pylori; double-stranded, circular
  misc_feature (B) LOCATION 1...348
  hypothetical: NO
  anti-sense: NO
aacaccacagcacaccccacgcagtttttaaacaaactaaacgagtttaagagcgatgtttttacgacacccaaagctaaagaatacattgacatagcgagcggatttcataagctttttaagaacgacgctaagatcgccgaaagcctaaaacccgctatcacgaaaaacttaagccaaggtttagcaaccactttaagcggagcgttaaaataccaatggactaaattcacgctagggactttataccgcaacgcacccgatcgcattttaggagtgaaattacctaaagcgctaaacgaagccaccgcaggagcagccttaaagtatcaccttaaaaagagcgct

SEQ ID NO: 3047 - DNA (genomic), 402 bp, Helicobacter pylori; double-stranded, circular
  misc_feature (B) LOCATION 1...402
  hypothetical: NO
  anti-sense: NO
gcggttgaatacattcaaaaaaatcataaacgaatagctgttgaaaagatagaaccaagttttgctaaagatttaaaattgaaatatccagatgatgcaagagcggttatggactatcaagctattaaccacatactaaaagaacacaaaaatttagcgtatgaagacatagctaactatagggaattatccaaacaagctaatgaaaccttaaaactaaaagataatcaaaacagaccggtagtagcgagttttaatcaaataaatggattttttgtagtggtggagcaagtatcaaatgctaagaatgaactaatgctaaaaacaatgtataaggcaagaggaaattataaggatagtttaatctataaaaaaacattagcaaaatctcagaatagcaat

SEQ ID NO: 3048 - DNA (genomic), 429 bp, Helicobacter pylori; double-stranded, circular
  misc_feature (B) LOCATION 1...429
  hypothetical: NO
  anti-sense: NO
cctaataagataaagcagggaacgagtgaaacagaagccaaagattacgccataaatgtaattaaaaccataccagaagtgattgacaaaggcgttaaggttgaacgaaacggcagagtagctattgaataccaaaatataagagtaggtttaaaggataattggaaaggagaaaaatcacctaatcattgggtgataacaggttatgaaaaaaggttagaggatagcgaaagtttatatacatctccaccaattacaaagggtgagactctacccttaaactctaacaaacctgatcctaccacaaacgcgattaaaacgcaagagcctttatacccccttgaacttgccaacgccgaaaagcttgcgaagccgagaaaaacaatacaaaaagttaggactaacaaacgaacaagccaaagaaaggac

SEQ ID NO: 3049 - DNA (genomic), 687 bp, Helicobacter pylori; double-stranded, circular
  misc_feature (B) LOCATION 1...687
  hypothetical: NO
  anti-sense: NO
atttttacacaaaacaacaaaaaaatgattatagaaaaagcctctaacaaagaattagaacttttaaaagacgctaactttaaacaccctgaaaacataagagcgagtttagatcatgatgctatcgctcacatactcaaaaggcatggcgttaattctgtcaatgttaaaaatggtgaaagccctatcacttacgaagatatagcgaattatagatatatcgttaataacgctgatgccattcttaggactttagacaacgaggataaagaagttataagcgcgtttaaacaaatcaacggctatgcggtagtggtagagcaagcgatcaataagaaaaatgaattagttttaaaaacgatgtataagagtaacggagattataaggataataacgcttataagaagttttcaagcacccttacactcaatgctgatgcaaaggtgaaccatgggttgagttcccatagcggtgctacagaaaatcttactcaaaaacctttaaccagtcaagaggatttattaaaagatacagaaaatttaaacgaaaccacacccaaacctacccatttaagccccgttgaacttgccaacgccgaaaagttagcgaagttagaaagcgaagcgaaagttagcgaacaagaatttttaaaagctaaagagcaagagcaaagcgcaaagttgcgt

SEQ ID NO: 3050 - DNA (genomic), 2106 bp, Helicobacter pylori; double-stranded, circular
  misc_feature (B) LOCATION 1...2106
  hypothetical: NO
  anti-sense: NO
gtgatcgcaggaaaccaccgcatccaaggcatgctaaacttcacgcctaaaagccgatacatttacaacaaagcgatcaaggaatattatcatatagacttagagcctgacgagttattagtgcgagtgccaaataaacgcctagacaacaccgagatcaacaatttagcggcttcaagcaatcaaggacgctttaacagcgaaagcgatcacgcgatagcggttttaagccattacgaagccaagttaaaagaattagaaaagaaattagacgctgatagcatctattcattaaaaaacatcgtagcgaataaccttaattttgacaaagccactcatcctaatgtaggcgatagtaatttagcgcttttaatgttcaacatgccaaggaccaaaacgcaagggatagaattactcaactgctggcagaaagcgttttctaacgacattaaaagctatgaaaaagtgaaaaaaatgtttgtagataacgccggaagctttcataatctcatccacgacatgaacttccctaacgtgagtttaaacgcttatttaagcgatatcatggatcgcagttttgcgaatttaaagaattaccaaagcacgagcgagagcttgaaagatttgagcgagaaattctataaaacgagttctttagacatgtttgaaaagagcgatcaacgcgcgagcgatattagcgagattttaggaggagcgatagcgcgctttgcgaggtttgatgatccttctaaggcgttatttgaagcgttaaagagcgataacattaaaaaaggcttgaaagagttcaagatcgcagatgttacaaaagacatgttcgatcctaaaagcaaggaatttaaggacattgacatttacgatttcacgcattaccttttaatggtcaatagagaaccgaatgaaaataaccccgtattaaagcgcttgatacaagccgttaaggacatgcaaaaagaaaaaaagaaagggataaaaaaaccaaagcttgaaacgcctagcgagtggggacaccattatagcgagtttaagggtgatggcttaggcgcgattaacaagctattaaaaactaaaaaaggttttgtagcgggagcgttttataaggaaggtttaggggatattgatttagtttggggtaataaagattacgggttagaacacatcttaaaacgccgagaagatcaagcgcttaacaatggaataaacgaagccgaagccaaagattacgccataagcgtgattaaaacgataccggaagtgattgacaaaggcgttaaggtagaacgaaacggcagagtagctattgaataccaaaatataagagtaggtttaaaggataattggaaaggagaaaaatcacctaatcattgggtgataacaggttatgaaaaaaggttagaggatagcgaaagtttatatacatctccaccaattacaaagggtgagactctacccttaaactctaacaaacctgatcctaccacaaacgcgattaaaacgcaagagcctttatacccccttgaacttgccaacgccgaaaagcttgcgaaattagaaacagagaaagcgtttaaagctgaagcagttaaaaaacttgattttaatgaaattaaaaaactcattgatgaaagcccacgaactggaagcagtatgcctattttaggaatgcaaaatttgaacgcagaagcggttgaatacattcaaaaaaatcataaacgaatagctgttgaaaagatagaaccaagttttgctaaagatttaaaattgaaatatccagatgatgcaagagcggttatggactatcaagctattaaccacatactaaaagaacacaaaaatttagcgtatgaagacatagctaactatagggaattatccaaacaagctaatgaaaccttaaaactaaaagataatcaaaacagaccggtagtagcgagttttaatcaaataaatggattttttgtagtggtggagcaagtatcaaatgctaagaatgaactaatgctaaaaacaatgtataaggcaagaggaaattataaggatagtttaatctataaaaaaacattagcaaaatctcagaatagcaattga

SEQ ID NO: 3051 - DNA (genomic), 3666 bp, Helicobacter pylori; double-stranded, circular
  misc_feature (B) LOCATION 1...3666
  hypothetical: NO
  anti-sense: NO
acttacaaactccaaacaatagcgagcggttttcataagctttttaaaaacgacgccaagatcgccgagagtttaaagcccgctacaacgaaaaatttaagccaaggtttagcgaccactttaagcggagcgttaaaataccaatggactaaattcacgctaggaacgctatacagaaacgcgcccgatcgcattttaggagtgaaattacctaaagcgctaaacgaagccaccgcaggagcagccttaaagtatcacattaaaagagcgcttgagagaagccatttaataagcgattttagtaagaatttagaattaagcgctaaaaattctaaattcactaacaacacgcttaaaatcattgaagagcttaataacggcgttaaacaagcgagtgaggaaatcaaagaaaaagcgtttgatttttctaatgaaaaactcactaacgagcagatcaaagagctattaaataacgcaaaaatccctacaagcgggagagacgctatcacttttggaactaataacctaaatcctgaaatggttgaatttttacacaaaaacaacaaaaaaatgattatagaaaaagcctctaacaaagaattagaacttttaaaagacgctaactttaaacaccctgaaaacataagagcgagtttagatcatgatgctatcgctcacatactcaaaaggcatggcgttaattctgtcaatgttaaaaatggtgaaagccctatcacttacgaagatatagcgaattatagatatatcgttaataacgctgatgccattcttaggactttagacaacgaggataaagaagttataagcgcgtttaaacaaatcaacggctatgcggtagtggtagagcaagcgatcaataagaaaaatgaattagttttaaaaacgatgtataagagtaacggagattataaggataataacgcttataagaagttttcaagcacccttacactcaatgctgatgcaaaggtgaaccatgggttgagttcccatagcggtgctacagaaaatcttactcaaaaacctttaaccagtcaagaggatttattaaaagatacagaaaatttaaacgaaaccacacccaaacctacccatttaagcccccttgaacttgccaacgccgaaaagcttgcgaaattagaaagcgaacaattacaaagcgaacaagaatttttaaaagctaaagagcaagaattaaagcgcaaagaagcgttaaaaaagaaattagaacacgagcgaggcaatgcgggccatattgaaagccagactaaaatagaagtaggagaggatatacccacgcaagtacaagcgcagatccccaagagtagagtaaggctaaacgaacgagagatttacgatctagactatgcgatcgtgaaagcaaaagatctaaaaccaagctttaccacaggcgggacgcaaaagagaacggacatgaacgaagagcagattaaaagcatagcagagaattttgatcccaaaaagatatttgggagcggagggtttgaagatttaccaatcattctacatgacgggcaagtgatcgcaggaaaccaccgcatccaaggcatgctaaacttcacgcctaaaagccgatacatttacaacaaagcgatcaaggaatattatcatatagacttagagcctgacgagttattagtgcgagtgccaaataaacgcctagacaacaccgagatcaacaatttagcggcttcaagcaatcaaggacgctttaacagcgaaagcgatcacgcgatagcggttttaagccattacgaagccaagttaaaagaattagaaaagaaattagacgctgatagcatctattcattaaaaaacatcgtagcgaataaccttaattttgacaaagccactcatcctaatgtaggcgatagtaatttagcgcttttaatgttcaacatgccaaggaccaaaacgcaagggatagaattactcaactgctggcagaaagcgttttctaacgacattaaaagctatgaaaaagtgaaaaaaatgtttgtagataacgccggaagctttcataatctcatccacgacatgaacttccctaacgtgagtttaaacgcttatttaagcgatatcatggatcgcagttttgcgaatttaaagaattaccaaagcacgagcgagagcttgaaagatttgagcgagaaattctataaaacgagttctttagacatgtttgaaaagagcgatcaacgcgcgagcgatattagcgagattttaggaggagcgatagcgcgctttgcgaggtttgatgatccttctaaggcgttatttgaagcgttaaagagcgataacattaaaaaaggcttgaaagagttcaagatcgcagatgttacaaaagacatgttcgatcctaaaagcaaggaatttaaggacattgacatttacgatttcacgcattaccttttaatggtcaatagagaaccgaatgaaaataaccccgtattaaagcgcttgatacaagccgttaaggacatgcaaaaagaaaaaaagaaagggataaaaaaaccaaagcttgaaacgcctagcgagtggggacaccattatagcgagtttaagggtgatggcttaggcgcgattaacaagctattaaaaactaaaaaaggttttgtagcgggagcgttttataaggaaggtttaggggatattgatttagtttggggtaataaagattacgggttagaacacatcttaaaacgccgagaagatcaagcgcttaacaatggaataaacgaagccgaagccaaagattacgccataagcgtgattaaaacgataccggaagtgattgacaaaggcgttaaggtagaacgaaacggcagagtagctattgaataccaaaatataagagtaggtttaaaggataattggaaaggagaaaaatcacctaatcattgggtgataacaggttatgaaaaaaggttagaggatagcgaaagtttatatacatctccaccaattacaaagggtgagactctacccttaaactctaacaaacctgatcctaccacaaacgcgattaaaacgcaagagcctttatacccccttgaacttgccaacgccgaaaagcttgcgaaattagaaacagagaaagcgtttaaagctgaagcagttaaaaaacttgattttaatgaaattaaaaaactcattgatgaaagcccacgaactggaagcagtatgcctattttaggaatgcaaaatttgaacgcagaagcggttgaatacattcaaaaaaatcataaacgaatagctgttgaaaagatagaaccaagttttgctaaagatttaaaattgaaatatccagatgatgcaagagcggttatggactatcaagctattaaccacatactaaaagaacacaaaaatttagcgtatgaagacatagctaactatagggaattatccaaacaagctaatgaaaccttaaaactaaaagataatcaaaacagaccggtagtagcgagttttaatcaaataaatggattttttgtagtggtggagcaagtatcaaatgctaagaatgaactaatgctaaaaacaatgtataaggcaagaggaaattataaggatagtttaatctataaaaaaacattagcaaaatctcagaatagcaattga

SEQ ID NO: 3052 - DNA (genomic), 378 bp, Helicobacter pylori; double-stranded, circular
  misc_feature (B) LOCATION 1...378
  hypothetical: NO
  anti-sense: NO
aaaagtgaattttcttggtataagaatcgccataaagaaccctttagcgaatatatcaaggttttcacggtttcattggctaaaaacagagaatgcggtaaagagtggatttttaatcaaaaagcgtctttttacatttcatcaactttttataaaagcacacaaattgtagagaactttgaggaagttaagtatcaatctggtattgctgtggtatttactagcgctgacaaggttttaaacgctaaattaaaaaaactattccaagaaattgattggacaaaatacgcaagtttagcgactaattcttgctatcatttaggaaaaagccatatttttcaagccctacatgatcatttggatagtttaaagggtaat

SEQ ID NO: 3053 - DNA (genomic), 531 bp, Helicobacter pylori; double-stranded, circular
  misc_feature (B) LOCATION 1...531
  hypothetical: NO
  anti-sense: NO
atttttttcatgcaaaccctgtttaaagaaattacctctaaatgctatgtcaatggcaatgagatgaaagaaaattctagcaatgttctagatcagtatttcactaagcctagtgtggctttaaaatgcttccaaaaagcttgtgaagttattaaaaaatacgaaaatccagatgactttattttttttagaaccaagtgccggggtgatggggtgttttatgacttgtttcctaaagatagacgcattggcatagacattgaacctaaaagagatggtttcattcaatgcgattttttaaattataaattgcctgtgcatcaaaaagtgatttgcttgggcaaccctccttttgggcatcgtggggttatggcgttagaatttatcaaccatgctagaaattgtgattttgtgtgttttatcctacccatgttctttgaaagtcaaggaaaaggctctatcaagtatcgcgtgaaaggtttaaatctgctttatagcgaagcgcttagaaaaaaatgcgtttatagattt

SEQ ID NO: 3054 - DNA (genomic), 963 bp, Helicobacter pylori; double-stranded, circular
  misc_feature (B) LOCATION 1...963
  hypothetical: NO
  anti-sense: NO
atgcaaaccctgtttaaagaaattacctctaaatgctatgtcaatggcaatgagatgaaagaaaattctagcaatgttctagatcagtatttcactaagcctagtgtggctttaaaatgcttccaaaaagcttgtgaagttattaaaaaatacgaaaatccagatgactttatttttttagaaccaagtgcgggcgatggggtgttttatgacttgtttcctaaagatagacgcattggcatagacattgaacctaaaagagatggtttcattcaatgcgattttttaaattataaattgcctgtgcatcaaaaagtgatttgcttgggcaaccctccttttgggcatcgtggggttatggcgttagaatttatcaaccatgctagaaattgtgattttgtgtgttttatcctacccatgttctttgaaagtcaaggaaaaggctctatcaagtatcgcgtgaaaggtttaaatctgctttatagcgaacgcttagaaaaaaatgcgtttatagattttaaaaataaagaagtggatgtgcattgcgtgtttcaaatttggagcaaaaagtatcaaaataaaaaaagtgaattttcttggtataagaatcgccataaagaaccctttagcgaatatatcaaggttttcacggtttcattggctaaaaacagagaatgcggtaaagagtggatttttaatcaaaaagcgtctttttacatttcatcaactttttataaaagcacacaaattgtagagaactttgaggaagttaagtatcaatctggtattgctgtggtatttactagcgctgacaaggttttaaacgctaaattaaaaaaactattccaagaaattgattggacaaaatacgcaagtttagcgactaattcttgctatcatttaggaaaaagccatatttttcaagccctacatgatcatttggatagtttaaagggtaattga

SEQ ID NO: 3055 - DNA (genomic), 606 bp, Helicobacter pylori; double-stranded, circular
  misc_feature (B) LOCATION 1...606
  hypothetical: NO
  anti-sense: NO
atgtctaagatttcaaatcattataacccgtctttaacgatgagggattaccatagtcaaagggttagtccgcacgcaagaaaagaagaaaataaggaaattcaaaatctttcagagaatgatgaaaagatcaaattagccaaacaagccaagcaggataacctagccataggggatttagaaagccgtctcaaaagcttaaaaggcatggataaagacgctaaagaattggtggggatttctaaatcttacgctcataacaatgaaaaagatcgaagcgattttgagcgtttcaaaagccgtttggacaaagcgattgattctttcaatcaaaatttagataatggtgcggctagtttgaaactccctagcgatattgatattgatgacacaaaggctttggaaaaattttcaaaatcattagaaagtgaaaaagaaagcattcaaaactctttgcaccagtggaaaaaacagctcgctgaaacgaatcatttgaacaaggaatacaacaccttagataaaacaagattgaacgctcaaaaattccaagatgtccatgacacaagcaaaatcaccccatctcgcttgcaagacttgctcgcttga

SEQ ID NO: 3056 - DNA (genomic), 651 bp, Helicobacter pylori; double-stranded, circular
  misc_feature (B) LOCATION 1...651
  hypothetical: NO
  anti-sense: NO
agtttgcttgtcttatctttaagaaaatcaaacgaaatggaggataggatgtctaagatttcaaatcattataacccgtctttaacgatgagggattaccatagtcaaagggttagtccgcacgcaagaaaagaagaaaataaggaaattcaaaatctttcagagaatgatgaaaagatcaaattagccaaacaagccaagcaggataacctagccataggggatttagaaagccgtctcaaaagcttaaaaggcatggataaagacgctaaagaattggtggggatttctaaatcttacgctcataacaatgaaaaagatcgaagcgattttgagcgtttcaaaagccgtttggacaaagcgattgattctttcaatcaaaatttagataatggtgcggctagtttgaaactccctagcgatattgatattgatgacacaaaggctttggaaaaattttcaaaatcattagaaagtgaaaaagaaagcattcaaaactctttgcaccagtggaaaaaacagctcgctgaaacgaatcatttgaacaaggaatacaacaccttagataaaacaagattgaacgctcaaaaattccaagatgtccatgacacaagcaaaatcaccccatctcgcttgcaagacttgctcgct

SEQ ID NO: 3057 - DNA (genomic), 381 bp, Helicobacter pylori; double-stranded, circular
  misc_feature (B) LOCATION 1...381
  hypothetical: NO
  anti-sense: NO
atgcttcctactaaaacacgcattagagatccgaacaagcaagaacttacacaaccaaaaataaaaggattgagtatgggaaaaattttagcttctttgttgggtggcggaacaaatctttttacaggtttatccagtgatttgttttctatgatattaaattttttgttcttcctgatgttaatgatgggacttaatgaagcattagggaaaaaatttaacttgcctatggacaatatcaagaattttatggcagaagtgctgaagaatggattcgatagtatcaaaaacatgggatctgctttggttggtaatggttttggtagcagcaaatcagacaaaaccactaataaaatgagtgtcccacaagtaagactctag

SEQ ID NO: 3058 - DNA (genomic), 378 bp, Helicobacter pylori; double-stranded, circular
  misc_feature (B) LOCATION 1...378
  hypothetical: NO
  anti-sense: NO
atgcttcctactaaaacacgcattagagatccgaacaagcaagaacttacacaaccaaaaataaaaggattgagtatgggaaaaattttagcttctttgttgggtggcggaacaaatctttttacaggtttatccagtgatttgttttctatgatattaaattttttgttcttcctgatgttaatgatgggacttaatgaagcattagggaaaaaatttaacttgcctatggacaatatcaagaattttatggcagaagtgctgaagaatggattcgatagtatcaaaaacatgggatctgctttggttggtaatggttttggtagcagcaaatcagacaaaaccactaataaaatgagtgtcccacaagtaagactc

SEQ ID NO: 3059 - DNA (genomic), 393 bp, Helicobacter pylori; double-stranded, circular
  misc_feature (B) LOCATION 1...393
  hypothetical: NO
  anti-sense: NO
gtatgctattgtgaaatgcttcctactaaaacacgcattagagatccgaacaagcaagaacttacacaaccaaaaataaaaggattgagtatgggaaaaattttagcttctttgttgggtggcggaacaaatctttttacaggtttatccagtgatttgttttctatgatattaaattttttgttcttcctgatgttaatgatgggacttaatgaagcattagggaaaaaatttaacttgcctatggacaatatcaagaattttatggcagaagtgctgaagaatggattcgatagtatcaaaaacatgggatctgctttggttggtaatggttttggtagcagcaaatcagacaaaaccactaataaaatgagtgtcccacaagtaagactc

SEQ ID NO: 3060 - DNA (genomic), 180 bp, Helicobacter pylori; double-stranded, circular
  misc_feature (B) LOCATION 1...180
  hypothetical: NO
  anti-sense: NO
ttgtttggtggcaaaatatttgatttgtttgcgattggtggttacttatcgcttgatttcatgagtaatcttagattcaagaattttgttagtagctttaggtatgctattgtgaaatgcttcctactaaaacacgcattagagatccgaacaagcaagaacttacacaaccaaaaataa

SEQ ID NO: 3061 - DNA (genomic), 195 bp, Helicobacter pylori; double-stranded, circular
  misc_feature (B) LOCATION 1...195
  hypothetical: NO
  anti-sense: NO
aaacaaaaaggatatggcttgtttggtggcaaaatatttgatttgtttgcgattggtggttacttatcgcttgatttcatgagtaatcttagattcaagaattttgttagtagctttaggtatgctattgtgaaatgcttcctactaaaacacgcattagagatccgaacaagcaagaacttacacaaccaaaaa

SEQ ID NO: 3062 - DNA (genomic), 192 bp, Helicobacter pylori; double-stranded, circular
  misc_feature (B) LOCATION 1...192
  hypothetical: NO
  anti-sense: NO
ttgtgtgaaaatttcagagcggtcataattcaaagagcaagaaaccattttttaaccataagatattgtttcaatcactcttatatctatttttcaaaacctacaaaaaacgctttcataaatagccctaaaaaccgatttaaaaaagttttaatattatatattatttttaaaaagcaagatcagtcgtaa

SEQ ID NO: 3063 - DNA (genomic), 336 bp, Helicobacter pylori; double-stranded, circular
  misc_feature (B) LOCATION 1...336
  hypothetical: NO
  anti-sense: NO
ccgggagctttgccggtgttgaataaagaagtggttaaaaaagccatccaattaggcacagccattgaagcccatatcaaccagtattccatttttgcgaggaaaaattatttttaccctgatttgcctaaggcttatcaaatttcgcagtttgaagtccccattgtgagcgatgggaaattagagattgacaccaaagagggcgcaaaaatcgtgcgtattgaaagagcccacatggaagaagacgccggtaaaaatatccatgagggcagctattctcttggtggacttgaatcgcgcttgcacccaagagctagtattcgtcccagcggttgg

SEQ ID NO: 3064 - DNA (genomic), 339 bp, Helicobacter pylori; double-stranded, circular
  misc_feature (B) LOCATION 1...339
  hypothetical: NO
  anti-sense: NO
agaattgcgggattagcgctcatgcgcaggcgcttagccaaacgcattgatgagggcaagatttcgggtaagagtgctaaagatgtgttagataggcttttagaagaacaagggggcgatgtggatacccctattgaacaaatgggcttgtctcaagtcaatgacacggaagcgattgttaaagtcatagaagaagtgttaaaaaacaacgccgacaaggtgcttgaatataaaagcggtaaggacaagctttttgggttttttgtagggcaagcgatgaaaaatttaaaaggggctaatcctagcgtggtgaatgctattttgaaagagaaattggat

SEQ ID NO: 3065 - DNA (genomic), 486 bp, Helicobacter pylori; double-stranded, circular
  misc_feature (B) LOCATION 1...486
  hypothetical: NO
  anti-sense: NO
aatagctttagattcatcgctaaagcgattgaatacgagatagagcgccaaagcgtggcgtgggagaacgggcgttataatgaagaggtggttcaagaaacgcgcctttttgacaccgccaaagggatcaccctttctatgcgcaataaagaagagtcagcggattaccgctactttaaagatccggatttgtatcctgtttttattgatgagaaacttttaaaagaagctcaaaagatcaatgaattgccgggtgcgaaaaaaatccgctacatgaaagattttaaccttaaagaagacgatgcgaatttattggtgagcgatcctttattggcggagtattttgaaagcatgcttaatcttggggttaaggctaaaacgagcgtaacatggctttgtgtggaattattagggcgcttgaaggctgaagttactttagagaattgcgggattagcgctcatgcgcaggcgcttagccaaacgcat

SEQ ID NO: 3066 - DNA (genomic), 483 bp, Helicobacter pylori; double-stranded, circular
  misc_feature (B) LOCATION 1...483
  hypothetical: NO
  anti-sense: NO
agctttagattcatcgctaaagcgattgaatacgagatagagcgccaaagcgtggcgtgggagaacgggcgttataatgaagaggtggttcaagaaacgcgcctttttgacaccgccaaagggatcaccctttctatgcgcaataaagaagagtcagcggattaccgctactttaaagatccggatttgtatcctgtttttattgatgagaaacttttaaaagaagctcaaaagatcaatgaattgccgggtgcgaaaaaaatccgctacatgaaagattttaaccttaaagaagacgatgcgaatttattggtgagcgatcctttattggcggagtattttgaaagcatgcttaatcttggggttaaggctaaaacgagcgtaacatggctttgtgtggaattattagggcgcttgaaggctgaagttactttagagaattgcgggattagcgctcatgcgcaggcgcttagccaaacgcat

SEQ ID NO: 3067 - DNA (genomic), 1392 bp, Helicobacter pylori; double-stranded, circular
  misc_feature (B) LOCATION 1...1392
  hypothetical: NO
  anti-sense: NO
atgtccaactcaacactaaaacccaaaatcttttgctcttgctccacaagttttggagaaacccctaattctaacacctgccctgtgtgtttgggattaccgggagctttgccggtgttgaataaagaagtggttaaaaaagccatccaattaggcacagccattgaagcccatatcaaccagtattccatttttgcgaggaaaaattatttttaccctgatttgcctaaggcttatcaaatttcgcagtttgaagtccccattgtgagcgatgggaaattagagattgacaccaaagagggcgcaaaaatcgtgcgtattgaaagagcccacatggaagaagacgccggtaaaaatatccatgagggcagctattctttggtggatttgaatcgcgcttgcacccctttattagaaattgtcagcaagccggacatgaaaaatagtgaagaagccatagcgtatttgaaaaagctccatgctatcgtgcgttttatagggatttctgatgcaaacatgcaagaggggaatttcaggtgcgatgcgaacgtgtccattaggcccaaaggcgatgaaaagctttacacgagggtagaaatcaaaaacttgaatagctttagattcatcgctaaagcgattgaatacgagatagagcgccaaagcgtggcgtgggagaacgggcgttataatgaagaggtggttcaagaaacgcgcctttttgacaccgccaaagggatcaccctttctatgcgcaataaagaagagtcagcggattaccgctactttaaagatccggatttgtatcctgtttttattgatgagaaacttttaaaagaagctcaaaagatcaatgaattgccgggtgcgaaaaaaatccgctacatgaaagattttaaccttaaagaagacgatgcgaatttattggtgagcgatcctttattggcggagtattttgaaagcatgcttaatcttggggttaaggctaaaacgagcgtaacatggctttgtgtggaattattagggcgcttgaaggctgaagttactttagagaattgcgggattagcgctcatgcgctaggcgctttagccaaacgcattgatgagggcaagatttcgggtaagagtgctaaagatgtgttagataggcttttagaagaacaagggggcgatgtggatacccttattgaacaaatgggcttgtctcaagtcaatgacacggaagcgattgttaaagtcatagaagaagtgttaaaaaacaacgccgacaaggtgcttgaatataaaagcggtaaggacaagctttttgggttttttgtagggcaagcgatgaaaaatttaaaaggggctaatcctagcgtggtgaatgctattttgaaagagaaattggattga

SEQ ID NO: 3068 - DNA (genomic), 732 bp, Helicobacter pylori; double-stranded, circular
  misc_feature (B) LOCATION 1...732
  hypothetical: NO
  anti-sense: NO
atgaaagacactctgtttaatgaatccctaaacaaacgcttttgttttgatgagaaagtcgcccatgtttttgatgacatgctggagcgttccatcccctattatcatgaaatgttgaatctgggggcgtattttatcgctcaaaatttaaaagaaaatgtctatcataagtccttgcctaagcccttgatttatgatttgggctgttctaccgggaacttttttatcgcgcttaaccaacagatccaacaggatattgagcttgtagggattgacaattccatgcccatgctcaaaaaagcgcaagaaaaattaaaagattttaacaatgtccgttttgaatgcatggattttttagaggttaagtttaaagaagcgagcgcgttttcattgctttttgtgttgcaatttgtccgccccatgcaaagagaggtgttgctcaaaaagatttataacagccttgcgttgaatggggttttattggtgggcgaaaagatcatgagcgaagatcggatattagacaagcaaatgatagaactatactacctttataaacaaaatcagggttatagccacaatgaaatcgctttcaaaagggaagcgttagaaaatgtgcttgtgccttatagtttaaaagaaaatatcgcgcttttagaaagcgtggggtttaagcatgtggaagcgctgtttaaatgggtgaatttcacgctgttagttgccagaaaaacttaa

SEQ ID NO: 3069 - DNA (genomic), 729 bp, Helicobacter pylori; double-stranded, circular
  misc_feature (B) LOCATION 1...729
  hypothetical: NO
  anti-sense: NO
atgaaagacactctgtttaatgaatccctaaacaaacgcttttgttttgatgagaaagtcgcccatgtttttgatgacatgctggagcgttccatcccctattatcatgaaatgttgaatctgggggcgtattttatcgctcaaaatttaaaagaaaatgtctatcataagtccttgcctaagcccttgatttatgatttgggctgttctaccgggaacttttttatcgcgcttaaccaacagatccaacaggatattgagcttgtagggattgacaattccatgcccatgctcaaaaaagcgcaagaaaaattaaaagattttaacaatgtccgttttgaatgcatggattttttagaggttaagtttaaagaagcgagcgcgttttcattgctttttgtgttgcaatttgtccgccccatgcaaagagaggtgttgctcaaaaagatttataacagccttgcgttgaatggggttttattggtgggcgaaaagatcatgagcgaagatcggatattagacaagcaaatgatagaactatactacctttataaacaaaatcagggttatagccacaatgaaatcgctttcaaaagggaagcgttagaaaatgtgcttgtgccttatagtttaaaagaaaatatcgcgcttttagaaagcgtggggtttaagcatgtggaagcgctgtttaaatgggtgaatttcacgctgttagttgccagaaaaact

SEQ ID NO: 3070 - DNA (genomic), 228 bp, Helicobacter pylori; double-stranded, circular
  misc_feature (B) LOCATION 1...228
  hypothetical: NO
  anti-sense: NO
atgcaatctttaagtttattgaaccagttgggcgctaaaattgatgaattgattgaaaaaatccaaaaacaagaagaagagttgagcgctttacgccaagcaaacaccacactgaatgcgcaaaatgaagaaaaagacattcaaatcgctattttatacgatgaattgagtgctaaagataagggtattcaaggtctttatgacaaaatctctgatttattgtcataa

SEQ ID NO: 3071 - DNA (genomic), 252 bp, Helicobacter pylori; double-stranded, circular
  misc_feature (B) LOCATION 1...252
  hypothetical: NO
  anti-sense: NO
cttttaaaaaccatagaaaggcttatgatgcaatctttaagtttattgaaccagttgggcgctaaaattgatgaattgattgaaaaaatccaaaaacaagaagaagagttgagcgctttacgccaagcaaacaccacactgaatgcgcaaaatgaagaaaaagacattcaaatcgctattttatacgatgaattgagtgctaaagataagggtattcaaggtctttatgacaaaatctctgatttattgtca

SEQ ID NO: 3072 - DNA (genomic), 558 bp, Helicobacter pylori; double-stranded, circular
  misc_feature (B) LOCATION 1...558
  hypothetical: NO
  anti-sense: NO
gtgcaacaaaatgagcaagaggtagaggataaagaaaaagagtctaaagagccggtggttttagaagatttgagcgctttagcatggcttgaattagaagaatttagccgcctttcagagcttcctaaagaaaggatcttggaattagtcaatatcggtaaaattaaaagcaagataagccacaacaagcttttaattgatgcgagcagcgggacaaacgctctaatcaaaaaagtagaaaacaatttgatttctatggatatgaacgggcgttctttagagcctgtgtttgtggaaaagaccattaacacgattttaaacttgcatgataaagtcattagcgctaaagacgaaacgatttcagcctttaaaaatgaaaacatgtttttaaaagacgctttaatctctatgcaagaagtctatgaagaagataaaaaaaccattgatcttttgcacgatgaactcaatcaagccagagaagaaattgaattcatgaagaggaaataccgcttgatgtgggggaaagtcgctgacatgagcagcgtgaataaaaagtag

SEQ ID NO: 3073 - DNA (genomic), 558 bp, Helicobacter pylori; double-stranded, circular
  misc_feature (B) LOCATION 1...558
  hypothetical: NO
  anti-sense: NO
gtgaagacaaatgagcaagaggtagaggataaagaaaaagagtctaaagagccggtggttttagaagatttgagcgctttagcatggcttgaattagaagaatttagccgcctttcagagcttcctaaagaaaggatcttggaattagtcaatatcggtaaaattaaaagcaagataagccacaacaagcttttaattgatgcgagcagcgggacaaacgctctaatcaaaaaagtagaaaacaatttgatttctatggatatgaacgggcgttctttagagcctgtgtttgtggaaaagaccattaacacgattttaaacttgcatgataaagtcattagcgctaaagacgaaacgatttcagcctttaaaaatgaaaacatgtttttaaaagacgctttaatctctatgcaagaagtctatgaagaagataaaaaaaccattgatcttttgcacgatgaactcaatcaagccagagaagaaattgaattcatgaagaggaaataccgcttgatgtgggggaaagtcgctgacatgagcagcgtgaataaaaagtag

SEQ ID NO: 3074 - DNA (genomic), 558 bp, Helicobacter pylori; double-stranded, circular
  misc_feature (B) LOCATION 1...558
  hypothetical: NO
  anti-sense: NO
gcggtgcaacaaaatgagcaagaggtagaggataaagaaaaagagtctaaagagccggtggttttagaagatttgagcgctttagcatggcttgaattagaagaatttagccgcctttcagagcttcctaaagaaaggatcttggaattagtcaatatcggtaaaattaaaagcaagataagccacaacaagcttttaattgatgcgagcagcgggacaaacgctctaatcaaaaaagtagaaaacaatttgatttctatggatatgaacgggcgttctttagagcctgtggttgtggaaaagaccattaacacgattttaaacttgcatgataaagtcattagcgctaaagacgaaacgatttcagcctttaaaaatgaaaacatgtttttaaaagacgctttaatctctatgcaagaagtctatgaagaagataaaaaaaccattgatcttttgcacgatgaactcaatcaagccagagaagaaattgaattcatgaagaggaaataccgcttgatgtgggggaaagtcgctgacatgagcagcgtgaataaaaag

SEQ ID NO: 3075 - DNA (genomic), 948 bp, Helicobacter pylori; double-stranded, circular
  misc_feature (B) LOCATION 1...948
  hypothetical: NO
  anti-sense: NO
atgctttttgctatgattggttcaggggggtttatcgcacccaagcacttgcaagcgattagagatacggggcattttttggattgctcttttgatgttcatgatagcgtgggggttttagatgagtatttcccgcaatcagagttttttaccaatattgaagattttgaaaagcatttagagcagtctaaggctatgggtaaagaaatcaactatttgagtgtttgcacgcccacgcacacgcattttgatcacatccgtttcgggttaagaaacggcatgcatgtgatttgtgaaaaacctttagttttagaccctagcgaaatacaggaattaaaagatctagaggtgaaataccaaaaaagggtgttcagtcttttgcccttgcgtttgcattgcgacactctggctttgaaagaaaaaattaagagtgaattagacaaaaaccctgaaaaggtgtttgacatcacgctcacttatatcagcgttcaagggaaatggtatttttcttcatggcgagccgatgtgaataggagtggggggttagccactcaaatgggagtgaatatttttgacactttattgtatttgtttggaggcgttaaagacaaggttatcaatagagaagagcctgattgcgtgtgcgggatactctttttagagcatgccaaaataagatggtttttttccatcaatccagaacacatgggagtggctaaagaaaaagtttatcataaaatgatcctagagggcgaagaagtcaatctcacgcaaagctttgataacctgtatatagaaagctacaaacagattttagctcaaggggggtttggcttggatgatgctgcggcgtctatcaaattggcttatgaattaagaaacctctctcttagcgaacccaatgatgattcgcatgctttgtgttgtaaaaacaaaacagaccaataa

SEQ ID NO: 3076 - DNA (genomic), 945 bp, Helicobacter pylori; double-stranded, circular
  misc_feature (B) LOCATION 1...945
  hypothetical: NO
  anti-sense: NO
atgctttttgctatgattggttcaggggggtttatcgcacccaagcacttgcaagcgattagagatacggggcattttttggattgctcttttgatgttcatgatagcgtgggggttttagatgagtatttcccgcaatcagagttttttaccaatattgaagattttgaaaagcatttagagcagtctaaggctatgggtaaagaaatcaactatttgagtgtttgcacgcccacgcacacgcattttgatcacatccgtttcgggttaagaaacggcatgcatgtgatttgtgaaaaacctttagttttagaccctagcgaaatacaggaattaaaagatctagaggtgaaataccaaaaaagggtgttcagtcttttgcccttgcgtttgcattgcgacactctggctttgaaagaaaaaattaagagtgaattagacaaaaaccctgaaaaggtgtttgacatcacgctcacttatatcagcgttcaagggaaatggtatttttcttcatggcgagccgatgtgaataggagtggggggttagccactcaaatgggagtgaatatttttgacactttattgtatttgtttggaggcgttaaagacaaggttatcaatagagaagagcctgattgcgtgtgcgggatactctttttagagcatgccaaaataagatggtttttttccatcaatccagaacacatgggagtggctaaagaaaaagtttatcataaaatgatcctagagggcgaagaagtcaatctcacgcaaagctttgataacctgtatatagaaagctacaaacagattttagctcaaggggggtttggcttggatgatgctgcggcgtctatcaaattggcttatgaattaagaaacctctctcttagcgaacccaatgatgattcgcatgctttgtgttgtaaaaacaaaacagaccaa

SEQ ID NO: 3077 - DNA (genomic), 315 bp, Helicobacter pylori; double-stranded, circular
  misc_feature (B) LOCATION 1...315
  hypothetical: NO
  anti-sense: NO
atgaatgtgtttgaaaaaataatccaaggcgaaatcccttgttctaagattttagaaaacgagcgttttttatccttttatgacattaaccctaaagccaaagtgcatgcgttagtgatccctaaacaaagcattcaagattttaatggcatcaccccagagcttatggcgcaaatgacaagttttatttttgaagtggtggaaaaattaggcatcaaagagaagggttacaagcttttaacgaatgtgggtaaaaacgcggggcaagaggtgatgcatttgcattttcatattttaagcggagataaacattaa

SEQ ID NO: 3078 - DNA (genomic), 357 bp, Helicobacter pylori; double-stranded, circular
  misc_feature (B) LOCATION 1...357
  hypothetical: NO
  anti-sense: NO
tacaactttaataaaagaaaaaccttaaaagggagtaaaaagagcatgaatgtgtttgaaaaaataatccaaggcgaaatcccttgttctaagattttagaaaacgagcgttttttatccttttatgacattaaccctaaagccaaagtgcatgcgttagtgatccctaaacaaagcattcaagattttaatggcatcaccccagagcttatggcgcaaatgacaagttttatttttgaagtggtggaaaaattaggcatcaaagagaagggttacaagcttttaacgaatgtgggtaaaaacgcggggcaagaggtgatgcatttgcattttcatattttaagcggagataaacat

SEQ ID NO: 3079 - DNA (genomic), 162 bp, Helicobacter pylori; double-stranded, circular
  misc_feature (B) LOCATION 1...162
  hypothetical: NO
  anti-sense: NO
aatgggctttttagtccattcggccagcgcatcaggcgcattagctggaaagatgtggagcctgcatcctttagcgcctctaatagcatcaataaagaaaatatcaccggcaccacgcgcattgaaaacgacaaaaccctgctcattttggatttaggaagc

SEQ ID NO: 3080 - DNA (genomic), 177 bp, Helicobacter pylori; double-stranded, circular
  misc_feature (B) LOCATION 1...177
  hypothetical: NO
  anti-sense: NO
aaccatctcaaaataaggacgcctaacatggcagaaaaaacagctaacgatttaaaattgagtgagatagaactcgtggattttcgtatttatggcatgcaagagggcgtcccttatgaggggatttatggcattaatgtggctaaagtccaagaaatcatccccatgcccaccctt

SEQ ID NO: 3081 - DNA (genomic), 195 bp, Helicobacter pylori; double-stranded, circular
  misc_feature (B) LOCATION 1...195
  hypothetical: NO
  anti-sense: NO
attcgctttagaaagcatcttagacgatttaagcttaatgaagacgctaaaagcactaaggaagacatccctaaagagcgttttgaaggcgaagtgttgtttttagatgatagcagaacggcgaggaaaaccttaaagaaccatttgagtaaattgggttttagcatcacggaagctgtgatggggaagacgggc

SEQ ID NO: 3082 - DNA (genomic), 192 bp, Helicobacter pylori; double-stranded, circular
  misc_feature (B) LOCATION 1...192
  hypothetical: NO
  anti-sense: NO
cgctttagaaagcatcttagacgatttaagcttaatgaagacgctaaaagcactaaggaagacatccctaaagagcgttttgaaggcgaagtgttgtttttagatgatagcagaacggcgaggaaaaccttaaagaaccatttgagtaaattgggttttagcatcacggaagctgtgatggggaagacgggc

SEQ ID NO: 3083 - DNA (genomic), 267 bp, Helicobacter pylori; double-stranded, circular
  misc_feature (B) LOCATION 1...267
  hypothetical: NO
  anti-sense: NO
tttgagctccacgatcattccgcttattctttggctaaatggatagggattgtcccggataaaagcaaggaaaatgaaagaatcgtcatcatcactgaatttaacaacgttaaaatgggctttttagtccattcggccagcgcatcaggcgcattagctggaaagatgtggagcctgcatcctttagcgcctctaatagcatcaataaagaaaatatcaccggcaccacgcgcattgaaaacgacaaaaccctgctcattttggatt

SEQ ID NO: 3084 - DNA (genomic), 654 bp, Helicobacter pylori; double-stranded, circular
  misc_feature (B) LOCATION 1...654
  hypothetical: NO
  anti-sense: NO
atggcagaaaaaacagctaacgatttaaaattgagtgagatagaactcgtggattttcgtatttatggcatgcaagagggcgtcccttatgaggggatttatggcattaatgtggctaaagtccaagaaatcatccccatgcccaccctttttgaataccccactaatctagattacattatcggcgtgtttgatttgcgctccacgatcattccgcttattgatttggctaaatggatagggattgtcccggataaaagcaaggaaaatgaaagaatcgtcatcatcactgaatttaacaacgttaaaatgggctttttagtccattcggccaggcgcatcaggcgcattagctggaaagatgtggagcctgcatcctttagcgcctctaatagcatcaataaagaaaatatcaccggcaccacgcgcattgaaaacgacaaaaccctgctcattttggatttagaaagcattttagacgatttaaagcttaatgaagacgctaaaagcactaaggaagacacccctaaagagcgttttgaaggcgaagtgttgtttttagatgatagcagaacggcgaggaaaaccttaaagaaccatttgagtaaattgggttttagcatcacggaagctgtgatggggaagacgggctga

SEQ ID NO: 3085 - DNA (genomic), 423 bp, Helicobacter pylori; double-stranded, circular
  misc_feature (B) LOCATION 1...423
  hypothetical: NO
  anti-sense: NO
ggcacgttggaacatgtgggtaaaggtaatttgcccttttatttcaaaaaagttaaagaagtgttaaagagaggcgggatgtttttgctccactccattttatgctgttttgaaggcaagactaacgcatgggtggataaatacatcttcccagggggttatttgccctctttaagagaagtgatgagcgtgatgagcgaatgcgacttccacctgctcatggctgaaagcttacgcatccattacgccaagaccttagacatttggcgagacaacttcaaccacaatctagaccaagtgaaaagactcggctatgacgaacgctttatccgcatgtgggatctgtatgtaaggacttgcgcgtccgctttcagggtggaggagtgcggatttattccaattgctcttaaccaacagcgtgga

SEQ ID NO: 3086 - DNA (genomic), 441 bp, Helicobacter pylori; double-stranded, circular
  misc_feature (B) LOCATION 1...441
  hypothetical: NO
  anti-sense: NO
ttagcgctcaaaaaattgaaaaatgagttaaggaatagacagatgatttcaaaatttttgctcaaaagcatgttcaagcagtggaaaaacggcgattatcaggtcgttttttgggacaatagcgtttataggaatggcgaacattcgcctaaattcacccttaaaatccatcgtcccctgaaatttagcgacattaaaaaagacatgtctttgacgattgctgaggcttatatggacggcgtgattgatattgaaggctctatggatgaggtgatgcactctttgtatttgcaaaccaattatgagcatttgcacaagcatgatagcgctaaagccgttcaaaaaccccttaaagaaagctccaacatttctaaacattacgatttagggaatgacttttattctatctggctggatgaaaccttaagctattcatgcgct

SEQ ID NO: 3087 - DNA (genomic), 666 bp, Helicobacter pylori; double-stranded, circular
  misc_feature (B) LOCATION 1...666
  hypothetical: NO
  anti-sense: NO
atgatttcaaaatttttgctcaaaagcatgttcaagcagtggaaaaacggcgattatcaggtcgttttttgggacaatagcgtttataggaatggcgaacattcgcctaaattcacccttaaaatccatcgtcccctgaaatttagcgacattaaaaaagacatgtctttgacgattgctgaggcttatatggacggcgtgattgatattgaaggctctatggatgaggtgatgcactctttgtatttgcaaaccaattatgagcatttgcacaagcatgatagcgctaaagccgttcaaaaaccccttaaagaaagctccaacatttctaaacattacgatttagggaatgacttttattctatctggctggatgaaaccttaagctattcatgcgcttatttcaaaaaagacgatgacaccctccatgccgcccaactccaaaaattggatcacactttaaaaaagctccatttaaaacaaggcgaaaaactgctggatataggctgtggctggggctatctctccataaaagccgcgcaagaatatggagcggaagtgatggggatcaccatttctagcgagcaatacaaacaggctaacaaacgagtccaggagctgggcttagaagataatgtaacgatcaatattgaattaccaggatct

SEQ ID NO: 3088 - DNA (genomic), 1170 bp, Helicobacter pylori; double-stranded, circular
  misc_feature (B) LOCATION 1...1170
  hypothetical: NO
  anti-sense: NO
atgatttcaaaatttttgctcaaaagcatgttcaagcagtggaaaaacggcgattatcaggtcgttttttgggacaatagcgtttataggaatggcgaacattcgcctaaattcacccttaaaatccatcgtcccctgaaatttagcgacattaaaaaagacatgtctttgacgattgctgaggcttatatggacggcgtgattgatattgaaggctctatggatgaggtgatgcactctttgtatttgcaaaccaattatgagcatttgcacaagcatgatagcgctaaagccgttcaaaaaccccttaaagaaagctccaacatttctaaacattacgatttagggaatgacttttattctatctggctggatgaaaccttaagctattcatgcgcttatttcaaaaaagacgatgacaccctccatgccgcccaactccaaaaattggatcacactttaaaaaagctccatttaaaacaaggcgaaaaactgctggatataggctgtggctggggctatctctccataaaagccgcgcaagaatatggagcggaagtgatggggatcaccatttctagcgagcaatacaaacaggctaacaaacgagtccaggagctgggcttagaagataaagtaacgatcaaattattgaattaccaggatttagacgggcggttataccgctttgataaggtggtgagcgtgggcatgtttgagcatgtgggtaaggataatttgcccttttatttcaaaaaagttaaagaagtgttaaagagaggcgggatgtttttgctccactccattttatgctgttttgaaggcaagactaacgcatgggtggataaatacatcttcccagggggttatttgccctctttaagagaagtgatgagcgtgatgagcgaatgcgacttccacctgctcatggctgaaagcttacgcatccattacgccaagaccttagacatttggcgagacaacttcaaccacaatctagaccaagtgaaaagactcggctatgacgaacgctttatccgcatgtgggatctgtatttaaggacttgcgcgtccgctttcagggtggggagtgcggatttattccaattgctcttaaccaacagcgtggataacactttccccttaaccaaagaatacatctaccaataa

SEQ ID NO: 3089 - DNA (genomic), 1197 bp, Helicobacter pylori; double-stranded, circular
  misc_feature (B) LOCATION 1...1197
  hypothetical: NO
  anti-sense: NO
ttgaaaaatgagttaaggaatagacagatgatttcaaaatttttgctcaaaagcatgttcaagcagtggaaaaacggcgattatcaggtcgttttttgggacaatagcgtttataggaatggcgaacattcgcctaaattcacccttaaaatccatcgtcccctgaaatttagcgacattaaaaaagacatgtctttgacgattgctgaggcttatatggacggcgtgattgatattgaaggctctatggatgaggtgatgcactctttgtatttgcaaaccaattatgagcatttgcacaagcatgatagcgctaaagccgttcaaaaaccccttaaagaaagctccaacatttctaaacattacgatttagggaatgacttttattctatctggctggatgaaaccttaagctattcatgcgcttatttcaaaaaagacgatgacaccctccatgccgcccaactccaaaaattggatcacactttaaaaaagctccatttaaaacaaggcgaaaaactgctggatataggctgtggctggggctatctctccataaaagccgcgcaagaatatggagcggaagtgatggggatcaccatttctagcgagcaatacaaacaggctaacaaacgagtccaggagctgggcttagaagataaagtaacgatcaaattattgaattaccaggatttagacgggcggttataccgctttgataaggtggtgagcgtgggcatgtttgagcatgtgggtaaggataatttgcccttttatttcaaaaaagttaaagaagtgttaaagagaggcgggatgtttttgctccactccattttatgctgttttgaaggcaagactaacgcatgggtggataaatacatcttcccagggggttatttgccctctttaagagaagtgatgagcgtgatgagcgaatgcgacttccacctgctcatggctgaaagcttacgcatccattacgccaagaccttagacatttggcgagacaacttcaaccacaatctagaccaagtgaaaagactcggctatgacgaacgctttatccgcatgtgggatctgtatttaaggacttgcgcgtccgctttcagggtggggagtgcggatttattccaattgctcttaaccaacagcgtggataacactttccccttaaccaaagaatacatctaccaataa

SEQ ID NO: 3090 - DNA (genomic), 333 bp, Helicobacter pylori; double-stranded, circular
  misc_feature (B) LOCATION 1...333
  hypothetical: NO
  anti-sense: NO
ttgtgcgatgaatgcactttgacaggttttcgtccaagaatgggcgaagtggctcaatacgaacattttgaactcatgcgtaaagcggattatgtgattggtattgtgaatgaggattcaacgactagaggggctgaagtccaacagagcgtttttgccctaaaaattgaccatgacactatcgggactgatgaagagggagcgttaaaggttgagggcgtttgcgctcaaaaagggagccaagaatacgaagaattagtcaataaaaacacttggcatttcacgcgcagcacaagacttggaaaaccaaaattgattaaaagaaaaagttaa

SEQ ID NO: 3091 - DNA (genomic), 441 bp, Helicobacter pylori; double-stranded, circular
  misc_feature (B) LOCATION 1...441
  hypothetical: NO
  anti-sense: NO
atggctcagttagaagatttaaaagcgcatgaaaaatacaatttgttgttgtgcatggtttcaggtgcgtataagggaactattccagggaatgaggattttaaagagttgtgcgatgaatgcactttgacaggttttcgtccaagaatgggcgaagtggctcaatacgaacattttgaactcatgcgtaaagcggattatgtgattggtattgtgaatgaggattcaacgactagaggggctgaagtccaacagagcgtttttgccctaaaaattgaccatgacactatcgggactgatgaagagggagcgttaaaggttgagggcgtttgcgctcaaaaagggagccaagaatacgaagaattagtcaataaaaacacttggcatttcacgcgcagcacaagacttggaaaaccaaaattgattaaaagaaaaagttaa

SEQ ID NO: 3092 - DNA (genomic), 459 bp, Helicobacter pylori; double-stranded, circular
  misc_feature (B) LOCATION 1...459
  hypothetical: NO
  anti-sense: NO
attcaatacaaggagaagacgatggctcagttagaagatttaaaagcgcatgaaaaatacaatttgttgttgtgcatggtttcaggtgcgtataagggaactattccagggaatgaggattttaaagagttgtgcgatgaatgcactttgacaggttttcgtccaagaatgggcgaagtggctcaatacgaacattttgaactcatgcgtaaagcggattatgtgattggtattgtgaatgaggattcaacgactagaggggctgaagtccaacagagcgtttttgccctaaaaattgaccatgacactatcgggactgatgaagagggagcgttaaaggttgagggcgtttgcgctcaaaaagggagccaagaatacgaagaattagtcaataaaaacacttggcatttcacgcgcagcacaagacttggaaaaccaaaattgattaaaagaaaaagt

SEQ ID NO: 3093 - DNA (genomic), 360 bp, Helicobacter pylori; double-stranded, circular
  misc_feature (B) LOCATION 1...360
  hypothetical: NO
  anti-sense: NO
tcttccaacttgtatatgagcatgagttcatggtgctatacccatagcttagatggcgcggggcttttcttgtttgaccatgtggctgaagaatacgagcatgctaaaaagcttattatcttcttgaatgaaaacaatgtgcctgtgcaattgaccagcatcagcgcgcctgagcataagtttgaaggtttgactcaaattttccaaaaagcctatgaacatgagcaacacatcagcgagtctattaacaatatcgtagatcacgccataaaaagcaaagatcatgcgactttcaatttcttgcaatggtatgtggctgaacagcatgaagaagaagtgcttttcaaggatatttttgga

SEQ ID NO: 3094 - DNA (genomic), 363 bp, Helicobacter pylori; double-stranded, circular
  misc_feature (B) LOCATION 1...363
  hypothetical: NO
  anti-sense: NO
aactcttccaacttgtatatgagcatgagttcatggtgctatacccatagcttagatggcgcggggcttttcttgtttgaccatgtggctgaagaatacgagcatgctaaaaagcttattatcttcttgaatgaaaacaatgtgcctgtgcaattgaccagcatcagcgcgcctgagcataagtttgaaggtttgactcaaattttccaaaaagcctatgaacatgagcaacacatcagcgagtctattaacaatatcgtagatcacgccataaaaagcaaagatcatgcgactttcaatttcttgcaatggtatgtggctgaacagcatgaagaagaagtgcttttcaaggatatttttgga

SEQ ID NO: 3095 - DNA (genomic), 504 bp, Helicobacter pylori; double-stranded, circular
  misc_feature (B) LOCATION 1...504
  hypothetical: NO
  anti-sense: NO
atgttatcaaaagacatcattaagttgctaaacgaacaagtgaataaggaaatgaactcttccaacttgtatatgagcatgagttcatggtgctatacccatagcttagatggcgcggggcttttcttgtttgaccatgcggctgaagaatacgagcatgctaaaaagcttattatcttcttgaatgaaaacaatgtgcctgtgcaattgaccagcatcagcgcgcctgagcataagtttgaaggtttgactcaaattttccaaaaagcctatgaacatgagcaacacatcagcgagtctattaacaatatcgtagatcacgccataaaaagcaaagatcatgcgactttcaatttcttgcaatggtatgtggctgaacagcatgaagaagaagtgcttttcaaggatattttggataaaattgagttgattggtaatgaaaaccatggcttgtatttagccgatcagtatgtcaaagggatcgctaaaagcaggaaatcttaa

SEQ ID NO: 3096 - DNA (genomic), 687 bp, Helicobacter pylori; double-stranded, circular
  misc_feature (B) LOCATION 1...687
  hypothetical: NO
  anti-sense: NO
tatgttatggataataaagattcaaaagatatagccattttgtgtggaaccaatatcaaaactatttttaatacttatgggacttctactaaagaagttgttttagatattgcacaaaataatttaaaatatctatatgaaatattgcagaatttagaaaacgacaacatgacagatttaggtatcaatattaaaattacttataaggatattagtgttaatttagacttaaaagaaagcttgcttgttattaatgccttagcaaccaagaaaattgctttaaggggaagtgcatattctatgataggtaaaagaattgaaaagcctttaatgttagaattgtgcaagcgttgcggtatttcagaaagtcatattgacgcaactaattttaaaaaagacaaaaaattggagtatgatagagaagtagattttaaactttataataaggataggagtaaagtttatagggtagaagttaaattaatgagtaaaggcaatcccgaaagtgctgatgcggtcattgcaagagatacggatatttttatagcttataccttaagcgaacaaaataaacaacagcttgaatatttaaacattgtttatttagctctaaaaaataattcaaatattatattagattttaaaagactctgtaagcgtttgggtataccattgataaatcatgca

SEQ ID NO: 3097 - DNA (genomic), 873 bp, Helicobacter pylori; double-stranded, circular
  misc_feature (B) LOCATION 1...873
  hypothetical: NO
  anti-sense: NO
atgaattttaatgaatcagttttaaatcatacgattaatttactcttaaaaggaaaagattatagagaagtagttttaaatactatcaacacagagtttttagattttgctatatctttttttaaagatattgtttatgcaaaaatgcatgataaatctatagattttagttggtatcagcagtatgttatggataataaagatccaaaagatatagccattttgtgtggaaccaatatcaaaactatttttaatacttatgggacttctactaaagaagttgttttagatattgcacaaaataatttaaaatatctatatgaaatattgcagaatttagaaaacgacaacatgacagatttaggtatcaatattaaaattacttataaggatattagtgttaatttagacttaaaagaaagcttgcttgttattaatgccttagcaaccaagaaaattgctttaaggggaagtgcatattctatgataggtaaaagaattgaaaagcctttaatgttagaattgtgcaagcgttgcggtatttcagaaagtcatattgacgcaactaattttaaaaaagacaaaaaattggagtatgatagagaagtagattttaaactttataataaggataggagtaaagtttatagggtagaagttaaattaatgagtaaaggcaatcccgaaagtgctgatgcggtcattgcaagagatacggatatttttatagcttataccttaagcgaacaaaataaacaacagcttgaatatttaaacattgtttatttagctctaaaaaataattcaaatattatattagattttaaaagactctgtaagcgtttgggtataccattgataaatcatgcatga

SEQ ID NO: 3098 - DNA (genomic), 237 bp, Helicobacter pylori; double-stranded, circular
  misc_feature (B) LOCATION 1...237
  hypothetical: NO
  anti-sense: NO
atgtctttagaaaacgatagcttagaaatcacttatttgggcaaacgctataaaatctctctcaataacacctttagcgatgagatgaaacgcaccctaaaggagcgtttccataaccaagaattaaacgccttagagcttttaaaggattatttgcatgaaagttgtcaaaacgagtatttgcataatgaactccaaaagcttttagaaaaaatctcatcatgttctatcacttaa

SEQ ID NO: 3099 - DNA (genomic), 246 bp, Helicobacter pylori; double-stranded, circular
  misc_feature (B) LOCATION 1...246
  hypothetical: NO
  anti-sense: NO
accattaaaaacatgtctttagaaaacgatagcttagaaatcacttatttgggcaaacgctataaaatctctctcaataacacctttagcgatgagatgaaacgcaccctaaaggagcgtttccataaccaagaattaaacgccttagagcttttaaaggattatttgcatgaaagttgtcaaaacgagtatttgcataatgaactccaaaagcttttagaaaaaatctcatcatgttctatcact

SEQ ID NO: 3100 - DNA (genomic), 180 bp, Helicobacter pylori; double-stranded, circular
  misc_feature (B) LOCATION 1...180
  hypothetical: NO
  anti-sense: NO
atggaatttaacgcccatagaaaatacgatgatgcaaacctggatgatgaatatgacaaaatagacgaattgttattctatctttcttattcttctaaagtttggaatttcttgcacacgcttgaagaaaggctacaacccttatttttaatgataataaaaagcttgagaaagaaataa

SEQ ID NO: 3101 - DNA (genomic), 432 bp, Helicobacter pylori; double-stranded, circular
  misc_feature (B) LOCATION 1...432
  hypothetical: NO
  anti-sense: NO
atggaatttaacgcccatagaaaatacgatgatgcaaacctggatgatgaatatgacaaaatagacgaattgttattctatctttcttattcttctaaagtttggaatttcttgcacacgcttgatgaaaaggctaccacccttatttttaatgataataaaaagcttgagacagaaatcacgcctaaaacgcgcaccttgttagacaaaatgcggcgcttaaacgctttgagcgataacgcttttctgcccttattgctctctctttttacgatacagcttgaagggaaacacgctaacaaacagccttacaccactaaagaattagagggcttgttagaatatttagagcgtttcgggtttttgatctatggggttgctggtagggatacagctaaaaatgaatggattggattggattggcttttatag

SEQ ID NO: 3102 - DNA (genomic), 591 bp, Helicobacter pylori; double-stranded, circular
  misc_feature (B) LOCATION 1...591
  hypothetical: NO
  anti-sense: NO
caaaaattagaaacgcttcaacaagaaatcaatgacacctacacgatcatttatgacgatttgagatcctttaaagatgatgatttagagaggtttttaaagcatttcgtggcgtattattatggcgagaacagcaacaagtttaaagaaaggttattggaaatggaatttaacgcccatagaaaatacgatgatgcaaacctggatgatgaatatgacaaaatagacgaattgttattctatctttcttattcttctaaagtttggaatttcttgcacacgcttgatgaaaaggctaccacccttatttttaatgataataaaaagcttgagacagaaatcacgcctaaaacgcgcaccttgttagacaaaatgcggcgcttaaacgctttgagcgataacgcttttctgcccttattgctctctctttttacgatacagcttgaagggaaacacgctaacaaacagccttacaccactaaagaattagagggcttgttagaatatttagagcgtttcgggtttttgatctatggggttgctggtagggatacagctaaaaatgaatggattggattggattggctttta

SEQ ID NO: 3103 - DNA (genomic), 1353 bp, Helicobacter pylori; double-stranded, circular
  misc_feature (B) LOCATION 1...1353
  hypothetical: NO
  anti-sense: NO
atgcaagaaatcagtgcctacgaactcatcaaagaaaaactgcatgccatacccaaccaacgccataaagggagcttgtttgaaaaaatttctaagcaatttttacaagagcatgacagcgctaacgaatacgagtctattgatctttggtatgattggaaattaagggggaatgagcgcgataaggggattgatatagtcattacgacttcaaacaaagaatacatcgccgtgcaatgcaaattccatcaaaacagcatctcgtataacgacatttcaccttttttaacccaattgctaagcggggtagggggtgtcaagtttaaaaaagggatcatcatctccacttccaatttaacctctgaagcccttaaagcaattgagcaaatcagaagcacaggaatggggattgacattgatgaaatcactgaagaggattttatttattctcgcattgattgggaaaagtttgatcccacaaaaaccgaagacgaaatccccttatgcgataagaaaaggccgcgccctcaccaaacagaagcgattgaaaagactaaagagtatttttctgaccctaaaaacgctagaggcaagctcattatggcatgcgggaccggcaaaacctacacttctttaaaaatcatggaatctttagatcccaagatcacgctttttctagcgcccagcatcgctttgctttctcaaacttttagagaatacgcacaagaaaaaagcgagcctttttacgcttctatcgtgtgcagcgatgataaaaccgggcaaagtaagaatgaagacaatgacgatattaaattttctgagctccctataaagccctccacccgcctggaagacattttaagcacttatgaaaaagcgcaaaaagaaaacaagcgcttcattatcttttcaacttaccaaagcgcgttgcgtattaaagaagcgcaagaagcgggtttgaatggaatcgatctcatcatttgcgatgaagcccacagaacggtaggggctatgtattccacgaatgaaagggacgataaaaacgctttcacgctttgccacagcgatgaaaatatcaaagctacaaaacgcctttacatgaccgccacgcctaaagtgtatagcgaaagttccaaagctaaagccaaagagaaagataacgttatctattccatggacgatgcacagacttttggcgaagaaatctatacgctcaattttgaaagagcgatcgctttagatctcttaaccgattacaaagtcatcattttagcggtgcgatcagaaaatttaagcggcgttactaacagcgtgaataagaaaatcagccagcttgaagccaaaaggcactaa

SEQ ID NO: 3104 - DNA (genomic), 1353 bp, Helicobacter pylori; double-stranded, circular
  misc_feature (B) LOCATION 1...1353
  hypothetical: NO
  anti-sense: NO
aaaatgcaagaaatcagtgcctacgaactcatcaaagaaaaactgcatgccatacccaaccaacgccataaagggagcttgtttgaaaaaatttctaagcaatttttacaagagcatgacagcgctaacgaatacgagtctattgatctttggtatgattggaaattaagggggaatgagcgcgataaggggattgatatagtcattacgacttcaaacaaagaatacatcgccgtgcaatgcaaattccatcaaaacagcatctcgtataacgacatttcaccttttttaacccaattgctaagcggggtagggggtgtcaagtttaaaaaagggatcatcatctccacttccaatttaacctctgaagcccttaaagcaattgagcaaatcagaagcacaggaatggggattgacattgatgaaatcactgaagaggattttatttattctcgcattgattgggaaaagtttgatcccacaaaaaccgaagacgaaatccccttatgcgataagaaaaggccgcgccctcaccaaacagaagcgattgaaaagactaaagagtatttttctgaccctaaaaacgctagaggcaagctcattatggcatgcgggaccggcaaaacctacacttctttaaaaatcatggaatctttagatcccaagatcacgctttttctagcgcccagcatcgctttgctttctcaaacttttagagaatacgcacaagaaaaaagcgagccttttgacgcttctatcgtgtgcagcgatgataaaaccgggcaaagtaagaatgaagacaatgacgatattaaattttttgagctccctataaagccctccacccgcctggaagacattttaagcacttatgaaaaagcgcaaaaagaaaacaagcgcttcattatcttttcaacttaccaaagcgcgttgcgtattaaagaagcgcaagaagcgggtttgaatggaatcgatctcatcatttgcgatgaagcccacagaacggtaggggctatgtattccacgaatgaaagggacgataaaaacgttttcacgttttgccacagcgatgaaaatatcaaagttacaaaacgcctttacatgaccgccacgcttaaagtgtatagcgaaagttccaaagctaaagccaaagagaaagataacgttatctattccatggacgatgcacagacttttggcgaagaaatctatacgctcaattttgaaagagcgatcgctttagatctcttaaccgattacaaagtcatcattttagcggtgcgatcagaaaatttaagcggcgttactaacagcgtgaataagaaaatcagccagcttgaagccaaaaggcac

SEQ ID NO: 3105 - DNA (genomic), 642 bp, Helicobacter pylori; double-stranded, circular
  misc_feature (B) LOCATION 1...642
  hypothetical: NO
  anti-sense: NO
atgtttacattacgagagttgccttttgctaaagacagcatgggagattttttaagccctgtagcgtttgatttccaccatgggaaacaccatcaaacttatgtgaataatttgaataacttaatcaaaggcacggattttgagaaaagttctttgttcgctattttaacgaagtctagcggaggcgtgttcaataacgccgctcaaatttacaaccacgatttttattgggattgcctaagccccaaagcgactgccctaagcgatgagttaaaagaggctttagaaaaagattttggctcattggaaaaatttaaagaagacttcattaagagtgcaaccactttgtttggctctggttggaattgggcagcgtataatttagacactcaaaaaattgaaatcattcaaacgagcaacgctcaaaccccagttacggataaaaaagtgccgcttttagtggtggatgtgtgggagcatgcttattacattgatcataaaaacgcgcgtcctgtatatttggaaaaattctatgggcatgtcaattggcatttcgtctctcaatgctatgaatgggcgaaaaaagaaggcttaggctcagtggattactacatcaatgagttggtgcataaaaaagcttaa

SEQ ID NO: 3106 - DNA (genomic), 654 bp, Helicobacter pylori; double-stranded, circular
  misc_feature (B) LOCATION 1...654
  hypothetical: NO
  anti-sense: NO
tcacaaggagaaaacatgtttacattacgagagttgccttttgctaaagacagcatgggagattttttaagccctgtagcgtttgatttccaccatgggaaacaccatcaaacttatgtgaataatttgaataacttaatcaaaggcacggattttgagaaaagttctttgttcgctattttaacgaagtctagcggaggcgtgttcaataacgccgctcaaatttacaaccacgatttttattgggattgcctaagccccaaagcgactgccctaagcgatgagttaaaagaggctttagaaaaagattttggctcattggaaaaatttaaagaagacttcattaagagtgcaaccactttgtttggctctggttggaattgggcagcgtataatttagacactcaaaaaattgaaatcattcaaacgagcaacgctcaaaccccagttacggataaaaaagtgccgcttttagtggtggatgtgtgggagcatgcttattacattgatcataaaaacgcgcgtcctgtatatttggaaaaattctatgggcatgtcaattggcatttcgtctctcaatgctatgaatgggcgaaaaaagaaggcttaggctcagtggattactacatcaatgagttggtgcataaaaaagct

SEQ ID NO: 3107 - DNA (genomic), 930 bp, Helicobacter pylori; double-stranded, circular
  misc_feature (B) LOCATION 1...930
  hypothetical: NO
  anti-sense: NO
atgcgaacgctcattctgtcgcttctaaaacatgcgattttaatgggcatgcttttaaaagaatgccaagaaaagttaaagcgttctttaaatttgagtgctaatcattgcgtcttgagcgcggggtatggggcgagttcagcgattaagaaatttcaagaaattttaggggtgtgtatcccttcaaaaacgaagaaaaatttagagccgtatttgaaagatatggctttaaagcgtgtgattgtagggccttatgagcatcattctaatgaagttagctggcgtgaaggcttgtgtgaagtggtgcgtatccctttaaatgaacatggtttattggatttagaaattttagagcaaactttaaaaaaaacccctaacagcttggtttctgtgagcgcggcttctaatgtaacgggaattcttacgcctttaaaagaagtttcatcattgtgtaaggaatatagggctattttagctttggatttagcgaattttagcgcgcatgctaaccctaaagattgcgaataccaaaccggtttttatgcgcctcataagcttttagggggcgttggagggtgcggtcttttaggcatttctaaagatttgattgacacgcaaatycctycgagttttagcgcagggggcgtgattaaatacgctaatcgcacacggcatgaatttattgatgaattgcctttaagagaagaatttggcacgccaggattgttgcaattttacaggagcgctctagcgtatcaattaagagatgaatgcggtttggattttatccataagaaagaaaacaaccttttaagggtgcttgtgtatggcttaaaagacttgcccgctattaatatttatgggaatttaacggcgagtcgtgtgggggtagtgrcttttaatattggagggatttcrccctatgattta

SEQ ID NO: 3108 - DNA (genomic), 1323 bp, Helicobacter pylori; double-stranded, circular
  misc_feature (B) LOCATION 1...1323
  hypothetical: NO
  anti-sense: NO
gtgcgagcgtttttaaacaggagttttgctcccttactcaaccctaacgagaaccttttagatcaagttaagtctagcattattttaaaaaaaggggtgtcttattttgactggggggcttcaggtttggcgagtgctttagtggaaaagcgcgtgaaatccttactgccttattatgcgaacgctcattctgtcgcttctaaacatgcgattttaatgggcatgcttttaaaagaatgccaagaaaagttaaagcgttctttaaatttgagtgctaatcattgcgtcttgagcgcggggtatggggcgagttcagcgattaagaaatttcaagaaattttaggggtgtgtatcccttcaaaaacgaagaaaaatttagagccgtatttgaaagatatggctttaaagcgtgtgattgtagggccttatgagcatcattctaatgaagttagctggcgtgaaggcttgtgtgaagtggtgcgtatccctttaaatgaacatggtttattggatttagaaattttagagcaaactttaaaaaaaacccctaacagcttggtttctgtgagcgcggcttctaatgtaacgggaattcttacgcctttaaaagaagtttcatcattgtgtaaggaatatagggctattttagctttggatttagcgaattttagcgcgcatgctaaccctaaagattgcgaataccaaaccggtttttatgcgcctcataagcttttagggggcgttggagggtgcggtcttttaggcatttctaaagatttgattgacacgcaaatccctccgagttttagcgcagggggcgtgattaaatacgctaatcgcacacggcatgaatttattgatgaattgcctttaagagaagaatttggcacgccaggattgttgcaattttacaggagcgctctagcgtatcaattaagagatgaatgcggtttggattttatccataagaaagaaaacaaccttttaagggtgcttgtgtatggcttaaaagacttgcccgctattaatatttatgggaatttaacggcgagtcgtgtgggggtagtggcttttaatattggagggatttcgccctatgatttagcgagggttttaagctatgaatacgctattgagacccgggcgggttgctcttgcgcggggccttatgggcatgatttgttgaatcttaacgctcaaaagtcaagcgattttaacgctaaacccggatggcttagagtgagtttgcacttcacgcattccataaacgatattgattatttgctagacagcttgaaaaaagcggtgaaaaaattgcgttaa

SEQ ID NO: 3109 - DNA (genomic), 1338 bp, Helicobacter pylori; double-stranded, circular
  misc_feature (B) LOCATION 1...1338
  hypothetical: NO
  anti-sense: NO
aagcgttggtggtatttcgtgcgagcgtttttaaacaggagttttgctcccttactcaaccctaacgagaaccttttagatcaagttaagtctagcattattttaaaaaaaggggtgtcttattttgactggggggcttcaggtttggcgagtgctttagtggaaaagcgcgtgaaatccttactgccttattatgcgaacgctcattctgtcgcttctaaacatgcgattttaatgggcatgcttttaaaagaatgccaagaaaagttaaagcgttctttaaatttgagtgctaatcattgcgtcttgagcgcggggtatggggcgagttcagcgattaagaaatttcaagaaattttaggggtgtgtatcccttcaaaaacgaagaaaaatttagagccgtatttgaaagatatggctttaaagcgtgtgattgtagggccttatgagcatcattctaatgaagttagctggcgtgaaggcttgtgtgaagtggtgcgtatccctttaaatgaacatggtttattggatttagaaattttagagcaaactttaaaaaaaacccctaacagcttggtttctgtgagcgcggcttctaatgtaacgggaattcttacgcctttaaaagaagtttcatcattgtgtaaggaatatagggctattttagctttggatttagcgaattttagcgcgcatgctaaccctaaagattgcgaataccaaaccggtttttatgcgcctcataagcttttagggggcgttggagggtgcggtcttttaggcatttctaaagatttgattgacacgcaaatccctccgagttttagcgcagggggcgtgattaaatacgctaatcgcacacggcatgaatttattgatgaattgcctttaagagaagaatttggcacgccaggattgttgcaattttacaggagcgctctagcgtatcaattaagagatgaatgcggtttggattttatccataagaaagaaaacaaccttttaagggtgcttgtgtatggcttaaaagacttgcccgctattaatatttatgggaatttaacggcgagtcgtgtgggggtagtggcttttaatattggagggatttcgccctatgatttagcgagggttttaagctatgaatacgctattgagacccgggcgggttgctcttgcgcggggccttatgggcatgatttgttgaatcttaacgctcaaaagtcaagcgattttaacgctaaacccggatggcttagagtgagtttgcacttcacgcattccataaacgatattgattatttgctagacagcttgaaaaaagcggtgaaaaaattgcgt

SEQ ID NO: 3110 - DNA (genomic), 735 bp, Helicobacter pylori; double-stranded, circular
  misc_feature (B) LOCATION 1...735
  hypothetical: NO
  anti-sense: NO
gctatgaagaaattgatgcaaaagattgaagaattactcgctattggcggcacgcagatcctttttcaagggggggtgcacccgcagctcaaaatagactattatgaaaatttagtcagccatatcgctcaaaaattccccaccattaccattcatggttttagcgcggttgagattgattacatttctaaaatctctaaattgtctttaaaagaagttttagaaaggttgaaaaacgccgggttaagctccattccaggagcgggtgcagaaatattaagcgatagggtgcgcgatgtcatcgctcctaaaaaattaagtagcgatcggtggattgaagtgcatagaatggcacacctttgcgggattaaaagcacggctaccatgatgtttgggagcgtggataatgaagaagatgtaatagagcatctacaaagggtgcgcgatttgcaagatgaaaccggcggctttagggcttttattttatggagctttcagcccaataacacccctttaaaagaagaaatcccaagcattaaaaaagcgagttccaatcggtatttacgctatttggcatgcagtaggatttttttagataacattcaaaacatacaaagctcatgggttactcaaggctctatgatagggcagttagccttattgtctggagcgaatgatttagggagtgtcatgatggaagaaaatgtcgtgaaagcggccgaacgagttctcgca

SEQ ID NO: 3111 - DNA (genomic), 732 bp, Helicobacter pylori; double-stranded, circular
  misc_feature (B) LOCATION 1...732
  hypothetical: NO
  anti-sense: NO
atgaagaaattgatgcaaaagattgaagaattactcgctattggcggcacgcagatcctttttcaagggggggtgcacccgcagctcaaaatagactattatgaaaatttagtcagccatatcgctcaaaaattccccaccattaccattcatggttttagcgcggttgagattgattacatttctaaaatctctaaattgtctttaaaagaagttttagaaaggttgaaaaacgccgggttaagctccattccaggagcgggtgcagaaatattaagcgatagggtgcgcgatgtcatcgctcctaaaaaattaagtagcgatcggtggattgaagtgcatagaatggcacacctttgcgggattaaaagcacggctaccatgatgtttgggagcgtggataatgaagaagatgtaatagagcatctacaaagggtgcgcgatttgcaagatgaaaccggcggctttagggcttttattttatggagctttcagcccaataacacccctttaaaagaagaaatcccaagcattaaaaaagcgagttccaatcggtatttacgctatttggcatgcagtaggatttttttagataacattcaaaacatacaaagctcatgggttactcaaggctctatgatagggcagttagccttattgtctggagcgaatgatttagggagtgtcatgatggaagaaaatgtcgtgaaagcggccgaacgagttctcgca

SEQ ID NO: 3112 - DNA (genomic), 957 bp, Helicobacter pylori; double-stranded, circular
  misc_feature (B) LOCATION 1...957
  hypothetical: NO
  anti-sense: NO
atgcgcattaacagagaagaaagtttggatttaatgaaaaacgcgcccttgaaagaattagggcaaagggctttgagagtgaagcaacgcttgcaccctgaaaacctgacgacttttattgtggataggaatatcaattacaccaatatttgttttgtggattgcaagttttgcgcgttcaaacgcaccttaaaagaaaaagacgcctatgtgttgagctatgaagaaattgatcaaaagattgaagaattactcgctattggcggcacgcagatcctttttcaagggggggtgcacccgcagctcaaaatagactattatgaaaatttagtcagccatatcgctcaaaaattccccaccattaccattcatggttttagcgcggttgagattgattacatttctaaaatctctaaattgtctttaaaagaagttttagaaaggttgaaaaacgccgggttaagctccattccaggagcgggtgcagaaatattaagcgatagggtgcgcgatgtcatcgctcctaaaaaattaagtagcgatcggtggattgaagtgcatagaatggcacacctttgcgggattaaaagcacggctaccatgatgtttgggagcgtggataatgaagaagatgtaatagagcatctacaaagggtgcgcgatttgcaagatgaaaccggcggctttagggcttttattttatggagctttcagcccaataacacccctttaaaagaagaaatcccaagcattaaaaaagcgagttccaatcggtatttacgctatttggcatgcagtaggatttttttagataacattcaaaacatacaaagctcatgggttactcaaggctctatgatagggcagttagccttattgtctggagcgaatgatttagggagtgtcatgatggaagaaaatgtcgtgaaagcggcccgacacgagtttctcgcatga

SEQ ID NO: 3113 - DNA (genomic), 1092 bp, Helicobacter pylori; double-stranded, circular
  misc_feature (B) LOCATION 1...1092
  hypothetical: NO
  anti-sense: NO
ttgaattttctatgggaacaaggttttaaaatgcgcattaacagagaagaaattttggatttaatgaaaaacgcgcccttgaaagaattagggcaaagggctttgagagtgaagcaacgcttgcaccctgaaaacctgacgacttttattgtggataggaatatcaattacaccaatatttgttttgtggattgcaagttttgcgcgttcaaacgcaccttaaaagaaaaagacgcctatgtgttgagctatgaagaaattgatcaaaagattgaagaattactcgctattggcggcacgcagatcctttttcaagggggggtgcacccgcagctcaaaatagactattatgaaaatttagtcagccatatcgctcaaaaattccccaccattaccattcatggttttagcgcggttgagattgattacatttctaaaatctctaaattgtctttaaaagaagttttagaaaggttgaaaaacgccgggttaagctccattccaggagcgggtgcagaaatattaagcgatagggtgcgcgatgtcatcgctcctaaaaaattaagtagcgatcggtggattgaagtgcatagaatggcacacctttgcgggattaaaagcacggctaccatgatgtttgggagcgtggataatgaagaagatgtaatagagcatctacaaagggtgcgcgatttgcaagatgaaaccggcggctttagggcttttattttatggagctttcagcccaataacacccctttaaaagaagaaatcccaagcattaaaaaagcgagttccaatcggtatttacgctatttggcatgcagtaggatttttttagataacattcaaaacatacaaagctcatgggttactcaaggctctatgatagggcagttagccttattgtctggagcgaatgatttagggagtgtcatgatggaagaaaatgtcgtgaaagcggccggaacgagtttttgcatgattgaagcggaaatgatagagcttattgaagacattgggagcgtggcggctaagcgaaacaccgcttatgaaatcttaaagcgttatccggctaaagcaaaggtataa

SEQ ID NO: 3114 - DNA (genomic), 171 bp, Helicobacter pylori; double-stranded, circular
  misc_feature (B) LOCATION 1...171
  hypothetical: NO
  anti-sense: NO
caattcattagaaaggatttaaccatgcaaaaagttacttttaaagaagaaacataccaattagaagggaaagccttgaaagtgggcgataaagcccctgatgtgaaattggtcaatggcgatttgcaagaagtcaactttgttggagcaaggcgtgcgttttcaggtcgt

SEQ ID NO: 3115 - DNA (genomic), 417 bp, Helicobacter pylori; double-stranded, circular
  misc_feature (B) LOCATION 1...417
  hypothetical: NO
  anti-sense: NO
aattggtcaatggcgatttgcaagaagtcaactttgttggagcaaggcgtgcgttttcaggtcgttagcgcgcttcctagtttaaccggatcggtttgcttgctccaagccaaacacttcaatgagcaagccggcaaactgccttctgtgagttttagcgttatttctatggacttgcctttttctcaagggcaaatttgcggcgctgaaggcattaaggacttaagaatcttaagcgattttaggtataaggcttttggggaaaattacggcgtgctgttaggcaaaggctctttgcaaggcttgctcgctcgatcggtgtttgttcttgacgataagggagtggttatctataaagaaatcgttcaaaacattttagaagagcccaattatgaagcgcttttaaaagtgttgaaa

SEQ ID NO: 3116 - DNA (genomic), 501 bp, Helicobacter pylori; double-stranded, circular
  misc_feature (B) LOCATION 1...501
  hypothetical: NO
  anti-sense: NO
atgcaaaaagttacttttaaagaagaaacataccaattagaagggaaagccttgaaagtgggcgataaagcccctgatgtgaaattggtcaatggcgatttgcaagaagtcaatttgttgaagcaaggcgtgcgttttcaggtcgttagcgcgcttcctagtttaaccggatcggtttgcttgctccaagccaaacacttcaatgagcaagccggcaaactgccttctgtgagttttagcgttatttctatggacttgcctttttctcaagggcaaatttgcggcgctgaaggcattaaggacttaagaatcttaagcgattttaggtataaggcttttggggaaaattacggcgtgctgttaggcaaaggctctttgcaaggcttgctcgctcgatcggtgtttgttcttgatgataagggagtggttatctataaagaaatcgttcaaaacattttagaagagcccaattatgaagcgcttttaaaagtgttgaaatag

SEQ ID NO: 3117 - DNA (genomic), 162 bp, Helicobacter pylori; double-stranded, circular
  misc_feature (B) LOCATION 1...162
  hypothetical: NO
  anti-sense: NO
catcacggaagctgtgatggggaagacgggctgaacaaattagaaatgttgttcaaaaaatacggggacgatttgaggaaacatttgaaattcgttatttcagatgttgaaatgcctaaaatggatggctatcatttcttattcaagctccaaaaagaccct

SEQ ID NO: 3118 - DNA (genomic), 228 bp, Helicobacter pylori; double-stranded, circular
  misc_feature (B) LOCATION 1...228
  hypothetical: NO
  anti-sense: NO
aattcgttatttcagatgttgaaatgcctaaaatggatggctatcatttcttattcaagctccaaaaagacccttaggttcgcttatattcctgtgatttttaattcttccatttgcgataattacagtgctgaaagggctaaagaaatgggggctgtggcgtatttggtcaagtttgatgcggaaaaattcaccgaagaaatttctaagattttagacaagaatgcg

SEQ ID NO: 3119 - DNA (genomic), 273 bp, Helicobacter pylori; double-stranded, circular
  misc_feature (B) LOCATION 1...273
  hypothetical: NO
  anti-sense: NO
atgttgttcaaaaaatacggggacgatttgaggaaacatttgaaattcattatttcagatgttgaaatgcctaaaatggatggctatcatttcttattcaagctccaaaaagaccctaggttcgcttatattcctgtgatttttaattcttctatttgcgataattacagtgctgaaagggctaaagaaatgggggctgtggcgtatttggtcaagtttgatgcggaaaaattcaccgaagaaatttctaagattttagacaagaatgcgtaa

SEQ ID NO: 3120 - DNA (genomic), 123 bp, Helicobacter pylori; double-stranded, circular
  misc_feature (B) LOCATION 1...123
  hypothetical: NO
  anti-sense: NO
gtgcttggcgtgttyaatttaaggggcaatgtcttccctttgatcagtttgcgtttaaagtttggcttgaaagccgaaaaacaaaacaaagacactcgttatttggtggtacgccataacgat

SEQ ID NO: 3121 - DNA (genomic), 417 bp, Helicobacter pylori; double-stranded, circular
  misc_feature (B) LOCATION 1...417
  hypothetical: NO
  anti-sense: NO
gtgagcaatcaattaaaagatttatttgaaagacaaaaagaagctaatgcaagctctaaacaagaagacaatgaagaaattttgcaattcattggctttattattggcgatgaagaatacgccattcccattttgaatattttagagatcgtcaaacccattggctacacgcgagtccctgaaaccccaaactatgtgcttggcgtgttcaatttaaggggcaatgtcttccctttgatcagtttgcgtttaaagtttggcttgaaagccgaaaaacaaaacaaagacactcgttatttggtggtacgccataacgatcgatcgctgggtttttcatcgctttctggactgatgccatccgaatcagcatccactattgacccgtcgcagaaactgtgcgcgataacaataatttaa

SEQ ID NO: 3122 - DNA (genomic), 432 bp, Helicobacter pylori; double-stranded, circular
  misc_feature (B) LOCATION 1...432
  hypothetical: NO
  anti-sense: NO
attagaaggagaccaatcgtgagcaatcaattaaaagatttatttgaaagacaaaaagaagctaatgcaagctctaaacaagaagacaatgaagaaattttgcaattcattggctttattattggcgatgaagaatacgccattcccattttgaatattttagagatcgtcaaacccattggctacacgcgagtccctgaaaccccaaactatgtgcttggcgtgttcaatttaaggggcaatgtcttccctttgatcagtttgcgtttaaagtttggcttgaaagccgaaaaacaaaacaaagacactcgttatttggtggtacgccataacgatcgatcgctgggtttttcatcgctttctggactgatgccatccgaatcagcatccactattgacccgtcgcagaaactgtgcgcgataacaataatt

SEQ ID NO: 3123 - DNA (genomic), 1008 bp, Helicobacter pylori; double-stranded, circular
  misc_feature (B) LOCATION 1...1008
  hypothetical: NO
  anti-sense: NO
atgcgattaggggtgaatgaagccgtagaattgagtttgggcgaattgcaaaacacaccctcaatcagctattttaattccattgtcttgtccttaaataaagtgcaaaaaggctctttatttgtggctaaggatcatgctctcattcccaaagctttagagttaggggcttatgggattttatacacaggagaatatcctttaagcgatagggatgtggcatggatcaagcttaaagatatagagcattctttgaatcatttgtttaaattttgcttgttgaatgagcgcgtggtcggggcgctgttaagccccatagaattagagatcgcttctaaaatcatcgtgagcggatttgtgtggtgcttgaaagagagccttgaagatttattcattatagaggggtgtaaaatagccttttttgataaattggagtggctccatttgttttataagcaggagcgcttgaaagaagatctaaaagaaagccgtttgattattctcaaccaatcgtttttttgcagcgctttagtctatgaaaaacaagaatacgaattaaaaacgccatgcatctttttagagcctttaaaaagggtcattcaattgtgcgagaaattacaaattgaatttgatttgagtcttttaggtaaaaaagaacctgctttagaacattgcaaacccttttttgtgaataaaaatttagaaatagccccctatggcacaacggcaagggtggttgtcgctgaggcgtcaaaagaattgtttgaaatgatgcttcaaaaagctcttgagactttatcgtgggggaaaattgtcgtgttttgtcgtaaaaacagcgcggctttctttaaaaaaaccaacccttattgttacaccacccaaaacaacttaaaagagcaattaaaaaatttagcgtttaatttcgcttttatttatgggattagctctcatcatttagaatcccttctaaacccccccttttttaaaaaaacccccacgctatggtaa

SEQ ID NO: 3124 - DNA (genomic), 1005 bp, Helicobacter pylori; double-stranded, circular
  misc_feature (B) LOCATION 1...1005
  hypothetical: NO
  anti-sense: NO
atgcgattaggggtgaatgaagccgtagaattgagtttgggcgaattgcaaaacacaccctcaatcagctattttaattccattgtcttgtccttaaataaagtgcaaaaaggctctttatttgtggctaaggatcatgctctcattcccaaagctttagagttaggggcttatgggattttatacacaggagaatatcctttaagcgatagggatgtggcatggatcaagcttaaagatatagagcattctttgaatcatttgtttaaattttgcttgttgaatgagcgcgtggtcggggcgctgttaagccccatagaattagagatcgcttctaaaatcatcgtgagcggatttgtgtggtgcttgaaagagagccttgaagatttattcattatagaggggtgtaaaatagccttttttgataaattggagtggctccatttgttttataagcaggagcgcttgaaagaagatctaaaagaaagccgtttgattattctcaaccaatcgtttttttgcagcgctttagtctatgaaaaacaagaatacgaattaaaaacgccatgcatctttttagagcctttaaaaagggtcattcaattgtgcgagaaattacaaattgaatttgatttgagtcttttaggtaaaaaagaacctgctttagaacattgcaaacccttttttgtgaataaaaatttagaaatagccccctatggcacaacggcaagggtggttgtcgctgaggcgtcaaaagaattgtttgaaatgatgcttcaaaaagctcttgagactttatcgtgggggaaaattgtcgtgttttgtcgtaaaaacagcgcggctttctttaaaaaaaccaacccttattgttacaccacccaaaacaacttaaaagagcaattaaaaaatttagcgtttaatttcgcttttatttatgggattagctctcatcatttagaatcccttctaaacccccccttttttaaaaaaacccccacgctatgg

SEQ ID NO: 3125 - DNA (genomic), 201 bp, Helicobacter pylori; double-stranded, circular
  misc_feature (B) LOCATION 1...201
  hypothetical: NO
  anti-sense: NO
tacgcttacaaggtttatggcgcgattgtgagccagaataaagacggcgtgtgggtaggagatgaagccaaaacgaaagccagaagaaaagaaattcttgaaaacagaaaggtcagatccatccctgtaaaagaatggatggagcaagagagaaacgctatccttgaaaaagaagcttccaaacaggttaagtacatgtat

SEQ ID NO: 3126 - DNA (genomic), 216 bp, Helicobacter pylori; double-stranded, circular
  misc_feature (B) LOCATION 1...216
  hypothetical: NO
  anti-sense: NO
ggggtgatttcaacccaactgatcgaggttatgaaaaacaacatttctcatgcgtctcaagtcaaaagggataagcaatgcatcaccactgagaactgctttgataattacgacttgtatttgaattacatcaaaggcggtcctggatttggcgatcctattgaaagggatttgaacgcgattttagaagatctaaacagcaaacagctattgcca

SEQ ID NO: 3127 - DNA (genomic), 402 bp, Helicobacter pylori; double-stranded, circular
  misc_feature (B) LOCATION 1...402
  hypothetical: NO
  anti-sense: NO
gaaaaagaagaaaaaaaaaccttttgtaccgacctacttttaagatacggcgctcttcacaacccgggaatgggcctacctctccaacatctaagttggaatgtcaaggccaataccggtgggtatgggaaatatcgaggcggtaacgggtttgaaaccttaagaatggtgtggggcgcgcatgattggaccatgttctttatgggtaatggctacatgaatagcgattggggcatgatgggtggctatccaacggccagtggttataggtttgaagcgcataacaccaacttagaaaataggattaaaaataacgccagtttgcctttagggggtgatttcaacccaactgatcgaggttatgaaaaacaacatttctcatgcgtctcaagtcaaaaggga

SEQ ID NO: 3128 - DNA (genomic), 399 bp, Helicobacter pylori; double-stranded, circular
  misc_feature (B) LOCATION 1...399
  hypothetical: NO
  anti-sense: NO
aaagaagaaaaaaaaaccttttgtaccgacctacttttaagatacggcgctcttcacaacccgggaatgggcctacctctccaacatctaagttggaatgtcaaggccaataccggtgggtatgggaaatatcgaggcggtaacgggtttgaaaccttaagaatggtgtggggcgcgcatgattggaccatgttctttatgggtaatggctacatgaatagcgattggggcatgatgggtggctatccaacggccagtggttataggtttgaagcgcataacaccaacttagaaaataggattaaaaataacgccagtttgcctttagggggtgatttcaacccaactgatcgaggttatgaaaaacaacatttctcatgcgtctcaagtcaaaaggga

SEQ ID NO: 3129 - DNA (genomic), 411 bp, Helicobacter pylori; double-stranded, circular
  misc_feature (B) LOCATION 1...411
  hypothetical: NO
  anti-sense: NO
gggtgggtaggtggcgttacgcatgtgattgatacgggatcagttactccaggatcaatgagtaccggacaggttcaaaggtttggggatggatacatgatcacttgccgtaaaacaggggcgaatgatgagagctttaaggattggttgcatgaatctcaaagatcagtaagaacgcctaaatattggattttggatgaaaggactaggattgctgggtgccacatgattagggatttagtgatggaagtcattaaagaagacggcattgattcttacatgcgatttattgatgaagtgattgaagaagggaggagaggccttatctctaggatcaaatccatgaccatacccggcaagtatagaaaggtcgcttttgtggatgtgtcttatgcgcataaggatattggc

SEQ ID NO: 3130 - DNA (genomic), 1812 bp, Helicobacter pylori; double-stranded, circular
  misc_feature (B) LOCATION 1...1812
  hypothetical: NO
  anti-sense: NO
gtgattgatacgggatcagttactccaggatcaatgagtaccggacaggttcaaaggtttggggatggatacatgatcacttgccgtaaaacaggggcgaatgatgagagctttaaggattggttgcatgaatctcaaagatcagtaagaacgcctaaatattggattttggatgaaaggactaggattgctgggtgccacatgattagggatttagtgatggaagtcattaaagaagacggcattgattcttacatgcgatttattgatgaagtgattgaagaagggaggagaggccttatctctaggatcaaatccatgaccatacccggcaagtataaaagggtcgcttttgtggatgtgccttatgcgcataaggatattggcgtgtgctctgagtttgctaagctagatacgatcatgcactctcctgtggaaatcactatcaataaagacgctacatggaaattggattttgatggcgcttccaggtggggatggcactctttcaattgcaaccaagtgtcttttactagcggtatttgggtgatgatgactcaaaccttaatacccacttctcgcatcaacgatggcgcttattttgcgactcaattcagactcaaaaaagggacttggatgaatccagatgacaggcgcactgggcatgcttatgcgtggcatttcttggtatcaggctggagcgctttgtggagaggcttgtctcaagcgtattacagccgagggtatttagaagaggtcaattctggaaacgctaacacttctaactggttgcaaggcggcggtatcaaccaagatggagaaatccatgcggtgaatagctttgagacgagttcttgtgggactggagcttgcgcgataaaagacggcttgaatcacgcagcggctatttggaatccagagggcgatatgggcgatattgaaatctgggaaatggcagaacctctcctctatttaggcaggaatgtcaaggccaataccggtgggtatgggaaatatcgaggcggtaacgggtttgaaaccttaagaatggtgtggggcgcgcatgattggaccatgttctttatgggtaatggctacatgaatagcgattggggcatgatgggtggctatccagcggccagtggttataggtttgaagcgcataacaccaacttagaaaataggattaaaaataacgccagtttgcctttagggggtgatttcaacccaactgatcgaggttatgaaaaacacatttctcatgcgtctcaagtcaaaagggataagcaatgcatcaccactgagaactgctttgataattacgacttgtatttgaattacatcaaaggcggtcctggatttggcgatcctattgaaagggatttgaacgcgattttagaagatctaaacagcaaacagctattgccagaatacgcttacaaggtttatggcgcgattgtgagccagaataaagacggcgtgtgggtaggagatgaagccaaaacgaaagccagaagaaaagaaattcttgaaaacagaaaggctagatccatccctgtaaaagaatggatggagcaagagagaaacgctatccttgaaaaagaagcttccaaacaggttaagcacatgtatgccactagctttgatctctcgcctaggttcttgaatgattttaaaacattctggaacttgccaaagaattggactgtggaagaagatgagcttggcgtattcacctatggatctaaatacaggatggatttgagcaaattgcctgatgtgcgcacggttgtgttggttgatgagaaataa

SEQ ID NO: 3131 - DNA (genomic), 477 bp, Helicobacter pylori; double-stranded, circular
  misc_feature (B) LOCATION 1...477
  hypothetical: NO
  anti-sense: NO
atatcaaaagagcgtttgagcgatttggaatatcgatgggcaatggctctagtctatggaggatgtatctccataaccactaggattttttatgacataaatggttcagctagcgatccgctttttgaccctaaatacagctattatgtgtggttagtgggtctaatagcggctttgttgtctaatctcttgtttaatcctaaaggcaggtcggtaggttatttaatgattgaaacttggcaaggattccccaagttttttaaagccatttttaaggctaggttttttggtgcgttttatgacgctgtgttaggagcaagactaagggatttttatgtgatgcttttaacgataccctttattatcgctatgcatgaaatttcggcgtattgtgggcaccctagcaatctccttgtagagggtttggtcattttagggtttcaaggttttcttaagctttgcgctaaatgggggtgg

SEQ ID NO: 3132 - DNA (genomic), 507 bp, Helicobacter pylori; double-stranded, circular
  misc_feature (B) LOCATION 1...507
  hypothetical: NO
  anti-sense: NO
atggatactacaaaagagaacttgaatggctcaaaagagcgtttgagcgatttggaatatcgatgggcaatggctctagtctatggaggatgtatctccataaccactaggattttttatgacataaatggttcagctagcgatccgctttttgaccctaaatacagctattatgtgtggttagtgggtctaatagcggctttgttgtctaatctcttgtttaatcctaaaggcaggtcggtaggttatttaatgattgaaacttggcaaggattccccaagttttttaaagccatttttaaggctaggttttttggtgcgttttatgacgctgtgttaggagcaagactaagggatttttatgtgatgcttttaacgataccctttattatcgctatgcatgaaatttcggcgtattgtgggcaccctagcaatctccttgtagagggtttggtcattttagggtttcaaggttttcttaagctttgcgctaaatgggggtggtga

SEQ ID NO: 3133 - DNA (genomic), 669 bp, Helicobacter pylori; double-stranded, circular
  misc_feature (B) LOCATION 1...669
  hypothetical: NO
  anti-sense: NO
atgttagattatcgccaaaggattgataccctcatcaccaaaatagaaaaggctcgcatcgcctattcaaggcaccatattgtcaaaatcgtggctgtttcaaaaaacgcttccccagaagctatccaacattactacaactgctctcaaagggcttttggagaaaataaagttcaagatttaaaaattaaaatgcattctttagagcatttgccccttgaatggcacatgataggctctttacaagaaaataaaatcaatgcgcttttgagtttaaaacccgcccttttgcattctttagactctttaaaactcgctttgaaaatagaaaagcgttgcgaaatattgggcgtcaacttaaacgctcttttacaggttaatagcgcgtatgaggaaagtaaaagcggggtggtgcctgaagaagcgctagaaacttattctcaaatcagtgaaacttgcaagcgcctcaagcttaagggacttatgtgtataggggcgcacaccgatgatgaaacaaaaattgaaaaatcctttaccaccaccaaaaagctttttgaccaaataaagaacgcgagcgttctttcaatgggcatgagtgatgattttgaattagcgattgcttgcggggcgaatcttttaaggattggctcttttttgttcaaagagtaa

SEQ ID NO: 3134 - DNA (genomic), 675 bp, Helicobacter pylori; double-stranded, circular
  misc_feature (B) LOCATION 1...675
  hypothetical: NO
  anti-sense: NO
agaaggattatgttagattatcgccaaaggattgataccctcatcaccaaaatagaaaaggctcgcatcgcctattcaaggcaccatattgtcaaaatcgtggctgtttcaaaaaacgcttccccagaagctatccaacattactacaactgctctcaaagggcttttggagaaaataaagttcaagatttaaaatttaaaatgcattctttagagcatttgccccttgaatggcacatgataggctctttacaagaaaataaaatcaatgcgcttttgagtttaaaacccgcccttttgcattctttagactctttaaaactcgctttgaaaatagaaaagcgttgcgaaatattgggcgtcaacttaaacgctcttttacaggttaatagcgcgtatgaggaaagtaaaagcggggtggtgcctgaagaagcgctagaaacttattctcaaatcagtgaaacttgcaagcgcctcaagcttaagggacttatgtgtataggggcgcacaccgatgatgaaacaaaaattgaaaaatcctttaccaccaccaaaaagctttttgaccaaataaagaacgcgagcgttctttcaatgggcatgagtgatgattttgaattagcgattgcttgcggggcgaatcttttaaagaatggctctttttggttcaaagag

SEQ ID NO: 3135 - DNA (genomic), 330 bp, Helicobacter pylori; double-stranded, circular
  misc_feature (B) LOCATION 1...330
  hypothetical: NO
  anti-sense: NO
aaagcattcttagatctaaaaatgctacaatgtttatctttaaaacgaaagggcaatttaaccatggattttttagaaaaagtattagacaatcaagttactgaaagtaaagaattagtcaggctttatgattatgatttatacacgctaggggaagcagcggatcgcatgcgccagaacatgcaccaaaaaatcgtgtattttaatgtcaataggcatttaaaccctagcaatatttgcgcggacgcttgcaaattttgcgctttttcagccgacagaaaaaacccaaacccttatgaaatgagcttagtcgatattggcaaaaccccc

SEQ ID NO: 3136 - DNA (genomic), 849 bp, Helicobacter pylori; double-stranded, circular
  misc_feature (B) LOCATION 1...849
  hypothetical: NO
  anti-sense: NO
tatgaaatgagcttagaagaaatcctagaaaaggttaaaaactcctacaacaaggggattaaagaagtccatatcgtgagcgctcataaccctaattactcttatgaatggtatttaaaggtgtttgaaaccatcaagcaagaaatgcctaacttgcatttaaaggccatgactgctgcagaagtgcattttttaagcgccaaatttaacaaaccttttgaattggtgctagaagacatgctcaaagccggggtggattccatgcctggtgggggggctgagatttttgatgaagaaattaggcgtaaaatctgtaatggtaaggtgggctcttctcggtggttagaaatccatgcttactggcacaaattaggcaaaatgagtaacgctaccatgctttttgggcatattgaaaataaaatccatcgcatcgatcacatgctgagaatcaaaaaaattcaaagccctaaaaataaagtggaaaataaagaagggggctttaacgcattcattcccttgctgtatcaaaaagaaaacaattatttgaaagtgggaaaatcccctagcgcgatagaaatcctaaaaaccatcgctatatcccgcattcttttaaacaatatcccccacattaaagcttattgggcgactttgggcttgaatttggctttagtggctcaagaatttggcgctaacgatttagacggcacgatagaaatagagagcattcaaagcgcggctggtgcgaagagccggcatggtttagaaaaagaagatttgatatttaaaatcaaggattccggctttgttgcggtagaaagggatagtttgtataattttatacagaaattt

SEQ ID NO: 3137 - DNA (genomic), 846 bp, Helicobacter pylori; double-stranded, circular
  misc_feature (B) LOCATION 1...846
  hypothetical: NO
  anti-sense: NO
gaaatgagcttagaagaaatcctagaaaaggttaaaaactcctacaacaaggggattaaagaagtccatatcgtgagcgctcataaccctaattactcttatgaatggtatttaaaggtgtttgaaaccatcaagcaagaaatgcctaacttgcatttaaaggccatgactgctgcagaagtgcattttttaagcgccaaatttaacaaaccttttgaattggtgctagaagacatgctcaaagccggggtggattccatgcctggtgggggggctgagatttttgatgaagaaattaggcgtaaaatctgtaatggtaaggtgggctcttctcggtggttagaaatccatgcttactggcacaaattaggcaaaatgagtaacgctaccatgctttttgggcatattgaaaataaaatccatcgcatcgatcacatgctgagaatcaaaaaaattcaaagccctaaaaataaagtggaaaataaagaagggggctttaacgcattcattcccttgctgtatcaaaaagaaaacaattatttgaaagtgggaaaatcccctagcgcgatagaaatcctaaaaaccatcgctatatcccgcattcttttaaacaatatcccccacattaaagcttattgggcgactttgggcttgaatttggctttagtggctcaagaatttggcgctaacgatttagacggcacgatagaaatagagagcattcaaagcgcggctggtgcgaagagccggcatggtttagaaaaagaagatttgatatttaaaatcaaggattccggctttgttgcggtagaaagggatagtttgtataattttatacagaaattt

SEQ ID NO: 3138 - DNA (genomic), 1083 bp, Helicobacter pylori; double-stranded, circular
  misc_feature (B) LOCATION 1...1083
  hypothetical: NO
  anti-sense: NO
atggattttttagaaaaagtattagacaatcaagttactgaaagtaaagaattagtcaggctttatgattatgatttatacacgctaggggaagcagcggatcgcatgcgccagaacatgcaccaaaaaatcgtgtattttaatgtcaataggcatttaaaccctagcaatatttgcgcggacgcttgcaaattttgcgctttttcagcccacagaaaaaacccaaacccttatgaaatgagcttagaagaaatcctagaaaaggttaaaaactcctacaacaaggggattaaagaagtccatatcgtgagcgctcataaccctaattactcttatgaatggtatttaaaggtgtttgaaaccatcaagcaagaaatgcctaacttgcatttaaaggccatgactgctgcagaagtgcattttttaagcgccaaatttaacaaaccttttgaattggtgctagaagacatgctcaaagccggggtggattccatgcctggtgggggggctgagatttttgatgaagaaattaggcgtaaaatctgtaatggtaaggtgggctcttctcggtggttagaaatccatgcttactggcacaaattaggcaaaatgagtaacgctaccatgctttttgggcatattgaaaataaaatccatcgcatcgatcacatgctgagaatcaaaaaaattcaaagccctaaaaataaagtggaaaataaagaagggggctttaacgcattcattcccttgctgtatcaaaaagaaaacaattatttgaaagtgggaaaatcccctagcgcgatagaaatcctaaaaaccatcgctatatcccgcattcttttaaacaatatcccccacattaaagcttattgggcgactttgggcttgaatttggctttagtggctcaagaatttggcgctaacgatttagacggcacgatagaaatagagagcattcaaagcgcggctggtgcgaagagccggcatggtttagaaaaagaagatttgatatttaaaatcaaggattctggctttgttgcggtagaaagggatagtttgtataattttatacagaaattttga

SEQ ID NO: 3139 - DNA (genomic), 654 bp, Helicobacter pylori; double-stranded, circular
  misc_feature (B) LOCATION 1...654
  hypothetical: NO
  anti-sense: NO
atggaattattgactttagacggcgtggttgaaaaaggcgtgtttgaaatccctagctatcaaagggggtatgcatggcaagtaaggcaatggaaggatttttggaacgatttagagcatgtctctaagctgggaaataaattccattacatgcacagcctaaccttaagagggcttgaaaatgagcttgaagatagcgcttttgaaatcatagacggccagcaacgattggctacaagtctgattttactaggccttttagctaaaaccactaaacataaagacccaaagtataattcaatgaaccttgaacccgttctgtcttataagtattatggtttaaatgaagcttttggggcgatcatgggagaagaaaaagatttagaaaggtttcaaacttctttttacgctaaaaatttgattgacgcttatgcgttttttaaagaaaaaatcagcgatacgcctatggaaacgcttgaaaaaatgtttgatgttctcactaaaaaaatgctttttagcgtggcggaattgaatgataaccgaatcgatccgttcagctcttttgaaacgatcaacaatcgtggcaaggatctatccactttggaattgtttaaaaaccgcctgcattttgtagcgcataagatttgtaattga

SEQ ID NO: 3140 - DNA (genomic), 654 bp, Helicobacter pylori; double-stranded, circular; identical to SEQ ID NO: 3139
  misc_feature (B) LOCATION 1...654
  hypothetical: NO
  anti-sense: NO

SEQ ID NO: 3141 - DNA (genomic), 663 bp, Helicobacter pylori; double-stranded, circular
  misc_feature (B) LOCATION 1...663
  hypothetical: NO
  anti-sense: NO
gaaaggattttaatggaattattgactttagacggcgtggttgaaaaaggcgtgtttgaaatccctagctatcaaagggggtatgcatggcaagtaaggcaatggaaggatttttggaacgatttagagcatgtctctaagctgggaaataaattccattacatgcacagcctaaccttaagagggcttgaaaatgagcttgaagatagcgcttttgaaatcatagacggccagcaacgattggctacaagtctgattttactaggccttttagctaaaaccactaaacataaagacccaaagtataattcaatgaaccttgaacccgttctgtcttataagtattatggtttaaatgaagcttttggggcgatcatgggagaagaaaaagatttagaaaggtttcaaacttctttttacgctaaaaatttgattgacgcttatgcgttttttaaagaaaaaatcagcgatacgcctatggaaacgcttgaaaaaatgtttgatgttctcactaaaaaaatgctttttagcgtggcggaattgaatgataaccgaatcgatccgttcagctcttttgaaacgatcaacaatcgtggcaaggatctatccactttggaattgtttaaaaaccgcctgcattttgtagcgcataagatttgtaat

SEQ ID NO: 3142 - DNA (genomic), 735 bp, Helicobacter pylori; double-stranded, circular
  misc_feature (B) LOCATION 1...735
  hypothetical: NO
  anti-sense: NO
atggcgttaaggccatggcgtaaaggcccttttgaaatttctcaaatcaagattgatagcgaatgggatagctccattaaatgggatctagtcaaaaacgccactcctttaaaagataaggttgtggctgatgtgggttgcaataatggctattacttgtttaaaatgctagaacataagcctaaaagtttggtggggtttgatccgggcgttttagtcaaaaaacaatttgaatttttagcccccttttttgataaagaaaaaaaaatcatttacgagtctttgggggtagaggattttcatgaaaaataccctaacgcttttgatgttattttttgcttaggggtgctataccacagaaaaagcccgctagaggctttaaaagccttgtatcatgctttaaagataaaaggggagttggtgttggataccttaatcattgattcgcccctagacatcgccctttgccctaaaaaaacttatgctaaaatgaaaaacgtttattttatccctagtgttagcgcgttaaaagggtggtgcgaaagggtagggtttgagaattttgagattcttagcgttttaaagaccacgcctaaagaacagcgtaaaacggattttattttggggcagagtttagaagattttttggataaaacggatcactctaaaactttagaggggtatgatgcccctttaagggggtattttaaaatgcttaaaccaagcaagcgttaa

SEQ ID NO: 3143 - DNA (genomic), 786 bp, Helicobacter pylori; double-stranded, circular
  misc_feature (B) LOCATION 1...786
  hypothetical: NO
  anti-sense: NO
atgctgatttgtaacgataaattcaatccaaaaacccttttagaagaaatcatggcgttaaggccatggcgtaaaggcccttttgaaatttctcaaatcaagattgatagcgaatgggatagctccattaaatgggatctagtcaaaaacgccactcctttaaaagataaggttgtggctgatgtgggttgcaataatggctattacttgtttaaaatgctagaacataagcctaaaagtttggtggggtttgatccgggcgttttagtcaaaaaacaatttgaatttttagcccccttttttgataaagaaaaaaaaatcatttacgagtctttgggggtagaggattttcatgaaaaataccctaacgcttttgatgttattttttgcttaggggtgctataccacagaaaaagcccgctagaggctttaaaagccttgtatcatgctttaaagataaaaggggagttggtgttggataccttaatcattgattcgcccctagacatcgccctttgccctaaaaaaacttatgctaaaatgaaaaacgtttattttatccctagtgttagcgcgttaaaagggtggtgcgaaagggtagggtttgagaattttgagattcttagcgttttaaagaccacgcctaaagaacagcgtaaaacggattttattttggggcagagtttagaagattttttggataaaacggatcactctaaaactttagaggggtatgatgcccctttaagggggtattttaaaatgcttaaaccaagcaagcgttaa

SEQ ID NO: 3144 - DNA (genomic), 786 bp, Helicobacter pylori; double-stranded, circular
  misc_feature (B) LOCATION 1...786
  hypothetical: NO
  anti-sense: NO
gtcatgctgatttgtaacgataaattcaatccaaaaacccttttagaagaaatcatggcgttaaggccatggcgtaaaggcccttttgaaatttctcaaatcaagattgatagcgaatgggatagctccattaaatgggatctagtcaaaaacgccactcctttaaaagataaggttgtggctgatgtgggttgcaataatggctattacttgtttaaaatgctagaacataagcctaaaagtttggtggggtttgatccgggcgttttagtcaaaaaacaatttgaatttttagcccccttttttgataaagaaaaaaaaatcatttacgagtctttgggggtagaggattttcatgaaaaataccctaacgcttttgatgttattttttgcttaggggtgctataccacagaaaaagcccgctagaggctttaaaagccttgtatcatgctttaaagataaaaggggagttggtgttggataccttaatcattgattcgcccctagacatcgccctttgccctaaaaaaacttatgctaaaatgaaaaacgtttattttatccctagtgttagcgcgttaaaagggtggtgcgaaagggtagggtttgagaattttgagattcttagcgttttaaagaccacgcctaaagaacagcgtaaaacggattttattttggggcagagtttagaagattttttggataaaacggatcactctaaaactttagaggggtatgatgcccctttaagggggtattttaaaatgcttaaaccaagcaagcgt

SEQ ID NO: 3145 - DNA (genomic), 792 bp, Helicobacter pylori; double-stranded, circular
  misc_feature (B) LOCATION 1...792
  hypothetical: NO
  anti-sense: NO
atggcaataagatttgatcataacaataattctgaagaatggcaaatgctttttaacaaaatcaataatggctcgccttttagggttatcactttcattggaccaattctatcgcattttaaaaacgtgatgaggagtggctacctttcttctgaaccaacaaagcaagatcggataaaatctttcttaataaataagcgtgaatttatagggtttgttgaaattgttattggacctagcgaaagcttgttttttgtatatgaaaacgagccgagtgcaacatttaatttaaaaagctacttgttggtgttagccaaaatgcattgtaatccaacagcgatttgttattgcggaaacaagcaagacgcacaaaacaccaacacaaaagagataaaattcctaagtgcaaaaagtcatgattttgggaaagaaatggactctaaaagtgttgaactttcaaactctaatacttttattcaatctcttttaaaattagggtcttttttgcatggaaaaactattgagtctcttaataatccaacaaactatccgccaattaatttggtagttactccagctttggcaccttggaaaacaacggtggagatagaggagcatagaaaaaatataacatttgaccactataggcaaagctctgcacaaaacattaaaatcaatgaaattgctaatgatttaaaacaaggtgaggtagttagcaataaacttattgcgaacacgcttataacgcaaaaagcgcccagcgatacgtcgcatgatgacgatttagattag

SEQ ID NO: 3146 - DNA (genomic), 822 bp, Helicobacter pylori; double-stranded, circular
  misc_feature (B) LOCATION 1...822
  hypothetical: NO
  anti-sense: NO
ctaaaagagatttttgagaaaggaataaataatatggcaataagatttgatcataacaataattctgaagaatggcaaatgctttttaacaaaatcaataatggctcgccttttagggttatcactttcattggaccaattctatcgcattttaaaaacgtgatgaggagtggctacctttcttctgaaccaacaaagcaagatcggataaaatctttcttaataaataagcgtgaatttatagggtttgttgaaattgttattggacctagcgaaagcttgttttttgtatatgaaaacgagccgagtgcaacatttaatttaaaaagctacttgttggtgttagccaaaatgcattgtaatccaacagcgatttgttattgcggaaacaagcaagacgcacaaaacaccaacacaaaagagataaaattcctaagtgcaaaaagtcatgattttgggaaagaaatggactctaaaagtgttgaactttcaaactctaatacttttattcaatctcttttaaaattagggtcttttttgcatggaaaaactattgagtctcttaataatccaacaaactatccgccaattaatttggtagttactccagctttggcaccttggaaaacaacggtggagatagaggagcatagaaaaaatataacatttgaccactataggcaaagctctgcacaaaacattaaaatcaatgaaattgctaatgatttaaaacaaggtgaggtagttagcaataaacttattgcgaacacgcttataacgcaaaaagcgcccagcgatacgtcgcatgatgacgatttagat

SEQ ID NO: 3147 - DNA (genomic), 300 bp, Helicobacter pylori; double-stranded, circular
  misc_feature (B) LOCATION 1...300
  hypothetical: NO
  anti-sense: NO
cgcattgtcatctttgtagagcatgccagcaacgatttaaacaacccttacatgctgttatggcgcatcgttaataacattgacgccaagcgtgatattctcacctctaaacattgtttttttatagacgctaccaataagggcgttatggataaacattttagagaatggcccaccgaaaccaattgctccatggaagtcatagaaaatttaaaaaagaaagggcttttaaaagattttgaaactttaaatcaaaaattccacctcacgcattctttcagcacgcacaaagaagatcta

SEQ ID NO: 3148 - DNA (genomic), 1395 bp, Helicobacter pylori; double-stranded, circular
  misc_feature (B) LOCATION 1...1395
  hypothetical: NO
  anti-sense: NO
atttttattttgggaaacccccccatgagatataacaacgcatgcaagccttcttgcactttgacgcccctagaaaacttcactgagagtttgaaaatcttaaaagatttatgggatttaatatacgtttttcctaaaaaaatcgctcgccctaaagatttcatcaccaagcaagataaagaagtcaatttgtgggatctgcccgttttaaaaacttgggaaaaagatggcggggctttcatcactatggggcaagtctatacccaaagcctggatcataaaaaaaagaatttaggcatgtatcgtttgcaagtttatgataaaaaccatttaggcttgcactggcaaatccataaagactcccagctctttttccacgaatacgctaaggctaaagtcaaaatgcccatcagcatcgctattggtggggatttgctctacacatggtgcgcgacagcccccttaccttatggcatttatgagctcatgctctatgggtttattagggagaaaaaagcgcgcgtgatgccatgcttgagcaatcctttgagcgtgccaagcgattgcgatattgtgatagaagggtttgtggattgcgaaaagctagagcttgaagggccttttggggatcacactggctattacacccctattgagccttaccctgttttagaagtcaaaaccattagctataaaaaagattccatttacttagccactgtggtgggtaagccccctttagaagacaaatacatggggtatttgaccgaacgcctgtttttgcccttgcttcaaacgcatgcccccaatctcatagattattacatgccagaaaatggggtgtttcataatttgattttagccaaaatacacacgcgctataacgctcatgccaagcaagtcatgcatgctttttggggcgtggggcagatgagctttgtcaagcatgcgatttttgtcaatgaagacgctcctaatctaagggacaccaacgctatcattgagtatatattagagaatttttctaaagaaaacgcgctcatctctcaaggcgtatgcgacgcgctagatcatgcaagccctgaatacgctatgggggggaaactcggtattgatgcgacttctaaaagcaataccccctaccccacgcttttaaacgataacgccttattagcgcttttacaagataaaatgcaaaatatcgttcttttgaagcaatattacccgcacacccgtaaccccatttgcgtgatcagcgtggaaaagaaagacaaaagcgtcattgaactggctaaaaacttgctcggttttgaaaaacatttaacgcattgtcatctttgtagagcatgccagcaacgatttaaacaacccttacatgctgttatggcgcatcgt

SEQ ID NO: 3149 - DNA (genomic), 1737 bp, Helicobacter pylori; double-stranded, circular
  misc_feature (B) LOCATION 1...1737
  hypothetical: NO
  anti-sense: NO
atggaggcaaagccctttttattcacgcaacccataagaaaagaacataaccagatcaaaacctttggcatgcctgttttgatgaacgcttttggctctttcaaacgcttagatcttttattgaaaacccctatagaggatttacaacaacgcatgcaagccttcttgcactttgacgcccctaaaaacttcactgagagtttgaaaatcttaaaagatttatgggatttaagacacgttttccctaaaaaaaccgctcgccctaaagatctcatcaccaagcaagataaagaagtcaatttgtgggatctgcccgttttaaaaacttgggaaaaagatggcggggctttcatcactatggggcaagtctatacccaaagcctggatcataaaaaaaagaatttaggcatgtatcgtttgcaagtttatgataaaaaccatttaggcttgcactggcaaatccataaagactcccagctctttttccacgaatacgctaaggctaaagtcaaaatgcccatcagcatcgctattggtggggatttgctctacacatggtgcgcgacagcccccttaccttatggcatttatgagctcatgctctatgggtttattagggagaaaaaagcgcgcgtgatgccatgcttgagcaatcctttgagcgtgccaagcgattgcgatattgtgatagaagggtttgtggattgcgaaaagctagagcttgaagggccttttggggatcacactggctattacacccctattgagccttaccctgttttagaagtcaaaaccattagctataaaaaagattccatttacttagccactgtggtgggtaagccccctttagaagacaaatacatggggtatttgaccgaacgcctgtttttgcccttgcttcaaacgcatgcccccaatctcatagattattacatgccagaaaatggggtgtttcataatttgattttagccaaaatacacacgcgctataacgctcatgccaagcaagtcatgcatgctttttggggcgtggggcagatgagctttgtcaagcatgcgatttttgtcaatgaagacgctcctaatctaagggacaccaacgctatcattgagtatatattagagaatttttctaaagaaaacgcgctcatctctcaaggcgtatgcgacgcgctagatcatgcaagccctgaatacgctatgggggggaaactcggtattgatgcgacttctaaaagcaataccccctaccccacgcttttaaacgataacgccttattagcgcttttacaagataaaatgcaaaatatcgttcttttgaagcaatattacccgcacacccgtaaccccatttgcgtgatcagcgtggaaaagaaagacaaaagcgtcattgaactggctaaaaacttgctcggttttgaagagcatttacgcattgtcatctttgtagagcatgccagcaacgatttaaacaacccttacatgctgttatggcgcatcgttaataacattgacgccaagcgtgatattctcacctctaaacattgtttttttatagacgctaccaataagggcgttatggataaacattttagagaatggcccaccgaaaccaattgctccatggaagtcatagaaaatttaaaaaagaaagggcttttaaaagattttgaaactttaaatcaaaaattccacctcacgcattctttcagcacgcacaaagaagatctataa

SEQ ID NO: 3150 - DNA (genomic), 1851 bp, Helicobacter pylori; double-stranded, circular
  misc_feature (B) LOCATION 1...1851
  hypothetical: NO
  anti-sense: NO
atgcgagattttttaaagcttttaaaaaagcatgatgaattaaaaatcattgacaccccccttgaagtggatttagaaatcgctcatctggcgtatatagaagcgaaaaaacctaatggaggcaaagcccttttattcacgcaacccataagaaaagaacataaccagatcaaaacctttggcatgcctgttttgatgaacgcttttggctctttcaaacgcttagatcttttattgaaaacccctatagaggatttacaacaacgcatgcaagccttcttgcactttgacgcccctaaaaacttcactgagagtttgaaaatcttaaaagatttatgggatttaagacacgttttccctaaaaaaaccgctcgccctaaagatctcatcaccaagcaagataaagaagtcaatttgtgggatctgcccgttttaaaaacttgggaaaaagatggcggggctttcatcactatggggcaagtctatacccaaagcctggatcataaaaaaaagaatttaggcatgtatcgtttgcaagtttatgataaaaaccatttaggcttgcactggcaaatccataaagactcccagctctttttccacgaatacgctaaggctaaagtcaaaatgcccatcagcatcgctattggtggggatttgctctacacatggtgcgcgacagcccccttaccttatggcatttatgagctcatgctctatgggtttattagggagaaaaaagcgcgcgtgatgccatgcttgagcaatcctttgagcgtgccaagcgattgcgatattgtgatagaagggtttgtggattgcgaaaagctagagcttgaagggccttttggggatcacactggctattacacccctattgagccttaccctgttttagaagtcaaaaccattagctataaaaaagattccatttacttagccactgtggtgggtaagccccctttagaagacaaatacatggggtatttgaccgaacgcctgtttttgcccttgcttcaaacgcatgcccccaatctcatagattattacatgccagaaaatggggtgtttcataatttgattttagccaaaatacacacgcgctataacgctcatgccaagcaagtcatgcatgctttttggggcgtggggcagatgagctttgtcaagcatgcgatttttgtcaatgaagacgctcctaatctaagggacaccaacgctatcattgagtatatattagagaatttttctaaagaaaacgcgctcatctctcaaggcgtatgcgacgcgctagatcatgcaagccctgaatacgctatgggggggaaactcggtattgatgcgacttctaaaagcaataccccctaccccacgcttttaaacgataacgccttattagcgcttttacaagataaaatgcaaaatatcgttcttttgaagcaatattacccgcacacccgtaaccccatttgcgtgatcagcgtggaaaagaaagacaaaagcgtcattgaactggctaaaaacttgctcggttttgaagagcatttacgcattgtcatctttgtagagcatgccagcaacgatttaaacaacccttacatgctgttatggcgcatcgttaataacattgacgccaagcgtgatattctcacctctaaacattgtttttttatagacgctaccaataagggcgttatggataaacattttagagaatggcccaccgaaaccaattgctccatggaagtcatagaaaatttaaaaaagaaagggcttttaaaagattttgaaactttaaatcaaaaattccacctcacgcattctttcagcacgcacaaagaagatctataa

SEQ ID NO: 3151 - DNA (genomic), 618 bp, Helicobacter pylori; double-stranded, circular
  misc_feature (B) LOCATION 1...618
  hypothetical: NO
  anti-sense: NO
atggattggattggattggcttttatagcgttcagagcgtatagatatggggaagaaaatatcaccattgagaatctcccaacgctagaaaagaattttttcaataaacacaacaatagcgctttggaattccttaaagagagtatccattccaaaaagaatactgagaagtggtataagtggggcaagacgctgaattacttgctttatgaatacgagctataccacaaccctgaaacgactctgaattttgatggcagtatagaaagcattgagcatatcctgccccaaaaacccgatcaaggctatagcgctaaagaaaaaaattgggctaaaaatccccatgtcgtgcatgctttagggaacttgctcttaatccctaaaaacgctaacagctctttaagcaacaagccttttgatgaaaaaagaaaagaataccttaaaggctcttacagcgaaaaagaagtggctaaaaacgcttctttcgggattacagagattcaaaaaaggagcgaaaaattattagactttttaatcgcacgttatcgtatcgttgaattggtgggcgaaaatgccattaaagcttttaaaaacgctcttttaaaagagatcaaatga

SEQ ID NO: 3152 - DNA (genomic), 615 bp, Helicobacter pylori; double-stranded, circular
  misc_feature (B) LOCATION 1...615
  hypothetical: NO
  anti-sense: NO
atggattggattggattggcttttatagcgttcagagcgtatagatatggggaagaaaatatcaccattgagaatctcccaacgctagaaaagaattttttcaataaacacaacaatagcgctttggaattccttaaagagagtatccattccaaaaagaatactgagaagtggtataagtggggcaagacgctgaattacttgctttatgaatacgagctataccacaaccctgaaacgactctgaattttgatggcagtatagaaagcattgagcatatcctgccccaaaaacccgatcaaggctatagcgctaaagaaaaaaattgggctaaaaatccccatgtcgtgcatgctttagggaacttgctcttaatccctaaaaacgctaacagctctttaagcaacaagccttttgatgaaaaaagaaaagaataccttaaaggctcttacagcgaaaaagaagtggctaaaaacgcttctttcgggattacagagattcaaaaaaggagcgaaaaattattagactttttaatcgcacgttatcgtatcgttgaattggtgggcgaaaatgccattaaagcttttaaaaacgctcttttaaaagagatcaaa

SEQ ID NO: 3153 - DNA (genomic), 405 bp, Helicobacter pylori; double-stranded, circular
  misc_feature (B) LOCATION 1...405
  hypothetical: NO
  anti-sense: NO
gtggataaaggtttaaccccgccctttttgaatgtgctttcattagcttttaaacaagacatgaaaacagatctcatttttgtggttaccaaaagcaacaaattgagcaaaaaagtcctttgcgattttgacgcttttttattgtccgaggctgtgatgagtgatatgcccgcaaaagcactttttcataaagagtttttattccaatctaaagaaaataaaacgctctatgtcttttcgcttatcaattctcaatattgctctaaaggtgggaattacagacacaaattagaaaggttagaacgctggtttgtgcaaaaagcacctgagttggctgagagccacagagtggattataagagccagtatgataaaacacaaacaaaaataaagaatgagagatga

SEQ ID NO: 3154 - DNA (genomic), 408 bp, Helicobacter pylori; double-stranded, circular
  misc_feature (B) LOCATION 1...408
  hypothetical: NO
  anti-sense: NO
gttagggtggataaaggtttaaccccgccctttttgaatgtgctttcattagcttttaaacaagacatgaaaacagatctcatttttgtggttaccaaaagcaacaaattgagcaaaaaagtcctttgcgattttgacgcttttttattgtccgaggctgtgatgagtgatatgcccgcaaaagcactttttcataaagagtttttattccaatctaaagaaaataaaacgctctatgtcttttcgcttatcaattctcaatattgctctaaaggtgggaattacagacacaaattagaaaggttagaacgctggtttgtgcaaaaagcacctgagttggctgagagccacagagtggattataagagccagtatgataaaacacaaacaaaaataaagaatgagaga

SEQ ID NO: 3155 - DNA (genomic), 405 bp, Helicobacter pylori; double-stranded, circular
  misc_feature (B) LOCATION 1...405
  hypothetical: NO
  anti-sense: NO
agggtggataaaggtttaaccccgccctttttgaatgtgctttcattagcttttaaacaagacatgaaaacagatctcatttttgtggttaccaaaagcaacaaattgagcaaaaaagtcctttgcgattttgacgcttttttattgtccgaggctgtgatgagtgatatgcccgcaaaagcactttttcataaagagtttttattccaatctaaagaaaataaaacgctctatgtcttttcgcttatcaattctcaatattgctctaaaggtgggaattacagacacaaattagaaaggttagaacgctggtttgtgcaaaaagcacctgagttggctgagagccacagagtggattataagagccagtatgataaaacacaaacaaaaataaagaatgagaga

SEQ ID NO: 3156 - DNA (genomic), 495 bp, Helicobacter pylori; double-stranded, circular
  misc_feature (B) LOCATION 1...495
  hypothetical: NO
  anti-sense: NO
atgagcgtttttcaaacgagcttgtgtgtgggattacttttttttggaggggtgttattgggggattcttctaaagcccttaaggttagggtggataaaggtttaaccccgccctttttgaatgtgctttcattagcttttaaacaagacatgaaaacagatctcatttttgtggttaccaaaagcaacaaattgagcaaaaaagtcctttgcgattttgacgcttttttattgtccgaggctgtgatgagtgatatgcccgcaaaagcactttttcataaagagtttttattccaatctaaagaaaataaaacgctctatgtcttttcgcttatcaattctcaatattgctctaaaggtgggaattacagacacaaattagaaaggttagaacgctggtttgtgcaaaaagcacctgagttggctgagagccacagagtggattataagagccagtatgataaaacacaaacaaaaataaagaatgagagatga

SEQ ID NO: 3157 - DNA (genomic), 318 bp, Helicobacter pylori; double-stranded, circular
  misc_feature (B) LOCATION 1...318
  hypothetical: NO
  anti-sense: NO
aggagaatggttatgtcaaaatacacacaagaacaaattaaaaatttagtagaggggaacttggattggaacactgtcttaaaggtgctgagcatgcctaaggatcatgagaggtatcaaatgtatttgaaggtgttgcaagataaggtggattttgatgaacaaatcgtcttacctttggggccgcatttgtttgtggtgcaagatcctcaaaacaaatgggtcattaattgttcatgcggtcatgcgttctgcgctccaaaggagaaattggaattgcatgcagacatctatgtgccgcgataccgccgaccgaat

SEQ ID NO: 3158 - DNA (genomic), 330 bp, Helicobacter pylori; double-stranded, circular
  misc_feature (B) LOCATION 1...330
  hypothetical: NO
  anti-sense: NO
atgtcaaaatacacacaagaacaaattaaaaatttagtagaggggaacttggattggaacactgtcttaaagatgctgagcatgcctaaggatcatgagaggtttcaaatgtatttgaaggtgttgcaagataaggtggattttgatgacaaaatcgtcttacctttggggccgcatttgtttgtggtgcaagatctcaaaagaagtgggtcattaagtgttcatgcggtcatgcgttctgcgctccagaggagaattggaaattgcatgcaaacatctatgtgcgcgatacagcagaaaaaatggaagaggtgtatcctaaactcttag

SEQ ID NO: 3159 - DNA (genomic), 360 bp, Helicobacter pylori; double-stranded, circular
  misc_feature (B) LOCATION 1...360
  hypothetical: NO
  anti-sense: NO
gatcaaatcaaccgcttcagtgaaaaagaacgccaccagctgtttttagagcctcaaaccattcacaaaagcgaatattatatcaacggcttaagcacctctttgcccctagatgtgcaagaaaaggtcatccattctatcaaaggcttagaaaacgccctcatcacgcgctatggctatgcgatagagtatgatttcatccagcccacagaattgacccacgctttagaaaccaaaaaaatcaaagggctttatttggccgggcaaatcaatgggactaccggctatgaagaagcggcggctcaagggcttatggctgggattaatgcggtgttagccttaaagaatcaagcccccttt

SEQ ID NO: 3160 - DNA (genomic), 354 bp, Helicobacter pylori; double-stranded, circular
  misc_feature (B) LOCATION 1...354
  hypothetical: NO
  anti-sense: NO
caaatcaaccgcttcagtgaaaaagaacgccaccagctgtttttagagcctcaaaccattcacaaaagcgaatattatatcaacggcttaagcacctctttgcccctagatgtgcaagaaaaggtcatccattctatcaaaggcttagaaaacgccctcatcacgcgctatggctatgcgatagagtatgatttcatccagcccacagaattgacccacgctttagaaaccaaaaaaatcaaagggctttatttggccgggcaaatcaatgggactaccggctatgaagaagcggcggctcaagggcttatggctgggattaatgcggtgttagccttaaagaatcaagccccc

SEQ ID NO: 3161 - DNA (genomic), 1422 bp, Helicobacter pylori; double-stranded, circular
  misc_feature (B) LOCATION 1...1422
  hypothetical: NO
  anti-sense: NO
gtgatcatcaccacaggcacttttttaaaaggggtggtgcatattggcgagcaccaaaaccaaaacgggcgctttggggaaaatgcttccaattctttagccttgaatttaagagagcttggctttaaggtggagaggttaaaaaccggcacttgcccaagagtggccggtaatagcattgattttgaaggcttagaagagcattttggggatgcaaaccctccctatttcagctataaaaccaaagattttaaccccacccaactctcttgcttcatcacctacactaaccctattacccaccaaatcattagggataatttccaccgagctcccctttttagcggtcaaattgaaggcataggccctaggtattgccctagcattgaagataaaatcaaccgcttcagtgaaaaagaacgccaccagctgtttttagagcctcaaaccattcacaaaagcgaatattatatcaacggcttaagcacctctttgcccctagatgtgcaagaaaaggtcatccattctatcaaaggcttagaaaacgccctcatcacgcgctatggctatgcgatagagtatgatttcatccagcccacagaattgacccacgctttagaaaccaaaaaaatcaaagggctttatttggccgggcaaatcaatgggactaccggctatgaagaagcggcggctcaagggcttatggctgggattaatgcggtgttagccttaaagaatcaagccccctttattttaaagcgcaatgaagcctatatcggcgttttgattgatgatctggttactaaaggcacgaatgagccttacagaatgtttactagccgggccgaataccgcttgcttttaagagaagacaacacgctttttaggttaggcgagcatgcctatcgtttagggcttatggaacaggatttttataaggaattggaaaaagacaaacaagcaatacaagaaaatctcaaacgccttaaagaatgcgtgcttacccctagcaaagaagtgttaaaacgcttgaatgaattaggtgaaaaccctatcaatgataaaatggatggcgtcagccttttagcgcgcgatagttttaatttagaaaaaatgcgctccttttttagctttttggtccccttgaatgagcgggttttagagcaaatcaaaattgaatgtaagtataatatttatattgaaaaacaacacgaaaatatcgctaaaatggatagcatgctcaaagtgtctatccctaaacattttgtgtttaaaggcattccaggccttagcttagaagcggtagaaaaattagaaaaattccgccccaaaagcctttttgaagcttcagaaatcagcgggatcaccccagcgaatttagacgttttgcatttgtatatccatttgcggaaaaactcttaa

SEQ ID NO: 3162 - DNA (genomic), 1422 bp, Helicobacter pylori; double-stranded, circular; identical to SEQ ID NO: 3161
  misc_feature (B) LOCATION 1...1422
  hypothetical: NO
  anti-sense: NO

SEQ ID NO: 3163 - DNA (genomic), 1107 bp, Helicobacter pylori; double-stranded, circular
  misc_feature (B) LOCATION 1...1107
  hypothetical: NO
  anti-sense: NO
atgctcacccaagaagatgtcttaaacgcgttaaaaacgatcatctaccctaattttgaaaaggatattgtcagctttggttttgttaaaaacatcaccttgcatgacaaccaattagggcttttaatagaaatcccctcaagctctgaggaaacgagtgcgattttaagggaaaatatctccaaagcgatgcaagaaaaaggcgtgaaagctttgaatttggatattaaaaccccgcctaaaccgcaagctccaaagcccaccactaaaaatctggctaaaaacatcaagcatgtggtcatgataagctcaggcaagggcggtgtgggtaaaagcaccaccagcgtgaatttaagcatcgctttagcgaatttaaaccaaaaagtggggctactagacgctgatgtgtatggccctaatatccctagaatgatgggcttgcaaaacgctgatgtgatcatggatcctagcggtaaaaaactcattcctttaaaagcttttggcgtttctgtgatgagcatggggcttttgtatgatgaggggcagagtctcatttggagaggacccatgctcatgcgagcgattgagcagatgctaagcgatattatttggggggatttagacgtgctggtggtggatatgcccccaggaacaggcgatgcgcagctcacgctagcccaagccgtgccactcagcgcaggaatcaccgttactacgcctcaaatcgtgagtttagatgacgctaaacggagtttggacatgtttaagaaactacacattcctattgcgggcattgtagaaaatatggggagttttgtgtgcgagcattgcaagaaagagagcgagatttttggctcaaattccatgagtggattattagaggcttataacacgcagattttagccaagctccctttagagcctaaagtgcgtctagggggggataagggtgaaccgattgtgatttctcatcccactagcgtgagtgctaaaatttttgaaaaaatggcaaaggatttgagtgcttttttagacaaggtggaaagggaaaaactagccgataataaggacatccagcccacacaaacgcatgcttattcgcattag

SEQ ID NO: 3164 - DNA (genomic), 1236 bp, Helicobacter pylori; double-stranded, circular
  misc_feature (B) LOCATION 1...1236
  hypothetical: NO
  anti-sense: NO
atggtgcaatttcaaaacacgcttataaaattccatgccctatcctttaaaaacgcaaatttaatttataatgcaaaattaaacaaaacatgctataaagaaaattcaaatactatcattttaaggattaaaatgctcacccaagaagatgtcttaaacgcgttaaaaacgatcatctaccctaattttgaaaaggatattgtcagctttggttttgttaaaaacatcaccttgcatgacaaccaattagggcttttaatagaaatcccctcaagctctgaggaaacgagtgcgattttaagggaaaatatctccaaagcgatgcaagaaaaaggcgtgaaagctttgaatttggatattaaaaccccgcctaaaccgcaagctccaaagcccaccactaaaaatctggctaaaaacatcaagcatgtggtcatgataagctcaggcaagggcggtgtgggtaaaagcaccaccagcgtgaatttaagcatcgctttagcgaatttaaaccaaaaagtggggctactagacgctgatgtgtatggccctaatatccctagaatgatgggcttgcaaaacgctgatgtgatcatggatcctagcggtaaaaaactcattcctttaaaagcttttggcgtttctgtgatgagcatggggcttttgtatgatgaggggcagagtctcatttggagaggacccatgctcatgcgagcgattgagcagatgctaagcgatattatttggggggatttagacgtgctggtggtggatatgcccccaaggaacaggcgatgcgcagctcacgcagcccaagccgtgccactcagcgcaggaatcaccgttactacgcctcaaatcgtgagtttagatgacgctaaacggagtttggacatgtttaagaaactacacattcctattgcgggcattgtagaaaatatggggagttttgtgtgcgagcattgcaagaaagagagcgagatttttggctcaaattccatgagtggattattagaggcttataacacgcagattttagccaagctccctttagagcctaaagtgcgtctagggggggataagggtgaaccgattgtgatttctcatcccactagcgtgagtgctaaaatttttgaaaaaatggcaaaggatttgagtgcttttttagacaaggtggaaagggaaaaactagccgataataaggacatccagcccacacaaacgcatgcttattcgcat

SEQ ID NO: 3165 - DNA (genomic), 1239 bp, Helicobacter pylori; double-stranded, circular
  misc_feature (B) LOCATION 1...1239
  hypothetical: NO
  anti-sense: NO
atggtgcaatttcaaaacacgcttataaaattccatgccctatcctttaaaaacgcaaatttaatttataatgcaaaattaaacaaaacatgctataaagaaaattcaaatactatcattttaaggattaaaatgctcacccaagaagatgtcttaaacgcgttaaaaacgatcatctaccctaattttgaaaaggatattgtcagctttggttttgttaaaaacatcaccttgcatgacaaccaattagggcttttaatagaaatcccctcaagctctgaggaaacgagtgcgattttaagggaaaatatctccaaagcgatgcaagaaaaaggcgtgaaagctttgaatttggatattaaaaccccgcctaaaccgcaagctccaaagcccaccactaaaaatctggctaaaaacatcaagcatgtggtcatgataagctcaggcaagggcggtgtgggtaaaagcaccaccagcgtgaatttaagcatcgctttagcgaatttaaaccaaaaagtggggctactagacgctgatgtgtatggccctaatatccctagaatgatgggcttgcaaaacgctgatgtgatcatggatcctagcggtaaaaaactcattcctttaaaagcttttggcgtttctgtgatgagcatggggcttttgtatgatgaggggcagagtctcatttggagaggacccatgctcatgcgagcgattgagcagatgctaagcgatattatttggggggatttagacgtgctggtggtggatatgcccccaggaacaggcgatgcgcagctcacgctagcccaagccgtgccactcagcgcaggaatcaccgttactacgcctcaaatcgtgagtttagatgacgctaaacggagtttggacatgtttaagaaactacacattcctattgcgggcattgtagaaaatatggggagttttgtgtgcgagcattgcaagaaagagagcgagatttttggctcaaattccatgagtggattattagaggcttataacacgcagattttagccaagctccctttagagcctaaagtgcgtctagggggggataagggtgaaccgattgtgatttctcatcccactagcgtgagtgctaaaatttttgaaaaaatggcaaaggatttgagtgcttttttagacaaggtggaaagggaaaaactagccgataataaggacatccagcccacacaaacgcatgcttattcgcattag

SEQ ID NO: 3166 - DNA (genomic), 1275 bp, Helicobacter pylori; double-stranded, circular
  misc_feature (B) LOCATION 1...1275
  hypothetical: NO
  anti-sense: NO
aagcaatttggtaggcgagtttttacccaaattcctaaaatggtgcaatttcaaaacacgcttataaaattccatgccctatcctttaaaaacgcaaatttaatttataatgcaaaattaaacaaaacatgctataaagaaaattcaaatactatcattttaaggattaaaatgctcacccaagaagatgtcttaaacgcgttaaaaacgatcatctaccctaattttgaaaaggatattgtcagctttggttttgttaaaaacatcaccttgcatgacaaccaattagggcttttaatagaaatcccctcaagctctgaggaaacgagtgcgattttaagggaaaatatctccaaagcgatgcaagaaaaaggcgtgaaagctttgaatttggatattaaaaccccgcctaaaccgcaagctccaaagcccaccactaaaaatctggctaaaaacatcaagcatgtggtcatgataagctcaggcaagggcggtgtgggtaaaagcaccaccagcgtgaatttaagcatcgctttagcgaatttaaaccaaaaagtggggctactagacgctgatgtgtatggccctaatatccctagaatgatgggcttgcaaaacgctgatgtgatcatggatcctagcggtaaaaaactcattcctttaaaagcttttggcgtttctgtgatgagcatggggcttttgtatgatgaggggcagagtctcatttggagaggacccatgctcatgcgagcgattgagcagatgctaagcgatattatttggggggatttagacgtgctggtggtggatatgcccccaggaacaggcgatgcgcagctcacgctagcccaagccgtgccactcagcgcaggaatcaccgttactacgcctcaaatcgtgagtttagatgacgctaaacggagtttggacatgtttaagaaactacacattcctattgcgggcattgtagaaaatatggggagttttgtgtgcgagcattgcaagaaagagagcgagatttttggctcaaattccatgagtggattattagaggcttataacacgcagattttagccaagctccctttagagcctaaagtgcgtctagggggggataagggtgaaccgattgtgatttctcatcccactagcgtgagtgctaaaatttttgaaaaaatggcaaaggatttgagtgcttttttagacaaggtggaaagggaaaaactagccgataataaggacatccagcccacacaaacgcatgcttattcgcat

SEQ ID NO: 3167 - DNA (genomic), 258 bp, Helicobacter pylori; double-stranded, circular
  misc_feature (B) LOCATION 1...258
  hypothetical: NO
  anti-sense: NO
atggaattttataagcgtgttttgaaattgcaccattttaggaatttgggtaaaaactcgcctaccaaattgcttttaaattcaagttttgatgaaaaacatggggggttggtggttttagtgggagaaaataatgtcggtaaaagcaatgttttagaagctttgaaaatctttaatgatgcggatattaaactttgcagtgaggaagattatttcaaagaccatgaaaaagacacccttttaagtttagaagaataa

SEQ ID NO: 3168 - DNA (genomic), 258 bp, Helicobacter pylori; double-stranded, circular
  misc_feature (B) LOCATION 1...258
  hypothetical: NO
  anti-sense: NO
ggcatggaattttataagcgtgttttgaaattgcaccattttaggaatttgggtaaaaactcgcctaccaaattgcttttaaattcaagttttgatgaaaaacatggggggttggtggttttagtgggagaaaataatgtcggtaaaagcaatgttttagaagctttgaaaatctttaatgatgcggatattaaactttgcagtgaggaagattatttcaaagaccatgaaaaagacacccttttaagtttagaagaa

SEQ ID NO: 3169 - DNA (genomic), 1221 bp, Helicobacter pylori; double-stranded, circular
  misc_feature (B) LOCATION 1...1221
  hypothetical: NO
  anti-sense: NO
ttggataatgaaagtgcaacacttttagagagtttgcaagttataagagatgaaacaaacgaagttatcacttttttaaatcccaatgagcttgaattgctaagacctacaggagaaaatactacaagtaaaatcgcttctattgctttagaagaaagcaataagcttaatgaaaaagaaactaacacacaagaacaagccaaacacacagaaaaagagcaagaaaagcccaagattgcccctaacaatgacatagaccttaaagacaaatacgctaacttgcatagtttctttaaacaaaccgagcttgatattaagcaaaaacgcattaagactaagcttgattttaaagagagctttttaaattacgctaaaaaccacatgaatgaagatgaattgaaagtcttattagtggtaagccaaaaagagccaaccaagctcactaaagagcatatcaatttgattaaggattgcttagaacaagcgcatggtaataagcacatgcaagataagggcttgcaattaagcgttaagtctatcttgggacaccaattagaaaaagaacaccacgaagtcttaaaagattatttagctaaatctaaagatagcttagagcctatggataatagagtgtatgaagtgatgcgaaagcatttagacaagcaacaagcaaaaacactcaaaaatttagatagcgccactcaaagtgtgggggtaaatgctattaaagagcaaaataaggctaataaaaattcagagcaacctaaaaactcacaaaatgagccaagacaagagactactaacgctcaaactaatagcaccgctacacaacaagaaaacacaaaacaaaaccaagctatagagcaaaatggcactactcaagcaaaagagccacaatctaagcaagagccaaaaaaaaccttgcatcctgatgaaccatggctaaatcatgaccctaaagctcacaaatgcttacaagaacgccaaaaagaagaaatccaagagaaagcacagagtaataacagcgatgagccttggatagagcatggcaaacgcatgcaagaaaaagccaaagcgcattatcaagcttgtttagaaagagaaaaagctaaagaattagctaaagagcaaaataacgctcaaaaagaagtgaaaaaagaaatgccaactatagattatggctacacacaaaatacgctctctaagagcagaaggcgttag

SEQ ID NO: 3170 - DNA (genomic), 1398 bp, Helicobacter pylori; double-stranded, circular
  misc_feature (B) LOCATION 1...1398
  hypothetical: NO
  anti-sense: NO
aaaagaagagctagaaagatacgccctagagggcaaaataaagccctagagcaatattatgagagccaaaaccctgatactctctatgagcaacaagtttttcaagagcaagaaaaagagcttttaaaccagcaagacttagaattagagacattaagagataataataccaagcaaggtttggataatgaaagtgcaacacttttagagagtttgcaagttataagagatgaaacaaacgaagttatcacttttttaaatcccaatgagcttgaattgctaagacctacaggagaaaatactacaagtaaaatcgcttctattgctttagaagaaagcaataagcttaatgaaaaagaaactaacacacaagaacaagccaaacacacagaaaaagagcaagaaaagcccaagattgcccctaacaatgacatagaccttaaagacaaatacgctaacttgcatagtttctttaaacaaaccgagcttgatattaagcaaaaacgcattaagactaagcttgattttaaagagagctttttaaattacgctaaaaaccacatgaatgaagatgaattgaaagtcttattagtggtaagccaaaaagagccaaccaagctcactaaagagcatatcaatttgattaaggattgcttagaacaagcgcatggtaataagcacatgcaagataagggcttgcaattaagcgttaagtctatcttgggacaccaattagaaaaagaacaccacgaagtcttaaaagattatttagctaaatctaaagatagcttagagcctatggataatagagtgtatgaagtgatgcgaaagcatttagacaagcaacaagcaaaaacactcaaaaatttagatagcgccactcaaagtgtgggggtaaatgctattaaagagcaaaataaggctaataaaaattcagagcaacctaaaaactcacaaaatgagccaagacaagagactactaacgctcaaactaatagcaccgctacacaacaagaaaacacaaaacaaaaccaagctatagagcaaaatggcactactcaagcaaaagagccacaatctaagcaagagccaaaaaaaaccttgcatcctgatgaaccatggctaaatcatgaccctaaagctcacaaatgcttacaagaacgccaaaaagaagaaatccaagagaaagcacagagtaataacagcgatgagccttggatagagcatggcaaacgcatgcaagaaaaagccaaagcgcattatcaagcttgtttagaaagagaaaaagctaaagaattagctaaagagcaaaataacgctcaaaaagaagtgaaaaaagaaatgccaactatagattatggctacacacaaaatacgctctctaagagcagaaggcgt

SEQ ID NO: 3171 - DNA (genomic), 699 bp, Helicobacter pylori; double-stranded, circular
  misc_feature (B) LOCATION 1...699
  hypothetical: NO
  anti-sense: NO
atgcaagattttatcaatggatttttaaaggcgtggaaagcttggagtgatgatggaaaggacgcttttttagagagttttttagatgaagttaaaaattctaaaaatgaccccaccaattttttaggcattttagaacaagaaatcaaatctttaagccaagagggcttacaagatgacatgtcttctatgctagaagtgattgagagcatgaaaaatgaaatctctaatttaaaagacaatgacaatgtaagcgatttttttaatgcgttccaacaagaaatcaatgaagagcaatctatctctaatgataatccaagcgagtttgtagaaagtttagaaaaagtgattgttgagacacaaaatgctaataaacatgagatacaaaattctagcaaaaatgaagtagagcttacagaagaaaaaagctttttagaaatgagcgaagatgagtattatgaataccaacaagagcaatacatacaaatgaatgaagatgatggcattgcacgagttagtgccaaattagaacaacaagagcttgaaagagaagaggctgagcttgaaagtaaggcactacaagattatgaaaaaaatcaaattcaaagagctggagaaattagtattgcagagcatgaaaataagcttgaaaaagaagagctagaaagatacgccctagagggcaaaataaagccctag

SEQ ID NO: 3172 - DNA (genomic), 711 bp, Helicobacter pylori; double-stranded, circular
  misc_feature (B) LOCATION 1...711
  hypothetical: NO
  anti-sense: NO
aggcaggggcagataatgcaagattttatcaatggatttttaaaggcgtggaaagcttggagtgatgatggaaaggacgcttttttagagagttttttagatgaagttaaaaattctaaaaatgaccccaccaattttttaggcattttagaacaagaaatcaaatctttaagccaagagggcttacaagatgacatgtcttctatgctagaagtgattgagagcatgaaaaatgaaatctctaatttaaaagacaatgacaatgtaagcgatttttttaatgcgttccaacaagaaatcaatgaagagcaatctatctctaatgataatccaagcgagtttgtagaaagtttagaaaaagtgattgttgagacacaaaatgctaataaacatgagatacaaaattctagcaaaaatgaagtagagcttacagaagaaaaaagctttttagaaatgagcgaagatgagtattatgaataccaacaagagcaatacatacaaatgaatgaagatgatggcattgcacgagttagtgccaaattagaacaacaagagcttgaaagagaagaggctgagcttgaaagtaaggcactacaagattatgaaaaaaatcaaattcaaagagctggagaaattagtattgcagagcatgaaaataagcttgaaaaagaagagctagaaagatacgccctagagggcaaaataaagccc

SEQ ID NO: 3173 - DNA (genomic), 1053 bp, Helicobacter pylori; double-stranded, circular
  misc_feature (B) LOCATION 1...1053
  hypothetical: NO
  anti-sense: NO
atgaaagcgtggaatgaaatggatattaaagagcaaaaagaggtttttgctaggtttttagcgagcgaaattgctaaaagtttagaatctggattagagtttaagccaaataatagagcttataatggtaatgctggcaatgcctataatggcttaaattctcttattttagatgccaagcaacatgagaatggctatgagagtaatgtttgggtaggtttagatgatgccttaaaacttggggcaaaccctaaagaagtggagcatattaaaaacaacactaagagtaaaaataatcctaatggcttttatgataaggcaagtattgcttatattagagattatgaaatgcgctatattaaagcaagagacaaagaaggcaatttaatcccccttaaagacaaagagggcaatcttaagcattattctaatggcgaagtgatttatgagaatgaaaaagttcctcaaagagacaaagagggtaatatcaagtatatgcaagatggcgttacacccttttacgaatttaaaaaagaaaagatagacatagagccgactttagagattaaaaatctctacaatgtcaatgtttttcaaacgctagacaaaactaagcttaaagaattagaccctaaaactttaagaacacaatacattagcaatactttctctatgaataatcaaaatttggtgatttatgatttatccaagcatttgaatgaaaagcagtataacaaagtgctagattatgtcaatcaatatggggcaacccatcatgaaaaaagaaagcaacacaaaatctatcaagaaccacagcaacaaattgcacctaatacagacaacaatgccaaagaaaacaacactaaagagccaaacaacaatgaaatgaatatggcagagttttctaaaatgcttgaaatggctcaaaacaatccccaaatgttagcgatgttgcaacaaactcttaataaaggagcagagcaacaaaagtatgaccactactttgctaatgatgaagtagtgcttactcaatctaaaggcaggggcagataa

SEQ ID NO: 3174 - DNA (genomic), 1050 bp, Helicobacter pylori; double-stranded, circular
  misc_feature (B) LOCATION 1...1050
  hypothetical: NO
  anti-sense: NO
atgaaagcgtggaatgaaatggatattaaagagcaaaaagaggtttttgctaggtttttagcgagcgaaattgctaaaagtttagaatctggattagagtttaagccaaataatagagcttataatggtaatgctggcaatgcctataatggcttaaattctcttattttagatgccaagcaacatgagaatggctatgagagtaatgtttgggtaggtttagatgatgccttaaaacttggggcaaaccctaaagaagtggagcatattaaaaacaacactaagagtaaaaataatcctaatggcttttatgataaggcaagtattgcttatattagagattatgaaatgcgctatattaaagcaagagacaaagaaggcaatttaatcccccttaaagacaaagagggcaatcttaagcattattctaatggcgaagtgatttatgagaatgaaaaagttcctcaaagagacaaagagggtaatatcaagtatatgcaagatggcgttacacccttttacgaatttaaaaaagaaaagatagacatagagccgactttagagattaaaaatctctacaatgtcaatgtttttcaaacgctagacaaaactaagcttaaagaattagaccctaaaactttaagaacacaatacattagcaatactttctctatgaataatcaaaatttggtgatttatgatttatccaagcatttgaatgaaaagcagtataacaaagtgctagattatgtcaatcaatatggggcaacccatcatgaaaaaagaaagcaacacaaaatctatcaagaaccacagcaacaaattgcacctaatacagacaacaatgccaaagaaaacaacactaaagagccaaacaacaatgaaatgaatatggcagagttttctaaaatgcttgaaatggctcaaaacaatccccaaatgttagcgatgttgcaacaaactcttaataaaggagcagagcaacaaaagtatgaccactactttgctaatgatgaagtagtgcttactcaatctaaaggcaggggcaga

SEQ ID NO: 3175 - DNA (genomic), 120 bp, Helicobacter pylori; double-stranded, circular
  misc_feature (B) LOCATION 1...120
  hypothetical: NO
  anti-sense: NO
atggataaattagaacaaattgatagcattaagccctttaatgaaaggcttaagggcattttagaaaatgctaaagaaaatttacaagcacaaagttgtgttaaagggagggggcgatga

SEQ ID NO: 3176 - DNA (genomic), 510 bp, Helicobacter pylori; double-stranded, circular
  misc_feature (B) LOCATION 1...510
  hypothetical: NO
  anti-sense: NO
gtggtagtagagacttacactgacattattaaaaattatcaaagagaaaaaaatgctcttatttataacaagcaagttgaaagaactagagaatacagaaagcctaagcctgttaataagccacaagatagttttaatgtcatcttagcctttgataatgatattaatggtaaaggatacaaagaaaaatgcgagggtattttatatgctcttacacagcaattccccactatctatacgcctttttcaaaagattgtaatgatgatttgaaattagcacacattatagaaaataaggcgattaacattgacactatggcggagtttttagaaagctctttagaaaaattaaaagacaactacacttcaacacaagaaaaggaaaatatcatggataaattagaacaaattgatagcattaagccctttaatgaaaggcttaagggcattttagaaaatgctaaagaaaatttacaagcacaaagttgtgttaaagggagggggcgatga

SEQ ID NO: 3177 - DNA (genomic), 546 bp, Helicobacter pylori; double-stranded, circular
  misc_feature (B) LOCATION 1...546
  hypothetical: NO
  anti-sense: NO
attaactttaaacaaatggctagtgatgattttaatagcgtggtagtagagacttacactgacattattaaaaattatcaaagagaaaaaaatgctcttatttataacaagcaagttgaaagaactagagaatacagaaagcctaagcctgttaataagccacaagatagttttaatgtcatcttagcctttgataatgatattaatggtaaaggatacaaagaaaaatgcgagggtattttatatgctcttacacagcaattccccactatctatacgcctttttcaaaagattgtaatgatgatttgaaattagcacacattatagaaaataaggtgattaacattgacactatggcggagtttttagaaagctctttagaaaaattaaaagacaactacacttcaacacaagaaaaggaaaatatcatggataaattagaacaaattgatagcattaagccctttaatgaaaggcttaagggcattttagaaaatgctaaagaaaatttacaagcacaaagttgtgttaaagggagggggcga

SEQ ID NO: 3178 - DNA (genomic), 1200 bp, Helicobacter pylori; double-stranded, circular
  misc_feature (B) LOCATION 1...1200
  hypothetical: NO
  anti-sense: NO
gaaaatcctatgagttatatccctaatctcactgccttgcctttgcatgagattttattagataatggctatgttatcaacaaaaataagcatagcaagaataacccttgcttaaagcatgaaaacgaagagggaagtttagtcatctttaaaaatcaaaataaagatggctcaattagttacacctacaaagaaactcataccgataaggtcggtaatatcattactttttgtaaggatagaaatatcagcgttgaagacttactcgctgggaagttagaaggctatcgcaataaaaaagatactctacaagcaagggataactctagcgaaaataacgaagaaattcaaaaaatcatcaatgagtttaaaaaccttaaaccctatgatttacaaaacgctacactcattaaaaagcgtggcattgatacaaagctattagagccttataaagagcatttaaaaacggacaattttaataatcttatccttgctacctatttagcttttgagaataaaaatcttaatgtcatacccattcatcagtgtgggattaacaaacgcctaaatactcccttaagcacagacaaagagggcaacataagagacaagccattaaaatctatcgcacaaggaagtaaaggcatagaagtcttgttccctaataatttaagcttagttaaaaatgtcattgttactgaaaatatctttgatagtctagcttatttagagttacaaggtttagagcctaaagagagcgttttaattagcaccgcagggcaatttaatgcacaaaaattagaactctttttaaaaagtttttttaagcaattaaaagggcgacaacaaagagcgtataaccattatctaaaacaagaagaacaatggcaagaattagtgagacaaggcatggctagtgatgattttaatagcgtggtagtagagacttacactgacattattaaaaattatcaaagagaaaaaaatgctcttatttataacaagcaagttgaaagaactagagaatacagaaagcctaagcctgttaataagccacaagatagttttaatgtcatcttagcctttgataatgatattaatggtaaaggtacaaagccaaatgcgagggtattttatatgttcttacacagcaattccccattatttatacgcctttttcaaaagattgtaatgatgatt

SEQ ID NO: 3179 - DNA (genomic), 1434 bp, Helicobacter pylori; double-stranded, circular
  misc_feature (B) LOCATION 1...1434
  hypothetical: NO
  anti-sense: NO
atgagttatatccctaatctcactgccttgcctttgcatgagattttattagataatggctatgttatcaacaaaaataagcatagcaagaataacccttgcttaaagcatgaaaacgaagagggaagtttagtcatctttaaaaatcaaaataaagatggctcaattagttacacctacaaagaaactcataccgataaggtcggtaatatcattactttttgtaaggatagaaatatcagcgttgaagacttactcgctgggaagttagaaggctatcgcaataaaaaagatactctacaagcaagggataactctagcgaaaataacgaagaaattcaaaaaatcatcaatgagtttaaaaaccttaaaccctatgatttacaaaacgctacactcattaaaaagcgtggcattgatacaaagctattagagccttataaagagcatttaaaaacggacaattttaataatcttatccttgctacctatttagcttttgagaataaaaatcttaatgtcatacccattcatcagtgtgggattaacaaacgcctaaatactcccttaagcacagacaaagagggcaacataagagacaagccattaaaatctatcgcacaaggaagtaaaggcatagaagtcttgttccctaataatttaagcttagttaaaaatgtcattgttactgaaaatatctttgatagtctagcttatttagagttacaaggtttagagcctaaagagagcgttttaattagcaccgcagggcaatttaatgcacaaaaattagaactctttttaaaaagtttttttaagcaattaaaagggcgacaacaaagagcgtataaccattatctaaaacaagaagaacaatggcaagaattagtgagacaaggcatggctagtgatgattttaatagcgtggtagtagagacttacactgacattattaaaaattatcaaagagaaaaaaatgctcttatttataacaagcaagttgaaagaactagagaatacagaaagcctaagcctgttaataagccacaagatagttttaatgtcatcttagcctttgataatgatattaatggtaaaggatacaaagaaaaatgcgagggtattttatatgctcttacacagcaattccccactatctatacgcctttttcaaaagattgtaatgatgatttgaaattagcacacattatagaaaataaggcgattaacattgacactatggcggagtttttagaaagctctttagaaaaattaaaagacaactacacttcaacacaagaaaaggaaaatatcatggataaattagaacaaattgatagcattaagccctttaatgaaaggcttaagggcattttagaaaatgctaaagaaaatttacaagcacaaagttgtgttaaagggagggggcgatga

SEQ ID NO: 3180 - DNA (genomic), 222 bp, Helicobacter pylori; double-stranded, circular
  misc_feature (B) LOCATION 1...222
  hypothetical: NO
  anti-sense: NO
ttgaaaaccctcttttttaaaaagggggggattaactccaataaaaaacctctaaagctaaaaattttcaacaaaacaaccgctttacaccccaaaaaagaaattttaaggtataatacattcgctttcgccatttttagttttcatggcaagctcctttttgaagattatccccataagtccaacttatgggggtctttgttttataacaatctctcttaa

SEQ ID NO: 3181 - DNA (genomic), 246 bp, Helicobacter pylori; double-stranded, circular
  misc_feature (B) LOCATION 1...246
  hypothetical: NO
  anti-sense: NO
cgtgtatctcaattatgtgtttgcgtattgaaaaccctcttttttaaaaagggggggattaactccaataaaaaacctctaaagctaaaaattttcaacaaaacaaccgctttacaccccaaaaaagaaattttaaggtataatacattcgctttcgccatttttagttttcatggcaagctcctttttgaagattatccccataagtccaacttatgggggtctttgttttataacaatctctct

SEQ ID NO: 3182 - DNA (genomic), 204 bp, Helicobacter pylori; double-stranded, circular
  misc_feature (B) LOCATION 1...204
  hypothetical: NO
  anti-sense: NO
aaggattgtttgatgaatcatttttataagcgttgtttgagattttcgttagtggggttactgggtgtggggtttttgagcgttcagcttacgctagggagttttattgatggggatctagacattccaaaattcagctatgaagattctttgcttaaaaagggagatcctaatggcgtgcataaggtgtcaggtgcgagatta

SEQ ID NO: 3183 - DNA (genomic), 447 bp, Helicobacter pylori; double-stranded, circular
  misc_feature (B) LOCATION 1...447
  hypothetical: NO
  anti-sense: NO
acattccaaaattcagctatgaagattctttgcttaaaaagggagatcctaatggcgtgcataaggtgtcaggtgcgagattataaaggcaaaatgcaagaagctgagatccactcagaaatacgcatcgcgcttaaaccgggggttaaaaaagaagttaaaaaaggcaagatttatagcgctcaaatcaatgatggcatgtgctatgcttttagaatgctccaaaccggcaataataccacaagccttgattctaaagagttccccaagcaaagccgtgagaaaaagggccaagtgatcactttaatcggtcaaaatgaagtgccttatcttattttagagacggattgccaagtgggtgatattgcaaagatctctttagtgggtaattttgatgggactggatttcttacggaatataaattcaaaggcgctaaacccatttac

SEQ ID NO: 3184 - DNA (genomic), 561 bp, Helicobacter pylori; double-stranded, circular
  misc_feature (B) LOCATION 1...561
  hypothetical: NO
  anti-sense: NO
ttgatgaatcatttttataagcgttgtttgagattttcgttagtggggttactgggtgtggggtttttgagcgttcagcttgacgctaggagttttattgatggggatttagacattcaaaaattcagctatgaagattctttgcttaaaaagggagatcctaatggcgtgcataaggtgcaggtgcgagattataaaggcaaaatgcaagaagctgagatccactcagaaatacgcatcgcgcttaaaccgggggttaaaaaagaagttaaaaaaggcaagatttatagcgctcaaatcaatgatggcatgtgctatgcttttagaatgctccaaaccggcaataataccacaagccttgattctaaagagttccccaagcaaagccgtgagaaaaagggccaagtgatcactttaatcggtcaaaatgaagtgccttatcttattttagagacggattgccaagtgggtgatattgcaaagatctctttagtgggtaattttgatgggactggatttcttacggaatataaattcaaaggcgctaaacccatttactag

SEQ ID NO: 3185 - DNA (genomic), 162 bp, Helicobacter pylori; double-stranded, circular
  misc_feature (B) LOCATION 1...162
  hypothetical: NO
  anti-sense: NO
atggggtttttcaagcttaaagaacacaacactaacattgccaccgagtttagagcgggtttaacgacttttatcaccatgatttacatcgtgccactaaacgctcttatcctttctcaagccaacatgccttatgaagcccttttgagtgcgactgccatt

SEQ ID NO: 3186 - DNA (genomic), 171 bp, Helicobacter pylori; double-stranded, circular
  misc_feature (B) LOCATION 1...171
  hypothetical: NO
  anti-sense: NO
tctataccaaatagtaaggagttatctaacatggggtttttcaagcttaaagaacacaacactaacattgccaccgagtttagagcgggtttaacgacttttatcaccatgatttacatcgtgccactaaacgctcttatcctttctcaagccaacatgccttatgaagcc

SEQ ID NO: 3187 - DNA (genomic), 1308 bp, Helicobacter pylori; double-stranded, circular
  misc_feature (B) LOCATION 1...1308
  hypothetical: NO
  anti-sense: NO
atggggtttttcaagcttaaagaacacaacactaacattgccaccgagtttagagcgggtttaacgacttttatcaccatgatttacatcgtgccactaaacgctcttatcctttctcaagccaacatgccttatgaagcccttttgagtgcgactgccattatcactatcttatcgagcgtgtttaacggattgtgggcaaacacccccatcgctatgagcgtgggtttagggttatcggcttattttagcttcgggttggttcaggggctaaaactcccttggcaaagcgctttaggcatcgtagcgctctcgggagcgatttttgtgattttgtctttcactaaatttagaagttgggtcatgcgaagcattcctagcgatttaaggcgcgcggtgagcgcggggataggggcttttatcgcattcattggcctcaaagaaatgcatatcgtcgttacccataaggctacgcttgtaaccttaggcgattttagcgatccgcatgtgttattgggggttgtggggatcattttgactttcgcgctctacacgcttaaaatcaagggttcttttattatagcggttttaatcacttccattctcgcatgggttttaaagctagccccttaccctagcgaatttttttccatgcctgctagcattagtcctatcgctttccaattagacattaaaggcattttttttgatgcgagcggggctttcactttagtgttagtgccagtcatcatcactttttttgtaaccgatttgttcgattctttaggcacgcttgcagggattggccacaagactgattttttcaatgatgaagaaaaaaacaaggaattagaaaggactttagaagcggatgcggtggcttctttagggagtgcggtggtaggcgtttctaccacgaccgcttttatagagagcgcgagtggggttgaagaggggggacgcacagggcttacagcggtttttactgggctattttttgttttaacgctcttttgcttgcctcttttaaaagccattcctagcaacgcgatttatccggtgctggtggtagtaggggttttgatgtttagcgtgttagaaggggtgaattttaaagacatggccattagcgtttccacttttttaaccgtggtgatgatgcctttaaccttctccattgccgatggcttagcctttggctttttgtcttatagtatcatcaaattggttcaaaaagattttaaagcactcaattcaggcatcatcattctctgcatcatttctgtttctgtatttatctttcgttaa

SEQ ID NO: 3188 - DNA (genomic), 285 bp, Helicobacter pylori; double-stranded, circular
  misc_feature (B) LOCATION 1...285
  hypothetical: NO
  anti-sense: NO
aatcaaatcatagaaaaatatgtggaaatgaatatcgctcacccttttttggagggtaatggcagagcgactaggatatggcttgatttgttgcttaaaaaggaattgaaaaaaattgcgctttgggataggattgataaagccgcttatttgagtgcaataaaaaggagtcctgtgaatgatttggaaatcaaaacgcttttaaaaaagcatttgagttctaatattaacgattccttaactttcattaaaggcatcacgcagtcatattactatgaagggctt

SEQ ID NO: 3189 - DNA (genomic), 282 bp, Helicobacter pylori; double-stranded, circular
  misc_feature (B) LOCATION 1...282
  hypothetical: NO
  anti-sense: NO
caaatcatagaaaaatatgtggaaatgaatatcgctcacccttttttggagggtaatggcagagcgactaggatatggcttgatttgttgcttaaaaaggaattgaaaaaaattgcgctttgggataggattgataaagccgcttatttgagtgcaataaaaaggagtcctgtgaatgatttggaaatcaaaacgcttttaaaaaagcatttgagttctaatattaacgattccttaactttcattaaaggcatcacgcagtcatattactatgaagggctt

SEQ ID NO: 3190 - DNA (genomic), 321 bp, Helicobacter pylori; double-stranded, circular
  misc_feature (B) LOCATION 1...321
  hypothetical: NO
  anti-sense: NO
gagcgtgaaaaaaatgcgcctctaaaaattacactcttaaaaatcagcacgatgcatttagacaggcagagtttagaaaaagccaagcatttgatccaaagcggtctgattgacaccatagaagtaggcgcaatcaagggcttgcaagaaatccatcggtttttgtttgaagggctgtatgaatttgccgggaaaatcagggataaaaatatttcgaatttcaggttcgctaactgcttgtatttggatttgattttacccagaatggagagcatgccgcaaaataatttcaatcaaatcatagaaaaatatgtggaaatg

SEQ ID NO: 3191 - DNA (genomic), 528 bp, Helicobacter pylori; double-stranded, circular
  misc_feature (B) LOCATION 1...528
  hypothetical: NO
  anti-sense: NO
atgcatttagacaggcagagtttagaaaaagccaagcatttgatccaaagcggtctgattgacaccatagaagtaggcgcaatcaagggcttgcaagaaatccatcggtttttgtttgaagggctgtatgaatttgccgggaaaatcagggataaaaatatttcgaatttcaggttcgctaactgcttgtatttggatttgattttacccagaatggagagcatgccgcaaaataatttcaatcaaatcatagaaaaatatgtggaaatgaatatcgctcacccttttttggagggtaatggcagagcgactaggatatggcttgatttgttgcttaaaaaggaattgaaaaaaattgcgctttgggataggattgataaagccgcttatttgagtgcaataaaaaggagtcctgtgaatgatttggaaatcaaaacgcttttaaaaaagcatttgagttctaatattaacgattccttaactttcattaaaggcatcacgcagtcatattactatgaagggctttaa

SEQ ID NO: 3192 - DNA (genomic), 660 bp, Helicobacter pylori; double-stranded, circular
  misc_feature (B) LOCATION 1...660
  hypothetical: NO
  anti-sense: NO
atgagtctagctacgagttacaatgtgagtaataatttttctaagtttaatattaagagagtcagaggatatttgatttgtcttgtttgtaacacacctaaaatgatacaaagaggattgaatggtgtctcattttatggttgctctgattatgtaaataaaggcgactgtaagggcgttttacgagaaataaatggctcaatgaaaatggtctgcttacattgtgaaaacacgcccataatggaaaaagtagaaagtggtaggggaggagcttacgcttgtaagaattgcaataggaagttttactttatcgatcttgcaaaacaaaacgaacgaaaaaaagatttagaaaaagaaaaaaaagaattgcttaataagattgaaaagcaaaaaatcaaacaccttgagcgtttcattttggctggtgtaaaagctaatattaaagaaaattcttttttcttaggatgtaaaaattatcctaagtgcgaatggactgctagtatggattcacaagatcttaaatgtcccaaatgcaacagattaatgaaaagaaaaaagaatttcaaaaacaatgagttttttacagctacatcgcttaccttaaatgcaatagaattttgtctctatattaatttgaaaaaaaaggaaaccaatgtttag

SEQ ID NO: 3193 - DNA (genomic), 693 bp, Helicobacter pylori; double-stranded, circular
  misc_feature (B) LOCATION 1...693
  hypothetical: NO
  anti-sense: NO
attctttttttagatttaagagtagttatttgcgatatgagtctagctacgagttacaatgtgagtaataatttttctaagtttaatattaagagagtcagaggatatttgatttgtcttgtttgtaacacacctaaaatgatacaaagaggattgaatggtgtctcattttatggttgctctgattatgtaaataaaggcgactgtaagggcgttttacgagaaataaatggctcaatgaaaatggtctgcttacattgtgaaaacacgcccataatggaaaaagtagaaagtggtaggggaggagcttacgcttgtaagaattgcaataggaagttttactttatcgatcttgcaaaacaaaacgaacgaaaaaaagatttagaaaaagaaaaaaaagaattgcttaataagattgaaaagcaaaaaatcaaacaccttgagcgtttcattttggctggtgtaaaagctaatattaaagaaaattcttttttcttaggatgtaaaaattatcctaagtgcgaatggactgctagtatggattcacaagatcttaaatgtcccaaatgcaacagattaatgaaaagaaaaaagaatttcaaaaacaatgagttttttacagctacatcgcttaccttaaatgcaatagaattttgtctctatattaatttgaaaaaaaaggaaaccaatgtt

SEQ ID NO: 3194 - DNA (genomic), 231 bp, Helicobacter pylori; double-stranded, circular
  misc_feature (B) LOCATION 1...231
  hypothetical: NO
  anti-sense: NO
gtggatattgttgtgcaaaataaagtcttaaaattgtatttaaagatggaattcaatgaattacaagatgaaataaaggaaaaactaaaaatcagagatgtttctaatatcggttgtccatgttctgaagacatggaagtagagctagaaacaaaagagaatatcccttattgtttggggttaatcagacaggctttagaaaaacagatgggtggtaggaataggcaataa

SEQ ID NO: 3195 - DNA (genomic), 255 bp, Helicobacter pylori; double-stranded, circular
  misc_feature (B) LOCATION 1...255
  hypothetical: NO
  anti-sense: NO
gcttataagttttttaaaataaattttgtggatattgttgtgcaaaataaagtcttaaaattgtatttaaagatggaattcaatgaattacaagatgaaataaaggaaaaactaaaaatcagagatgtttctaatatcggttgtccatgttctgaagacatggaagtagagctagaaacaaaagagaatatcccttattgtttggggttaatcagacaggctttagaaaaacagatgggtggtaggaataggcaa

SEQ ID NO: 3196 - DNA (genomic), 597 bp, Helicobacter pylori; double-stranded, circular
  misc_feature (B) LOCATION 1...597
  hypothetical: NO
  anti-sense: NO
gcgttattaaataacgcaaaaatccctacaagtgggagagatgcagttatttttggcaagaataacctaaaccctgaaattgtagaatttatacacaaaaaccacaaaagaatggctatagaaaaagcctctaacaaagaaatagaacttttacaagacgctaactttagacaccctgaagatgttagagcgagtttagatcatgaagctattacccacatactcaaaaggcatggcgttaattctgttaatgttagaaatggagaaagccctatcacttacgaggatatagctaattatagagatattgttaataacgctgatgaaatcattagagccataggaaaaggcaataaagaaaatataacagcgtttaaacaaatcaacggctatgcggtagtggtagaacaagcagttaatagaaatagtgagttagttttaaaaacaatgttcaagagtaacgggaattataagaataacaacgcttataagaagttttcaagcaccggactcaatgctaacgcaaggttcagccataggtcgagttcccatggtggtgttgaaaagaacatacttaaaaaacttgaaaagtcagga

SEQ ID NO: 3197 - DNA (genomic), 957 bp, Helicobacter pylori; double-stranded, circular
  misc_feature (B) LOCATION 1...957
  hypothetical: NO
  anti-sense: NO
agtatcaccttaaaaagagcgcttgagagaagccacactataagcgagtttagcaagaatttagaactaagtgtgaaaaacgctaaatttagcaacaacacgctcaaaatcattgaagagcttactaacggagttaagcaagcgagtgaggaaatcaaagcaaaagccactaaatacgaaaaagccttacaagaattacaaaagattgatgaaagcaaactgactaaagaacagcaacaagttttgaaagtgtttaaaggcgagttagatcaaacagaaattaaaggcatagacttaaacgacctttacattttagatcaaggcacaaggcatgcgggagctaaaaagattttagttaaacattacggagtagagaacacaggcggactaactaacgatgaactgattaacatgagcgaagttatcaagaacggaagcgtgttattagagagttttgaaaggcttaaaaacggctttagatacggctatgaatgggataataacggcgtaaagcttaggctagtggtagatgatttaaacgatgggaataaggtttttgatttttatagcgataggaattttaaagattttagagatgccaggccacaacctagtgcctcaaaggataacgggacacaacccattacccttgatggaaataatcctactcaaaaacctttaacgagtcaagaggatttattaaaaaatacagaattaaataacgaaaccacccaagaagttaaaaatttaagcctccttgaacaagctaacgccgaaaagttagcgaagttagaaagcgaagcgaaagttagcgaactggattttttaaaggttaaagcccaggacccaaggcccaatgttgttttaaaaaagaaattagaacacgcgcgtggctatgcaggaatctttgaaccctgttttgcattagtcacaaacccaagccgaacaaacgagccg

SEQ ID NO: 3198 - DNA (genomic), 1446 bp, Helicobacter pylori; double-stranded, circular
  misc_feature (B) LOCATION 1...1446
  hypothetical: NO
  anti-sense: NO
agagcaagagcaaagcgcaaagttgcgttaaaaaagaaattagaacacgagcgaggcaatgcaggaaacattgaaagccagactaaaatagaagtaggagaagatatacccacgcagatccaagcgcagatccctaaaagtagagtaaggctaaatgaacgagagatttacgatctagattatgcgatcgtgaaagctaaagacttaaaaccaagctttaccacaggcgggacgcaaaaacgcacggacatgaacgaagagcagattaaaagcattgcggagaattttgatcctaaaaagatatttgggagcggaggttttgaggatttacccatcatcttacacgacgggcaagtgatcgcaggaaaccaccgcatagctggcatgctgaacttcacgcccaaaagccgttatatctataacaaagcgatcaaggaatactatcgcatagacttaaaacctgacgaattgttagtgagagtgccacaccaacgcctagacaacaccgagatcaacaatttagcggcttcaagcaatcaaggacgctttaacagtgaaagcgatcatgcgatagcggttttaagccattacgaagcgaaattgaaagaattagacaagaaattagacgctgatagcatctactcattaaaaaacatcgtcgctaaaaaccttaattttgataaggctactcatcctaatgtaggcgatagtaatttagccttgcttatgtataacatgccaaggactaagacgcaagggatagaattactcaaccgctggcagaaagaattttctaacgacattaaaagctatgaaaaagtaaaaaaaatgtttgtggataacgctggaagctttcataatctcatccacgacatgaacttccctaacgtgagtttaaacgcttatttaagcgatatcatggatcgcagtttcgccaatttaaagaattacccaagcacgagcgagagcctgaaagatttgagcgagaaattctataaaacgagttctttagacatgtttgaaaagagcgatcaacgcgcgagcgatattagcgagattttaggaggagcgatagcgcgctttgcgaggtttgatgatccttctaaggcgttatttgaagcgttaaagagcgataacattaaaaaaggcttgaaagagttcaagatcgcagatgttacaaaagacatgttcaatcctaaaagcaaggaatttaaggacattgacatttacgatttcacgcattaccttttaatggtcaatagagaaccgaatgaaaataaccccgtattaaagcgcttgatacaagccgttaagggcatgcaaaaagaaagcgagaaagggattaaagaagttagtaagcaagccgcagaagaaacagaggaagggataaaacgagattttagcgataccaatttaagcatcaatggaaatctaagcgttattaaa

SEQ ID NO: 3199 - DNA (genomic), 2739 bp, Helicobacter pylori; double-stranded, circular
  misc_feature (B) LOCATION 1...2739
  hypothetical: NO
  anti-sense: NO
gtgaaaaacgctaaatttagcaacaacacgctcaaaatcattgaagagcttactaacggagtcaagcaagcgagtgaggaaatcaaagcaaaagccactaaatacgaaaaagccttacaagaattacaaaagattgatgaaagcaaactgactaaagaacagcaacaagttttgaaagtgtttaaaggcgagttagatcaaacagaaattaaaggcatagacttaaacgacctttacattttagatcaaggcacaaggcatgcgggagctaaaaagattttagttaaacattacggagtagagaacacaggcggactaactaacgatgaactgattaacatgagcgaagttatcaagaacggaagcgtgttattagagagttttgaaaggcttaaaaacggctttagatacggctatgaatgggataataacggcgtaaagcttaggctagtggtagatgatttaaacgatgggaataaggtttttgatttttatagcgataggaattttaaagattttagagatgccaggccacaacctagtgcctcaaaggataacgggacacaacccattacccttgatggaaataatcctactcaaaaacctttaacgagtcaagaggatttattaaaaaatacagaattaaataacgaaaccacccaagaagttaaaaatttaagcctccttgaacaagctaacgccgaaaagttagcgaagttagaaagcgaagcgaaagttagcgaacaagaatttttaaaagctaaagagcaagaagcaaagcgcaaagttgcgttaaaaaagaaattagaacacgagcgaggcaatgcaggaaacattgaaagccagactaaaatagaagtaggagaagatatacccacgcagatccaagcgcagatccctaaaagtagagtaaggctaaatgaacgagagatttacgatctagattatgcgatcgtgaaagctaaagacttaaaaccaagctttaccacaggcgggacgcaaaaacgcacggacatgaacgaagagcagattaaaagcattgcggagaattttgatcctaaaaagatatttgggagcggaggttttgaggatttacccatcatcttacacgacgggcaagtgatcgcaggaaaccaccgcatagctggcatgctgaacttcacgcccaaaagccgttatatctataacaaagcgatcaaggaatactatcgcatagacttaaaacctgacgaattgttagtgagagtgccacaccaacgcctagacaacaccgagatcaacaatttagcggcttcaagcaatcaaggacgctttaacagtgaaagcgatcatgcgatagcggttttaagccattacgaagcgaaattgaaagaattagacaagaaattagacgctgatagcatctactcattaaaaaacatcgtcgctaaaaaccttaattttgataaggctactcatcctaatgtaggcgatagtaatttagccttgcttatgtataacatgccaaggactaagacgcaagggatagaattactcaaccgctggcagaaagaattttctaacgacattaaaagctatgaaaaagtaaaaaaaatgtttgtggataacgctggaagctttcataatctcatccatgacatgaactttcctaatgtgagtttaaacgcttatttgagcgatattatggatcgcagtttcgccaatttaaagaattacccaagcacgagcgagagcctgaaagatttgagcgagaaattctataaaacgagttcgttagacatgtttgaaaagagcgatcaaagcgcgagcgacattagcgagattttaggaggagcaatagcccgatttgcgaggtttgatgatccttctaaggcgttatttgaatcgttaaagagcgataacattaaaaaaggcttgaaagattacaagatcgcagatattaccaaagacatgtttaaccctgatagtaaggaatttaaggacattgacatttacgacttcacgcattaccttttaatggtcaatagagagccgaatgaaaacaatcccgtattaaaccgcttaatccaagccgttaagggcatgcaaaaagaaagcgagaaagggattaaagaagttagtaagcaagccgcagaagaaacagagaaagggataaaacgagattttagcgataccaatttaagcaacaatgaaatcaaagcgttattaaataacgcaaaaatccctacaagtgggagagatgcagttatttttggcaagaataacctaaaccctgaaattgtagaatttatacacaaaaaccacaaaagaatggctatagaaaaagcctctaacaaagaaatagaacttttacaagacgctaactttagacaccctgaagatgttagagcgagtttagatcatgaagctattacccacatactcaaaaggcatggcgttaattctgttaatgttagaaatggagaaagccctatcacttacgaggatatagctaattatagagatattgttaataacgctgatgaaatcattagagccataggaaaaggcaataaagaaaatataacagcgtttaaacaaatcaacggctatgcggtagtggtagaacaagcagttaatagaaatagtgagttagttttaaaaacaatgttcaagagtaacgggaattataagaataacaacgcttataagaagttttcaagcaccggactcaatgctaacgcaaaggttcagccatag

SEQ ID NO: 3200 - DNA (genomic), 3135 bp, Helicobacter pylori; double-stranded, circular
  misc_feature (B) LOCATION 1...3135
  hypothetical: NO
  anti-sense: NO
aacaccacagcacaccccacgcagtttttaaacaaactaaacgagtttaagagcgatgtttttacgacacccaaagctaaagaatacattgacatagcgagcggatttcataagctttttaagaacgacgctaagatcgccgaaagcctaaaacccgctatcacgaaaaacttaagccaaggtttagcaaccactttaagcggagcgttaaaataccaatggactaaattcacgctagggactttataccgcaacgcacccgatcgcgttttagggatcaaactacccaaagccctaaacgaagccaccgcaggcacagctttaaagtatcacctaaaaagagcgttagaaagaagccacactataagcgagtttagtaagaatttagaactaagtgtgaaaaacgctaaatttagcaacaacacgctcaaaatcattgaagagcttactaacggagtcaagcaagcgagtgaggaaatcaaagcaaaagccactaaatacgaaaaagccttacaagaattacaaaagattgatgaaagcaaactgactaaagaacagcaacaagttttgaaagtgtttaaaggcgagttagatcaaacagaaattaaaggcatagacttaaacgacctttacattttagatcaaggcacaaggcatgcgggagctaaaaagattttagttaaacattacggagtagagaacacaggcggactaactaacgatgaactgattaacatgagcgaagttatcaagaacggaagcgtgttattagagagttttgaaaggcttaaaaacggctttagatacggctatgaatgggataataacggcgtaaagcttaggctagtggtagatgatttaaacgatgggaataaggtttttgatttttatagcgataggaattttaaagattttagagatgccaggccacaacctagtgcctcaaaggataacgggacacaacccattacccttgatggaaataatcctactcaaaaacctttaacgagtcaagaggatttattaaaaaatacagaattaaataacgaaaccacccaagaagttaaaaatttaagcctccttgaacaagctaacgccgaaaagttagcgaagttagaaagcgaagcgaaagttagcgaacaagaatttttaaaagctaaagagcaagaagcaaagcgcaaagttgcgttaaaaaagaaattagaacacgagcgaggcaatgcaggaaacattgaaagccagactaaaatagaagtaggagaagatatacccacgcagatccaagcgcagatccctaaaagtagagtaaggctaaatgaacgagagatttacgatctagattatgcgatcgtgaaagctaaagacttaaaaccaagctttaccacaggcgggacgcaaaaacgcacggacatgaacgaagagcagattaaaagcattgcggagaattttgatcctaaaaagatatttgggagcggaggttttgaggatttacccatcatcttacacgacgggcaagtgatcgcaggaaaccaccgcatagctggcatgctgaacttcacgcccaaaagccgttatatctataacaaagcgatcaaggaatactatcgcatagacttaaaacctgacgaattgttagtgagagtgccacaccaacgcctagacaacaccgagatcaacaatttagcggcttcaagcaatcaaggacgctttaacagtgaaagcgatcatgcgatagcggttttaagccattacgaagcgaaattgaaagaattagacaagaaattagacgctgatagcatctactcattaaaaaacatcgtcgctaaaaaccttaattttgataaggctactcatcctaatgtaggcgatagtaatttagccttgcttatgtataacatgccaaggactaagacgcaagggatagaattactcaaccgctggcagaaagaattttctaacgacattaaaagctatgaaaaagtaaaaaaaatgtttgtggataacgctggaagctttcataatctcatccatgacatgaactttcctaatgtgagtttaaacgcttatttgagcgatattatggatcgcagtttcgccaatttaaagaattacccaagcacgagcgagagcctgaaagatttgagcgagaaattctataaaacgagttcgttagacatgtttgaaaagagcgatcaaagcgcgagcgacattagcgagattttaggaggagcaatagcccgatttgcgaggtttgatgatccttctaaggcgttatttgaatcgttaaagagcgataacattaaaaaaggcttgaaagattacaagatcgcagatattaccaaagacatgtttaaccctgatagtaaggaatttaaggacattgacatttacgacttcacgcattaccttttaatggtcaatagagagccgaatgaaaacaatcccgtattaaaccgcttaatccaagccgttaagggcatgcaaaaagaaagcgagaaagggattaaagaagttagtaagcaagccgcagaagaaacagagaaagggataaaacgagattttagcgataccaatttaagcaacaatgaaatcaaagcgttattaaataacgcaaaaatccctacaagtgggagagatgcagttatttttggcaagaataacctaaaccctgaaattgtagaatttatacacaaaaaccacaaaagaatggctatagaaaaagcctctaacaaagaaatagaacttttacaagacgctaactttagacaccctgaagatgttagagcgagtttagatcatgaagctattacccacatactcaaaaggcatggcgttaattctgttaatgttagaaatggagaaagccctatcacttacgaggatatagctaattatagagatattgttaataacgctgatgaaatcattagagccataggaaaaggcaataaagaaaatataacagcgtttaaacaaatcaacggctatgcggtagtggtagaacaagcagttaatagaaatagtgagttagttttaaaaacaatgttcaagagtaacgggaattataagaataacaacgcttataagaagttttcaagcaccggactcaatgctaacgcaaaggttcagccatag

SEQ ID NO: 3201 - DNA (genomic), 600 bp, Helicobacter pylori; double-stranded, circular
  misc_feature (B) LOCATION 1...600
  hypothetical: NO
  anti-sense: NO
atggaactaggtttcaatgaagcagaaagacaaaagatcttagacagcaacagctctcttataagaaatgcgaatgaagtaagggataagtttattcaaaattacgccatttctttaaaagatagcaacgatccgcaagattttttgagaagagttcaagagttaagaatcaatatgcaaaagaattttattagttttgatacttattacaactatttaaacaaccttgtgttagccagttacaatcgttgcaaacaagaaaagacttttgcagaaagcacgatcaaaaatgaactaacgcttggagagtttgttgcagaaatttctgacaacttcaataatttcatgtgtgatgaagtggcaagaatttcagacctagtggcttcttatctgccaagagagtatttaccgccattcatagatggcaatatgatgggcgtggcgtttcagattctagggatagatgattttgggagaaagctcaatgagattgtccaagatatagggactaaatatattattttgagcaaaaataagacttatctcacttctttagaaagggctaaattgataacccagttaaaattaaatttggaataa

SEQ ID NO: 3202 - DNA (genomic), 609 bp, Helicobacter pylori; double-stranded, circular
  misc_feature (B) LOCATION 1...609
  hypothetical: NO
  anti-sense: NO
aaggaaacagcaatggaactaggtttcaatgaagcagaaagacaaaagatcttagacagcaacagctctcttataagaaatgcgaatgaagtaagggataagtttattcaaaattacgccatttctttaaaagatagcaacgatccgcaagattttttgagaagagttcaagagttaagaatcaatatgcaaaagaattttattagttttgatacttattacaactatttaaacaaccttgtgttagccagttacaatcgttgcaaacaagaaaagacttttgcagaaagcacgatcaaaaatgaactaacgcttggagagtttgttgcagaaatttctgacaacttcaataatttcatgtgtgatgaagtggcaagaatttcagacctagtggcttcttatctgccaagagagtatttaccgccattcatagatggcaatatgatgggcgtggcgtttcagattctagggatagatgattttgggagaaagctcaatgagattgtccaagatatagggactaaatatattattttgagcaaaaataagacttatctcacttctttagaaagggctaaattgataacccagttaaaattaaatttggaa

SEQ ID NO: 3203 - DNA (genomic), 1332 bp, Helicobacter pylori; double-stranded, circular
  misc_feature (B) LOCATION 1...1332
  hypothetical: NO
  anti-sense: NO
atgtctaaattgaatatgaccccaagagaaattgtcgcttatttagatgaatacatcattgaacaaaaggaagctaaaaagtttatcgctatcgctttaaggaatcgttacaggcgtttgcaactggaaaaatccttacaagaagaaatcacgcctaaaaacattttaatgattggctctactggcgtgggtaaaactgaaatcgcaagaagaatggcaaaaatcatgaaactcccctttgtgaaagtggaagcgagcaaatacacagaagtgggttttgtggggcgcgatgtggagtctatggtaagggatttagtcaataacagcgtgcttttagtggaaaatgagcataaagaaagattaaaagacaagattgaagaggcggttgtagaaaaaatcgctaaaaaactcttacctcccttgcctagtggcgtgagcgaagagaaaaaacaagaatacgctaacagccttttaaaaatgcaacaaagaatcgcacaaggcgagttggatagtagagaaattgaaattgaagtgcgtaaaaaaagcatagagattgattctaatgtgccgcctgaaattttaagggttcaagaaaacttgattaaggttttccataaagaacaggataaagtcaaaaaaactttaagcgttaaagaggctaaagaagccctaaaagcagaaattagcgacacgcttttagatggcgaagccattaaaatggagggtttgaagcgcgcggaaagttcaggggtgatttttattgatgaaattgataagattgctgtcagctctaaagaaggaagccgtcaagatcccagtaaagagggggttcaaagggatttgttgccgattgtagaggggagtgtggtgaatacgaagtatggctctattaaaacagagcatattttattcattgcggcaggggcgtttcatctttctaaaccaagcgatttgatccctgaattgcagggacgtttccctttaagagtggagttagaaaatttaaccgaagaaatcatgtatatgattttaacccaaactaaaacctctatcatcaagcaataccaagcccttttaaaagtggagggcgtagaaattgcgtttgaagacgatgcgatcaaagagttagccaaactttcttataacgccaatcaaaaaagcgaagatataggcgctagaaggttgcacaccaccattgaaaaagtgctagaagacattagttttgaagcggaggattattctgggcaaagcgttactatcactaaagaattggttcaatccaagctaggggatttagtggctgatgaaaatttagtgaagtatattttataa

SEQ ID NO: 3204 - DNA (genomic), 1344 bp, Helicobacter pylori; double-stranded, circular
  misc_feature (B) LOCATION 1...1344
  hypothetical: NO
  anti-sense: NO
aattttggagctttaatgtctaaattgaatatgaccccaagagaaattgtcgcttatttagatgaatacatcattgaacaaaaggaagctaaaaagtttatcgctatcgctttaaggaatcgttacaggcgtttgcaactggaaaaatccttacaagaagaaatcacgcctaaaaacattttaatgattggctctactggcgtgggtaaaactgaaatcgcaagaagaatggcaaaaatcatgaaactcccctttgtgaaagtggaagcgagcaaatacacagaagtgggttttgtggggcgcgatgtggagtctatggtaagggatttagtcaataacagcgtgcttttagtggaaaatgagcataaagaaagattaaaagacaagattgaagaggcggttgtagaaaaaatcgctaaaaaactcttacctcccttgcctagtggcgtgagcgaagagaaaaaacaagaatacgctaacagccttttaaaaatgcaacaaagaatcgcacaaggcgagttggatagtagagaaattgaaattgaagtgcgtaaaaaaagcatagagattgattctaatgtgccgcctgaaattttaagggttcaagaaaacttgattaaggttttccataaagaacaggataaagtcaaaaaaactttaagcgttaaagaggctaaagaagccctaaaagcagaaattagcgacacgcttttagatggcgaagccattaaaatggagggtttgaagcgcgcggaaagttcaggggtgatttttattgatgaaattgataagattgctgtcagctctaaagaaggaagccgtcaagatcccagtaaagagggggttcaaagggatttgttgccgattgtagaggggagtgtggtgaatacgaagtatggctctattaaaacagagcatattttattcattgcggcaggggcgtttcatctttctaaaccaagcgatttgatccctgaattgcagggacgtttccctttaagagtggagttagaaaatttaaccgaagaaatcatgtatatgattttaacccaaactaaaacctctatcatcaagcaataccaagcccttttaaaagtggagggcgtagaaattgcgtttgaagacgatgcgatcaaagagttagccaaactttcttataacgccaatcaaaaaagcgaagatataggcgctagaaggttgcacaccaccattgaaaaagtgctagaagacattagttttgaagcggaggattattctgggcaaagcgttactatcactaaagaattggttcaatccaagctaggggatttagtggctgatgaaaatttagtgaagtatatttta

SEQ ID NO: 3205 - DNA (genomic), 138 bp, Helicobacter pylori; double-stranded, circular
  misc_feature (B) LOCATION 1...138
  hypothetical: NO
  anti-sense: NO
ttggaggcacaggcatatagcctccttgctttcccggtctatgcccaaaattcacgccgttttcaaagcttttatccctattccattcgccctcttcgctatccacttcgtagtattgggaattggaagcgtctttaa

SEQ ID NO: 3206 - DNA (genomic), 144 bp, Helicobacter pylori; double-stranded, circular
  misc_feature (B) LOCATION 1...144
  hypothetical: NO
  anti-sense: NO
gtgtggggcatttgtttgatgcctttttctctgatttcgtccaaagttagcttgaaaaggttaatgtccatcgcttcgccgggatccattttatttttaatgccatcaatgcccgccattaaaatagccccaaaagccaggtag

SEQ ID NO: 3207 - DNA (genomic), 993 bp, Helicobacter pylori; double-stranded, circular
  misc_feature (B) LOCATION 1...993
  hypothetical: NO
  anti-sense: NO
atgactgaagacagattgagtgcagaagataaaaaatttctagaagtagaaagagccttaaaagaagcggcattaaatcctctaaggcatgctactgaagaactttttggtgattttttaaaaatggaaaatatcactgagatttgttacaatggggacaaggttgtatgggttttaaaaaataatggcgaatggcaaccgtttgatgtgagaaacaagaaagcctttagcttatctcgtttaatgcatttcgctcggtgttgtgcaagttttaagaaaaaaacaatagacaactatgaaaatcctattttgagtagcaatttagcgaatggtgaaagggtgcagattgtcctttctcctgttacagttaatgatgaaaccatttccatatccataaggatacctagcaaaacaacctaccctcatagcttttttgaagaacaaggtttttataatctactagacaacaaagaacaagcgatcagcgcgattaaagatggtattgctattggtaagaatgtgattgtttgtggtggcacaggaagcggtaaaacgacttatatcaaaagcatcatggagtttatccctaaagaagaaaggatcatatccattgaagacaccgaagagattgtattcaaacaccacaaaaactacacacagcttttttttggtgggaatatcacctctgctgattgcttaaagtcatgtctgagaatgcggcctgatagaatcattttaggggagctcagaagcagtgaggcatacgatttttataatgtgctttgtagcggtcataaaggcacactaaccactctgcatgcagggagcagtgaagaagcgtttatccgtttggccaacatgagttcatctaatagcgcagcaaggaatatcaagtttgaaagtcttattgagggctttaaagatttgattgatatgattgtccatatcaaccaccacaaacagtgtgatgaattttatatcaaacataggtag

SEQ ID NO: 3208 - DNA (genomic), 1005 bp, Helicobacter pylori; double-stranded, circular
  misc_feature (B) LOCATION 1...1005
  hypothetical: NO
  anti-sense: NO
atttggaataagaacatgactgaagacagattgagtgcagaagataaaaaatttctagaagtagaaagagccttaaaagaagcggcattaaatcctctaaggcatgctactgaagaactttttggtgattttttaaaaatggaaaatatcactgagatttgttacaatggggacaaggttgtatgggttttaaaaaataatggcgaatggcaaccgtttgatgtgagaaacaagaaagcctttagcttatctcgtttaatgcatttcgctcggtgttgtgcaagttttaagaaaaaaacaatagacaactatgaaaatcctattttgagtagcaatttagcgaatggtgaaagggtgcagattgtcctttctcctgttacagttaatgatgaaaccatttccatatccataaggatacctagcaaaacaacctaccctcatagcttttttgaagaacaaggtttttataatctactagacaacaaagaacaagcgatcagcgcgattaaagatggtattgctattggtaagaatgtgattgtttgtggtggcacaggaagcggtaaaacgacttatatcaaaagcatcatggagtttatccctaaagaagaaaggatcatatccattgaagacaccgaagagattgtattcaaacaccacaaaaactacacacagcttttttttggtgggaatatcacctctgctgattgcttaaagtcatgtctgagaatgcggcctgatagaatcattttaggggagctcagaagcagtgaggcatacgatttttataatgtgctttgtagcggtcataaaggcacactaaccactctgcatgcagggagcagtgaagaagcgtttatccgtttggccaacatgagttcatctaatagcgcagcaaggaatatcaagtttgaaagtcttattgagggctttaaagatttgattgatatgattgtccatatcaaccaccacaaacagtgtgatgaattttatatcaaacatagg

SEQ ID NO: 3209 - DNA (genomic), 600 bp, Helicobacter pylori; double-stranded, circular
  misc_feature (B) LOCATION 1...600
  hypothetical: NO
  anti-sense: NO
atgagtaataacatgcgaaaactcttctcaatgattgccaactcaaaagataagaaagaaaaacttattgagagcttgcaggagaacgaacttttaaacactgatgaaaaaaagaaaatcatagatcaaataaaaaccatgcatgattttttcaagcagatgcatacaaacaagggagcgttagataaggttctaagaaattacatgaaagattatcgtgctgttatcaaaagcattggtgttgataagtttaaaaaggtttatcgattgcttgagagtgagactatggagctgttgcatgcgattgcagagaatcctaatttcttattctctaaatttgatcgatcaattcttggaatatttctgcctttcttcagtaagcccatcatgttcaagatgagtattagagaaatggactcgcaaatagaattgtatggcactaagctcccaccattgaaattgtttgtgatgacagatgaagaagttaatttctatgctaacctaaaaaccattgaacaatataacgactatgttagggatttgttgatgaaatttgatcttgaaaaatacatggaagaaaaaggagtgcaaaatgcttga

SEQ ID NO: 3210 - DNA (genomic), 633 bp, Helicobacter pylori; double-stranded, circular
  misc_feature (B) LOCATION 1...633
  hypothetical: NO
  anti-sense: NO
agagaaaccaaatccattgaaaggatcaagaacgatatgagtaataacatgcgaaaactcttctcaatgattgccaactcaaaagataagaaagaaaaacttattgagagcttgcaggagaacgaacttttaaacactgatgaaaaaaagaaaatcatagatcaaataaaaaccatgcatgattttttcaaacagatgcatacaaacaagggagcgttagataaggttctaagaaattacatgaaagattatcgtgctgttatcaaaagcattggtgttgataagtttaaaaaggtttatcgattgcttgagagtgagactatggagctgttgcatgcgattgcagagaatcctaatttcttattctctaaatttgatcgatcaattcttggaatatttctgcctttcttcagtaagcccatcatgttcaagatgagtattagagaaatggactcgcaaatagaattgtatggcactaagctcccaccattgaaattgtttgtgatgacagatgaagaagttaatttctatgctaacctaaaaaccattgaacaatataacgactatgttagggatttgttgatgaaatttgatcttgaaaaatacatggaagaaaaaggagtgcaaaatgct

SEQ ID NO: 3211 - DNA (genomic), 261 bp, Helicobacter pylori; double-stranded, circular
  misc_feature (B) LOCATION 1...261
  hypothetical: NO
  anti-sense: NO
gtgccgtctgatttagaaaaacccaccattatttacccttgcgtttgggattatagggtgattatgaccactaacgatacaagcgtgttaaaagagcttttagaaacctaccaacgcccctttaaattggaattaaaaaacacttctaaaaacgctaaattttatagctttaatgtttctatggaagtttcaaacgaagcggaacggaacgaaatttttcaaaaaatctcacaattagaagtcgtggcgcatgcgctttaa

SEQ ID NO: 3212 - DNA (genomic), 357 bp, Helicobacter pylori; double-stranded, circular
  misc_feature (B) LOCATION 1...357
  hypothetical: NO
  anti-sense: NO
agcctttcaaagtctttgcttcagaaatcaagtttggctttgtcaaccgctctacatacagccctattgccattcctaaattgtttaaggagcttcttagtgccgtctgatttagaaaaacccaccattatttacccttgcgtttgggattatagggtgattatgaccactaacgatacaagcgtgttaaaagagcttttagaaacctaccaacgcccctttaaattggaattaaaaaacacttctaaaaacgctaaattttatagctttaatgtttctatggaagtttcaaacgaagcggaacggaacgaaatttttcaaaaaatctcacaattagaagtcgtggcgcatgcgctt

SEQ ID NO: 3213 - DNA (genomic), 348 bp, Helicobacter pylori; double-stranded, circular
  misc_feature (B) LOCATION 1...348
  hypothetical: NO
  anti-sense: NO
atggctgacacaatcaatacaactgaaacaacccatgaaacaaagaagccaaacgcttttgtaaattttttcaaaaacaatttgactgataagcgttatgattcattaggtctcattggagcgggggttttatgttgtgtcttgagcggtgctatggggattgttgggataatctttgtcgcaataggaatctttttgtctttttctaatatcaacttagtgaaattggttgaaaaattgtccaaaaaacaacctaaagcggccacaactgtcaataacgaaacccaaaaatctcaagcagcaagcgttaccaacgaaccaactgaagctaaagagactaaagattga

SEQ ID NO: 3214 - DNA (genomic), 378 bp, Helicobacter pylori; double-stranded, circular
  misc_feature (B) LOCATION 1...378
  hypothetical: NO
  anti-sense: NO
caaattgagaatataccttatggaggtaacactatggctgacacaatcaatacaactgaaacaacccatgaaacaaagaagccaaacgcttttgtaaattttttcaaaaacaatttgactgataagcgttatgattcattaggtctcattggagcgggggttttatgttgtgtcttgagcggtgctatggggattgttgggataatctttgtcgcaataggaatctttttgtctttttctaatatcaacttagtgaaattggttgaaaaattgtccaaaaaacaacctaaagcggccacaactgtcaataacgaaacccaaaaatctcaagcagcaagcgttaccaacgaaccaactgaagctaaagagactaaagat

SEQ ID NO: 3215 - DNA (genomic), 543 bp, Helicobacter pylori; double-stranded, circular
  misc_feature (B) LOCATION 1...543
  hypothetical: NO
  anti-sense: NO
atgtttgaagcgacgacgattttgggctatagaggggaatttgataacaaaaagtttgcgctcattggaggcgatgggcaggtaactttgggtaattgcgtagtcaaagccaatgcgataaaaatcaggagcttgtatcacaaccaggttttaagcgggtttgccggaagcactgcggacgcttttagtttgtttgatatgtttgaacgcattttagagagcaaaaaaggggatttgtttaaaagcgtggtggatttcagcaaagaatggcgcaaggataagtatttacgccgattggaagcgatgatgatcgttttaaacttcgatcatgtttttattttgagcggcacgggcgatgttttagaagctgaagacaataagatcgccgctattgggagtggggggaattttgctttgagtgcggctagggctttggatcatttcgctcatttagagccaagaaaactcgtagaagagtccttaaaaatcgcaggggatctttgcatttacaccaacacgaatattaaaattttggagctttaa

SEQ ID NO: 3216 - DNA (genomic), 543 bp, Helicobacter pylori; double-stranded, circular
  misc_feature (B) LOCATION 1...543
  hypothetical: NO
  anti-sense: NO
aaaatgtttgaagcgacgacgattttgggctatagaggggaatttgataacaaaaagtttgcgctcattggaggcgatgggcaggtaactttgggtaattgcgtagtcaaagccaatgcgataaaaatcaggagcttgtatcacaaccaggttttaagcgggtttgccggaagcactgcggacgcttttagtttgtttgatatgtttgaacgcattttagagagcaaaaaaggggatttgtttaaaagcgtggtggatttcagcaaagaatggcgcaaggataagtatttacgccgattggaagcgatgatgatcgttttaaacttcgatcatgtttttattttgagcggcacgggcgatgttttagaagctgaagacaataagatcgccgctattgggagtggggggaattttgctttgagtgcggctagggctttggatcatttcgctcatttagagccaagaaaactcgtagaagagtccttaaaaatcgcaggggatctttgcatttacaccaacacgaatattaaaattttggagctt

SEQ ID NO: 3217 - DNA (genomic), 555 bp, Helicobacter pylori; double-stranded, circular
  misc_feature (B) LOCATION 1...555
  hypothetical: NO
  anti-sense: NO
ttggaatgcttttttaaaaactccatagagcgagtgttttcaaagatagcggacactcatattattgataagctgaataatcaaggcagaagagttgaagaagtttgtttttcgtgggtgcgcgggtttttggtagcggagttttttaaggattttatcgcttgtctttttggcgcgcaaaaagaaaccatcaaattttttggtggtgataattttgagagcatagaaagttttaaaagaagtcctaaagccgattttttgttagacgatcatttattgctagaagttcaaagcggatttcaagggatcaatgacattaaagaacataaagttttagaagctcaaaggcgtttgataacggataaaattcccactattgtggtgcattttgatctgtttaacgggcaagtggcatgcgtagaaatttctaaaatcaaagaaaatgatttgaattggataacccgccaacaaatggaagggcagagcgtttttaatatttcgcaaaacttttttgatcacaaaattacagaaatgcctaataagccgcttttataa

SEQ ID NO: 3218 - DNA (genomic), 615 bp, Helicobacter pylori; double-stranded, circular
  misc_feature (B) LOCATION 1...615
  hypothetical: NO
  anti-sense: NO
aggctgattgaaatttttagcgctatcaatagtatttattgttttaaatataacgggtatgaattggaatgcttttttaaaaactccatagagcgagtgttttcaaagatagcggacactcatattattgataagctgaataatcaaggcagaagagttgaagaagtttgtttttcgtgggtgcgcgggtttttggtagcggagttttttaaggattttatcgcttgtctttttggcgcgcaaaaagaaaccatcaaattttttggtggtgataattttgagagcatagaaagttttaaaagaagtcctaaagccgattttttgttagacgatcatttattgctagaagttcaaagcggatttcaagggatcaatgacattaaagaacataaagttttagaagctcaaaggcgtttgataacggataaaattcccactattgtggtgcattttgatctgtttaacgggcaagtggcatgcgtagaaatttctaaaatcaaagaaaatgatttgaattggataacccgccaacaaatggaagggcagagcgtttttaatatttcgcaaaacttttttgatcacaaaattacagaaatgcctaataagccgctttta

SEQ ID NO: 3219 - DNA (genomic), 5460 bp, Helicobacter pylori; double-stranded, circular
  misc_feature (B) LOCATION 1...5460
  hypothetical: NO
  anti-sense: NO
atgaatgaagaaaacgataaacttgaaacttctaaaaaagcccaacaagattcaccccaagatctatctaatgaagaagcaacagaagccaatcattttgaagatcttttaaaagaatccacagaaagctcagacaatcatcttgacaaccccacagaaactaaaacccattttgatgaagacaagctagaagaaacccaaactcaaatggattctggaggtaatgaaacttcagaatctagcaatggcagtctagcagacaagttattcaagaaagccagaaaattagttgatgataaaagacctttcactcagcaaaagagtttagatgaagaaacccaaaaactgaacgaagaagacgatcaagaaaataatgagcatcaagaagaaactcaaacggacttgattgatgatgaaacttctgaaaaaacccaacaagattcaccccaagatctatctaatgaagaagcaacagaagccaatcattttgaagatcttttaaaagaatccacagaaagttcagataatcatcttgacaaccccacagaaagctcagacaatcatcttgacaaccccacagaaactaaaacccaagaaactaaaacccattttgatgaagacaagccagaagaaataactgacgactctaacgatcaagagattatcaaaggaagcaaaaagaaatacattattggcggcattgtagtcgctgttcttatcgtgattattttattttctagaagcatttttcactactttgtacctttggaagataaaagctctcgttttagcaaagacaggaatctttatgtcaatgatgaaatccaaataaggcaagagtataaccgattgctgaaagaacggaatgaaaaaggcaatatgatcgataagaatcttttcttcaatgacgatcccaatagaaccttatacaactatttgaatattgcagaaattgaggacaaaaacccattgagagccttttatgaatgtattagtaatggtggcaactatgaagaatgtttgaagcttatcaaagacaaaaaacttcaagatcagatgaaaaagactctagaggcttataatgactgcatcaaaaatgccaaaactgaagaagaaaggatcaagtgtttagatttaatcaaagatgaaaacctgaaaaaaagcttactgaaccaacaaaaagttcaagtggctctagattgtttgaaaaacgctaaaaccgatgaagaacggaaagagtgcctaaaactcataaatgaccctgagattagagagaaattccgtaaggaattagagcttcaaaaagagcttcaagagtataaggattgtatcaaaaacgccaaaacagaagctgagaaaaacgaatgcttgaaaggcttgtctaaagaagccatagaaagattgaaacaacaagcgctagattgtttgaaaaacgctaaaaccgatgaagaacggaaagagtgcttaaaaaatattccccaagacttgcaaaaagaactactagctgatatgagcgttaaggcttacaaagactgcgtatcaagagctaggaatgaaaaagagaaacaagaatgcgagaaattactcacgcctgaagcgaaaaaactattagagaatcaagcgctagattgtttgaaaaacgctaaaaccgatgaagaacggaaagagtgcttgaaaaatctccctaaagacttacaaagcgatattttagctaaagagagcctgaaagcttataaagactgcgcatctcaagccaaaactgaagctgaaaaaaaagaatgcgagaaattactcacgcctgaagcgaaaaaacttttagaagaagaagccaaagagagcgttaaggcttatttggattgcgtatctcaggccaaaactgaagctgaaaaaaaagaatgcgagaaattgctcacacctgaagcgaaaaaaaagttagaagaagccaaaaagagcgttagagcttatttggattgcgtatcaaaagccaaaaacgaagctgaaagaaaagaatgcgagaaattactcacgcctgaagcgaaaaaactattagagaatcaagcgctagattgtttgaaaaacgctaaaaccgatgaagaacggaaagagtgcttgaaagatctccctaaagacttacagaaaaaggttttagccaaagagagtgttagggtttatttggattgcgtatcaaaagccaaaaacgaagctgaaagaaaagaatgcgagaaattgctcacccctgaagcgagaaagctattagaagaagctaagaagagcgttaaggcttacaaagactgcgttttaagagctaggaatgaaaaagagaaacaagaatgcgagaaattactcacgcctgaagcgaggaaactattagaagaatctaaaaaaagcgttaaggcttatttggattgcgtatcaaaagccaaaaacgaagctgaaagaaaagaatgcgagaaattgctcacccctgaagcgagaaagctattagaagaagctaaagagagtgttaaggcttacaaagactgcgtatcaagagctaggaatgaaaaagagaaacaagaatgcgagaaattactcacgcctgaagcgaggaaactattagaagaatctaaaaaaagcgttaaggcttatttggattgcgtatcaaaagccaaaaacgaagctgaaagaaaagaatgcgagaaattgctcacccctgaagcgagaaagctattagaagaagctaaagagagtgttaaggcttacaaagactgcgtatcaagagctaggaatgaaaaagagaaacaagaatgcgagaaattactcacgcctgaagcgaaaaaactattagagaatcaagcgctagattgtttgaaaaacgctaaaaccgaagctgagaaaaaaaggtgtgtcaaagatctccctaaagacttacagaaaaaggttttagccaaagagagtgttagggtttatttggattgcgtatcaaaagccaaaaacgaagctgaaagaaaagaatgcgagaaattgctcacccctgaagcgagaaagctattagaagaagctaaagagagtgttaaggcttacaaagactgcgtatcaagagctaggaatgaaaaagagaaacaagaatgcgagaaattactcacccctgaagctaggaaactattagagcaagaagttaaaaagagcgttaaggcttatttagactgcgtttcaagagctaggaatgaaaaagagaaacaagaatgcgagaaattactcacgcctgaagcgaggaaacttttagagaatcaagcgctagattgtttgaaaaacgctaaaaccgaagctgagaaaaaaaggtgtgtcaaagatctccctaaagacttgcagaaaaaggttttagctaaagagagcgttaaggcttatttagactgcgtatcaagagctaggaatgaaaaagagaaaaaagaatgcgagaagttgctcacgcctgaagcgagaaaactattagaagaatctaaaaaaagcgttaaggcttatttggattgcgtatcaaaagccaaaaacgaagctgaaaaaaaagaatgcgagaaattgctcacacctgaagcgagaaagctattagaagaagctaaagagagtgttaaggcttacaaagactgcgtatcaagagctaggaatgaaaaagagaaacaagaatgcgagaaactactcacccctgaagcgaggaaactattagagcaagaagttaaaaagagcgttaaggcttatttagactgtgtatcaagagctaggaatgaaaaagagaaacaagaatgcgagaaattactcacccctgaagcgaggaaatttttagagaaacagcgccaacaaaaagataaagcgataaaggattgcttgaaaaacgccgatcctaacgacagagcggctatcatgaagtgtttggatggtttgagcgatgaagagaagctcaaatacctgcaagaagccagagaaaaggctgtcttggattgtttgaaaacggctaggaccgatgaagaaaaaaggaaatgccaaaacctttatagcgatttgatccaagaaatccaaaataaaaaggcacagaacaaacaaaatcaattgagtaaaacagaaaggttgcatcaagcaagcgagtgcttggataacttagatgaccctactgatcaagaagccatagagcaatgtttagagggattgagcgatagcgaaagggcgctaattctaggaatcaaacgacaagctgatgaagtggatcggatttatagcgatctaagaagccgcaaaacctttgataacatggcggctaaaggttatccattgttaccaatggattttaaaaatggtggcgatattgctactattaacgccactaatgttgatgcggacaaaatagctagcgataatcctatttatgcttccatagagcctgatattactaagcaatacgaaacagagaaaaccattaaggataagagtttagaagctaaattagctaaggctttaggtggcgataagaaagatgacgataaagaaaaaggtaaaaaacccacagcagaaactaaagcagaaagcaataagatagacaaagatgtcgcagaaactgccaaaaatatcagcgaaatcgctcttaagaacaaaaaagaaaagagtggggattttgtagatgaaaatggtaatcccattgatgataaaaagaaagaagaaaaacaagatgaaacaagccctgtcaaacaggcctttataggcaagagtgatcccacatttgttttagcacaatacactcccattgaaatcactctgacttctaaagtagatgccactctcacgggtatagtgagtggggttgtagccaaagatgtatggaacatgaacggcactatgatcttattagacaaaggcactaaggtgtatgggaattatcaaagcgtgaaaggtggcacgcctattatgactcgtttaatgatagtctttactaaagctattacgcctgatggggtgattatacctctagcaaacgctcaagcagcaggcatgctgggtgaagcaggggtagatggctatgtgaataatcacttcatgaagcgcataggctttgctgtgatagcaagcgtggttaatagcttcttgcaaactgcgcctatcatagccctagataaactcataggtcttggcaaaggcagaagtgaaaggacacctgaatttaattacgctttgggtcaagctatcaatggcagtatgcaaagttcagctcagatgtctaatcaaattctagggcaactgatgaatatccccccaagtttttacaaaaatgagggcgatagcattaagattctcaccatggacgatattgattttagtggcgtgtatgatgttaaaattaccaacaaatctgtggtagatgaaattatcaaacaaagcaccaaaactttgtctagagaacatgaagaaatcaccacaagccccaaaggtggcaattga

SEQ ID NO: 3220 - DNA (genomic), 5460 bp, Helicobacter pylori; double-stranded, circular
  misc_feature (B) LOCATION 1...5460
  hypothetical: NO
  anti-sense: NO
gacatgaatgaagaaaacgataaacttgaaacttctaaaaaagcccaacaagattcaccccaagatctatctaatgaagaagcaacagaagccaatcattttgaagatcttttaaaagaatccacagaaagctcagacaatcatcttgacaaccccacagaaactaaaacccattttgatgaagacaagctagaagaaacccaaactcaaatggattctggaggtaatgaaacttcagaatctagcaatggcagtctagcagacaagttattcaagaaagccagaaaattagttgatgataaaagacctttcactcagcaaaagagtttagatgaagaaacccaaaaactgaacgaagaagacgatcaagaaaataatgagcatcaagaagaaactcaaacggacttgattgatgatgaaacttctgaaaaaacccaacaagattcaccccaagatctatctaatgaagaagcaacagaagccaatcattttgaagatcttttaaaagaatccacagaaagttcagataatcatcttgacaaccccacagaaagctcagacaatcatcttgacaaccccacagaaactaaaacccaagaaactaaaacccattttgatgaagacaagccagaagaaataactgacgactctaacgatcaagagattatcaaaggaagcaaaaagaaatacattattggcggcattgtagtcgctgttcttatcgtgattattttattttctagaagcatttttcactactttgtacctttggaagataaaagctctcgttttagcaaagacaggaatctttatgtcaatgatgaaatccaaataaggcaagagtataaccgattgctgaaagaacggaatgaaaaaggcaatatgatcgataagaatcttttcttcaatgacgatcccaatagaaccttatacaactatttgaatattgcagaaattgaggacaaaaacccattgagagccttttatgaatgtattagtaatggtggcaactatgaagaatgtttgaagcttatcaaagacaaaaaacttcaagatcagatgaaaaagactctagaggcttataatgactgcatcaaaaatgccaaaactgaagaagaaaggatcaagtgtttagatttaatcaaagatgaaaacctgaaaaaaagcttactgaaccaacaaaaagttcaagtggctctagattgtttgaaaaacgctaaaaccgatgaagaacggaaagagtgcctaaaactcataaatgaccctgagattagagagaaattccgtaaggaattagagcttcaaaaagagcttcaagagtataaggattgtatcaaaaacgccaaaacagaagctgagaaaaacgaatgcttgaaaggcttgtctaaagaagccatagaaagattgaaacaacaagcgctagattgtttgaaaaacgctaaaaccgatgaagaacggaaagagtgcttaaaaaatattccccaagacttgcaaaaagaactactagctgatatgagcgttaaggcttacaaagactgcgtatcaagagctaggaatgaaaaagagaaacaagaatgcgagaaattactcacgcctgaagcgaaaaaactattagagaatcaagcgctagattgtttgaaaaacgctaaaaccgatgaagaacggaaagagtgcttgaaaaatctccctaaagacttacaaagcgatattttagctaaagagagcctgaaagcttataaagactgcgcatctcaagccaaaactgaagctgaaaaaaaagaatgcgagaaattactcacgcctgaagcgaaaaaacttttagaagaagaagccaaagagagcgttaaggcttatttggattgcgtatctcaggccaaaactgaagctgaaaaaaaagaatgcgagaaattgctcacacctgaagcgaaaaaaaagttagaagaagccaaaaagagcgttagagcttatttggattgcgtatcaaaagccaaaaacgaagctgaaagaaaagaatgcgagaaattactcacgcctgaagcgaaaaaactattagagaatcaagcgctagattgtttgaaaaacgctaaaaccgatgaagaacggaaagagtgcttgaaagatctccctaaagacttacagaaaaaggttttagccaaagagagtgttagggtttatttggattgcgtatcaaaagccaaaaacgaagctgaaagaaaagaatgcgagaaattgctcacccctgaagcgagaaagctattagaagaagctaagaagagcgttaaggcttacaaagactgcgtttcaagagctaggaatgaaaaagagaaacaagaatgcgagaaattactcacgcctgaagcgaggaaactattagaagaatctaaaaaaagcgttaaggcttatttggattgcgtatcaaaagccaaaaacgaagctgaaagaaaagaatgcgagaaattgctcacccctgaagcgagaaagctattagaagaagctaaagagagtgttaaggcttacaaagactgcgtatcaagagctaggaatgaaaaagagaaacaagaatgcgagaaattactcacgcctgaagcgaggaaactattagaagaatctaaaaaaagcgttaaggcttatttggattgcgtatcaaaagccaaaaacgaagctgaaagaaaagaatgcgagaaattgctcacccctgaagcgagaaagctattagaagaagctaaagagagtgttaaggcttacaaagactgcgtatcaagagctaggaatgaaaaagagaaacaagaatgcgagaaattactcacgcctgaagcgaaaaaactattagagaatcaagcgctagattgtttgaaaaacgctaaaaccgaagctgagaaaaaaaggtgtgtcaaagatctccctaaagacttacagaaaaaggttttagccaaagagagtgttagggtttatttggattgcgtatcaaaagccaaaaacgaagctgaaagaaaagaatgcgagaaattgctcacccctgaagcgagaaagctattagaagaagctaaagagagtgttaaggcttacaaagactgcgtatcaagagctaggaatgaaaaagagaaacaagaatgcgagaaattactcacgcctgaagctaggaaactattagagcaagaagttaaaaagagcgttaaggcttatttagactgcgtttcaagagctaggaatgaaaaagagaaacaagaatgcgagaaattactcacgcctgaagcgaggaaacttttagagaatcaagcgctagattgtttgaaaaacgctaaaaccgaagctgagaaaaaaaggtgtgtcaaagatctccctaaagacttgcagaaaaaggttttagctaaagagagcgttaaggcttatttagactgcgtatcaagagctaggaatgaaaaagagaaaaaagaatgcgagaagttgctcacgcctgaagcgagaaaactattagaagaatctaaaaaaagcgttaaggcttatttggattgcgtatcaaaagccaaaaacgaagctgaaaaaaaagaatgcgagaaattgctcacacctgaagcgagaaagctattagaagaagctaaagagagtgttaaggcttacaaagactgcgtatcaagagctaggaatgaaaaagagaaacaagaatgcgagaaactactcacccctgaagcgaggaaactattagagcaagaagttaaaaagagcgttaaggcttatttagactgtgtatcaagagctaggaatgaaaaagagaaacaagaatgcgagaaattactcacccctgaagcgaggaaatttttagagaaacagcgccaacaaaaagataaagcgataaaggattgcttgaaaaacgccgatcctaacgacagagcggctatcatgaagtgtttggatggtttgagcgatgaagagaagctcaaatacctgcaagaagccagagaaaaggctgtcttggattgtttgaaaacggctaggaccgatgaagaaaaaaggaaatgccaaaacctttatagcgatttgatccaagaaatccaaaataaaaaggcacagaacaaacaaaatcaattgagtaaaacagaaaggttgcatcaagcaagcgagtgcttggataacttagatgaccctactgatcaagaagccatagagcaatgtttagagggattgagcgatagcgaaagggcgctaattctaggaatcaaacgacaagctgatgaagtggatcggatttatagcgatctaagaagccgcaaaacctttgataacatggcggctaaaggttatccattgttaccaatggattttaaaaatggtggcgatattgctactattaacgccactaatgttgatgcggacaaaatagctagcgataatcctatttatgcttccatagagcctgatattactaagcaatacgaaacagagaaaaccattaaggataagagtttagaagctaaattagctaaggctttaggtggcgataagaaagatgacgataaagaaaaaggtaaaaaacccacagcagaaactaaagcagaaagcaataagatagacaaagatgtcgcagaaactgccaaaaatatcagcgaaatcgctcttaagaacaaaaaagaaaagagtggggattttgtagatgaaaatggtaatcccattgatgataaaaagaaagaagaaaaacaagatgaaacaagccctgtcaaacaggcctttataggcaagagtgatcccacatttgttttagcacaatacactcccattgaaatcactctgacttctaaagtagatgccactctcacgggtatagtgagtggggttgtagccaaagatgtatggaacatgaacggcactatgatcttattagacaaaggcactaaggtgtatgggaattatcaaagcgtgaaaggtggcacgcctattatgactcgtttaatgatagtctttactaaagctattacgcctgatggggtgattatacctctagcaaacgctcaagcagcaggcatgctgggtgaagcaggggtagatggctatgtgaataatcacttcatgaagcgcataggctttgctgtgatagcaagcgtggttaatagcttcttgcaaactgcgcctatcatagccctagataaactcataggtcttggcaaaggcagaagtgaaaggacacctgaatttaattacgctttgggtcaagctatcaatggcagtatgcaaagttcagctcagatgtctaatcaaattctagggcaactgatgaatatccccccaagtttttacaaaaatgagggcgatagcattaagattctcaccatggacgatattgattttagtggcgtgtatgatgttaaaattaccaacaaatctgtggtagatgaaattatcaaacaaagcaccaaaactttgtctagagaacatgaagaaatcaccacaagccccaaaggtggcaat

SEQ ID NO: 3221 - DNA (genomic), 906 bp, Helicobacter pylori; double-stranded, circular
  misc_feature (B) LOCATION 1...906
  hypothetical: NO
  anti-sense: NO
atgaaaactaaggcaggctttgtagctcttataggcaaaccaaacgctggaaaaagcactcttttaaacactttattaaacgctcatttagcccttgtttcgcataaggctaatgcgactagaaaattgatgaaatgcatcgtgccttttaaagacaaagaagggtatgagagccaaatcatttttttagacactccagggctccatcatcaagaaaaattactcaaccagtgcatgctctcacaggctttaaaagcgatgggcgatgctgaattgcgcgtttttttggcttctgtgcatgatgatttgaaagggtatgaagagtttttgagtttgtgccaaaaaccccatatcttggctttgagtaagattgacacagccacgcataagcaggttttacaaaaattacaagagtatcaaaaatattcatcgcaatttttagctctagtgcctttgagtgcgaaaaaatctcaaaatttaaacgcgcttttagaatgcatcagtaagcatttaagccctagcgcatggctttttgaaaaggatttgatgagcgatgaaaaaatgcgcgatatttataaggaaatcattagggagagtttgtttgattttttgagcgatgaaatcccttatgaaagcgatgtgatgattgataaatttatagaagaagaacgcatagacaaggtgtatgcgcgcattatcgtagaaaaagaaagccaaaaaaaaatcgtgataggtaaaaacggggtgaatatcaaacgcatcgggactaacgcgcgattgaaaatgcaagaagtgggcgaaaaaaaggtttttttaaacttgcaagtgatcgctcaaaaatcatggagtaaggaagaaaaaagcttgcaaaaactaggctatatctatcaaaggaatagggattga

SEQ ID NO: 3222 - DNA (genomic), 927 bp, Helicobacter pylori; double-stranded, circular
  misc_feature (B) LOCATION 1...927
  hypothetical: NO
  anti-sense: NO
aaatttagtgaagtatattttataatgaaaactaaggcaggctttgtagctcttataggcaaaccaaacgctggaaaaagcactcttttaaacactttattaaacgctcatttagcccttgtttcgcataaggctaatgcgactagaaaattgatgaaatgcatcgtgccttttaaagacaaagaagggtatgagagccaaatcatttttttagacactccagggctccatcatcaagaaaaattactcaaccagtgcatgctctcacaggctttaaaagcgatgggcgatgctgaattgcgcgtttttttggcttctgtgcatgatgatttgaaagggtatgaagagtttttgagtttgtgccaaaaaccccatatcttggctttgagtaagattgacacagccacgcataagcaggttttacaaaaattacaagagtatcaaaaatattcatcgcaatttttagctctagtgcctttgagtgcgaaaaaatctcaaaatttaaacgcgcttttagaatgcatcagtaagcatttaagccctagcgcatggctttttgaaaaggatttgatgagcgatgaaaaaatgcgcgatatttataaggaaatcattagggagagtttgtttgattttttgagcgatgaaatcccttatgaaagcgatgtgatgattgataaatttatagaagaagaacgcatagacaaggtgtatgcgcgcattatcgtagaaaaagaaagccaaaaaaaaatcgtgataggtaaaaacggggtgaatatcaaacgcatcgggactaacgcgcgattgaaaatgcaagaagtgggcgaaaaaaaggtttttttaaacttgcaagtgatcgctcaaaaatcatggagtaaggaagaaaaaagcttgcaaaaactaggctatatctatcaaaggaatagggat

SEQ ID NO: 3223 - DNA (genomic), 177 bp, Helicobacter pylori; double-stranded, circular
  misc_feature (B) LOCATION 1...177
  hypothetical: NO
  anti-sense: NO
atgggttgtttcagttgtattgattgtgtcagccatagtgttacctccataaggtatattctcaatttgttacttatgaaacaaattcatgctattatagcaaaaaatatgaaaccatctccctattgcttgtcgctattatgttgttgtttgcaatctaaaaaagagatgatttga

SEQ ID NO: 3224 - DNA (genomic), 240 bp, Helicobacter pylori; double-stranded, circular
  misc_feature (B) LOCATION 1...240
  hypothetical: NO
  anti-sense: NO
atcataacgcttatcagtcaaattgtttttgaaaaaatttacaaaagcgtttggcttctttgtttcatgggttgtttcagttgtattgattgtgtcagccatagtgttacctccataaggtatattctcaatttgttacttatgaaacaaattcatgctattatagcaaaaaatatgaaaccatctccctattgcttgtcgctattatgttgttgtttgcaatctaaaaaagagatgatt

SEQ ID NO: 3225 - DNA (genomic), 126 bp, Helicobacter pylori; double-stranded, circular
  misc_feature (B) LOCATION 1...126
  hypothetical: NO
  anti-sense: NO
atgctgatactaacatgcgatataacacaaaccaacgatttgtttgtttatgtcaaacaaagaatagaaaacacctatcaaggaataaaagagtttctatccaaaaaacaccaatccattgtataa

SEQ ID NO: 3226 - DNA (genomic), 168 bp, Helicobacter pylori; double-stranded, circular
  misc_feature (B) LOCATION 1...168
  hypothetical: NO
  anti-sense: NO
ttgaggactcagcttgcaaccatgagcgctatgttaaaaggggctaatggcgttattaatggtgtcaatagcatgacaggggggttttttgcaggttcagacatcttgcttggcgtcatggaagggtattcaagcgcgcttagcacttgggggggaatgtcaaaatga

SEQ ID NO: 3227 - DNA (genomic), 279 bp, Helicobacter pylori; double-stranded, circular
  misc_feature (B) LOCATION 1...279
  hypothetical: NO
  anti-sense: NO
agccattcaggcggatgcacaagccaaacaaaaaaccgctcaagccgaattaaaagccatagaggctcaatctatgccaaagaaaaagccgttcaagcgcaaatagagggagatttgaggactcagcttgcaaccatgagcgctatgttaaaaggggctaatggcgttattaatggtgtcaatagcatgacaggggggttttttgcaggttcagacatcttgcttggcgtcatggaagggtattcaagcgcgcttagcacttgggggggaatgtcaaaa

SEQ ID NO: 3228 - DNA (genomic), 771 bp, Helicobacter pylori; double-stranded, circular
  misc_feature (B) LOCATION 1...771
  hypothetical: NO
  anti-sense: NO
atgatcgtggaaaaacaaaaaattaatacccaaacagaaatccaaaacatgcaaatcgcgctccaaaaaaataacgaaataatcaagctcaaaatgaaccagcaaaacgctctcttagaagcgttaaaaaacagctttgagccgagcgttaccctaaaaacacaaatggaaatgctttctcaagctctaggaagttcttctgacaacgctcaatacatcgcttacaatacgattggtatcaaggcgtttgaagaaaccttaaaaggttttgaaacatggttgaaaacagctatgcaaaaagcgacccttattgactataattccctaacaggtcaggctttgtttcaaagcaccatctatgcgcctgctcttagttttttttcaagcatgggcgcaccatttggaatcattgaaacattcactctagcgcccacaaaatgcccttatcttgatgggctaaaaatttcagcatgccttatggaacaggttattcagaattacagaatgattgtagcccttattcaaaataaactgagtgatgcagattttcaaaatatcgcttatttgaatgggatcaatggagaaatcaaaaccttaaaaggatcagtagatttgaatgcgctcatagaagttgcgatcttaaacgcagaaaatcatttaaactatatagagaatcttgaaaaaaaagccgacctttgggaagaacaactgaaattagaaagagaaacgacagcaagaaacattgctagctctaaagttattgtcaaatga

SEQ ID NO: 3229 - DNA (genomic), 789 bp, Helicobacter pylori; double-stranded, circular
  misc_feature (B) LOCATION 1...789
  hypothetical: NO
  anti-sense: NO
cacttgggggggaatgtcaaaatgatcgtggaaaaacaaaaaattaatacccaaacagaaatccaaaacatgcaaatcgcgctccaaaaaaataacgaaataatcaagctcaaaatgaaccagcaaaacgctctcttagaagcgttaaaaaacagctttgagccgagcgttaccctaaaaacacaaatggaaatgctttctcaagctctaggaagttcttctgacaacgctcaatacatcgcttacaatacgattggtatcaaggcgtttgaagaaaccttaaaaggttttgaaacatggttgaaaacagctatgcaaaaagcgacccttattgactataattccctaacaggtcaggctttgtttcaaagcaccatctatgcgcctgctcttagttttttttcaagcatgggcgcaccatttggaatcattgaaacattcactctagcgcccacaaaatgcccttatcttgatgggctaaaaatttcagcatgccttatggaacaggttattcagaattacagaatgattgtagcccttattcaaaataaactgagtgatgcagattttcaaaatatcgcttatttgaatgggatcaatggagaaatcaaaaccttaaaaggatcagtagatttgaatgcgctcatagaagttgcgatcttaaacgcagaaaatcatttaaactatatagagaatcttgaaaaaaaagccgacctttgggaagaacaactgaaattagaaagagaaacgacagcaagaaacattgctagctctaaagttattgtcaaa

SEQ ID NO: 3230 - DNA (genomic), 1146 bp, Helicobacter pylori; double-stranded, circular
  misc_feature (B) LOCATION 1...1146
  hypothetical: NO
  anti-sense: NO
gtgaaatgttttttaagcatattttctttcttaactttttgtggcttgtccttgaatggtgcaggggcagtaataacgcttgaacctgccttaaaagccattcaggcggatgcacaagccaaacaaaaaaccgctcaagccgaattaaaagccatagaggctcaatctaatgccaaagaaaaagccattcaagcgcaaatagagggagaattgaggactcagcttgcaaccatgagcgctatgttaaaaggggctaatggcgttattaatggtgtcaatagcatgacaggggggttttttgcaggttcagacatcttgcttggcgtcatggaagggtattcaagcgcgcttagcgcattgggggggaatgtcaaaatgatcgtggaaaaacaaaaaattaatacccaaacagaaatccaaaacatgcaaatcgcgctccaaaaaaataacgaaataatcaagctcaaaatgaaccagcaaaacgctctcttagaagcgttaaaaaacagctttgagccgagcgttaccctaaaaacacaaatggaaatgctttctcaagctctaggaagttcttctgacaacgctcaatacatcgcttacaatacgattggtatcaaggcgtttgaagaaaccttaaaaggttttgaaacatggttgaaaacagctatgcaaaaagcgacccttattgactataattccctaacaggtcaggctttgtttcaaagcaccatctatgcgcctgctcttagttttttttcaagcatgggcgcaccatttggaatcattgaaacattcactctagcgcccacaaaatgcccttatcttgatgggctaaaaatttcagcatgccttatggaacaggttattcagaattacagaatgattgtagcccttattcaaaataaactgagtgatgcagattttcaaaatatcgcttatttgaatgggatcaatggagaaatcaaaaccttaaaaggatcagtagatttgaatgcgctcatagaagttgcgatcttaaacgcagaaaatcatttaaactatatagagaatcttgaaaaaaaagccgacctttgggaagaacaactgaaattagaaagagaaacgacagcaagaaacattgctagctctaaagttattgtcaaatga

SEQ ID NO: 3231 - DNA (genomic), 243 bp, Helicobacter pylori; double-stranded, circular
  misc_feature (B) LOCATION 1...243
  hypothetical: NO
  anti-sense: NO
atgtcttattttaagaatattttcaatcaaaaatctttaatagatgattccagtgtgtatttagagccttgttctagctctaatttcatagaattaaagcgcatgcattataatgaagagaatactaagaaaacatgggatattatcaagtctttagacagcgtggcggttttactctatgaaaaagaatccgattgctttgtgattgtgaaacaattccgcccagccatttatgctcggtga

SEQ ID NO: 3232 - DNA (genomic), 264 bp, Helicobacter pylori; double-stranded, circular
  misc_feature (B) LOCATION 1...264
  hypothetical: NO
  anti-sense: NO
gcgcgatcaggatcaactattgacggatacacttatgaattgtgcgcggggcttgtggataaggctaataagagtttagaagaaactgcttgcgaagaagcactagaagaatgcggttatcaaattagccctaaaaacttagaaaccataggccaattttatagcgcgactgggttgagcgggagtttgcaaacgctctattacgctgaagcgcatgagggtttgaaggtttcaaagggtggggggattgataccagaaaagat

SEQ ID NO: 3233 - DNA (genomic), 273 bp, Helicobacter pylori; double-stranded, circular
  misc_feature (B) LOCATION 1...273
  hypothetical: NO
  anti-sense: NO
aaaaaattcattttatcttttagagggtttttaatgtcttattttaagaatattttcaatcaaaaatctttaatagatgattccagtgtgtatttagagccttgttctagctctaatttcatagaattaaagcgcatgcattataatgaagagaatactaagaaaacatgggatattatcaagtctttagacagcgtggcggttttactctatgaaaaagaatccgattgctttgtgattgtgaaacaattccgcccagccatttatgctcgg

SEQ ID NO: 3234 - DNA (genomic), 345 bp, Helicobacter pylori; double-stranded, circular
  misc_feature (B) LOCATION 1...345
  hypothetical: NO
  anti-sense: NO
ttgtgcgcggggcttgtggataaggctaataagagtttagaagaaatcgcttgcgaagaagcactagaagaatgcggttatcaaattagccctaaaaacttagaaaccataggccaattttatagcgcgactgggttgagcgggagtttgcaaacgctctattacgctgaagcgcatgagggtttgaaggtttcaaagggtggggggattgatacagaaaagattgaagtgttgtttttagagcgatcaaaagctcttgattttataatggattttcaatacgctaaaaccaccggcttgtctttagccattttatggcatttaaaaaagtttaaaaatgtttaa

SEQ ID NO: 3235 - DNA (genomic), 639 bp, Helicobacter pylori; double-stranded, circular
  misc_feature (B) LOCATION 1...639
  hypothetical: NO
  anti-sense: NO
atgtcttattttaagaatattttcaatcaaaaatctttaatagatgattccagtgtgtatttagagccttgttctagctctaatttcatagaattaaagcgcatgcattataatgaagagaatactaagaaaacatgggatattatcaagtctttagacagcgtggcggttttactctatgaaaaagaatccgattgctttgtgattgtgaaacaattccgcccagccatttatgctcgtaatttttattttaagcgcgatcaggatcaaactattgacggatacacttatgaattgtgcgcggggcttgtggataaggctaataagagtttagaagaaatcgcttgcgaagaagcactagaagaatgcggttatcaaattagccctaaaaacttagaaaccataggccaattttatagcgcgactgggttgagcgggagtttgcaaacgctctattacgctgaagcgcatgagggtttgaaggtttcaaagggtggggggattgatacagaaaagattgaagtgttgtttttagagcgatcaaaagctcttgattttataatggattttcaatacgctaaaaccaccggcttgtctttagccattttatggcatttaaaaaagtttaaaaatgtttaa

SEQ ID NO: 3236 - DNA (genomic), 402 bp, Helicobacter pylori; double-stranded, circular
  misc_feature (B) LOCATION 1...402
  hypothetical: NO
  anti-sense: NO
atgcgctgtagggtatattacgaagataccgactctgaaggcgtggtctatcatgcgaattatttgaaatattgcgaaagggctaggagcgagtttttttttaaacaaaatgtcttgcccgaaaatgaagaaggcgtgtttgtcatccgctctatcaaagcggattttttcacccctgcgagtttgggacaagtcttagaaataagaacgcaaattaaagaattaagaaaggtttttgtggtgctttttcaagaaatttattgcatccaaaacgcttctttagagcctatgaagcctttcaaagtctttgcttcagaaatcaagtttggctttgtcaaccgctctacatacagccctattgccattcctaaattgtttaaggagcttcttagtgccgtctga

SEQ ID NO: 3237 - DNA (genomic), 408 bp, Helicobacter pylori; double-stranded, circular
  misc_feature (B) LOCATION 1...408
  hypothetical: NO
  anti-sense: NO
ggggaattaatgcgctgtagggtatattacgaagataccgactctgaaggcgtggtctatcatgcgaattatttgaaatattgcgaaagggctaggagcgagtttttttttaaacaaaatgtcttgcccgaaaatgaagaaggcgtgtttgtcatccgctctatcaaagcggattttttcacccctgcgagtttgggacaagtcttagaaataagaacgcaaattaaagaattaagaaaggtttttgtggtgctttttcaagaaatttattgcatccaaaacgcttctttagagcctatgaagcctttcaaagtctttgcttcagaaatcaagtttggctttgtcaaccgctctacatacagccctattgccattcctaaattgtttaaggagcttcttagtgccgtc

SEQ ID NO: 3238 - DNA (genomic), 282 bp, Helicobacter pylori; double-stranded, circular
  misc_feature (B) LOCATION 1...282
  hypothetical: NO
  anti-sense: NO
ggagtaaaaatgcatattagcggagtcaaaactgcctttaaaatcgctgatgtagaatacgtgaaagacagcacaaagttgaatttcaactatcttaaggatttaaaagatgaaaacaatcaatctttatctcaaaatattttaactcaaaatgtggccagagcgtatttaattgtagtggatggtgagattaaaaaaatcggtggttctcaagcggatggtgggattaaaagcacgctcaatatttataaagatgggggagtcaaagggaggtctagacat

SEQ ID NO: 3239 - DNA (genomic), 528 bp, Helicobacter pylori; double-stranded, circular
  misc_feature (B) LOCATION 1...528
  hypothetical: NO
  anti-sense: NO
atgcatattagcggagtcaaaactgcctttaaaatcgctgatgtagaatacgtgaaagacagcacaaagttgaatttcaactatcttaaggatttaaaagatgaaaacaatcaatctttatctcaaaatattttaactcaaaatgtggccagagcgtatttaattgtagtggatggtgagattaaaaaaatcggtggttctcaagcggatggtgggattaaaagcacgctcaatatttataaagatgggggagtcaaagggaggtctagcattagaagttttggcgtgtggtattttctttaccatacgatactcacaggggctaaaatagaattttacatgatttatcaacctaattttgaaacccaagtgaaaggcttgtttggtttttgtgcaatcaaagacgcaagcatcagttataaacttttagagcaagcttgtctgacggattatagaaacaataacaatgacgcattgcccgaatggaatgcacgagagcaaggtaaagaattggccaaacgatattaa

SEQ ID NO: 3240 - DNA (genomic), 81 bp, Helicobacter pylori; double-stranded, circular
  misc_feature (B) LOCATION 1...81
  hypothetical: NO
  anti-sense: NO
ttgagatttttgggtttcgttattgacagttgtggccgctttaggttgttttttggacaatttttcaaccaatttcactaa

SEQ ID NO: 3241 - DNA (genomic), 180 bp, Helicobacter pylori; double-stranded, circular
  misc_feature (B) LOCATION 1...180
  hypothetical: NO
  anti-sense: NO
atttgtgagattttcccttattctttcttcagtcaaaatcgttgttctgcctcaatctttagtctctttagcttcagttggttcgttggtaacgcttgctgcttgagatttttgggtttcgttattgacagttgtggccgctttaggttgttttttggacaatttttcaaccaatttcac

SEQ ID NO: 3242 - DNA (genomic), 180 bp, Helicobacter pylori; double-stranded, circular
  misc_feature (B) LOCATION 1...180
  hypothetical: NO
  anti-sense: NO
ttgacagttgtggccgctttaggttgttttttggacaatttttcaaccaatttcactaagttgatattagaaaaagacaaaaagattcctattgcgacaaagattatcccaacaatccccatagcaccgctcaagacacaacataaaacccccgctccaatgagacctaatgaatcataa

SEQ ID NO: 3243 - DNA (genomic), 195 bp, Helicobacter pylori; double-stranded, circular
  misc_feature (B) LOCATION 1...195
  hypothetical: NO
  anti-sense: NO
gatttttgggtttcgttattgacagttgtggccgctttaggttgttttttggacaatttttcaaccaatttcactaagttgatattagaaaaagacaaaaagattcctattgcgacaaagattatcccaacaatccccatagcaccgctcaagacacaacataaaacccccgctccaatgagacctaatgaatca

SEQ ID NO: 3244 - DNA (genomic), 261 bp, Helicobacter pylori; double-stranded, circular
  misc_feature (B) LOCATION 1...261
  hypothetical: NO
  anti-sense: NO
ttgagagaatactatatagaatttgtgaaaaacaataccaatttgttgcagaacgcttctcaaatgatacttaatcaatcaggattagctactagcacctatgacactcaagcgatttctaacataagctcgctatataattacaatatagtagcgaataaatcttttttgaaatcgcatttgacttatcttgattacatcaaagacaagcttaaggggcaaaaagatagctacttaacagaaaggtgcagactaaaataa

SEQ ID NO: 3245 - DNA (genomic), 348 bp, Helicobacter pylori; double-stranded, circular
  misc_feature (B) LOCATION 1...348
  hypothetical: NO
  anti-sense: NO
atgaccactcctgcatgccctattggggacaaggttcttgccgtttattgctatgctgaaaaagtagcagaaattttgagagaatactatatagaatttgtgaaaaacaataccaatttgttgcagaacgcttctcaaatgatacttaatcaatcaggattagctactagcacctatgacactcaagcgatttctaacataagctcgctatataattacaatatagtagcgaataaatcttttttgaaatcgcatttgacttatcttgattacatcaaagacaagcttaaggggcaaaaagatagctacttaacagaaagggtgcagactaaaataatcgtgaagtga

SEQ ID NO: 3246 - DNA (genomic), 372 bp, Helicobacter pylori; double-stranded, circular
  misc_feature (B) LOCATION 1...372
  hypothetical: NO
  anti-sense: NO
tcgttagccactaatgccctatcttcacgcgttaatcctatgaccactcctgcatgccctattggggacaaggttcttgccgtttattgctatgctgaaaaagtagcagaaattttgagagaatactatatagaatttgtgaaaaacaataccaatttgttgcagaacgcttctcaaatgatacttaatcaatcaggattagctactagcacctatgacactcaagcgatttctaacataagctcgctatataattacaatatagtagcgaataaatcttttttgaaatcgcatttgacttatcttgattacatcaaagacaagcttaaggggcaaaaagatagctacttaacagaaaggtgcagactaaaa

SEQ ID NO: 3247 - DNA (genomic), 384 bp, Helicobacter pylori; double-stranded, circular
  misc_feature (B) LOCATION 1...384
  hypothetical: NO
  anti-sense: NO
ttggccactaatgccctaacttcaggcgttaatcctatgaccactcctgcatgccctattggggacaaggttcttgccgtttattgctatgctgaaaaagtagcagaaattttgagagaatactatatagaatttgtgaaaaacaataccaatttgttgcagaacgcttctcaaatgatacttaatcaatcaggattagctactagcacctatgacactcaagcgatttctaacataagctcgctatataattacaatatagtagcgaataaatcttttttgaaatcgcatttgacttatcttgattacatcaaagacaagcttaaggggcaaaaagatagctacttaacagaaagggtgcagactaaaataatcgtgaagtga

SEQ ID NO: 3248 - DNA (genomic), 108 bp, Helicobacter pylori; double-stranded, circular
  misc_feature (B) LOCATION 1...108
  hypothetical: NO
  anti-sense: NO
atggggatattttttaacttcatcgcaaagcccactttaatatccaaaccgccttcagcagcgataacgctatcgcccactttcaaaccgcttggctgtaaaatatag

SEQ ID NO: 3249 - DNA (genomic), 261 bp, Helicobacter pylori; double-stranded, circular
  misc_feature (B) LOCATION 1...261
  hypothetical: NO
  anti-sense: NO
atgaatacaaaagagccgcataaaaggctagtgcaaggcaaggttatcagcaagtttgctgaaaaaagcgctgtgattcttgtggaaagaaaagtggtgcatgaaaaataccgcaagattgttaaaaagtttaaaaaatacactatccatgatgaaaacaatcaggtgaaagtaggagattttgtgagcgcgattgagtgcagaccgctttctaaaaccaagtccttcacgcttaaagaaattttagtagtgggagtataa

SEQ ID NO: 3250 - DNA (genomic), 261 bp, Helicobacter pylori; double-stranded, circular
  misc_feature (B) LOCATION 1...261
  hypothetical: NO
  anti-sense: NO
gcaatgaatacaaaagagccgcataaaaggctagtgcaaggcaaggttatcagcaagtttgctgaaaaaagcgctgtgattcttgtggaaagaaaagtggtgcatgaaaaataccgcaagattgttaaaaagtttaaaaaatacactatccatgatgaaaacaatcaggtgaaagtaggaggttttgtgagcgcgattgagtgcagaccgctttctaaaaccaagtccttcacgcttaaagaaattttagtggtgggagta

SEQ ID NO: 3251 - DNA (genomic), 318 bp, Helicobacter pylori; double-stranded, circular
  misc_feature (B) LOCATION 1...318
  hypothetical: NO
  anti-sense: NO
atgataaacaacaataaagccatgttagagcaatacaacgtttctaaattagcgagtgaagagaaattaaaagctctagctcaaaataaaaacgacaagctcctcaaagaacaaaccgattcttttgaagcactgcttttaaaattcatgctggatagcgctatgaaaatggataaccccttgtatcctaaagccccaggcgatgaaatttatgcgtccatgtataaggacaccctctctaaagaattgagcgggaattttggttatagcgaaatgctgtttaatttcttaaaagagcaagaaaaacaaaaaccatga

SEQ ID NO: 3252 - DNA (genomic), 351 bp, Helicobacter pylori; double-stranded, circular
  misc_feature (B) LOCATION 1...351
  hypothetical: NO
  anti-sense: NO
aaaaaagcggcgcgattagcgcgaaatggagatactatgataaacaacaataaagccatgttagagcaatacaacgtttctaaattagcgagtgaagagaaattaaaagctctagctcaaaataaaaacgacaagctcctcaaagaacaaaccgattcttttgaagcactgcttttaaaattcatgctggatagcgctatgaaaatggataaccccttgtatcctaaagccccaggcgatgaaatttatgcgtccatgtataaggacaccctctctaaagaattgagcgggaattttggttatagcgaaatgctgtttaatttcttaaaagagcaagaaaaacaaaaacca

SEQ ID NO: 3253 - DNA (genomic), 372 bp, Helicobacter pylori; double-stranded, circular
  misc_feature (B) LOCATION 1...372
  hypothetical: NO
  anti-sense: NO
gtgcataacttccattggaatgtgaaaggcaccgattttttcaatgtgcataaagccactgaagaaatttatgaagggtttgcggacatgtttgatgatctcgctgaaaggatcgttcaattaggacaccaccccctagtcactttatccgaagcgatcaaactcactcgtgttaaagaagaaactaaaacgagcttccactctaaagacatctttaaagaaattctagaggactacaaacacctagaaaaagaatttaaagagctctctaacaccgccgaaaaagaaggcgataaagttaccgtaacttatgcggacgatcaattagccaagttgcaaaaatccatttggatgctagaagcccatttagct

SEQ ID NO: 3254 - DNA (genomic), 435 bp, Helicobacter pylori; double-stranded, circular
  misc_feature (B) LOCATION 1...435
  hypothetical: NO
  anti-sense: NO
atgaaaacatttgaaattttaaaacatttgcaagcggatgcgatcgtgttatttatgaaagtgcataacttccattggaatgtgaaaggcaccgattttttcaatgtgcataaagccactgaagaaatttatgaagggtttgcggacatgtttgatgatctcgctgaaaggatcgttcaattaggacaccaccccctagtcactttatccgaagcgatcaaactcactcgtgttaaagaagaaactaaaacgagcttccactctaaagacatctttaaagaaattctagaggactacaaacacctagaaaaagaatttaaagagctctctaacaccgccgaaaaagaaggcgataaagttaccgtaacttatgcggacgatcaattagccaagttgcaaaaatccatttggatgctagaagcccatttagcttaa

SEQ ID NO: 3255 - DNA (genomic), 465 bp, Helicobacter pylori; double-stranded, circular
  misc_feature (B) LOCATION 1...465
  hypothetical: NO
  anti-sense: NO
aagcctaaaacaattttaaaaaaaggacttttgatgaaaacatttgaaattttaaaacatttgcaagcggatgcgatcgtgttatttatgaaagtgcataacttccattggaatgtgaaaggcaccgattttttcaatgtgcataaagccactgaagaaatttatgaagggtttgcggacatgtttgatgatctcgctgaaaggatcgttcaattaggacaccaccccctagtcactttatccgaagcgatcaaactcactcgtgttaaagaagaaactaaaacgagcttccactctaaagacatctttaaagaaattctagaggactacaaacacctagaaaaagaatttaaagagctctctaacaccgccgaaaaagaaggcgataaagttaccgtaacttatgcggacgatcaattagccaagttgcaaaaatccatttggatgctagaagcccatttagct

SEQ ID NO: 3256 - DNA (genomic), 285 bp, Helicobacter pylori; double-stranded, circular
  misc_feature (B) LOCATION 1...285
  hypothetical: NO
  anti-sense: NO
atgagggattacagcgagcttgaaatttttgagggaaaccccttagacaagtggaatgacattatttttcatgcgagcaaaaagctttccaaaaaagagctagaaaggcttttagagcttttggctctcttagaaacttttatagaaaaagaagacttggaagaaaggtttgaatcttttgctaaagctttaagaatggatgaagagttgcaacaaaaaatagagagcagaaaaacagacattgtgatccaatccatggcgaatattctcagcgggaatgaatga

SEQ ID NO: 3257 - DNA (genomic), 381 bp, Helicobacter pylori; double-stranded, circular
  misc_feature (B) LOCATION 1...381
  hypothetical: NO
  anti-sense: NO
agttaccgtaacttatgcggacgatcaattagccaagttgcaaaaatccatttggatgctagaagcccatttagcttaagccaacaaaaagaagccagcatgagggattacagcgagcttgaaatttttgagggaaaccccttagacaagtggaatgacattatttttcatgcgagcaaaaagctttccaaaaaagagctagaaaggcttttagagcttttggctctcttagaaacttttatagaaaaagaagacttggaagaaaggtttgaatcttttgctaaagctttaagaatggatgaagagttgcaacaaaaaatagagagcagaaaaacagacattgtgatccaatccatggcgaatattctcagcgggaatgaa

SEQ ID NO: 3258 - DNA (genomic), 396 bp, Helicobacter pylori; double-stranded, circular
  misc_feature (B) LOCATION 1...396
  hypothetical: NO
  anti-sense: NO
atgaatgagcttatccgctatggcttgatattccttgtttttttaaaggcgtttgggcttgattatgggatcgataaaacgctagaattaaaaaaagatgaagcgtttagagccgttatcaaagacacttctaacgaacaaaccaaagaaattacgctctattggactttatacgctaataaaggtttagtcattaacatgcgttttaaccatttcccttaccagtttattttatacaccgatcatgcgagaaacacctataacctcaaagtttttgaagaaaacttttcttctaacagcgttctgtcgcttgtgtttaaagattttaaagaagataaagccactttaaggcttttagcccccatgcctcttattttttctcctaaagagccttaa

SEQ ID NO: 3259 - DNA (genomic), 423 bp, Helicobacter pylori; double-stranded, circular
  misc_feature (B) LOCATION 1...423
  hypothetical: NO
  anti-sense: NO
tccaatccatggcgaatattctcagcgggaatgaatgagcttatccgctatggcttgatattccttgtttttttaaaggcgtttgggcttgattatgggatcgataaaacgctagaattaaaaaaagatgaagcgtttagagccgttatcaaagacacttctaacgaacaaaccaaagaaattacgctctattggactttatacgctaataaaggtttagtcattaacatgcgttttaaccatttcccttaccagtttattttatacaccgatcatgcgagaaacacctataacctcaaagtttttgaagaaaacttttcttctaacagcgttctgtcgcttgtgtttaaagattttaaagaagataaagccactttaaggcttttagcccccatgcctcttattttttctcctaaagagcct

SEQ ID NO: 3260 - DNA (genomic), 507 bp, Helicobacter pylori; double-stranded, circular
  misc_feature (B) LOCATION 1...507
  hypothetical: NO
  anti-sense: NO
tttcttaaaagagcaagaaaaacaaaaaccatgaaaaaatccaagcgcttaaaacgcccttatttaaaaaactcccatctgaaacactctgataaggcttcttctttcaaggggttgttggaaaacgaaaacaatgtgatttcattagaaaattttaaacccaaagagagcgaagatttattagaaaatttttccaacaaaaaagacatgcaagagttattggagcttttaaaccaattcattctacaaagctacaaggtggaaaaggagtttaaggattataaagccctttatgaatgggtcatagagattttaccgcaagcgatttgggtgatgaatgaaaacgggagctttttttataaaaattctttagccaatcaaagccatgaggtgttcaataaggctaaattaggaaattttaacaccgaaattgaacatgaaaacaaaagctatttagtccagcaaaacagcattcagggcaaagcaaatcatcaccgcaaccgatat

SEQ ID NO: 3261 - DNA (genomic), 717 bp, Helicobacter pylori; double-stranded, circular
  misc_feature (B) LOCATION 1...717
  hypothetical: NO
  anti-sense: NO
tccagcaaaacagcattcagggcaaagcaaatcatcaccgcaaccgatattagcgctcaaaaacgccaagagcggctcgcttctatggggaaaatttcagcgcatttagcccatgaaatcagaaaccccgtaggctctatctctcttttagcttcggtgttattaaagcatgcgaacgaaaaaactaaacccattgttgtagaattgcaaaaagctttatggcgcgtagaaaggatcattaaagccaccttgcttttttctaaaggcattcaagccaaccgcaccaagcaaagtttgaaaacgctagagagcgatctcaaagaagccctaaactgctacacttactctaaagacattgattttctttttaattttagcgatgaagaagggttttttgactttgatttaatggggattgtgttacaaaatttcttgtataacgccattgatgcgattgaagccttagaagagagcgaacaaggtcaggtcaaaattgaagcgttcattcaaaatgaatttattgtcttcaccattattgataatggcaaggaagtggaaaataaaagcgctttatttgagccttttgaaaccactaaattaaaggggaatggcttagggttagccctgtctttgcaagtcgttaaagcccatgaagggagcattgcgctattagaaaatcaagaaaaaacctttgaaattaagattcttaacgcttct

SEQ ID NO: 3262 - DNA (genomic), 1146 bp, Helicobacter pylori; double-stranded, circular
  misc_feature (B) LOCATION 1...1146
  hypothetical: NO
  anti-sense: NO
atgaaaaaatccaagcgcttaaaacgcccttatttaaaaaactcccatctgaaacactctgataaggcttcttctttcaaggggttgttggaaaacgaaaacaatgtgatttcattagaaaattttaaacccaaagagagcgaagatttattagaaaatttttccaacaaaaaagacatgcaagagttattggagcttttaaaccaattcattctacaaagctacaaggtggaaaaggagtttaaggattataaagccctttatgaatgggtcatagagattttaccgcaagcgatttgggtgatgaatgaaaacgggagctttttttataaaaattctttagccaatcaaagccatgaggtgttcaataaggctaaattaggaaattttaacaccgaaattgaacatgaaaacaaaagctatttagtccagcaaaacagcattcagggcaagcaaatcatcaccgcaaccgatattagcgctcaaaaacgccaagagcggctcgcttctatggggaaaatttcagcgcatttagcccatgaaatcagaaaccccgtaggctctatctctcttttagcttcggtgttattaaagcatgcgaacgaaaaaactaaacccattgttgtagaattgcaaaaagctttatggcgcgtagaaaggatcattaaagccaccttgcttttttctaaaggcattcaagccaaccgcaccaagcaaagtttgaaaacgctagagagcgatctcaaagaagccctaaactgctacacttactctaaagacattgattttctttttaattttagcgatgaagaagggttttttgactttgatttaatggggattgtgttacaaaatttcttgtataacgccattgatgcgattgaagccttagaagagagcgaacaaggtcaggtcaaaattgaagcgttcattcaaaatgaatttattgtcttcaccattattgataatggcaaggaagtggaaaataaaagcgctttatttgagccttttgaaaccactaaattaaaggggaatggcttagggttagccctgtctttgcaagtcgttaaagcccatgaagggagcattgcgctattagaaaatcaagaaaaaacctttgaaattaagattcttaacgcttcttaa

SEQ ID NO: 3263 - DNA (genomic), 393 bp, Helicobacter pylori; double-stranded, circular
  misc_feature (B) LOCATION 1...393
  hypothetical: NO
  anti-sense: NO
ggaatttgcatgcaagaaaaacgacttaaagccattcaaaacaaaatcgcttcttggatcaaggaaattgaaagcggctttatagatgcattgttttctaagattggcccttcaaagatgctgcgctccaaactcatgctcgctttgttagacgaaaaaacagacgctattttattagataaagcgctcaatttgtgtgcgattgtggaaatgatacagaccgcttctttattgcatgatgatgtgattgacaaggcgaccatgcgccgaaagctccctagcattaacgctctttttgggaattttaacgccgtgatgcttggggatgtgttttattctaaagccttttttgagttgtctaaaatgggcgaatccatcgctcaagcccctctc

SEQ ID NO: 3264 - DNA (genomic), 615 bp, Helicobacter pylori; double-stranded, circular
  misc_feature (B) LOCATION 1...615
  hypothetical: NO
  anti-sense: NO
tgcttggggatgtgttttattctaaagccttttttgagttgtctaaaatgggcgaatccatcgctcaagcccctctctaatgcggttttaaggctctctaggggcgagattgaagacgtgtttgtgggggaatgttttaatagcgacaaacaaaaatactggcgtattttagaagacaagaccgcccatttcatagaagcgagcttaaaaagcatggcgattcttttaaataaagacgccaaaatgtatgcggattttgggttgcattttggcatggcgtttcaaatcattgatgatttgttagacatcactcaagacgccaacactctaggtaagcccaattttagcgattttaaagagggcaagaccactctaccctacttgcttttatatgaaaaattgaatcagcatgaacaagggcttttaatttcctatttcaaacaagatagtcatgaaatcatagaatggactaaggaaaaattcaagcaacatggtatcatagaagaaacccttaaaatcgctcaagtttattctaaaaaggcccttgaagccattaaaggggaaaacaatttgattttagaaaaactagcgcaagatgtcatttataggactttt

SEQ ID NO: 3265 - DNA (genomic), 729 bp, Helicobacter pylori; double-stranded, circular
  misc_feature (B) LOCATION 1...729
  hypothetical: NO
  anti-sense: NO
atgcaagaaaaacgacttaaagccattcaaaacaaaatcgcttcttggatcaaggaaattgaaagcggctttatagatgcattgttttctaagattggcccttcaaagatgctgcgctccaaactcatgctcgctttgttagacgaaaaaacagacgctattttattagataaagcgctcaatttgtgtgcgattgtggaaatgatacagaccgcttctttattgcatgatgatgtgattgacaaggcgaccatgcgccgaaagctccctagcattaacgctctttttgggaattttaacgccgtgatgcttggggatgtgttttattctaaagccttttttgagttgtctaaaatgggcgaatccatcgctcaagccctctctaatgcggttttaaggctctctaggggcgagattgaagacgtgtttgtgggggaatgttttaatagcgacaaacaaaaatactggcgtattttagaagacaagaccgcccatttcatagaagcgagcttaaaaagcatggcgattcttttaaataaagacgccaaaatgtatgcggattttgggttgcattttggcatggcgtttcaaatcattgatgatttgttagacatcactcaagacgccaacactctaggtaagcccaattttagcgattttaaagagggcaagaccactctaccctacttgcttttatatgaaaaattgaatcagcatgaacagggcttt

SEQ ID NO: 3266 - DNA (genomic), 924 bp, Helicobacter pylori; double-stranded, circular
  misc_feature (B) LOCATION 1...924
  hypothetical: NO
  anti-sense: NO
atgcaagaaaaacgacttaaagccattcaaaacaaaatcgcttcttggatcaaggaaattgaaagcggctttatagatgcattgttttctaagattggcccttcaaagatgctgcgctccaaactcatgctcgctttgttagacgaaaaaacagacgctattttattagataaagcgctcaatttgtgtgcgattgtggaaatgatacagaccgcttctttattgcatgatgatgtgattgacaaggcgaccatgcgccgaaagctccctagcattaacgctctttttgggaattttaacgccgtgatgcttggggatgtgttttattctaaagccttttttgagttgtctaaaatgggcgaatccatcgctcaagccctctctaatgcggttttaaggctctctaggggcgagattgaagacgtgtttgtgggggaatgttttaatagcgacaaacaaaaatactggcgtattttagaagacaagaccgcccatttcatagaagcgagcttaaaaagcatggcgattcttttaaataaagacgccaaaatgtatgcggattttgggttgcattttggcatggcgtttcaaatcattgatgatttgttagacatcactcaagacgccaacactctaggtaagcccaattttagcgattttaaagagggcaagaccactctaccctacttgcttttatatgaaaaattgaatcagcatgaacaagggcttttaatttcctatttcaaacaagatagtcatgaaatcatagaatggactaaggaaaaattcaagcaacatggtatcatagaagaaacccttaaaatcgctcaagtttattctaaaaaggcccttgaagccattaaaggggaaaacaatttgattttagaaaaactagcgcaagatgtcatttataggactttttaa

SEQ ID NO: 3267 - DNA (genomic), 225 bp, Helicobacter pylori; double-stranded, circular
  misc_feature (B) LOCATION 1...225
  hypothetical: NO
  anti-sense: NO
catcacgctacgcctttagaagttttagagcgttgcgaggtttttttgtgcgaggatacaagggtgagcaagaggctgttgcacctgcttgcgaaaaaccctattattagccattctttccctaatattgcggctaaaaaaagggagtttatcgctttccattcgcacaatgaccaggaatttttaaaccaaatagagccttctttttttgacaaagaatcgctg

SEQ ID NO: 3268 - DNA (genomic), 408 bp, Helicobacter pylori; double-stranded, circular
  misc_feature (B) LOCATION 1...408
  hypothetical: NO
  anti-sense: NO
ttgaggattattaaaattctaaacgctttagcgtatttagaagaaaaaaccccggtggttttttatgaaagcccgcaccgattgttagagactttaagggatttaaacgatctggctcaaggcatgcatttgtttgcggctaaggagcttaccaaactccaccagcaatattatttgggagaaatttctcaaatcatgacgcaattacaaaagagcaatatccaaggggagtgggttttagtgcttttgaatgaaaaaaaaatagagcctagcatggggctatcggcgttattggagttggatttgcctcctaaaatcaaggctaaaatggaagccgctatgacgcaaaaaaacgctaaagagctttatttccagcgtttgttagaagaaaaaaaacaatgcgattag

SEQ ID NO: 3269 - DNA (genomic), 486 bp, Helicobacter pylori; double-stranded, circular
  misc_feature (B) LOCATION 1...486
  hypothetical: NO
  anti-sense: NO
acggcgttttgcgcgagcgggtttttagaagggcggtttttttacgccggctttttaccccataagagcaaggaaaggcgtttgaggattattaaaattctaaacgctttagcgtatttagaagaaaaaaccccggtggttttttatgaaaccccgcaccgattgttagagactttaagggatttaaacgatctggctcaaggcatgcatttgtttgcggctaaggagcttaccaaactccaccagcaatattatttgggagaaatttctcaaatcatgacgcaattacaaaagagcaatatccaaggggagtgggttttagtgcttttgaatgaaaaaaaaatagagcctagcatggggctatcggcgttattggagttggatttgcctcctaaaatcaaggctaaaatggaagccgctatgacgcaaaaaaacgctaaagagctttatttccagcgtttgttagaagaaaaaaaacaatgcgat

SEQ ID NO: 3270 - DNA (genomic), 483 bp, Helicobacter pylori; double-stranded, circular
  misc_feature (B) LOCATION 1...483
  hypothetical: NO
  anti-sense: NO
gcgttttgcgcgagcgggtttttagaagggcggtttttttacgccggctttttaccccataagagcaaggaaaggcgtttgaggattattaaaattctaaacgctttagcgtatttagaagaaaaaaccccggtggttttttatgaaaccccgcaccgattgttagagactttaagggatttaaacgatctggctcaaggcatgcatttgtttgcggctaaggagcttaccaaactccaccagcaatattatttgggagaaatttctcaaatcatgacgcaattacaaaagagcaatatccaaggggagtgggttttagtgcttttgaatgaaaaaaaaatagagcctagcatggggctatcggcgttattggagttggatttgcctcctaaaatcaaggctaaaatggaagccgctatgacgcaaaaaaacgctaaagagctttatttccagcgtttgttagaagaaaaaaaacaatgcgat

SEQ ID NO: 3271 - DNA (genomic), 783 bp, Helicobacter pylori; double-stranded, circular
  misc_feature (B) LOCATION 1...783
  hypothetical: NO
  anti-sense: NO
ttgtgcgaggatacaagggtgagcaagaggctgttgcacctgcttgcgaaaaaccctattattagccattctttccctaatattgcggctaaaaaaagggagtttatcgctttccattcgcacaatgaccaggaatttttaaaccaaatagagccttctttttttgacaaagaaatcgctgtgatgagcgatgcgggtatgccaagcttgagtgatccgggcatgagtttagtcgcttacgctttaaaacacaacctccaatacgatgttttgcctggggctaatgcgctcactacggcgttttgcgcgagcgggtttttagaagggcggtttttttacgccggctttttaccccataagagcaaggaaaggcgtttgaggattattaaaattctaaacgctttagcgtatttagaagaaaaaaccccggtggttttttatgaaagcccgcaccgattgttagagactttaagggatttaaacgatctggctcaaggcatgcatttgtttgcggctaaggagcttaccaaactccaccagcaatattatttgggagaaatttctcaaatcatgacgcaattacaaaagagcaatatccaaggggagtgggttttagtgcttttgaatgaaaaaaaaatagagcctagcatggggctatcggcgttattggagttggatttgcctcctaaaatcaaggctaaaatggaagccgctatgacgcaaaaaaacgctaaagagctttatttccagcgtttgttagaagaaaaaaaacaatgcgattag

SEQ ID NO: 3272 - DNA (genomic), 684 bp, Helicobacter pylori; double-stranded, circular
  misc_feature (B) LOCATION 1...684
  hypothetical: NO
  anti-sense: NO
atgcaagcagtgatttatggcaagcaggtgattacgcaccttctaaactcccatcatgaaaagttgcaagaaatctatctttctaaagaaatagacaaaaagctttttttcgcgctcaaaaaagcatgcccaaatatcatcaaagtggataataaaaaagcgcaaagtttggctaaaggggggaaccatcaaggggttttagctaaagtggaactgcccttagcggcttctttaaaagaaattaaaaaagctcaaaaacttttggtgctttgtggcattacggatgtgaggaatattgggggtatttttaggagcgcgtattgcttaggaatggatggcgttattttagattttgctagagagtttgcttatgaggggattgtgcgatccagcttggggcttatgtatgatttgccttttagcgttatgcctaacacgctggatttaatcaatgaattgaaaacgagcgggtttttatgtttgggtgcgagcatgcaaggctctagccaagcagaaaatctgtccttaaaaaaatgcgctctttttttggggagcgaacatgaggggttgtctaaaaaaatccttgctaaaatggatgctatattgagtgtaaagatgcgaagggattttgattcgctcaatgtgagcgtggcagcagggatcttaatggataaaatcaactag

SEQ ID NO: 3273 - DNA (genomic), 717 bp, Helicobacter pylori; double-stranded, circular
  misc_feature (B) LOCATION 1...717
  hypothetical: NO
  anti-sense: NO
aagaaaaaaaacaatgcgattagaaaggggtttagcatgcaagcagtgatttatggcaagcaggtgattacgcaccttctaaactcccatcatgaaaagttgcaagaaatctatctttctaaagaaatagacaaaaagctttttttcgcgctcaaaaaagcatgcccaaatatcatcaaagtggataataaaaaagcgcaaagtttggctaaaggggggaaccatcaaggggttttagctaaagtggaactgcccttagcggcttctttaaaagaaattaaaaaagctcaaaaacttttggtgctttgtggcattacggatgtgaggaatattgggggtatttttaggagcgcgtattgcttaggaatggatggcgttattttagattttgctagagagtttgcttatgaggggattgtgcgatccagcttggggcttatgtatgatttgccttttagcgttatgcctaacacgctggatttaatcaatgaattgaaaacgagcgggtttttatgtttgggtgcgagcatgcaaggctctagccaagcagaaaatctgtccttaaaaaaatgcgctctttttttggggagcgaacatgaggggttgtctaaaaaaatccttgctaaaatggatgctatattgagtgtaaagatgcgaagggattttgattcgctcaatgtgagcgtggcagcagggatcttaatggataaaatcaac

SEQ ID NO: 3274 - DNA (genomic), 441 bp, Helicobacter pylori; double-stranded, circular
  misc_feature (B) LOCATION 1...441
  hypothetical: NO
  anti-sense: NO
ttgattttagccgctaaaaacagcgtatttgcgcatataagaagaggggattatgtggggattggctgtcagcttggtattgactatcaaaaaaaggctgttgagtatatggcaaagcgcgtgccaaacatggagctttttgtattttgtgaagacttaaaattcacgcaaaaccttgatcttggctacccttttatggacatgaccactagggataaagacgaagaggcgtattgggacatgctgctcatgcaatcttgcaagcatggcattatcgctaacagcacttatagctggtgggcggcttatttgataaacaatccaggaaaaatcatcattggccccaaacactggctttttgggcatgaaaacatcctttgtaaggaatgggtgaaaatagaatcccattttgaggtgaaatcccaaaagtataacgcttaa

SEQ ID NO: 3275 - DNA (genomic), 522 bp, Helicobacter pylori; double-stranded, circular
  misc_feature (B) LOCATION 1...522
  hypothetical: NO
  anti-sense: NO
tcaagcaaaccttcaccctacccccccccccccgaaaatggaaataataaaaaaaaagaggaagaataccaccgcaagctttctttgattttagccgctaaaaacagcgtatttgcgcatataagaagaggggattatgtggggattggctgtcagcttggtattgactatcaaaaaaaggctgttgagtatatggcaaagcgcgtgccaaacatggagctttttgtattttgtgaagacttaaaattcacgcaaaaccttgatcttggctacccttttatggacatgaccactagggataaagacgaagaggcgtattgggacatgctgctcatgcaatcttgcaagcatggcattatcgctaacagcacttatagctggtgggcggcttatttgataaacaatccaggaaaaatcatcattggccccaaacactggctttttgggcatgaaaacatcctttgtaaggaatgggtgaaaatagaatcccattttgaggtgaaatcccaaaagtataacgct

SEQ ID NO: 3276 - DNA (genomic), 609 bp, Helicobacter pylori; double-stranded, circular
  misc_feature (B) LOCATION 1...609
  hypothetical: NO
  anti-sense: NO
gtgatgagtgaaaaagatgagggcatttatgacgctatgaataagggcataaagcgttctagtggggatattatcgctttattgaatagcgatgatttttacaaagatgagtttgtggtagaaaaagtggtgcatgaatttgaaaacaaaaattgcgatagcgtgtatggggatctgggggttgtcaaacctgattgtttagaaaaagtggtgcgctattatgaaagcggggagtttagccccaaaaccttgctttatggcgtagtgccagcgcaccccacgctttttgtcaaaaaagccatttatgaacgctacggcttatacaaaaccgattataaaatttcagcggattttgagatgatcatccgcttgtttgtggtgcaaaaaataagcttttcttatttgaaagaagtgttagtcatcatgcgcaccggtggggttagcgcaagcgggtttaaaagccttttattaaggaataaagaaaatttgagagcatgccaagaaaacggcattcaagcgaatgttttttccatgcttttaaaataccctagaaagatcatgggcttatttaaaagagaatctaaagggagtctaaaacgaaacgattaa

SEQ ID NO: 3277 - DNA (genomic), 657 bp, Helicobacter pylori; double-stranded, circular
  misc_feature (B) LOCATION 1...657
  hypothetical: NO
  anti-sense: NO
cgcgatagcactttagaaatcattcaaaaatataaggatagaatcgcttgcgtgatgagtgaaaaagatgagggcatttatgacgctatgaataagggcataaagcgttctagtggggatattatcgctttattgaatagcgatgatttttacaaagatgagtttgtggtagaaaaagtggtgcatgaatttgaaaacaaaaattgcgatagcgtgtatggggatctgggggttgtcaaacctgattgtttagaaaaagtggtgcgctattatgaaagcggggagtttagccccaaaaccttgctttatggcgtagtgccagcgcaccccacgctttttgtcaaaaaagccatttatgaacgctacggcttatacaaaaccgattataaaatttcagcggattttgagatgatcatccgcttgtttgtggtgcaaaaaataagcttttcttatttgaaagaagtgttagtcatcatgcgcaccggtggggttagcgcaagcgggtttaaaagccttttattaaggaataaagaaaatttgagagcatgccaagaaaacggcattcaagcgaatgttttttccatgcttttaaaataccctagaaagatcatgggcttatttaaaagagaatctaaagggagtctaaaacgaaacgat

SEQ ID NO: 3278 - DNA (genomic), 423 bp, Helicobacter pylori; double-stranded, circular
  misc_feature (B) LOCATION 1...423
  hypothetical: NO
  anti-sense: NO
atggcttttaaagtggtgcaaatttgcggggggcttgggaatcaaatgttccaatacgctttcgctaaaagtttgcaaaaacactctaatacgcccgtgctattggatatcacttcttttgatgggagcaataggaaaatgcaattagagcttttccctattgatttgccctatgcgagcgcaaaagaaatcgctatagctaaaatgcaacacctccccaagctagtaagagacgcgctcaaatacatggggtttgatagggtgagtcaagaaatcgtttttgaatacgagcctaaattattaaagccaagccgcttgacttatttttatggctattttcaagatccacgatattttgatgctatatcctctttaatcaagcaaaccttcaccctacccccccccccccgaaaatggaaataa

SEQ ID NO: 3279 - DNA (genomic), 420 bp, Helicobacter pylori; double-stranded, circular
  misc_feature (B) LOCATION 1...420
  hypothetical: NO
  anti-sense: NO
atggcttttaaagtggtgcaaatttgcggggggcttgggaatcaaatgttccaatacgctttcgctaaaagtttgcaaaaacactctaatacgcccgtgctattggatatcacttcttttgatgggagcaataggaaaatgcaattagagcttttccctattgatttgccctatgcgagcgcaaaagaaatcgctatagctaaaatgcaacacctccccaagctagtaagagacgcgctcaaatacatggggtttgatagggtgagtcaagaaatcgtttttgaatacgagcctaaattattaaagccaagccgcttgacttatttttatggctattttcaagatccacgatattttgatgctatatcctctttaatcaagcaaaccttcaccctacccccccccccccgaaaatggaaa

SEQ ID NO: 3280 - DNA (genomic), 120 bp, Helicobacter pylori; double-stranded, circular
  misc_feature (B) LOCATION 1...120
  hypothetical: NO
  anti-sense: NO
gtgatcacggcgtgttttaatagygaaaaaaccattgaagacaccattctttccgtgcttaatcaaacttataaaaacattgaatacatcattatagatggggctagcgcgatagcactt

SEQ ID NO: 3281 - DNA (genomic), 138 bp, Helicobacter pylori; double-stranded, circular
  misc_feature (B) LOCATION 1...138
  hypothetical: NO
  anti-sense: NO
ttgttaaaggtttctgtgatcacggcgtgttttaatagcgaaaaaaccattgaagacaccattctttccgtgcttaatcaaacttataaaaacattgaatacatcattatagatggggctagcgcgatagcactttag

SEQ ID NO: 3282 - DNA (genomic), 183 bp, Helicobacter pylori; double-stranded, circular
  misc_feature (B) LOCATION 1...183
  hypothetical: NO
  anti-sense: NO
atttgtttaaaacttaatcaggggggagtttatcaaaaaagggttggattgttaaaggtttctgtgatcacggcgtgttttaatagcgaaaaaaccattgaagacaccattctttccgtgcttaatcaaacttataaaaacattgaatacatcattatagatggggctagcgcgatagcactt

SEQ ID NO: 3283 - DNA (genomic), 531 bp, Helicobacter pylori; double-stranded, circular
  misc_feature (B) LOCATION 1...531
  hypothetical: NO
  anti-sense: NO
atgccaaagcctaagaaaaacaccctcccttgtagcctttctgtcaaaatgtcttatttcatgcgtcttctcattaaatggcgcacccgttctttaagccataagatgatgactctagttcaaattttaagtattttagccttagcgagcaaggccagtgaagatttagaagagcagctcaaaaaaatcaaagattacatttataaaaccctaaacgctaaaatcgcgtctgatgtgtatgaccgggtgcttattttagtgaatgaatattgcgctaatgaagaattgtttgataaagagagcgttaaaatctcagatttactcattcaagacattcagctttacgctttagtcgatgaaatgcttaaagaagacaaataccaagtccagcacaccattttaaagggcatcatcaagcgcaaatacgatgaagcctactcgctcaatagcgaagacaggattcttttagaataccaagaacgcttgctagagccctcatacgcgtctttttcaaataaaaaattcaaatga

SEQ ID NO: 3284 - DNA (genomic), 540 bp, Helicobacter pylori; double-stranded, circular
  misc_feature (B) LOCATION 1...540
  hypothetical: NO
  anti-sense: NO
aagaaaataagcatgccaaagcctaagaaaaacaccctcccttgtagcctttctgtcaaaatgtcttatttcatgcgtcttctcattaaatggcgcacccgttctttaagccataagatgatgactctagttcaaattttaagtattttagccttagcgagcaaggccagtgaagatttagaagagcagctcaaaaaaatcaaagattacatttataaaaccctaaacgctaaaatcgcgtctgatgtgtatgaccgggtgcttattttagtgaatgaatattgcgctaatgaagaattgtttgataaagagagcgttaaaatctcagatttactcattcaagacattcagctttacgctttagtcgatgaaatgcttaaagaagacaaataccaagtccagcacaccattttaaagggcatcatcaagcgcaaatacgatgaagcctactcgctcaatagcgaagacaggattcttttagaataccaagaacgcttgctagagccctcatacgcgtctttttcaaataaaaaattcaaa

SEQ ID NO: 3285 - DNA (genomic), 480 bp, Helicobacter pylori; double-stranded, circular
  misc_feature (B) LOCATION 1...480
  hypothetical: NO
  anti-sense: NO
aaagcagttttaatgctcattcatatttgctgctcagtggataatctttattttttaaaaaaggctaaagaggcttttgcgggtgaaaaaattgtagggtttttttataaccccaatatccacccttatagcgaatacttgttgcgtttagaagacgtgaaacgcacttgcgagatgctaggaattgaattgcttgagggcgattatgaattagaaaaatttttagataaagctaagggtaaggaattgttaggggaaaaaagcgaacgctgttttgagtgctttgacttgcgcttagaagcgagcgctctgaaggcctttgaattaggggaagaaaaattcaccaccaccttactcacaagccctaaaaagaccctaaccagctcatcgctaagggacaacacatcgcgcaaaggcacaatttggaatttgttgtgttcagaaacgataattttgaacattttaagagcgagttggatt

SEQ ID NO: 3286 - DNA (genomic), 747 bp, Helicobacter pylori; double-stranded, circular
  misc_feature (B) LOCATION 1...747
  hypothetical: NO
  anti-sense: NO
aaagaccctaaccagctcatcgctaagggacaacacatcgcgcaaaggcacaatttggaatttgttgtgttcagaaacgataattttgaacattttaagagcgagttggatttaaatttgcaagctttggcgagagaaaacgagctttataggcaaaattattgcggttgccaattcgctttaaaaatccaaaaagagtcccaaaacagaagcccctttgagctttattcgcccttaaaacgccagattttacccgcaagtattgaagaaaggacgcaagtttttagagaactagacgcagctaaaaaggacgctaataagccttttttagcccaaaaaacgatcgcaacttaccgcttattaaatgggggcgtgtggctttctaaaaattcaaaccccttggattgctgcattctagcgcgctctaaaagtaaggctaaagtgagaatcaacgatttaaggtgggttttttctcagcgtttaagcgcgctagtgggctatagccaaagagatgaaaccttgtttttaactttagaaggccttaatacccttatggcaaaaaactacgataatttaaaagagttaaaccttaaccccttaagttatgaagaagagttgtctttaagggcgttagtgagcgggagcgagagcattaatcctattatcgtgctagaagaacgcacagaaaaaaccctttttgtagaaattaaaagcatttttcaagaagaaaaggtgttttatttgctc

SEQ ID NO: 3287 - DNA (genomic), 1107 bp, Helicobacter pylori; double-stranded, circular
  misc_feature (B) LOCATION 1...1107
  hypothetical: NO
  anti-sense: NO
atgctcattcatatttgctgctcagtggataatctttattttttaaaaaaggctaaagaggcttttgcgggtgaaaaaattgtagggtttttttataaccccaatatccacccttatagcgaatacttgttgcgtttagaagacgtgaaacgcacttgcgagatgctaggaattgaattgcttgagggcgattatgaattagaaaaatttttagataaagctaagggtaaggaattgttaggggaaaaaagcgaacgctgttttgagtgctttgacttgcgcttagaagcgagcgctctgaaggcctttgaattaggggaagaaaaattcaccaccaccttactcacaagccctaaaaaagaccctaaccagctcatcgctaagggacaacacatcgcgcaaaggcacaatttggaatttgttgtgttcagaaacgataattttgaacattttaagagcgagttggatttaaatttgcaagctttggcgagagaaaacgagctttataggcaaaattattgcggttgccaattcgctttaaaaatccaaaaagagtcccaaaacagaagcccctttgagctttattcgcccttaaaacgccagattttacccgcaagtattgaagaaaggacgcaagtttttagagaactagacgcagctaaaaaggacgctaataagccttttttagcccaaaaaacgatcgcaacttaccgcttattaaatgggggcgtgtggctttctaaaaattcaaaccccttggattgctgcattctagcgcgctctaaaagtaaggctaaagtgagaatcaacgatttaaggtgggttttttctcagcgtttaagcgcgctagtgggctatagccaaagagatgaaaccttgtttttaactttagaaggccttaatacccttatggcaaaaaactacgataatttaaaagagttaaaccttaaccccttaagttatgaagaagagttgtctttaagggcgttagtgagcgggagcgagagcattaatcctattatcgtgctagaagaacgcacagaaaaaaccctttttgtagaaattaaaagcatttttcaagaagaaaaggtgttttatttgctctaa

SEQ ID NO: 3288 - DNA (genomic), 249 bp, Helicobacter pylori; double-stranded, circular
  misc_feature (B) LOCATION 1...249
  hypothetical: NO
  anti-sense: NO
atgaaaactttcaaaaaaggcgtaatcttagacgctaaaagcgtggggttgaaagcgttagaagttttaaaagaagtggcagattttgatttttatgaggttacttcgcccaatcaaatcgttgaacgctctattgaagctgaaatcatggtattgaataaagtcgttatcacccaagaggttttagccaattgcctaaactcaaactcatttgcatcaccgctacaggcacggataatgtggatataa

SEQ ID NO: 3289 - DNA (genomic), 282 bp, Helicobacter pylori; double-stranded, circular
  misc_feature (B) LOCATION 1...282
  hypothetical: NO
  anti-sense: NO
ttatataactttaaaattaaatctgggagtatagagatgaaaactttcaaaaaaggcgtaatcttagacgctaaaagcgtggggttgaaagcgttagaagttttaaaagaagtggcagattttgatttttatgaggttacttcgcccaatcaaatcgttgaacgctctattgaagctgaaatcatggtattgaataaagtcgttatcacccaagaggttttagccaattgcctaaactcaaactcatttgcatcaccgctacaggcacggataatgtggata

SEQ ID NO: 3290 - DNA (genomic), 618 bp, Helicobacter pylori; double-stranded, circular
  misc_feature (B) LOCATION 1...618
  hypothetical: NO
  anti-sense: NO
agtcgttatcacccaagaggttttagccaattgcctaaactcaaactcatttgcatcaccgctacaggcacggataatgtggatataaaaagcgcgaaagctttaggcatagaagtcaaaaacgtgagcgcttattctaccgaatctgtagcccagcacactttagcgtgcgcgttgtctttgttggggaggatcaatgattacgatcgttattgcaaaagcggggaatatagtcaaagcgatatttttacgcacattagcgatattaaaatggggcttattaaaggaggtcaatggggggttattggtttaggcaatatcggtaaaagagtcgccaagctcgctcaagctttcggggcaaaggtggtgtatttttcccctaaagataaaaaagaagaatacgagcgcttgagtttagaggaattgcttaaaacaagcggtattatcagcattcatgcccccttaaatgaaagcacgcgcgatttaatcgctctgaaagaattgcaaagcttaaaagatggggcgattttaatcaatgtggggcgtgggggcattgtgaatgaaaaggatttggctttaattttagaaaccaaagatttgtattacgcgagcgatgtg

SEQ ID NO: 3291 - DNA (genomic), 621 bp, Helicobacter pylori; double-stranded, circular
  misc_feature (B) LOCATION 1...621
  hypothetical: NO
  anti-sense: NO
agtcgttatcacccaagaggttttagccaattgcctaaactcaaactcatttgcatcaccgctacaggcacggataatgtggatataaaaagcgcgaaagctttaggcatagaagtcaaaaacgtgagcgcttattctaccgaatctgtagcccagcacactttagcgtgcgcgttgtctttgttggggaggatcaatgattacgatcgttattgcaaaagcggggaatatagtcaaagcgatatttttacgcacattagcgatattaaaatggggcttattaaaggaggtcaatggggggttattggtttaggcaatatcggtaaaagagtcgccaagctcgctcaagctttcggggcaaaggtggtgtatttttcccctaaagataaaaaagaagaatacgagcgcttgagtttagaggaattgcttaaaacaagcggtattatcagcattcatgcccccttaaatgaaagcacgcgcgatttaatcgctctgaaagaattgcaaagcttaaaagatggggcgattttaatcaatgtggggcgtgggggcattgtgaatgaaaaggatttggctttaattttagaaaccaaagatttgtattacgcgagcgatgtgttt

SEQ ID NO: 3292 - DNA (genomic), 753 bp, Helicobacter pylori; double-stranded, circular
  misc_feature (B) LOCATION 1...753
  hypothetical: NO
  anti-sense: NO
ttgcctaaactcaaactcatttgcatcaccgctacaggcacggataatgtggatataaaaagcgcgaaagctttaggcatagaagtcaaaaacgtgagcgcttattctaccgaatctgtagcccagcacactttagcgtgcgcgttgtctttgttggggaggatcaatgattacgatcgttattgcaaaagcggggaatatagtcaaagcgatatttttacgcacattagcgatattaaaatggggcttattaaaggaggtcaatggggggttattggtttaggcaatatcggtaaaagagtcgccaagctcgctcaagctttcggggcaaaggtggtgtatttttcccctaaagataaaaaagaagaatacgagcgcttgagtttagaggaattgcttaaaacaagcggtattatcagcattcatgcccccttaaatgaaagcacgcgcgatttaatcgctctgaaagaattgcaaagcttaaaagatggggcgattttaatcaatgtggggcgtgggggcattgtgaatgaaaaggatttggctttaattttagaaaccaaagatttgtattacgcgagcgatgtgtttgtgaaagagccttttgaaaaagatcatgcgtttttgaacccaaagatccaaaataaattgcttttaactccccatatcgcatgggcgtatagcgacagcttgaaaaccttagtagaaaaaaccaaagaaaatatccaggattttttagcttctcaaaaataa

SEQ ID NO: 3293 - DNA (genomic), 945 bp, Helicobacter pylori; double-stranded, circular
  misc_feature (B) LOCATION 1...945
  hypothetical: NO
  anti-sense: NO
atgaaaactttcaaaaaaggcgtaatcttagacgctaaaagcgtggggttgaaagcgttagaagttttaaaagaagtggcagattttgatttttatgaggttacttcgcccaatcaaatcgttgaacgctctattgaagctgaaatcatggtattgaataaagtcgttatcacccaagaggttttaagccaattgcctaaactcaaactcatttgcatcaccgctacaggcacggataatgtggatataaaaagcgcgaaagctttaggcatagaagtcaaaaacgtgagcgcttattctaccgaatctgtagcccagcacactttagcgtgcgcgttgtctttgttggggaggatcaatgattacgatcgttattgcaaaagcggggaatatagtcaaagcgatatttttacgcacattagcgatattaaaatggggcttattaaaggaggtcaatggggggttattggtttaggcaatatcggtaaaagagtcgccaagctcgctcaagctttcggggcaaaggtggtgtatttttcccctaaagataaaaaagaagaatacgagcgcttgagtttagaggaattgcttaaaacaagcggtattatcagcattcatgcccccttaaatgaaagcacgcgcgatttaatcgctctgaaagaattgcaaagcttaaaagatggggcgattttaatcaatgtggggcgtgggggcattgtgaatgaaaaggatttggctttaattttagaaaccaaagatttgtattacgcgagcgatgtgtttgtgaaagagccttttgaaaaagatcatgcgtttttgaacccaaagatccaaaataaattgcttttaactccccatatcgcatgggcgtatagcgacagcttgaaaaccttagtagaaaaaaccaaagaaaatatccaggattttttagcttctcaaaaataa

SEQ ID NO: 3294 - DNA (genomic), 357 bp, Helicobacter pylori; double-stranded, circular
  misc_feature (B) LOCATION 1...357
  hypothetical: NO
  anti-sense: NO
ttgtatttagtgagtaatgcaaataactatatatttgattatttacttttaagggggcgaaatttcaaatctctaaggagccatgcaaaatttttaaaaataccgcttttagaacctaacaaactaaaaaacataaaactctcattctataacgatgagccttggattgagtttggtaaaaaagaacaagctagagctaaagcacactatcaagctatgctagaaaaagaaaaagctaaagaattagccaaacaacaagctaacaccttgcactctaatgagcttgatgatgaccctaaagctcatgctggattaaaacaaaatggcaacacaaactctaaagggcgtaatagataa

SEQ ID NO: 3295 - DNA (genomic), 363 bp, Helicobacter pylori; double-stranded, circular
  misc_feature (B) LOCATION 1...363
  hypothetical: NO
  anti-sense: NO
attcaatttttgtatttagtgagtaatgcaaataactatatatttgattatttacttttaagggggcgaaatttcaaatctctaaggagccatgcaaaatttttaaaaataccgcttttagaacctaacaaactaaaaaacataaaactctcattctataacgatgagccttggattgagtttggtaaaaaagaacaagctagagctaaagcacactatcaagctatgctagaaaaagaaaaagctaaagaattagccaaacaacaagctaacaccttgcactctaatgagcttgatgatgaccctaaagctcatgctggattaaaacaaaatggcaacacaaactctaaagggcgtaataga

SEQ ID NO: 3296 - DNA (genomic), 210 bp, Helicobacter pylori; double-stranded, circular
  misc_feature (B) LOCATION 1...210
  hypothetical: NO
  anti-sense: NO
atgatccttaccgcaatgcaagacgccataggccgcactcccatttttaaattcaccagaaaggattaccccattcccttaaagtccgccatttacgccaaactagagcatctaaacccgggagggagcgttaaagaccgcttaggccaatacctcataaaagaagcgtttagaacgcgcaaaatcacttccacaacgaccatcagtgac

SEQ ID NO: 3297 - DNA (genomic), 261 bp, Helicobacter pylori; double-stranded, circular
  misc_feature (B) LOCATION 1...261
  hypothetical: NO
  anti-sense: NO
gttatcgttatctttataatggaagaaataatgatccttaccgcaatgcaagacgccataggccgcactcccatttttaaattcaccagaaaggattaccccattcccttaaagtccgccatttacgccaaactagagcatctaaacccgggagggagcgttaaagaccgcttaggccaatacctcataaagaagcgtttagaacgcgcaaaatcacttccacaacgaccatcagtgaccctacagcaggcgataccggca

SEQ ID NO: 3298 - DNA (genomic), 558 bp, Helicobacter pylori; double-stranded, circular
  misc_feature (B) LOCATION 1...558
  hypothetical: NO
  anti-sense: NO
atgatccttaccgcaatgcaagacgccataggccgcactcccatttttaaattcaccagaaaggattaccccattcccttaaagtccgccatttacgccaaactagagcatctaaacccgggagggagcgttaaagaccgcttaggccaatacctcataaaagaagcgtttagaacgcgcaaaatcacttccacaacgaccatcattgagcctacagcaggcaataccggcatcgctctagccttagtggcaatcaagcaccatctcaaaaccatctttgttgtcccgaaaaaattcagcacagaaaaacagcaaatcatgagagctttgggggctttagtgatcaacacgcctactagtgaggggatttctggcgccattaaaaaaagtaaagaattagccgaaagtatccctgatagctatttgcccttgcaatttgaaaaccctgataatcccgcagcctactaccacaccctagcccctgagattgtccaagaattaggtacaaaccttacgagctttgtagccgggatagggagtggtggcacttttgcaggc

SEQ ID NO: 3299 - DNA (genomic), 297 bp, Helicobacter pylori; double-stranded, circular
  misc_feature (B) LOCATION 1...297
  hypothetical: NO
  anti-sense: NO
atgaccatcaacacccattacacccctaatttcacgcagctccaaaccttaaacaatatcaataatgacgcaaccataaaggacaggaatcaagcagagcaggatttacaacaaagcagtattcaagatggtttcagccaagataatacgcaaaacgcccctgattttgaccgactacaagctttaaacgctatcaataacgacggcgagattaaagataaatcccaagttgagaaaagccttgttgatggcgaaaatacccctgaaatttattccagcctagacacatacgcttaa

SEQ ID NO: 3300 - DNA (genomic), 297 bp, Helicobacter pylori; double-stranded, circular
  misc_feature (B) LOCATION 1...297
  hypothetical: NO
  anti-sense: NO
aacatgaccatcaacacccattacacccctaatttcacgcagctccaaaccttaaacaatatcaataatgacgcaaccataaaggacaggaatcaagcagagcaggatttacaacaaagcagtattcaagatggtttcagccaagataatacgcaaaacgcccctgattttgaccgactacaagctttaaacgctatcaataacgacggcgagattaaagataaatcccaagttgagaaaagccttgttgatggcgaaaatacccctgaaatttattccagcctagacacatacgct

SEQ ID NO: 3301 - DNA (genomic), 234 bp, Helicobacter pylori; double-stranded, circular
  misc_feature (B) LOCATION 1...234
  hypothetical: NO
  anti-sense: NO
taccttttattaaaaaaacttgttatcatgctaaacatgaacacacacacaagaggcattgacagcgggctgatccattcgctccaaagcatttcattatccatgtttagaaagggtttttttgggctttatcaaggctccatttcggcgcgcattggcgctaatcaatttgtgatcaataaaagaaacgctgtttttgatcaattgaatgaaaacaccttactggtcttgaca

SEQ ID NO: 3302 - DNA (genomic), 432 bp, Helicobacter pylori; double-stranded, circular
  misc_feature (B) LOCATION 1...432
  hypothetical: NO
  anti-sense: NO
catgacaagatagattaccgttggaaagaagcgagcctggattcgcccattcatgcgagcgtgtatcgggagtttttggacgctaaattcatcgcttacgcgcgccctccttatagcctagcgtattctttgcgccataaccgattgctccctagggattatttagggtatcgttctttgggcgaagaaatcgccatttttaaccccaaagactatgacagctggcaagaaagagcggatacagaaattttacgccaattgcaagagagcaaaaaatattttgttttcattaaggggtgcgggatttttgcctaccacagagagctttctaaactcatggaagtttttgatttgattgaaaactcatgcaaggttttacgattgggcgatttaatggattattgctataatgatgatccacgattgagcgtg

SEQ ID NO: 3303 - DNA (genomic), 639 bp, Helicobacter pylori; double-stranded, circular
  misc_feature (B) LOCATION 1...639
  hypothetical: NO
  anti-sense: NO
atgctaaacatgaacacacacacaagaggcattgacagcgggctgatccattcgctccaaagcatttcattatccatgtttagaaagggtttttttgggctttatcaaggctccatttcggcgcgcattggcgctaatcaatttgtgatcaataaaagaaacgctgtttttgatcaattgaatgaaaacaccttactggtcttgcatgacaagatagattaccgttggaaagaagcgagcctggattcgcccattcatgcgagcgtgtatcgggagtttttggacgctaaattcatcgcttacgcgcgccctccttatagcctagcgtattctttgcgccataaccgattgctccctagggattatttagggtatcgttctttgggcgaagaaatcgccatttttaaccccaaagactatgacagctggcaagaaagagcggatacagaaattttacgccaattgcaagagagcaaaaaatattttgttttcattaaggggtgcgggatttttgcctaccacagagagctttctaaactcatggaagtttttgatttgattgaaaactcatgcaaggttttacgattgggcgatttaatggattattgctataatgatgatccacgattgagcgtgtaa

SEQ ID NO: 3304 - DNA (genomic), 576 bp, Helicobacter pylori; double-stranded, circular
  misc_feature (B) LOCATION 1...576
  hypothetical: NO
  anti-sense: NO
aaaggggatttcatgaaagaacaagaatgggatttaagcgctttatttgaaaataaagaaagcgcagaagaatttttaaaaaccttacaaacagaagtgcaagaatttgagaacgcttatcaaaataaccttaagaatttagacgctgcaaaatttgccaacactcttaaacattacgaaaatttgtcagaaaagatctctagagcgatggcttacgctcaattactttttgccaagaacactaaagaagcgaagttttattcgcaatgcgaaatggcttgtgcaaatatccaacaacaccttttattctttgaaattgaatttaagaatttggacgccaaaaaacagctcgctttcattaaaaaatgcaaagatcatgctttttatttaaacaatctcatagaaaagaaaaagcacaccctaaatttagatgaagaaaagatcgctctagccctttcgcctgtgggagtgggtgcgtttagctttgttatggatgaacatttgttttctttgaacatctctttacatagaataaactttaagcgaagaataaattttagccctcttgcacaaccc

SEQ ID NO: 3305 - DNA (genomic), 1194 bp, Helicobacter pylori; double-stranded, circular
  misc_feature (B) LOCATION 1...1194
  hypothetical: NO
  anti-sense: NO
attttagccctcttgcacaaccctaaacgcaagatccgtaaaaaatctcaaaaagctttcagcaaatcgttagaaaaatcccgccctttactcacttatattttaaacatggtgcgtaaagacttgctcattgaaaccaagctgagaaaatacgacaaaaaagagagtttccgccacattgataaccagatctcgcaagagagcgtggatagcatgatagagatcgtgaacgctaacttttctttagtgcatcgttactaccatcaaaaagcgcaaatcttagggcataaactcaaagattacgatcgctacgcccctttaaacgatgagagcatcaccatgacttactctcaagctttagaagaagtgcttaaaacccttaaagcctttagccctgaatttcataaaatcgcttctaaagcgatcaaagaaggctgggtggattcacaccccaaagactttaagcaaggcggggcttttagccatggtgcggtgcctagcgctcacccttatgtgctgttaaactacacaggaaaccgccgagacgctttcactatcgctcatgaatttgggcatatgatccaccaagaattgtccaaaaagcaaggcgtattgaacatggatacgcccttaaccaccgcagaaaccgcttctgtcttttctgaaatgctgttttttgagcatttgaaaaaaggtttgaaatctgatgagcttcttttcatgctggcaggcaaattagaggatattttttctacgctttttaggcaagtggtgatgacgaattttgaaagaagaatccacgaaatggatgaagaattagacaccaaagattttgatcaaatctggtttgaagaaaaccaaagaatgtttgaaaagagcgtgaaactcactaaaaactaccatttgtggtggagctatatcccccattttatccattcgcctttttattgctacgcttatagttacgggcagcttttgactttagcgctttatgggctttataaaaaaagcgacgctaaagaatttgttaaaacttacacggaatttttgagcttaggagggtcaaaaagccctaaagaattagtgtccatgtttggctttgatattgatagcaaagaattttgggaaattggcatgcaagaggtgcgtcatttgttagaagaatttgaaaggttactcgcatgcaaagagaat

SEQ ID NO: 3306 - DNA (genomic), 1737 bp, Helicobacter pylori; double-stranded, circular
  misc_feature (B) LOCATION 1...1737
  hypothetical: NO
  anti-sense: NO
atgaaagaacaagaatgggatttaagcgctttatttgaaaataaagaaagcgcagaagaatttttaaaaaccttacaaacagaagtgcaagaatttgagaacgcttatcaaaataaccttaagaatttagacgctgcaaaatttgccaacactcttaaacattacgaaaatttgtcagaaaagatctctagagcgatggcttacgctcaattactttttgccaagaacactaaagaagcgaagttttattcgcaatgcgaaatggcttgtgcaaatatccaacaacaccttttattctttgaaattgaatttaagaatttggacgccaaaaaacagctcgctttcattaaaaaatgcaaagatcatgctttttatttaaacaatctcatagaaaagaaaaagcacaccctaaatttagatgaagaaaagatcgctctagccctttcgcctgtgggagtgggcgcgtttagccgtctttttgatgaacatttttcttctttgaaaatcccttttgaagaaaaaactttaagcgaagaagaaattttagccctcttgcacaaccctaaacgcaagatccgtaaaaaatctcaaaaagctttcagcaaatcgttagaaaaatcccgccctttactcacttatattttaaacatggtgcgtaaagacttgctcattgaaaccaagctgagaaaatacgacaaaaaagagagtttccgccacattgataaccagatctcgcaagagagcgtggatagcatgatagagatcgtgaacgctaacttttctttagtgcatcgttactaccatcaaaaagcgcaaatcttagggcataaactcaaagattacgatcgctacgcccctttaaacgatgagagcatcaccatgacttactctcaagctttagaagaagtgcttaaaacccttaaagcctttagccctgaatttcataaaatcgcttctaaagcgatcaaagaaggctgggtggattcacaccccaaagactttaagcaaggcggggcttttagccatggtgcggtgcctagcgctcacccttatgtgctgttaaactacacaggaaaccgccgagacgctttcactatcgctcatgaatttgggcatatgatccaccaagaattgtccaaaaagcaaggcgtattgaacatggatacgcccttaaccaccgcagaaaccgcttctgtcttttctgaaatgctgttttttgagcatttgaaaaaaggtttgaaatctgatgagcttcttttcatgctggcaggcaaattagaggatattttttctacgctttttaggcaagtggtgatgacgaattttgaaagaagaatccacgaaatggatgaagaattagacaccaaagattttgatcaaatctggtttgaagaaaaccaaagaatgtttgaaaagagcgtgaaactcactaaaaactaccatttgtggtggagctatatcccccattttatccattcgcctttttattgctacgcttatagttacgggcagcttttgactttagcgctttatgggctttataaaaaaagcgacgctaaagaatttgttaaaacttacacggaatttttgagcttaggagggtcaaaaagccctaaagaattagtgtccatgtttggctttgatattgatagcaaagaattttgggaaattggcatgcaagaggtgcgtcatttgttagaagaatttgaaaggttactcgcatgcaaagagaattaa

SEQ ID NO: 3307 - DNA (genomic), 438 bp, Helicobacter pylori; double-stranded, circular
  misc_feature (B) LOCATION 1...438
  hypothetical: NO
  anti-sense: NO
ttgagtgagtggcaaacattttgtttaaaagatttagggaaaatagtcggcggcgctaccccacctaccaataaccccaaaaattatggcaataaaattgcttggattacccctaaagatttatccactttacaagggcgctacattaaaaaaggcagccgcagcatttcacgattagggtttaaatcatgctcttgtgtgttgctcccaaagcatgccattttattttcttcaagagctcccataggttatgtggcaattgctgaaaaaaggctatgcaccaatcaaggttttaaaagtattatccctaacaaaaaaatttattttgaatttttatattacttattaaaatactataaggataacatttccaacatagggggcggaactacttttaaagaagtttcaggggctactttaggktctattccaagttaa

SEQ ID NO: 3308 - DNA (genomic), 1230 bp, Helicobacter pylori; double-stranded, circular
  misc_feature (B) LOCATION 1...1230
  hypothetical: NO
  anti-sense: NO
ttgagtgagtggcaaacattttgtttaaaagatttagggaaaatagtcggcggcgctaccccacctaccaataaccccaaaaattatggcaataaaattgcttggattacccctaaagatttatccactttacaagggcgctacattaaaaaaggcagccgcagcatttcacgattagggtttaaatcatgctcttgtgtgttgctcccaaagcatgccattttattttcttcaagagctcccataggttatgtggcaattgctgaaaaaaggctatgcaccaatcaaggttttaaaagtattatccctaacaaaaaaatttattttgaatttttatattacttattaaaatactataaggataacatttccaacatagggggcggaactacttttaaagaagtttcaggggctactttaggtctattccaagttaagataccccccacttattacgaacaacaaaaaatcgcccacacactttctattttagatcaaaaaatagagaacaaccataaaatcaatgagcttttacacaaaatcttagagcttctttatgagcaatacttcgtccgttttgattttttagatgaaaacaacaaaccctatcaaactagcggcgggaaaatgaaattttctaaagaattaaaccgccttatccctaacgattttaaagtcaaaacgctaggggaactaataacttggatttccggaagtcagccacccaaaagttgtcacatatacgagtataaagagggttacattcgtttcatacaaaacagagattatagctctaataattatgttacatatattcctatatcaaaaaataacaagatttgttatcaatatgatattatgatggacaaatacggagaagctggatccgtgcgttttggacttcaaggggcttataatgttgccttaagtaaaattagcgtattaaatcaatccatgcaggaatatatacgcagttatctaaattcaaaacctataaaaaaatatctttctaatgcttgcatggcatctacgagagcatcactaaatgaaaatcatatttattctttaatgctccccataccacctattaatctattacaaaaatacgaaaaaatcgcaaaaaatatcataacagccattattaaaaacaatcaatcaacccaaaccctaaccgcgctcagagactttctactccccctactcttaaaacaacaagtcaaaccacaatga

SEQ ID NO: 3309 - DNA (genomic), 1239 bp, Helicobacter pylori; double-stranded, circular
  misc_feature (B) LOCATION 1...1239
  hypothetical: NO
  anti-sense: NO
aaggggttaggtttgagtgagtggcaaacattttgtttaaaagatttagggaaaatagtcggcggcgctaccccacctaccaataaccccaaaaattatggcaataaaattgcttggattacccctaaagatttatccactttacaagggcgctacattaaaaaaggcagccgcagcatttcacgattagggtttaaatcatgctcttgtgtgttgctcccaaagcatgccattttattttcttcaagagctcccataggttatgtggcaattgctgaaaaaaggctatgcaccaatcaaggttttaaaagtattatccctaacaaaaaaatttattttgaatttttatattacttattaaaatactataaggataacatttccaacatagggggcggaactacttttaaagaagtttcaggggctactttaggtctattccaagttaagataccccccacttattacgaacaacaaaaaatcgcccacacactttctattttagatcaaaaaatagagaacaaccataaaatcaatgagcttttacacaaaatcttagagcttctttatgagcaatacttcgtccgttttgattttttagatgaaaacaacaaaccctatcaaactagcggcgggaaaatgaaattttctaaagaattaaaccgccttatccctaacgattttaaagtcaaaacgctaggggaactaataacttggatttccggaagtcagccacccaaaagttgtcacatatacgagtataaagagggttacattcgtttcatacaaaacagagattatagctctaataattatgttacatatattcctatatcaaaaaataacaagatttgttatcaatatgatattatgatggacaaatacggagaagctggatccgtgcgttttggacttcaaggggcttataatgttgccttaagtaaaattagcgtattaaatcaatccatgcaggaatatatacgcagttatctaaattcaaaacctataaaaaaatatctttctaatgcttgcatggcatctacgagagcatcactaaatgaaaatcatatttattctttaatgctccccataccacctattaatctattacaaaaatacgaaaaaatcgcaaaaaatatcataacagccattattaaaaacaatcaatcaacccaaaccctaaccgcgctcagagactttctactccccctactcttaaaacaacaagtcaaaccacaa

SEQ ID NO: 3310 - DNA (genomic), 321 bp, Helicobacter pylori; double-stranded, circular
  misc_feature (B) LOCATION 1...321
  hypothetical: NO
  anti-sense: NO
atggaaatcattttattaattgttgcggcggttgtgttgttttatttttacaacaccctcaaagaatatttgaaaaaccccctaaaccctaaaaccaaaaccgaagaatacgacttgaaaaatgacccctatttgctggtgcaatctagccccctagacaaattcaagcaaacccaaataggcgcgtatatgcgtcttttaaaatttttagacattcaaaaaaacgccttggataacgctttaagaacgctttttatccatgaattggagcagcccttaaacagcgaacagcaaaatttaggccaaagagcttctcaatga

SEQ ID NO: 3311 - DNA (genomic), 327 bp, Helicobacter pylori; double-stranded, circular
  misc_feature (B) LOCATION 1...327
  hypothetical: NO
  anti-sense: NO
aggaaaaaaatggaaatcattttattaattgttgcggcggttgtgttgttttatttttacaacaccctcaaagaatatttgaaaaaccccctaaaccctaaaaccaaaaccgaagaatacgacttgaaaaatgacccctatttgctggtgcaatctagccccctagacaaattcaagcaaacccaaataggcgcgtatatgcgtcttttaaaatttttagacattcaaaaaaacgccttggataacgctttaagaacgctttttatccatgaattggagcagcccttaaacagcgaacagcaaaatttaggccaaagagcttctcaa

SEQ ID NO: 3312 - DNA (genomic), 444 bp, Helicobacter pylori; double-stranded, circular
  misc_feature (B) LOCATION 1...444
  hypothetical: NO
  anti-sense: NO
gtggataaaaaagaaaattttgaatccttatgccaagaaatcgccgaccacacgcatggagaatacaccaaacgcctgaaattagtggaatttcttatgctattagcctatgctgatgggattttggacagcaaagaaaaagaattgtttttagatgtgggggcgtttttgcagatagacaatcaagattttaacgagctttatgacaattttgaacacttcaattcaatagaaatccctatgtctttagaagaagcaaaaaatctttttgaaatccaaacccacaccaccatgcaagatttagaaaaaaaagctttggatttaagcgccccctattaccataaaatgaatgacaacaaacgctacagcgaacaagattttatctctttgaaaaaaatcgccctcgcttcccaacttttagaaaatgatttaaaagactcatag

SEQ ID NO: 3313 - DNA (genomic), 465 bp, Helicobacter pylori; double-stranded, circular
  misc_feature (B) LOCATION 1...465
  hypothetical: NO
  anti-sense: NO
gccaaagagcttctcaatgagcctgtggataaaaaagaaaattttgaatccttatgccaagaaatcgccgaccacacgcatggagaatacaccaaacgcctgaaattagtggaatttcttatgctattagcctatgctgatgggattttggacagcaaagaaaaagaattgtttttagatgtgggggcgtttttgcagatagacaatcaagattttaacgagctttatgacaattttgaacacttcaattcaatagaaatccctatgtctttagaagaagcaaaaaatctttttgaaatccaaacccacaccaccatgcaagatttagaaaaaaaagctttggatttaagcgccccctattaccataaaatgaatgacaacaaacgctacagcgaacaagattttatctctttgaaaaaaatcgccctcgcttcccaacttttagaaaatgatttaaaagactca

SEQ ID NO: 3314 - DNA (genomic), 768 bp, Helicobacter pylori; double-stranded, circular
  misc_feature (B) LOCATION 1...768
  hypothetical: NO
  anti-sense: NO
atggaaatcattttattaattgttgcggcggttgtgttgttttatttttacaacaccctcaaagaatatttgaaaaaccccctaaaccctaaaaccaaaaccgaagaatacgacttgaaaaatgacccctatttgctggtgcaatctagccccctagacaaattcaagcaaacccaaataggcgcgtatatgcgtcttttaaaatttttagacattcaaaaaaacgccttggataacgctttaagaacgctttttatccatgaattggagcagcccttaaacagcgaacagcaaaatttagccaaagagcttctcaatgagcctgtggataaaaaagaaaattttgaatccttatgccaagaaatcgccgaccacacgcatggagaatacaccaaacgcctgaaattagtggaatttcttatgctattagcctatgctgatgggattttggacagcaaagaaaaagaattgtttttagatgtgggggcgtttttgcagatagacaatcaagattttaacgagctttatgacaattttgaacacttcaattcaatagaaatccctatgtctttagaagaagcaaaaaatctttttgaaatccaaacccacaccaccatgcaagatttagaaaaaaaagctttggatttaagcgccccctattaccataaaatgaatgacaacaaacgctacagcgaacaagattttatctctttgaaaaaaatcgccctcgcttcccaacttttagaaaatgatttaaaagactcatag

SEQ ID NO: 3315 - DNA (genomic), 765 bp, Helicobacter pylori; double-stranded, circular
  misc_feature (B) LOCATION 1...765
  hypothetical: NO
  anti-sense: NO
atggaaatcattttattaattgttgcggcggttgtgttgttttatttttacaacaccctcaaagaatatttgaaaaaccccctaaaccctaaaaccaaaaccgaagaatacgacttgaaaaatgacccctatttgctggtgcaatctagccccctagacaaattcaagcaaacccaaataggcgcgtatatgcgtcttttaaaatttttagacattcaaaaaaacgccttggataacgctttaagaacgctttttatccatgaattggagcagcccttaaacagcgaacagcaaaatttagccaaagagcttctcaatgagccsgtggataaaaaagaaaattttgaatccttatgccaagaaatcgccgaccacacgcatggagaatacaccaaacgcctgaaattagtggaatttcttatgctattagcctatgctgatgggattttggacagcaaagaaaaagaattgtttttagatgtgggggcgtttttgcagatagacaatcaagattttaacgagctttatgacaattttgaacacttcaattcaatagaaatccctatgtctttagaagaagcaaaaaatctttttgaaatccaaacccacaccaccatgcaagatttagaaaaaaaagctttggatttaagcgccccctattaccataaaatgaatgacaacaaacgctacagcgaacaagattttatctctttgaaaaaaatcgccctcgcttcccaacttttagaaaatgatttaaaagactca

SEQ ID NO: 3316 - DNA (genomic), 306 bp, Helicobacter pylori; double-stranded, circular
  misc_feature (B) LOCATION 1...306
  hypothetical: NO
  anti-sense: NO
tttaaaggatttttattgaatcgtttctttaaccgagagctttcatggttagcttttaacacaagggttttgaacgaagccaaagatgagagcttgcctttattagagcgcttgaaatttttagccatttatgacacgaatttagacgaattttacatgataagagtggccgggcttaaacaactctatgagcataaaatcgcctctaaaggcattgatggcgcaagccctgaagagcaactagaaaaaatcaagcattatttagcgcatgaaattgaagaaagggaattagaatttcaaaaaatc

SEQ ID NO: 3317 - DNA (genomic), 339 bp, Helicobacter pylori; double-stranded, circular
  misc_feature (B) LOCATION 1...339
  hypothetical: NO
  anti-sense: NO
agcaatctgcactgggcaaaggctttagaaggggcgggcgcgttagtcgtttatggcgttttcaaactcaaagtgcatgctaaaatgctcgtgatcactaaaaaaacggacaaccagttacgccatttcacccatttaagcacgggcaattacaaccctttgagcgctaaaatctataccgatgtgagtttttttagcgctaaaaatgaaatcgctaacgacattatcaagcttttccattccttgctgacaagcagcgccactagcaacacattagaaacgctttcatggcgcccaaacagatcaagcctaaaatcattgaactcattcaaaatgaaa

SEQ ID NO: 3318 - DNA (genomic), 336 bp, Helicobacter pylori; double-stranded, circular
  misc_feature (B) LOCATION 1...336
  hypothetical: NO
  anti-sense: NO
aatctgcactgggcaaaggctttagaaggggcgggcgcgttagtcgtttatggcgttttcaaactcaaagtgcatgctaaaatgctcgtgatcactaaaaaaacggacaaccagttacgccatttcacccatttaagcacgggcaattacaaccctttgagcgctaaaatctataccgatgtgagtttttttagcgctaaaaatgaaatcgctaacgacattatcaagcttttccattccttgctgacaagcagcgccactagcaacacattagaaacgctttcatggcgcccaaacagatcaagcctaaaatcattgaactcattcaaaatgaaa

SEQ ID NO: 3319 - DNA (genomic), 357 bp, Helicobacter pylori; double-stranded, circular
  misc_feature (B) LOCATION 1...357
  hypothetical: NO
  anti-sense: NO
aaagggctttgcatcaccccctataatgaattgaatttgagcaaaaagcgaaggctaaaacctcttttaaaagagcagctttatgcgttagttttgccttttaagttgaattcttcgcacaccttcccgcctttagcgaatctgactttcgcgctttttgcccacatcaaagacaaagaaactcaaagcgcctcctatgcgctcatcaaactcccctcttttatcttccgttttgtggagctagaaaaaggcttgtttgcactggctgaagaaattgtagaagcgcatttagaagaattgttgttagagcatgaggattttagattgcatggcttttacggtaacttgcgatgcgga

SEQ ID NO: 3320 - DNA (genomic), 417 bp, Helicobacter pylori; double-stranded, circular
  misc_feature (B) LOCATION 1...417
  hypothetical: NO
  anti-sense: NO
aaacggaatcaaggcgaaatcgtgcgcttgcaaacccaaaaagggagtcaagagcttttaaaaacccttttagcgtctttaaggagttttcaaacccactcttacaaaaagcacaaactcaccggcatgcatatctataaaagcgcgatcatgctcaatttaggggatttgtgggaattggtcaatcatagcgattttaaagcgctcaaatcgcccaatttcacgcctaaaatccaccctcatttcaatgaaaacgatcttttcaaattcatagaaaaacaagatctggtgctgttccacccttatgaaagttttgagcctgtgatcgatttaatagagcaagccgctagtgatccgaccaccctttctatcaaaatgacgctttatcgtgtgggcaagcatcccccattgtcaaag

SEQ ID NO: 3321 - DNA (genomic), 690 bp, Helicobacter pylori; double-stranded, circular
  misc_feature (B) LOCATION 1...690
  hypothetical: NO
  anti-sense: NO
ttgaatcgtttctttaaccgagagctttcatggttagcttttaacacaagggttttgaacgaagccaaagatgagagcttgcctttattagagcgcttgaaatttttagccatttatgacacgaatttagacgaattttacatgataagagtggccgggcttaaacaactctatgagcataaaatcgcctctaaaggcattgatggcgcaagccctgaagagcaactagaaaaaatcaagcattatttagcgcatgaaattgaagaaagggaattagaatttcaaaaaatccaagccctactctttaaaaaagggctttgcatcaccccctataatgaattgaatttagagcaaaaagcgaaggctaaaacctattttaaagagcagctttatgcgttagttttgccttttaagttgaattcttcgcacaccttcccgcctttagcgaatctgactttcgcgctttttgcccacatcaaagacaaagaaactcaaagcgcctcctatgcgctcatcaaactcccctcttttatcttccgttttgtggagctagaaaaaggcttgtttgcactggctgaagaaattgtagaagcgcatttagaagaattgtttttagagcatgagattttagattgcatggcgtttagcggtaacttgcgatgcgatattgctatcactgaagatgaagcg

SEQ ID NO: 3322 - DNA (genomic), 2007 bp, Helicobacter pylori; double-stranded, circular
  misc_feature (B) LOCATION 1...2007
  hypothetical: NO
  anti-sense: NO
atgctttcatggttagcttttaacacaagggttttgaacgaagccaaagatgagagcttgcctttattagagcgcttgaaatttttagccatttatgacacgaatttagacgaattttacatgataagagtggccgggcttaaacaactctatgagcataaaatcgcctctaaaggcattgatggcgcaagccctgaagagcaactagaaaaaatcaagcattatttagcgcatgaaattgaagaaagggaattagaatttcaaaaaatccaagccctactctttaaaaaagggctttgcatcaccccctataatgaattgaatttagagcaaaaagcgaaggctaaaacctattttaaagagcagctttatgcgttagttttgccttttaagttggattcttcgcacaccttcccgcctttagcgaatctgactttcgcgctttttgcccacatcaaagacaaagaaactcaaagcgcctcctatgcgctcatcaaactcccctcttttatcttccgttttgtggagctagaaaaaggcttgtttgcactggctgaagaaattgtagaagcgcatttagaagaattgtttttagagcatgagattttagattgcatggcgtttagggtaacttgcgatgcggatattgctatcactgaagatgaagcgcatgattatgcggatttgatgagtaagagtttgaggaaacggaatcaaggcgaaatcgtgcgcttgcaaacccaaaaagggagtcaagagcttttaaaaacccttttagcgtctttaaggagttttcaaacccactcttacaaaaagcacaaactcaccggcatgcatatctataaaagcgcgatcatgctcaatttaggggatttgtgggaattggtcaatcatagcgattttaaagcgctcaaatcgcccaatttcacgcctaaaatccaccctcatttcaatgaaaacgatcttttcaaatccatagaaaaacaagatctgttgctgttccacccttatgaaagttttgagcctgtgatcgatttaatagagcaagccgctagtgatccgaccaccctttctatcaaaatgacgctttatcgtgtgggcaagcattcccccattgtcaaagccttgattgaagcggcgagcaagattcaagtgagcgttttagtggaattaaaagcgcgttttgatgaagaaagcaatctgcactgggcaaaagctttagaaagggcgggcgcgttagtcgtttatggcgttttcaaactcaaagtgcatgctaaaatgctcgtgatcactaaaaaaacggacaaccagttacgccatttcacccatttaagcacgggcaattacaaccctttgagcgctaaaatctataccgatgtgagtttttttagcgctaaaaatgaaatcgctaacgacattatcaagcttttccattccttgctgacaagcagtgccactagcaacacattagaaacgcttttcatggcgcccaaacagatcaagcctaaaatcattgaactcattcaaaatgaaatgaatcacaaacaagaaggttatatcattttaaaagccaacgccctagtggatagcgaaatcattgaatggctctatcaagcctctcaaaaaggggttaaaattgatctcattatcagggggatttgttgtttaaagccccaagtcaagggcttgagcgaaaatatcagggtgtattctatcgtggggaaatatttagaacatgcacgcatttattattttaaacatgaaaatatttatttttctagcgcggatttaatgcctaggaatttagaaaggcgcgtggaattgctcattcccgccacaaacccaaagatcgccaataaattgttgcatattttagaaatccaactcaaagacaccttaaaacgctacgagttaaattctaaaggccgttacgctaaaatttcaaaccctaacgatcctttaaattcacaggattattttgaaaaacaagcccttaaaaccctttaa

SEQ ID NO: 3323 - DNA (genomic), 2028 bp, Helicobacter pylori; double-stranded, circular
  misc_feature (B) LOCATION 1...2028
  hypothetical: NO
  anti-sense: NO
ttgaatcgtttctttaaccgagagctttcatggttagcttttaacacaagggttttgaacgaagccaaagatgagagcttgcctttattagagcgcttgaaatttttagccatttatgacacgaatttagacgaattttacatgataagagtggccgggcttaaacaactctatgagcataaaatcgcctctaaaggcattgatggcgcaagccctgaagagcaactagaaaaaatcaagcattatttagcgcatgaaattgaagaaagggaattagaatttcaaaaaatccaagccctactctttaaaaaagggctttgcatcaccccctataatgaattgaatttagagcaaaaagcgaaggctaaaacctattttaaagagcagctttatgcgttagttttgccttttaagttggattcttcgcacaccttcccgcctttagcgaatctgactttcgcgctttttgcccacatcaaagacaaagaaactcaaagcgcctcctatgcgctcatcaaactcccctcttttatcttccgttttgtggagctagaaaaaggcttgtttgcactggctgaagaaattgtagaagcgcatttagaagaattgtttttagagcatgagattttagattgcatggcgtttagggtaacttgcgatgcggatattgctatcactgaagatgaagcgcatgattatgcggatttgatgagtaagagtttgaggaaacggaatcaaggcgaaatcgtgcgcttgcaaacccaaaaagggagtcaagagcttttaaaaacccttttagcgtctttaaggagttttcaaacccactcttacaaaaagcacaaactcaccggcatgcatatctataaaagcgcgatcatgctcaatttaggggatttgtgggaattggtcaatcatagcgattttaaagcgctcaaatcgcccaatttcacgcctaaaatccaccctcatttcaatgaaaacgatcttttcaaatccatagaaaaacaagatctgttgctgttccacccttatgaaagttttgagcctgtgatcgatttaatagagcaagccgctagtgatccgaccaccctttctatcaaaatgacgctttatcgtgtgggcaagcattcccccattgtcaaagccttgattgaagcggcgagcaagattcaagtgagcgttttagtggaattaaaagcgcgttttgatgaagaaagcaatctgcactgggcaaaagctttagaaagggcgggcgcgttagtcgtttatggcgttttcaaactcaaagtgcatgctaaaatgctcgtgatcactaaaaaaacggacaaccagttacgccatttcacccatttaagcacgggcaattacaaccctttgagcgctaaaatctataccgatgtgagtttttttagcgctaaaaatgaaatcgctaacgacattatcaagcttttccattccttgctgacaagcagtgccactagcaacacattagaaacgcttttcatggcgcccaaacagatcaagcctaaaatcattgaactcattcaaaatgaaatgaatcacaaacaagaaggttatatcattttaaaagccaacgccctagtggatagcgaaatcattgaatggctctatcaagcctctcaaaaaggggttaaaattgatctcattatcagggggatttgttgtttaaagccccaagtcaagggcttgagcgaaaatatcagggtgtattctatcgtggggaaatatttagaacatgcacgcatttattattttaaacatgaaaatatttatttttctagcgcggatttaatgcctaggaatttagaaaggcgcgtggaattgctcattcccgccacaaacccaaagatcgccaataaattgttgcatattttagaaatccaactcaaagacaccttaaaacgctacgagttaaattctaaaggccgttacgctaaaatttcaaaccctaacgatcctttaaattcacaggattattttgaaaaacaagcccttaaaaccctttaa

SEQ ID NO: 3324 - DNA (genomic), 3081 bp, Helicobacter pylori; double-stranded, circular
  misc_feature (B) LOCATION 1...3081
  hypothetical: NO
  anti-sense: NO
gtgtgtttagaccatcaggttggagcaggcaagactttgtgcgctatagccagctgcatggaacaaaaacgcatgggattagtgaataaaacgctcattgccgtgcctaaccatttaaccaagcaatggggcgatgaattttataaggcttaccctaacgctaatgtgttagttgttgatagcaaggacaccactgaaaaagaaagagaacttttattcaatcaaatcgctaacaacaattatgacgctgtggttatcgcgcacacccatttggaattattgtctaaccctagaggaatcatagaagaattgaaagaagaagagctagtgaatgctgaaaaaaactttgaaaggcaagaattagcttataaaaataaccctagagaaactaaaaaacccaatgaaagagcctttaaaaacaagttggataaaatccgtgctaaatacgatgcgattttagaaaaacaaggctctcatattgatattagtcaaatggggattgacaatttgattgtggatgaagcccacttattcaaaaatctagcctttgaaacttctatggaaaaaattgcaggacttggtaaccaacaaggctctaatcgcgctagagatttgtttattaaaacgcgctacttgcatcaaaacgataagaaaatcatgtttttaaccggcacgcctatagctaattccttgagtgaaatgtatcacttgcaacgctatttaacccctgatgtgttaaaagaaagagggttagaattctttgatgattgggctaagacttatggggaagtggtgaatgattttgaattagacacttccgctcaaagttataaaatggttaatcgcttttctaaatttagcgatgtgcaaggcttaagcaccatgtatagagcttttgcggatattgtctctaatgatgatattttaaagcataacccccactttgtgcctaaagtgtatggggataaacctatcaatgtggtggtgaaaagaagcgaagaagtggctcaattcattggagtggctttagaaaatggaaaatataatgaaggctctatcattgataggatgcaaaaatgcgagggcaagaaaagccaaaaagggcaagacaatatcctttcttgcaccacagacgctagaaaagtggctttggattaccgcttgattgaccctaacgctaaagtagaaaaagaattttctaaaagctatgctatggcaaaaaatatctatgagaattatttagaaactcatgccactaaaggcacacaacttggtttcatagggctatccacacccaaaacccatagccaaaaagtcagtttagaagcgctagataacgctcacgaaactgaaaataaaaatcccctagataaagctcaagaacttttagaaagcttgtctagttatgatgaaaagggcaatcttatcgctcctagcaagaaagaattagagaacgagctcaaagagaaagaagctaaaagcgtcaatttagatgaagagatagctaaaggctgttcgtttgatgtttatagcgatgttttaaggcatttagtccaaatgggtatcccacaaaatgaaatcgctttcatccatgacgctaaaaccgaagagcaaaagcaggatttgtttaaaaagctcaatcgtggcggagtcagggtattattgggcagtcctgctaaaatgggcgtaggcactaatgtgcaagaaagattagtcgctatgcatgaattagattgcccatggagacctgatgaattgttgcaaatggaagggcgtgggataaggcaaggcaatattttacaccaaaatgatcctgaaaactttagaatgaaaatctatcgttacgccactgaaaagacttacgatagccgtatgtggcaaatcatagaaactaaatctaaaggcatagagcaatttagaaacgcgcacaaattaggcttgaatgaattagaagactttaatatgggtagctctaatgcgagcgagatgaaagcagaagcgacaggcaatcccttgattattgaagaagtcaaattgagagcggagattaaaagcgaagaatcaaaatacaaagccttcaataaagagcattacttcaatgaagaaagcttaaaaaacaacgcttctaaattggattatctaaaacaggaattgaaagatttagaaacgcttcaaagatccgtaataatccccactcatacagagatcaagctctatgatttgaaaaatgaagaaagtaaggattatgagcttatcaaagttaaagaggtagagcctttaaaagaaaacgcctctatgagtgaagaattaacgcacaagaaactcaaagaacaaaacaagcaaatagccgaacaaaataaagaaaagctagacgctattaaaaagcaatttgcaagcaatttgaacaccttgtttgtgaatgaagaagaagattataagcttttagaatacaagggctttgtggtgaatgcttataaaactaagtatcaagtggagtttagtttaagccctaaagacaatcccaatattgcctatagccctagcaatatggtttataaaaacgatactatcaacatgtttagctcttataatttctgcgctgagatcaagtttgatgggtttttaaaaaggttggataacgctatcactaaactccctgaaaaaatcaaggaattagaaaactccattgaaatcacgaaaaaaaatatcgctaaatacacaagattagtggagcaaaaaccttcttacccacgactagaatacctgcaagctttaaaatgggatcataaaactctaatagatgatttagctaaaatgagcaaagacagaaattataagcctgcgttcaaccctaaatctaaagaagtcttaaagaatttgaacgctgaaaaaagagcgagtttagagaatgagagggaagagcaaggggttaaggggaacacaaagagtcatgatgaaatagagccagctacagaacaagtgattgaaaaagaaatagaaaaaggagatgaaatcgctaataatgttgattactacgagaacgaacaagaagtggaaattactaaatcaatgggtagaaga

SEQ ID NO: 3325 - DNA (genomic), 7155 bp, Helicobacter pylori; double-stranded, circular
  misc_feature (B) LOCATION 1...7155
  hypothetical: NO
  anti-sense: NO
atggagcgatcgagtgatgaagatctttcacaccaagaccctagtttatttattgagtctagagagcagggaggaacaagaggagtttatcgatctagcgaccaacaggcagtttcagaagaatcccatagagagcgagatagaatacatgaacatgtatctagaggagatggagtatcagcaagagcggatgcaagagcgaatagcaatggagcatcaagtccagcaagccgaatggaaaatggagcaagaagcgaagaaaagggggataatcccagcgatgagagaggaataccacagacaccgcaatccccatctcatcaacaaaatagctccagagatttggggctttctctctctagagaacagccaggacagactggacgcttacgcctttttgatcatggacagatgggctcattatttcccacagaccatgaaaaccaaagaaaaaggagcgataatgagcttgatagacgcagtgataaagcaaacgaaaatggagacaaaagccctagacagaatggaagcgcaaatcaagagagcgcaaggagtgagcgatatggaattgctcaaggaagctcaaatcaatcagtattattacctgctcaaagccgattacatcatgcaggactcagcgcacaaaatggacttagagaccttgaagaaaacagggatcaagagggaagacttttatcaaatttagataatttagaaagcttgcttaacgctattagaaacaacactatagcgagtgagcctgattttagatccaggctcttagaagccattcaaaacaacgatcctttaaaagatagcattgtgggggcgcaactccttaaagaccctacgactaaaatcttttatgacaaattccaattaaaaatcagccctaaaaaagtcttagagattttagaaaatcgccttaaaaaatccattgaaacaacgaacgaaacgctaaacgcattcaatgtgctggatagtcaagccattgatttaaacgctatctctaatagcgtaggattaaatcccacacaagagagcaaaataacagacaatagcgtagagttgaataacgctcaagaacaaaccgcgcaagagcaaaccacacaagaacaaaccacacaagaacaaaccacacaagaacaaaccacacaagaacaaaccacacaagaacaaaccacacaagaacaaaccacacaagagcaagacacgcaagaaaacgcgccaaccacgataaaacaagaaacaccaattacgccagccatcccccttaatcctaaaatagattttaaaccgagcgaagaagttttaatcaagggagctaaaactcgctacaaggctaacattaaagccattgagcttttaaaagaattgcaagccaaacaagagatcttaaaaggcgattactacgccactttaaaagagcaagaaatcctagcgcaatttagcggatggggcgggttagagagctactttaaaaaggctcaacaccctgaggaatttaaagaattaaacgccttactcactaaagatgaattcagaagagcttatttgagcgcaagagacgcttactacacccctaaattagttattgatagcatttatcaaggtttagatcaattagggtttaataacgacaaccatccaaaagaaatctttgaacccagtttaggcacaggcaaatttatcgctcatgcgccaagcgataagaattaccgcttcatcggcacagaattagatcctattagcgctaatctttctaaattcctttaccctaatcaagtcatccaaaacaccgctttagaaaactaccaattctatcaagaatacgatgcgtttgtgggcaatcctccttatggcaatcataaaatctatagctccaatgacaaagaattgagtaacgagagtattcataattactttttagggaaagctatcaaagaattgaaagatgatggcataggagcgtttgtggtgagttcttggtttatggatgctaaaaaccctaaaatgagagaacacatcgcaaaaaacgccacctttttaggcgcgataagactgcctaatagcgtgtttaaagcaacaggcgctgaagttacgagcgacattgtgttttttaaaaaaggcgttgaaaaagcaaccaatcaaagcttcactaaagctatgccttattatgacaagatactcaatagcttggatgatgacaccctttttgccttgcaaaacaaccgctttgatagttttattcctagcgatcaacttaagattgtcaatgcggttgcaaaccattttggtttcaaacaagaaaaattgcaacgctggtatgaaaaaatagacaccgctaactttggctacagcacgcaagattataagatcatcaaagacttcattgataaagttggaaagaatagcatcaatctcaacgaacaaaccctaaatgaatactttatccaccaccctgaaaacattctagggcatttgagtttggaaaaaacccgctatagatttgaaacaaatggcgaacaaatttacaaatacgacttgcaagccttagaagatgagagcttggatttatcccaagcgcttaaacaagcgatagaaaaattgcctaaagacgtctatcaataccataagactacccttaaaacagacgttcttattattgattcaagtaacgaacgctatcaagaagttcaaaagcttatcaaaaatttagaaaggagggaattagtcaagtgggataatctttatttccaactagaacaaaataatgaaatgggcatttttttaaaacccactaaaatcaactctaaagtccaagattcacgactaaaagcctattttaaaattaaagacgctttgaatgatttaacgagcgcggaattaaaccccttaagctctgatttagagctagaaaacaagagggctaaactcaatcttgtttatgatgaatttgtcaagaaatttggctatctcaatgagaataaaaatcgtaaggacatcagacaagatttgtatggcgctaaagtcttaggattagaaaaagactttgaaaaagaaataacccctagaagcgctaaaatgcaaaacatagaaccaaggcaagctcaagccaaaaaagctcaaatcttttttgaaaggactttaaaccctaaaaaagaacttattatcactaacgctaaagaggcattaattgcaagcatcaatcaaaaagggggtttggacttgcatttcattagggatcatttcacaacccaaagtttagaaaccacgattaaagaacttttagagcaaaaacttatctataaagaccacaaggataatggcggctatattttagcgaacgattatttgagcggcaacgtgaaaagaaaactcaaagaagttaaagaagccatcaatcaaggcgtggagggattagaggctaatgtgaaagatttagagctgattatccctaaagatttgaaagccactgaaatcatggctaatatcaacagcccttggatacccactcagtatttagaagagtttttaatggaattgagcgctaaccattatgaaaagcaatacggcgataaaatgacagattaccaactaagcaatctcaaagaagacatcaaaatagaacacctaagcggtgcttatgaagtttttgttagaaacaatgaattaaacgagctttatggtatcaggcataaagacaagccgcattcttataaagtgccttttgaaagccttttaaataaagtcttaaacaacaaggatttgagcgttaaatacgcccaagttgatcctaatgaccctaaaaaagaaatattcatcactgatgaagagcaaagcaatctcgccagacaaaaagcagaagaattgaaagaagcttttaaagactggatttataaagattattcaagaagaacccatttagagcaaatctataatgacactttcaacaactctgttttaaaaacctatgatggctcgcaattagaactagagggctttaactaccatatcagcttgcgcccccaccaaaagaacgctatttttagaaccatccaagacagggcggtgtgtttagaccatcaggttggagcaggcaagactttgtgcgctatagccagctgcatggaacaaaaacgcatgggattagtgaataaaacgctcattgccgtgcctaaccatttaaccaagcaatggggcgatgaattttataaggcttaccctaacgctaatgtgttagttgttgatagcaaggacaccactgaaaaagaaagagaacttttattcaatcaaatcgctaacaacaattatgacgctgtggttatcgcgcacacccatttggaattattgtctaaccctagaggaatcatagaagaattgaaagaagaagagctagtgaatgctgaaaaaaactttgaaaggcaagaattagcttataaaaataaccctagagaaactaaaaaacccaatgaaagagcctttaaaaacaagttggataaaatccgtgctaaatacgatgcgattttagaaaaacaaggctctcatattgatattagtcaaatggggattgacaatttgattgtggatgaagcccacttattcaaaaatctagcctttgaaacttctatggaaaaaattgcaggacttggtaaccaacaaggctctaatcgcgctagagatttgtttattaaaacgcgctacttgcatcaaaacgataagaaaatcatgtttttaaccggcacgcctatagctaattccttgagtgaaatgtatcacttgcaacgctatttaacccctgatgtgttaaaagaaagagggttagaattctttgatgattgggctaagacttatggggaagtggtgaatgattttgaattagacacttccgctcaaagttataaaatggttaatcgcttttctaaatttagcgatgtgcaaggcttaagcaccatgtatagagcttttgcggatattgtctctaatgatgatattttaaagcataacccccactttgtgcctaaagtgtatggggataaacctatcaatgtggtggtgaaaagaagcgaagaagtggctcaattcattggagtggctttagaaaatggaaaatataatgaaggctctatcattgataggatgcaaaaatgcgagggcaagaaaagccaaaaagggcaagacaatatcctttcttgcaccacagacgctagaaaagtggctttggattaccgcttgattgaccctaacgctaaagtagaaaaagaattttctaaaagctatgctatggcaaaaaatatctatgagaattatttagaaactcatgccactaaaggcacacaacttggtttcatagggctatccacacccaaaacccatagccaaaaagtcagtttagaagcgctagataacgctcacgaaactgaaaataaaaatcccctagataaagctcaagaacttttagaaagcttgtctagttatgatgaaaagggcaatcttatcgctcctagcaagaaagaattagagaacgagctcaaagagaaagaagctaaaagcgtcaatttagatgaagagatagctaaaggctgttcgtttgatgtttatagcgatgttttaaggcatttagtccaaatgggtatcccacaaaatgaaatcgctttcatccatgacgctaaaaccgaagagcaaaagcaggatttgtttaaaaagctcaatcgtggcggagtcagggtattattgggcagtcctgctaaaatgggcgtaggcactaatgtgcaagaaagattagtcgctatgcatgaattagattgcccatggagacctgatgaattgttgcaaatggaagggcgtgggataaggcaaggcaatattttacaccaaaatgatcctgaaaactttagaatgaaaatctatcgttacgccactgaaaagacttacgatagccgtatgtggcaaatcatagaaactaaatctaaaggcatagagcaatttagaaacgcgcacaaattaggcttgaatgaattagaagactttaatatgggtagctctaatgcgagcgagatgaaagcagaagcgacaggcaatcccttgattattgaagaagtcaaattgagagcggagattaaaagcgaagaatcaaaatacaaagccttcaataaagagcattacttcaatgaagaaagcttaaaaaacaacgcttctaaattggattatctaaaacaggaattgaaagatttagaaacgcttcaaagatccgtaataatccccactcatacagagatcaagctctatgatttgaaaaatgaagaaagtaaggattatgagcttatcaaagttaaagaggtagagcctttaaaagaaaacgcctctatgagtgaagaattaacgcacaagaaactcaaagaacaaaacaagcaaatagccgaacaaaataaagaaaagctagacgctattaaaaagcaatttgcaagcaatttgaacaccttgtttgtgaatgaagaagaagattataagcttttagaatacaagggctttgtggtgaatgcttataaaactaagtatcaagtggagtttagtttaagccctaaagacaatcccaatattgcctatagccctagcaatatggtttataaaaacgatactatcaacatgtttagctcttataatttctgcgctgagatcaagtttgatgggtttttaaaaaggttggataacgctatcactaaactccctgaaaaaatcaaggaattagaaaactccattgaaatcacgaaaaaaaatatcgctaaatacacaagattagtggagcaaaaaccttcttacccacgactagaatacctgcaagctttaaaatgggatcataaaactctaatagatgatttagctaaaatgagcaaagacagaaattataagcctgcgttcaaccctaaatctaaagaagtcttaaagaatttgaacgctgaaaaaagagcgagtttagagaatgagagggaagagcaaggggttaaggggaacacaaagagtcatgatgaaatagagccagctacagaacaagtgattgaaaaagaaatagaaaaaggagatgaaatcgctaataatgttgattactacgagaacgaacaagaagtggaaattactaaatcaatgggtagaagatga

SEQ ID NO: 3326 - DNA (genomic), 7320 bp, Helicobacter pylori; double-stranded, circular
  misc_feature (B) LOCATION 1...7320
  hypothetical: NO
  anti-sense: NO
tataatcatccaaatttaagcgttgctgatttagaattagagcaacagaatttaggagaacaaaatggaaaagagagaacaaatcgcgcagatgagccgaatggaactagagcaggaattccgcaagaaattcaccgcagaagcgaacctagaggacagcaagagggaatggagcgatcgagtgatgaagatctttcacaccaagaccctagtttatttattgagtctagagagcagggaggaacaagaggagtttatcgatctagcgaccaacaggcagtttcagaagaatcccatagagagcgagatagaatacatgaacatgtatctagaggagatggagtatcagcaagagcggatgcaagagcgaatagcaatggagcatcaagtccagcaagccgaatggaaaatggagcaagaagcgaagaaaagggggataatcccagcgatgagagaggaataccacagacaccgcaatccccatctcatcaacaaaatagctccagagatttggggctttctctctctagagaacagccaggacagactggacgcttacgcctttttgatcatggacagatgggctcattatttcccacagaccatgaaaaccaaagaaaaaggagcgataatgagcttgatagacgcagtgataaagcaaacgaaaatggagacaaaagccctagacagaatggaagcgcaaatcaagagagcgcaaggagtgagcgatatggaattgctcaaggaagctcaaatcaatcagtattattacctgctcaaagccgattacatcatgcaggactcagcgcacaaaatggacttagagaccttgaagaaaacagggatcaagagggaagacttttatcaaatttagataatttagaaagcttgcttaacgctattagaaacaacactatagcgagtgagcctgattttagatccaggctcttagaagccattcaaaacaacgatcctttaaaagatagcattgtgggggcgcaactccttaaagaccctacgactaaaatcttttatgacaaattccaattaaaaatcagccctaaaaaagtcttagagattttagaaaatcgccttaaaaaatccattgaaacaacgaacgaaacgctaaacgcattcaatgtgctggatagtcaagccattgatttaaacgctatctctaatagcgtaggattaaatcccacacaagagagcaaaataacagacaatagcgtagagttgaataacgctcaagaacaaaccgcgcaagagcaaaccacacaagaacaaaccacacaagaacaaaccacacaagaacaaaccacacaagaacaaaccacacaagaacaaaccacacaagaacaaaccacacaagagcaagacacgcaagaaaacgcgccaaccacgataaaacaagaaacaccaattacgccagccatcccccttaatcctaaaatagattttaaaccgagcgaagaagttttaatcaagggagctaaaactcgctacaaggctaacattaaagccattgagcttttaaaagaattgcaagccaaacaagagatcttaaaaggcgattactacgccactttaaaagagcaagaaatcctagcgcaatttagcggatggggcgggttagagagctactttaaaaaggctcaacaccctgaggaatttaaagaattaaacgccttactcactaaagatgaattcagaagagcttatttgagcgcaagagacgcttactacacccctaaattagttattgatagcatttatcaaggtttagatcaattagggtttaataacgacaaccatccaaaaaaaatctttgaacccagtttaggcacaggcaaatttatcgctcatgcgccaagcgataagaattaccgcttcatcggcacagaattagatcctattagcgctaatctttctaaattcctttaccctaatcaagtcatccaaaacaccgctttagaaaactaccaattctatcaagaatacgatgcgtttgtgggcaatcctccttatggcaatcataaaatctatagctccaatgacaaagaattgagtaacgagagtattcataattactttttagggaaagctatcaaagaattgaaagatgatggcataggagcgtttgtggtgagttcttggtttatggatgctaaaaaccctaaaatgagagaacacatcgcaaaaaacgccacctttttaggcgcgataagactgcctaatagcgtgtttaaagcaacaggcgctgaagttacgagcgacattgtgttttttaaaaaaggcgttgaaaaagcaaccaatcaaagcttcactaaagctatgccttattatgacaagatactcaatagcttggatgatgacaccctttttgccttgcaaaacaaccgctttgatagttttattcctagcgatcaacttaagattgtcaatgcggttgcaaaccattttggtttcaaacaagaaaaattgcaacgctggtatgaaaaaatagacaccgctaactttggctacagcacgcaagattataagatcatcaaagacttcattgataaagttggaaagaatagcatcaatctcaacgaacaaaccctaaatgaatactttatccaccaccctgaaaacattctagggcatttgagtttggaaaaaacccgctatagatttgaaacaaatggcgaacaaatttacaaatacgacttgcaagccttagaagatgagagcttggatttatcccaagcgcttaaacaagcgatagaaaaattgcctaaagacgtctatcaataccataagactacccttaaaacagacgttcttattattgattcaagtaacgaacgctatcaagaagttcaaaagcttatcaaaaatttagaaaggagggaattagtcaagtgggataatctttatttccaactagaacaaaataatgaaatgggcatttttttaaaacccactaaaatcaactctaaagtccaagattcacgactaaaagcctattttaaaattaaagacgctttgaatgatttaacgagcgcggaattaaaccccttaagctctgatttagagctagaaaacaagagggctaaactcaatcttgtttatgatgaatttgtcaagaaatttggctatctcaatgagaataaaaatcgtaaggacatcagacaagatttgtatggcgctaaagtcttaggattagaaaaagactttgaaaaagaaataacccctagaagcgctaaaatgcaaaacatagaaccaaggcaagctcaagccaaaaaagctcaaatcttttttgaaaggactttaaaccctaaaaaagaacttattatcactaacgctaaagaggcattaattgcaagcatcaatcaaaaagggggtttggacttgcatttcattagggatcatttcacaacccaaagtttagaaaccacgattaaagaacttttagagcaaaaacttatctataaagaccacaaggataatggcggctatattttagcgaacgattatttgagcggcaacgtgaaaagaaaactcaaagaagttaaagaagccatcaatcaaggcgtggagggattagaggctaatgtgaaagatttagagctgattatccctaaagatttgaaagccactgaaatcatggctaatatcaacagcccttggatacccactcagtatttagaagagtttttaatggaattgagcgctaaccattatgaaaagcaatacggcgataaaatgacagattaccaactaagcaatctcaaagaagacatcaaaatagaacacctaagcggtgcttatgaagtttttgttagaaacaatgaattaaacgagctttatggtatcaggcataaagacaagccgcattcttataaagtgccttttgaaagccttttaaataaagtcttaaacaacaaggatttgagcgttaaatacgcccaagttgatcctaatgaccctaaaaaagaaatattcatcactgatgaagagcaaagcaatctcgccagacaaaaagcagaagaattgaaagaagcttttaaagactggatttataaagattattcaagaagaacccatttagagcaaatctataatgacactttcaacaactttgttttaaaaacctatgatggctcgcaattagaactagagggctttaactaccatatcagcttgcgcccccaccaaaagaacgctatttttagaaccatccaagacagggcggtgtgtttagaccatcaggttggagcaggcaagactttgtgcgctatagccagctgcatggaacaaaaacgcatgggattagtgaataaaacgctcattgccgtgcctaaccatttaaccaagcaatggggcgatgaattttataaggcttaccctaacgctaatgtgttagttgttgatagcaaggacaccactgaaaaagaaagagaacttttattcaatcaaatcgctaacaacaattatgacgctgtggttatcgcgcacacccatttggaattattgtctaaccctagaggaatcatagaagaattgaaagaagaagagctagtgaatgctgaaaaaaactttgaaaggcaagaattagcttataaaaataaccctagagaaactaaaaaacccaatgaaagagcctttaaaaacaagttggataaaatccgtgctaaatacgatgcgattttagaaaaacaaggctctcatattgatattagtcaaatggggattgacaatttgattgtggatgaagcccacttattcaaaaatctagcctttgaaacttctatggaaaaaattgcaggacttggtaaccaacaaggctctaatcgcgctagagatttgtttattaaaacgcgctacttgcatcaaaacgataagaaaatcatgtttttaaccggcacgcctatagctaattccttgagtgaaatgtatcacttgcaacgctatttaacccctgatgtgttaaaagaaagagggttagaattctttgatgattgggctaagacttatggggaagtggtgaatgattttgaattagacacttccgctcaaagttataaaatggttaatcgcttttctaaatttagcgatgtgcaaggcttaagcaccatgtatagagcttttgcggatattgtctctaatgatgatattttaaagcataacccccactttgtgcctaaagtgtatggggataaacctatcaatgtggtggtgaaaagaagcgaagaagtggctcaattcattggagtggctttagaaaatggaaaatataatgaaggctctatcattgataggatgcaaaaatgcgagggcaagaaaagccaaaaagggcaagacaatatcctttcttgcaccacagacgctagaaaagtggctttggattaccgcttgattgaccctaacgctaaagtagaaaaagaattttctaaaagctatgctatggcaaaaaatatctatgagaattatttagaaactcatgccactaaaggcacacaacttggtttcatagggctatccacacccaaaacccatagccaaaaagtcagtttagaagcgctagataacgctcacgaaactgaaaataaaaatcccctagataaagctcaagaacttttagaaagcttgtctagttatgatgaaaagggcaatcttatcgctcctagcaagaaagaattagagaacgagctcaaagagaaagaagctaaaagcgtcaatttagatgaagagatagctaaaggctgttcgtttgatgtttatagcgatgttttaaggcatttagtccaaatgggtatcccacaaaatgaaatcgctttcatccatgacgctaaaaccgaagagcaaaagcaggatttgtttaaaaagctcaatcgtggcggagtcagggtattattgggcagtcctgctaaaatgggcgtaggcactaatgtgcaagaaagattagtcgctatgcatgaattagattgcccatggagacctgatgaattgttgcaaatggaagggcgtgggataaggcaaggcaatattttacaccaaaatgatcctgaaaactttagaatgaaaatctatcgttacgccactgaaaagacttacgatagccgtatgtggcaaatcatagaaactaaatctaaaggcatagagcaatttagaaacgcgcacaaattaggcttgaatgaattagaagactttaatatgggtagctctaatgcgagcgagatgaaagcagaagcgacaggcaatcccttgattattgaagaagtcaaattgagagcggagattaaaagcgaagaatcaaaatacaaagccttcaataaagagcattacttcaatgaagaaagcttaaaaaacaacgcttctaaattggattatctaaaacaggaattgaaagatttagaaacgcttcaaagatccgtaataatccccactcatacagagatcaagctctatgatttgaaaaatgaagaaagtaaggattatgagcttatcaaagttaaagaggtagagcctttaaaagaaaacgcctctatgagtgaagaattaacgcacaagaaactcaaagaacaaaacaagcaaatagccgaacaaaataaagaaaagctagacgctattaaaaagcaatttgcaagcaatttgaacaccttgtttgtgaatgaagaagaagattataagcttttagaatacaagggctttgtggtgaatgcttataaaactaagtatcaagtggagtttagtttaagccctaaagacaatcccaatattgcctatagccctagcaatatggtttataaaaacgatactatcaacatgtttagctcttataatttctgcgctgagatcaagtttgatgggtttttaaaaaggttggataacgctatcactaaactccctgaaaaaatcaaggaattagaaaactccattgaaatcacgaaaaaaaatatcgctaaatacacaagattagtggagcaaaaaccttcttacccacgactagaatacctgcaagctttaaaatgggatcataaaactctaatagatgatttagctaaaatgagcaaagacagaaattataagcctgcgttcaaccctaaatctaaagaagtcttaaagaatttgaacgctgaaaaaagagcgagtttagagaatgagagggaagagcaaggggttaaggggaacacaaagagtcatgatgaaatagagccagctacagaacaagtgattgaaaaagaaatagaaaaaggagatgaaatcgctaataatgttgattactacgagaacgaacaagaagtggaaattactaaatcaatgggtagaaga

SEQ ID NO: 3327 - DNA (genomic), 1017 bp, Helicobacter pylori; double-stranded, circular
  misc_feature (B) LOCATION 1...1017
  hypothetical: NO
  anti-sense: NO
atgaataatcttaacaacttaagcgatgagcaaatcaatggcatgattgattatttgcaaaacatacttatggaaatgggagggcttaagcaagaaccaccacaaaattcaaactattcacacaatctagaagaaactaacgcacaaagaacccaatcaacccaagagaattcagaaagcaaagaagctttacttaaagctaaatccggtcaaatcaactatgttaaaacaaggattattcagggtttgaaagaaaagaactcgcctttttgggacaagcctgaaatagtggctaacaaagaaagagggcataacgctttaaatggcgaaccttattgcaatcttaacgacatgattttagatatggaaaaaaaccgcttagggtttcaaagtaatgcatgggtgagtttagaggaagctaaaatgcttggagcgagcaaagaagaaagagatacgatttttaaagccactcaaaataaagaaatctcgcctgttcgtttgatgtttattaaaaacaaagaacctgtgcctttagtggataataatggcgaattagtgattgataaaaacactaaaaaacctaaacacaagcagtttgctgtcattgaaaatggtcaaaaggtgttcaaacctgcttacagagacattgaaccccaagcgcaattcaagtttgtttataatatagaaatgtttccaagcattaacaaggaaaaaatcaaacctttaaacttggacaagctctcaaactatgcctataagactaggctcttccatcaaaaagattatttgcaagaaagaagagacaagacaaacattatttacgaagatttgcatagagatttgtctccagataacaggaatgaagctttattggaaagaatgcgtagctacactctgcttaaaaatgaaaaatacaatcaattagcaaatgaaacaaagcaacaaacccaaacgcgctctcaatctcaaagctattatcaaaagaaaaataaagcttctagcggtattgaaaggtaa

SEQ ID NO: 3328 - DNA (genomic), 1080 bp, Helicobacter pylori; double-stranded, circular
  misc_feature (B) LOCATION 1...1080
  hypothetical: NO
  anti-sense: NO
aaacccaacacgaaaattacatcgctcaaagagattttgctcaatctaacccacaaagagaagaagatgaataatcttaacaacttaagcgatgagcaaatcaatggcatgattgattatttgcaaaacatacttatggaaatgggagggcttaagcaagaaccaccacaaaattcaaactattcacacaatctagaagaaactaacgcacaaagaacccaatcaacccaagagaattcagaaagcaaagaagctttacttaaagctaaatccggtcaaatcaactatgttaaaacaaggattattcagggtttgaaagaaaagaactcgcctttttgggacaagcctgaaatagtggctaacaaagaaagagggcataacgctttaaatggcgaaccttattgcaatcttaacgacatgattttagatatggaaaaaaaccgcttagggtttcaaagtaatgcatgggtgagtttagaggaagctaaaatgcttggagcgagcaaagaagaaagagatacgatttttaaagccactcaaaataaagaaatctcgcctgttcgtttgatgtttattaaaaacaaagaacctgtgcctttagtggataataatggcgaattagtgattgataaaaacactaaaaaacctaaacacaagcagtttgctgtcattgaaaatggtcaaaaggtgttcaaacctgcttacagagacattgaaccccaagcgcaattcaagtttgtttataatatagaaatgtttccaagcattaacaaggaaaaaatcaaacctttaaacttggacaagctctcaaactatgcctataagactaggctcttccatcaaaaagattatttgcaagaaagaagagacaagacaaacattatttacgaagatttgcatagagatttgtctccagataacaggaatgaagctttattggaaagaatgcgtagctacactctgcttaaaaatgaaaaatacaatcaattagcaaatgaaacaaagcaacaaacccaaacgcgctctcaatctcaaagctattatcaaaagaaaaataaagcttctagcggtattgaaagg

SEQ ID NO: 3329 - DNA (genomic), 285 bp, Helicobacter pylori; double-stranded, circular
  misc_feature (B) LOCATION 1...285
  hypothetical: NO
  anti-sense: NO
ggaaatcccaatgactacagacagaaacctgtttttttgcgcttcgttgttgatttttttaggggtattgatgagctattcgctctcaacttacaccacagtggtgctgtatcattatggggaattccatttttttatacgccagcttgtgagtgcgatcatgggcattattatatagaaagactaaaaaccactgatggtttagagaagcatcaaaaggggctaaataacaccaaaaaacaaattcaagcaaatcctattgaagagattaaagaaaacaagaaa

SEQ ID NO: 3330 - DNA (genomic), 897 bp, Helicobacter pylori; double-stranded, circular
  misc_feature (B) LOCATION 1...897
  hypothetical: NO
  anti-sense: NO
ttggctaaaacagaaacggataactttaataaacaagataagcacaagcttgactacagaaaaatcaattatgagagcaaggaaattgatgatggcaagtttataagaattggagatgaagtcaatcacattttcattgaaaaagctaaaatcaatcgtggttatttgcaaaaccccaaacacaaacgcacctggtggagtttgtggctctataaaaaacccagtgatgacgcgcttgatataaaggtgctagatgtctttgatgatggcaaatacacttattttagatatgacagagatcaagccttttcaaaatttccttacacctataaggttgtagatgggtatgataatcctatcaatagccgtgtggtagggaattacattattgctgaagacatttctaaaaaatggactttaaggagcggtaaggaatacgtgtgcgtgagaagagacaagcgcaaataccaaaagtctagggacttcatgcgcttaaaaaggcttttagagcaagatgaagccatgaaagccaaacgaaataacatgcatttgattgaagacactacgcctcaacctaaaaatgccattagcgtaacggagttgttagctcaaatcaaaaaccaaactccaagcaaagaatgccgagccttaaatgaagaagaagttaaaactttagaagaggttaaaaacatcataaaaactcctaagcctttgcaaaaagatttgaaaaagaacgctaaaaaacacaccatcaaaacccagtattgcgtgcctatcccctatatagaaagactaaaaaccactgatggtttagagaagcatcaaaaggggctaaataacaccaaaaaacaaattcaagcaaatcctattgaagagattaaagaaaacaagaaatga

SEQ ID NO: 3331 - DNA (genomic), 894 bp, Helicobacter pylori; double-stranded, circular
  misc_feature (B) LOCATION 1...894
  hypothetical: NO
  anti-sense: NO
ttggctaaaacagaaacggataactttaataaacaagataagcacaagcttgactacagaaaaatcaattatgagagcaaggaaattgatgatggcaagtttataagaattggagatgaagtcaatcacattttcattgaaaaagctaaaatcaatcgtggttatttgcaaaaccccaaacacaaacgcacctggtggagtttgtggctctataaaaaacccagtgatgacgcgcttgatataaaggtgctagatgtctttgatgatggcaaatacacttattttagatatgacagagatcaagccttttcaaaatttccttacacctataaggttgtagatgggtatgataatcctatcaatagccgtgtggtagggaattacattattgctgaagacatttctaaaaaatggactttaaggagcggtaaggaatacgtgtgcgtgagaagagacaagcgcaaataccaaaagtctagggacttcatgcgcttaaaaaggcttttagagcaagatgaagccatgaaagccaaacgaaataacatgcatttgattgaagacactacgcctcaacctaaaaatgccattagcgtaacggagttgttagctcaaatcaaaaaccaaactccaagcaaagaatgccgagccttaaatgaagaagaagttaaaactttagaagaggttaaaaacatcataaaaactcctaagcctttgcaaaaagatttgaaaaagaacgctaaaaaacacaccatcaaaacccagtattgcgtgcctatcccctatatagaaagactaaaaaccactgatggtttagagaagcatcaaaaggggctaaataacaccaaaaaacaaattcaagcaaatcctattgaagagattaaagaaaacaagaaa

SEQ ID NO: 3332 - DNA (genomic), 804 bp, Helicobacter pylori; double-stranded, circular
  misc_feature (B) LOCATION 1...804
  hypothetical: NO
  anti-sense: NO
atggatagcaaaaaaccccattatagagtgagtttaagcgaacaagctcttaatcatgaaaaactgatgagagccattgttaaaaatctagccgacacccctatggtattaaaaggcgaaacagctttgtatctaggctatggcttaaatcgtttttcagaagatttagactttgattgtcataaaaaaatcaatctcttaggcagagtaaagagcgctattcctaatggcattatcttaaatgatattcatattaaaaaagacactgatagtgtggggcgttatatggtgcgttatgctaccaaagacaataaagaagaacaaactttaaaattagaaatatcttatagagacgcaccaaaagagagcgaagtcaatgtgattgagggaatgcgaattgctaaaatagagcgtattattgataacaaactctgtgcttgctttgatggggagcatacaagaactaaagctagagatttatttgatttgcattttttagccaagcattatgaagaacattttaacttagatttagcaagtcgcttaaaagattttagcaaagaccctgataaattagtgagcgattatttagtagatgtaaaactagatgctttattaaatcaaattatggacttagaagaaacagccctagaattaggggtaatggctcaactaatacataaaaaacttgaaaaacaatctcattcccttaatgccttgcaagagcaacaaggctatagcaataatgataatagcctagacaattctaatgaaaacacctacacacctaagcgtaggcgatag

SEQ ID NO: 3333 - DNA (genomic), 801 bp, Helicobacter pylori; double-stranded, circular
  misc_feature (B) LOCATION 1...801
  hypothetical: NO
  anti-sense: NO
atggatagcaaaaaaccccattatagagtgagtttaagcgaacaagctcttaatcatgaaaaactgatgagagccattgttaaaaatctagccgacacccctatggtattaaaaggcgaaacagctttgtatctaggctatggcttaaatcgtttttcagaagatttagactttgattgtcataaaaaaatcaatctcttaggcagagtaaagagcgctattcctaatggcattatcttaaatgatattcatattaaaaaagacactgatagtgtggggcgttatatggtgcgttatgctaccaaagacaataaagaagaacaaactttaaaattagaaatatcttatagagacgcaccaaaagagagcgaagtcaatgtgattgagggaatgcgaattgctaaaatagagcgtattattgataacaaactctgtgcttgctttgatggggagcatacaagaactaaagctagagatttatttgatttgcattttttagccaagcattatgaagaacattttaacttagatttagcaagtcgcttaaaagattttagcaaagaccctgataaattagtgagcgattatttagtagatgtaaaactagatgctttattaaatcaaattatggacttagaagaaacagccctagaattaggggtaatggctcaactaatacataaaaaacttgaaaaacaatctcattcccttaatgccttgcaagagcaacaaggctatagcaataatgataatagcctagacaattctaatgaaaacacctacacacctaagcgtaggcga

SEQ ID NO: 3334 - DNA (genomic), 264 bp, Helicobacter pylori; double-stranded, circular
  misc_feature (B) LOCATION 1...264
  hypothetical: NO
  anti-sense: NO
ttgcagttaaaaactcaaatgcctattttagatttcaatatcaaagaaataaaagctaaatcccctagcccttatactgaaagcacttttattgcaatgatggagacctatggtataggaagacctagcacttatacaagtatatttgagaccttaaaaaacaaaaattacatcacattagagggcaaaaatagaaagatcacgcccacagctttgggtaaaagcatcgttgatttcttcttaaatgatagccaaacacaatga

SEQ ID NO: 3335 - DNA (genomic), 366 bp, Helicobacter pylori; double-stranded, circular
  misc_feature (B) LOCATION 1...366
  hypothetical: NO
  anti-sense: NO
tgcagttttagccaactcaaatctaaaggttttaaagcgattaaagacttagaagaagaaaagaaagatgaagaagagattgaaagcgatcttgatttttctagcttgcagttaaaaactcaaatgcctattttagatttcaatatcaaagaaataaaagctaaatcccctagcccttatactgaaagcacttttattgcaatgatggagacctatggtataggaagacctagcacttatacaagtatatttgagaccttaaaaaacaaaaattacatcacattagagggcaaaaatagaaagatcacgcccacagctttgggtaaaagcatcgttgatttcttcttaaatgatagccaaacacaa

SEQ ID NO: 3336 - DNA (genomic), 810 bp, Helicobacter pylori; double-stranded, circular
  misc_feature (B) LOCATION 1...810
  hypothetical: NO
  anti-sense: NO
atggaaaagagagaacaaatcgcgcagatgagccgaatggaactagagcaggaattccgcaagaaattcaccgcagaagcgaacctagaggacagcaagagggaatggagcgatcgagtgatgaagatctttcacaccaagaccctagtttatttattgagtctagagagcagggaggaacaagaggagtttatcgatctagcgaccaacaggcagtttcagaagaatcccatagagagcgagatagaatacatgaacatgtatctagaggagatggagtatcagcaagagcggatgcaagagcgaatagcaatggagcatcaagtccagcaagccgaatggaaaatggagcaagaagcgaagaaaagggggataatcccagcgatgagagaggaataccacagacaccgcaatccccatctcatcaacaaaatagctccagagatttggggctttctctctctagagaacagccaggacagactggacgcttacgcctttttgatcatggacagatgggctcattatttcccacagaccatgaaaaccaaagaaaaaggagcgataatgagcttgatagacgcagtgataaagcaaacgaaaatggagacaaaagccctagacagaatggaagcgcaaatcaagagagcgcaaggagtgagcgatatggaattgctcaaggaagctcaaatcaatcagtattattacctgctcaaagccgattacatcatgcaggactcagcgcacaaaatggacttagagaccttgaagaaaacagggatcaagagggaagacttttatcaaatttag

SEQ ID NO: 3337 - DNA (genomic), 816 bp, Helicobacter pylori; double-stranded, circular
  misc_feature (B) LOCATION 1...816
  hypothetical: NO
  anti-sense: NO
gagaacaaaatggaaaagagagaacaaatcgcgcagatgagccgaatggaactagagcaggaattccgcaagaaattcaccgcagaagcgaacctagaggacagcaagagggaatggagcgatcgagtgatgaagatctttcacaccaagaccctagtttatttattgagtctagagagcagggaggaacaagaggagtttatcgatctagcgaccaacaggcagtttcagaagaatcccatagagagcgagatagaatacatgaacatgtatctagaggagatggagtatcagcaagagcggatgcaagagcgaatagcaatggagcatcaagtccagcaagccgaatggaaaatggagcaagaagcgaagaaaagggggataatcccagcgatgagagaggaataccacagacaccgcaatccccatctcatcaacaaaatagctccagagatttggggctttctctctctagagaacagccaggacagactggacgcttacgcctttttgatcatggacagatgggctcattatttcccacagaccatgaaaaccaaagaaaaaggagcgataatgagcttgatagacgcagtgataaagcaaacgaaaatggagacaaaagccctagacagaatggaagcgcaaatcaagagagcgcaaggagtgagcgatatggaattgctcaaggaagctcaaatcaatcagtattattacctgctcaaagccgattacatcatgcaggactcagcgcacaaaatggacttagagaccttgaagaaaacagggatcaagagggaagacttttatcaaatt

SEQ ID NO: 3338 - DNA (genomic), 588 bp, Helicobacter pylori; double-stranded, circular
  misc_feature (B) LOCATION 1...588
  hypothetical: NO
  anti-sense: NO
atgatagacaaagcaagaaaaaacttaaaagaccttaaaaacatttttctgtattggtatgagatgtttggttctaatgataagtctaaagacatgatgaaagcctttatgaaagatttggctttcgctaaagataaaaatgaggtgataaaagcccaagataacgagttagtcaaagaattcatgcaagagttaagcagcctctcttttaaagagcaactagaattttatcaaaccaatagagattatgatcctagccttgacaatgatgaaaactcaagcgaattgttagacgcattcactagctctctagaaaacttagaaaaacaaaagattaatcctattagagagcaaaaaagagaaagtggatggcaaaacaatgaagataataaggaaaatagcgaacttgaaaaagcttttaaaaaggatttgagcttctcacaatccaatcctattccccttgataaaaaagaaacttcaaaagaagaaaaagaagaagaactggaaagcaaggaaaaagaaccaaaagaaacactaggttttgcccattctttttcaagttctcgtttttctttggattttatgtga

SEQ ID NO: 3339 - DNA (genomic), 591 bp, Helicobacter pylori; double-stranded, circular
  misc_feature (B) LOCATION 1...591
  hypothetical: NO
  anti-sense: NO
ctcatcatgatagacaaagcaagaaaaaacttaaaagaccttaaaaacatttttctgtattggtatgagatgtttggttctaatgataagtctaaagacatgatgaaagcctttatgaaagatttggctttcgctaaagataaaaatgaggtgataaaagcccaagataacgagttagtcaaagaattcatgcaagagttaagcagcctctcttttaaagagcaactagaattttatcaaaccaatagagattatgatcctagccttgacaatgatgaaaactcaagcgaattgttagacgcattcactagctctctagaaaacttagaaaaacaaaagattaatcctattagagagcaaaaaagagaaagtggatggcaaaacaatgaagataataaggaaaatagcgaacttgaaaaagcttttaaaaaggatttgagcttctcacaatccaatcctattccccttgataaaaaagaaacttcaaaagaagaaaaagaagaagaactggaaagcaaggaaaaagaaccaaaagaaacactaggttttgcccattctttttcaagttctcgtttttctttggattttatg

SEQ ID NO: 3340 - DNA (genomic), 324 bp, Helicobacter pylori; double-stranded, circular
  misc_feature (B) LOCATION 1...324
  hypothetical: NO
  anti-sense: NO
gtggatgatagttttaccaaaaaattagaagaaatgctagatatgattatagaagatggtaaaagtgcttatcttgatttaatgcaaaatatccaaaagagattaggcacagaaatttctaacttatatagaaataatagcaataacaacgcttctgttacaaaaaaagaaatgatacctcccactgaaaaacagcttaattttgtagaaactatagaaaaaactcttcaaataaaagcttctgatatgacgaaaaaagacaagtttgcgtgcatgagatttatagaagaacatagtaaaaaaatgcctaaaaaggataagtga

SEQ ID NO: 3341 - DNA (genomic), 336 bp, Helicobacter pylori; double-stranded, circular
  misc_feature (B) LOCATION 1...336
  hypothetical: NO
  anti-sense: NO
attgctatttctaaagtggatgatagttttaccaaaaaattagaagaaatgctagatatgattatagaagatggtaaaagtgcttatcttgatttaatgcaaaatatccaaaagagattaggcacagaaatttctaacttatatagaaataatagcaataacaacgcttctgttacaaaaaaagaaatgatacctcccactgaaaaacagcttaattttgtagaaactatagaaaaaactcttcaaataaaagcttctgatatgacgaaaaaagacaagtttgcgtgcatgagatttatagaagaacatagtaaaaaaatgcctaaaaaggataag

SEQ ID NO: 3342 - DNA (genomic), 2034 bp, Helicobacter pylori; double-stranded, circular
  misc_feature (B) LOCATION 1...2034
  hypothetical: NO
  anti-sense: NO
atgctagatagggctatattagatactaagctagatagtcgccctatggacttatctttcttagatgatattttaaagcatatgcaaaagcctagatttagtgatagcgataaagtagataaaagattgctcattaagttcaatcaatttaaccctaactcaaagtttattaaatctaatctagttggcacaaaaacagctagtcctgtgcttattaaaaacatagggcaaatgaaacgctcccacttagaaaatgctctaaattatgctttagaaaatagtgaaacagcttacaatgaaatgtttttagaatgcgataagcaattcatcttagagagttggctcaatgactttgatttgactaaagattataacgagactatgcacttagttttttctatcaaagataagccagatgaagagacaatgcaagggcttttacattctacttgggagagcttaaaaataagattgcctgaatacaagtttgcccttgtgccacacgctcatcaagaccatgcccatatccattgttttatcaataagactaatcaactaacacgaagaagactgcgttttaaagggcgtgaggattgtaaggaattttttaacgaattaagaagtgagtttgcttatagactaaatgagcatttattaagcgaagaatacttgtatgtcaatgagcctaaactcaaggaattagacaatatcaaacttcaattacaagacttagaaaaagaagaaaaagccttagagcaaatcaaatccccacaagatgagtgggacttaaacaaggctttacaaaaagaatacctacaagaactcaaagataaaaacaaagcaaaagccctagacattcaaaacaaccacagcacccctttaaaacaaaagatttctaaatttaaaatcgctctctttaatcacaaagacacaagcgatgatgaaaaagaaagcctaagcattgacagaatagacaaaagaaagccagtaagcgaacacttaaaaaacatgagcaaacacgaattatacgaactcttaggcttttatcaaaaagaattagataaaaaacaaaaccattcagcctttaagaattttgctattctcaatggtttagacagagactttgaaagagagactaagggctattctgttttaaagaaaaaagaaatgcttttaaataagcttaaacacctagacaaacgccttttagataaaaactcacacttactattagcccagctaagaaatgaagttaaaaccaagcaaaacacccaatacaacactctaactaatcctattcttttagccaaagccttagaactttctaaagataaacgccccactctcaaaacttttaaaaacgcttattttagtgctagaaaatatcaattcatgctagagagctttaaaactaagcaaaatgaccccacttacaagcttaatgataacacttatgagctagtgagtaagcaactacaagactatcaaaacaccatgcttttattagccaaagagagattactttttttagaacaagatttaaaacaaaaagaagaagagtttgaaagagccaaagaacattatgtgaaatcttcaaaacattatagagaaacttcattgtctccaaaagaaaaacaaggctttctcaaacaaattaaacaattttctaaaatttctaaggatattctctatacttgtaatgagatcataggagctaataggtttttaacccactatgacaacctaaaccttgaaaaagtcctagaacacgctaaagatactaagctagagcaaaaagaaattcaagctatcacaaaagagcctaataacgatgagccttggattgagtttggtaaaaaagaacaagctagagctaaagcacactatcaagctatgctagaaaaagaaaaagctaaagaattagctaaacaacaagctaacaccttgcactctaatgagcttgatgatgaccctaaagctcatgctggattaaaacaaaatggcaacacaaactctaaagggcgtaatagataa

SEQ ID NO: 3343 - DNA (genomic), 2034 bp, Helicobacter pylori; double-stranded, circular
  misc_feature (B) LOCATION 1...2034
  hypothetical: NO
  anti-sense: NO
atgctagatagggctatattagatactaagctagatagtcgccctatggacttatctttcttagatgatattttaaagcatatgcaaaagcctagatttagtgatagcgataaagtagataaaagattgctcattaagttcaatcaatttaaccctaactcaaagtttattaaatctaatctagttggcacaaaaacagctagtcctgtgcttattaaaaacatagggcaaatgaaacgctcccacttagaaaatgctctaaattatgctttagaaaatagtgaaacagcttacaatgaaatgtttttagaatgcgataagcaattcatcttagagagttggctcaatgactttgatttgactaaagattataacgagactatgcacttagttttttctatcaaagataagccagatgaagagacaatgcaagggcttttacattctacttgggagagcttaaaaataagattgcctgaatacaagtttgcccttgtgccacacgctcatcaagaccatgcccatatccattgttttatcaataagactaatcaactaacacgaagaagactgcgttttaaagggcgtgaggattgtaaggaattttttaacgaattaagaagtgagtttgcttatagactaaatgagcatttattaagcgaagaatacttgtatgtcaatgagcctaaactcaaggaattagacaatatcaaacttcaattacaagacttagaaaaagaagaaaaagccttagagcaaatcaaatccccacaagatgagtgggacttaaacaaggctttacaaaaagaatacctacaagaactcaaagataaaaacaaagcaaaagccctagacattcaaaacaaccacagcacccctttaaaacaaaagatttctaaatttaaaatcgctctctttaatcacaaagacacaagcgatgatgaaaaagaaagcctaagcattgacagaatagacaaaagaaagccagtaagcgaacacttaaaaaacatgagcaaacacgaattatacgaactcttaggcttttatcaaaaagaattagataaaaaacaaaaccattcagcctttaagaattttgctattctcaatggtttagacagagactttgaaagagagactaagggctattctgttttaaagaaaaaagaaatgcttttaaataagcttaaacacctagacaaacgccttttagataaaaactcacacttactattagcccagctaagaaatgaagttaaaaccaagcaaaacacccaatacaacactctaactaatcctattcttttagccaaagccttagaactttctaaagataaacgccccactctcaaaacttttaaaaacgcttattttagtgctagaaaatatcaattcatgctagagagctttaaaactaagcaaaatgaccccacttacaagcttaatgataacacttatgagctagtgagtaagcaactacaagactatcaaaacaccatgcttttattagccaaagagagattactttttttagaacaagatttaaaacaaaaagaagaagagtttgaaagagccaaagaacattatgtgaaatctttaaaacattatagagaaacttcattgtctccaaaagaaaaacaaggctttctcaaacaaattaaacaattttctaaaatttctaaggatattctctatacttgtaatgagatcataggagctaataggtttttaacccactatgacaacctaaaccttgaaaaagtcctagaacacgctaaagatactaagctagagcaaaaagaaattcaagctatcacaaaagagcctaataacgatgagccttggattgagtttggtaaaaaagaacaagctagagctaaagcacactatcaagctatgctagaaaaagaaaaagctaaagaattagccaaacaacaagctaacaccttgcactctaatgagcttgatgatgaccctaaagctcatgctggattaaaacaaaatggcaacacaaactctaaagggcgtaatagataa

SEQ ID NO: 3344 - DNA (genomic), 2040 bp, Helicobacter pylori; double-stranded, circular
  misc_feature (B) LOCATION 1...2040
  hypothetical: NO
  anti-sense: NO
agggtttgtatgctagatagggctatattagatactaagctagatagtcgccctatggacttatctttcttagatgatattttaaagcatatgcaaaagcctagatttagtgatagcgataaagtagataaaagattgctcattaagttcaatcaatttaaccctaactcaaagtttattaaatctaatctagttggcacaaaaacagctagtcctgtgcttattaaaaacatagggcaaatgaaacgctcccacttagaaaatgctctaaattatgctttagaaaatagtgaaacagcttacaatgaaatgtttttagaatgcgataagcaattcatcttagagagttggctcaatgactttgatttgactaaagattataacgagactatgcacttagttttttctatcaaagataagccagatgaagagacaatgcaagggcttttacattctacttgggagagcttaaaaataagattgcctgaatacaagtttgcccttgtgccacacgctcatcaagaccatgcccatatccattgttttatcaataagactaatcaactaacacgaagaagactgcgttttaaagggcgtgaggattgtaaggaattttttaacgaattaagaagtgagtttgcttatagactaaatgagcatttattaagcgaagaatacttgtatgtcaatgagcctaaactcaaggaattagacaatatcaaacttcaattacaagacttagaaaaagaagaaaaagccttagagcaaatcaaatccccacaagatgagtgggacttaaacaaggctttacaaaaagaatacctacaagaactcaaagataaaaacaaagcaaaagccctagacattcaaaacaaccacagcacccctttaaaacaaaagatttctaaatttaaaatcgctctctttaatcacaaagacacaagcgatgatgaaaaagaaagcctaagcattgacagaatagacaaaagaaagccagtaagcgaacacttaaaaaacatgagcaaacacgaattatacgaactcttaggcttttatcaaaaagaattagataaaaaacaaaaccattcagcctttaagaattttgctattctcaatggtttagacagagactttgaaagagagactaagggctattctgttttaaagaaaaaagaaatgcttttaaataagcttaaacacctagacaaacgccttttagataaaaactcacacttactattagcccagctaagaaatgaagttaaaaccaagcaaaacacccaatacaacactctaactaatcctattcttttagccaaagccttagaactttctaaagataaacgccccactctcaaaacttttaaaaacgcttattttagtgctagaaaatatcaattcatgctagagagctttaaaactaagcaaaatgaccccacttacaagcttaatgataacacttatgagctagtgagtaagcaactacaagactatcaaaacaccatgcttttattagccaaagagagattactttttttagaacaagatttaaaacaaaaagaagaagagtttgaaagagccaaagaacattatgtgaaatctttaaaacattatagagaaacttcattgtctccaaaagaaaaacaaggctttctcaaacaaattaaacaattttctaaaatttctaaggatattctctatacttgtaatgagatcataggagctaataggtttttaacccactatgacaacctaaaccttgaaaaagtcctagaacacgctaaagatactaagctagagcaaaaagaaattcaagctatcacaaaagagcctaataacgatgagccttggattgagtttggtaaaaaagaacaagctagagctaaagcacactatcaagctatgctagaaaaagaaaaagctaaagaattagctaaacaacaagctaacaccttgcactctaatgagcttgatgatgaccctaaagctcatgctggattaaaacaaaatggcaacacaaactctaaagggcgtaataga

SEQ ID NO: 3345 - DNA (genomic), 705 bp, Helicobacter pylori; double-stranded, circular
  misc_feature (B) LOCATION 1...705
  hypothetical: NO
  anti-sense: NO
atgaattataaagaattactagaatttaacgattacgctatggatttgactattcgcatggctcatcatagcaccgctattgaaaacaatcctttgagccttgctgaaattataagtattttaaccactgaatacattcctagagaaatgccccaaagagccttctttgaagtgaaaaactatcaaaacatgctcttctttctgttagaaaacctgaataaaagacaaagcatggatagtttttttataagggagttgcatgggattttaatgaattttttactccctaataagggggctttcaaaacgactgataataccattttaggagctagttttgaaacgaccccccattttcaagcgcctatggctatgaaagaatggtgcgataacctcaattataagatgaagaccttacaagataaagaagaaaaactaaaagccattttagaacaacacattttgtttgaaaggatacacccttttagcgatggtaatggtagggtgggcagaattctaatcttttatagtgctttagagcaaaatttaataccatttgtgatcactaaagagcaaaaagaggcttacattaaggctttagacacgcgcaatacagaaagcttataccaactcgctaaagtatcccaagagtttgaactcacacgcatacaagggcaaatggtactcaataagaataagccctaa

SEQ ID NO: 3346 - DNA (genomic), 705 bp, Helicobacter pylori; double-stranded, circular
  misc_feature (B) LOCATION 1...705
  hypothetical: NO
  anti-sense: NO
gtaatgaattataaagaattactagaatttaacgattacgctatggatttgactattcgcatggctcatcatagcaccgctattgaaaacaatcctttgagccttgctgaaattataagtattttaaccactgaatacattcctagagaaatgccccaaagagccttctttgaagtgaaaaactatcaaaacatgctcttctttctgttagaaaacctgaataaaagacaaagcatggatagtttttttataagggagttgcatgggattttaatgaattttttactccctaataagggggctttcaaaacgactgataataccattttaggagctagttttgaaacgaccccccattttcaagcgcctatggctatgaaagaatggtgcgataacctcaattataagatgaagaccttacaagataaagaagaaaaactaaaagccattttagaacaacacattttgtttgaaaggatacacccttttagcgatggtaatggtagggtgggcagaattctaatcttttatagtgctttagagcaaaatttaataccatttgtgatcactaaagagcaaaaagaggcttacattaaggctttagacacgcgcaatacagaaagcttataccaactcgctaaagtatcccaagagtttgaactcacacgcatacaagggcaaatggtactcaataagaataagccc

SEQ ID NO: 3347 - DNA (genomic), 927 bp, Helicobacter pylori; double-stranded, circular
  misc_feature (B) LOCATION 1...927
  hypothetical: NO
  anti-sense: NO
ttgcaagaaatagaaaatctgcaccaaagcgttttgttgcaagaagtcttgcaggcgttcacgcctttagaagaagggattttgattgattgcactttagggttaggggggcattctaaagcgattctatcccaaaaaccgcacctgaaactcattggcattgataaagataagttcgctcaagaaatcgctaaagaacgattgaaagaatttgaagggcgttacaacctcttaagcggaggttttgccaaacgctttaaagaagccctagaaattcatggcgagcgaatcaagggggttttagtggatttaggggtgagttccttacagcttgatgatgacaatagagggtttaatttccgctcgcatgctttggatatgcgcatggatttggaaagcgaattgaacgctcaaaaagtcatcaactcttatcctgtagtggcgttagaaaaaatctttagagactatggcgaaatcaaagaatacaaaaaaatcgcccacaaaattgcagaaagacgcgctaaaaaaccctttaaagacgctaaggatttgagcgagtttttaagctccctttctaaaaataaaaaaatccacccagcgacattagtgtttcaagccgttcgcatagaagtcaatagcgaattagaagaattaaaagaatttttacaatgcgctagaaaccttaaggaggcgattttgtgcgtgatttcttttcattctttagaagacgcgttagtgaaaaacgcctttaaagattacgccaaaaattgcatttgcgatccttcaagcttcaaatgcgcttgctctaacaatcacgctttaggcgcaattttaaccaaaaagcccatcactccaagcccagaagaaattaaaaacaacaggcgttcacgaagcgctaaaatgagggtgttccaattcaagccatga

SEQ ID NO: 3348 - DNA (genomic), 933 bp, Helicobacter pylori; double-stranded, circular
  misc_feature (B) LOCATION 1...933
  hypothetical: NO
  anti-sense: NO
ggggattgtttgcaagaaatagaaaatctgcaccaaagcgttttgttgcaagaagtcttgcaggcgttcacgcctttagaagaagggattttgattgattgcactttagggttaggggggcattctaaagcgattctatcccaaaaaccgcacctgaaactcattggcattgataaagataagttcgctcaagaaatcgctaaagaacgattgaaagaatttgaagggcgttacaacctcttaagcggaggttttgccaaacgctttaaagaagccctagaaattcatggcgagcgaatcaagggggttttagtggatttaggggtgagttccttacagcttgatgatgacaatagagggtttaatttccgctcgcatgctttggatatgcgcatggatttggaaagcgaattgaacgctcaaaaagtcatcaactcttatcctgtagtggcgttagaaaaaatctttagagactatggcgaaatcaaagaatacaaaaaaatcgcccacaaaattgcagaaagacgcgctaaaaaaccctttaaagacgctaaggatttgagcgagtttttaagctccctttctaaaaataaaaaaatccacccagcgacattagtgtttcaagccgttcgcatagaagtcaatagcgaattagaagaattaaaagaatttttacaatgcgctagaaaccttaaggaggcgattttgtgcgtgatttcttttcattctttagaagacgcgttagtgaaaaacgcctttaaagattacgccaaaaattgcatttgcgatccttcaagcttcaaatgcgcttgctctaacaatcacgctttaggcgcaattttaaccaaaaagcccatcactccaagcccagaagaaattaaaaacaacaggcgttcacgaagcgctaaaatgagggtgttccaattcaagcca

SEQ ID NO: 3349 - DNA (genomic), 96 bp, Helicobacter pylori; double-stranded, circular
  misc_feature (B) LOCATION 1...96
  hypothetical: NO
  anti-sense: NO
gtggaaaaatatcgtcatcgcaggtgttacaaacaaacccaatggtgctggcgctatcacatccactggtcatgtaaccgactatgcggtgtttaa

SEQ ID NO: 3350 - DNA (genomic), 357 bp, Helicobacter pylori; double-stranded, circular
  misc_feature (B) LOCATION 1...357
  hypothetical: NO
  anti-sense: NO
gatacccgcttattacacccaacaggggttgggactttgatcgctcaaggcaaggaatcaagggaatttaacggcaaggagtatattttagaaagagccataacaggcgattatgggcttatcaaagcctataaaagcgacactcttgggaatttggtgtttagaaaaacggcccgaaatttcaaccctttgtgcgcgatggcagcaaaaatatgcgtcgctgaagtggaagaaattgtcccggccggggaattagacccagatgaaatacacttgccaggaatctatgtgcaacacatctataagggcgagaaatttgaaaaacggatagaaaaaaccaccacaaggagtgcgaaa

SEQ ID NO: 3351 - DNA (genomic), 699 bp, Helicobacter pylori; double-stranded, circular
  misc_feature (B) LOCATION 1...699
  hypothetical: NO
  anti-sense: NO
atgaacaaggttataaccgatttagacaaagcgttgagcggattaaaagatggggatactattttagtgggcggttttgggctgtgcgggatacccgaatacgccattgattacatttataagaaaggcattaaggatttgattgtcgtgagcaataattgtggcgttgatgactttgggttgggtattcttttggaaaaaaagcagattaaaaagattatcgcttcctatgtgggggaaaataagatttttgaatcgcaaatgttgaatggagaaattgaagtcgttttgacaccgcaaggcacgctggctgaaaacttgcgcgctggaggggctgggatacccgcttattacaccccaacaggggttgggactttgatcgctcaaggcaaggaatcaagggaatttaacggcaaggagtatattttagaaagagccataacaggcgattatgggcttatcaaagcctataaaagcgacactcttgggaatttggtgtttagaaaaacggcccgaaatttcaaccctttgtgcgcgatggcagcaaaaatatgcgtcgctgaagtggaagaaattgtcccggccggggaattagacccagatgaaatacacttgccaggaatctatgtgcaacacatctataagggcgagaaatttgaaaaacggatagaaaaaaccaccacaaggagtgcgaaatga

SEQ ID NO: 3352 - DNA (genomic), 402 bp, Helicobacter pylori; double-stranded, circular
  misc_feature (B) LOCATION 1...402
  hypothetical: NO
  anti-sense: NO
atgagggcgaatttagacgagttggacaaagtggcggctgcaattttaaaagatgattttaagggggtggtgcttttaaagggcgttgtagggagcggtaaaacgactttagttcaagcgtgcttgaaacatttgggtttagacattcaagcgacttcgcccacctttagcttgatgcatgcttatagcgagagcgtgttccattatgatttttacatgcgcgatttagagacttgcttggagcttggcatgttagagtgtttgttagaaaaggggatccattttgtggaatggggcgatgaaaaattagaaaaaattttaaaaaaatacgatttagctattaaggttgtggaaatcaaaaccgaatcaactagccgtttttatacgataaagatcgcttaa

SEQ ID NO: 3353 - DNA (genomic), 420 bp, Helicobacter pylori; double-stranded, circular
  misc_feature (B) LOCATION 1...420
  hypothetical: NO
  anti-sense: NO
aatcaaaagcgtggaattgttatgagggcgaatttagacgagttggacaaagtggcggctgcaattttaaaagatgattttaagggggtggtgcttttaaagggcgttgtagggagcggtaaaacgactttagttcaagcgtgcttgaaacatttgggtttagacattcaagcgacttcgcccacctttagcttgatgcatgcttatagcgagagcgtgttccattatgatttttacatgcgcgatttagagacttgcttggagcttggcatgttagagtgtttgttagaaaaggggatccattttgtggaatggggcgatgaaaaattagaaaaaattttaaaaaaatacgatttagctattaaggttgtggaaatcaaaaccgaatcaactagccgtttttatacgataaagatcgct

SEQ ID NO: 3354 - DNA (genomic), 306 bp, Helicobacter pylori; double-stranded, circular
  misc_feature (B) LOCATION 1...306
  hypothetical: NO
  anti-sense: NO
aatggggcttttgttaattggatgattcctaaaaaacttataaagggcatgggaggggctatggatttggtgcatggtgctaaaaaagtgattgtcatcatggagcattgcaacaaatacggggagtctaaagtgaaaaaagaatgctcattgcctttaacaggaaaaggcgtggtgcatcaattgataacggatttagcggtgtttgagttctccaataacgccatggaattagtggaattgcaagaaggggtcagccttgatcaagtgaaagaaaaaacagaagctgaatttgaagtgcatcta

SEQ ID NO: 3355 - DNA (genomic), 303 bp, Helicobacter pylori; double-stranded, circular
  misc_feature (B) LOCATION 1...303
  hypothetical: NO
  anti-sense: NO
ggggcttttgttaattggatgattcctaaaaaacttataaagggcatgggaggggctatggatttggtgcatggtgctaaaaaagtgattgtcatcatggagcattgcaacaaatacggggagtctaaagtgaaaaaagaatgctcattgcctttaacaggaaaaggcgtggtgcatcaattgataacggatttagcggtgtttgagttctccaataacgccatggaattagtggaattgcaagaaggggtcagccttgatcaagtgaaagaaaaaacagaagctgaatttgaagtgcatcta

SEQ ID NO: 3356 - DNA (genomic), 624 bp, Helicobacter pylori; double-stranded, circular
  misc_feature (B) LOCATION 1...624
  hypothetical: NO
  anti-sense: NO
atgagagaggctatcattaaacgagcggcaaaggaattgaaagagggcatgtatgtgaatttagggataggcttgcctacgctggtggctaatgaagtgagcgggatgaatatcgttttccaaagcgagaacgggctattagggattggcgcttaccctttagaggggggcgttgatgcggatcttatcaacgcaggaaaggaaaccataaccgtggtgccgggcgcttcgtttttcaacagcgcggattcgtttgcgatgattcgtggggggcatattgatttagcgatcttaggagggatggaagtctcacagaatggggatttggctaattggatgatccctaaaaaactcataaagggcatgggaggggctatggatttggtgcatggtgctaaaaaagtgattgtcatcatggagcattgcaacaaatacggggagtctaaagtgaaaaaagaatgctcattgcctttaacaggaaaaggcgtggtgcatcaattgataacggatttagcggtgtttgagttctccaataacgccatggaattagtggaattgcaagaaggggtcagccttgatcaagtgaaagaaaaaacagaagctgaatttgaagtgcatctataa

SEQ ID NO: 3357 - DNA (genomic), 141 bp, Helicobacter pylori; double-stranded, circular
  misc_feature (B) LOCATION 1...141
  hypothetical: NO
  anti-sense: NO
atggaggcgatagcgattggccaccctatttgcgcgggcggcgctaggatattagtcactttattgcatgaaatgaaaaggagtgggcatgacgtgggttgcgcgtcattgtgcgtgggtggcggtcaagggctatcagtg

SEQ ID NO: 3358 - DNA (genomic), 153 bp, Helicobacter pylori; double-stranded, circular
  misc_feature (B) LOCATION 1...153
  hypothetical: NO
  anti-sense: NO
ctcaaagcgagagccgccatcaatgcagggaaattccaagaagaaatcacgcctattgaaatagcgaataaaaaaggcgtggtggtttttaaagaagacgaataccctagaggacacgacgctagaatcccttgcaaagctcaaacccgcctt

SEQ ID NO: 3359 - DNA (genomic), 162 bp, Helicobacter pylori; double-stranded, circular
  misc_feature (B) LOCATION 1...162
  hypothetical: NO
  anti-sense: NO
aacttattagggtttcaatcacttaaaagtgataccatgatttggataaatcaacttaaaggcaaagacatgaatgaagtggttgtagtggcggcaaagcgtagcgctgtagggagttttttaggctctctaaagaatgtgggcgctagcccaaatgggcgt

SEQ ID NO: 3360 - DNA (genomic), 165 bp, Helicobacter pylori; double-stranded, circular
  misc_feature (B) LOCATION 1...165
  hypothetical: NO
  anti-sense: NO
agaatgtgggcgctagcccaaatgggcgttagcgtgcttaaagacgctttgaatgcgagctctcttaagcctagcgatgtggattctgttattttaggcaatgttttaggcgctggtttgggtcaaaatatcgccagacagatccaactggcacgccggtatccc

SEQ ID NO: 3361 - DNA (genomic), 309 bp, Helicobacter pylori; double-stranded, circular
  misc_feature (B) LOCATION 1...309
  hypothetical: NO
  anti-sense: NO
tggtgcgagtattatcattttatgcgcgctaaaaaagcgcaaaaactggggttaaaaacaatggccactatcaaggggtttggtttgggtggttgcagtccggatattatgggcatatgcccaagcatcgctattaaaaacaatcttaaaaatatcaaaatgaatctcaacgacatcaatctttttgaactcaatgaagcctttgccgcgcagagtattgccgtgctaaaagagcttgaattaaaccccaatatcgtaaatgtgaatggaggcgatagcgattggccaccctatttgcgcgggcggcgc

SEQ ID NO: 3362 - DNA (genomic), 411 bp, Helicobacter pylori; double-stranded, circular
  misc_feature (B) LOCATION 1...411
  hypothetical: NO
  anti-sense: NO
cgatgtggattctgttattttaggcaatgttttaggcgctggtttgggtcaaaatatcgccagacagatccaactggcacgccggtatccctaatgacagaaacgcttttagcgtcaatatggatttgcggatcgtctatgaaagctatccaattagcgcataatagcattgtacttgggtgcgatgaagtggtggtgtgcggcggcgtggagaacatgagcgcagcaccctatctgtcgtttgacatgcgagaggggaaaagaatggggaatgcgaacatgatagactccatgatacatgacggattgtgggatgcgttcaatgattaccacatggggatcaccgctgataatgtcgctcaagcgtaccacataagccgagaagatcaagacgcattcgcgctccaatcg

SEQ ID NO: 3363 - DNA (genomic), 1176 bp, Helicobacter pylori; double-stranded, circular
  misc_feature (B) LOCATION 1...1176
  hypothetical: NO
  anti-sense: NO
atgaatgaagtggttgtagtggcggcaaagcgtagcgctgtagggagttttttaggctctctaaagaatgtgggcgctaggcaaatgggcgttagcgtgcttaaagacgctttgaatgcgagctctcttaagcctagcgatgtggattctgttattttaggcaatgttttaggcgctggtttgggtcaaaatatcgccagacagatccaactggacgccggtatccctaatgacagaaacgcttttagcgtcaatatggtttgcggatcgtctatgaaagctatccaattagcgcatgatagcattgtacttgggtgcgatgaagtggtggtgtgcggtggcgtggagaacatgagcgcagcaccctatctgtcgtttgacatgcgagaggggaaaagaatggggaatgcgaacatgatagactccatgatacatgacggattgtgggatgcgttcaatgattaccacatggggatcaccgctgataatgtcgctcaagcgtaccacataagccgagaagatcaagacgcattcgcgctccaatcgcaactcaaagcgagagccgccatcaatgcagggaaattccaagaagaaatcacgcctattgaaatagcgaataaaaaaggcgtggtggtttttaaagaagacgaataccctagagacacgacgctagaatcccttgcaaagctcaaacccgcctttaaaaaagacggatcggtaacggcaggaaattcatcagggatcaatgatggtgcgagtattatcattttatgcagcgctaaaaaagcgcaaaaactggggttaaaaacaatggccactatcaaggggtttggtttgggtggttgcagtccggatattatgggcatatgcccaagcatcgctattaaaaacaatcttaaaaatatcaaaatgaatctcaacgacatcaatctttttgaactcaatgaagcctttgccgcgcagagtattgccgtgctaaaagagcttgaattaaaccccaatatcgtaaatgtgaatggaggcgcgatagcgattggccaccctattggcgcgagcggcgctaggatattagtcactttattgcatgaaatgaaaaggagtgggcatggcgtgggttgcgcgtcattgtgcgtgggtggcggtcaagggctatcagtggtagtggaacaaaaataa

SEQ ID NO: 3364 - DNA (genomic), 225 bp, Helicobacter pylori; double-stranded, circular
  misc_feature (B) LOCATION 1...225
  hypothetical: NO
  anti-sense: NO
ttgaaacgaagcaaactctcttcagtgccttttttgtcaaaaagacaaatatctaaatccgtgcaagcgataaaaatagacgcgaacaataaggcgatcaaataccccccaagcgtggataacaccgtccataatagaatgctctctggctcattgaatttcaacaccgaaaacactaaccctaagaaaaaccccaccacaacagaaaaatggataaaattttga

SEQ ID NO: 3365 - DNA (genomic), 267 bp, Helicobacter pylori; double-stranded, circular
  misc_feature (B) LOCATION 1...267
  hypothetical: NO
  anti-sense: NO
tttaaaatactagccacttctttttctctgtttttaaactcatggttgaaacgaagcaaactctcttcagtgccttttttgtcaaaaagacaaatatctaaatccgtgcaagcgataaaaatagacgcgaacaataaggcgatcaaataccccccaagcgtggataacaccgtccataatagaatgctctctggctcattgaatttcaacaccgaaaacactaaccctaagaaaaaccccaccacaacagaaaaatggataaaattt

SEQ ID NO: 3366 - DNA (genomic), 468 bp, Helicobacter pylori; double-stranded, circular
  misc_feature (B) LOCATION 1...468
  hypothetical: NO
  anti-sense: NO
atgggtatttgcaagatgtcatgcaaaagggtagtgaagctaaatcaaagggttttaaacctcgctattaatacagaatttcaagtgcctttagagcatggcatttttagcatagagcagagctattgtttagagcatgctaaagagggcgagaaaggcttttttgaaagccaccgacaatatgtggatttccaattgatcatcaaaggcgttgagggggctaaggtggcagatataaatagagctgtcattaaaaccccttacgatgaaaaaagagatttgatcgtttatgagccggtcagtgaagcttcttttttgcatttagatgcgggcatgctggctatttttttggaaaacgatgcgcatgcgttgagattctatggggagtcttttgaaaaatatagggaagagccgatttttaaagcggtcgttaaaatgcctaaaggattgatcaaattaaaattatga

SEQ ID NO: 3367 - DNA (genomic), 474 bp, Helicobacter pylori; double-stranded, circular
  misc_feature (B) LOCATION 1...474
  hypothetical: NO
  anti-sense: NO
aaattttgcatgggtatttgcaagatgtcatgcaaaagggtagtgaagctaaatcaaagggttttaaacctcgctattaatacagaatttcaagtgcctttagagcatggcatttttagcatagagcagagctattgtttagagcatgctaaagagggcgagaaaggcttttttgaaagccaccgacaatatgtggatttccaattgatcatcaaaggcgttgagggggctaaggtggcagatataaatagagctgtcattaaaaccccttacgatgaaaaaagagatttgatcgtttatgagccggtcagtgaagcttcttttttgcatttagatgcgggcatgctggctatttttttggaaaacgatgcgcatgcgttgagattctatggggagtcttttgaaaaatatagggaagagccgatttttaaagcggtcgttaaaatgcctaaaggattgatcaaattaaaatta

SEQ ID NO: 3368 - DNA (genomic), 177 bp, Helicobacter pylori; double-stranded, circular
  misc_feature (B) LOCATION 1...177
  hypothetical: NO
  anti-sense: NO
atatacacgggattacccaataaggcttatctggactacatggaaatccaagaaatcattcaaaacaccatgcgagaaaaacaatactttctcattgaagacgcattgaaagatttgagccagattttaaaaacgcgctacaagaaaatctctgagttttttttgaaatcagcaagt

SEQ ID NO: 3369 - DNA (genomic), 354 bp, Helicobacter pylori; double-stranded, circular
  misc_feature (B) LOCATION 1...354
  hypothetical: NO
  anti-sense: NO
atgaaaactaaacaagccgtccatatccataacttggtgtttgaaacgattttagggattttagagtttgaacgcttaaaaccccaaaaaataagcgtggatttggatcttttctacacggaattacccaataaggcttatttggactacatggaaatccaagaaatcattcaaaacaccatgcgagaaaaacaataccttctcattgaagacgccttgaaagatttgagccaaattttaaaaacgcgctacaagaaaatctctgagctttttttgaaaatcagcaagttagaaatttctcccaattctcaagtgggggcgagcatgaaaatttactatgaaaccaatctttag

SEQ ID NO: 3370 - DNA (genomic), 1002 bp, Helicobacter pylori; double-stranded, circular
  misc_feature (B) LOCATION 1...1002
  hypothetical: NO
  anti-sense: NO
ttgaataaggcgtgggaatatcaaaccctagccttagaaaacccaagcgtagcctgcatggtgctagataaaaaccatgagatcttgagtttagaaacccataaaaaagccaaaaccccgcatgcagaagtcttggctgctaaatcggcgttaaagattttacgcccccatttaaaaagcgatttagaaaaattagaagaccctaaaattttaagcgattttttaaaaacgcgccacgataacgcctttaaagactgcgtttttttaatcaccctagagccatgcaattcttatggcaaaaccccggcgtgcagcggattgttagaaatcttaaagcctaaaagagtgatcattgccacagaagaaaacgaagccaaaaaagggggtttagaaaggctacaaaaagctcacattgaaacaataatttgtcataatttagaaaacaaggctaaaaatttgctcttgccttttagggtaatggaacaaaaggggcgttttaatttgttcaaactcgctttaaggatgaatggggattatcatcatggcaagatcactgggcaaaaaagcgtgattttcacgcacaaccagcgagcggtatgcgacactctcatcatttctgggaaaaccataagaacggacaaccccttattagatgctcgcttttgcgatagcttttatcacaataaaaaccccaatatcgctattttatccaagcgctcaattagcccccattcaaaagttttttttgcgcccaatcgtttggttaatacttttcatgaccctaaagatttacccctagagaaagggtttaatttcattgaaggggggtggggattgtttgagggtttgagggataaaattgatgcgttgcttttgcattcgcatgcgtctatgattggtgaagcgtttaatacgctcgctctaaaaaccccttttaaagggcggttgttgcatgcgcaaatcttagaaaatgaagcccttttatggatagaaaactcttaa

SEQ ID NO: 3371 - DNA (genomic), 1035 bp, Helicobacter pylori; double-stranded, circular
  misc_feature (B) LOCATION 1...1035
  hypothetical: NO
  anti-sense: NO
atgagactttatgaaagtttattagaaatttgcttgaataaggcgtgggaatatcaaaccctagccttagaaaacccaagcgtagcctgcatggtgctagataaaaaccatgagatcttgagtttagaaacccataaaaaagccaaaaccccgcatgcagaagtcttggctgctaaatcggcgttaaagattttacgcccccatttaaaaagcgatttagaaaaattagaagaccctaaaattttaagcgattttttaaaaacgcgccacgataacgcctttaaagactgcgtttttttaatcaccctagagccatgcaattcttatggcaaaaccccggcgtgcagcggattgttagaaatcttaaagcctaaaagagtgatcattgccacagaagaaaacgaagccaaaaaagggggtttagaaaggctacaaaaagctcacattgaaacaataatttgtcataatttagaaaacaaggctaaaaatttgctcttgccttttagggtaatggaacaaaaggggcgttttaatttgttcaaactcgctttaaggatgaatggggattatcatcatggcaagatcactgggcaaaaaagcgtgattttcacgcacaaccagcgagcggtatgcgacactctcatcatttctgggaaaaccataagaacggacaaccccttattagatgctcgcttttgcgatagcttttatcacaataaaaaccccaatatcgctattttatccaagcgctcaattagcccccattcaaaagttttttttgcgcccaatcgtttggttaatacttttcatgaccctaaagatttacccctagagaaagggtttaatttcattgaaggggggtggggattgtttgagggtttgagggataaaattgatgcgttgcttttgcattcgcatgcgtctatgattggtgaagcgtttaatacgctcgctctaaaaaccccttttaaagggcggttgttgcatgcgcaaatcttagaaaatgaagcccttttatggatagaaaactcttaa

SEQ ID NO: 3372 - DNA (genomic), 1035 bp, Helicobacter pylori; double-stranded, circular
  misc_feature (B) LOCATION 1...1035
  hypothetical: NO
  anti-sense: NO
accatgagactttatgaaagtttattagaaatttgcttgaataaggcgtgggaatatcaaaccctagccttagaaaacccaagcgtagcctgcatggtgctagataaaaaccatgagatcttgagtttagaaacccataaaaaagccaaaaccccgcatgcagaagtcttggctgctaaatcggcgttaaagattttacgcccccatttaaaaagcgatttagaaaaattagaagaccctaaaattttaagcgattttttaaaaacgcgccacgataacgcctttaaagactgcgtttttttaatcaccctagagccatgcaattcttatggcaaaaccccggcgtgcagcggattgttagaaatcttaaagcctaaaagagtgatcattgccacagaagaaaacgaagccaaaaaagggggtttagaaaggctacaaaaagctcacattgaaacaataatttgtcataatttagaaaacaaggctaaaaatttgctcttgccttttagggtaatggaacaaaaggggcgttttaatttgttcaaactcgctttaaggatgaatggggattatcatcatggcaagatcactgggcacaaacgcgtgattttcacgcaccaccagcgagccgtatgcgacactctcatcatttctgggaaaaccataagaacggacaaccccttattagatgctcgcttttgcgatagcttttatcacaataaaaaccccaatatcgctattttatccaagcgctcaattagcccccattcaaaagttttttttgcgcccaatcgtttggttaatacttttcatgaccctaaagatttacccctagagaaagggtttaatttcattgaaggggggtggggattgtttgagggtttgagggataaaattgatgcgttgcttttgcattcgcatgcgtctatgattggtgaagcgtttaatacgctcgctctaaaaaccccttttaaagggcggttgttgcatgcgcaaatcttagaaaatgaagcccttttatggatagaaaactct

SEQ ID NO: 3373 - DNA (genomic), 249 bp, Helicobacter pylori; double-stranded, circular
  misc_feature (B) LOCATION 1...249
  hypothetical: NO
  anti-sense: NO
cgaagtttgaatacaaagagcaatgggcgtttgataaggcttattaaagaagcagggattttaggggttttaggggctgggtttgatccaggcgttacgaacgcttatgtcgctcatgctcaaagacaccattttgacaccatccacactttagatattttagactgcaacgctggggatcacaaacgcccttttgctacgaattttaaccctggaatcaatttgagaggagtcagctttaagggcgtt

SEQ ID NO: 3374 - DNA (genomic), 276 bp, Helicobacter pylori; double-stranded, circular
  misc_feature (B) LOCATION 1...276
  hypothetical: NO
  anti-sense: NO
atcgtgccgatacaattcttatacacttgcttccgtgatccagagtccttagccatagacactaccggcaaaaccaatatcgggtgctatatgaccggcattaaatacaaccaagacaacacgttctatatttacaacgtgtgcgatcacaaaaaatgctatgaagaagtgggttcgcaagccataagatacaccaccggcgtgccagcgatgtgtgcggctaaaatgatttgcaaagacacttggagcgtggagcattttaaagccggggttttt

SEQ ID NO: 3375 - DNA (genomic), 405 bp, Helicobacter pylori; double-stranded, circular
  misc_feature (B) LOCATION 1...405
  hypothetical: NO
  anti-sense: NO
ttagaaagtaggtgttccttgcatacagtattacaaattggagctggtggcgtaggcagtgtcgtggcgcacaaaatgggcatgaacagagatgtgtttaaaaatatcattctggcgagcaggagcttagacaaatgccatgtgattaaagaaagcatgctcaaaaagggtttgggggaaattggcgttgaacaagtggatgcagacgatacgcaagccttaatcgctttaatccaaaaacacaagcccaaagtcgttgttaatgtggcgttaccctatcaggatttaacgatcatgcaagcatgtttagagactaaaacgcattacattgataccgccaattacgagcatccggatttagcgaagtttgaatacaaagagcaatgggcgtttgataaggcttat

SEQ ID NO: 3376 - DNA (genomic), 1200 bp, Helicobacter pylori; double-stranded, circular
  misc_feature (B) LOCATION 1...1200
  hypothetical: NO
  anti-sense: NO
ttgcatacagtattacaaattggagctggtggcgtaggcagtgtcgtggcgcacaaaatgggcatgaacagagatgtgtttaaaaatatcattctggcgagcaggagcttagacaaatgccatgcgattaaagaaagcatgctcaaaaagggtttgggggaaattggcgttgaacaagtggatgcagacgatacgcaagccttaatcgctttaatccaaaaacacaagcccaaagtcgttgttaatgtggcgttaccctatcaggatttaacgatcatgcaagcatgtttagagactaaaacgcattacattgataccgccaattacgagcatccggatttagcgaagtttgaatacaaagagcaatgggcgtttgataaggcttataaagaagcagggattttaggggttttaggggctgggtttgatccaggcgttacgaacgcttatgtcgctcatgctcaaagacaccattttgacaccatccacactttagatattttagactgcaacgctggggatcacaaacgcccttttgctacgaattttaaccctgaaatcaatttgagagaagtcagctctaaagggcgttattatgaaaacggcaagtggattgaaaccaagcctttagaaatcaagcaagtgtgggcttacccgcagattggcgaaatggattcgtatcttttataccatgaagaattggaatcgttagtcaaaaacgttaaaggcttgaggagggcgaggttttttatgactttctctcaaaactatttaacccacatgaaatgcttagaaaatgtcggcatgctaggcattaaagaaatagagcatcagggcgtgaaaatcgtgccgatacaatttttaaaaaccttgctccctgatccagagtccttagccaaagacactaccggcaaaaccaatatcgggtgctatatgaccggcattaaaaacaaccaagacaaaacgctctatatttacaacgtgtgcgatcacaaaaaatgctatgaagaagtgggttcgcaagccataagctacaccaccggcgtgccagcgatgtgtgcggctaaaatgatttgcaacgacacttggagcgtggagcattttaaagccggggtgtttaacgtagaagaattaaacaccgatcccttcatggaagaattgatcaaacaaggcttgccttatgaagtgattgagcgctag

SEQ ID NO: 3377 - DNA (genomic), 288 bp, Helicobacter pylori; double-stranded, circular
  misc_feature (B) LOCATION 1...288
  hypothetical: NO
  anti-sense: NO
gtgaaacttttaggcatcaaatgcgataaaaaagtccccactaataaagctattgcaatgagagctaaagtttctacaaaactggatgcagtgattaggcgctgctctttaggggtttcaaaacctttagacaccacgccctctaaagtgtctttttctttagtgtctttaggttctagtttgtatttagaaatcaaatatttagcgacaggccctccaataatccccccgctcaccaagccaaaagtcgcgcacgccatgcccacttccaagctagagctaaaatga

SEQ ID NO: 3378 - DNA (genomic), 417 bp, Helicobacter pylori; double-stranded, circular
  misc_feature (B) LOCATION 1...417
  hypothetical: NO
  anti-sense: NO
gctaaaaacaggctcaagctcacattccctataactgaaacctctctgtcaaacacgctatggattttaaaaaacgacaaagcgttccttaagataacccccacaaacaaacaccacacgaaagtcggtaaggtgaaacttttaggcatcaaatgcgataaaaaagtccccactaataaagctattgcaatgagagctaaagtttctacaaaactggatgcagtgattaggcgctgctctttaggggtttcaaaacctttagacaccacgccctctaaagtgtctttttctttagtgtctttaggttctagtttgtatttagaaatcaaatatttagcgacaggccctccaataatccccccgctcaccaagccaaaagtcgcgcacgccatgcccacttccaagctagagctaaaa

SEQ ID NO: 3379 - DNA (genomic), 432 bp, Helicobacter pylori; double-stranded, circular
  misc_feature (B) LOCATION 1...432
  hypothetical: NO
  anti-sense: NO
atggatagaaaactcttaagattataccagcccttaaacgcttattcttacaatagcgattcgctttttttatacgatttttcacgcccttttatcaaaaatagcggcgcgattttagacataggctcagggtgtggggttctaggcttgctctgcgctagagacaacccgctagcgagcgttcatttagtggaaaaggatagcaaaatggcgttttgctcccaaaaaaacgcccttaaattccctaacgctcaagtgtttgagagcgattttttagattttaaccctccgattttgtatgatgcgattgtgtgcaaccctcctttttatgctttaggatctattaaatctcaaattaaagggcatgcgaggcaccagagcgaattagacttcgcttctttggtggctaaagtgaaaaaatgcctgaaaccc

SEQ ID NO: 3380 - DNA (genomic), 717 bp, Helicobacter pylori; double-stranded, circular
  misc_feature (B) LOCATION 1...717
  hypothetical: NO
  anti-sense: NO
atggatagaaaactcttaagattataccagcccttaaacgcttattcttacaatagcgattcgctttttttatacgatttttcacgcccttttatcaaaaatagcggcgcgattttagacataggctcagggtgtggggttctaggcttgctctgcgctagagacaacccgctagcgagcgttcatttagtggaaaaggatagcaaaatggcgttttgctcccaaaaaaacgcccttaaattccctaacgctcaagtgtttgagagcgattttttagattttaaccctccgattttgtatgatgcgattgtgtgcaaccctcctttttatgctttaggatctattaaatctcaaattaaagggcatgcgaggcaccagagcgaattagacttcgcttctttggtggctaaagtgaaaaaatgcctgaaacctaaagggtattttattttttgctatgaagccttgtcgctttgcttggtcatagagagcttaaaaagcgttaaactcacgctagaaactttaaggtttgtccaaagtttcaaagacaaaaacgcccatttgatgcttggagcggctaggaataattccaaaagcgctctaaaagttttgccccctttaatcacgcacaattccaaaaaccaaagcgacaacaccaaagaagttttaaacatctatcaaatttgtaacacttattctatcaaagcgcctttagattga

SEQ ID NO: 3381 - DNA (genomic), 723 bp, Helicobacter pylori; double-stranded, circular
  misc_feature (B) LOCATION 1...723
  hypothetical: NO
  anti-sense: NO
agcccttttatggatagaaaactcttaagattataccagcccttaaacgcttattcttacaatagcgattcgctttttttatacgatttttcacgcccttttatcaaaaatagcggcgcgattttagacataggctcagggtgtggggttctaggcttgctctgcgctagagacaacccgctagcgagcgttcatttagtggaaaaggatagcaaaatggcgttttgctcccaaaaaaacgcccttaaattccctaacgctcaagtgtttgagagcgattttttagattttaaccctccgattttgtatgatgcgattgtgtgcaaccctcctttttatgctttaggatctattaaatctcaaattaaagggcatgcgaggcaccagagcgaattagacttcgcttctttggtggctaaagtgaaaaaatgcctgaaacctaaagggtattttattttttgctatgaagccttgtcgctttgcttggtcatagagagcttaaaaagcgttaaactcacgctagaaactttaaggtttgtccaaagtttcaaagacaaaaacgcccatttgatgcttggagcggctaggaataattccaaaagcgctctaaaagttttgccccctttaatcacgcacaattccaaaaaccaaagcgacaacaccaaagaagttttaaacatctatcaaatttgtaacacttattctatcaaagcgcctttagat

SEQ ID NO: 3382 - DNA (genomic), 213 bp, Helicobacter pylori; double-stranded, circular
  misc_feature (B) LOCATION 1...213
  hypothetical: NO
  anti-sense: NO
aatcgcgaagcgattaaaaaggctttaggcaatccggtattcccccaagacgcgctagatgccgctttgcaaattgacaaacagctggattctttcaagcaagacaatttgattgatgttaagcccttaaaagatgttttagcccagctagaagccgaattgagaaaagccattgatttccaaaaacaatggctcaattctaccaaacctaat

SEQ ID NO: 3383 - DNA (genomic), 321 bp, Helicobacter pylori; double-stranded, circular
  misc_feature (B) LOCATION 1...321
  hypothetical: NO
  anti-sense: NO
atgcagaagtttttctctcgttttagaaggtgggcgttgcccttttattttgtgagcgctttagcagcgattgatattgatgaagtaacagaagctcaagctaatagcattaaattaagcgatcagttagtgagcctgagcgataagcttttagaaaaagcggtggatagggggcgcaataccgatcacttaaaagatcttaacgatttgcatgaaaaaatcaaacatttgcgcttgattttagagcctaagcctaagggcaaagaagatagtcctaacttgggaggtaataaggatatgaaaacggttgaaatcggaagc

SEQ ID NO: 3384 - DNA (genomic), 324 bp, Helicobacter pylori; double-stranded, circular
  misc_feature (B) LOCATION 1...324
  hypothetical: NO
  anti-sense: NO
atgcagaagtttttctctcgttttagaaggtgggcgttgcccttttattttgtgagcgctttagcagcgattgatattgatgaagtaacagaagctcaagctaatagcattaaattaagcgatcagttagtgagcctgagcgataagcttttagaaaaagcggtggatagggggcgcaataccgatcacttaaaagatcttaacgatttgcatgaaaaaatcaaacatttgcgcttgattttagagcctaagcctaagggcaaagaagatagtcctaacttgggaggtaataaggatatgaaaacggttgaaatcggaagcggt

SEQ ID NO: 3385 - DNA (genomic), 528 bp, Helicobacter pylori; double-stranded, circular
  misc_feature (B) LOCATION 1...528
  hypothetical: NO
  anti-sense: NO
atgcagaagtttttctctcgttttagaaggtgggcgttgcccttttattttgtgagcgctttagcagcgattgatattgatgaagtaacagaagctcaagctaatagcattaaattaagcgatcagttagtgagcctgagcgataagcttttagaaaaagcggtggatagggggcgcaataccgatcacttaaaagatcttaacgatttgcatgaaaaaatcaaacatttgcgcttgattttagagcctaagcctaaggacaaagaaaataatcctaacttaaaagatcatcaaggctctgaaacgattgaaatcggcgaagcgattaaaaaggctttaggcgatccggtattcccccaagacgcgctagatgccgctttgcaaattgacaaacagctggattctttcaagcaagacaatttgattgatgttaagcccttaaaagatgttttagcccagctagaagccgaattgagaaaagccattgatttccaaaaacaatggctcaattctaccaaacctaattga

SEQ ID NO: 3386 - DNA (genomic), 981 bp, Helicobacter pylori; double-stranded, circular
  misc_feature (B) LOCATION 1...981
  hypothetical: NO
  anti-sense: NO
gtgggctttggtaaaatccgatcaaagctcaacgatcaagaaaagcacgactctttagaagagatttacaaagccaccaacgaaaaaaattttttgcagctttttttgaccgattacgctaatttatttgccgctaaggtgataaaggtttctaaagagattgatgagagtttgatccctagctattataaagaaaaaaatttggaagtggaagacttttttattatcagcgatttaagggaattagtcagggaagactttagccttttaagggatcaatttttagccaattccatcgccccaaacaaccacacttacgccatttatgggaataattatgtctatcctttgccggtgagattgaaagaagagcgttcttattttttaggcgatgaaaagcattatttgagcgtgtataaaagcaacgaatatttaaccatgcaagaaaatttcatgcgttttgtttttggcaaaaggcttttttacctcttataccctgacagcatcaataacatcattcatgccgaattagagcttttacaaagcgaaaacgatcttttgaatgattttaccagcatcatcgtcaaatacaccaaaaccttagaatacgaaatttatacttttgctaaacaagttcttctaaaggcttgcgaaaaagatcccaacctttatgatttagcttataaagtccaaggaaaatcttttacacttaaagattttttcgctaaaaagcccaatcttgggagcattaaactcctactcaaacacgaaaaagtccaagatcatttagaagaaaacttaaaaagattcatcaattatccttttcaaaaaagcctaagcctcattcaaaatatccgcaataaagccgttcatcaaaaagctccaagtttgaatgaagtggaaaaactcaggaatgaaattttaggcatagaaggcgcgagcttactcaaaggcgttttaacccacaaggaaacttcataa

SEQ ID NO: 3387 - DNA (genomic), 1110 bp, Helicobacter pylori; double-stranded, circular
  misc_feature (B) LOCATION 1...1110
  hypothetical: NO
  anti-sense: NO
cgagatcaaacaaaacctcaaagaaatcctaaaataagacaaggcatgaaccaccttttaatcctttataacccttactatcaaaaagatgtgatccaacagcatttaagcgttttacaggaaaaatcccaagtgggctttggtaaaatccgatcaaagctcaacgatcaagaaaagcacgactctttagaagagatttacaaagccaccaacgaaaaaaattttttgcagctttttttgaccgattacgctaatttatttgccgctaaggtgataaaggtttctaaagagattgatgagagtttgatccctagctattataaagaaaaaaatttggaagtggaagacttttttattatcagcgatttaagggaattagtcagggaagactttagccttttaagggatcaatttttagccaattccatcgccccaaacaaccacacttacgccatttatgggaataattatgtctatcctttgccggtgagattgaaagaagagcgttcttattttttaggcgatgaaaagcattatttgagcgtgtataaaagcaacgaatatttaaccatgcaagaaaatttcatgcgttttgtttttggcaaaaggcttttttacctcttataccctgacagcatcaataacatcattcatgccgaattagagcttttacaaagcgaaaacgatcttttgaatgattttaccagcatcatcgtcaaatacaccaaaaccttagaatacgaaatttatacttttgctaaacaagttcttctaaaggcttgcgaaaaagatcccaacctttatgatttagcttataaagtccaaggaaaatcttttacacttaaagattttttcgctaaaaagcccaatcttgggagcattaaactcctactcaaacacgaaaaagtccaagatcatttagaagaaaacttaaaaagattcatcaattatccttttcaaaaaagcctaagcctcattcaaaatatccgcaataaagccgttcatcaaaaagctccaagtttgaatgaagtggaaaaactcaggaatgaaattttaggcatagaaggcgcgagcttactcaaaggcgttttaacccacaaggaaacttca

SEQ ID NO: 3388 - DNA (genomic), 354 bp, Helicobacter pylori; double-stranded, circular
  misc_feature (B) LOCATION 1...354
  hypothetical: NO
  anti-sense: NO
atggcgcgaaagagagggtataaagaaacgaacatggaagaatccaaaaagcgaacaactcttgatcgtttcccttgcacctcttgtgggctttgctgtaaaaatatcaccgggattattgagcttgttgggtttgacgctggcaatggggtgtgcaaatttttggatttagaaacgaatctgtgcaagatttatgaatcgcgcccgttaatttgcaggattgatgaagcgcacaaaaagctttattcccatattccgcttaaggagttttatgccaaaaacgcagaggtttgtaacgctttacaagaagcaaaccgcatggataagagctttagggttattattacaaaataa

SEQ ID NO: 3389 - DNA (genomic), 378 bp, Helicobacter pylori; double-stranded, circular
  misc_feature (B) LOCATION 1...378
  hypothetical: NO
  anti-sense: NO
gactatggagctttaaaagaggaaaaaatggcgcgaaagagagggtataaagaaacgaacatggaagaatccaaaaagcgaacaactcttgatcgtttcccttgcacctcttgtgggctttgctgtaaaaatatcaccgggattattgagcttgttgggtttgacgctggcaatggggtgtgcaaatttttggatttagaaacgaatctgtgcaagatttatgaatcgcgcccgttaatttgcaggattgatgaagcgcacaaaaagctttattcccatattccgcttaaggagttttatgccaaaaacgcagaggtttgtaacgctttacaagaagcaaaccgcatggataagagctttagggttattattacaaaa

SEQ ID NO: 3390 - DNA (genomic), 510 bp, Helicobacter pylori; double-stranded, circular
  misc_feature (B) LOCATION 1...510
  hypothetical: NO
  anti-sense: NO
gtgcgacaacattttgtggctcaaatcatttttaaaggggttctaatggaacataacgggcatgataaactgaacggcgttttgcgtggctttttgggcgactcattcacgcttgatgggaaagagggaggattgaacatgagcaagatgcttgaatttatcaaaaaggaaaaaccaaagatgaatgttttgctcatgggggctactggggtgggtaaaagctcgctcattaacgctctatttggtaaagaaatcactaaaacaggcgtaggaaagcccatcactcagcatcttgaaaaatacattgatgaagaaaaaggcttaattttgtgggacactaaaggcattgaagataaagattaccacgacaccatgcaaagcattaaaaaagaaatggaagattcttttaaaacacttgatgaaaaagaagccattgatgtggcgtatctgtgcgttaaggagacttcttctagggttcaagagagagagagagttattaagcttcgctaa

SEQ ID NO: 3391 - DNA (genomic), 510 bp, Helicobacter pylori; double-stranded, circular
  misc_feature (B) LOCATION 1...510
  hypothetical: NO
  anti-sense: NO
tcggtgcgacaacattttgtggctcaaatcatttttaaaggggttctaatggaacataacgggcatgataaactgaacggcgttttgcgtggctttttgggcgactcattcacgcttgatgggaaagagggaggattgaacatgagcaagatgcttgaatttatcaaaaaggaaaaaccaaagatgaatgttttgctcatgggggctactggggtgggtaaaagctcgctcattaacgctctatttggtaaagaaatcactaaaacaggcgtaggaaagcccatcactcagcatcttgaaaaatacattgatgaagaaaaaggcttaattttgtgggacactaaaggcattgaagataaagattaccacgacaccatgcaaagcattaaaaaagaaatggaagattcttttaaaacacttgatgaaaaagaagccattgatgtggcgtatctgtgcgttaaggagacttcttctagggttcaagagagagagagagttattaagcttcgc

SEQ ID NO: 3392 - DNA (genomic), 1017 bp, Helicobacter pylori; double-stranded, circular
  misc_feature (B) LOCATION 1...1017
  hypothetical: NO
  anti-sense: NO
ttgacagcgcgagattttaaaaattatttagagcctttaagggaggggaaaaatttattgggtttttcaggtgggttggattccacttgcttgtttcatcttttagttggagaaaacatcgcctttgacatcgctttagtggattatagcacgcaaaaacaacgccttgaaatcatccagcacgctcaaaaactcgcgcaaacgcaccataaaaaatgctatatccattacgccccaaaaatcgcgcgcaattttgaaatgcaagcgagaaaagttcgttatgatttttttgaaaccctaatcaaagagcattcttacaagcatttgattttagcgcaccatttgaatgacaggctggaatggtttttgatgcaattaagtaaaggtgctggattaaacacgcttttaagctttcaagcttatgaaaaaagagaatcttatgcgatcgttcgccccttgctctacacccctaaagacacccttaaaacgctcgctaaagatcaaaaattttttgaagacgattctaattcttctttaaaattcaaacgcaattgtttcaggaaacattacgctaacgccttgatgcaacactattctaagggcattatccaaagttttaaatttttggataaagaaaaagagcggctttatcctttgattcccgtttcacaaatgcatgggatcacttttttcaagcattcgcacaatgcgctttttatggtggataaaatcttaaagaaaaaggggtatgtgttgagctttcttcaaaaagaagaaatcaagcaccatttttttagcctagaaatcgctcaaaaattcatcattgaaaaggataaagagcatgtttttatcgcttttaaaccccaaaaaactctaagcatgccaaaggattttaaagacagagccaggaggttggatatccctaaacgcttacggcctgttttatacgcagagtttttaaaacaaccaacgcatgattttttaacccgtttcaaacagagtttaatggatctataa

SEQ ID NO: 3393 - DNA (genomic), 1113 bp, Helicobacter pylori; double-stranded, circular
  misc_feature (B) LOCATION 1...1113
  hypothetical: NO
  anti-sense: NO
aattttaggcatagaaggcgcgagcttactcaaaggcgttttaacccacaaggaaacttcataaaagcgcaacccattcagcatgcgtttagcaccgatttgacagcgcgagattttaaaaattatttagagcctttaagggaggggaaaaatttattgggtttttcaggtgggttggattccacttgcttgtttcatcttttagttggagaaaacatcgcctttgacatcgctttagtggattatagcacgcaaaaacaacgccttgaaatcatccagcacgctcaaaaactcgcgcaaacgcaccataaaaaatgctatatccattacgccccaaaaatcgcgcgcaattttgaaatgcaagcgagaaaagttcgttatgatttttttgaaaccctaatcaaagagcattcttacaagcatttgattttagcgcaccatttgaatgacaggctggaatggtttttgatgcaattaagtaaaggtgctggattaaacacgcttttaagctttcaagcttatgaaaaaagagaatcttatgcgatcgttcgccccttgctctacacccctaaagacacccttaaaacgctcgctaaagatcaaaaattttttgaagacgattctaattcttctttaaaattcaaacgcaattgtttcaggaaacattacgctaacgccttgatgcaacactattctaagggcattatccaaagttttaaatttttggataaagaaaaagagcggctttatcctttgattcccgtttcacaaatgcatgggatcacttttttcaagcattcgcacaatgcgctttttatggtggataaaatcttaaagaaaaaggggtatgtgttgagctttcttcaaaaagaagaaatcaagcaccatttttttagcctagaaatcgctcaaaaattcatcattgaaaaggataaagagcatgtttttatcgcttttaaaccccaaaaaactctaagcatgccaaaggattttaaagacagagccaggaggttggatatccctaaacgcttacggcctgttttatacgcagagtttttaaaacaaccaacgcatgattttttaacccgtttcaaacagagtttaatggatcta

SEQ ID NO: 3394 - DNA (genomic), 162 bp, Helicobacter pylori; double-stranded, circular
  misc_feature (B) LOCATION 1...162
  hypothetical: NO
  anti-sense: NO
agaatcgctcgtgccttaaatgacgcgccggtggattatgtggtggtacatgggaggacacgaagcgataggtatcaaaaagacaaaatagattatgaaagcatcgctttaatgaaaaagattttaaaaaagcctgtgatgccaatggcgaaattgacagcg

SEQ ID NO: 3395 - DNA (genomic), 438 bp, Helicobacter pylori; double-stranded, circular
  misc_feature (B) LOCATION 1...438
  hypothetical: NO
  anti-sense: NO
aagcatcgctttaatgaaaaagattttaaaaaagcctgtgatgccaatggcgaaattgacagcgtgaaaaaagcttttgaagttttacaaatcactcaagcggatgggctaatgatagggcgagcgaccttaagagccccatggatattttggcaaatcagaaacaacaccaccgaattacccgcagtcgtgaaaaaagacctggttttagaacattttgataaaatggtggagttttatggggataggggggtgatcatgttcaggaaaaacttgcatgcttacgctaagggtgaaatgcaagcgagcgcgtttcgcaactgcgtcaatacccttacagaaataaagagcatgcgagagagcatagaggaattttttaatcaagagatgttacaaagtgaagtgccattatgggtagaattgaatcaaaaaagcgtt

SEQ ID NO: 3396 - DNA (genomic), 462 bp, Helicobacter pylori; double-stranded, circular
  misc_feature (B) LOCATION 1...462
  hypothetical: NO
  anti-sense: NO
atggactttaagaataaaaaatggctttttttagcccctctagcaggctatacggatttgcctttcaggagcgtggtgaaaaaatttggcgtggacgttaccacaagcgaaatggtgagctcgcattcgttggtgtatgcgtttgataaaacttctaaaatgttggaaaaatcccctttagaagatcatttcatggcgcaaatttcaggctctaaagaaagcgtagtcaaagaagcggtggagaaaatcaacgctttagatcatgtgagcgggattgattttaattgcggttgtcctgcccctaaagtggctaatcatggtaacgggagcgggctattgaaggacttaaaccacttggtggagattttaaaagtgattagagaaaacaccaataaaaaaatcacaagcgtgaaagtgcgtttaggttttgaaaagaaaatccctaaagaatcgctcgtgcct

SEQ ID NO: 3397 - DNA (genomic), 987 bp, Helicobacter pylori; double-stranded, circular
  misc_feature (B) LOCATION 1...987
  hypothetical: NO
  anti-sense: NO
atggactttaagaataaaaaatggctttttttagcccctctagcaggctatacggatttgcctttcaggagcgtggtgaaaaaatttggcgtggacgttaccacaagcgaaatggtgagctcgcattcgttggtgtatgcgtttgataaaacttctaaaatgttggaaaaatcccctttagaagatcatttcatggcgcaaatttcaggctctaaagaaagcgtagtcaaagaagcggtggagaaaatcaacgctttagatcatgtgagcgggattgattttaattgcggttgtcctgcccctaaagtggctaatcatggtaacgggagcgggctattgaaggacttaaaccacttggtggagattttaaaagtgattagagaaaacaccaataaaaaaatcacaagcgtgaaagtgcgtttaggttttgaaaagaaaatccctaaagaaatcgctcatgccttaaatgacgcgccggtggattatgtggtggtacatgggaggacacgaagcgataggtatcaaaaagacaaaatagattatgaaagcatcgctttaatgaaaaagattttaaaaaagcctgtgatagccaatggcgaaattgacagcgtgaaaaaagcttttgaagttttacaaatcactcaagcggatgggctaatgatagggcgagcgaccttaagagccccatggatattttggcaaatcagaaacaacaccaccgaattacccgcagtcgtgaaaaaagacctggttttagaacattttgataaaatggtggagttttatggggataggggggtgatcatgttcaggaaaaacttgcatgcttacgctaagggtgaaatgcaagcgagcgcgtttcgcaactgcgtcaatacccttacagaaataaagagcatgcgagagagcatagaggaattttttaatcaagagatgttacaaagtgaagtgccattatgggtagaattgaatcaaaaaagcgtttga

SEQ ID NO: 3398 - DNA (genomic), 273 bp, Helicobacter pylori; double-stranded, circular
  misc_feature (B) LOCATION 1...273
  hypothetical: NO
  anti-sense: NO
aaagccactgacatgcaagttaaagaaaacaaacaactctgcttgatctcattaggttgttctaaaaatttagtggattcagaggtgatgttaggcaagctttataattacacgctcactaatgacgctaaaaaagccgatgtgatccttatcaacacttgcggttttattgaaagcgctaaacaagagagtattccaaaccattctcaacgcagccaaagacaaaaaagagggagcgattttaattgcgagcgggtgcttgagcgagcgcta

SEQ ID NO: 3399 - DNA (genomic), 507 bp, Helicobacter pylori; double-stranded, circular
  misc_feature (B) LOCATION 1...507
  hypothetical: NO
  anti-sense: NO
tccttatcaacacttgcggttttattgaaagcgctaaacaagagagtattccaaaccattctcaacgcagccaaagacaaaaaagagggagcgattttaattgcgagcgggtgcttgagcgagcgctataaagatgaaatcaaagaattgatccctgaagtggatatttttaccggcgtgggggattatgacaagattgatattttaatcgctaaaaaacaaaaccaattcagcgagcaggtgtttttaagcgagcattataacgcgcgcattatcacgggatcgagcgtgcatgcttacgttaaaatttctgagggctgtaaccaaaaatgctctttttgcgctatccctagctttaagggaaaattacaaagcagggaattagactccattttaaaagaagtagaagatctagcccttaaaggctataaagatatgacttttatcgctcaagattctagctcatttttatccgatagggcaaaaagtcggcttgatccagctcat

SEQ ID NO: 3400 - DNA (genomic), 681 bp, Helicobacter pylori; double-stranded, circular
  misc_feature (B) LOCATION 1...681
  hypothetical: NO
  anti-sense: NO
tccagctcattagagcgattgccagcaagccttaaagacgcgcgtattttatacctctacccctctagcaccactttagagctgattggcgcgattgaagactcgcctatttttcaaaattatttttacatgcccattcagcatatcagcgactccatgcttaaaaaaatgcggcgcaactccagccaagcacaccatttaaagcttttaaacgccatgaagcaggttaaagaaagctttataagaagcacgatcattgtagggcatccagaagaaaatgagagcgaatttgaagaattgagcgcgtttttagacgagttccggtttgacagattgaatatttttgctttcagtgctgaagaaaacacgcatgcctattctttagagaaagtgcctaaaaaaatcatcaacgcccgcattaaagccttgaataaaatcgctttaaaacaccaaaaccattcttttaaggctttgttgaataagcccattaaggcgttagtggaacataaagagggcgaatatttttacaaagcaagggatttgagatgggcgcctgaagtggatggggaaattttaatcaatgacagcgaactaaccacccctttaaaacccgggcattacacgattgtgcctagcgcctttaaagacaatattttactcgctaaggttttaagtcctttt

SEQ ID NO: 3401 - DNA (genomic), 1320 bp, Helicobacter pylori; double-stranded, circular
  misc_feature (B) LOCATION 1...1320
  hypothetical: NO
  anti-sense: NO
atgcaagttaaagaaaacaaacaactctgcttgatctcattaggttgttctaaaaatttagtggattcagaggtgatgttaggcaagctttataattacacgctcactaatgacgctaaaaaagccgatgtgatccttatcaacacttgcggttttattgaaagcgctaaacaagagagtatccaaaccattctcaacgcagccaaagacaaaaaagagggagcgattttaattgcgagcgggtgcttgagcgagcgctataaagatgaaatcaaagaattgatccctgaagtggatatttttaccggcgtgggggattatgacaagattgatattttaatcgctaaaaaacaaaaccaattcagcgagcaggtgtttttaagcgagcattataacgcgcgcattatcacgggatcgagcgtgcatgcttacgttaaaatttctgagggctgtaaccaaaaatgctctttttgcgctatccctagctttaagggaaaattacaaagcagggaattagactccattttaaaagaagtagaagatctagcccttaaaggctataaagatatgacttttatcgctcaagattctagctcatttttatacgataaggggcaaaaagacggcttgatccagctcattagagcgattgacaaacagcaagccttaaagagcgcgcgtattttatacctctacccctctagcaccactttagagctgattggcgcgattgaagactcgcctatttttcaaaattattttgacatgcccatccagcatatcagcgactccatgcttaaaaaaatgcggcgcaactccagccaagcacaccatttaaagcttttaaacgccatgaagcaggttaaagaaagctttataagaagcacgatcattgtagggcatccagaagaaaatgagagcgaatttgaagaattgagcgcgtttttagacgagttccggtttgacagattgaatatttttgctttcagtgctgaagaaaacacgcatgcctattctttagagaaagtgcctaaaaaaatcatcaacgcccgcattaaagccttgaataaaatcgctttaaaacaccaaaaccattcttttaaggctttgttgaataagcccattaaggcgttagtggaacataaagagggcgaatatttttacaaagcaagggatttgagatgggcgcctgaagtggatggggaaattttaatcaatgacagcgaactaaccacccctttaaaacccgggcattacacgattgtgcctagcgcctttaaagacaatattttactcgctaaggttttaagccctttttaa

SEQ ID NO: 3402 - DNA (genomic), 360 bp, Helicobacter pylori; double-stranded, circular
  misc_feature (B) LOCATION 1...360
  hypothetical: NO
  anti-sense: NO
gaaaagagcattaaagatcttcaaagtatttttaaaaacgctgatggcagagatgaaaaactgaagcgattcaaccaagaagcgttggaggtgtttcaaaaattagagcgtgaaagtttaaaagagcttgaaagcttgaaaaataatgaagagtgggaaaattttaccattgccttttatggggaaaccggtgcggggaaatcaacccttattgaatgtttgaggatgttttttaaagaacaaagcaaagtggatcaacaagaacgatttcaagcggctttattcaacttaccaatacaaccatcaaaactttattttgctggatgtgccagggatagaaggcagcgaaaaaaaggttat

SEQ ID NO: 3403 - DNA (genomic), 357 bp, Helicobacter pylori; double-stranded, circular
  misc_feature (B) LOCATION 1...357
  hypothetical: NO
  anti-sense: NO
aagagcattaaagatcttcaaagtatttttaaaaacgctgatggcagagatgaaaaactgaagcgattcaaccaagaagcgttggaggtgtttcaaaaattagagcgtgaaagtttaaaagagcttgaaagcttgaaaaataatgaagagtgggaaaattttaccattgccttttatggggaaaccggtgcggggaaatcaacccttattgaatgtttgaggatgttttttaaagaacaaagcaaagtggatcaacaagaacgatttcaagcggctttattcaacttaccaatacaaccatcaaaactttattttgctggatgtgccagggatagaaggcagcgaaaaaaaggttat

SEQ ID NO: 3404 - DNA (genomic), 399 bp, Helicobacter pylori; double-stranded, circular
  misc_feature (B) LOCATION 1...399
  hypothetical: NO
  anti-sense: NO
atgagggcaaaaatgaaagacatttatcttgacgtagaaaagagcattaaagatcttcaaagtatttttaaaaacgctgatggcagagatgaaaaactgaagcgattcaaccaagaagcgttggaggtgtttcaaaaattagagcgtgaaagtttaaaagagcttgaaagcttgaaaaataatgaagagtgggaaaattttaccattgccttttatggggaaaccggtgcggggaaatcaacccttattgaatgtttgaggatgttttttaaagaacaaagcaaagtggatcaacaagaacgatttcaagcggctttattcaacttaccaatacaaccatcaaaactttattttgctggatgtgccagggatagaaggcagcgaaaaaaaggttattga

SEQ ID NO: 3405 - DNA (genomic), 444 bp, Helicobacter pylori; double-stranded, circular
  misc_feature (B) LOCATION 1...444
  hypothetical: NO
  anti-sense: NO
ttgcgtttttttttttttgttaaaaatgcgtcagaaaaattcgacatgagggcaaaaatgaaagacatttatcttgacgtagaaaagagcattaaagatcttcaaagtatttttaaaaacgctgatggcagagatgaaaaactgaagcgattcaaccaagaagcgttggaggtgtttcaaaaattagagcgtgaaagtttaaaagagcttgaaagcttgaaaaataatgaagagtgggaaaattttaccattgccttttatggggaaaccggtgcggggaaatcaacccttattgaatgtttgaggatgttttttaaagaacaaagcaaagtggatcaacaagaacgatttcaagcggctttattcaacttaccaatacaaccatcaaaactttattttgctggatgtgccagggatagaaggcagcgaaaaaaaggttattga

SEQ ID NO: 3406 - DNA (genomic), 225 bp, Helicobacter pylori; double-stranded, circular
  misc_feature (B) LOCATION 1...225
  hypothetical: NO
  anti-sense: NO
ttgaaaaaagagagaacagagagtttagtcgctcaagccttaaaaaatattgggaatgatcgctacatgctagataatttggttttcgctcgtgtgaagcaactaaacgctggagccaaaactttagtgaatatggaccctaagcgtcataaattagtggatattgctatcagagaaatcgctgaagggaaaattgatatagacaggatagatgaacgaaattga

SEQ ID NO: 3407 - DNA (genomic), 297 bp, Helicobacter pylori; double-stranded, circular
  misc_feature (B) LOCATION 1...297
  hypothetical: NO
  anti-sense: NO
gcaccaacaaggcgtgttttctatggtaaaataagccctttaaaattggatagaactcaaaataaaaggatcactttgaaaaaagagagaacagagagtttagtcgctcaagccttaaaaaatattgggaatgatcgctacatgctagataatttggttttcgctcgtgtgaagcaactaaacgctggagccaaaactttagtgaatatggaccctaagcgtcataaattagtggatattgctatcagagaaatcgctgaagggaaaattgatatagacaggatagatgaacgaaat

SEQ ID NO: 3408 - DNA (genomic), 273 bp, Helicobacter pylori; double-stranded, circular
  misc_feature (B) LOCATION 1...273
  hypothetical: NO
  anti-sense: NO
agcgctaaaagggttttaatgccccattttttagccaaggtagactccaagcctttagaataccccttaataaggggggatttttgttatcatagggaatttttaagcttaaaacaccccactaaaagctgtgtgcatgcgagtttcaaaaatgatgtttttttattgcaaaaaatccggcgagcgggtgattttttgatcaaaagcgaaaaaggcaacgcccttaaaaagagagattttaaaacaagctttgaggatttattcgcaatcttt

SEQ ID NO: 3409 - DNA (genomic), 465 bp, Helicobacter pylori; double-stranded, circular
  misc_feature (B) LOCATION 1...465
  hypothetical: NO
  anti-sense: NO
aaaatttacaatagcgagatagaaatcaaaaaaaacgctcaaatcccggtggttagcaagtatgaggcgcgttggaataaactcaaaaaagacatttatgatttaaaaatttattctttaggattggatgaaaaccctactcaaaaccatgcattggatttttcttttgatacaataacgattgataaagaaagcgttggagcgattttaaaaaccccaaaaatcatcaaggaagggtattttgtgcatgtttgtaatatttatgagaataagggggattttttagtggaattgagtatgggggattttgattggcctgtgcgtttgtttgttttattggcagaaaatcaagttttttacctcaataaaagccccttaaaaaccttaaacaaccacaaagcgcatcttttgcttcaaaatatcctaagccaaaaggaattggatgagcgtaatcatcgcagcgaa

SEQ ID NO: 3410 - DNA (genomic), 567 bp, Helicobacter pylori; double-stranded, circular
  misc_feature (B) LOCATION 1...567
  hypothetical: NO
  anti-sense: NO
tcaaaagcgaaaaaggcaacgcccttaaaaagagagattttaaaacaagctttgaggatttattcgcaatcttttgaagtcatttcgcataatttgcaagaaaattctaaacatgcgagccaaaaaaaagcccttgatttagaaacttttgaagattttatccaaaaaaatcaagcccctattttaatagaaattggttttgggagtggtaggcatttgatagaattagccaaaaacaaccccactacaacatgcttagggatagagattcacaccccgtctatcgcgcaagcgttaaagcaaattgagttgttggatttaaaaaatctgcacatcttgcaaggcgatggccgtttggttttagagagcatgccaaatcacaggtgcgagaaaatttttgtgcatttccctgtgccatggaatgagaaaaaacaccgccgagtgttaagcgaaaagtttttaaacgaagctttaagggttttaaagcctagagggtttatggaattacgaaccgacgatagcctttgttttgaagacagcctaaaattagccctaaaaaatttacaa

SEQ ID NO: 3411 - DNA (genomic), 1203 bp, Helicobacter pylori; double-stranded, circular
  misc_feature (B) LOCATION 1...1203
  hypothetical: NO
  anti-sense: NO
atgccccattttttagccaagctagactccaagcctttagaataccccttaataaggggggatttttgttttcatagggaatttttaagcttaaaacaccccactaaaagctgtgtgcatgcgagtttcaaaaatgatgtttttttattgcaaaaaatccggcgagcgggtgattttttgatcaaaagcgaaaaagcaacgcccttaaaaagagagattttaaaacaagctttgaggatttattcgcaatcttttgaagtcatttcgcataatttgcaagaaaattctaaacatgcgagccaaaaaaaagcccttgatttagaaacttttgaagattttatccaaaaaaatcaagcccctattttaatagaaattggttttgggagtggtaggcatttgatagaattagccaaaaacaaccccactacaacatgcttagggatagagattcacaccccgtctatcgcgcaagcgttaaagcaaattgagttgttggatttaaaaaatctgcacatcttgcaaggcgatggccgtttggttttagagagcatgccaaatcacaggtgcgagaaaatttttgtgcatttccctgtgccatggaatgagaaaaaacaccgccgagtgttaagcgaaaagtttttaaacgaagctttaagggttttaaagcctagagggtttttggaattacgaaccgacgatagcctttgttttgaagacagcctaaaattagccctaaaaaattttcaatgcgagatagaaatcaaaaaaaacgctcaaatcccggtggttagcaagtatgaggcgcgttggaataaactcaaaaaagacatttatgatttaaaaatttattctttaggattggatgaaaaccctactcaaaaccatgcattggatttttcttttgatacaataacgattgataaagaaagcgttggagcgattttaaaaaccccaaaaatcatcaaggaagggtattttgtgcatgtttgtaatatttatgagaataagggggattttttagtggaattgagtatgggggattttgattggcctgtgcgtttgtttgttttattggcagaaaatcaagttttttacctcaataaaagccccttaaaaaccttaaacaaccacaaagcgcatcttttgcttcaaaatatcctaagccaaaaggaattggatgagcgtgatcatcgcagcgaataa

SEQ ID NO: 3412 - DNA (genomic), 240 bp, Helicobacter pylori; double-stranded, circular
  misc_feature (B) LOCATION 1...240
  hypothetical: NO
  anti-sense: NO
atgaactcgcctgatgtgttattagattcctttaaaatcgctcttgttaaaaaagattctaaactcgccttttcattgatagagcgcctttctttagaacaaataaaaagcttggatttagatgcgcttttaagccttaaggaaatgatagcccaaagcattgaactattagaaaaagaaaaagaagaactgcaatcgcaaatgcataaggctaagcaaatccaaaaatttttgtcttag

SEQ ID NO: 3413 - DNA (genomic), 261 bp, Helicobacter pylori; double-stranded, circular
  misc_feature (B) LOCATION 1...261
  hypothetical: NO
  anti-sense: NO
aggcatggagggaaatccattcagatgaactcgcctgatgtgttattagattcctttaaaatcgctcttgttaaaaaagattctaaactcgccttttcattgatagagcgcctttctttagaacaaataaaaagcttggatttagatgcgcttttaagccttaaggaaatgatagcccaaagcattgaactattagaaaaagaaaaagaagaactgcaatcgcaaatgcataaggctaagcaaatccaaaaatttttgtct

SEQ ID NO: 3414 - DNA (genomic), 492 bp, Helicobacter pylori; double-stranded, circular
  misc_feature (B) LOCATION 1...492
  hypothetical: NO
  anti-sense: NO
atgaacatgcaacatttatacgccccttggcgcgaaagttatttgaaagagaaaaataagagttgtgtcttttgcgggatttctcaaaaccccacaaaagattcagagaacagagtgctttatagaaatagcgatctctttgtggtgatgaacgcctacccttataacccagggcatttgttgatcgtccctcatgcgcatcaagcgagcgttgaacttttagatctgaatacttggctgaacatgaatgctttagcgcctaaaatcttaaaagcgctgtatgcttatggcgctcaagggatcaatttaggtttgaatttacacagaaacgccggagcagggatcccagagcatttgcacatgcatttagtgcctagattcttaggggatagcaattttataagcgttatcgctcaaactagggtgtgcgggatggatcttaatgaaacttatcttgcgttaaaaaacttattagaaaaggagcttggttga

SEQ ID NO: 3415 - DNA (genomic), 306 bp, Helicobacter pylori; double-stranded, circular
  misc_feature (B) LOCATION 1...306
  hypothetical: NO
  anti-sense: NO
atgttttctaaaatttgcgcatcttttaagcttgccaacgcattcaaaggttttatatgcaaacgcatttcaagccccatgcaaagcactcgcattaccaagatggttttgggtataaaagacgctttcaatgacgataaagatccgttgaataacgcttgtgaagctttggatttggtagtgaagtttaagaaagagcacccgcaagattttaacgaattgtttgaaattttaaaagatctcattcaagaatacgagcaaaatcctgacgagatcaaacaaaacctcaaagaaatcctaaaataa

SEQ ID NO: 3416 - DNA (genomic), 312 bp, Helicobacter pylori; double-stranded, circular
  misc_feature (B) LOCATION 1...312
  hypothetical: NO
  anti-sense: NO
ggaaaggcgatgttttctaaaatttgcgcatcttttaagcttgccaacgcattcaaaggttttatatgcaaacgcatttcaagccccatgcaaagcactcgcattaccaagatggttttgggtataaaagacgctttcaatgacgataaagatccgttgaataacgcttgtgaagctttggatttggtagtgaagtttaagaaagagcacccgcaagattttaacgaattgtttgaaattttaaaagatctcattcaagaatacgagcaaaatcctgacgagatcaaacaaaacctcaaagaaatcctaaaa

SEQ ID NO: 3417 - DNA (genomic), 984 bp, Helicobacter pylori; double-stranded, circular
  misc_feature (B) LOCATION 1...984
  hypothetical: NO
  anti-sense: NO
atgcaaaaagttttcatcgcccctacccattacaaacgcattgatgaatttttagccaaagaattgcaaatttctaaaaaccaggtattgaatttgattaaagaggggttagtgttttgtcaaaaaaaggaggtcaaaaaaggggggctagccttaaaagagggcgatgcaatcacgcttttaacgcccaaaatcgtgcccaaacccttaaaaaaagagcttgatttagaaatagaagtcatttttgaagatgaagacttgttggtgttgaataagccccctaatctagtcgtccataaagccccaagcgtgaaagagcctactttagtggattggttaaaatctcaaaattacgagctttccaatcttggcttaaaagagcgctatgggattgtgcatcgtttggataaggacacgagcggagggattgtcatcgctaaaaacaattttacccatgtttgtttgagcgagcaactcaaaactaaaatgatggggcgctactatatcgccttgctttcaacgcccttaaaagaagaaaaaatgagcgtggaatgttatttgacaagaaaccctaataaccgcttaaaaatgatagcgctcaaagcggctaaaaaagaaaaaagccgctattctaaaagcgaatttactagcttgctgacttctcaaaatggcatggatttgataggggctaaactattcaccgggcgcacgcaccagatcagagcgcatttagaatatttaaacagacacatcataggcgataacctttacgggcttaatggggtgctttctaaagaagaaataaggatcatgctgcatgcctatttgatagagttcaaacaccccagaagcgagcaaaaactgcgctttaaagttcccctattaaaggatatgttagaatatcttaaaaaagtttttgacaaggagaatttagatgaggtcttggatgaagaaaaaatacttcacgcttttattgcaaagtag

SEQ ID NO: 3418 - DNA (genomic), 981 bp, Helicobacter pylori; double-stranded, circular
  misc_feature (B) LOCATION 1...981
  hypothetical: NO
  anti-sense: NO
atgcaaaaagttttcatcgcccctacccattacaaacgcattgatgaatttttagccaaagaattgcaaatttctaaaaaccaggtattgaatttgattaaagaggggttagtgttttgtcaaaaaaaggaggtcaaaaaaggggggctagccttaaaagagggcgatgcaatcacgcttttaacgcccaaaatcgtgcccaaacccttaaaaaaagagcttgatttagaaatagaagtcatttttgaagatgaagacttgttggtgttgaataagccccctaatctagtcgtccataaagccccaagcgtgaaagagcctactttagtggattggttaaaatctcaaaattacgagctttccaatcttggcttaaaagagcgctatgggattgtgcatcgtttggataaggacacgagcggagggattgtcatcgctaaaaacaattttacccatgtttgtttgagcgagcaactcaaaactaaaatgatggggcgctactatatcgccttgctttcaacgcccttaaaagaagaaaaaatgagcgtggaatgttatttgacaagaaaccctaataaccgcttaaaaatgatagcgctcaaagcggctaaaaaagaaaaaagccgctattctaaaagcgaatttactagcttgctgacttctcaaaatggcatggatttgataggggctaaactattcaccgggcgcacgcaccagatcagagcgcatttagaatatttaaacagacacatcataggcgataacctttacgggcttaatggggtgctttctaaagaagaaataaggatcatgctgcatgcctatttgatagagttcaaacaccccagaagcgagcaaaaactgcgctttaaagttcccctattaaaggatatgttagaatatcttaaaaaagtttttgacaaggagaatttagatgaggtcttggatgaagaaaaaatacttcacgcttttattgcaaag

SEQ ID NO: 3419 - DNA (genomic), 831 bp, Helicobacter pylori; double-stranded, circular
  misc_feature (B) LOCATION 1...831
  hypothetical: NO
  anti-sense: NO
ttggacgctttcacagaattaaacacagaattaaacacagaattaaacgcgcgaaaaaagcaatatcagtattaccaaaacatgcttttagactttaacgacatcaaccaaagccgcaaagacgccaaagaaagattggcgcaaaaaccctaccccaaacgcttaaaaaccttactccaaactctagcgcctaagggggtggggtttaggaagttgggggaggtgtgtgaaagcaccaataaaaaaacacttaaaataagtgaagtgagcgaagtaaaaaataagggaatgtatccagtgataaattcagggagggaattgtatggttattaccatgattttaataatgatggagaaaatataactattgcatctagaggagaatatgcaggatttataaattactttaatgaaaaattttttgcagggggtctatgttatccctataaagttaaagatactaacgagcttttaacaaaatttttatacttttatctcaaaaccaatgaaacccaaattatggaaaatcttgtttttcgtggtagtatccccgcactcaataaagcagatattgaaactttaaccatccccatcccacccctagagatccaacaagagatcgttacgattttggacgctttcacagaattaaacacagaattaaacacagaattaaacgcgcgaaaaaagcaatatcagtattaccaaaacatgcttttagactttaacgacatcaaccaaagccgcaaagacgccaaagaaagattggcgcaaaaaccctaccccaaacgcttaaaaaccttactccaaactctagcgccaagggggtgg

SEQ ID NO: 3420 - DNA (genomic), 1344 bp, Helicobacter pylori; double-stranded, circular
  misc_feature (B) LOCATION 1...1344
  hypothetical: NO
  anti-sense: NO
gtggagtttaaaacgcttgaagaggtttttgaaattagaaatggttacaccccatcaaaaaacaatcctgaattttggaaaaatgggactatcccttggtttagaatggaagaccttagagaaaacgggaggattttaaaagactcaatccaacacattaccccaaaggctttgaaaggtaagaaattattccctaaaaactctattattatttctacaacagcaacgataggagagcatgctcttttaatcgttgattcgctagcgaatcaacaattcacttttttaagcaaaaaagcgaattgtgatattgctttagacatgaaattctttttttaccaatgctttcttttgggggaatggtgtaaaaacaataccaatgtttcaggttttgcttctgtggatatgaccgcttttaaaaaatataagttccccatcccgcccctagagatccaacaagagatcgttacgattttggacgctttcacagaattaaacacagaattaaacgcgcgaaaaaagcaatacgagtattaccaaaacatgcttttagactttaacgatattaaccaaagccgcaaagacaccaaagaaaaattggcgcaaaaaccctaccccaaacgcttaaaaaccttactccaaactctagcgcctaagggggtggggtttaggaagttgggggaggtgtgtgaaagcaccaataaaaaaacacttaaaataagtgaagtgagcgaagtaaaaaataagggaatgtatccagtgataaattcagggagggaattgtatggttattaccatgattttaataatgatggagaaaatataactattgcatctagaggagaatatgcaggatttataaattactttaatgaaaaattttttgcagggggtctatgttatccctataaagttaaagatactaacgagcttttaacaaaatttttatacttttatctcaaaaccaatgaaacccaaattatggaaaatcttgtttttcgtggtagtatccccgcactcaataaagcagatattgaaactttaaccatccccatcccacccctagagatccaacaagagatcgttacgattttggacgctttcacagaattaaacacagaattaaacacagaattaaacgcgcgaaaaaagcaatatcagtattaccaaaacatgcttttagactttaacgacatcaaccaaagccgcaaagacgccaaagaaagattggcgcaaaaaccctaccccaaacgcttaaaaaccttactccaaactctagcgccaagggggtggggtttaggaagttgggggaggtgtgtgaaagcaccaataaaaaactcttaa

SEQ ID NO: 3421 - DNA (genomic), 762 bp, Helicobacter pylori; double-stranded, circular
  misc_feature (B) LOCATION 1...762
  hypothetical: NO
  anti-sense: NO
atggcttatgaaatttccaaaaaagtcttgcacattgtaggcaagacaaacgccacttacaaactcatagaagaaggcgataaaatcttgttagggttgagtgggggcaaggattctatcatgctcgcttgcatcttagccaggatgcaaaaacatgcccctttcaaatttgattttaaagcggttaccgtgcattatggtttgggtgaaaatttaaaatggttgagcgatttgtgccaagaacaaggcattgagcatgagatcatttacacccaaatcgctgccacgatcaacgaaaaacgccgtgaaaaaagctcgttttgttcgttttgctctcgtttgaggcgagggactttgtattctaaggctttaggagaaggctataataaagtcgctatcgcgcaccatttagatgatgcggtggagagcttttttatgaattttacttataacgggagtttgaggagcatgccccccatttatagggctgaaaacggcttattagtgatccgccctttgattaaggttcgagaagctagcagcattcattttgtcacttctcaaaatatccgggttgcccctgattgcaattgcccagccaaacagcccacttccgataagccccctatcgcgcgattagccactaaaaatttcttaaaagaaatgcaaaacttgcaccctcatttctttgacagcttagaaaacgcgtttaataacgttcaagcgaacagctttagcgacgctaaatatttagacgcttaa

SEQ ID NO: 3422 - DNA (genomic), 774 bp, Helicobacter pylori; double-stranded, circular
  misc_feature (B) LOCATION 1...774
  hypothetical: NO
  anti-sense: NO
aatcaaggatcaaagatggcttatgaaatttccaaaaaagtcttgcacattgtaggcaagacaaacgccacttacaaactcatagaagaaggcgataaaatcttgttagggttgagtgggggcaaggattctatcatgctcgcttgcatcttagccaggatgcaaaaacatgcccctttcaaatttgattttaaagcggttaccgtgcattatggtttgggtgaaaatttaaaatggttgagcgatttgtgccaagaacaaggcattgagcatgagatcatttacacccaaatcgctgccacgatcaacgaaaaacgccgtgaaaaaagctcgttttgttcgttttgctctcgtttgaggcgagggactttgtattctaaggctttaggagaaggctataataaagtcgctatcgcgcaccatttagatgatgcggtggagagcttttttatgaattttacttataacgggagtttgaggagcatgccccccatttatagggctgaaaacggcttattagtgatccgccctttgattaaggttcgagaagctagcagcattcattttgtcacttctcaaaatatccgggttgcccctgattgcaattgcccagccaaacagcccacttccgataagccccctatcgcgcgattagccactaaaaatttcttaaaagaaatgcaaaacttgcaccctcatttctttgacagcttagaaaacgcgtttaataacgttcaagcgaacagctttagcgacgctaaatatttagacgct

SEQ ID NO: 3423 - DNA (genomic), 1050 bp, Helicobacter pylori; double-stranded, circular
  misc_feature (B) LOCATION 1...1050
  hypothetical: NO
  anti-sense: NO
atgagcgtaaatgcgcccaaacgcatgcgtattttattgcgtttgcctaattggctaggcgatggggtgatggcaagctcgcttttttacacccttaaacaccactaccctaacgcgcattttatcttagtaggcccaaccattacgtgcgaacttttcaaaaaagatgaaaaaatagaagccgtttttacagatgacaccaaaaaatcctttttcaggctattagccacttacaagctcgctcaaaaaatagggcgttgcgatatagcgatcgctttaaacaaccatttttattccgcttttttgctctatgcgacaaaaacgcctattcgcatcggttttgctcaatttttccgttctttgtttctcagccatgcgataactactgcccctaaagagtatcatcaagtggaaaaatattgctttttattttcgcaatttttaaaaaaagaattggatcaaaaaagcgttttacccttaaaattagcctttgatctccccactcacaccccaaacacccctaaaaaaatcggctttaaccctagcgcaagctatgggagcgctaaaagatggccagcttcttattacgctgaagtcgcggttgctttgttagaaaaagggcatgaaatttatttttttggagctaaagaagacgctatcgtttctgaagagattttaaaatccgttaaaaacttattgaaaaaccccttattgttccataatgcttacaatctgtgcgggaaaacaagcattgaagaattgatacaacgcatcgcaattttagatttattcatcactaacgatagcggccctatgcatgtggctgctagcacgcaaacccccttaatcgctctttttggccccactgatgaaaaagagactcgcccctataaagctcaaaaagcgatcgtattgaaccaccatttaagctgtgcgccatgcaagaaacgagtttgccctttaaagaatgaaaaaaaccatttgtgcatgaaatctatcacgccccttgaagtccttcaagccgctcacactcttttagaagagtcttaa

SEQ ID NO: 3424 - DNA (genomic), 1074 bp, Helicobacter pylori; double-stranded, circular
  misc_feature (B) LOCATION 1...1074
  hypothetical: NO
  anti-sense: NO
cttaaaatctttaaaaaagggctattgatgagcgtaaatgcgcccaaacgcatgcgtattttattgcgtttgcctaattggctaggcgatggggtgatggcaagctcgcttttttacacccttaaacaccactaccctaacgcgcattttatcttagtaggcccaaccattacgtgcgaacttttcaaaaaagatgaaaaaatagaagccgtttttacagatgacaccaaaaaatcctttttcaggctattagccacttacaagctcgctcaaaaaatagggcgttgcgatatagcgatcgctttaaacaaccatttttattccgcttttttgctctatgcgacaaaaacgcctattcgcatcggttttgctcaatttttccgttctttgtttctcagccatgcgataactactgcccctaaagagtatcatcaagtggaaaaatattgctttttattttcgcaatttttaaaaaaagaattggatcaaaaaagcgttttacccttaaaattagcctttgatctccccactcacaccccaaacacccctaaaaaaatcggctttaaccctagcgcaagctatgggagcgctaaaagatggccagcttcttattacgctgaagtcgcggttgctttgttagaaaaagggcatgaaatttatttttttggagctaaagaagacgctatcgtttctgaagagattttaaaatccgttaaaaacttattgaaaaaccccttattgttccataatgcttacaatctgtgcgggaaaacaagcattgaagaattgatacaacgcatcgcaattttagatttattcatcactaacgatagcggccctatgcatgtggctgctagcacgcaaacccccttaatcgctctttttggccccactgatgaaaaagagactcgcccctataaagctcaaaaagcgatcgtattgaaccaccatttaagctgtgcgccatgcaagaaacgagtttgccctttaaagaatgaaaaaaaccatttgtgcatgaaatctatcacgccccttgaagtccttcaagccgctcacactcttttagaagagtct

SEQ ID NO: 3425 - DNA (genomic), 687 bp, Helicobacter pylori; double-stranded, circular
  misc_feature (B) LOCATION 1...687
  hypothetical: NO
  anti-sense: NO
cccttacacccaccgcttaaccggcgacatataatcctccattcccttaatgcgcccgatcccttcagggtgagctacattgcgagatatcttttacaagacgctaaagagatcacgaatgtgcgtaacatgctaggctttagcgggaagtataagggtaaggggatttctttaatggggcatggcatgggcattgcgtcatgcacgatttatgtaaccgaactcattaaaacctatcaagtcaaagagcttttaaggattggcacttgcggggcgattagcccaaaagtgggcctgaaagacattgtcatggccactggagcttcaacggattctaaaaccaatcgggtgcgttttttaaaccacgatttgagtgcaacgcctgattttgaattgagtttaagagcgtatcaaacagcaaagcgtttgggtattgatttgaaaataggcaatgttttttcaagcgattttttctattcttttgaaacgcatgcttttggtttgatggcccaatacaaccacttggctattgaaatggaagcggcagggttatacgccacggcgatggaattgaacgctaaggctttatgcttatgctctgtctcagatcacttgatcactaaagaagccctaagccctaaagaaaggatagaaagctttgataacatgatcactctggctttagag

SEQ ID NO: 3426 - DNA (genomic), 693 bp, Helicobacter pylori; double-stranded, circular
  misc_feature (B) LOCATION 1...693
  hypothetical: NO
  anti-sense: NO
atgacccctcacatcaacgctaaaatcggcgacttttatcctcaatgccttttatgcggcgatcccttaagggtgagctacattgcgaaaaattttttacaagacgctaaagagatcacgaatgtgcgtaacatgctaggctttagcgggaagtataagggtaaggggatttctttaatggggcatggcatgggcattgcgtcatgcacgatttatgtaaccgaactcattaaaacctatcaagtcaaagagcttttaaggattggcacttgcggggcgattagcccaaaagtgggcctgaaagacattgtcatggccactggagcttcaacggattctaaaaccaatcgggtgcgttttttaaaccacgatttgagtgcaacgcctgattttgaattgagtttaagagcgtatcaaacagcaaagcgtttgggtattgatttgaaaataggcaatgttttttcaagcgattttttctattcttttgaaacgcatgcttttggtttgatggcccaatacaaccacttggctattgaaatggaagcggcagggttatacgccacggcgatggaattgaacgctaaggctttatgcttatgctctgtctcagatcacttgatcactaaagaagccctaagccctaaagaaaggatagaaagctttgataacatgatcactctggctttagagatg

SEQ ID NO: 3427 - DNA (genomic), 312 bp, Helicobacter pylori; double-stranded, circular
  misc_feature (B) LOCATION 1...312
  hypothetical: NO
  anti-sense: NO
ggttattttaacccattttttaggaaactcatgaaccaacgcatagaaatgattacggctttattagatgaaaaaaaggcttttgatattacacacattgatttatccaaaaccccttatttggtagaagatgtcattatcgctaccacgctagcgaataagcatgccctttctttactagatgcgctaaaaaacacccttaagcctttaggcgaagtcttttaccagatagatgagtctaatggagagtggattattttggatctaggggatttgatgatccatcttttcaccggagaatgccgtaaaatt

SEQ ID NO: 3428 - DNA (genomic), 342 bp, Helicobacter pylori; double-stranded, circular
  misc_feature (B) LOCATION 1...342
  hypothetical: NO
  anti-sense: NO
atgaaccaacgcatagaaatgattacggctttattagatgaaaaaaaggcttttgatattacacacattgatttatccaaaaccccttatttggtagaagatgtcattatcgctaccacgctagcgaataagcatgccctttctttactagatgcgctaaaaaacacccttaagcctttaggcgaagtcttttaccagatagatgagtctaatggagagtggattattttggatctaggggatttgatgatccatcttttcaccgaagaatgccgtaaaaaatttgatttagaagggtttttgaacgcttataaaagagggcttccttatcaaaacgcctaa

SEQ ID NO: 3429 - DNA (genomic), 234 bp, Helicobacter pylori; double-stranded, circular
  misc_feature (B) LOCATION 1...234
  hypothetical: NO
  anti-sense: NO
atggcacaccatgaacaacaacaccaagcacaacaacagcaacaacaggctaacagccaacaccaccaccatcaccatgtgcaccaccaccattattatggcggcgaacaccaccatcataacgcgcaacaacacgccgaacaacaagcagagcaacacgcgcaacaacagcaacaacaacaagcacaccaacaacaacaacaaaaagcgcaacaacaaaaccaacaatattga

SEQ ID NO: 3430 - DNA (genomic), 279 bp, Helicobacter pylori; double-stranded, circular
  misc_feature (B) LOCATION 1...279
  hypothetical: NO
  anti-sense: NO
atttcaattaaaggagtcatcatggcacaccatgaacaacaacaccaagcacaacaacagcaacaacaggctaacagccaacaccaccaccatcaccatgtgcaccaccaccattattatggcggcgaacaccaccatcataacgcgcaacaacacgccgaacaacaagcagagcaacacgcgcaacaactagcaacaacaacaagcacaccaacaacaacaacaaaaagcgcaacaacaaaaccaacaatattgattggggcgtttatggggcggcct

SEQ ID NO: 3431 - DNA (genomic), 405 bp, Helicobacter pylori; double-stranded, circular
  misc_feature (B) LOCATION 1...405
  hypothetical: NO
  anti-sense: NO
aacgcctatatttttgaatacaacagcgatttactagaggctttccctaacccaaaccccaatttagaccccgtaatcactttagaatgcaaggaatttacaagcctttgtccgattacttcccagccggattttggcgtgatttttatccgctacatccctaaagataaaatggtagaaagcaagtctctaaaactctatttgttcagttacagaaaccatgggagttttcatgagagctgtatcaatacgattttattagatttagtccaattgctagagccaaagtatttggaagtgtatggggattttgtttctagaggggggattgcgatcaagccctttgtgaattatgcgatcaaagaataccaggactttaaagaaaaacgccttttggatgcgaaa

SEQ ID NO: 3432 - DNA (genomic), 447 bp, Helicobacter pylori; double-stranded, circular
  misc_feature (B) LOCATION 1...447
  hypothetical: NO
  anti-sense: NO
atgacccctgaatcaaacctcaaatccttaggcgctaaaacgccctatatttttgaatacaacagcgatttactagaggctttccctaacccaaaccccaatttagaccccctaatcactttagaatgcaaggaatttacaagcctttgtccgatcacttcccagccggattttggcgtgatttttatccgctacatccctaaagataaaatggtagaaagcaagtctctaaaactctatttgttcagttacagaaaccatgggagttttcatgagagctgtatcaatacgattttattagatttagtccaattgctagagccaaagtatttggaagtgtatggggattttgtttctagaggggggattgcgatcaagccctttgtgaattatgcgatcaaagaataccaggactttaaagaaaaacgccttttggatgcgaaataa

SEQ ID NO: 3433 - DNA (genomic), 183 bp, Helicobacter pylori; double-stranded, circular
  misc_feature (B) LOCATION 1...183
  hypothetical: NO
  anti-sense: NO
atggcacaccatgaagaacaacacggcgggcaccaccaccatcaccaccacacacaccaccaccattatcatggcggcgaacaccaccatcaccaccacagctctcatcatgaagaaggttgttgcagcactagcgatagtcatcatcaagaagaaggttgttgccacgggcatcacgagtaa

SEQ ID NO: 3434 - DNA (genomic), 183 bp, Helicobacter pylori; double-stranded, circular
  misc_feature (B) LOCATION 1...183
  hypothetical: NO
  anti-sense: NO
atggcacaccatkaagaacaacacggcgggcaccaccaccaycaccaccacacacaccaccaccattatcatggcggcgaacaccaccatcaccaccacagytctcatcatgaagaaggttgttgcagcactagcgatagtcatcatcaagaagaaggttgttgycacgggyaycacgagtaa

SEQ ID NO: 3435 - DNA (genomic), 234 bp, Helicobacter pylori; double-stranded, circular
  misc_feature (B) LOCATION 1...234
  hypothetical: NO
  anti-sense: NO
aataaaatcctagccagtgagctagaatttaaatttttaatcaaaggagtcatcatggcacaccatgaagaacaacacggcgggcaccaccaccatcaccaccacacacaccaccaccattatcatggcggcgaacaccaccatcaccaccacagctctcatcatgaagaaggttgttgcagcactagcgatagtcatcatcaagaagaaggttgttgccacgggcatcacgag

SEQ ID NO: 3436 - DNA (genomic), 363 bp, Helicobacter pylori; double-stranded, circular
  misc_feature (B) LOCATION 1...363
  hypothetical: NO
  anti-sense: NO
atgcccctaaaatccttaaaaaaccgcttgaatcagcattttgaactatcgcctcgctacgggagcgtgaaaaaaatcatgcccaatatcgtttatgcggatggttttaacccctctgtgggcgatgtggtgaagattgaaaaaagcgatggcactgaatgcgtgggaatggtggtggtggcagaaaaagagcagtttggtttcacgccctttaactttatagagggggctagggctggcgataaggtgctgtttttaaaagaggggttgaatttccctgtgggccgtaatcttttagggagggtgcttaaccctttagggcaagtcattgacaataagggggtgctagattatggcgattag

SEQ ID NO: 3437 - DNA (genomic), 360 bp, Helicobacter pylori; double-stranded, circular
  misc_feature (B) LOCATION 1...360
  hypothetical: NO
  anti-sense: NO
atgcccctaaaatccttaaaaaaccgcttgaatcagcattttgaactatcgcctcgctacgggagcgtgaaaaaaatcatgcccaatatcgtttatgcggatggttttaacccctctgtgggcgatgtggtgaagattgaaaaaagcgatggcactgaatgcgtgggaatggtggtggtggtagaaaaagagcagtttggtttcacgccctttaactttatagagggggctagggctggcgataaggtgctgtttttaaaagaggggttgaatttccctgtgggccgtaatcttttagggagggtgcttaaccctttagggcaagtcattgacaataagggggtgctagattatggcgat

SEQ ID NO: 3438 - DNA (genomic), 156 bp, Helicobacter pylori; double-stranded, circular
  misc_feature (B) LOCATION 1...156
  hypothetical: NO
  anti-sense: NO
atgggttttcaaaacgaaaataagttaaaagtaggggcgtcagtcaaagccacgatcaacgacaaagtggtggaggctaaagtcattagcattgggttcaatcgtgtaaccttaaggagcgaaaaaggacaacgaagccacctacgctttcaatag

SEQ ID NO: 3439 - DNA (genomic), 222 bp, Helicobacter pylori; double-stranded, circular
  misc_feature (B) LOCATION 1...222
  hypothetical: NO
  anti-sense: NO
aaaacactaaaaaacattgaacgaccgattatagcggaatttaaaacaaattttaccaaggagtattttatgggttttcaaaacgaaaataagttaaaagtaggggcgtcagtcaaagccacgatcaacgacaaagtggtggaggctaaagtcattagcattgggttcaatcgtgtaaccttaaggagcgaaaaaggacaacgaagccacctacgctttcaa

SEQ ID NO: 3440 - DNA (genomic), 186 bp, Helicobacter pylori; double-stranded, circular
  misc_feature (B) LOCATION 1...186
  hypothetical: NO
  anti-sense: NO
cacaactcttatgcgatggcggtatcaataggtataatctctcttgtgcggggcttaactgaaaacttattgaaagatgtaatccctcacattggactagaaaccgatgatgagtatcttaaagagttggacgctgatgatgagttagctaaaaactccgatgagtgggttgttagtttgaaaaac

SEQ ID NO: 3441 - DNA (genomic), 723 bp, Helicobacter pylori; double-stranded, circular
  misc_feature (B) LOCATION 1...723
  hypothetical: NO
  anti-sense: NO
ttgaccgagcatatgagacttcacgctgaaaatgaaaaaagcggagaggatttgctaaaagacgttaaagtggtaactagcggaccgagtgttaaggacaggacttcaactcctaaagagcctaaagaaaaagaggacaggtttaagttgatgtttgatttcggtgatgttaagactaactttatggcaattgcggagggctctgtattgtcagagcgtaaaggtaggttaggacaacttatgtcgcctttagtgtatcgtggtaatggttttcacgcttctttagtgattatgtgggcgttatcgtttgcttctcaattaaagcaccataacgaccatgagtgggctaaaatgcttgaaaatcgcaatgttgatgagtgttggtttgaaacttttgaccatatggacaataccgatttaaggttattctgtgatattctaggggcttacgctcaaggacaagaggaaactttaaatcttactaaactatgggcggtaatgttacctaaaaatcaaaaagaggcgtattttgtagcacaactcttatgcgatggcggtatcaataggtataatctctcttgtgcgggcttaactgaaaacttattgaaagatgtaatccctcacattggactagaaaccgataatgagtatcttaaagagttggacgctgatgatgagttagctaaaaactccgatgagtgggttgttagtttgaaaaactaa

SEQ ID NO: 3442 - DNA (genomic), 258 bp, Helicobacter pylori; double-stranded, circular
  misc_feature (B) LOCATION 1...258
  hypothetical: NO
  anti-sense: NO
ctgcccctttccccaatcaaagcgatcactttaatgggcgctaagcaacccctagtgatcatgcccattagcgtggatttacccaccccagagccggcaaaaatgcccagtttttgccccttaccgcaagtcaaaagcccatcaatgctcttcacccccacgctaaaaacctcatcaatcaaacctctttttaaaggggctatgggcgttgtaatcacaggcgctaatcgccataatctagcacccccttattgtcaa

SEQ ID NO: 3443 - DNA (genomic), 429 bp, Helicobacter pylori; double-stranded, circular
  misc_feature (B) LOCATION 1...429
  hypothetical: NO
  anti-sense: NO
atgatgaataacacgtctagcccttggtttttaaaatactccgccacgctcatcgcgcaaaaggccccgtatttgcgcattaaagggctatcatcgctcgtagcgaccaccaacacgcaagagcttaaatcccctttcaagtttttctctataaattcagggatttctctgcccctttccccaatcaaagcgatcactttaatgggcgctaagcaacccctagtgatcatgcccattagcgtggatttacccaccccagagccggcaaaaatgcccagtttttgccccttaccgcaagtcaaaagcccatcaatgctcttcacccccacgctaaaaacctcatcaatcaaacctctttttaaaggggctatgggcgttgtaatcacaggcgctaatcgccataatctagcacccccttattgtcaatga

SEQ ID NO: 3444 - DNA (genomic), 684 bp, Helicobacter pylori; double-stranded, circular
  misc_feature (B) LOCATION 1...684
  hypothetical: NO
  anti-sense: NO
atgctagaaaccactattgatttttctcgttacagcagcgtgaaaatcggtgcgcctttaaaagtgagcgttttagaaaacgataatgaaatctctcaagaacaccagatcataggattagcgaacaaccttttaatcgctcctgacgtgaaaaatctcgctttattaggaaaaaactacgattatatttgcgataagggtgagtgggtggaggtagggggagcggccaatgcgtctaaaatttttaattattttagggcgaatgatttagagggtttagagtttttagggcaattgcctggcactttaggggcgttagttaaaatgaatgctggcatgaaagaatttgaaataaaaaatgttttagaaagcgcttgcgttaatggcgaatggctagaaaaagaagctttggggctagattatcgcagcagcgggtttaatggcgttgttttgagggctaggtttaaaaagacgcatggttttagagaaggggttttaaaagcgtgtaaaagcatgcgcaaaagccaccccaaattgcctaattttgggagctgtttcaaaaacccgcctaacgattatgcgggcaggcttttagagggcgtgggcttaaggggttattgtctaaaagagtgggctttgccaaagaacatgcgaatttttggtgaatttggggggcgcagaatt

SEQ ID NO: 3445 - DNA (genomic), 780 bp, Helicobacter pylori; double-stranded, circular
  misc_feature (B) LOCATION 1...780
  hypothetical: NO
  anti-sense: NO
atgctagaaaccactattgatttttctcgttacagcagcgtgaaaatcggtgcgcctttaaaagtgagcgttttagaaaacgataatgaaatctctcaagaacaccagatcataggattagcgaacaaccttttaatcgctcctgacgtgaaaaatctcgctttattaggaaaaaactacgattatatttgcgataagggtgagtgggtggaggtagggggagcggccaatgcgtctaaaatttttaattattttagggcgaatgatttagagggtttagagtttttagggcaattgcctggcactttaggggcgttagttaaaatgaatgctggcatgaaagaatttgaaataaaaaatgttttagaaagcgcttgcgttaatggcgaatggctagaaaaagaagctttggggctagattatcgcagcagcgggtttaatggcgttgttttgagggctaggtttaaaaagacgcatggttttagagaaggggttttaaaagcgtgtaaaagcatgcgcaaaagccaccccaaattgcctaattttgggagctgtttcaaaaacccgcctaacgattatgcgggcaggcttttagagggcgtgggcttaaggggttattgtctaaaaagagtgggctttgccaaagaacatgcgaattttttggtgaatttggggggcgcagaatttgaagaagccctagatctgatagaactcgccaaaaccagagtgctacaagaatatggcattcatttagaagaagaagtgaaaattttaaggtag

SEQ ID NO: 3446 - DNA (genomic), 783 bp, Helicobacter pylori; double-stranded, circular
  misc_feature (B) LOCATION 1...783
  hypothetical: NO
  anti-sense: NO
aaaatgctagaaaccactattgatttttctcgttacagcagcgtgaaaatcggtgcgcctttaaaagtgagcgttttagaaaacgataatgaaatctctcaagaacaccagatcataggattagcgaacaaccttttaatcgctcctgacgtgaaaaatctcgctttattaggaaaaaactacgattatatttgcgataagggtgagtgggtggaggtagggggagcggccaatgcgtctaaaatttttaattattttagggcgaatgatttagagggtttagagtttttagggcaattgcctggcactttaggggcgttagttaaaatgaatgctggcatgaaagaatttgaaataaaaaatgttttagaaagcgcttgcgttaatggcgaatggctagaaaaagaagctttggggctagattatcgcagcagcgggtttaatggcgttgttttgagggctaggtttaaaaagacgcatggttttagagaaggggttttaaaagcgtgtaaaagcatgcgcaaaagccaccccaaattgcctaattttgggagctgtttcaaaaacccgcctaacgattatgcggggcaggcttttagagggcgtgggcttaaggggttattgtctaaaaagagtggggctttgccaaagcaacatgcgaattttttggtgaatttggggggcgcagaatttgaagaagccctagatctgatagaactcgccaaaaccagagtgctacaagaatatggcattcatttagaagaagaagtgaaaattttaagg

SEQ ID NO: 3447 - DNA (genomic), 732 bp, Helicobacter pylori; double-stranded, circular
  misc_feature (B) LOCATION 1...732
  hypothetical: NO
  anti-sense: NO
atggttttgatgattttcacaagcatcttgaagatagcgttaaaagttttatcagagcgaaaaaaaaatcgttatggttttcctagaatctttgatgttgcagacatagaacaagaagagagggaagtcattgaatggcgagaaaaaaagaaagcgtcaaaacaaagctataaacaaaaccttcaaatcaataaaatcgctaacgatttaaagcgtgataagatagtggataaaagaacgattttaagcgtgatagacgctgatatagagcgtggttttatcccgcctaaagatttgttaaaacaattagaaaaaattagcgcttctctttctaaagacatcgtaataacgataaagcaagtagaaaaattagagcttaactatgcgctaatagacaatatccaacataacacgcttgatgacacgcttgattttacctttattgttggggattctttgagcgttcagtcgctttatgttacctttaatcttgtgattgatattgatagacccatgagcgagcagtttctcaaccatattgggaaattggggagttttgaatctagagagcaagcgttagagtgggtgcgattatcgcaaactaaactgatcattgaaacgcctaaagaagcgttaaaaaatgcggaattatcacaaattgaagaaatattgaccggctgtatttttaatggcgcttaccgccttcaaaacgatcttaagaaagggcgatag

SEQ ID NO: 3448 - DNA (genomic), 729 bp, Helicobacter pylori; double-stranded, circular
  misc_feature (B) LOCATION 1...729
  hypothetical: NO
  anti-sense: NO
atggttttgatgattttcacaagcatcttgaagatagcgttaaaagttttatcagagcgaaaaaaaaatcgttatggttttcctagaatctttgatgttgcagacatagaacaagaagagagggaagtcattgaatggcgagaaaaaaagaaagcgtcaaaacaaagctataaacaaaaccttcaaatcaataaaatcgctaacgatttaaagcgtgataagatagtggataaaagaacgattttaagcgtgatagacgctgatatagagcgtggttttatcccgcctaaagatttgttaaaacaattagaaaaaattagcgcttctctttctaaagacatcgtaataacgataaagcaagtagaaaaattagagcttaactatgcgctaatagacaatatccaacataacacgcttgatgacacgcttgattttacctttattgttggggattctttgagcgttcagtcgctttatgttacctttaatcttgtgattgatattgatagacccatgagcgagcagtttctcaaccwtattgggaaattggggagttttgaatctagagagcaagcgttagagtgggtgcgattatcgcaaactaaactgatcattgaaacgcctaaagaagcgttaaaaaatgcggaattatcacaaattgaagaaatattgaccggctgtatttttaatggcgcttaccgccttcaaaacgatcttaagaaagggcga

SEQ ID NO: 3449 - DNA (genomic), 768 bp, Helicobacter pylori; double-stranded, circular
  misc_feature (B) LOCATION 1...768
  hypothetical: NO
  anti-sense: NO
gactcaaatagaagcgcttttatatgccacaatctagcgatggttttgatgattttcacaagcatcttgaagatagcgttaaaagttttatcagagcgaaaaaaaaatcgttatggttttcctagaatctttgatgttgcagacatagaacaagaagagagggaagtcattgaatggcgagaaaaaaagaaagcgtcaaaacaaagctataaacaaaaccttcaaatcaataaaatcgctaacgatttaaagcgtgataagatagtggataaaagaacgattttaagcgtgatagacgctgatatagagcgtggttttatcccgcctaaagatttgttaaaacaattagaaaaaattagcgcttctctttctaaagacatcgtaataacgataaagcaagtagaaaaattagagcttaactatgcgctaatagacaatatccaacataacacgcttgatgacacgcttgattttacctttattgttggggattctttgagcgttcagtcgctttatgttacctttaatcttgtgattgatattgatagacccatgagcgagcagtttctcaaccatattgggaaattggggagttttgaatctagagagcaagcgttagagtgggtgcgattatcgcaaactaaactgatcattgaaacgcctaaagaagcgttaaaaaatgcggaattatcacaaattgaagaaatattgaccggctgtatttttaatggcgcttaccgccttcaaaacgatcttaagaaagggcga

SEQ ID NO: 3450 - DNA (genomic), 255 bp, Helicobacter pylori; double-stranded, circular
  misc_feature (B) LOCATION 1...255
  hypothetical: NO
  anti-sense: NO
atgcgaatagacaaatttttacaatcagtgggtttagtgaagcggcgcgttttagcgacagatatgtgcaatgtaggggcggtgtggctcaatgggagttgcgctaagcccagtaaagaagtgaaaacaggcgatgtgattagcttgcactatttaaaagggatagaagaatacacgattttacaaatccccactttaaaaaatgtgccgcgaaaagacacgcacctttatatcgctcctaaaacaaaagaataa

SEQ ID NO: 3451 - DNA (genomic), 261 bp, Helicobacter pylori; double-stranded, circular
  misc_feature (B) LOCATION 1...261
  hypothetical: NO
  anti-sense: NO
aataaacgcatgcgaatagacaaatttttacaatcagtgggtttagtgaagcggcgcgttttagcgacagatatgtgcaatgtaggggcggtgtggctcaatgggagttgcgctaagcccagtaaagaagtgaaaacaggcgatgtgattagcttgcactatttaaaagggatagaagaatacacgattttacaaatccccactttaaaaaatgtgccgcgaaaagacacgcacctttatatcgctcctaaaacaaaagaa

SEQ ID NO: 3452 - DNA (genomic), 438 bp, Helicobacter pylori; double-stranded, circular
  misc_feature (B) LOCATION 1...438
  hypothetical: NO
  anti-sense: NO
atgccaaaaactttatggagtcaatcgttgccaaccgcaatattccatactgatcctagtatcaccgattggagcgccacttacaaaaccactaccacccaaaccactcaaccttatttacgcccagcccaagataatgaaaaacaccccacaacctataatcttatcaccactcaaaccaccatcaacaggactcaaagcgttttgaaaaacgaattgcatttgagtaacgattatttgaagtatgtagaaatccatcaaggctattacaaggataatgaccttaaacaatcgcaggctatattgattggactaattactacctcaatcaaagtgaaggcttttgctctcaatataacatttggagtgaaagcacaaagattggtaagaattggtatcattggcatgataataaaatctcttgcgctcaaagactga

SEQ ID NO: 3453 - DNA (genomic), 462 bp, Helicobacter pylori; double-stranded, circular
  misc_feature (B) LOCATION 1...462
  hypothetical: NO
  anti-sense: NO
atgccaaaaactttatggagtcaatcgttgccaaccgcaatattccatactgatcctagtatcaccgattggagcgccacttacaaaaccactaccacccaaaccactcaaccttatttacgcccagcccaagataatgaaaaacaccccacaacctataatcttatcaccactcaaaccaccatcaacaggactcaaagcgttttgaaaaacgaattgcatttgagtaacgattatttgaagtatgtagaaatccatcaaggctattacaaggataatgaccttaaacaatcgcaaggctatattgattggactaattactacctcaatcaaagtgaaggcttttgctctcaatataacatttggagtgaaagcacaaagattggtaagaattggtatcattggcatgataataaaatctcttgcgctcaaagactgatctataggccctttcaaggatag

SEQ ID NO: 3454 - DNA (genomic), 468 bp, Helicobacter pylori; double-stranded, circular
  misc_feature (B) LOCATION 1...468
  hypothetical: NO
  anti-sense: NO
gagagaacaatgccaaaaactttatggagtcaatcgttgccaaccgcaatattccatactgatcctagtatcaccgattggagcgccacttacaaaaccactaccacccaaaccactcaaccttatttacgcccagcccaagataatgaaaaacaccccacaacctataatcttatcaccactcaaaccaccatcaacaggactcaaagcgttttgaaaaacgaattgcatttgagtaacgattatttgaagtatgtagaaatccatcaaggctattacaaggataatgaccttaaacaatcgcaaggctatattgattggactaattactacctcaatcaaagtgaaggcttttgctctcaatataacatttggagtgaaagcacaaagattggtaagaattggtatcattggcatgataataaaatctcttgcgctcaaagactgatctataggccctttcaagga

SEQ ID NO: 3455 - DNA (genomic), 702 bp, Helicobacter pylori; double-stranded, circular
  misc_feature (B) LOCATION 1...702
  hypothetical: NO
  anti-sense: NO
atgactgataacaaccaaaataatgaaaaccatgaaaatagcagtgaaaattcaaaagatcaccatgaggcacgagccggggcgtttgagcgattcaccaaccgcaaaaagcgtttcagagaaaacgcacaaaaaaacgcagagtcttcaaaccatgaaacgctctcgcaccataaaaaagagcatcgccccaacaaaaaaccaaacaaccaccacaaacctaaacatgcctcccaaaaaacacgaaattacgccaaagaagagttggataacaacaaagtagagggcgttacggaaattttgcatgtgaatgagagagggactttaggctttcataaggagctcaaaaagggcgttgaagcgaataacaagatccaagtggagcatttaaacccgcattataagatgaatctaaactctaaagcgagcgttaagatcacgcctttagggggcttgggcgaaattggggggaacatgatggtcattgaaaccccaaaaagcgcgatcgtgattgatgcgggcatgagcttccctaaagaggggctttttggcgtggatattttaatcccggatttttcctacttgcaccagatcaaggacaaaatcgccggtattatcatcacccatgcccatgaagatcacatagggccacgccttatttgtttaaagagttgcaattccccctttatggcacgcctttga

SEQ ID NO: 3456 - DNA (genomic), 225 bp, Helicobacter pylori; double-stranded, circular
  misc_feature (B) LOCATION 1...225
  hypothetical: NO
  anti-sense: NO
gtggtctccccggcttcaacctggatttctcgtgtcctggcctactctggatactgctacctaagaacgccttgtcgcatacaaggctatcactttctatggcttacctttccaggtaactctgctaaagcgttctcttggatattgcagtcctcaaccccgaatgcaagcactcggtttgcccttttccccgttcgctcgccactacttagggaatctcgttga

SEQ ID NO: 3457 - DNA (genomic), 231 bp, Helicobacter pylori; double-stranded, circular
  misc_feature (B) LOCATION 1...231
  hypothetical: NO
  anti-sense: NO
ggttggagagtggtctccccggcttcaacctggatttctcgtgtcctggcctactctggatactgctacctaagaacgccttgtcgcatacaaggctatcactttctatggcttacctttccaggtaactctgctaaagcgttctcttggatattgcagtcctcaaccccgaatgcaagcactcggtttgcccttttccccgttcgctcgccactacttagggaatctcgt

SEQ ID NO: 3458 - DNA (genomic), 318 bp, Helicobacter pylori; double-stranded, circular
  misc_feature (B) LOCATION 1...318
  hypothetical: NO
  anti-sense: NO
aactctcattctttaggcgttagcgttttaagaagccgcattgaagaagctaaaaatcattttaatgaaaaggaaaaaggccctaacaagcgatttagcgataaggaatttaaaaaattcctaaaagacagagctaaaaacggcatgactaatgaagaaatgcaagtgcttttattgatgatcaacaacaaaaaaggtaatctaagacctagtcataaggaatttttacaagaatgcctaatagaagcggttttgcacaataaaaatatcaataagaccactgagtattccacaagaaagcattcgcatttcgatgcg

SEQ ID NO: 3459 - DNA (genomic), 768 bp, Helicobacter pylori; double-stranded, circular
  misc_feature (B) LOCATION 1...768
  hypothetical: NO
  anti-sense: NO
atgactaatgaagaaatgcaagtgcttttattgatgatcaacaacaaaaaaggtaatctaagacctagtcataaggaatttttacaagaatgcctaatagaagcggttttgcacaataaaaatatcaataagaccactgagtatgccattagaaacaatatcgcacacttgcccatcaataaaacagaaggttttttagttagaacttataatcattcattggggatttttaatgaaaatattgctgaaaaactcaaaatccctaaaaaagaaaaagaaatactacagcctttaaatgcaaatgaaaaacaagttttaaacaccgctttagaaaacaatgaaatagacgcaagaactttcaaaccatgggatcttggaagcaaagaagcaagcaaagaaaacgcctctatgagtgaagaattaacgcagaataattctaaattatctcattttaatgaaaatagcatcgctcaaaatagtgtaggacaaaataatgtaaaagagcctaacactaaatctaataattctaaacaaaatcattcgctttcaaattcggatctaacttcaaataccgattacaacaagcttgtagcggatatgtttgaaaatcaaatggacgctaatggcaattatattggcaaaaaatttagtacacaagcttacgataacaaaactccctataaagtcgctaccggtaatgctagtgagtatagctcttatttgtattcaaaaaaaactaaatccaaagatattggaatggagcgttaa

SEQ ID NO: 3460 - DNA (genomic), 909 bp, Helicobacter pylori; double-stranded, circular
  misc_feature (B) LOCATION 1...909
  hypothetical: NO
  anti-sense: NO
aactctcattctttaggcgttagcgttttaagaagccgcattgaagaagctaaaaatcattttaatgaaaaggaaaaaggccctaacaagcgatttagcgataaggaatttaaaaaattcctaaaagacagagctaaaaacggcatgactaatgaagaaatgcaagtgcttttattgatgatcaacaacaaaaaaggtaatctaagacctagtcataaggaatttttacaagaatgcctaatagaagcggttttgcacaataaaaatatcaataagaccactgagtatgccattagaaacaatatcgcacacttgcccatcaataaaacagaaggttttttagttagaacttataatcattcattggggatttttaatgaaaatattgctgaaaaactcaaaatccctaaaaaagaaaaagaaatactacagcctttaaatgcaaatgaaaaacaagttttaaacaccgctttagaaaacaatgaaatagacgcaagaactttcaaaccatgggatcttggaagcaaagaagcaagcaaagaaaacgcctctatgagtgaagaattaacgcagaataattctaaattatctcattttaatgaaaatagcatcgctcaaaatagtgtaggacaaaataatgtaaaagagcctaacactaaatctaataattctaaacaaaatcattcgctttcaaattcggatctaacttcaaataccgattacaacaagcttgtagcggatatgtttgaaaatcaaatggacgctaatggcaattatattggcaaaaaatttagtacacaagcttacgataacaaaactccctataaagtcgctaccggtaatgctagtgagtatagctcttatttgtattcaaaaaaaactaaatccaaagatattggaatggagcgt

SEQ ID NO: 3461 - DNA (genomic), 426 bp, Helicobacter pylori; double-stranded, circular
  misc_feature (B) LOCATION 1...426
  hypothetical: NO
  anti-sense: NO
gtgtatggcgagatcgtgcaagagccgcgattttatttagataatggagaatgcgaattagggtatttttatgcagaagccacgagcttcattctcacaggagagcatttgcgctatcttttaggaatgttacattctaaattgatcacttttgctttcaaaactttctatgctggcggaggactaggcgagagtggttatcgctataaaaaggcttttatagaacggctacccattcctaaaatcaccgaaaaaaaccaagaattagccgataaaatcaccgattgcgcggagcaaatcctagcgctaaaagcaaaagaccctaaagccaacactcaaaagttagaaaaagaaattgacgctttagtctatcagctctaccacctcaccgatgaagaaattaaaaccattgaagacgggcagtga

SEQ ID NO: 3462 - DNA (genomic), 564 bp, Helicobacter pylori; double-stranded, circular
  misc_feature (B) LOCATION 1...564
  hypothetical: NO
  anti-sense: NO
attgatatagaaaaataccccgcaacaaaagcgcatttagacgctcattacgatactattgcaacacgatgcgatcaaggagacaccccctatcacttaaggaattgcgcgtatttagaggattttgaaaaagagaaaattgtgtatggcgagatcgtgcaagagccgcgattttatttagataatggagaatgcgaattagggtatttttatgcagaagccacgagcttcattctcacaggagagcatttgcgctatcttttaggaatgttacattctaaattgatcacttttgctttcaaaactttctatgctggcggaggactaggcgagagtggttatcgctataaaaaggcttttatagaacggctacccattcctaaaatcaccgaaaaaaaccaagaattagccgataaaatcaccgattgcgcggagcaaatcctagcgctaaaagcaaaagaccctaaagccaacactcaaaagttagaaaaagaaattgacgctttagtctatcagctctaccacctcaccgatgaagaaattaaaaccattgaagacgggcag

SEQ ID NO: 3463 - DNA (genomic), 561 bp, Helicobacter pylori; double-stranded, circular
  misc_feature (B) LOCATION 1...561
  hypothetical: NO
  anti-sense: NO
gatatagaaaaataccccgcaacaaaagcgcatttagacgctcattacgatactattgcaacacgatgcgatcaaggagacaccccctatcacttaaggaattgcgcgtatttagaggattttgaaaaagagaaaattgtgtatggcgagatcgtgcaagagccgcgattttatttagataatggagaatgcgaattagggtatttttatgcagaagccacgagcttcattctcacaggagagcatttgcgctatcttttaggaatgttacattctaaattgatcacttttgctttcaaaactttctatgctggcggaggactaggcgagagtggttatcgctataaaaaggcttttatagaacggctacccattcctaaaatcaccgaaaaaaaccaagaattagccgataaaatcaccgattgcgcggagcaaatcctagcgctaaaagcaaaagaccctaaagccaacactcaaaagttagaaaaagaaattgacgctttagtctatcagctctaccacctcaccgatgaagaaattaaaaccattgaagacgggcag

SEQ ID NO: 3464 - DNA (genomic), 525 bp, Helicobacter pylori; double-stranded, circular
  misc_feature (B) LOCATION 1...525
  hypothetical: NO
  anti-sense: NO
atgatcaccactaacaaagccctttttttggacagagacggcattatcaatattgatagaggctatgtgagtcaaaaagaagattttgagtttcaaaaagggatttttgaattgctaaagcatacgaaaactttaggctacaaattgcttttaatcaccaaccaatccgggatcaaccgaggctattacacccttaaagactttgaacaactcaccgaatacctccaagaaagcttgctcaaagaattaggttttaatttagacggcatttatttttgcaggcacgccccagaagaaaattgcgcttgcaggaagccaaaaccctctttgattttacaagccgctaaagagcatcaaatttgcttggagcgatctttcatgataggcgataaagagagcgacatgctggccggcttgaacgctaaagttaaaaataaccttttgctcactcaaaaccctttaaaaactcctcattcttggatacaatgtaaaaatcttaaagagatgattgattggattaaataa

SEQ ID NO: 3465 - DNA (genomic), 525 bp, Helicobacter pylori; double-stranded, circular
  misc_feature (B) LOCATION 1...525
  hypothetical: NO
  anti-sense: NO
gctttcaagaagtgggaattctatatgaaaacccttttaatgcaggttttatgccggtcaatttggagttgtgaagggaagagtcatttggaagaaaagctgattgatttttttaaaacaagagatgaagggctgttgttgccagagcaagatttattcgtgcttgtttgtcaagggcgtattttagaaatgccttgcaagtataatgtccatccacgcatggttgggacgagaatgatacctaaaaaatctgacgcttgcatgttgcatttttatgctgacgaaaagccttggaagcattttggctacccgtattctaaagaatggcaccaagtcgcttttaaaacttcttttgaatctttggtttttgagaatttagtgggtaaaattgaaacttttactgaactcaatgaccacaacaaaaagagtttttttgaatttttaaacaccagactgaataaaaaattccttatacaatatgttttgtttaagatttttaaaaagctagagtctttttgtttgcgt

SEQ ID NO: 3466 - DNA (genomic), 1026 bp, Helicobacter pylori; double-stranded, circular
  misc_feature (B) LOCATION 1...1026
  hypothetical: NO
  anti-sense: NO
gtgagtttatactccatgcttcttaacgcgaagcgagaaagagatggggtaaagctcttttatcaaatccattgtttagtggatagtttgagcgctgaaaatgcagaaaaattaaagcggactataagcccctttagcgcgttttctggtattgaattttgtgatatttcaaaaaatggcgcttacccttttaagttggtttctcaacttttcttaagactcaatcctttcgctaaaaagcgtttttctaaaatgattttatgccgtttgttgctggcgagtattttccctcaatacgaaaaaataatcatgtttgatgtggataccttgtttgtgggcgatattagtgagggcttttttacccctatggatggagagtattttggagcgaccaaagaagatctctcattgattggcattcatagcactaatgatttgtttgtatctcgtcttaattggtctaagggaatgggtgtcaaactcaatcataaaagcctgagctttcaagaagtgggaattctatatgaaaacccttttaatgcaggttttatgctggtcaatttggagttgtggagggagagtcatttggaagaaaagctgattgatttttttaaaacaagagatgaagggctgttgttgccagagcaagatttattcgtgcttgtttgtcaagggcgtattttagaaatgccttgcaagtataatgtccatccacgcatggttgggacgagaatgatacctaaaaaatctgacgcttgcatgttgcatttttatgctgacgaaaagccttggaagcattttggctacccgtattctaaagaatggcaccaagtcgcttttaaaacttcttttgaatctttggtttttgagaatttagtgggtaaaattgaaacttttactgaactcaatgaccacaacaaaaagagtttttttgaatttttaaacaccagactgaataaaaaattccttatacaatatgttttgtttaagatttttaaaaagctagagtctttttgtttgcgttag

SEQ ID NO: 3467 - DNA (genomic), 1122 bp, Helicobacter pylori; double-stranded, circular
  misc_feature (B) LOCATION 1...1122
  hypothetical: NO
  anti-sense: NO
gtgaaaattagcgcatctgttacccccccccccccctcatttcaaactatccccatagtagtcgcttttgacaataattattgcatccctgcgggtgtgagtttatactccatgcttcttaacgcgaagcgagaaagagatggggtaaagctcttttatcaaatccattgtttagtggatagtttgagcgctgaaaatgcagaaaaattaaagcggactataagcccctttagcgcgttttctggtattgaattttgtgatatttcaaaaaatggcgcttacccttttaagttggtttctcaacttttcttaagactcaatcctttcgctaaaaagcgtttttctaaaatgattttatgccgtttgttgctggcgagtattttccctcaatacgaaaaaataatcatgtttgatgtggataccttgtttgtgggcgatattagtgagggcttttttacccctatggatggagagtattttggagcgaccaaagaagatctctcattgattggcattcatagcactaatgatttgtttgtatctcgtcttaattggtctaagggaatgggtgtcaaactcaatcataaaagcctgagctttcaagaagtgggaattctatatgaaaacccttttaatgcaggttttatgctggtcaatttggagttgtggagggagagtcatttggaagaaaagctgattgatttttttaaaacaagagatgaagggctgttgttgccagagcaagatttattcgtgcttgtttgtcaagggcgtattttagaaatgccttgcaagtataatgtccatccacgcatggttgggacgagaatgatacctaaaaaatctgacgcttgcatgttgcatttttatgctgacgaaaagccttggaagcattttggctacccgtattctaaagaatggcaccaagtcgcttttaaaacttcttttgaatctttggtttttgagaatttagtgggtaaaattgaaacttttactgaactcaatgaccacaacaaaaagagtttttttgaatttttaaacaccagactgaataaaaaattccttatacaatatgttttgtttaagatttttaaaaagctagagtctttttgtttgcgttag

SEQ ID NO: 3468 - DNA (genomic), 462 bp, Helicobacter pylori; double-stranded, circular
  misc_feature (B) LOCATION 1...462
  hypothetical: NO
  anti-sense: NO
atgcaagacgaattgaacgcttaccaacaagaaattgaagacactagggaagttttaaaaaaaatccgtttggaattgaagcaagtccaagaaatcttgcgtaagaaaaagagcgttttaaaaggtttgaaacaagaaatctgtcaaaagaaattagaaaaagaaaacttccgctcaaacaaagaaacgcaaaatacagaagaggatgtgattttccctaaagcccttgaagaggtggaggtttatgctaaagacaatcaggtcattatggctaaaccatgtaagcgtttattcaatgaagggctttacttgcaataccgtagcgttttgcgcgaaaacaggcttttaaaaaaccatctctctaaaaaagattttgaaaattcgttgctcaaaattgaactgagggatttgcataaagaaatcaagctctatcaagtccaaaaccttttgaaagacaaataa

SEQ ID NO: 3469 - DNA (genomic), 465 bp, Helicobacter pylori; double-stranded, circular
  misc_feature (B) LOCATION 1...465
  hypothetical: NO
  anti-sense: NO
aaactgatgcaagacgaattgaacgcttaccaacaagaaattgaagacactagggaagttttaaaaaaaatccgtttggaattgaagcaagtccaagaaatcttgcgtaagaaaaagagcgttttaaaaggtttgaaacaagaaatctgtcaaaagaaattagaaaaagaaaacttccgctcaaacaaagaaacgcaaaatacagaagaggatgtgattttccctaaagcccttgaagaggtggaggtttatgctaaagacaatcaggtcattatggctaaaccatttaagcgtttattcaatgaagggctttacttgcaataccgtagcgttttgcgcgaaaacaggcttttaaaaaaccatctctctaaaaaagattttgaaaattcgttgctcaaaattgaactgagggatttgcataaagaaatcaagctctatcaagtccaaaaccttttgaaagacaaa

SEQ ID NO: 3470 - DNA (genomic), 468 bp, Helicobacter pylori; double-stranded, circular
  misc_feature (B) LOCATION 1...468
  hypothetical: NO
  anti-sense: NO
ttgaacttgccaacgccgaaaagcttgcgaagccgagaaaaacaatacaaaaagttaggactaacaaacgaacaagccaaagaaaggactaacgaactacttaaggaaatccctaacattctacaaaaaggggtgaaagaagaagacaggccaggttatgcggctattattctaaacaattcaaaagtaattttaagtaagtttaagggagataacgaactaaaaaaccattatatgattacaagttttgaagtggatgataaggttttaagggagttagagaccattgcgacactctctaacgattacagagacggcatcaactatagcatctcaaaccttaatagagaaaatcctacaccaaaaccgctaacaagtcaagaggttttattaaaacaacaagaaagtttaaacgaatttacaaaagagcctacccatttaagccccttaacacaaatgcaagcataa

SEQ ID NO: 3471 - DNA (genomic), 525 bp, Helicobacter pylori; double-stranded, circular
  misc_feature (B) LOCATION 1...525
  hypothetical: NO
  anti-sense: NO
actctaacaaacctgatcctaccacaaacgcgattaaaacgcaagagcctttatacccccttgaacttgccaacgccgaaaagcttgcgaagccgagaaaaacaatacaaaaagttaggactaacaaacgaacaagccaaagaaaggactaacgaactacttaaggaaatccctaacattctacaaaaaggggtgaaagaagaagacaggccaggttatgcggctattattctaaacaattcaaaagtaattttaagtaagtttaagggagataacgaactaaaaaaccattatatgattacaagttttgaagtggatgataaggttttaagggagttagagaccattgcgacactctctaacgattacagagacggcatcaactatagcatctcaaaccttaatagagaaaatcctacaccaaaaccgctaacaagtcaagaggttttattaaaacaacaagaaagtttaaacgaatttacaaaagagcctacccatttaagccccttaacacaaatgcaagca

SEQ ID NO: 3472 - DNA (genomic), 732 bp, Helicobacter pylori; double-stranded, circular
  misc_feature (B) LOCATION 1...732
  hypothetical: NO
  anti-sense: NO
atgaaagcaaacacaatcatactagttgattgggagaatttcaggcgcgatattaaacaaacaaagtgcgttaattacaatatcgctttagatgtgatcgttactatcagagcttttttactagatgatgaatggatcagtcgcatttatttttataccaccccgccctttgattttgaacatgcgttgtgggataaaaggaacgacaccctccaaaatgaaaaaaatccgggaacagaaatgaaaatcttcaccagcagcgacattgaagaaatcttacaaagcagtgaagcgactaaatgggagaagatttatagcgatgtggaaaatttccaacacgatctggcttcattggatcaagtggaattgaggttagggaggactaagttaaacgcaataagagtggagtttgatgggagttatagggcgttattagaacaaaagcaggtggatatgctcatgggtcttgacattcaaagaatagcctttaaaaaaatagccgataggattttgatattttcaaaagatacggatctaatccccgcgctcaaattagccagagatgaggggctaagggtggatattgccgatttgtctaacaggctgtctcttcttagccaggatttgaaatacaattctgataaagtgaggaaattgagcagtaacgaagtcaaagacaagctgttttccatcagagaaaacctcactaaaaccaactgggctttaaactaa

SEQ ID NO: 3473 - DNA (genomic), 729 bp, Helicobacter pylori; double-stranded, circular
  misc_feature (B) LOCATION 1...729
  hypothetical: NO
  anti-sense: NO
atgaaagcaaacacaatcatactagttgattgggagaatttcaggcgcgatattaaacaaacaaagtgcgttaattacaatatcgctttagatgtgatcgttactatcagagcttttttactagatgatgaatggatcagtcgcatttatttttataccaccccgccctttgattttgaacatgcgttgtgggataaaaggaacgacaccctccaaaatgaaaaaaatccgggaacagaaatgaaaatcttcaccagcagcgacattgaagaaatcttacaaagcagtgaagcgactaaatgggagaagatttatagcgatgtggaaaatttccaacacgatctggcttcattggatcaagtggaattgaggttagggaggactaagttaaacgcaataagagtggagtttgatgggagttatagggcgttattagaacaaaagcaggtggatatgctcatgggtcttgacattcaaagaatagcctttaaaaaaatagccgataggattttgatattttcaaaagatacggatctaatccccgcgctcaaattagccagagatgaggggctaagggtggatattgccgatttgtctaacaggctgtctcttcttagccaggatttgaaatacaattctgataaagtgaggaaattgagcagtaacgaagtcaaagacaagctgttttccatcagagaaaacctcactaaaaccaactgggctttaaac

SEQ ID NO: 3474 - DNA (genomic), 405 bp, Helicobacter pylori; double-stranded, circular
  misc_feature (B) LOCATION 1...405
  hypothetical: NO
  anti-sense: NO
ataagaagtaggcctatgccagctaggcaatctttcaaggatttaaaagacttgattttatgcgatataggcaacacacgcatccatttcgcgcaaaactaccagctcttttcaagcgctaaagaagatttaaagcgtttgggtattcaaaaggaaattttttacattagtgtgaatgaagaaaatgaaaaagctcttttaaattgttaccctaacgctaaaaatatcgcagggttttttcatttagaaaccgactatatagggcttgggatagaccggcaaatggcatgtttagcggtggttaatggggttatagtggatgctgggagcgcgattacgattgatttagtcaaagagggcaagcatttaggagggtgtattttgcccggtttgcccaatatgtca

SEQ ID NO: 3475 - DNA (genomic), 672 bp, Helicobacter pylori; double-stranded, circular
  misc_feature (B) LOCATION 1...672
  hypothetical: NO
  anti-sense: NO
atgccagctaggcaatctttcaaggatttaaaagacttgattttatgcgatataggcaacacacgcatccatttcgcgcaaaactaccagctcttttcaagcgctaaagaagatttaaagcgtttgggtattcaaaaggaaattttttacattagtgtgaatgaagaaaatgaaaaagctcttttaaattgttaccctaacgctaaaaatatcgcagggttttttcatttagaaaccgactatatagggcttgggatagaccggcaaatggcatgtttagcggtggttaatggggttatagtggatgctgggagcgcgattacgattgatttagtcaaagagggcaagcatttaggagggtgtattttgcccggtttagcccaatatgtccatgcgtataaaaaaagcgcgaaaatcttagagcaacctttcaaagccttagattctttagaagttttacccaaaaacaccagagacgctgtgaattacggcatgattttgagtatcatctcttgtatccaacatttagctaaagatcaaaaaatctatctttgtgggggcgatgcgaaatatttgagcgcgtttttacctcattctgtttgcaaggagcgtttggtttttgacgggatggaaatcgctcttaaaaaagcagggatactagaatgcaaatga

SEQ ID NO: 3476 - DNA (genomic), 1845 bp, Helicobacter pylori; double-stranded, circular
  misc_feature (B) LOCATION 1...1845
  hypothetical: NO
  anti-sense: NO
atgagcttggagcgttttgcccctataaaagttgagcggtgcaaagacattcaaaaagaattaaaaaaagcggccgctgaaaataaattacaaacagaagatctgtggtttgagattttaaaaacttctatttttatcaaaaacagtgctaaagacgattttagcgaggcttttggtggggaattgcagcaattagaagaagaggaatactatgaaaaaaaagagctaaccctttatcaaacccacgacattaaaatcaaatcaaacgcttacaaacgcttttttgaagtaaaagtggatgaagatttaagcaaaatagaaattattttagacgagtgttttattgtcctagacactgaagaatattaccaagaaatgtttgcgtatattaaagagcgtttggcttttgagggcgtggtgtttaggcatttttcacaaatgtatgaaaatttaaaaacagaattaagaaaatatcaaaaagaagcccaaaacaagcgctttattttatacgcttctccaacttttatccctaatacagaagaaaaatcgcattttttattagaagaagaataccttccaacgcataccatttttttaagcgatcaagaagaatcttttgttaaagaaaattactatatcgctaaagaaaaccaaaaagtcgcttgcgtgaattaccccaaacaaggcagagacggccgtaaccttaaaggcctttatattgaattgtctaaagttgcccattcgcccacccctatagggcatgacaaaaacgcttttgaagaaagagaagaaaataacgctttagtgtattactccaaagccttacaaggggttaaaatggaaaaggggcgtttggtttctaatcaaaattttatttttaaaaacgggatcaaatccattgaaacgcctaatcttttagggggagtggagagcgggctagttttagaaattcaagctaaagacgaattgagcgatgcgattgattctaacctcattttagaagcgagcgcgattaacattaagggcaatgtgggcaagaatgtgatcttagtggctaaagaaattactatagaggggcaaatccaccctgaaagctatgtctatgccaataaggcgcgtatcactaaccataagggcgtgtgctacgctaaagagtttgagtgcaagtatctagagcgtgctaaagtgtatgccaatagcgttaaagtggaagcgagcgcggggagcgtggtctatgcgaaagaaatcgctttagaaaagcttaaaagcgacaacaagctgtatttttccaagcaatgttggattgatgaggtggatggcaatggcaaccgctttattttttacgcttttggggggcgagaaaaccaagaagaattgaaaaacgctaaacaaaaactcaatgccttaggggtaaaatctaaaaaaatcatcgctcagcaccagtccttaaaccatttggttaaaaataatcaagtcatcatggaaaagcttaaaaacgccactgaagaaatcaaacgctctttaatgcagcaagaaagcgtgaaagacgcttatagcgagtttgtgtttgctctaaagcgtttgaaaatcttaaaagctcaaatgctagaattgcaaaaaatcaataacgaatgttacgctaaactcatcagcatagaaaacagcttccagcatgcaagcattacgactaaaaaccctttcaagcaagaaaatatcgtgatttaccatcgcaattaccctaaagtgagcaacttgagcgccatgttaagccataatgaaagcgtggatgtgatctatgaagatcataaaatcaaaaaagtccctaaaagcgctataaaaggctag

SEQ ID NO: 3477 - DNA (genomic), 1845 bp, Helicobacter pylori; double-stranded, circular
  misc_feature (B) LOCATION 1...1845
  hypothetical: NO
  anti-sense: NO
aaaatgagcttggagcgttttgcccctataaaagttgagcggtgcaaagacattcaaaaagaattaaaaaaagcggccgctggaaataaattacaaacagaagatctgtggtttgagattttaaaaacttctatttttatcaaaaacagtgctaaagacgattttagcgaggcttttggtggggaattgcagcaattagaagaagaggaatactatgaaaaaaaagagctaaccctttatcaaacccacgacattaaaatcaaatcaaacgcttacaaacgcttttttgaagtaaaagtggatgaagatttaagcaaaatagaaattattttagacgagtgttttattgtcctagacactgaagaatattaccaagaaatgtttgcgtatattaaagagcgtttggcttttgagggcgtggtgtttaggcatttttcacaaatgtatgaaaatttaaaaacagaattaagaaaatatcaaaaagaagcccaaaacaagcgctttattttatacgcttctccaacttttatccctaatacagaagaaaaatcgcattttttattagaagaagaataccttccaacgcataccatttttttaagcgatcaagaagaatcttttgttaaagaaaattactatatcgctaaagaaaaccaaaaagtcgcttgcgtgaattaccccaaacaaggcagagacggccgtaaccttaaaggcctttatattgaattgtctaaagttgcccattcgcccacccctatagggcatgacaaaaacgcttttgaagaaagagaagaaaataacgctttagtgtattactccaaagccttacaaggggttaaaatggaaaaggggcgtttggtttctaatcaaaattttatttttaaaaacgggatcaaatccattgaaacgcctaatcttttagggggagtggagagcgggctagttttagaaattcaagctaaagacgaattgagcgatgcgattgattctaacctcattttagaagcgagcgcgattaacattaagggcaatgtgggcaagaatgtgatcttagtggctaaagaaattactatagaggggcaaatccaccctgaaagctatgtctatgccaataaggcgcgtatcactaaccataagggtgtgtgctacgctaaagagtttgagtgcaagtatctagagcgtgctaaagtgtatgccaatagcgttaaagtggaagcgagcgcggggagcgtggtctatgcgaaagaaatcgctttagaaaagcttaaaagcgacaacaagctgtatttttccaagcaatgttggattgatgaggtggatggcaatggcaaccgctttattttttacgcttttggggggcgagaaaaccaagaagaattgaaaaacgctaaacaaaaactcaatgccttaggggtaaaatctaaaaaaatcatcgctcagcaccagtccttaaaccatttggttaaaaataatcaagtcatcatggaaaagcttaaaaacgccactgaagaaatcaaacgctctttaatgcagcaagaaagcgtgaaagacgcttatagcgagtttgtgtttgctctaaagcgtttgaaaatcttaaaagctcaaatgctagaattgcaaaaaatcaataacgaatgttacgctaaactcatcagcatagaaaacagcttccagcatgcaagcattacgactaaaaaccctttcaagcaagaaaatatcgtgatttaccatcgcaattaccctaaagtgagcaacttgagcgccatgttaagccataatgaaagcgtggatgtgatctatgaagatcataaaatcaaaaaagtccctaaaagcgctataaaaggc

SEQ ID NO: 3478 - DNA (genomic), 399 bp, Helicobacter pylori; double-stranded, circular
  misc_feature (B) LOCATION 1...399
  hypothetical: NO
  anti-sense: NO
atgcgagattttgatttcagttttaatcataaggcatgcgagggttgtggggcaaagtgttgcgtgggggaaagcgggtatatttttgtaacgatccaagaaatgcaacaaattagcgcttttttaaaattagaattagaagaattcagtcaaaaatacgttaaaaaggtgggttataagttttctttattagaaaaagacgctaaagatttaggtttagcgtgcgtgtttttggatttagaaaccaaaaaatgccagatttatagcgcgcgccccaaacaatgccaaacctttcctttttgggagagcgtgaaaactttctctaaagagcaaaaggaagctttttgtcaaagctgtccgggcatcacacaaaaaaccaaagaaactaaagtgcgctaa

SEQ ID NO: 3479 - DNA (genomic), 429 bp, Helicobacter pylori; double-stranded, circular
  misc_feature (B) LOCATION 1...429
  hypothetical: NO
  anti-sense: NO
gtattgatctccaataggattaagggtggtttaatgcgagattttgatttcagttttaatcataaggcatgcgagggttgtggggcaaagtgttgcgtgggggaaagcgggtatatttttgtaacgatccaagaaatgcaacaaattagcgcttttttaaaattagaattagaagaattcagtcaaaaatacgttaaaaaggtgggttataagttttctttattagaaaaagacgctaaagatttaggtttagcgtgcgtgtttttggatttagaaaccaaaaaatgccagatttatagcgcgcgccccaaacaatgccaaacctttcctttttgggagagcgtgaaaactttctctaaagagcaaaaggaagctttttgtcaaagctgtccgggcatcacacaaaaaaccaaagaaactaaagtgcgc

SEQ ID NO: 3480 - DNA (genomic), 519 bp, Helicobacter pylori; double-stranded, circular
  misc_feature (B) LOCATION 1...519
  hypothetical: NO
  anti-sense: NO
gtgtttggattgagtttggcggatatgattttagagcgttttaaagattttatgagagaataccctgagccttacaagtttttacaggttttttacgcgcaagaaaaagaacgcttcttaaatcataaaatgaacgattatatcaagcaaaataagagcaaggaagaggctagtattttggccagacaaggctttgtcagcgtaattggaagagcgttagaaaaaatcatagaacttttattaaaagatttttgtattaaaaacaatgtaaaaatgacgaacgataaaaccttaagggctaagcgcattaatggcgaattagataaggtcaaacgggctttattggtgcattttggaggatatagcgttttacccgatattattctttatcaaaccaacaaagataatatcaaaatcctagcgattttatcggtaaaaaattcgtttagagagcgtttcacaaaagacgccttattggaaattaaaacttttgcaatcgcctgtaacttctcacattaa

SEQ ID NO: 3481 - DNA (genomic), 540 bp, Helicobacter pylori; double-stranded, circular
  misc_feature (B) LOCATION 1...540
  hypothetical: NO
  anti-sense: NO
tttgatggatttctatggattgaggtgtttggattgagtttggcggatatgattttagagcgttttaaagattttatgagagaataccctgagccttacaagtttttacaggttttttacgcgcaagaaaaagaacgcttcttaaatcataaaatgaacgattatatcaagcaaaataagagcaaggaagaggctagtattttggccagacaaggctttgtcagcgtaattggaagagcgttagaaaaaatcatagaacttttattaaaagatttttgtattaaaaacaatgtaaaaatgacgaacgataaaaccttaagggctaagcgcattaatggcgaattagataaggtcaaacgggctttattggtgcattttggaggatatagcgttttacccgatattattctttatcaaaccaacaaagataatatcaaaatcctagcgattttatcggtaaaaaattcgtttagagagcgtttcacaaaagacgccttattggaaattaaaacttttgcaatcgcctgtaacttctcacat

SEQ ID NO: 3482 - DNA (genomic), 189 bp, Helicobacter pylori; double-stranded, circular
  misc_feature (B) LOCATION 1...189
  hypothetical: NO
  anti-sense: NO
atgctcgccaattcccccgcaatctttaaatggaaaaggtatttttcatctattttatgcaaaggcgataaaacttcaaacaatttcacgcattcttttttgaccttttggctgtgcttttcatggggtaaaaagcgatcttttagagagatgagagaggggttgatattgggggggaatttatggtaa

SEQ ID NO: 3483 - DNA (genomic), 240 bp, Helicobacter pylori; double-stranded, circular
  misc_feature (B) LOCATION 1...240
  hypothetical: NO
  anti-sense: NO
atgaaatacgcgctgtgcttgtgggctaaatatacacttaaaatcttacccatgctcgccaattcccccgcaatctttaaatggaaaaggtatttttcatctattttatgcaaaggcgataaaacttcaaacaatttcacgcattcttttttgaccttttggctgtgcttttcatggggtaaaaagcgatcttttagagagatgagagaggggttgatattgggggggaatttatggtaa

SEQ ID NO: 3484 - DNA (genomic), 462 bp, Helicobacter pylori; double-stranded, circular
  misc_feature (B) LOCATION 1...462
  hypothetical: NO
  anti-sense: NO
aagggggagttgatgcatgtattgagcgtgagcgaaatcaatgcgcaaatcaaagcccttttagaagcgacttttttgcaagttagggttcaaggggaagtgagtaatttgacgatccataaggtgagcggtcatgcgtatttttcgctcaaagacagccagtcagtcatcagatgcgtgctgtttaaagggaacgctaacaggctcaaattcgctttaaaagaagggcaggaaatggttgtttttgggggcattagcgtgtatgctccaaggggggattatcaaatcaattgctttgaaatagagcctaaagagataggttcattaaccctagctttagagcaattgaaagaaaaattacgccttaaaggctattttgatgaagccaataaattacccaaaccaaactttcctaaacgagtggcagtcatcacttctcaaaattcagccgcttgggcggca

SEQ ID NO: 3485 - DNA (genomic), 855 bp, Helicobacter pylori; double-stranded, circular
  misc_feature (B) LOCATION 1...855
  hypothetical: NO
  anti-sense: NO
acgagtggcagtcatcacttctcaaaattcagccgcttgggcggcatgaaaaagatcgcttccaaacgatggccgatgtgcgaattggtttgcatcaatactctaatgcaaggggagggctgcgttcaaagcgtggtggagagcatcgcttatgcggatagtttttatgacacaaaaaacgcttttgatgcgattgtagtggctaggggtggggggagcatggaggatttgtattctttcaatgatgaaaaaatcgctgatgctctgtatttggctaaaaccttcagcatgtcagctattgggcatgagagcgattttttattgagcgattcagtggcggatttaagggcttctacgccttcaaacgcgatggagattttgctccctagtagcgatgagtggttgcaaagacttgatgggtttaatgtgaaattgcaccgctcttttaaaactttgctccatcaaaaaaaggcgcatttagagcatttagcggcttctttgaaacgattgagttttgaaaacaagcaccatttaaacgctttaaaattagagaaattaacaatcgctttagacaataaaaccttagaatttttacgccttaaaaaaacgcttttagaaaaaatctctacccaactatccacaagcccttttttacaaaccaaaacagagcgcttaaacaggctagaaaacgccctcaaactcgcttacgcaaatttgaaactgccccaattcggggcgttggtgagtaaaaaccatcaagcgatagaattagaggcattaaaaaggggcgataaaattgaattgagtaatgaaaaagccagagcgagcgctgaaattttgagcgtggatagggtg

SEQ ID NO: 3486 - DNA (genomic), 1266 bp, Helicobacter pylori; double-stranded, circular
  misc_feature (B) LOCATION 1...1266
  hypothetical: NO
  anti-sense: NO
ttgatgcatgtattgagcgtgagcgaaatcaatgcgcaaatcaaagcccttttagaagcgacttttttgcaagttagggttcaaggggaagtgagtaatttgacgatccataaggtgagcggtcatgcgtatttttcgctcaaagacagccagtcagtcatcagatgcgtgctgtttaaagggaacgctaacaggctcaaattcgctttaaaagaagggcaggaaatggttgtttttgggggcattagcgtgtatgctccaaggggggattatcaaatcaattgctttgaaatagagcctaaagagataggttcattaaccctagctttagagcaattgaaagaaaaattacgccttaaaggctattttgatgaagccaataaattacccaaaccaaactttcctaaacgagtggcagtcatcacttctcaaaattcagccgcttgggcggacatgaaaaagatcgcttccaaacgatggccgatgtgcgaattggtttgcatcaatactctaatgcaaggggagggctgcgttcaaagcgtggtggagagcatcgcttatgcggatagtttttatgacacaaaaaacgcttttgatgcgattgtagtggctaggggtggggggagcatggaggatttgtattctttcaatgatgaaaaaatcgctgatgctctgtatttggctaaaaccttcagcatgtcagctattgggcatgagagcgattttttattgagcgattcagtggcggatttaagggcttctacgccttcaaacgcgatggagattttgctccctagtagcgatgagtggttgcaaagacttgatgggtttaatgtgaaattgcaccgctcttttaaaactttgctccatcaaaaaaaggcgcatttagagcatttagcggcttctttgaaacgattgagttttgaaaacaagcaccatttaaacgctttaaaattagagaaattaacaatcgctttagacaataaaaccttagaatttttacgccttaaaaaaacgcttttagaaaaaatctctacccaactatccacaagcccttttttacaaaccaaaacagagcgcttaaacaggctagaaaacgccctcaaactcgcttacgcaaatttgaaactgccccaattcggggcgttggtgagtaaaaaccatcaagcgatagaattagaggcattaaaaaggggcgataaaattgaattgagtaatgaaaaagccagagcgagcgctgaaattttgagcgtggatagggtgtag

SEQ ID NO: 3487 - DNA (genomic), 258 bp, Helicobacter pylori; double-stranded, circular
  misc_feature (B) LOCATION 1...258
  hypothetical: NO
  anti-sense: NO
cgctccaagcaagaagctcaaaaacaagccgctctggctaaaggggaagcggacgctaacaggattaaggctcagggcgtggcggatgcgatcgtgattgaggctaaggcaaaatctcaggccaatttaagcatttcgcaaagcttgagcgacaagcttttaagattacgacagattgaagttcaaggccagtttaatgaagcgttaaaaacgaacaagcaacgctcaaatcatgctcactccaggcggagctgtgcc

SEQ ID NO: 3488 - DNA (genomic), 255 bp, Helicobacter pylori; double-stranded, circular
  misc_feature (B) LOCATION 1...255
  hypothetical: NO
  anti-sense: NO
tccaagcaagaagctcaaaaacaagccgctctggctaaaggggaagcggacgctaacaggattaaggctcagggcgtggcggatgcgatcgtgattgaggctaaggcaaaatctcaggccaatttaagcatttcgcaaagcttgagcgacaagcttttaagattacgacagattgaagttcaaggccagtttaatgaagcgttaaaaacgaacaagcaacgctcaaatcatgctcactccaggcggagctgtgcc

SEQ ID NO: 3489 - DNA (genomic), 693 bp, Helicobacter pylori; double-stranded, circular
  misc_feature (B) LOCATION 1...693
  hypothetical: NO
  anti-sense: NO
atggatagcaggggtttgaccgtttctattgagctcaccgtgcaataccgcctaaaccctcaaaccaccccccaaacgatcgctaattatggcttgtcttgggagcaaaaaatcatcaatcctgtggtgcgcgatgtggtgcgatctgtcgtggggcgctatccgggtgaagatttacccatcaagcgcaacgagattgccgctcttatcaatagcggtatcaataaagaagtttgtaagctccccaacacccctgtggaattaagctctatccaattgagagaaatcgtcttacccgctaagatcaaagagcaaattgaaaaagtccaaatcgcgcgccaagaatcagaaagggtgaaatacgaggtggaacgctccaagcaagaagctcaaaaacaagccgctctggctaaaggggaagcggacgctaacaggattaaggctcagggcgtggcggatgcgatcgtgattgaggctaaggcaaaatctcaggccaatttaagcatttcgcaaagcttgagcgacaagcttttaagattacgacagattgaagttcaaggccagtttaatgaagcgttaaaaacgaacaacaacgctcaaatcatgctcactccaggcggagctgtgcctaacatttggattgacactaaaagtaaggttaaatctagcattgccgagagtaaagagccttaa

SEQ ID NO: 3490 - DNA (genomic), 1089 bp, Helicobacter pylori; double-stranded, circular
  misc_feature (B) LOCATION 1...1089
  hypothetical: NO
  anti-sense: NO
atgcccattgatttgaacgaacatttaaaaaagaaaaattctcaaagagaaaaccccacgcctaatacgcctaataatggagggcgtttcattccgccgtctaactcttttaattccaaaaaactatcggttttaatcgttattgtccttttgggcgttatcgcttttttagccaagccttttgaagtgatcagctcaggagaaattggcattaagatcaccgccgggaaatacgaacccacccccttacagccgggaatccacttttttgtgcctatcattcaagacattctcattgtagatacaaggatcaggaatatcaatttttcacgcaccgaagacatgggcgtggcgggtaaaaaccaagggatttttagaaacgacgccattaacgtgatggatagcaggggtttgaccgtttctattgagctcaccgtgcaataccgcctaaaccctcaaaccaccccccaaacgatcgctacttatggcttgtcttgggagcaaaaaatcatcaatcctgtggtgcgcgatgtggtgcgatctgtcgtggggcgctatccggctgaagatttacccatcaagcgcaacgagattgccgctcttatcaatagcggtatcaataaagaagtttctaagctccccaacacccctgtggaattaagctctatccaattgagagaaatcgtcttacccgctaagatcaaagagcaaattgaaaaagtccaaatcgcgcgccaagaatcagaaagggtgaaatacgaggtggaacgctccaagcaagaagctcaaaaacaagccgctctggctaaaggggaagcggacgctaacaggattaaggctcagggcgtggcggatgcgatcgtgattgaggctaaggcaaaatctcaggccaatttaagcatttcgcaaagcttgagcgacaagcttttaagattacgacagattgaagttcaaggccagtttaatgaagcgttaaaaacgaacaacaacgctcaaatcatgctcactccaggcggagctgtgcctaacatttggattgacactaaaagtaaggttaaatctagcattgccgagagtaaagagccttaa

SEQ ID NO: 3491 - DNA (genomic), 600 bp, Helicobacter pylori; double-stranded, circular
  misc_feature (B) LOCATION 1...600
  hypothetical: NO
  anti-sense: NO
ttgtataaccgcgccgctggcacgcaaagctcttctatgaattttgtttctaacagcgcgaacattcaggctcaaaactcctattttatagacgataccgcacaaaataaaggcaaccctaattttagtttcaacgctttgaatctggatttttctaacagctcttttagaggctatgtggggcaaacgcagtctgtttttaaattcaatgccgttaatgcgatcagtttcactaacagctctaatttaagctctggtttgtatcaaatgcaagctaaaagcgtgttgtttgacaattccaatttaagcgtttcagtggggacaagcagcattaaagccaatgcgatcaatctttctcaaaacgcctctatcaatgcgagcaaccattcaaccttagaacttcaaggcgatttgaatttgaacgacaccagctcgctcaacctcaaccaaagcgccattaatgtttctaacaacgccacgatcaacgattatgcgagcttgattgcgagtaatggctctcaccttaattttaacggggcggttaatttcaattcagcgaatattactacgagtttgaataattcctctatcgtgttttaa

SEQ ID NO: 3492 - DNA (genomic), 657 bp, Helicobacter pylori; double-stranded, circular
  misc_feature (B) LOCATION 1...657
  hypothetical: NO
  anti-sense: NO
cggtggggcgcgagccttaattttaacgggcttcaaggcattcttttaacgaacgcgactttgtataaccgcgccgctggcacgcaaagctcttctatgaattttgtttctaacagcgcgaacattcaggctcaaaactcctattttatagacgataccgcacaaaataaaggcaaccctaattttagtttcaacgctttgaatctggatttttctaacagctcttttagaggctatgtggggcaaacgcagtctgtttttaaattcaatgccgttaatgcgatcagtttcactaacagctctaatttaagctctggtttgtatcaaatgcaagctaaaagcgtgttgtttgacaattccaatttaagcgtttcagtggggacaagcagcattaaagccaatgcgatcaatctttctcaaaacgcctctatcaatgcgagcaaccattcaaccttagaacttcaaggcgatttgaatttgaacgacaccagctcgctcaacctcaaccaaagcgccattaatgtttctaacaacgccacgatcaacgattatgcgagcttgattgcgagtaatggctctcaccttaattttaacggggcggttaatttcaattcagcgaatattactacgagtttgaataattcctctatcgtgttt

SEQ ID NO: 3493 - DNA (genomic), 693 bp, Helicobacter pylori; double-stranded, circular
  misc_feature (B) LOCATION 1...693
  hypothetical: NO
  anti-sense: NO
cggtggggcgcgagccttaattttaacgggcttcaaggcattcttttaacgaacgcgactttgtataaccgcgccgctggcacgcaaagctcttctatgaattttgtttctaacagcgcgaacattcaggctcaaaactcctattttatagacgataccgcacaaaataaaggcaaccctaattttagtttcaacgctttgaatctggatttttctaacagctcttttagaggctatgtggggcaaacgcagtctgtttttaaattcaatgccgttaatgcgatcagtttcactaacagctctaatttaagctctggtttgtatcaaatgcaagctaaaagcgtgttgtttgacaattccaatttaagcgtttcagtggggacaagcagcattaaagccaatgcgatcaatctttctcaaaacgcctctatcaatgcgagcaaccattcaaccttagaacttcaaggcgatttgaatttgaacgacaccagctcgctcaacctcaaccaaagcgccattaatgtttctaacaacgccacgatcaacgattatgcgagcttgattgcgagtaatggctctcaccttaattttaacggggcggttaatttcaattcagcgaatattactacgagtttgagtagttcctctatcgtgtttaaggggcggtctctttacgagggcagtttaatttaa

SEQ ID NO: 3494 - DNA (genomic), 477 bp, Helicobacter pylori; double-stranded, circular
  misc_feature (B) LOCATION 1...477
  hypothetical: NO
  anti-sense: NO
ttgaaacaagctataatattgacagaatttaatcaaagggctagatatgcaatttttaaatcaatctttaggatttttggccttgatactaaaagaagttcaagcgatgaatttttagaaatcaaacaagtatcttttcaaagtaaaacttggagcgcgacttttaatgacaccactttagaaaaagccaaagttttttgcgatattaaaacgactttagccgtgggcgtgtggaataatatttctaatcttttatttattgtttatggaaagcaccctgaaattggcttgtatttagaacaaaaagtgaaagagtgtcataacgaaagcaggcgttcaactcaaacgataggaattagtaagttaatcaaagaatttgaatttaaaataaaacccattgattcaaaagaacaagagcttatcaatctttttaatctcaaattcggtcgtttttcttgggaaaattatcttgcataa

SEQ ID NO: 3495 - DNA (genomic), 573 bp, Helicobacter pylori; double-stranded, circular
  misc_feature (B) LOCATION 1...573
  hypothetical: NO
  anti-sense: NO
aacgctctaaaatcatatccgccaaactcaatccaaacacctcaatccatagaaatccatcaaattataatacaaaaacttttttataatggctggcgtttgaaacaagctataatattgacagaatttaatcaaagggctagatatgcaatttttaaatcaatctttaggatttttggccttgatactaaaagaagttcaagcgatgaatttttagaaatcaaacaagtatcttttcaaagtaaaacttggagcgcgacttttaatgacaccactttagaaaaagccaaagttttttgcgatattaaaacgactttagccgtgggcgtgtggaataatatttctaatcttttatttattgtttatggaaagcaccctgaaattggcttgtatttagaacaaaaagtgaaagagtgtcataacgaaagcaggcgttcaactcaaacgataggaattagtaagttaatcaaagaatttgaatttaaaataaaacccattgattcaaaagaacaagagcttatcaatctttttaatctcaaattcggtcgtttttcttgggaaaattatcttgca

SEQ ID NO: 3496 - DNA (genomic), 429 bp, Helicobacter pylori; double-stranded, circular
  misc_feature (B) LOCATION 1...429
  hypothetical: NO
  anti-sense: NO
atgaaaaaattcgcttctgtgttggtgcaattaaaaacccttgcgttagaaaaaatagagcgaaagcttgaaagcaagcgtttagaattgcaacaaaatgagcgagaagttttggacaaacaagcccaactgagcgcgtttaaaaaccctgaattggggggaatgagcctttttttacaaacccagcaattaaaaagcgctctaagaatggagatagaatattaccaacaagagggtgagaatttaactaaggatttaaaaattttagaaaaagattaccttttggctaaccaggaattagaaaaagctaaaatcattttagaaaaggaaaagcaaaaagaaaaggaaattttggaaaaaaaagagcaggcccttttagatgaaaacgccatgattttacactggcaaaaagggggcttgcatgcgtaa

SEQ ID NO: 3497 - DNA (genomic), 1506 bp, Helicobacter pylori; double-stranded, circular
  misc_feature (B) LOCATION 1...1506
  hypothetical: NO
  anti-sense: NO
atgaaaatgattctattcaaccaaaaccccatgattgaaaagctgcttgagagtgtttctaagaaattagaattatccatagaaaattttaaccactatcaagagttatccgcgcgccttaaaggagatccagaatggcttttgatagccgatgatgaatgtttggaaaaactagatcaagtggattggctagagttaaaagaaaccatctctcaaaataaaaacagcgtgtgcatgtataaaaagggcaatgaagcgcagccctttttagagggctttgagatgaaaatcaaaaagccttttttacccactgaaatgttgaaagtccttcaaaaaaagcttggctctaacgcaagcgagctagagcctagccagaatttagacccaactcaagaaattttagaaaccaattgggatgagttggaaaatctaggcgatttagaagccctagccaaagaagagcctaacaacgaagagcaattgctccccactttaaacgagcaagaaggagaaactcctaaagaagaagcgcaagaagaggttaaaaaagaagaagttaaagaaatgcaagaagaagttaaagaaaaacaaaaacaagaagttgcagaaaacccccaagatgaagaaaagcccaaagatgatgaaacgcaagggagcgttgaaccccccaaagatgaagaagtttctaaagaattagaaacgcaagaagaattagaaacccctaaagaagaaacgcaagaacaagagccaatcaaagaagaaacgcaagaaattaaggaggaaaaacaagagaaaacacaagattccccaagcgcgcaagaattagaagccatgcaagaattagtcaaagaaatccaagaaaattctaacgaccaagagaataaaaaggaaacccaagaaacccaagaaaacacagaaacaccgcaagatatagaaacgcaggaattagaaattcctaaagaagaagaaacacaagaagtcgcagaaaaaacacaggtgcaaggattagaaaaagaagaaattgcagaaacgccccaagaaaaagaaatccaagaaacccaagatgaaacgccccaagaattagaagcccaagatgaaaaactccaagaaaacgaaacccccaaagatgaaagcatgcaagaaagtgcacaaaatttacaagataaagaaaccccccaagaagaaacccaagaagatcattacgaaagcattgaagacattcctgagccggtgatggctaaagcgatgggggaagaattgccctttttgaatgaagctgttgcaaaaattcctaataatgagaacgacacagaaacccctaaagagagcgatataaaagccccacaagaaaaagaagaaagcgataaaacttccagccccctagaattgcgcttgaatttgcaggatttattaaaaagcctcaatcaagagtccttaaaaagccttttagaaaacaaaaccttaagcattaaaatcactttagaggataaaaaacctaatgaataa

SEQ ID NO: 3498 - DNA (genomic), 1515 bp, Helicobacter pylori; double-stranded, circular
  misc_feature (B) LOCATION 1...1515
  hypothetical: NO
  anti-sense: NO
ggagtccctaaaatgaaaatgattctattcaaccaaaaccccatgattgaaaagctgcttgagagtgtttctaagaaattagaattatccatagaaaattttaaccactatcaagagttatccgcgcgccttaaaggagatccagaatggcttttgatagccgatgatgaatgtttggaaaaactagatcaagtggattggctagagttaaaagaaaccatctctcaaaataaaaacagcgtgtgcatgtataaaaagggcaatgaagcgcagccctttttagagggctttgagatgaaaatcaaaaagccttttttacccactgaaatgttgaaagtccttcaaaaaaagcttggctctaacgcaagcgagctagagcctagccagaatttagacccaactcaagaaattttagaaaccaattgggatgagttggaaaatctaggcgatttagaagccctagccaaagaagagcctaacaacgaagagcaattgctccccactttaaacgagcaagaaggagaaactcctaaagaagaagcgcaagaagaggttaaaaaagaagaagttaaagaaatgcaagaagaagttaaagaaaaacaaaaacaagaagttgcagaaaacccccaagatgaagaaaagcccaaagatgatgaaacgcaagggagcgttgaaccccccaaagatgaagaagtttctaaagaattagaaacgcaagaagaattagaaacccctaaagaagaaacgcaagaacaagagccaatcaaagaagaaacgcaagaaattaaggaggaaaaacaagagaaaacacaagattccccaagcgcgcaagaattagaagccatgcaagaattagtcaaagaaatccaagaaaattctaacgaccaagagaataaaaaggaaacccaagaaacccaagaaaacacagaaacaccgcaagatatagaaacgcaggaattagaaattcctaaagaagaagaaacacaagaagtcgcagaaaaaacacaggtgcaaggattagaaaaagaagaaattgcagaaacgccccaagaaaaagaaatccaagaaacccaagatgaaacgccccaagaattagaagcccaagatgaaaaactccaagaaaacgaaacccccaaagatgaaagcatgcaagaaagtgcacaaaatttacaagataaagaaaccccccaagaagaaacccaagaagatcattacgaaagcattgaagacattcctgagccggtgatggctaaagcgatgggggaagaattgccctttttgaatgaagctgttgcaaaaattcctaataatgagaacgacacagaaacccctaaagagagcgatataaaagccccacaagaaaaagaagaaagtgataaaacttccagccccctagaattgcgcttgaatttgcaggatttattaaaaagcctcaatcaagagtccttaaaaagccttttagaaaacaaaaccttaagcattaaaatcactttagaggataaaaaacctaatgaa

SEQ ID NO: 3499 - DNA (genomic), 177 bp, Helicobacter pylori; double-stranded, circular
  misc_feature (B) LOCATION 1...177
  hypothetical: NO
  anti-sense: NO
atggtacgagcacccactaaatggcatgaacgctccttgaatttattctcatctcgctcccattatgcactatcaattaacaagtttcaatataatacaagatctttttataacttgtcatgtgttaaggatcaaaatgcgcgtgtttgtttgctttttaggggtttttgtatctaa

SEQ ID NO: 3500 - DNA (genomic), 243 bp, Helicobacter pylori; double-stranded, circular
  misc_feature (B) LOCATION 1...243
  hypothetical: NO
  anti-sense: NO
atgaaactagttttagccaagaatacaagaaaatcagacgctaagagcgtggaattagaggatttgtataaaaaattcaatgaagacaagcgttctattttttattttgcccctacaaacgcccataaagacatgctcaaagcggtggattttttcaaagaaaaaggccatacagcttatttagatgaggtgagggtcagcactgatgaaaaagattttctttatgaattgcacattatttaa

SEQ ID NO: 3501 - DNA (genomic), 255 bp, Helicobacter pylori; double-stranded, circular
  misc_feature (B) LOCATION 1...255
  hypothetical: NO
  anti-sense: NO
attaaagggaatggaatgaaactagttttagccaagaatacaagaaaatcagacgctaagagcgtggaattagaggatttgtataaaaaattcaatgaagacaagcgttctattttttattttgcccctacaaacgcccataaagacatgctcaaagcggtggattttttcaaagaaaaaggccatacagcttatttagatgaggtgagggtcagcactgatgaaaaagattttctttatgaattgcacattatt

SEQ ID NO: 3502 - DNA (genomic), 210 bp, Helicobacter pylori; double-stranded, circular
  misc_feature (B) LOCATION 1...210
  hypothetical: NO
  anti-sense: NO
ttgcaatcgcctgtaacttctcacattaaagttttcatgataacaccggataacgatgaagagatcagctttaaagacaagcctaaaaaggctaggattgttatggagcatgaattagaaggcctctatttagccaaaagccattttgatcaaagttctaagattaagggcatagagaatttgttagaagatttaaaaaggcttttatga

SEQ ID NO: 3503 - DNA (genomic), 261 bp, Helicobacter pylori; double-stranded, circular
  misc_feature (B) LOCATION 1...261
  hypothetical: NO
  anti-sense: NO
aaaattcgtttagagagcgtttcacaaaagacgccttattggaaattaaaacttttgcaatcgcctgtaacttctcacattaaagttttcatgataacaccggataacgatgaagagatcagctttaaagacaagcctaaaaaggctaggattgttatggagcatgaattagaaggcctctatttagccaaaagccattttgatcaaagttctaagattaagggcatagagaatttgttagaagatttaaaaaggctttta

SEQ ID NO: 3504 - DNA (genomic), 210 bp, Helicobacter pylori; double-stranded, circular
  misc_feature (B) LOCATION 1...210
  hypothetical: NO
  anti-sense: NO
aaacgccagggaacgcaaaagagcgagctcaaacgggtggggttgctcaatcaaattttggcgttttatgggctaaaaattggtgattggcaaggtgcgaagtccgtgctgtgtgataaaaaagggcagagcgtgatcgtgaatgatttaggcgatttgtgggataaggcacaaatttgccaaaaaaagatggacgtgctagatcttctg

SEQ ID NO: 3505 - DNA (genomic), 387 bp, Helicobacter pylori; double-stranded, circular
  misc_feature (B) LOCATION 1...387
  hypothetical: NO
  anti-sense: NO
ttgatttgggagattaagatgtgcgttttatgcggggaacttatcagctcttttcattggaccgatgggagcgatggttataggagcgatgaaaatttgagagggtcaaatgcggttattagcgcgaatgaaaacgccagggaacgcaaaagagcgaggctcaaacgggtggggttgctcaatcaaattttggcgttttatgggctaaaaattggtgattggcaaggtgcgaagtttgtgctgtgtgataaaaaagggcagagcgtgatcgtgaatgatttaggcgatttgtgggataaggcacaaaatttagccaaaaaaaagatggacgtgctagattctaatctgttagcgtttttaaatcaacatacacaagccactcgctga

SEQ ID NO: 3506 - DNA (genomic), 168 bp, Helicobacter pylori; double-stranded, circular
  misc_feature (B) LOCATION 1...168
  hypothetical: NO
  anti-sense: NO
aagcaatatctcaagacgcaccgcttgggggagttgctgcaagctagcgcaccttatgcgatcgctcctgtggagttgatcgttgttttttataaaaacgaatacaaacgaaaaaaacaaacttctacgatgagtagagaggaatttttactctacacgaacgggctt

SEQ ID NO: 3507 - DNA (genomic), 228 bp, Helicobacter pylori; double-stranded, circular
  misc_feature (B) LOCATION 1...228
  hypothetical: NO
  anti-sense: NO
aattttagcggtgaatccaaaaagcgcctaaagcacccagccccattcccaagggaattacccaggcgttgcatccaattgttttcttttttggaagacacgatttttgatccctttagcggctctggcacgactattttagaggccaacgctttagggcgttttagcgtgggtttagagattgaaaaagaatattgcgagttgttcaaaaagcgtattttagagagt

SEQ ID NO: 3508 - DNA (genomic), 225 bp, Helicobacter pylori; double-stranded, circular
  misc_feature (B) LOCATION 1...225
  hypothetical: NO
  anti-sense: NO
aattttagcggtgaatccaaaaagcgcctaaagcacccagccccattcccaagggaattacccaggcgttgcatccaattgttttcttttttggaagacacgatttttgatccctttagcggctctggcacgactattttagaggccaacgctttagggcgttttagcgtgggtttagagattgaaaaagaatattgcgagttgttcaaaaagcgtattttagag

SEQ ID NO: 3509 - DNA (genomic), 390 bp, Helicobacter pylori; double-stranded, circular
  misc_feature (B) LOCATION 1...390
  hypothetical: NO
  anti-sense: NO
ttgggggagttgctgcaagctagcgcaccttatgcgatcgctcctgtggagttgatcgttgttttttataaaaacgaatacaaacgaaaaaaacaaacttctacgatgagtagagaggaatttttactctacacgaacgggctttggaattttagcggtgaatccaaaaagcgcctaaagcacccagccccattcccaagggaattacccaggcgttgcatccaattgttttcttttttggaagacacgatttttgatccctttagcggctctggcacgactattttagaggccaacgctttagggcgttttagcgtgggtttagagattgaaaaagaatattgcgagttgtctaaaaagcgtattttagagagtttgtcgttagtgtga

SEQ ID NO: 3510 - DNA (genomic), 423 bp, Helicobacter pylori; double-stranded, circular
  misc_feature (B) LOCATION 1...423
  hypothetical: NO
  anti-sense: NO
atgaaaccttatttcagtttggagaaattggatttataccatggcgatgcgagcgttttagagacttttgaaaaaggtttttatgatttgtgcgttacttcaccgccctataatttgagtattgaataccaagggagtaatgattttagggcttatgacgattatttgaattggtgtaaaaattggcttaaaaattgttatttttggggtaaggaacaggcgaggttgtgtttgaatgtccctttggatacgaataagcatggcaagcaaagtttgggggctgatattactatagtggctaaagaatgcggttggaaataccaaaatacgattatttggaatgaaagcaatatctcaagacgcaccgcttgggggagttgctgcaagctagcgcaccttatgcgatcgctcctgtggagttga

SEQ ID NO: 3511 - DNA (genomic), 459 bp, Helicobacter pylori; double-stranded, circular
  misc_feature (B) LOCATION 1...459
  hypothetical: NO
  anti-sense: NO
gggcatagagaatttgttagaagatttaaaaaggcttttatgaaaccttatttcagtttggagaaattggatttataccatggcgatgcgagcgttttagagacttttgaaaaaggtttttatgatttgtgcgttacttcaccgccctataatttgagtattgaataccaagggagtaatgattttagggcttatgacgattatttgaattggtgtaaaaattggcttaaaaattgttatttttggggtaaggaacaggcgaggttgtgtttgaatgtccctttggatacgaataagcatggcaagcaaagtttgggggctgatattactatagtggctaaagaatgcggttggaaataccaaaatacgattatttggaatgaaagcaatatctcaagacgcaccgcttgggggagttgctgcaagctagcgcaccttatgcgatcgctcctgtggagt

SEQ ID NO: 3512 - DNA (genomic), 759 bp, Helicobacter pylori; double-stranded, circular
  misc_feature (B) LOCATION 1...759
  hypothetical: NO
  anti-sense: NO
atgaaaccttatttcagtttggagaaattggatttataccatggcgatgcgagcgttttagagacttttgaaaaaggtttttatgatttgtgcgttacttcaccgccctataatttgagtattgaataccaagggagtaatgattttagggcttatgacgattatttgaattggtgtaaaaattggcttaaaaattgttatttttggggtaaggaacaggcgaggttgtgtttgaatgtccctttggatacgaataagcatggcaagcaaagtttgggggctgatattactatagtggctaaagaatgcggttggaaataccaaaatacgattatttggaatgaaagcaatatctcaagacgcaccgcttgggggagttggctgcaagctagcgcaccttatgcgatcgctcctgtggagttgatcgttgttttttataaaaacgaatacaaacgaaaaaaacaaacttctacgatgagtagagaggaatttttactctacacgaacgggctttggaattttagcggtgaatccaaaaagcgcctaaagcacccagccccattcccaagggaattacccaggcgttgcatccaattgttttcttttttggaagacacgatttttgatccctttagcggctctggcacgactattttagaggccaacgctttagggcgttttagcgtgggtttagagattgaaaaagaatattgcgagttgtctaaaaagcgtattttagagagtttgtcgttagtgtga

SEQ ID NO: 3513 - DNA (genomic), 474 bp, Helicobacter pylori; double-stranded, circular
  misc_feature (B) LOCATION 1...474
  hypothetical: NO
  anti-sense: NO
aagagggcatgcctttcttatgaaatgttgggtaaaagcttgtcgtataacccttacttgcctagaatcattcctcaaactaaagattgcgtttttgcaacccctgatgaggttttagaaacgcttttgaaagaaaacacccgcaccgattgcgtcattgtcaatttcaaaggattatacgaaataggcgcgccaagcgtgtttgatctagaaatcttagggttgttgcgccggcatgcgagttctttgattgtccatcaggatcctttcatcagccactaccagcttttagaatcgcttgttcaaggctctgatggggtcattttagatgaagagcttttaaaagaggatttaaagggcatggtagaattcgcttggcgtttgggcttgagcgtgtttgtagaaacccacaagccagactacacccatttaaaagatttaggggttttaggcgtgctggaaaatagcccccat

SEQ ID NO: 3514 - DNA (genomic), 501 bp, Helicobacter pylori; double-stranded, circular
  misc_feature (B) LOCATION 1...501
  hypothetical: NO
  anti-sense: NO
atgctttcttatgaaatgttgggtaaaagcttgtcgtataacccttacttgcctagaatcattcctcaaactaaagattgcgtttttgcaacccctgatgaggttttagaaacgcttttgaaagaaaacacccgcaccgattgcgtcattgtcaatttcaaaggattatacgaaataggcgcgccaagcgtgtttgatctagaaatcttagggttgttgcgccggcatgcgagttctttgattgtccatcaggatcctttcatcagccactaccagcttttagaatcgcttgttcaaggctctgatggggtcattttagatgaagagcttttaaaagaggatttaaagggcatggtagaattcgcttggcgtttgggcttgagcgtgtttgtagaaacccacaagccagactacacccatttaaaagatttaggggttttaggcgtgctggaaaatagcccccattcttataatcaaaaaaaaatagtctttttagattga

SEQ ID NO: 3515 - DNA (genomic), 1230 bp, Helicobacter pylori; double-stranded, circular
  misc_feature (B) LOCATION 1...1230
  hypothetical: NO
  anti-sense: NO
atgcaagaaatcataggagcgtctttagtttttttgtgtaatgaaaaatgcgaagtgttagaagattacggcgtggtctttgatgaaaagattgttgaaataggcgattatcacaatttaacgcttaaatacccccacttaaaggcgcagttttttgaaaattccgttctgttgcccgcttttatcaacgcgcacacccattttgaattttccaacaacaaggcgagttttgattacgggagtttttctggctggttagggagcgtgttgaacaatgggggggcgattttagaaaattgccaaggggctattcaaaacgccatcatggcgcaattaaaaagcggggtggggagcgtgggagcgatttctaaccacctgatagaagttaatctgttaaaagaaagccccttgaatgctgtcgtgtttttagagtttttagggagcagctattctttagaaaaattaaaagcgtttgaggccaaatttaaagagctaaaagatttagaagatcaaaagcttaaagcggctttggctgtgcatgccccttattcggtccaaaaagacatggctttaagcgtcatccaattggccaaagattcacaaagcctgctttctacgcattttttagaatcgcttgaagaactagaatgggtggaaaattctaaagggtggtttgaaaatttttaccagcgttttttaaaagagtctaatttcacatcgctctatgagggggcgaacgattacattgacatgtttaaagacacgcacactctatttgtgcataaccagttcgcttctttagaagcgttaaaaaggatcaagtctcaagtcaaaaacgcttttttaatcacatgccccttttctaaccggctgttgagtgggaaggcgttggatttagagagagttagagaagccggtttgagcgtgagcgtggccactgatggcttgagttctaacatttctttgagccttttagacgaattaagggcgttcttgctttcccataacatgccgttattggaattagccaaaatagcccttttaggggcgactaggcatggggctaaagctttagctttgaataatggcgagatagaaaccaacaaaagggcggatttgagcgtgtttggttttaatgaaaaattcaccaaagagcaagcgattttgcaatttttattgcatgctaaagaagtggagcgcttgtttttagggggtaaaagggtaatctaa

SEQ ID NO: 3516 - DNA (genomic), 1236 bp, Helicobacter pylori; double-stranded, circular
  misc_feature (B) LOCATION 1...1236
  hypothetical: NO
  anti-sense: NO
ggagaatgcatgcaagaaatcataggagcgtctttagtttttttgtgtaatgaaaaatgcgaagtgttagaagattacggcgtggtctttgatgaaaagattgttgaaataggcgattatcacaatttaacgcttaaatacccccacttaaaggcgcagttttttgaaaattccgttctgttgcccgcttttatcaacgcgcacacccattttgaattttccaacaacaaggcgagttttgattacgggagtttttctggctggttagggagcgtgttgaacaatgggggggcgattttagaaaattgccaaggggctattcaaaacgccatcatggcgcaattaaaaagcggggtggggagcgtgggagcgatttctaaccacctgatagaagttaatctgttaaaagaaagccccttgaatgctgtcgtgtttttagagtttttagggagcagctattctttagaaaaattaaaagcgtttgaggccaaatttaaagagctaaaagatttagaagatcaaaagcttaaagcggctttggctgtgcatgccccttattcggtccaaaaagacatggctttaagcgtcatccaattggccaaagattcacaaagcctgctttctacgcattttttagaatcgcttgaagaactagaatgggtggaaaattctaaagggtggtttgaaaatttttaccagcgttttttaaaagagtctaatttcacatcgctctatgagggggcgaacgattacattgacatgtttaaagacacgcacactctatttgtgcataaccagttcgcttctttagaagcgttaaaaaggatcaagtctcaagtcaaaaacgcttttttaatcacatgccccttttctaaccggctgttgagtgggaaggcgttggatttagagagagttagagaagccggtttgagcgtgagcgtggccactgatggcttgagttctaacatttctttgagccttttagacgaattaagggcgttcttgctttcccataacatgccgttattggaattagccaaaatagcccttttaggggcgactaggcatggggctaaagctttagctttgaataatggcgagatagaaaccaacaaaagggcggatttgagcgtgtttggttttaatgaaaaattcaccaaagagcaagcgattttgcaatttttattgcatgctaaagaagtggagcgcttgtttttagggggtaaaagggtaatc

SEQ ID NO: 3517 - DNA (genomic), 756 bp, Helicobacter pylori; double-stranded, circular
  misc_feature (B) LOCATION 1...756
  hypothetical: NO
  anti-sense: NO
ttgcttaatcgtattatagaacacatgaacgctcaccatgtagaagacatgaaaggtttgttgaaaaaatttgggcaagtccatcacgctgaaaatgtcgcctttaaaagcgtggatccacaaggcattgtgattggctataacaacaaccaaactttaaggattgaattcaaccacgaagttaaagaccccaaagactacaaaaacgctatcattgaattgtgccaaagcgtggaaaaaacccatgatttaaaaggcgtggaagaagaagttaaagcctttagaaaagactttgattccgtttgtttagcgaccttacaccctaatgggcatgtggtatgctcttatgcgcctttaatgacagatggcaaacaatactacatttatgtgagcgaagtggctgaacattttgcgggtcttaaaaacaacccccacaatgtggaagtgatgtttttagaagacgagagcaaggctaaatcagctattttgagaaaacgcttgcgttataaaaccaacgctcgttttattgaaagaggggcggagtttgacaaagcgtttgattctttcattgaaaaaaccggtggtgctgggggcattaaaaccattcgcaccatgcaagatttccatttgatcgcgttggatttcaaagaagggcgttttgtgaaaggctttggtcaagcttatgacattttaggcgataaaatcgcttatgttggggataaaggcaacccgcacaatttcgctcataagaaataa

SEQ ID NO: 3518 - DNA (genomic), 837 bp, Helicobacter pylori; double-stranded, circular
  misc_feature (B) LOCATION 1...837
  hypothetical: NO
  anti-sense: NO
agtaaagcgatcaaaagattaagctcaaaattagtttttttgattataatattctcattatttttaaaaaataaggagaatattttgcttaatcgtattatagaacacatgaacgctcaccatgtagaagacatgaaaggtttgttgaaaaaatttgggcaagtccatcacgctgaaaatgtcgcctttaaaagcgtggatccacaaggcattgtgattggctataacaacaaccaaactttaaggattgaattcaaccacgaagttaaagaccccaaagactacaaaaacgctatcattgaattgtgccaaagcgtggaaaaaacccatgatttaaaaggcgtggaagaagaagttaaagcctttagaaaagactttgattccgtttgtttagcgaccttacaccctaatgggcatgtggtatgctcttatgcgcctttaatgacagatggcaaacaatactacatttatgtgagcgaagtggctgaacattttgcgggtcttaaaaacaacccccacaatgtggaagtgatgtttttagaagacgagagcaaggctaaatcagctattttgagaaaacgcttgcgttataaaaccaacgctcgttttattgaaagaggggcggagtttgacaaagcgtttgattctttcattgaaaaaaccggtggtgctgggggcattaaaaccattcgcaccatgcaagatttccatttgatcgcgttggatttcaaagaagggcgttttgtgaaaggctttggtcaagcttatgacattttaggcgataaaatcgcttatgttggggataaaggcaacccgcacaatttcgctcataagaaa

SEQ ID NO: 3519 - DNA (genomic), 288 bp, Helicobacter pylori; double-stranded, circular
  misc_feature (B) LOCATION 1...288
  hypothetical: NO
  anti-sense: NO
tttttgaagaggcacatggaatggagcgcgtttgggatttggctgagtttgttgttgcatcaatacggcacgcagattttacgcataaaggggattattgacattggaagcgatcttttagtgagcattaacggcgtgatgcatgtgatttacccgcccaagcacattttaaaggatcaaaacggctctaacctcgtttttattgtgcgccatttagggcgtgaaaaaatcttaaattccttaaagggttttaaggattttctcggcatcaagggttttgaaacccca

SEQ ID NO: 3520 - DNA (genomic), 510 bp, Helicobacter pylori; double-stranded, circular
  misc_feature (B) LOCATION 1...510
  hypothetical: NO
  anti-sense: NO
tctgttagcgtttttaaatcaacatacacaagccactcgctgctgcccaaaatccctatcacgctcatcaccggttttttaggcagcggtaaaacgagttttttaagcgaatatttaaaccaaatagatcaccaaggcgtcgctctcatcatcaatgaaatcgggcaagccgctttggatcagcgcatcttaagcgttcaatattgcggtgaaaaaatgctctatcttaacgcagggtgtgtgtgttgcaataaacgcttagatttagtggagtctctaaaagccacgctcaataactatgaatggcgcggcgaaattctaaagcgcgtcattattgaaaccaccggtttagccaatccggcgccgattttatggacgaatttgagcgatgtttttttaggggcgcattttgaaattcaaagcgtggtggcttgcgtggatgttttgaacgctaaaacgcatttaacaaacaacgaagctaaagagcaaatcgtttttgctgatagcgtt

SEQ ID NO: 3521 - DNA (genomic), 507 bp, Helicobacter pylori; double-stranded, circular
  misc_feature (B) LOCATION 1...507
  hypothetical: NO
  anti-sense: NO
tctgttagcgtttttaaatcaacatacacaagccactcgctgctgcccaaaatccctatcacgctcatcaccggttttttaggcagcggtaaaacgagttttttaagcgaatatttaaaccaaatagatcaccaaggcgtcgctctcatcatcaatgaaatcgggcaagccgctttggatcagcgcatcttaagcgttcaatattgcggtgaaaaaatgctctatcttaacgcagggtgtgtgtgttgcaataaacgcttagatttagtggagtctctaaaagccacgctcaataactatgaatggcgcggcgaaattctaaagcgcgtcattattgaaaccaccggtttagccaatccggcgccgattttatggacgaatttgagcgatgtttttttaggggcgcattttgaaattcaaagcgtggtggcttgcgtggatgttttgaacgctaaaacgcatttaacaaacaacgaagctaaagagcaaatcgtttttgctgatagc

SEQ ID NO: 3522 - DNA (genomic), 966 bp, Helicobacter pylori; double-stranded, circular
  misc_feature (B) LOCATION 1...966
  hypothetical: NO
  anti-sense: NO
atgcccaaaatccctatcacgctcatcaccggttttttaggcagcggtaaaacgagttttttaagcgaatatttaaaccaaatagatcaccaaggcgtcgctctcatcatcaatgaaatcgggcaagccgctttggatcagcgcatcttaagcgttcaatattgcggtgaaaaaatgctctatcttaacgcagggtgtgtgtgttgcaataaacgcttagatttagtggagtctctaaaagccacgctcaataactatgaatggcgcggcgaaattctaaagcgcgtcattattgaaaccaccggtttagccaatccggcgccgattttatggacgaatttgagcgatgtttttttaggggcgcattttgaaattcaaagcgtggtggcttgcgtggatgttttgaacgctaaaacgcatttaacaaacaacgaagctaaagagcaaatcgtttttgctgatagcgttttattgaccaaaacggatttgcaaaacgacagcacggctttaatgaaattaaaagagcgaatacaatcccttaaccctagcgcagaaatttttgacaagaaaaatatagattacgaaagctttttttcacgcaaaaatggggcgcgaaatttcatgctaagaatgccaaaagattcgcactcgcaaggctttgagactttaagcgttagttttgaaggcacgatggaatggagcgcgtttgggatttggctgagtttgttgttgcatcaatacggcacgcagattttacgcataaaggggattattgacattggaagcgatcttttagtgagcattaacggcgtgatgcatgtgatttacccgcccaagcacattttaaaggatcaaaacggctctaacctcgtttttattgtgcgccatttagggcgtgaaaaaatcttaaattccttaaagggttttaaggattttctcggcatcaagggttttgaaaccccataa

SEQ ID NO: 3523 - DNA (genomic), 1314 bp, Helicobacter pylori; double-stranded, circular
  misc_feature (B) LOCATION 1...1314
  hypothetical: NO
  anti-sense: NO
ttgaaagtttatattgaaacgatgggttgtgccatgaattctagggatagcgagcacctactaagcgaactatccaaactggattacaaagagactagcgaccctaaaatggcggatttgattttaatcaacacttgcagcgtgcgcgaaaagcccgagaggaaattgttttcagaaatcggtcaattcgctaagatcaaaaaacccaacgccaaaattggggtttgcggctgcaccgcaagccacatgggggcggatattttgaaaaaagccccaagcgtgagctttgtgttaggggctaggaatgtgtctaaaatctctcaagtgatccataaagaaaaggccgttgaggtggcgattgattatgatgaaagcgcgtatgcgtttgaattttttgaaaaaaaggctcaaatcagatcgttactaaacatctctataggttgcgataagaaatgcgcttattgcattgtcccgcacactagggggaaagaaatttctatccctatggatttgattttaaaagaagccgagaaattagcgaataacggcactaaagagctcatgcttttagggcagaatgtgaataattacggcgttcgtttcagtagcgagcatgcgaaagtgggttttagcgatttactggataaattgagcgaaatccaaggcattgaaaggatacgattcacttcgcctcaccccttgcacatgaacgatgcatttttagagcgctttgcccaaaaccctaaagtgtgtaagagtatccatatgcccttacagagcggatctagcgcggtgttaaagatgatgcgaagaggttatagcaaagaatggtttttaaatagggtggagaggttgaaagccttagtgcctgaagtgggcatcagcacggatattattgtaggctttcctaatgagagcgataaggattttgaagacacgatggaggtgttagaaaaagtgcgctttgacacgctctatagttttatttattccccacgccctttcactgaagcgggagcttggaaagaaagagtgcctttagagatttcatctttaaggttagagaggctgcaaaacaggcacaaagaaattttagaagaaaaagccaagttggaagtgggcaaaacgcatgtggtgttggtggaaaataggcgcgaaatggatggccaaatcgtgggttttgaagggcgtagcgatacggggaaattcattgaagtaacttgtaaagaaaaaaagaatccgggcgagcttgtaagagtggagattatctctcattctaaagggcgcttaatggcaaccactaaaggcaactaa

SEQ ID NO: 3524 - DNA (genomic), 1320 bp, Helicobacter pylori; double-stranded, circular
  misc_feature (B) LOCATION 1...1320
  hypothetical: NO
  anti-sense: NO
aggcttgtattgaaagtttatattgaaacgatgggttgtgccatgaattctagggatagcgagcacctactaagcgaactatccaaactggattacaaagagactagcgaccctaaaatggcggatttgattttaatcaacacttgcagcgtgcgcgaaaagcccgagaggaaattgttttcagaaatcggtcaattcgctaagatcaaaaaacccaacgccaaaattggggtttgcggctgcaccgcaagccacatgggggcggatattttgaaaaaagccccaagcgtgagctttgtgttaggggctaggaatgtgtctaaaatctctcaagtgatccataaagaaaaggccgttgaggtggcgattgattatgatgaaagcgcgtatgcgtttgaattttttgaaaaaaaggctcaaatcagatcgttactaaacatctctataggttgcgataagaaatgtgcttattgcattgtcccgcacactagggggaaagaaatttctatccctatggatttgattttaaaagaagccgagaaattagcgaataacggcactaaagagctcatgcttttagggcagaatgtgaataattacggcgttcgtttcagtagcgagcatgcgaaagtgggttttagcgatttactggataaattgagcgaaatccaaggcattgaaaggatacgattcacttcgcctcaccccttgcacatgaacgatgcatttttagagcgctttgcccaaaaccctaaagtgtgtaagagtatccatatgcccttacagagcggatctagcgcggtgttaaagatgatgcgaagaggttatagcaaagaatggtttttaaatagggtggagaggttgaaagccttagtgcctgaagtgggcatcagcacggatattattgtaggctttcctaatgagagcgataaggattttgaagacacgatggaggtgttagaaaaagtgcgctttgacacgctctatagttttatttattccccacgccctttcactgaagcgggagcttggaaagaaagagtgcctttagagatttcatctttaaggttagagaggctgcaaaacaggcacaaagaaattttagaagaaaaagccaagttggaagtgggcaaaacgcatgtggtgttggtggaaaataggcgcgaaatggatggccaaatcgtgggttttgaagggcgtagcgatacggggaaattcattgaagtaacttgtaaagaaaaaaagaatccgggcgagcttgtaagagtggagattatctctcattctaaagggcgcttaatggcaaccactaaaggcaac

SEQ ID NO: 3525 - DNA (genomic), 537 bp, Helicobacter pylori; double-stranded, circular
  misc_feature (B) LOCATION 1...537
  hypothetical: NO
  anti-sense: NO
atgaaaccattgcatttttcacacctggacagagagcaatcaggcgatgtgggttttatcattaaaaaccttatttttttaggggttttttccttattgggttggttgaataccgagtattttctatggcctagcatgctggaattaaaaaaaatccttttagaagaaaatcgtaaaaaaagcgttttagaatacgcgcaaaggcattttgaaacagccctagcaaactaccgcaatcaaaaagaaaccagcgaatctttgttaaagatttttaatgatgaagagtccaggcggattttagaaaagatcttaaaaaaatgttttgacgcctataaaatcaaacccttgctctctcaaaacccctcccaaaaaacccaattttttatcatggctagagcgagcgaattggaaaaaacttatctttttttcaccttaatcaacaagtatttaccgagcgctcaaagccaattgcccttaaagatttctaaagatagcgacgggttgttggtgcaatttggcgtgagtattgatctccaa

SEQ ID NO: 3526 - DNA (genomic), 540 bp, Helicobacter pylori; double-stranded, circular
  misc_feature (B) LOCATION 1...540
  hypothetical: NO
  anti-sense: NO
atgaaaccattgcatttttcacacctggacagagagcaatcaggcgatgtgggttttatcattaaaaaccttatttttttaggggttttttccttattgggttggttgaataccgagtattttctatggcctagcatgctggaattaaaaaaaatccttttagaagaaaatcgtaaaaaaagcgttttagaatacgcgcaaaggcattttgaaacagccctagcaaactaccgcaatcaaaaagaaaccagcgaatctttgttaaagatttttaatgatgaagagtccaggcggattttagaaaagatcttaaaaaaatgttttgacgcctataaaatcaaacccttgctctctcaaaacccctcccaaaaaacccaattttttatcatggctagagcgagcgaattggaaaaaacttatctttttttcaccttaatcaacaagtatttaccgagcgctcaaagccaattgcccttaaagatttctaaagatagcgacgggttgttggtgcaatttggcgtgagtattgatctccaatag

SEQ ID NO: 3527 - DNA (genomic), 537 bp, Helicobacter pylori; double-stranded, circular; identical to SEQ ID NO: 3525
  misc_feature (B) LOCATION 1...537
  hypothetical: NO
  anti-sense: NO

SEQ ID NO: 3528 - DNA (genomic), 354 bp, Helicobacter pylori; double-stranded, circular
  misc_feature (B) LOCATION 1...354
  hypothetical: NO
  anti-sense: NO
atgcgcaaatcagatcctttgaacacgcctttttctcaagctgaatgtaaggactattcgtattgcgtggcaacttttttagaaaaatatttaaaaaaggttgtttctttcccgcaagctttgagcgtagagtacacgcttttagaagataaagtcaaacaaatcactatttatacccacccatcagacatggggcatgtgattggcaaagagggcaaaatggtgagtgcgattaaggcgttcgtttcaggcgtgaaagccaaagacgggttttcttataaaatcgttgtttttgccagtaatgataaaaatggtgataaaaatccccatgctttaggcgatcaaacgccttga

SEQ ID NO: 3529 - DNA (genomic), 354 bp, Helicobacter pylori; double-stranded, circular; identical to SEQ ID NO: 3528
  misc_feature (B) LOCATION 1...354
  hypothetical: NO
  anti-sense: NO

SEQ ID NO: 3530 - DNA (genomic), 351 bp, Helicobacter pylori; double-stranded, circular
  misc_feature (B) LOCATION 1...351
  hypothetical: NO
  anti-sense: NO
atgcgcaaatcagatcctttgaacacgcctttttctcaagctgaatgtaaggactattcgtattgcgtggcaacttttttagaaaaatatttaaaaaaggttgtttctttcccgcaagctttgagcgtagagtacacgcttttagaagataaagtcaaacaaatcactatttatacccacccatcagacatggggcatgtgattggcaaagagggcaaaatggtgagtgcgattaaggcgttcgtttcaggcgtgaaagccaaagacggggtttcttataaaatcgttgtttttgccagtaatgataaaaatggtgataaaaatccccatgctttaggcgatcaaacgcct

SEQ ID NO: 3531 - DNA (genomic), 858 bp, Helicobacter pylori; double-stranded, circular
  misc_feature (B) LOCATION 1...858
  hypothetical: NO
  anti-sense: NO
atgttcagatccccatgctatactcaacccttgtgtgtggcaaaatttttattttttaggaaaaacatgggaaaaactgaaaccacgatttttgtggattgggaaaatctcctcgccgatttgaaagcaattcaagaaacggatgagcgtttaaaagagtctaattttaatttcaacaaccccgagcaactcttagcgctaatccgttcgtttttggagcctgaagaggaattgaagcggatctatttttatgtatctgagcctttcacagaagttgaacctagaatcaagagcaataaaaaagaagaacttgaggagtataaagagaagaatcctaaagaatatgaggaaaaagtgaataaatcagggattatccaatctttcaaccatgcgattgcccaacaaaatcaagtgaaattaagagtcgggcgggtaaggttcatgtttaaggatatgcccaaagaccaaagagtccatggtggcctagaagctgaaattctcataccgcacttagaattgcgtcaaaaacaaattgatgcactgttggcgcacgatattaccaagctatattgcaccaaaccactagggtgtgttgtgctgttcagcaaggataccgattttgtgcctgtgttagaagccgcttgggagaaaggctttgaagtcttcatcgctaacattcaagaaagccccaattctgtcccttcagacttgaagaagtcttgcaatgtgagagagcgcaatgtcgctgaaattgtagataacttgccaaaaaatcagtacacccccaagaaaaagaacttttcccccaacgagcctttcaacaacccatttaaagaccaactttttaagaagaactaa

SEQ ID NO: 3532 - DNA (genomic), 885 bp, Helicobacter pylori; double-stranded, circular
  misc_feature (B) LOCATION 1...885
  hypothetical: NO
  anti-sense: NO
caggacttttatttttttaagaaacaaggcatgttcagatccccatgctatactcaacccttgtgtgtggcaaaatttttattttttaggaaaaacatgggaaaaactgaaaccacgatttttgtggattgggaaaatctcctcgccgatttgaaagcaattcaagaaacggatgagcgtttaaaagagtctaattttaatttcaacaaccccgagcaactcttagcgctaatccgttcgtttttggagcctgaagaggaattgaagcggatctatttttatgtatctgagcctttcacagaagttgaacctagaatcaagagcaataaaaaagaagaacttgaggagtataaagagaagaatcctaaagaatatgaggaaaaagtgaataaatcagggattatccaatctttcaaccatgcgattgcccaacaaaatcaagtgaaattaagagtcgggcgggtaaggttcatgtttaaggatatgcccaaagaccaaagagtccatggtggcctagaagctgaaattctcataccgcacttagaattgcgtcaaaaacaaattgatgcactgttggcgcacgatattaccaagctatattgcaccaaaccactagggtgtgttgtgctgttcagcaaggataccgattttgtgcctgtgttagaagccgcttgggagaaaggctttgaagtcttcatcgctaacattcaagaaagccccaattctgtcccttcagacttgaagaagtcttgcaatgtgagagagcgcaatgtcgctgaaattgtagataacttgccaaaaaatcagtacacccccaagaaaaagaacttttcccccaacgagcctttcaacaacccatttaaagaccaactttttaagaagaac

SEQ ID NO: 3533 - DNA (genomic), 375 bp, Helicobacter pylori; double-stranded, circular
  misc_feature (B) LOCATION 1...375
  hypothetical: NO
  anti-sense: NO
ggatttgagcatattaacgaagtgcgtttggaaaaaattgattccttattcagccgattaatgggccaaaccaattcccccatggcgttggatatggttttagtgaatccttattgtttgagggaatacagctttgtgatacccaaatacatagaattactgctagaattagattctcattccaaagtggaggtgtattgcgtggtcgtgttgcaaaaaaatttagaagattctatggttaatttcttagcccctttagtgtttaattccaaaaacggctttggcgctcaagtcgcactttctatgatggattatccggattttggctttagagatcctttaaaaagctttgtggttaaagaaagagaacgagct

SEQ ID NO: 3534 - DNA (genomic), 408 bp, Helicobacter pylori; double-stranded, circular
  misc_feature (B) LOCATION 1...408
  hypothetical: NO
  anti-sense: NO
gtgaattactttttaaaagcccctattttaggatttgagcatattaacgaagtgcgtttggaaaaaattgattccttattcagccgattaatgggccaaaccaattcccccatggcgttggatatggttttagtgaatccttattgtttgagggaatacagctttgtgatacccaaatacatagaattactgctagaattagattctcattccaaagtggaggtgtattgcgtggtcgtgttgcaaaaaaatttagaagattctatggttaatttcttagcccctttagtgtttaattccaaaaacggctttggcgctcaagtcgcactttctatgatggattatccggattttggctttagagatcctttaaaaagctttgtggttaaagaaagagaacgagcttag

SEQ ID NO: 3535 - DNA (genomic), 534 bp, Helicobacter pylori; double-stranded, circular
  misc_feature (B) LOCATION 1...534
  hypothetical: NO
  anti-sense: NO
ttgggtaagaatggtaaaagcgtggggcttaatggggggttaaagcttcatttagagagcgatttcccagagtgcttaaaaaagggcgttaaggtgagcgtcgctccaatcaacgctttctcttgcgcttcttcttttaaagactatgtgatccattcttatgaacatgccaaaaacctgttgtttttagaaactatccgcacgcctgaaaaggctaaagagctgactaatttagggctttttatgagtgaagcagagagcaagaaactctgcgttttaaaagagggcgagtttttttattgcgatttgatagggcttagcgtggtggaaggaaacgagattctaggaaaagtcatagaaatccaaaggatttctcaaacagattatttcatggttgaaactacgagaagtttggttgaaaaaggtttggctaagatttttttaatcccttatagggatttttatatccaagaaatccttttgcaagacaaaaaaataaccacccataacgctaaaacgcttttagagaatagt

SEQ ID NO: 3536 - DNA (genomic), 546 bp, Helicobacter pylori; double-stranded, circular
  misc_feature (B) LOCATION 1...546
  hypothetical: NO
  anti-sense: NO
atgcttttagtgggtaggattggtaaaagcgtggggcttaatggggggttaaagcttcatttagagagcgatttcccagagtgcttaaaaaagggcgttaaggtgagcgtcgctccaatcaacgctttctcttgcgcttcttcttttaaagactatgtgatccattcttatgaacatgccaaaaacctgttgtttttagaaactatccgcacgcctgaaaaggctaaagagctgactaatttagggctttttatgagtgaagcagagagcaagaaactctgcgttttaaaagagggcgagtttttttattgcgatttgatagggcttagcgtggtggaaggaaacgagattctaggaaaagtcatagaaatccaaaggatttctcaaacagattatttcatggttgaaactacgagaagtttggttgaaaaaggtttggctaagatttttttaatcccttatagggatttttatatccaagaaatccttttgcaagacaaaaaaataaccacccataacgctaaaacgcttttagagaatagttga

SEQ ID NO: 3537 - DNA (genomic), 288 bp, Helicobacter pylori; double-stranded, circular
  misc_feature (B) LOCATION 1...288
  hypothetical: NO
  anti-sense: NO
atgcctaacaccaccaacaaagactacacaaaatacagccaaaaacagctttttaattttttaaattctatcaaggcaaagcaaaaaagagcgttagaaaaattgaaagaaatccaaactcaaaagcaaaggattaaaaaagcactccaatttaaagcgctccatttaaccgaaaatggatacaccatagaagaagagcgagaaatcttagcaagggctaaggacactaagaaccgcctttgttttaaaagcatagaggattttaagaagcattgtgaaaacttataa

SEQ ID NO: 3538 - DNA (genomic), 357 bp, Helicobacter pylori; double-stranded, circular
  misc_feature (B) LOCATION 1...357
  hypothetical: NO
  anti-sense: NO
ttttctagcctttttaataccgctctatcgcttgcgcataatgaatcggtatttttaaaaaaagggataagcatgcctaacaccaccaacaaagactacacaaaatacagccaaaaacagctttttaattttttaaattctatcaaggcaaagcaaaaaagagcgttagaaaaattgaaagaaatccaaactcaaaagcaaaggattaaaaaagcactccaatttaaagcgctccatttaaccgaaaatggatacaccatagaagaagagcgagaaatcttagcaagggctaaggacactaagaaccgcctttgttttaaaagcatagaggattttaagaagcattgtgaaaactta

SEQ ID NO: 3539 - DNA (genomic), 252 bp, Helicobacter pylori; double-stranded, circular
  misc_feature (B) LOCATION 1...252
  hypothetical: NO
  anti-sense: NO
atgccaaacaccaccaacaaagattacacaaaatacagccaaaaacagctttttaatctcatcaatcaattagagcaaaaaatcagccaagcttttgatgataaaagaggttgttgtttggggcatgagatcccaaaccttgaaacgcaacaagccataagaggtgcgttaaatggcgaaaatttagaggttattgaagatttttctgcatgggccaatgaaatcaaaaaggaagtgaatgctgaaaattaa

SEQ ID NO: 3540 - DNA (genomic), 279 bp, Helicobacter pylori; double-stranded, circular
  misc_feature (B) LOCATION 1...279
  hypothetical: NO
  anti-sense: NO
acttatcttaatttaataaaagggatgaatatgccaaacaccaccaacaaagattacacaaaatacagccaaaaacagctttttaatctcatcaatcaattagagcaaaaaatcagccaagcttttgatgataaaagaggttgttgtttggggcatgagatcccaaaccttgaaacgcaacaagccataagaggtgcgttaaatggcgaaaatttagaggttattgaagatttttctgcatgggccaatgaaatcaaaaaggaagtgaatgctgaaaat

SEQ ID NO: 3541 - DNA (genomic), 159 bp, Helicobacter pylori; double-stranded, circular
  misc_feature (B) LOCATION 1...159
  hypothetical: NO
  anti-sense: NO
ttgcaagtaaataacatgactaaaagagctaaactcaaaactaaacttaaaaatgtcaaacaaaagagtgggcttaatcaatctattttaaacgcttcattctatcaaatcatctcttttttagattgcaaacaacaacataatagcgacaagcaatag

SEQ ID NO: 3542 - DNA (genomic), 1329 bp, Helicobacter pylori; double-stranded, circular
  misc_feature (B) LOCATION 1...1329
  hypothetical: NO
  anti-sense: NO
atgaaagtcaataagggttttaaattccgcttgtatcccactaaagaacaacaggataaattgcaacactgcttttttgtctataatcaagcttataatattggcttgaatttactgcaagagcaatacgagaaaaacaaagatttacctcccaaagaaagaacgaggaaaaaatcaagcgagttagacaaagcgattaaacaccacttgaacgctagggggttaagctttagtagtgtgatagcccaacaatcacgcatgaatgttgaaagggctttaaaggatgcttttaaagttaaaaatagaggctttcctaaattcaagaactctaaatccgctaaacaatctttttcgtggaacaatcaaggtttctttattaaagagagcgatgaggaacgctttaagatattcactttaatgaaaatgcccttaatgatgtgcatgcatagagacttccctcctcattctaaagtgaaacaaatcgtgatctcttgcagccatagaaaatatttcgttagctttagcgtggaatacgaacaagacattactcccatcaaaaaccctaaaaatggtgtggggctagatttgaatatccttgatatagcttgttcttgtggcgtgaataatcacaaaaaactaacggactttaagcgatactcaacagacatgaaagaattactagggatagaaatagatgaagagttggacactaaacgactcatccctacttattccaaattgtattctttaaaaaaacactctaaaaaatttaaaagattgcaaagaaaacaaagccgtagggtgttaaagtctaaacaaaacaaaaccaaattaggaggtaatttttacaaaacccaaaagaaattaaaccaagtctttgacaagtctagtcatcaaaaaacagacagataccataaaatcacaagcgaactttcaaagcaatttgaattgatagtagttgaagatttgcaagtaaaaaacatgactaaaagagctaaactcaaaaacgttaaacaaaagagtgggcttaatcaatctattttaaacacttcattctatcaaatcatctcttttttagactacaaacaacagcataatggcaaattgttagtgaaagttcccccacaatatacgagtaaaacttgccattgttgtgggaatatcaaccacaagcttaaattaaatcataggcagtattggtgtttagaatgcgggtatagagaacacagagacatcaacgctgcgaacaatatcttaagcaaagggttaagtctttttggggtaggaaatatccatgcagactttaaagaacaaagcctttcgtgttag

SEQ ID NO: 3543 - DNA (genomic), 1335 bp, Helicobacter pylori; double-stranded, circular
  misc_feature (B) LOCATION 1...1335
  hypothetical: NO
  anti-sense: NO
aatccttttatgaaagtcaataagggttttaaattccgcttgtatcccactaaagaacaacaggataaattgcaacactgcttttttgtctataatcaagcttataatattggcttgaatttactgcaagagcaatacgagaaaaacaaagatttacctcccaaagaaagaacgaggaaaaaatcaagcgagttagacaaagcgattaaacaccacttgaacgctagggggttaagctttagtagtgtgatagcccaacaatcacgcatgaatgttgaaagggctttaaaggatgcttttaaagttaaaaatagaggctttcctaaattcaagaactctaaatccgctaaacaatctttttcgtggaacaatcaaggtttctttattaaagagagcgatgaggaacgctttaagatattcactttaatgaaaatgcccttaatgatgtgcatgcatagagacttccctcctcattctaaagtgaaacaaatcgtgatctcttgcagccatagaaaatatttcgttagctttagcgtggaatacgaacaagacattactcccatcaaaaaccctaaaaatggtgtggggctagatttgaatatccttgatatagcttgttcttgtggcgtgaataatcacaaaaaactaacggactttaagcgatactcaacagacatgaaagaattactagggatagaaatagatgaagagttggacactaaacgactcatccctacttattccaaattgtattctttaaaaaaacactctaaaaaatttaaaagattgcaaagaaaacaaagccgtagggtgttaaagtctaaacaaaacaaaaccaaattaggaggtaatttttacaaaacccaaaagaaattaaaccaagtctttgacaagtctagtcatcaaaaaacagacagataccataaaatcacaagcgaactttcaaagcaatttgaattgatagtagttgaagatttgcaagtaaaaaacatgactaaaagagctaaactcaaaaacgttaaacaaaagagtgggcttaatcaatctattttaaacacttcattctatcaaatcatctcttttttagactacaaacaacagcataatggcaaattgttagtgaaagttcccccacaatatacgagtaaaacttgccattgttgtgggaatatcaaccacaagcttaaattaaatcataggcagtattggtgtttagaatgcgggtatagagaacacagagacatcaacgctgcgaacaatatcttaagcaaagggttaagtctttttggggtaggaaatatccatgcagactttaaagaacaaagcctttcgtgt

SEQ ID NO: 3544 - DNA (genomic), 525 bp, Helicobacter pylori; double-stranded, circular
  misc_feature (B) LOCATION 1...525
  hypothetical: NO
  anti-sense: NO
atgcctcaaatacaatcatcgcattccaatcattttgatttcactatagacacagcggatcgcactaaattattgatgagctatttagtcgtgcctacaaccgctaatttcaacaacgtcatgcatgggggggaattattgaatttgttggataaagtggcttatgtgtgttcgactcgttattgcgctaaagggacggtcactttaagcgtggatggggttacttttaaataccccattcctgtggggaatttgctcacttttttagccagcatcaattatgtggggaacacctcgtgcgaggtaggcattaaggttttgagcgaagacattaaaactcgtgaaatcacgcataccaattcatgttatttcacgatggtggctgtggaaaatggcaaacccacccccatgcccaaatacgagcctaaaacagaggttgaaatccgccgttatgaaggggctttgaagcgcaaggaaatgcgcacacgagggtatttaaaaagcggcaaacacgagggtgtttaa

SEQ ID NO: 3545 - DNA (genomic), 531 bp, Helicobacter pylori; double-stranded, circular
  misc_feature (B) LOCATION 1...531
  hypothetical: NO
  anti-sense: NO
ggagaagcaatgcctcaaatacaatcatcgcattccaatcattttgatttcactatagacacagcggatcgcactaaattattgatgagctatttagtcgtgcctacaaccgctaatttcaacaacgtcatgcatgggggggaattattgaatttgttggataaagtggcttatgtgtgttcgactcgttattgcgctaaagggacggtcactttaagcgtggatggggttacttttaaataccccattcctgtggggaatttgctcacttttttagccagcatcaattatgtggggaacacctcgtgcgaggtaggcattaaggttttgagcgaagacattaaaactcgtgaaatcacgcataccaattcatgttatttcacgatggtggctgtggaaaatggcaaacccacccccatgcccaaatacgagcctaaaacagaggttgaaatccgccgttatgaaggggctttgaagcgcaaggaaatgcgcacacgagggtatttaaaaagcggcaaacacgaaggtgtt

SEQ ID NO: 3546 - DNA (genomic), 201 bp, Helicobacter pylori; double-stranded, circular
  misc_feature (B) LOCATION 1...201
  hypothetical: NO
  anti-sense: NO
agatttttaaaaatcgcatcaaaacgcatggagaaaataagggcaatggccaaaattgaattgttagccaaattcacgcaaatcgcgctccctaacagccaccctttgttgaaaaaagttttaaactacgctaaaaaacatttcagccagtgccaacatgctctcttcatcattactcatcttaaacgacacggaatgttt

SEQ ID NO: 3547 - DNA (genomic), 681 bp, Helicobacter pylori; double-stranded, circular
  misc_feature (B) LOCATION 1...681
  hypothetical: NO
  anti-sense: NO
actacgctaaaaaacatttcagccagtgccaacatgctctcttcatcattactcatcttaaacgacacggaatgttttaaaaaaaactacttgctcaattgggtctatcatgcccttgaatgcgcgcatgagaaagatattagcatgcattctttagaagagattttacaaaaaagccacctgcccatacgcatcaaaatcatggctcaaaacacgcttttagaaaagatagaggtgaaagttttaacctttggggcagaatacgcgctctttatcaccaaacaccctatcgctaagcgctttttacgccagaaatttagcggctgtgtgtttttagaaacccaagatgaattgcatataagaggcgattcagagcgtttttgggaactcattgtaacgctcaatgaaaatagaatcgtccataacgcatgcttagatttcatctatcctaatggctttggtaaggacagctacaccactatggctgaacgcaaattaaaagaatgctataaagcgttaggttttatcaagcatgaaaatttcagcgaagtcaaaaagcgctatttagaattggctaaaacctaccaccctgatttatgcaatcttaaagaaaaaaaggctctttacgccaaacgtttcgctatcattcaagaagcctatagccacattaaaaaacacgct

SEQ ID NO: 3548 - DNA (genomic), 762 bp, Helicobacter pylori; double-stranded, circular
  misc_feature (B) LOCATION 1...762
  hypothetical: NO
  anti-sense: NO
atggccaaaattgaattgttagccaaattcacgcaaatcgcgctccctaacagccaccctttgttgaaaaaagttttaaactacgctaaaaaacatttcagccagtgccacatgctctcttcatcattactcatcttaaacgacacggaatgttttaaaaaaaactacttgctcaattgggtctatcatgcccttgaatgcgcgcatgagaaagatattagcatgcattctttagaagagattttacaaaaaagccacctgcccatacgcatcaaaatcatggctcaaaacacgcttttagaaaagatagaggtgaaagttttaacctttggggcagaatacgcgctctttatcaccaaacaccctatcgctaagcgctttttacgccagaaatttagcggctgtgtgtttttagaaacccaagatgaattgcatataagaggcgattcagagcgtttttgggaactcattgtaacgctcaatgaaaatagaatcgtccataacgcatgcttagatttcatctatcctaatggctttggtaaggacagctacaccactatggctgaacgcaaattaaaagaatgctataaagcgttaggttttatcaagcatgaaaatttcagcgaagtcaaaaagcgctatttagaattggctaaaacctaccaccctgatttatgcgatcttaaagaaaaaaaggctctttacgccaaacgtttcgctatcattcaagaagcctatagccacattaaaaaacacgcttaa

SEQ ID NO: 3549 - DNA (genomic), 447 bp, Helicobacter pylori; double-stranded, circular
  misc_feature (B) LOCATION 1...447
  hypothetical: NO
  anti-sense: NO
atggatacacccaataaagacgattcaatcatccgcttttcggtttctttgcaacaaaatttattagatgaattggacaaccgcatcattaaaaacggctattcttctcgctcagaattagtgcgcgacatgatcagggaaaaattagtagaagacaattgggtagaagataaccctaatgatgggagcaaaatcgccgtgcttgtggtgatttatgaccaccaccaaagggaattgaaccagcgcatgatagacattcagcatgccagcgggacgcatgttttatgcaccacgcacattcatatggacgagcataattgtttggagacgatcattttacaaggcaattcgcttgaaatccaacgcttgcaattagaaatcggagggcttaggggggttaaattcgctaaattgactaaggcgtctagctttgaatacaatgaatag

SEQ ID NO: 3550 - DNA (genomic), 489 bp, Helicobacter pylori; double-stranded, circular
  misc_feature (B) LOCATION 1...489
  hypothetical: NO
  anti-sense: NO
catgagcggcttttaacaaactcatgccaaaaaggattttctcaaatggatacacccaataaagacgattcaatcatccgcttttcggtttctttgcaacaaaatttattagatgaattggacaaccgcatcattaaaaacggctattcttctcgctcagaattagtgcgcgacatgatcagggaaaaattagtagaagacaattgggtagaagataaccctaatgatgggagcaaaatcgccgtgcttgtggtgatttatgaccaccaccaaagggaattgaaccagcgcatgatagacattcagcatgccagcgggacgcatgttttatgcaccacgcacattcatatggacgagcataattgtttggagacgatcattttacaaggcaattcgcttgaaatccaacgcttgcaattagaaatcggagggcttaggggggttaaattcgctaaattgactaaggcgtctagctttgaatacaatgaa

SEQ ID NO: 3551 - DNA (genomic), 459 bp, Helicobacter pylori; double-stranded, circular
  misc_feature (B) LOCATION 1...459
  hypothetical: NO
  anti-sense: NO
atctttctacccataaagtcatccacctatattctcaaaaaaatacaaaaaagctattacgcaacgcatgaaaaagaagccttttttttagagcatttttatctcactagcgtgtatgtggccactacagcaggctattatctcacgccaaaaggcgctaaaacttttatagaagccacggagcgttttaaaatcatagagccggtggatatgtttatgaacaaccccacttaccatgatgtggctaattttacctatttgccttgccctgtttctttaaacaagcatgctttcaatagcaccattcaaaatgcaaaaaaacctgacatttcattaaagccccctagaaaatcctattttgataatcttttttatcataaactcaacgctcaaaagtgcttaaaagcctttaataaatacagcaaacgatacgctcctttaaaaacccctaaagaggtt

SEQ ID NO: 3552 - DNA (genomic), 753 bp, Helicobacter pylori; double-stranded, circular
  misc_feature (B) LOCATION 1...753
  hypothetical: NO
  anti-sense: NO
atggaaacgcaacaagaccctaaagaactatctgagtcttgcaaaatagcgccccaaaaaacctcttttaatccagtggtttttaaaaaaattaaaagaaaactcaacctctttattggaaatattttagctcggacagaagcgtataagaatgtcgtggcaaaatacgatgatctcacaggaaaatacgatgatctcaataagaatattgcggaaaaatacgatgatctcacaggaaaatacgatgatctcaataagaatattgcggaaaaatacgatgatctcatgggaaaatacgaagccttattggcaaaagaaacaaacatcaaagagactttttgggaatctcgcgctgataatgaaaaggaagcactatttttagagcatttttatctcactagcgtgtatgtggccactacagcaggctattatctcacgccaaaaggcgctaaaacttttatagaagccacggagcgttttaaaatcatagagccggtggatatgtttatgaacaaccccacttaccatgatgtggctaattttacctatttgccttgccctgtttctttaaacaagcatgctttcaatagcaccattcaaaatgcaaaaaaacctgacatttcattaaagccccctagaaaatcctattttgataatcttttttatcataaattcaacgctcaaaagtgcttaaaagcctttaataaatacagcaaacgatacgctcctttaaaaacccctaaagaggtttaa

SEQ ID NO: 3553 - DNA (genomic), 213 bp, Helicobacter pylori; double-stranded, circular
  misc_feature (B) LOCATION 1...213
  hypothetical: NO
  anti-sense: NO
aaattactcgctctacccatagacaagattgatcccacgcattcctatgtcaaagatattgatgatttatccaaacacactttagataaaatcaagcatttttttgaaacttacaaggatttagagcctaataaatgggtgaaagtcaaggggtttgaaaacaaagagagcgcgattaaggttttagaaaaagcgataaaagcctatcaaggc

SEQ ID NO: 3554 - DNA (genomic), 522 bp, Helicobacter pylori; double-stranded, circular
  misc_feature (B) LOCATION 1...522
  hypothetical: NO
  anti-sense: NO
atgaatttagaccaattagaagtgagccatgacgctgattctttgtgcgtggtgattgaaatatccaagcattctaatatcaagtatgaattggataaagaaagcggggctttaatggtggatagggtgctttatggggcgcaaaattaccccgcaaattacggctttgtgcctaacactttaggatctgatggcgaccctgtagatgcgcttgttttaagcgatgtggcttttcaagccggaagcgtagtgaaagcgcgcttggttggggtgttgaacatggaagatgaaagcggaatggatgaaaaattactcgctctacccatagacaagattgatcccacgcattcctatgtcaaagatattgatgatttatccaaacacactttagataaaatcaagcatttttttgaaacttacaaggatttagagcctaataaatgggtgaaagtcaaggggtttgaaaacaaagagagcgcgattaaggttttagaaaaagcgataaaagcctatcaaggctaa

SEQ ID NO: 3555 - DNA (genomic), 186 bp, Helicobacter pylori; double-stranded, circular
  misc_feature (B) LOCATION 1...186
  hypothetical: NO
  anti-sense: NO
atcttgtttgaagataagccttgtgagagcgtggagagcgcgtatatgaaacttttagcgctttctttagggaaagcccctttgaggagtttgaatttagagggcatttttaaccagctttctaatgcagcttggagcggtaacaagccctatgaattagaatggcttagaacgacgaagtggctt

SEQ ID NO: 3556 - DNA (genomic), 249 bp, Helicobacter pylori; double-stranded, circular
  misc_feature (B) LOCATION 1...249
  hypothetical: NO
  anti-sense: NO
atgaaacttttagcgctttctttagggaaagcccctttgaggagtttgaatttagagggcatttttaaccagctttctaatgcagcttggagcggtaacaagccctatgaattagaatggcttagaacgaacgaagtggctttaaaaatgcgaggcaatttccctagtattgattttatagataaattcccgcgctatttgatgcaattaatccctgagtttgataatatccgcttactggatagctca

SEQ ID NO: 3557 - DNA (genomic), 222 bp, Helicobacter pylori; double-stranded, circular
  misc_feature (B) LOCATION 1...222
  hypothetical: NO
  anti-sense: NO
agaaaaaatcctaaaagagacgcaagcgagtacgtcgttgagattgatgaaagttttgtgttaaaagcgctagatttttacacgccctttttgaatgaagcctactctaataaaatggctcataagaatattcaagtggttttagagcttttaaaggctttagaggaaaatcgtttgaaaaatagcgatggggagtctctttatcgcttggtgaatcttgtt

SEQ ID NO: 3558 - DNA (genomic), 417 bp, Helicobacter pylori; double-stranded, circular
  misc_feature (B) LOCATION 1...417
  hypothetical: NO
  anti-sense: NO
gtgattaagtttaaaaattttgtgagcaactaccagcaatccagttgttatagagagcctttaggttttggcattgccagagtggatattgcccctatttccaaaaagattttatgcgccacttaccccgttttgaactggaaagaggaaaatctaggctcttatgcggtgttttgcaactcgctttctaaagaaaaaatcctaaaagagagcgcaagcgagtgcgtcgttgagattgatgaaagttttgtgttaaaagcgctagatttttacacgccctttttgaatgaagcctactctaataaaatggctcataagaatattcaagtggttttagagcttttaaaggctttagaggaaaatcgtttgaaaaatagcgatggggagtctctttatcgcttggtgaatcttgtttga

SEQ ID NO: 3559 - DNA (genomic), 504 bp, Helicobacter pylori; double-stranded, circular
  misc_feature (B) LOCATION 1...504
  hypothetical: NO
  anti-sense: NO
atgacaacgatgaatgcgattcgatggcctaagaaatggattccaggagagactgataatttcgtgtccaatgaagtcattgtcaaaggtttggattttaataaagtggtgcaacatttaagagacgcgtcccattgggaaaagtattacaaaaactcagggaatatccacatgtatcatcaagacaataccattcttaaagacaagactcgtttttgttttgaaacttttggctttttggtggaagcagaagtggaagagtttgaattgaaagacgctattttgcgtttggcttggagaggttggaatgaagctaaaggcgatgagtatcttgaagtgtatcacgcatggctagttgaaaaattagataatgatcgtgtgcgtattttaacccaagaaagtcaatcaggagtccctgctaaagctttagcgaaatctgtgcctaatgcgatgttaaacggccatcaagcttggttagatggtttagtggcgtattcacgctaa

SEQ ID NO: 3560 - DNA (genomic), 558 bp, Helicobacter pylori; double-stranded, circular
  misc_feature (B) LOCATION 1...558
  hypothetical: NO
  anti-sense: NO
tgctataaatctttcgccaatagggcaaaaaaattaaaaattaaaaatggaaaaaacatgacaacgatgaatgcgattcgatggcctaagaaatggattccagaagagactgataatttcgtgtccaatgaagtcattgtcaaaggtttggattttaataaagtggtgcaacatttaagagacgcgtcccattgggaaaagtattacaaaaactcagggaatatccacatgtatcatcaagacaataccattcttaaagacaagactcgtttttgttttgaaacttttggctttttggtggaagcagaagtggaagagtttgaattgaaagacgctattttgcgtttggcttggagaggttggaatgaagctaaaggcgatgagtatcttgaagtgtatcacgcatggctagttgaaaaattagataatgatcgtgtgcgtattttaacccaagaaagtcaatcaggagtccctgctaaagctttagcgaaatctgtgcctaatgcgatgttaaacggccatcaagcttggttagatggtttagtggcgtattcacgc

SEQ ID NO: 3561 - DNA (genomic), 216 bp, Helicobacter pylori; double-stranded, circular
  misc_feature (B) LOCATION 1...216
  hypothetical: NO
  anti-sense: NO
ttggctaaaaagggcgattatcaaggggcttttaagcttttttcccaatcgtgcgataacggcaatgcggccgggtgttttgcggtaggggcgatgtatgctaatggagtagggatccaaaccaacagattaaaagccgctcgctattatgaaatgggttgcagtgggggcgatgcgaccgcttgtgcgaatttagctcaaatgtatgaaaacaaa

SEQ ID NO: 3562 - DNA (genomic), 1014 bp, Helicobacter pylori; double-stranded, circular
  misc_feature (B) LOCATION 1...1014
  hypothetical: NO
  anti-sense: NO
cttagtggtgctgaagaaaacaatcaagccccaaaaaacacgccccctgaattaaaccccgctaatactaagggtgcgccaaaccctaacacccagatcacccctaaaaacgataactccaatctattagacaaattaggatcgcctgaaaacgctcaaaccgagctttctgccggtattgatttggctaaaaagggcgattatcaaggggcttttaagcttttttcccaatcgtgcgataacggcaatgcggccgggtgttttgcggtaggggcgatgtatgctaatggagtagggatccaaaccaacagattaaaagccgctcgctattatgaaatgggttgcagtgggggcgatgcgaccgcttgtgcgaatttagctcaaatgtatgaaaacaaaaaaaacgctgattcaaacgataaagaaaacgctttgcaattgtatgcggtggcttgtcaagggggggacatgctcgcatgcaataatttagggtggatgtttgctaacgggagtggggtcccaaaagattattacaaagcgatgagttattataaattttcatgcgaaaacgggaatgatatggggtgctacaatttgggtttgatgtctaacgtgaataatatttatggcattgataaggcgcagctcagtcaagtggatttgaattatttggcttgtaacgctggggacatgatggggtgcgcgaatttaggctggatttatgcgaatggggatttaggggctcctttgaataaccactatgcggcgaagtattttcaaatggcatgcgatggggggattttggggagctgtaacaatttaggcgtgctgtatcaaaagggcttaggcgtgcctcaagacgatcaaagggctttggatttattctcgtatgcatgcgataatggttttgagtcaagctgtcgtaattacgggaatttcaaagagcatttattgcacgtgaatcctaattacgggcgcttgttcatgccatacaattcttatgagataccctag

SEQ ID NO: 3563 - DNA (genomic), 519 bp, Helicobacter pylori; double-stranded, circular
  misc_feature (B) LOCATION 1...519
  hypothetical: NO
  anti-sense: NO
tgcgacgatttggcaaatgcctggccggtggatgggcgagccttggattgtgaaaaatacattgatgaagtcttcacttcagggcatgggaagctttatgctagcgatggcagaagttcgcaaaaccccaccaaaaactacgggaaagggggcttgatgcaaggtaaaaaatacatgttgagtttgacctggaacgctcccattgaagcctttaacgatcctagtgaattttttgaaggggtgggcgtggatgttgtgtatttgcatttgcataaagcgttccagtttttagggctttcagcgttacccacttttatttgcaacgatgtgatgaaaaacccccaagtggagcagtatcttaactccctaaccgtgcatttgcgccaagctttggcaagtgattttaaaataagggtttttaaccccctcattttttgggggcttgtttattccacaacaaagtctctgggattgagattgcagcctaagataagatctttaagattactgcccgtagtt

SEQ ID NO: 3564 - DNA (genomic), 585 bp, Helicobacter pylori; double-stranded, circular
  misc_feature (B) LOCATION 1...585
  hypothetical: NO
  anti-sense: NO
atgaaaaaagtactcatcattaatggagccaaagcgttcgggcattctggggggaaactcaatgaaaccttaacccaccatgcaaaaaagattctagaatctttagggctagaagtggatacaacgatcgtggataaaggctatgaaaagagtcaagaagtggagaaattctttagcgctgatgcgacgatttggcaaatgcctggctggtggatgggcgagccttggattgtgaaaaaatacattgatgaagtcttcacttcagggcatgggaagctttatgctagcgatggcagaagttcgcaaaaccccaccaaaaactacgggaaagggggcttgatgcaaggtaaaaaatacatgttgagtttgacctggaacgctcccattgaagcctttaacgatcctagtgaattttttgaaggggtgggcgtggatgttgtgtatttgcatttgcataaagcgttccagtttttagggctttcagcgttacccacttttatttgcaacgatgtgatgaaaaacccccaagtggagcagtatcttaactccctaaccgtgcatttgcgccaagcttttggcaagtga

SEQ ID NO: 3565 - DNA (genomic), 453 bp, Helicobacter pylori; double-stranded, circular
  misc_feature (B) LOCATION 1...453
  hypothetical: NO
  anti-sense: NO
atgcatcaaaacaataaaacttttttacccaaccaatccgctcatctttctaaaatcgttctttttttaaacaccggccttttagcctatctgttaagcgcttgtggggcgaatgtgcctatagaagaagtgatagttaaagatcctaaagaaaccaaagcccaagaagtcgccagagaagaaaacgccatccagcaagaaaacgccattattgatgtgcgcaccacgcctttaatcaatcgtttcactaattataacgcttatggttctctaaacggcttttacaattcagtggataacctcaattcgcccatgcaaaacggcatgtatggaggctattacatgccttattattacatgccctatggtttcatgccttatgggtcaggtcttatgccttatgggccttatgggtatggagcacctggatacttcccctacgctttttattga

SEQ ID NO: 3566 - DNA (genomic), 465 bp, Helicobacter pylori; double-stranded, circular
  misc_feature (B) LOCATION 1...465
  hypothetical: NO
  anti-sense: NO
aatgtaggaaaaaccatgcatcaaaacaataaaacttttttacccaaccaatccgctcatctttctaaaatcgttctttttttaaacaccggccttttagcctatctgttaagcgcttgtggggcgaatgtgcctatagaagaagtgatagttaaagatcctaaagaaaccaaagcccaagaagccgccagagaagaaaacgccatccagcaagaaaacgccattattgatgtgcgcaccacgcctttaatcaatcgtttcactaattataacgcttatggttctctaaacggcttttacaattcagtggataacctcaattcgcccatgcaaaacggcatgtatggaggctattacatgccttattattacatgccctatggtttcatgccttatgggtcaggtcttatgccttatgggccttatgggtatggagcacctggatacttcccctacgctttttat

SEQ ID NO: 3567 - DNA (genomic), 195 bp, Helicobacter pylori; double-stranded, circular
  misc_feature (B) LOCATION 1...195
  hypothetical: NO
  anti-sense: NO
atgcaaatgcaaatacacaacatccacgcccaccccttcaaaaaattcactaggatcgttaaaggcttcaatgggagcgttccaggtcaaactcaacatgtattttttaccttgcatcaagccccctttcccgtagtttttggtggggttttgcgaacttctgccatcgctagcataaagcttcccatgccctga

SEQ ID NO: 3568 - DNA (genomic), 207 bp, Helicobacter pylori; double-stranded, circular
  misc_feature (B) LOCATION 1...207
  hypothetical: NO
  anti-sense: NO
aaactggaacgctttatgcaaatgcaaatacacaacatccacgcccaccccttcaaaaaattcactaggatcgttaaaggcttcaatgggagcgttccaggtcaaactcaacatgtattttttaccttgcatcaagccccctttcccgtagtttttggtggggttttgcgaacttctgccatcgctagcataaagcttcccatgccc

SEQ ID NO: 3569 - DNA (genomic), 507 bp, Helicobacter pylori; double-stranded, circular
  misc_feature (B) LOCATION 1...507
  hypothetical: NO
  anti-sense: NO
ggaattttgatggaacaagaaatttgcgtgatcggttttagcggcgggcaagacagcaccactttagccgtatgggcgaaaaagcgttttaaaaaagtctgtttagtggggtttgattacgcgcaaaaacactctgtggaattagaatgcgctcaaaaaatcgcttctcttttacaactcccttatgaaatcatcccgttagattttttagaaaatatcacccactccgcgctttttaaaaactctaacgatttaatggggcattcgcatgcgcaaaataaagatttgcccaactcttttgtgcctaatcgtaacgccatttttatcacccttttgcattcttacgcacaaaaactaggggctagcaacatcgctttaggggtttcgcaagcggattttagcggctatccggattgtaaagaagattttattaaaagcatcgagcatgccctaaatttaggctcaaacacggcgattaaaattgtaacgcctctaatgtttttaagt

SEQ ID NO: 3570 - DNA (genomic), 678 bp, Helicobacter pylori; double-stranded, circular
  misc_feature (B) LOCATION 1...678
  hypothetical: NO
  anti-sense: NO
atggaacaagaaatttgcgtgatcggttttagcggcgggcaagacagcaccactttagccgtatgggcgaaaaagcgttttaaaaaagtctgtttagtggggtttgattacgcgcaaaaacactctgtggaattagaatgcgctcaaaaaatcgcttctcttttacaactcccttatgaaatcatcccgttagattttttagaaaatatcacccactccgcgctttttaaaaactctaacgatttaatggggcattcgcatgcgcaaaataaagatttgcccaactcttttgtgcctaatcgtaacgccatttttatcacccttttgcattcttacgcacaaaaactaggggctagcaacatcgctttaggggtttcgcaagcggattttagcggctatccggattgtaaagaagattttattaaaagcatcgagcatgccctaaatttaggctcaaacacggcgattaaaattgtaacgcctctaatgtttttaagtaaagcgcaagaatttcaaatggctaaagatttaggggttttagatttgatcatcaaagaaacgcacacttgctatcaaggagagcgaaagattttgcatgcttatggctatggctgcgataaatgcccggcatgccaactgagaaaaaaaggctttgaagagtttcaagccatgctgtaa

SEQ ID NO: 3571 - DNA (genomic), 207 bp, Helicobacter pylori; double-stranded, circular
  misc_feature (B) LOCATION 1...207
  hypothetical: NO
  anti-sense: NO
atgatgcaaaatagcactaaaaaattagaatacgaagagcgtttcaatgccgctcttttgaaattacaagcatgcccagaagaaaagcaagtagcgagttgcttgaaatgcgagaaggttttgaattgtaagatccgcaacagctatgtggatgcggcttatgaaagcatgagtttaggcgaagcgggcgggtttgatttcaattaa

SEQ ID NO: 3572 - DNA (genomic), 237 bp, Helicobacter pylori; double-stranded, circular
  misc_feature (B) LOCATION 1...237
  hypothetical: NO
  anti-sense: NO
agctcagattttagaaaaacatttaaagggagaatgatgcaaaatagcactaaaaaattagaatacgaagagcgtttcaatgccgctcttttgaaattacaagcatgcccagaagaaaagcaagtagcgagttgcttgaaatgcgagaaggttttgaattgtaagatccgcaacagctatgtggatgcggcttatgaaagcatgagtttaggcgaagcgggcgggtttgatttcaat

SEQ ID NO: 3573 - DNA (genomic), 96 bp, Helicobacter pylori; double-stranded, circular
  misc_feature (B) LOCATION 1...96
  hypothetical: NO
  anti-sense: NO
gtgatgcttaaaacaaacgccttaaaaactaaaaaataccatcaacttgcttttgaatctgtatattggctaggaaaactttcaaaaagagggtaa

SEQ ID NO: 3574 - DNA (genomic), 189 bp, Helicobacter pylori; double-stranded, circular
  misc_feature (B) LOCATION 1...189
  hypothetical: NO
  anti-sense: NO
cccttaaaacaagcaaaaacaatcaaatgcgatttaaagattaaaaaagctttttctaccgcatggctttggaataaaaccataaatagtgggatcgtgatgcttaaaacaaacgccttaaaaactaaaaaataccatcaacttgcttttgaatctgtatattggctaggaaaactttcaaaaagaggg

SEQ ID NO: 3575 - DNA (genomic), 267 bp, Helicobacter pylori; double-stranded, circular
  misc_feature (B) LOCATION 1...267
  hypothetical: NO
  anti-sense: NO
aagattttaaacgaaagcatacaaagctttaagatccaaaaaatgaaacggatatgggggagttgcaatattgctaaacgcaccctgctttttaacttggaattggctaaagcgcctagaaagggcattgaatatgtggttgtgcatgaattattgcatttaaaagcgcgccaccataacgaatattttagggatttgctgagtttgtatttgcctgattggcaaagagctaaggccagcctcaaagaaacttatttggagcgctct

SEQ ID NO: 3576 - DNA (genomic), 351 bp, Helicobacter pylori; double-stranded, circular
  misc_feature (B) LOCATION 1...351
  hypothetical: NO
  anti-sense: NO
tggcctgtgcatgtgtcttgccccctagctctaaacgatgagagccttaggctttctttgattaaaagactcccttggataaaagaacagcaacaaaattttttaaaccaaaacagacaaagccaaagggaaatgctagagagagaaagccattatctttttgggaaacgctatttgttaaagattgaacacaccataaaaaaacacttcgtcctccaaagccctaaatgtttaatcttgcatgtccatcaaaagacaagcttagaaaaccgcttaaaagtgttagaaaactattacagacaagttttaagagaaaaaatacaaacctacatcaaccaatatgaaagattt

SEQ ID NO: 3577 - DNA (genomic), 609 bp, Helicobacter pylori; double-stranded, circular
  misc_feature (B) LOCATION 1...609
  hypothetical: NO
  anti-sense: NO
gtgcatgtgtcttgccccctagctctaaacgatgagagccttaggctttctttgattaaaagactcccttggataaaagaacagcaacaaaattttttaaaccaaaacagacaaagccaaagggaaatgctagagagagaaagccattatctttttgggaaacgctatttgttaaagattgaacacaccataaaaaaacacttcgtcctccaaagccctaaatgtttaatcttgcatgtccatcaaaagacaagcttagaaaaccgcttaaaagtgttagaaaactattacagacaagttttaagagaaaaaatacaaacctacatcaaccaatatgaaaagattttaaacgaaagcatacaaagctttaagatccaaaaaatgaaacggatatgggggagttgcaatattgctaaacgcaccctgctttttaacttggaattggctaaagcgcctagaaagggcattgaatatgtggttgtgcatgaattattgcatttaaaagcgcgccaccataacgaatattttagggatttgctgagtttgtatttgcctgattggcaaagagctaaggccagcctcaaagaaacttatttggagcgctcttaa

SEQ ID NO: 3578 - DNA (genomic), 282 bp, Helicobacter pylori; double-stranded, circular
  misc_feature (B) LOCATION 1...282
  hypothetical: NO
  anti-sense: NO
agaaaggagcatcagatggcaatctttgataacaataataaatcggctaatgcaaaaacaggaccagcgactatcatcgctcaaggcaccaaaataaagggggagcttcatttggattatcatttgcacataaatagcgaattagaaggggtggtgcatgctaaaaacacggtattgatcgggcaaaccggctcggtactgggtgagattttcgctaataaattagtactgaatggcaagtttactggcgcggtggaatccgaatgtaaacattcatgcctt

SEQ ID NO: 3579 - DNA (genomic), 411 bp, Helicobacter pylori; double-stranded, circular
  misc_feature (B) LOCATION 1...411
  hypothetical: NO
  anti-sense: NO
atggcaatctttgataacaataataaatcggctaatgcaaaaacaggaccagcgactatcatcgctcaaggcaccaaaataaagggggagcttcatttggattaccatttgcacgtagatggcgaattagaaggggtggtgcattctaaaaacacggtagtgatcgggcaaaccggctcggtagtgggtgagattttcgctaataaattagtagtgaatggcaagtttactggcacggtggaagcggaagtggtagaaatcatgcctttagggcgccttgatggtaagatctctacccaagagcttgtggtggaaaggaaggggattttgattggggagactcgccctaagaatattcaagggggggcgttgttgatcaatgagcaagaaaagaaaattgaaaataaatag

SEQ ID NO: 3580 - DNA (genomic), 216 bp, Helicobacter pylori; double-stranded, circular
  misc_feature (B) LOCATION 1...216
  hypothetical: NO
  anti-sense: NO
ttgtttaaaatctgtaaaaacacaaacgccggtatgaggtgcaacacggtggctaaagagctggccaacagctctgaagcgaaacgcttgcacaccccaattttgagcgtaacggaaataaggtttaaagctaacgctacaaataacaccaccgtattaggctcatacaaaaaccctgcaatggtcgttaaagaaataaggctgaacagcacatga

SEQ ID NO: 3581 - DNA (genomic), 297 bp, Helicobacter pylori; double-stranded, circular
  misc_feature (B) LOCATION 1...297
  hypothetical: NO
  anti-sense: NO
atgggtgtttcagctttaggcaatgtaacttatatcaaccaaaacgctcctttaaattctgctatccagcagggtgcaagaagtgatatgctggatttagcacaaagctttcaaagcaagcttgaattagcccaagaaacaagggcgttagaaaacatgcaagccattagcgataaagatcctaaagaaggctccaaaaaccgctatccaaacagccaaagggctaaggcgtttggcttggaagaagaagaaattgaattgtggcatgaagagcatttgttggatattgtgggataa

SEQ ID NO: 3582 - DNA (genomic), 312 bp, Helicobacter pylori; double-stranded, circular
  misc_feature (B) LOCATION 1...312
  hypothetical: NO
  anti-sense: NO
acacttaaggaggttagcatgggtgtttcagctttaggcaatgtaacttatatcaaccaaaacgctcctttaaattctgctatccagcagggtgcaagaagtgatatgctggatttagcacaaagctttcaaagcaagcttgaattagcccaagaaacaagggcgttagaaaacatgcaagccattagcgataaagatcctaaagaaggctccaaaaaccgctatccaaacagccaaagggctaaggcgtttggcttggaagaagaagaaattgaattgtggcatgaagagcatttgttggatattgtggga

SEQ ID NO: 3583 - DNA (genomic), 543 bp, Helicobacter pylori; double-stranded, circular
  misc_feature (B) LOCATION 1...543
  hypothetical: NO
  anti-sense: NO
atgctgctttgcgcgggaaggaatgagactttaaaaaaagcggtgcctattggtgtgggcttgatagagagcgcgatcaatttaacgagaatgtgccttaaaaaccctgatacagaaagccttatttttatagggagcgcggggagttatagcccagaaacggagattttgagcgtgtttgaaagcattgaaggctatcaaattgaagagagttttagccatttaaacagctacacgcctttggataatttcattcacatagaaactaaagagcaggctctttttgaaagggtgcgtgtgaatagcagtaactacatccacaccagcgaaatgtttgctaaaaaaatggttcaaaagggcgttttattagaaaacatggagttttttagcgtcttaagcgtggctaaaattttttctttaaaggctaaagggattttttgcgtgagcaatcatgtagggcttaacgcgcataaggaatttaaagaaaaccacgccaaagtcaaacagattctagaaaacatcattgatagtttgatagtttag

SEQ ID NO: 3584 - DNA (genomic), 540 bp, Helicobacter pylori; double-stranded, circular
  misc_feature (B) LOCATION 1...540
  hypothetical: NO
  anti-sense: NO
atgctgctttgcgcgggaaggaatgagactttaaaaaaagcggtgcctattggtgtgggcttgatagagagcgcgatcaatttaacgagaatgtgccttaaaaaccctgatacagaaagccttatttttatagggagcgcggggagttatagcccagaaacggagattttgagcgtgtttgaaagcattgaaggctatcaaattgaagagagttttagccatttaaacagctacacgcctttggataatttcattcacatagaaactaaagagcaggctctttttgaaagggtgcgtgtgaatagcagtaactacatccacaccagcgaaatgtttgctaaaaaaatggttcaaaagggcgttttattagaaaacatggagttttttagcgtcttaagcgtggctaaaattttttctttaaaggctaaagggattttttgcgtgagcaatcatgtagggcttaacgcgcataaggaatttaaagaaaaccacgccaaagtcaaacagattctagaaaacatcattgatagtttgatagtt

SEQ ID NO: 3585 - DNA (genomic), 567 bp, Helicobacter pylori; double-stranded, circular
  misc_feature (B) LOCATION 1...567
  hypothetical: NO
  anti-sense: NO
gctaatggatgcgaaaaaaggattttcatgctgctttgcgcgggaaggaatgagactttaaaaaaagcggtgcctattggtgtgggcttgatagagagcgcgatcaatttaacgagaatgtgccttaaaaaccctgatacagaaagccttatttttatagggagcgcggggagttatagcccagaaacggagattttgagcgtgtttgaaagcattgaaggctatcaaattgaagagagttttagccatttaaacagctacacgcctttggataatttcattcacatagaaactaaagagcaggctctttttgaaagggtgcgtgtgaatagcagtaactacatccacaccagcgaaatgtttgctaaaaaaatggttcaaaagggcgttttattagaaaacatggagttttttagcgtcttaagcgtggctaaaattttttctttaaaggctaaagggattttttgcgtgagcaatcatgtagggcttaacgcgcataaggaatttaaagaaaaccacgccaaagtcaaacagattctagaaaacatcattgatagtttgatagtt

SEQ ID NO: 3586 - DNA (genomic), 219 bp, Helicobacter pylori; double-stranded, circular
  misc_feature (B) LOCATION 1...219
  hypothetical: NO
  anti-sense: NO
gttataatgcttctacattgtaagggcttcagtagcccacttttttacaaactacttaaatctgcaaaatctttattcccaacgctcttaattaaatcatctaaaaatagagtgattttgttaggttcaataccaatcactaaaattctgtccattagaatgttttctgtttttccattgaatggtgtggttattgtgggcggttgttcggttggattt

SEQ ID NO: 3587 - DNA (genomic), 234 bp, Helicobacter pylori; double-stranded, circular
  misc_feature (B) LOCATION 1...234
  hypothetical: NO
  anti-sense: NO
atgcttctacattgtaagggcttcagtagcccacttttttacaaactacttaaatctgcaaaatctttattcccaacgctcttaattaaatcatctaaaaatagagtgattttgttaggttcaataccaatcactaaaattctgtccattagaatgttttctgtttttccattgaatggtgtggttattcgtgggcggttgttcggttggattttgagtaaattttcccaatga

SEQ ID NO: 3588 - DNA (genomic), 513 bp, Helicobacter pylori; double-stranded, circular
  misc_feature (B) LOCATION 1...513
  hypothetical: NO
  anti-sense: NO
atgagggttttacttttttttattttattgctttggttcaagggctgtgggtataaacccatcgccacttacgctcaaaacgcgcttggcgatagcgtgtatgtaaaactcattgtgaatttgcctaaccctgaaaactctgtggagtttaaggatttgatgaatcgtttagtcgtgcaacgcttccaaaaccgcctagcgagtgaaaaagatgcggattctatcatcattatagaaattacgaatgtaaccgatacgagcatcacgcaaaataaagaaggttttacgactttctatcgcgcgaccgtgtctgtgaattacacctacgataataaaagaggcacacaaaagacttttcaaaatagcggatactacaattacgccgtgaatttgcaagacccccttaacactttccagaaccgctattacgctatcaatcaggctgtggagcaaactttgactaaatttgtggctcaaatcgcttatgaggggaaattcaataatgaaaaatag

SEQ ID NO: 3589 - DNA (genomic), 522 bp, Helicobacter pylori; double-stranded, circular
  misc_feature (B) LOCATION 1...522
  hypothetical: NO
  anti-sense: NO
ttttgttaccgcatgagggttttacttttttttattttattgctttggttcaagggctgtgggtataaacccatcgccacttacgctcaaaacgcgcttggcgatagcgtgtatgtaaaactcattgtgaatttgcctaaccctgaaaactctgtggagtttaaggatttgatgaatcgtttagtcgtgcaacgcttccaaaaccgcctagcgagtgaaaaagatgcggattctatcatcattatagaaattacgaatgtaaccgatacgagcatcacgcaaaataaagaaggttttacgactttctatcgcgcgaccgtgtctgtgaattacacctacgataataaaagaggcacacaaaagacttttcaaaatagcggatactacaattacgccgtgaatttgcaagacccccttaacactttccagaaccgctattacgctatcaatcaggctgtggagcaaactttgactaaatttgtggctcaaatcgcttatgaggggaaattcaataatgaaaaa

SEQ ID NO: 3590 - DNA (genomic), 627 bp, Helicobacter pylori; double-stranded, circular
  misc_feature (B) LOCATION 1...627
  hypothetical: NO
  anti-sense: NO
atggaagtgatttgtaagcattacacccctttagacattgcgagccaagcgatccgcacttgctggcagagttttgaatacagcgatgatggaggttgtaaggatagggatttgatccacagggtggggaatattttcaggcattcttccactttagagcatctttattacaattttgaaatcaagggtttgagtaggggggcgttgcaagaattgagccgacatcgaatagcgagcttgagcgtgaaatcaagccgttacactttaagggaattgaaagaagtggagagctttttaccccttaatgaaacgaatttagaaagagctaaagagtttttagtttttgtagatgatgaaaaagtgaatgaaatgagcgttttagctttggaaaatctcagggttttattgagcgagcataacattaaaaacgatttagccaaatacgccatgcctgaaagctataaaacgcatttagcctatagcattaacgctaggagcttgcaaaatttattgactttaagaagcagcaataaagccttaaaagaaatgcaagatttagccaaagccttatttgacgccttaccttatgagcatcaatatttgtttgaggattgtttgaagcactag

SEQ ID NO: 3591 - DNA (genomic), 666 bp, Helicobacter pylori; double-stranded, circular
  misc_feature (B) LOCATION 1...666
  hypothetical: NO
  anti-sense: NO
aagcgttaccgtggaataaaaagcgatattaggagtcaaataatggaagtgatttgtaagcattacacccctttagacattgcgagccaagcgatccgcacttgctggcagagttttgaatacagcgatgatggaggttgtaaggatagggatttgatccacagggtggggaatattttcaggcattcttccactttagagcatctttattacaattttgaaatcaagggtttgagtaggggggcgttgcaagaattgagccgacatcgaatagcgagcttgagcgtgaaatcaagccgttacactttaagggaattgaaagaagtggagagctttttaccccttaatgaaacgaatttagaaagagctaaagagtttttagtttttgtagatgatgaaaaagtgaatgaaatgagcgttttagctttggaaaatctcagggttttattgagcgagcataacattaaaaacgatttagccaaatacgccatgcctgaaagctataaaacgcatttagcctatagcattaacgctaggagcttgcaaaatttattgactttaagaagcagcaataaagccttaaaagaaatgcaagatttagccaaagccttatttgacgccttaccttatgagcatcaatatttgtttgaggattgtttgaagcac

SEQ ID NO: 3592 - DNA (genomic), 156 bp, Helicobacter pylori; double-stranded, circular
  misc_feature (B) LOCATION 1...156
  hypothetical: NO
  anti-sense: NO
ttgatcgcgctctctatcaagcccacaccaataggcaccgctttttttaaagtctcattccttcccgcgcaaagcagcatgaaaatccttttttcgcatccattagcttattataaagcaagcattatagacaaacccttaaaagaaacaccttaa

SEQ ID NO: 3593 - DNA (genomic), 219 bp, Helicobacter pylori; double-stranded, circular
  misc_feature (B) LOCATION 1...219
  hypothetical: NO
  anti-sense: NO
ctccccgcgctccctataaaaataaggctttctgtatcagggtttttaaggcacattctcgttaaattgatcgcgctctctatcaagcccacaccaataggcaccgctttttttaaagtctcattccttcccgcgcaaagcagcatgaaaatccttttttcgcatccattagcttattataaagcaagcattatagacaaacccttaaaagaaacacct

SEQ ID NO: 3594 - DNA (genomic), 267 bp, Helicobacter pylori; double-stranded, circular
  misc_feature (B) LOCATION 1...267
  hypothetical: NO
  anti-sense: NO
ttgaatgctgcgccagtcgtcaatgatgaaattcgcgctgtgtttggaaatcgtccatgtgttttcagcaacttgcatgccataaaaaagagaaaatacatacaaagggtttttattgtattccatgatcaaatcccctccaaagccgtaagtgaacatgttcgcttgagcgcccgttcttttattgagaatgacattcccgtaatccataaaaaagtaatagcgcgaataaaaccagtaattagtggggttaatctcccagcctaa

SEQ ID NO: 3595 - DNA (genomic), 282 bp, Helicobacter pylori; double-stranded, circular
  misc_feature (B) LOCATION 1...282
  hypothetical: NO
  anti-sense: NO
agttttgagcgaaaacccttgaatgctgcgccagtcgtcaatgatgaaattcgcgctgtgtttggaaatcgtccatgtgttttcagcaacttgcatgccataaaaaagagaaaatacatacaaagggtttttattgtattccatgatcaaatcccctccaaagccgtaagtgaacatgttcgcttgagcgcccgttcttttattgagaatgacattcccgtaatccataaaaaagtaatagcgcgaataaaaccagtaattagtggggttaatctcccagcc

SEQ ID NO: 3596 - DNA (genomic), 321 bp, Helicobacter pylori; double-stranded, circular
  misc_feature (B) LOCATION 1...321
  hypothetical: NO
  anti-sense: NO
cttaaagagaaagagattaaagacattaacgctttcattacatggctgtactttaaggtcgtatttatcaaaaccacttgccccaatgtaagtatggcgttaaggatttttagtgttttaaacgctagaggtttgcccttgcatgcgatagatgtttttaaagtggagttactaaaaaaactcgctcaaaaaaaggatcaagaagagtttttgtctcgttggagtgccttgcatcaaaaatgctcagagaatgagtcaaaatttccaaagagaaaagagaacaagcgagagaagaatgccacagattattcagctggtatt

SEQ ID NO: 3597 - DNA (genomic), 540 bp, Helicobacter pylori; double-stranded, circular
  misc_feature (B) LOCATION 1...540
  hypothetical: NO
  anti-sense: NO
attatacaaggggtttttatggcaaatgaagtcaaaggcgtagatcgtccattaaaagatattttagctacagcacttgtttcttattaccaaatccctgattaccaacgcccttatcaatggacagaaaaaaactgcgaaaagcttttagacgatttgttttctagctatgaatattataaagaaagcggttatttttgcggatcattagttttaatcgtaattaacacagattccgaaactaacgctgaaacctatgatattgtggatggccagcaacgcttaagcactttcattctgctggcaaaagttttagccaccctctatgataaagatttagacacaactagcagagaacttttagaaaagagtttgggcgatactggtggagaaaaaagagagcggttgcattttaacgctatggggcttaacgctaaagatgattttgtgtatgcattagaacatttcaacgactctcaagcaagcaagaataaaaataataagaccaattacctaaaaaatgcgatttgtttaaaagac

SEQ ID NO: 3598 - DNA (genomic), 849 bp, Helicobacter pylori; double-stranded, circular
  misc_feature (B) LOCATION 1...849
  hypothetical: NO
  anti-sense: NO
atggcaaatgaagtcaaaggcgtagatcgtccattaaaagatattttagctacagcacttgtttcttattaccaaatccctgattaccaacgcccttatcaatggacagaaaaaaactgcgaaaagcttttagacgatttgttttctagctatgaatattataaagaaagcggttatttttgcggatcattagttttaatcgtaattaacacagattccgaaactaacgctgaaacctatgatattgtggatggccagcaacgcttaagcactttcattctgctggcaaaagttttagccaccctctatgataaagatttagacacaactagcagagaacttttagaaaagagtttgggcgatactggtggagaaaaaagagagcggttgcattttaacgctatggggcttaacgctaaagatgattttgtgtatgcattagaacatttcaacgactctcaagcaagcaagaataaaaataataagaacaattacctaaaaaatgcgatttgtttaaaagactatcttaaagagaaagagattaaagacattaacgctttcattacatggctgtattttaaggtcgtatttatcaaaaccacttgccccaatgtaagtatggcgttaaggatttttagtgttttaaacgctagaggtttgcccttgcatgcgatagatgtttttaaagtggagttactaaaaaaactcgctcaaaaaaaggatcaagaagagtttttgtctcgttggagtgccttgcatcaaaaatgctcagagaatgagtcaaaatttccaaagagaaaagagaacaagcgagagaagaatgccacagattattcagctggtatttaa

SEQ ID NO: 3599 - DNA (genomic), 609 bp, Helicobacter pylori; double-stranded, circular
  misc_feature (B) LOCATION 1...609
  hypothetical: NO
  anti-sense: NO
gtgagggggggggggttatttaatggcttgaacgccgtatttaaagaaaggcgcttcattctcgtccagttagatgaaaaaattgagaaaaacaaaagcgcttatgatttttgtttgaacaccttaaaatccacctcgccgagcatttttgacatcaccgaagaaaggattaaaagagcgggggctaaaatcaaagaagcttgcgcgcatttagatgtggggtttagagcgtttgaaatcattgatgatgaaacgcatactaatgataaaaatctgggtgaagcccatcaaaaggatttgttcgcttattctaaccttgatagaatggaaactcaaacgattttaatcaagcttttaggctgcgagggtttggagctcactacgcctataatttgcttgattgaaaacgccttgtatctggctttaaatacggctttcattgtgggggatatagaaatgagtgaggttttagaaaacttgaaagataaaggggtggaaaaaatcagcgtgtatatgcccgctatcagtaatgataggctgtgtttggaattgggcagtaatttgttggatttgaaattagagagcggcgatttaaagattagggggtag

SEQ ID NO: 3600 - DNA (genomic), 606 bp, Helicobacter pylori; double-stranded, circular
  misc_feature (B) LOCATION 1...606
  hypothetical: NO
  anti-sense: NO
gtgagggggggggggttatttaatggcttgaacgccgtatttaaagaaaggcgcttcattctcgtccagttagatgaaaaaattgagaaaaacaaaagcgcttatgatttttgtttgaacaccttaaaatccacctcgccgagcatttttgacatcaccgaagaaaggattaaaagagcgggggctaaaatcaaagaagcttgcgcgcatttagatgtggggtttagagcgtttgaaatcattgatgatgaaacgcatactaatgataaaaatctgggtgaagcccatcaaaaggatttgttcgcttattctaaccttgatagaatggaaactcaaacgattttaatcaagcttttaggctgcgagggtttggagctcactacgcctataatttgcttgattgaaaacgccttgtatctggctttaaatacggctttcattgtgggggatatagaaatgagtgaggttttagaaaacttgaaagataaaggggtggaaaaaatcagcgtgtatatgcccgctatcagtaatgataggctgtgtttggaattgggcagtaatttgttggatttgaaattagagcgcggcgatttaaagattaggggg

SEQ ID NO: 3601 - DNA (genomic), 1029 bp, Helicobacter pylori; double-stranded, circular
  misc_feature (B) LOCATION 1...1029
  hypothetical: NO
  anti-sense: NO
gacgggaaatttcacgaatgggagcatagccgccatgccatgggcgaatacgatgttgtcattgacacccatttttcacgaatttgtcatacggatattcacttcgctcacagcgattggttgcctgtaatgtatcctatggtacctgggcatgagattgctggggtagtgagcgcggttggctctaaagtaacgaagtttaaagtaggcgatcacgctggagtgggttgcatggtaaattcttgcggtgagtgtcatacctgtaagcatgaacaccaagaacaatggtgcgaaaacaacaaaaccatttacacttacagctgggaagattctttccacaataatgagcctacttatggcgggtattctaacaatatcgtggtgagcgaaaactttgtgatttctatccctaaagaagccccattagacaaagcggcccccttgctttgcgcgggcatcaccgtgtattcgcctttaaaattttctaaagttactaaaggctctaaagtgggtatcgctggctttggcgggttggggcatatggctttaaaatacgccgtggctatgggagcgcaagtgagcgtgttcgcaaggaacgacaagaaaaagcaaatggctcaaaaactaggcgcgactaacttttatacaagcgtgggagaatgcaaagaaaaatttgatttaatcgtttctagcattcccacgcaatatgacttgctcgcttacacgaaattattaaaatatggcggtgaagtggcgatcgtgggtatccccccaaaagatccgcaaaggaatttggattttggcgatttggtgctgttttcaggcaatcataaggtttatggctcttggattgggggcgtgaaagaaacccaagaaatgatggatttttccgtcaaacatggcatttaccctgagattgagctagttaccggtcaagaaattgatgcgacttgggacaaactcttaaacgggcaagggaatttccgctatgtgattgacatgaaaaaatccatggaaaattttaagaaa

SEQ ID NO: 3602 - DNA (genomic), 1098 bp, Helicobacter pylori; double-stranded, circular
  misc_feature (B) LOCATION 1...1098
  hypothetical: NO
  anti-sense: NO
atgcataacgcttgcaattgtaacagccaacgagtgccttttaaaggttttgcgatagacggcaaagacgggaaattccacgaatgggagcatagccgccatgccatgggcgaatacgatgttgtcattgacacccatttttcaggaatttgtcatacggatattcacttcgctcacagcgattggttgcctggaatttatcctatggtacctgggcatgagattgctggggtagtgagcgcggttggctctaaagtaacgaagtttaaagtaggcgatcacgctggagtgggttgcatggtaaattcttgcggtgagtgtcatacctgtaagcatgaacaccaagaacaatggtgcgaaaacaacaaaaccatttacacttacagctgggaagattctttccacaataatgagcctacttatggcgggtattctaacaatatcgtggtgagcgaaaactttgtgatttctatccctaaagaagccccattagacaaagcggcccccttgctttgcgcgggcatcaccgtgtattcgcctttaaaattttctaaagttactaaaggctctaaagtgggtatcgctggctttggcgggttggggcatatggctttaaaatacgccgtggctatgggagcgcaagtgagcgtgttcgcaaggaacgacaagaaaaagcaaatggctcaaaaactaggcgcgactaacttttatacaagcgtgggagaatgcaaagaaaaatttgatttaatcgtttctagcattcccacgcaatatgacttgctcgcttacacgaaattattaaaatatggcggtgaagtggcgatcgtgggtatccccccaaaagatccgcaaaggaatttggattttggcgatttggtgctgttttcaggcaatcataaggtttatggctcttggattgggggcgtgaaagaaacccaagaaatgatggatttttccgtcaaacatggcatttaccctgagattgagctagttaccggtcaagaaattgatgcgacttgggacaaactcttaaacgggcaagggaatttccgctatgtgattgacatgaaaaaatccatggaaaattttaagaaataa

SEQ ID NO: 3603 - DNA (genomic), 246 bp, Helicobacter pylori; double-stranded, circular
  misc_feature (B) LOCATION 1...246
  hypothetical: NO
  anti-sense: NO
ttggtgtttttagacaggcgtttgattgtgatggttacggactctaaagggagtcgttatattaatgtgcatatcttattccgccaaatcagtttgtatgcgctgttgagcgttgtgggatctttattgtttttaggcgtttcattactggttttaaataaagaaattaaaaacattgaaaaacagcatgctttamtcactaaggaatttgagaaaaaaagagagacgaatgaamagctttcttyg

SEQ ID NO: 3604 - DNA (genomic), 939 bp, Helicobacter pylori; double-stranded, circular
  misc_feature (B) LOCATION 1...939
  hypothetical: NO
  anti-sense: NO
gtgtttttagacaggcgtttgattgtgatggttacggactctaaagggagtcgttatattaatgtgcatatcttattccgccaaatcagtttgtatgcgctgttgagcgttgtgggatctttattgtttttaggcgtttcattactggttttaaataaagaaattaaaaacattgaaaaacagcatgctttaatcactaaggaatttgagaaaaaaagagagacgaatgaaaagctttctttgcaaatggatgagtttttagacgatttgcaactttcaggggagcgcatcaacgatttagaagaagtggtgggggtgaataggcctgaagaagaaaaagaagagggcaatttttccagccgcttggatgtggctgggattaccgggcttcaaaaaagctttatcatgcgccttatccctaatgactacccgctagaatcctatcggcgcgtttcagccgcttttaataaaagaatgcaccctattttgcatgtgttgcacaaccataccgggcttgatttaagcaccgctattaacacgcctgtgtatgcgagcgcgagcggggtagtggggttagcgagcaaggggtggaatggggggtatgggaatttgattaaggttttccacccttttggttttaaaacctactacgcccatttgaataaaatcgtcgtaaaaacgggcgaatttgtcaaaaaagggcagttgattgggtatagtggtaatacaggaatgagcacaggaccgcatttgcattatgaagtgcgcttcttagatcaacccataaaccccatgagtttcaccaaatggaacatgaaagattttgaagaagtttttaataaagaaaggagcatcagatggcaatctttgataacaataataaatcggctaatgcaaaaacaggaccagcgactatcatcgctcaaggcaccaaaataa

SEQ ID NO: 3605 - DNA (genomic), 942 bp, Helicobacter pylori; double-stranded, circular
  misc_feature (B) LOCATION 1...942
  hypothetical: NO
  anti-sense: NO
ttggtgtttttagacaggcgtttgattgtgatggttacggactctaaagggagtcgttatattaatgtgcatatcttattccgccaaatcagtttgtatgcgctgttgagcgttgtgggatctttattgtttttaggcgtttcattactggttttaaataaagaaattaaaaacattgaaaaacagcatgctttaatcactaaggaatttgagaaaaaaagagagacgaatgaaaagctttctttgcaaatggatgagtttttagacgatttgcaactttcaggggagcgcatcaacgatttagaagaagtggtgggggtgaataggcctgaagaagaaaaagaagagggcaatttttccagccgcttggatgtggctgggattaccgggcttcaaaaaagctttatcatgcgccttatccctaatgactacccgctagaatcctatcggcgcgtttcagccgcttttaataaaagaatgcaccctattttgcatgtgttgcacaaccataccgggcttgatttaagcaccgctattaacacgcctgtgtatgcgagcgcgagcggggtagtggggttagcgagcaaggggtggaatggggggtatgggaatttgattaaggttttccacccttttggttttaaaacctactacgcccatttgaataaaatcgtcgtaaaaacgggcgaatttgtcaaaaaagggcagttgattgggtatagtggtaatacaggaatgagcacaggaccgcatttgcattatgaagtgcgcttcttagatcaacccataaaccccatgagtttcaccaaatggaacatgaaagattttgaagaagtttttaataaagaaaggagcatcagatggcaatctttgataacaataataaatcggctaatgcaaaaacaggaccagcgactatcatcgctcaaggcaccaaaataa

SEQ ID NO: 3606 - DNA (genomic), 945 bp, Helicobacter pylori; double-stranded, circular
  misc_feature (B) LOCATION 1...945
  hypothetical: NO
  anti-sense: NO
gggtttttggtgtttttagacaggcgtttgattgtgatggttacggactctaaagggagtcgttatattaatgtgcatatcttattccgccaaatcagtttgtatgcgctgttgagcgttgtgggatctttattgtttttaggcgtttcattactggttttaaataaagaaattaaaaacattgaaaaacagcatgctttaatcactaaggaatttgagaaaaaaagagagacgaatgaaaagctttctttgcaaatggatgagtttttagacgatttgcaactttcaggggagcgcatcaacgatttagaagaagtggtgggggtgaataggcctgaagaagaaaaagaagagggcaatttttccagccgcttggatgtggctgggattaccgggcttcaaaaaagctttatcatgcgccttatccctaatgactacccgctagaatcctatcggcgcgtttcagccgcttttaataaaagaatgcaccctattttgcatgtgttgcacaaccataccgggcttgatttaagcaccgctattaacacgcctgtgtatgcgagcgcgagcggggtagtggggttagcgagcaaggggtggaatggggggtatgggaatttgattaaggttttccacccttttggttttaaaacctactacgcccatttgaataaaatcgtcgtaaaaacgggcgaatttgtcaaaaaagggcagttgattgggtatagtggtaatacaggaatgagcacaggaccgcatttgcattatgaagtgcgcttcttagatcaacccataaaccccatgagtttcaccaaatggaacatgaaagattttgaagaagtttttaataaagaaaggagcatcagatggcaatctttgataacaataataaatcggctaatgcaaaaacaggaccagcgactatcatcgctcaaggcaccaaaa

SEQ ID NO: 3607 - DNA (genomic), 882 bp, Helicobacter pylori; double-stranded, circular
  misc_feature (B) LOCATION 1...882
  hypothetical: NO
  anti-sense: NO
atggaagaaagacttgccgatcagtttgaaaggcttaataaaccccctttagaatactttaagggcgtagagaatttttacaacgcttattgtaaggtattggaaatgcaagattggcatgctcatttgctttcttatctagcctctgatttttggcgtgttattttgtgcactagcatattgcaccattatagcgatcaagacatagagactttaaaggagttattggtcaagttttactaccaaaattgggttgcaacgcgagaagaacctaaaaaacaaactaattgcaacatcattaaagccttaaaagagaataaaagcgtagagagcatcgcttctattgtaaaagaatatttagattatcataagataacacaagactttaagaaaaacctacaagacagcaaattgtatgaacaacacaaaaagagttcaaaaaattcatgggtcaagcccgttctcattttagtggaatattccatgagcgataacgctaaccccgcttatattaaaatggatgacgatttgcatgttgaacgcattttgccccaaaaccccgatccttcaagccaatgggtgaaagactttagcgaagaagaaagagaattatacacgcattctttagccaacctcacgcttttaggaggcacgaaaaacaccaaagctttaagccaagctttaaaccaagatttcaaagagaaaaaagaaatctacatggggaaaactatcgcgctagacaataagaaaacttttaaggtgatgacttgctatgatatgactaaaaacgatgtgtgccgctacacagaatggatgcccaaaaatttagaaaaaagaaaagaagagttgattaaacgcattgagagcgttctaacgctctag

SEQ ID NO: 3608 - DNA (genomic), 981 bp, Helicobacter pylori; double-stranded, circular
  misc_feature (B) LOCATION 1...981
  hypothetical: NO
  anti-sense: NO
gtcaaaatttccaaagagaaaagagaacaagcgagagaagaatgccacagattattcagctggtatttaacctatctcaatccggtaactagtgggaaaagcatggaagaaagacttgccgatcagtttgaaaggcttaataaaccccctttagaatactttaagggcgtagagaatttttacaacgcttattgtaaggtattggaaatgcaagattggcatgctcatttgctttcttatctagcctctgatttttggcgtgttattttgtgcactagcatattgcaccattatagcgatcaagacatagagactttaaaggagttattggtcaagttttactaccaaaattgggttgcaacgcgagaagaacctaaaaaacaaactaattgcaacatcattaaagccttaaaagagaataaaagcgtagagagcatcgcttctattgtaaaagaatatttagattatcataagataacacaagactttaagaaaaacctacaagacagcaaattgtatgaacaacacaaaaagagttcaaaaaattcatgggtcaagcccgttctcattttagtggaatattccatgagcgataacgctaaccccgcttatattaaaatggatgacgatttgcatgttgaacgcattttgccccaaaaccccgatccttcaagccaatgggtgaaagactttagcgaagaagaaagagaattatacacgcattctttagccaacctcacgcttttaggaggcacgaaaaacaccaaagctttaagccaagctttaaaccaagatttcaaagagaaaaaagaaatctacatggggaaaactatcgcgctagacaataagaaaacttttaaggtgatgacttgctatgatatgactaaaaacgatgtgtgccgctacacagaatggatgcccaaaaatttagaaaaaagaaaagaagagttgattaaacgcattgagagcgttctaacgctc

SEQ ID NO: 3609 - DNA (genomic), 231 bp, Helicobacter pylori; double-stranded, circular
  misc_feature (B) LOCATION 1...231
  hypothetical: NO
  anti-sense: NO
atgacaccaagcacaactttaaatatttgtttcaataagaaaaacagcaaactgattttacaaattgatttttcgcaaatggataccgaaacacaagaaaagtttttagcgtatttgtttgaaaaagctttacaaaaaaatctacaagcttattggataacaacaactgaaactaagaatgaattaacaagagaagagttttcaaatttactaaagaaaaacaatgattga

SEQ ID NO: 3610 - DNA (genomic), 231 bp, Helicobacter pylori; double-stranded, circular; identical to SEQ ID NO: 3609
  misc_feature (B) LOCATION 1...231
  hypothetical: NO
  anti-sense: NO

SEQ ID NO: 3611 - DNA (genomic), 273 bp, Helicobacter pylori; double-stranded, circular
  misc_feature (B) LOCATION 1...273
  hypothetical: NO
  anti-sense: NO
aaactcacccaaagtttcagactactttcaagagagtgcttaagaatgacaccaagcacaactttaaatatttgtttcaataagaaaaacagcaaactgattttacaaattgatttttcgcaaatggataccgaaacacaagaaaagtttttagcgtatttgtttgaaaaagctttacaaaaaaatctacaagcttattggataacaacaactgaaactaagaatgaattaacaagagaagagttttcaaatttactaaagaaaaacaatgat

SEQ ID NO: 3612 - DNA (genomic), 213 bp, Helicobacter pylori; double-stranded, circular
  misc_feature (B) LOCATION 1...213
  hypothetical: NO
  anti-sense: NO
aagaaaaagaaagtcttaatgtttgaaaacgctcttaaatattgtaaagaaaaagccatagaccttttaacaggttttgttccaaaaacctattctatgacagaggaatgcaatattttaggtttgtatgatgatactttcatcatcactaaacaagaaaataatgctaattactcatgcgcttcgcacaacaattgggttgtcccaaacaat

SEQ ID NO: 3613 - DNA (genomic), 426 bp, Helicobacter pylori; double-stranded, circular
  misc_feature (B) LOCATION 1...426
  hypothetical: NO
  anti-sense: NO
atgtttgaaaacgctcttaaatattgtaaagaaaaagccatagaccttttaacaggttttgttccaaaaacctattctatgacagaggaatgcaatattttaggtttgtatgatgatactttcatcatcactaaacaagaaaatttagtcgctattatgtctttacaaggactaagctattctaatttaatgcaaaaagacttagagggttattttgatactagacaaaatgttctcaacaccattagtaaagacattcaattaagaattgtggctaaaaggcgtaaggaatttatcaatcaaagtccaaatattgacaatatttatgccaaagctattatcacacaatttgaaagcaaggaaatctataaaacagagtattttttaatagctttagttaatctatcagtatttaatagaatttag

SEQ ID NO: 3614 - DNA (genomic), 426 bp, Helicobacter pylori; double-stranded, circular
  misc_feature (B) LOCATION 1...426
  hypothetical: NO
  anti-sense: NO
atgtttgaaaacgctcttaaatattgtaaagaaaaagccatagaccttttaacaggtttgttccaaaaacctattctatgacagaggaatgcaatattttaggtttgtatgatgatactttcatcatcactaaacaagaaaatttagtcgctattatgtctttacaaggactaagctattctaatttaatgcaaaaagacttagagggttattttgatactagacaaaatgttctcaacaccattagtaaagacattcaattaagaattgtggctaaaaggcgtaaggaatttatcaatcaaagtccaaatattgacaatatttatgccaaagctattatcacacaatttgaaagcaaggaaatctataaaacagagtattttttaatagctttagttaatctatcagtatttaatagaatttagt

SEQ ID NO: 3615 - DNA (genomic), 441 bp, Helicobacter pylori; double-stranded, circular
  misc_feature (B) LOCATION 1...441
  hypothetical: NO
  anti-sense: NO
aagaaaaagaaagtcttaatgtttgaaaacgctcttaaatattgtaaagaaaaagccatagaccttttaacaggttttgttccaaaaacctattctatgacagaggaatgcaatattttaggtttgtatgatgatactttcatcatcactaaacaagaaaatttagtcgctattatgtctttacaaggactaagctattctaatttaatgcaaaaagacttagagggttattttgatactagacaaaatgttctcaacaccattagtaaagacattcaattaagaattgtggctaaaaggcgtaaggaatttatcaatcaaagtccaaatattgacaatatttatgccaaagctattatcacacaatttgaaagcaaggaaatctataaaacagagtattttttaatagctttagttaatctatcagtatttaatagaatt

SEQ ID NO: 3616 - DNA (genomic), 432 bp, Helicobacter pylori; double-stranded, circular
  misc_feature (B) LOCATION 1...432
  hypothetical: NO
  anti-sense: NO
atggcgttagtgtatttagcccaaagcgataccactataggactgctttctaaagacagcgaaaaactcaacgccttaaaaggccgccctaaaaaccaaagcgttttaatagaaagcactgattttaccactttaaaaagcctggtgcgcgcgcccaatgcgtttaaaaacctcgttagaagaagcgctaaaaccacttttatttaccctaattctaaagccgttcgtgtggttaaaggcaggcatggggattttttaaagcgctttaaaacgctttatagcacctcagccaacctcacccaatgcgcttatgataaagaaatcgcttccaatctcgcagatgtcattgtgagcgatgaaaggggtttgtttgaaagtggtagttctaaaatatttaagctttataaacataaaaaagtgagagtaagataa

SEQ ID NO: 3617 - DNA (genomic), 438 bp, Helicobacter pylori; double-stranded, circular
  misc_feature (B) LOCATION 1...438
  hypothetical: NO
  anti-sense: NO
agtaatttgatggcgttagtgtatttagcccaaagcgataccactataggactgctttctaaagacagcgaaaaactcaacgccttaaaaggccgccctaaaaaccaaagcgttttaatagaaagcactgattttaccactttaaaaagcctggtgcgcgcgcccaatgcgtttaaaaacctcgttagaagaagcgctaaaaccacttttatttaccctaattctaaagccgttcgtgtggttaaaggcaggcatggggattttttaaagcgctttaaaacgctttatagcacctcagccaacctcacccaatgcgcttatgataaagaaatcgcttccaatctcgcagatgtcattgtgagcgatgaaaggggtttgtttgaaagtggtacttctaaaatatttaagctttataaacataaaaaagtgagagtaaga

SEQ ID NO: 3618 - DNA (genomic), 132 bp, Helicobacter pylori; double-stranded, circular
  misc_feature (B) LOCATION 1...132
  hypothetical: NO
  anti-sense: NO
atgatcgcttttggtataaaggctatagaattagcgctacaatacccccatgcaaaaaaagatttttttactagaagacgattaccttttaagcgagagtatcaaggagttcttggagcatttaggctatga

SEQ ID NO: 3619 - DNA (genomic), 333 bp, Helicobacter pylori; double-stranded, circular
  misc_feature (B) LOCATION 1...333
  hypothetical: NO
  anti-sense: NO
gtgttgcgcaagcttttgggtaaaaattgcatagaaacgcataagggggtgggctatcgcttaacccactatgaaaaaaaatccctcaaactctttttagggacttatttaggctcttcgtttgtgttaatgctagtgattagcgttttagcgtttaactatgaaaaaaacgaaaaaatcaaartgatacgcatggacatggacaaaatggcttctaagatcgctagtgaaattatccaattgcacatgcaaacgcatgcggattatcacaacgctttaaacgccctgatttcacgttataaagacgtttccatagycctytyygayacgtaa

SEQ ID NO: 3620 - DNA (genomic), 969 bp, Helicobacter pylori; double-stranded, circular
  misc_feature (B) LOCATION 1...969
  hypothetical: NO
  anti-sense: NO
aacgctttaaacgccctgatttcacgctataaagacgcttccatagccctttttgatagtaaaaagcgtgttttatactctaatatccctgaaagcgcggatttgattaaaacccataaagaagggggctttttcagttttaagggggaatattacctgttcagcgatgaaactttcgcccatttaggcgtggttaaaatgcttcttaaaaattctaaaccccttcatttttcttctttgtatcgcaatatggttttagtgtttgtcgtagcgtttttatgcgtgataggggtttctgtgtttttagggcgtttgtttttaaagcccattaggaatgaaatcattcgcatcgatcatttcttaaaaaacaccacgcatgaattaaacacccccatgagcgctttaggcttgtctttaaaaactttagaagacaaccaacaacaccgccgcattaaaatcgctatccagcgcatgagttttttataccgctcgctctcttatttggtgatgcaagacattgagcgcgaatcctttgcgcttttggatttaaaagccctaattactaaagaaaacacgctttttagcgagatgatagactaccacaaattggaatttaaaagcgatttagtgggagtggtattgaaggctaaagagcaggattttatttcgctttatagcaatttgctcatgaatgcgatcaaatacagcgtcatgcatgggtatatccacatagagctaacgcctgagtttttgaaagtgaaaaatttagggtatgaaatccctaaagacaagatcacaaaattaagcgtccgttacgcgcgtttcaattctagcgtgttgggttatggtatagggttagatttggtgaaaaaagtgtgtgaaaagtataaaatgcgtttagaaattcatagcgaaccctctttaaaaggatcgtttcatgaaaattcgttttgcgttcaatttcaagga

SEQ ID NO: 3621 - DNA (genomic), 966 bp, Helicobacter pylori; double-stranded, circular
  misc_feature (B) LOCATION 1...966
  hypothetical: NO
  anti-sense: NO
gctttaaacgccctgatttcacgctataaagacgcttccatagccctttttgatagtaaaaagcgtgttttatactctaatatccctgaaagcgcggatttgattaaaacccataaagaagggggctttttcagttttaagggggaatattacctgttcagcgatgaaactttcgcccatttaggcgtggttaaaatgcttcttaaaaattctaaaccccttcatttttcttctttgtatcgcaatatggttttagtgtttgtcgtagcgtttttatgcgtgataggggtttctgtgtttttagggcgtttgtttttaaagcccattaggaatgaaatcattcgcatcgatcatttcttaaaaaacaccacgcatgaattaaacacccccatgagcgctttaggcttgtctttaaaaactttagaagacaaccaacaacaccgccgcattaaaatcgctatccagcgcatgagttttttataccgctcgctctcttatttggtgatgcaagacattgagcgcgaatcctttgcgcttttggatttaaaagccctaattactaaagaaaacacgctttttagcgagatgatagactaccacaaattggaatttaaaagcgatttagtgggagtggtattgaaggctaaagagcaggattttatttcgctttatagcaatttgctcatgaatgcgatcaaatacagcgtcatgcatgggtatatccacatagagctaacgcctgagtttttgaaagtgaaaaatttagggtatgaaatccctaaagacaagatcacaaaattaagcgtccgttacgcgcgtttcaattctagcgtgttgggttatggtatagggttagatttggtgaaaaaagtgtgtgaaaagtataaaatgcgtttagaaattcatagcgaaccctctttaaaaggatcgtttcatgaaaattcgttttgcgttcaatttcaagga

SEQ ID NO: 3622 - DNA (genomic), 1119 bp, Helicobacter pylori; double-stranded, circular
  misc_feature (B) LOCATION 1...1119
  hypothetical: NO
  anti-sense: NO
gtgttaatgctagtgattagcgttttagcgtttaactatgaaaaaaacgaaaaaatcaaaatgatacgcatggacatggacaaaatggcttctaagatcgctagtgaaattatccaattgcacatgcaaacgcatgcggattatcacaacgctttaaacgccctgatttcacgctataaagacgcttccatagccctttttgatagtaaaaagcgtgttttatactctaatatccctgaaagcgcggatttgattaaaacccataaagaagggggctttttcagttttaagggggaatattacctgttcagcgatgaaactttcgcccatttaggcgtggctaaaatgctttttaaaaattctaaaccccttcatttttcttctttgtatcgcaatatggttttagtgtttgtcgtagcgtttttatgcgtgataggggtttctgtgtttttagggcgtttgtttttaaagcccattaggaatgaaatcattcgcatcgatcatttcttaaaaaacaccacgcatgaattaaacacccccatgagcgctttagtcttgtctttaaaaactttagaagacaaccaacaacaccgccgcattaaaatcgctatccagcgcatgagttttttataccgctcgctctcttatttggtgatgcaagacattgagcgcgaatcctttgcgcttttggatttaaaagccctaattactaaagaaaacacgctttttagcgagatgatagactaccacaaattggaatttaaaagcgatttagtgggagtggtattgaaggctaaagagcaggattttatttcgctttatagcaatttgctcatgaatgcgatcaaatacagcgtcatgcatgggtatatccacatagagctaacgcctgagtttttgaaagtgaaaaatttagggtatgaaatccctaaagacaagatcacaaaattaagcgtccgttacgcgcgtttcaattctagcgtgttgggttatggtatagggttagatttggtgaaaaaagtgtgtgaaaagtataaaatgcgtttagaaattcatagcgaaccctctttaaaaggatcgtttcatgaaaattcgttttgcgttcaatttcaaggataa

SEQ ID NO: 3623 - DNA (genomic), 546 bp, Helicobacter pylori; double-stranded, circular
  misc_feature (B) LOCATION 1...546
  hypothetical: NO
  anti-sense: NO
ttgtattccccacattaccgcaagcgttatgaagacttcctcaaagccgattaccctaaaatccttttcacaaacaataaagatttattcagggctttaagccttttagggattgaactaatcggcttgcatgtcttaaaccgagaaagcctgaatcacagctttgaaaaattaaaagaccccaccataggcgaatcctactacaaagaagcgcatgatcgtaaccccatcatcaaaaaaccctctcataaaaagctagaacaacggctttatatcaaccatagcgcttattttaggggggtgagtgaggaaattcatgattacatgataggggggtatggcgttttagacaagtatttaaaaagccacaaaaacgagccttgcgactttgatcatgtaagcaatatcattaaaatcattgcgcgcacgattgaaatccaaaaaacgcttggatttttaacgagcgatttgccccatttaaaagggaatgacagcaaagccttaatacaagaaatcttgcaaaatccaccccccccccccatttaa

SEQ ID NO: 3624 - DNA (genomic), 711 bp, Helicobacter pylori; double-stranded, circular
  misc_feature (B) LOCATION 1...711
  hypothetical: NO
  anti-sense: NO
tatacgcaaagtttattacgacaccaaaaaactagaaagagcaagggagaacacattcaagcacatgttacccccccccccccaacaaaccctaaaacacccaatcaaacgcgcaaaaatgtcgcgctcaacaccccacgacagctaaaaaacaacgataaaagttggacgcaatgctttataagctctcaacttaacgatcaagggttaagctctgggggcaatggagctggggttaattaccccctctatcaattcaaacaccccaactacaccgaaaattttacgccagagtttagaagctttatagacaaacactatagccaccattttgagccgctagaggttttaggctatatttatgcgttattgtattccccacattaccgcaagcgttatgaagacttcctcaaagccgattaccctaaaatccttttcacaaacaataaagatttattcagggctttaagccttttagggattgaactaatcggcttgcatgtcttaaaccgagaaagcctgaatcacagctttgaaaaattaaaagaccccaccataggcgaatcctactacaaagaagcgcatgatcgtaaccccatcatcaaaaaaccctctcataaaaagctagaacaacggctttatatcaaccatagcgcttattttaggggggtgagtgaggaaattcatgattacatgataggggggtatggc

SEQ ID NO: 3625 - DNA (genomic), 714 bp, Helicobacter pylori; double-stranded, circular
  misc_feature (B) LOCATION 1...714
  hypothetical: NO
  anti-sense: NO
tatacgcaaagtttattacgacaccaaaaaactagaaagagcaagggagaacacattcaagcacatgttacccccccccccccaacaaaccctaaaacacccaatcaaacgcgcaaaaatgtcgcgctcaacaccccacgacagctaaaaaacaacgataaaagttggacgcaatgctttataagctctcaacttaacgatcaagggttaagctctgggggcaatggagctggggttaattaccccctctatcaattcaaacaccccaactacaccgaaaattttacgccagagtttagaagctttatagacaaacactatagccaccattttgagccgctagaggttttaggctatatttatgcgttattgtattccccacattaccgcaagcgttatgaagacttcctcaaagccgattaccctaaaatccttttcacaaacaataaagatttattcagggctttaagccttttagggattgaactaatcggcttgcatgtcttaaaccgagaaagcctgaatcacagctttgaaaaattaaaagaccccaccataggcgaatcctactacaaagaagcgcatgatcgtaaccccatcatcaaaaaaccctctcataaaaagctagaacaacggctttatatcaaccatagcgcttattttaggggggtgagtgaggaaattcatgattacatgataggggggtatggcgtt

SEQ ID NO: 3626 - DNA (genomic), 915 bp, Helicobacter pylori; double-stranded, circular
  misc_feature (B) LOCATION 1...915
  hypothetical: NO
  anti-sense: NO
tatacgcaaagtttattacgacaccaaaaaactagaaagagcaagggagaacacattcaagcacatgttacccccccccccccaacaaaccctaaaacacccaatcaaacgcgcaaaaatgtcgcgctcaacaccccacgacagctaaaaaacaacgataaaagttggacgcaatgctttataagctctcaacttaacgatcaagggttaagctctgggggcaatggagctggggttaattaccccctctatcaattcaaacaccccaactacaccgaaaattttacgccagagtttagaagctttatagacaaacactatagccaccattttgagccgctagaggttttaggctatatttatgcgttattgtattccccacattaccgcaagcgttatgaagacttcctcaaagccgattaccctaaaatccttttcacaaacaataaagatttattcagggctttaagccttttagggattgaactaatcggcttgcatgtcttaaaccgagaaagcctgaatcacagctttgaaaaattaaaagaccccaccataggcgaatcctactacaaagaagcgcatgatcgtaaccccatcatcaaaaaaccctctcataaaaagctagaacaacggctttatatcaaccatagcgcttattttaggggggtgagtgaggaaattcatgattacatgataggggggtatggcgttttagacaagtatttaaaaagccacaaaaacgagccttgcgactttgatcatgtaagcaatatcattaaaatcattgcgcgcacgattgaaatccaaaaaacgcttggatttttaacgagcgatttgccccatttaaaagggaatgacagcaaagccttaatacaagaaatcttgcaaaatccaccccccccccccatttaa

SEQ ID NO: 3627 - DNA (genomic), 2448 bp, Helicobacter pylori; double-stranded, circular
  misc_feature (B) LOCATION 1...2448
  hypothetical: NO
  anti-sense: NO
atgctaaaagaatatttagaaagcattaaagatctgacgcctgaaagtaatgaactcacgcaccgcccttctttatacaacttgcttaaaaatttaaaaaacgattttaagaaagaacttaagattgaacatgagcctaacagagacaaacaagggggtcagcctgattttcgcgtttcttatcaagggcttaacatcggctatatagaaaataaaagggtagggactgatcttaaccagctcttagaaagcgatcaaatccttaaatatttagaattaaaccccaacctcatgctcaccgattaccttaatttcgtgtgggtagggaaagatgaagagaataagccttcaactaaaagaaaaatttctatcgctagccttgaggaacttcccaaattaaaacccaacccgcaaaccgagcgcgatctgattgaattgtttagaggctttttcaatcacgaagcagcccctattactaacgctaaagatttcgcaaacgcattaagtgcgcccaccaggtatttaaaagacgctttaatcgcataccaaaaagacgatcaagtttctagcatttttaagaattttaaagaatatctttatgaagaattgagttttgaagactttagcgatgcgttcgctcaaacgctcacttacagcctttttttagccaaactcaaccacccttttgaaaaaatagatttgaataatgtgagaagctctatccctaaaaatttcgctgtgatcagagaaatggcggattttttaaagaagcttgatgcaatccaagaaatccaatggcttttaaatgaaattctaatcttgatcaatcatgttgatatgggccctatcattaaagatttgaatgacgataaagacccttatttgcacttttatgaaacctttttaagcgcttatgaccctaaattgcgagagaaaaagggcgtgtactacaccccagattctgtggtggaattcatcattaacgctttggatagcctgctcaaaacgcatttcaaagacgctcccttaggcttaaaaagcgctttagataacaaaaacatcaagctcttagactttgctaccggcacaggcacttttttattggaagcgttcaggaaagcgctagaagtgagaaaaacaagcgatggaggcgcctccactaaagaggacaaataccaaaacctcttgaagcaattctatgggtttgaatacttgatcgctccttatgcgatcgctcatttgaacctcagccaagcctttaaggaggaatttaaaaagcctctcaaagaaaacgacacgcttaaaatcattttaaccaacaccctcatacagcctagtgagattatcgcttatcgtgggctaaacccgatttttgaaaaagagctttcaaacgcccaagaaattaaaaaaaatgaaaacatccttatcatcaccggtaaccccccttatagcggggcgagcgagaataagggcttgtttgaatgggaagtgaaagccacttacggcatagagcctgaatttcaaaccatagaaattgaaaaaaacgttaaactcaccgataaaatccaaacgcttttaaagaacgttcaaaaacaaaaagaaagcggcagcaaaaacgccctaaaggaacttaaaaatctccactctaaatacaaattgcaaaaggagaaaaaccctaaatggctcctagacgattacgtgaaattcatgcgtttcgctcaaaacaagatcgaattattagggcatggcctctttggctttatctctaacaacgcctttttagacaaccctacttttagggggttaaggcgctctcttttagaatgctacgatgagctttatatcttaaatttgcatggaaacgctaggagaaaggaggaaaccccacaaggcgcaacagatgaaaacgttttcaatatcatgcaaggcgtttccattaacctctttgtcaaaaaggcgcaagccaccaagccaaaaatctgttattatgatgtgtatggcgaaagggctgaaaaatacgcctttttagcccaaaatgatttggataggattgaatggcttgagcttgccccaagagagcctttttacttgctcataccccaaaaaacgcccttgttagaggaatacgaacaaggctttagcgttcaggagatgtttcaaatctcaagtgtggggattgttacaggaaaagataaaatctttattgctaacaatactgaaagcttaaaagaacaagtcttaaaatattgtaatgaatttaacgaacaatgcgtcaaggatattcactatcgtccttttgatatacgcaaagtttattacgacaccaaaaaactagaaagagcaagggagaacacattcaagcacatgttacccccccccccccaacaaaccctaaaacacccaatcaaacgcgcaaaaatgtcgcgctcaacaccccacgacagctaa

SEQ ID NO: 3628 - DNA (genomic), 2460 bp, Helicobacter pylori; double-stranded, circular
  misc_feature (B) LOCATION 1...2460
  hypothetical: NO
  anti-sense: NO
aaaggggttattagcatgctaaaagaatatttagaaagcattaaagatctgacgcctgaaagtaatgaactcacgcaccgcccttctttatacaacttgcttaaaaatttaaaaaacgattttaagaaagaacttaagattgaacatgagcctaacagagacaaacaagggggtcagcctgattttcgcgtttcttatcaagggcttaacatcggctatatagaaaataaaagggtagggactgatcttaaccagctcttagaaagcgatcaaatccttaaatatttagaattaaaccccaacctcatgctcaccgattaccttaatttcgtgtgggtagggaaagatgaagagaataagccttcaactaaaagaaaaatttctatcgctagccttgaggaacttcccaaattaaaacccaacccgcaaaccgagcgcgatctgattgaattgtttagaggctttttcaatcacgaagcagcccctattactaacgctaaagatttcgcaaacgcattaagtgcgcccaccaggtatttaaaagacgctttaatcgcataccaaaaagacgatcaagtttctagcatttttaagaattttaaagaatatctttatgaagaattgagttttgaagactttagcgatgcgttcgctcaaacgctcacttacagcctttttttagccaaactcaaccacccttttgaaaaaatagatttgaataatgtgagaagctctatccctaaaaatttcgctgtgatcagagaaatggcggattttttaaagaagcttgatgcaatccaagaaatccaatggcttttaaatgaaattctaatcttgatcaatcatgttgatatgggccctatcattaaagatttgaatgacgataaagacccttatttgcacttttatgaaacctttttaagcgcttatgaccctaaattgcgagagaaaaagggcgtgtactacaccccagattctgtggtggaattcatcattaacgctttggatagcctgctcaaaacgcatttcaaagacgctcccttaggcttaaaaagcgctttagataacaaaaacatcaagctcttagactttgctaccggcacaggcacttttttattggaagcgttcaggaaagcgctagaagtgagaaaaacaagcgatggaggcgcctccactaaagaggacaaataccaaaacctcttgaagcaattctatgggtttgaatacttgatcgctccttatgcgatcgctcatttgaacctcagccaagcctttaaggaggaatttaaaaagcctctcaaagaaaacgacacgcttaaaatcattttaaccaacaccctcatacagcctagtgagattatcgcttatcgtgggctaaacccgatttttgaaaaagagctttcaaacgcccaagaaattaaaaaaaatgaaaacatccttatcatcaccggtaaccccccttatagcggggcgagcgagaataagggcttgtttgaatgggaagtgaaagccacttacggcatagagcctgaatttcaaaccatagaaattgaaaaaaacgttaaactcaccgataaaatccaaacgcttttaaagaacgttcaaaaacaaaaagaaagcggcagcaaaaacgccctaaaggaacttaaaaatctccactctaaatacaaattgcaaaaggagaaaaaccctaaatggctcctagacgattacgtgaaattcatgcgtttcgctcaaaacaagatcgaattattagggcatggcctctttggctttatctctaacaacgcctttttagacaaccctacttttagggggttaaggcgctctcttttagaatgctacgatgagctttatatcttaaatttgcatggaaacgctaggagaaaggaggaaaccccacaaggcgcaacagatgaaaacgttttcaatatcatgcaaggcgtttccattaacctctttgtcaaaaaggcgcaagccaccaagccaaaaatctgttattatgatgtgtatggcgaaagggctgaaaaatacgcctttttagcccaaaatgatttggataggattgaatggcttgagcttgccccaagagagcctttttacttgctcataccccaaaaaacgcccttgttagaggaatacgaacaaggctttagcgttcaggagatgtttcaaatctcaagtgtggggattgttacaggaaaagataaaatctttattgctaacaatactgaaagcttaaaagaacaagtcttaaaatattgtaatgaatttaacgaacaatgcgtcaaggatattcactatcgtccttttgatatacgcaaagtttattacgacaccaaaaaactagaaagagcaagggagaacacattcaagcacatgttacccccccccccccaacaaaccctaaaacacccaatcaaacgcgcaaaaatgtcgcgctcaacaccccacgacagc

SEQ ID NO: 3629 - DNA (genomic), 552 bp, Helicobacter pylori; double-stranded, circular
  misc_feature (B) LOCATION 1...552
  hypothetical: NO
  anti-sense: NO
atggctatttgggggtggtgttttttatttttatcgtccttgatgtggggttcaagcatgcatgagttggttttaagatcccaagctttagggtttgaaacgcgcttagtccagtgcgatttatcgttttcttatgaaaggtttatttctaaaaccaaacgctctttagcggtgttagaagaatttgattggttaaattctggctttgatttttcacgcttgaacgttgaaaatgacactctggaattactcaaagcgctgtattttaaattagaaaaattagagagcctgcttttaaaagaaaatttacttgaattggagcaaaaggatcgcatcatcgctttagggcatgggctagtttgcctaaaaaaacaaagcctgatagcgcctcaaacttactatgggcgttgcgtgttagaggggaaaatcctagccttttttggcgtggcaagggataaagattttttagaaatcactcgcatgcacgccttagacattaagcgttatgattctttcattgttgatagcgaaagaaaaggcttgaaattatga

SEQ ID NO: 3630 - DNA (genomic), 549 bp, Helicobacter pylori; double-stranded, circular
  misc_feature (B) LOCATION 1...549
  hypothetical: NO
  anti-sense: NO
atggctatttgggggtggtgttttttatttttatcgtccttgatgtggggttcaagcatgcatgagttggttttaagatcccaagctttagggtttgaaacgcgcttagtccagtgcgatttatcgttttcttatgaaaggtttatttctaaaaccaaacgctctttagcggtgttagaagaatttgattggttaaattctggctttgatttttcacgcttgaacgttgaaaatgacactctggaattactcaaagcgctgtattttaaattagaaaaattagagagcctgcttttaaaagaaaatttacttgaattggagcaaaaggatcgcatcatcgctttagggcatgggctagtttgcctaaaaaaacaaagcctgatagcgcctcaaacttactatgggcgttgcgtgttagaggggaaaatcctagccttttttggcgtggcaagggataaagattttttagaaatcactcgcatgcacgccttagacattaagcgttatgattccttcattgttgatagcgaaagaaaaggcttgaaatta

SEQ ID NO: 3631 - DNA (genomic), 552 bp, Helicobacter pylori; double-stranded, circular
  misc_feature (B) LOCATION 1...552
  hypothetical: NO
  anti-sense: NO
gtaatggctatttgggggtggtgttttttatttttatcgtccttgatgtggggttcaagcatgcatgagttggttttaagatcccaagctttagggtttgaaacgcgcttagtccagtgcgatttatcgttttcttatgaaaggtttatttctaaaaccaaacgctctttagcggtgttagaagaatttgattggttaaattctggctttgatttttcacgcttgaacgttgaaaatgacactctggaattactcaaagcgctgtattttaaattagaaaaattagagagcctgcttttaaaagaaaatttacttgaattggagcaaaaggatcgcatcatcgctttagggcatgggctagtttgcctaaaaaaacaaagcctgatagcgcctcaaacttactatgggcgttgcgtgttagaggggaaaatcctagccttttttggcgtggcaagggataaagattttttagaaatcactcgcatgcacgccttagacattaagcgttatgattccttcattgttgatagcgaaagaaaaggcttgaaatta

SEQ ID NO: 3632 - DNA (genomic), 204 bp, Helicobacter pylori; double-stranded, circular
  misc_feature (B) LOCATION 1...204
  hypothetical: NO
  anti-sense: NO
agagcgcgattacttagaagaaaaaatcattacttagaaaacaaatttaaagacatggggcattatgccgctagcgatgaagtcaacgaaaaacaggttttgaaaatgtatcaagaaggctatagcgtggattctatttctaaagaatttaaagtgagtaagggcgaggtggaatttatattgaacatggcagggttaaaatgg

SEQ ID NO: 3633 - DNA (genomic), 345 bp, Helicobacter pylori; double-stranded, circular
  misc_feature (B) LOCATION 1...345
  hypothetical: NO
  anti-sense: NO
acgggagcaatcatgttatcttctaatgatttgtttatggtcgttttaggggcgattttattggtgttggtgtgcttggtggggtatttgtatcttaaagaaaaagagttttaccataaaatgaggcgtttagaaaaaactttagatgaatcctatcaagaaaattatctctattctaagcgtttgagagaattagaggggcgtttggaaggcctttctttagaaaaaagcgctaaagaggacagctcattaaaaacgactctttcgcacctttataaccagttgcaagaaatccaaaaatccatggataaagagcgcgattacttagaagaaaaaatcattact

SEQ ID NO: 3634 - DNA (genomic), 507 bp, Helicobacter pylori; double-stranded, circular
  misc_feature (B) LOCATION 1...507
  hypothetical: NO
  anti-sense: NO
atgttatcttctaatgatttgtttatggtcgttttaggggcgattttattggtgttggtgtgcttggtggggtatttgtatcttaaagaaaaagagttttaccataaaatgaggcgtttagaaaaaactttagatgaatcctatcaagaaaattatctctattctaagcgtttgagagaattagaggggcgtttggaaggcctttctttagaaaaaagcgctaaagaggacagctcattaaaaacgactctttcgcacctttataaccagttgcaagaaatccaaaaatccatggataaagagcgcgattacttagaagaaaaaatcattactttagaaaacaaatttaaagacatggggcattatgccgctagcgatgaagtcaacgaaaaacaggttttgaaaatgtatcaagaaggctatagcgtggattctatttctaaagaatttaaagtgagtaagggcgaggtggaatttatattgaacatggcagggttaaaatggtag

SEQ ID NO: 3635 - DNA (genomic), 207 bp, Helicobacter pylori; double-stranded, circular
  misc_feature (B) LOCATION 1...207
  hypothetical: NO
  anti-sense: NO
atgccgtttatcaatatcaaacttgtgccagaaaatggagggccaacaaacgagcaaaaacagcaattgattgaaggggtttcagatttgatggtgaaggtgttaaacaaaaataaggcttctattgtggtcattatagatgaggttgattctaataattatggtcttgggggcgagagcatccatcatttgaggcaaaaaaactag

SEQ ID NO: 3636 - DNA (genomic), 231 bp, Helicobacter pylori; double-stranded, circular
  misc_feature (B) LOCATION 1...231
  hypothetical: NO
  anti-sense: NO
tacgctatctcaattttaaggaataacatgccgtttatcaatatcaaacttgtgccagaaaatggagggccaacaaacgagcaaaaacagcaattgattgaaggggtttcagatttgatggtgaaggtgttaaacaaaaataaggcttctattgtggtcattatagatgaggttgattctaataattatggtcttgggggcgagagcatccatcatttgaggcaaaaaaac

SEQ ID NO: 3637 - DNA (genomic), 447 bp, Helicobacter pylori; double-stranded, circular
  misc_feature (B) LOCATION 1...447
  hypothetical: NO
  anti-sense: NO
gaaatcatgaccatcaaatttttttcgccccaataccccactgaattagaagagttttacgctgagcgcatcgctgataaccctttagggtttatccaacgcttggatcttttgcccagtattagcggatttgttcaaaaattgcgcgagcatggcggggaattttttgaaatgagaaagggtgaaaagctcattgggatctgcgggcttaatcatatcaatcaaacggaagccgagctgtgcaaattccacataaataccgcttatcaatctcaagggttgggtcaaaaactctatgagagcgtggagcgatacgcttttattaagggctatactaaaatctctctgcatgtgagcaagagtcaaatcaaggcatgcaacctctatcaaaagctgggttttacgcacatcaaagaagaggattgcgtggtggagttgggcgaagag

SEQ ID NO: 3638 - DNA (genomic), 450 bp, Helicobacter pylori; double-stranded, circular
  misc_feature (B) LOCATION 1...450
  hypothetical: NO
  anti-sense: NO
gaaatcatgaccatcaaatttttttcgccccaataccccactgaattagaagagttttacgctgagcgcatcgctgataaccctttagggtttatccaacgcttggatcttttgcccagtattagcggatttgttcaaaaattgcgcgagcatggcggggaattttttgaaatgagaaagggtgaaaagctcattgggatctgcgggcttaatcatatcaatcaaacggaagccgagctgtgcaaattccacataaataccgcttatcaatctcaagggttgggtcaaaaactctatgagagcgtggagcgatacgcttttattaagggctatactaaaatctctctgcatgtgagcaagagtcaaatcaaggcatgcaacctctatcaaaagctgggttttacgcacatcaaagaagaggattgcgtggtggagttgggcgaagaggct

SEQ ID NO: 3639 - DNA (genomic), 486 bp, Helicobacter pylori; double-stranded, circular
  misc_feature (B) LOCATION 1...486
  hypothetical: NO
  anti-sense: NO
atgaccatcaaaattttttcgccccaataccccactgaattagaagagttttacgctgagcgcatcgctgataaccctttagggtttatccaacgcttggatcttttgcccagtattagcggatttgttcaaaaattgcgcgagcatggcggggaattttttgaaatgagaaagggtgaaaagctcattgggatctgcgggcttaatcatatcaatcaaacggaagccgagctgtgcaaattccacataaataccgcttatcaatctcaagggttgggtcaaaaactctatgagagcgtggagcgatacgcttttattaagggctatactaaaatctctctgcatgtgagcaagagtcaaatcaaggcatgcaacctctatcaaaagctgggttttacgcacatcaaagaagaggattgcgtggtggagttgggcgaagaggctttgattttccctactctttttatggaaaagatcctgtcttga

SEQ ID NO: 3640 - DNA (genomic), 216 bp, Helicobacter pylori; double-stranded, circular
  misc_feature (B) LOCATION 1...216
  hypothetical: NO
  anti-sense: NO
atggggcttgttgcgagcggcattaacgatgaagagcttttaaaatggcttcaggcttttgggttaaaaatgggtctttgttttcaagtgctagatgatattatagacgttacacaagatgaaaaagaaagcggtaaaaccacgcatttagacagcgctaaaaacagctttgtgaatttattggggctaaaaaaggcagcggttacgcccaaactt

SEQ ID NO: 3641 - DNA (genomic), 912 bp, Helicobacter pylori; double-stranded, circular
  misc_feature (B) LOCATION 1...912
  hypothetical: NO
  anti-sense: NO
atgagtaaccctaatttatccttttattgtaatgagtgcgagcgttttgaaagctttttaaaaaaccattatttacaccttgaaggcttccacccttatttggaaaaagccttttttgaaatggtgcttaatgggggcaaaaggttccgccccaagctttttttagccgtgctttgctctttagtgggtaaaaaagattattctaaccaacaaacagaatattttaaaatcgctttaagcattgaatgcttgcacacttattcgctcatccatgacgatttgccttgcatggataacgctattttaagaagaaaccaccccactttacacgccaaatacgatgaaaccacagccgttttaatcggcgatgcgctcaacacctattcttttgaattgctctcaaattctttactagaaagccgtatcattgtggaattagtcaaaatcttaagcgctaatggggggattaaaggcatgattttagggcaggctttggattgctattttgaaaacacccccttaaatttagagcagctcactttcttacacgagcataaaaccgctaaattgattagcgcaagcctgattatggggcttgttgcgagcggcattaacgatgaagagcttttaaaatggcttcaggcttttgggttaaaaatgggtctttgttttcaagtgctagatgatattatagacgttacacaagatgaaaaagaaagcggtaaaaccacgcatttagacagcgctaaaaacagctttgtgaatttattggggctaaaaaaggcaagcggttacgcccaaactttaaaaacagagattttaaacgatttgaatgcattagaacctacttatctttcattgcaagaaaatttaaacgcattattgaacactctatttaaaggcaagacatga

SEQ ID NO: 3642 - DNA (genomic), 924 bp, Helicobacter pylori; double-stranded, circular
  misc_feature (B) LOCATION 1...924
  hypothetical: NO
  anti-sense: NO
gttataattctaggcatgagtaaccctaatttatccttttattgtaatgagtgcgagcgttttgaaagctttttaaaaaaccattatttacaccttgaaggcttccacccttatttggaaaaagccttttttgaaatggtgcttaatgggggcaaaaggttccgccccaagctttttttagccgtgctttgctctttagtgggtaaaaaagattattctaaccaacaaacagaatattttaaaatcgctttaagcattgaatgcttgcacacttattcgctcatccatgacgatttgccttgcatggataacgctattttaagaagaaaccaccccactttacacgccaaatacgatgaaaccacagccgttttaatcggcgatgcgctcaacacctattcttttgaattgctctcaaattctttactagaaagccgtatcattgtggaattagtcaaaatcttaagcgctaatggggggattaaaggcatgattttagggcaggctttggattgctattttgaaaacacccccttaaatttagagcagctcactttcttacacgagcataaaaccgctaaattgattagcgcaagcctgattatggggcttgttgcgagcggcattaacgatgaagagcttttaaaatggcttcaggcttttgggttaaaaatgggtctttgttttcaagtgctagatgatattatagacgttacacaagatgaaaaagaaagcggtaaaaccacgcatttagacagcgctaaaaacagctttgtgaatttattggggctaaaaaaggcaagcggttacgcccaaactttaaaaacagagattttaaacgatttgaatgcattagaacctacttatctttcattgcaagaaaatttaaacgcattattgaacactctatttaaaggcaagaca

SEQ ID NO: 3643 - DNA (genomic), 1146 bp, Helicobacter pylori; double-stranded, circular
  misc_feature (B) LOCATION 1...1146
  hypothetical: NO
  anti-sense: NO
atgaatttaaactttatgcccctattgcatgcttataaccatgtaagcattgattttcatttcaattctagcgctagggatttttgcgtgcatgaagtgcctttgtatgaatttagcaacacgggcgaacatgccgttattcaagtgagaaaaagcggtttaagcactttagaaatgcttcaaattttttctcaaattttaggggtaaaaatcgctgaattgggttatgcgggcttgaaagataaaaacgcgctgacgactcaattcatctcactccctaaaaaatacgcccctttattagaaaaaaatacgagcaactttcaagaaagaaaccttaaaatcctgtctttgaattaccatcacaataaaatcaaattagggcatttaaaggggaatcgcttttttatgcgtttcaaaaaaatgacccccctaaacgctcaaaaaacggagcaagttttagaacaaatcgcgcagtttggcatgcctaattattttggctcgcaacgcttcgggaagttcaatgacaaccataaagaggggttaaaaatcttgcaaaatgaaacgaaattcgcccaccaaaaattaaacgcttttttaatttcaagctatcaaagttatttgtttaattcgcttttaagcaagcgattagaaatcagtaaaatcattagcgcttttagcgtcaaagaaagtttagaattttttaaacaaaaaaatttaagcgtccattcaaacgccctaaaagcccttaaaaaccaagcccacccctttaaaatcttagaaggcgatgtgatgcgccattacccttatgggaagttttttgacgctttggaattagaaaaagagagcgaaaggtttttgaacaaagaagctgtgcctacggggttactggacggtaaaaaagctctttatgcaaaaaatttgagtttagaaattgaaaaaggattccagcataaccttttaagtggccatgctaaaacgctaggatccaggcggtttttttgggtgtttgtggaaaatataacttctcaatacatcaaagaaaaagcgcaatttgaattggaattttacttgcctaaagggagttatgcgagcgcgctgctcaaagaaatcaagcatgagaaaggagaaaataatgacgaattttga

SEQ ID NO: 3644 - DNA (genomic), 1158 bp, Helicobacter pylori; double-stranded, circular
  misc_feature (B) LOCATION 1...1158
  hypothetical: NO
  anti-sense: NO
ttcaaggatcaaggcatgaatttaaactttatgcccctattgcatgcttataaccatgtaagcattgattttcatttcaattctagcgctagggatttttgcgtgcatgaagtgcctttgtatgaatttagcaacacgggcgaacatgccgttattcaagtgagaaaaagcggtttaagcactttagaaatgcttcaaattttttctcaaattttaggggtaaaaatcgctgaattgggttatgcgggcttgaaagataaaaacgcgctgacgactcaattcatctcactccctaaaaaatacgcccctttattagaaaaaaatacgagcaactttcaagaaagaaaccttaaaatcctgtctttgaattaccatcacaataaaatcaaattagggcatttaaaggggaatcgcttttttatgcgtttcaaaaaaatgacccccctaaacgctcaaaaaacggagcaagttttagaacaaatcgcgcagtttggcatgcctaattattttggctcgcaacgcttcgggaagttcaatgacaaccataaagaggggttaaaaatcttgcaaaatgaaacgaaattcgcccaccaaaaattaaacgcttttttaatttcaagctatcaaagttatttgtttaattcgcttttaagcaagcgattagaaatcagtaaaatcattagcgcttttagcgtcaaagaaagtttagaattttttaaacaaaaaaatttaagcgtccattcaaacgccctaaaagcccttaaaaaccaagcccacccctttaaaatcttagaaggcgatgtgatgcgccattacccttatgggaagttttttgacgctttggaattagaaaaagagagcgaaaggtttttgaacaaagaagctgtgcctacggggttactggacggtaaaaaagctctttatgcaaaaaatttgagtttagaaattgaaaaaggattccagcataaccttttaagtggccatgctaaaacgctaggatccaggcggtttttttgggtgtttgtggaaaatataacttctcaatacatcaaagaaaaagcgcaatttgaattggaattttacttgcctaaagggagttatgcgagcgcgctgctcaaagaaatcaagcatgagaaaggagaaaataatgacgaattt

SEQ ID NO: 3645 - DNA (genomic), 876 bp, Helicobacter pylori; double-stranded, circular
  misc_feature (B) LOCATION 1...876
  hypothetical: NO
  anti-sense: NO
atgggtgtgtttttggataagagcattaaagaagtggtagatgaattgaatggacgttattttttgcctgacattcagcgtgaatacgtgtggctccaaaacgccgatggaaaaaagatagagcaactttttgactccattcttaggggctatcctatcggcttttttttattttggaaattaccaaaagaggatatagccaagagcgatgaacaagatagcgataaactcaatttccaactctatcaattcattacaaattacgatgagcgaaagcctcacaatgaaaaaatccgtattgaacaaatcaagcgtgatgatttgtatatcgtcctagatggccaacagcgtttaacctcgctttatatcgggcttaaaggcactagaacgcttaagaaaaagaatgctagatacgataaccctaacgcttatgaagagaagcgtttgtatttgaatttgaaacaccagccaaacatggacaacccagaagacaattacgaatttgaatttcatgctcaaaagcctgaaaacgataaaaaacattggtggtttaaggtgggggatattttagagtcggaaagtcatgtttggaattatgcggacgaacatggtttaaaaggtaatgaattgaaattactaggagatctacaccgtgcttttcacaccaaacaactcgtctcattttttgaagaaacagaaaaaaatcttaataaagttttaaatatctttatccgtgtcaatagtggcggggtcaagttaagctattctgatttattgatgtctattttgacagcaagcttttcaagcgatattagagaaaaaatgaatgagctagtggacgctttaaaagacaaaggcttttcaaacatggggtaa

SEQ ID NO: 3646 - DNA (genomic), 897 bp, Helicobacter pylori; double-stranded, circular
  misc_feature (B) LOCATION 1...897
  hypothetical: NO
  anti-sense: NO
ataatacaagataaggaaattcccatgggtgtgtttttggataagagcattaaagaagtggtagatgaattgaatggacgttattttttgcctgacattcagcgtgaatacgtgtggctccaaaacgccgatggaaaaaagatagagcaactttttgactccattcttaggggctatcctatcggcttttttttattttggaaattaccaaaagaggatatagccaagagcgatgaacaagatagcgataaactcaatttccaactctatcaattcattacaaattacgatgagcgaaagcctcacaatgaaaaaatccgtattgaacaaatcaagcgtgatgatttgtatatcgtcctagatggccaacagcgtttaacctcgctttatatcgggcttaaaggcactagaacgcttaagaaaaagaatgctagatacgataaccctaacgcttatgaagagaagcgtttgtatttgaatttgaaacaccagccaaacatggacaacccagaagacaattacgaatttgaatttcatgctcaaaagcctgaaaacgataaaaaacattggtggtttaaggtgggggatattttagagtcggaaagtcatgtttggaattatgcggacgaacatggtttaaaaggtaatgaattgaaattactaggagatctacaccgtgcttttcacaccaaacaactcgtctcattttttgaagaaacagaaaaaaatcttaataaagttttaaatatctttatccgtgtcaatagtggcggggtcaagttaagctattctgatttattgatgtctattttgacagcaagcttttcaagcgatattagagaaaaaatgaatgagctagtggacgctttaaaagacaaaggcttttcaaacatgggg

SEQ ID NO: 3647 - DNA (genomic), 825 bp, Helicobacter pylori; double-stranded, circular
  misc_feature (B) LOCATION 1...825
  hypothetical: NO
  anti-sense: NO
gtgctaaaaacttgtttgcttctcattggcaaagacactacttttgaattaaaaaattttaataagcaaaatatcaaagagattgaagacaattgggaaaaaattacagaaagcatttataacgctacaaaactattagaaaattttggttatgccggttatctgggttcagtttatattttatccagtttagcctatttttattttttaaaatcaaaaatgaatgagaacgataaagaacaagccctaaaatttgttcgtaacgctcaaatcacgagttatttcactccttcaacggatacaaaattaagcatcatagcccatagcatgaaggatgcgccaacctttgaatcattcaaccacaatttagccaaacaccaaacaagccctttaaaaatcactaatgatgctatagaagaaatgatgtgttctagtagccatgctcgagtctttcctatcttacaaatcttatacccaaacctgaactacaaaaccaccacttttcatatagaccatatttatccaaagtccaagtttaaaaaggaaaataaaaaattggataaagatttctatgagtgtgggaatcatttatacaacctccaacttttagaaggcacagagaaccaagccaaaaaggataaagaccctgaggtgtggctcaaagaagaatataaagataatcaacaagccatagaagagtataaaaaaagaaattatattgaccctaatttaagattagagtgggaaaatatcaaggaatttcgtgaaaaaagagaagaagctatcattgaaaaattaaaggaagtgttattgcctaagtcttaa

SEQ ID NO: 3648 - DNA (genomic), 828 bp, Helicobacter pylori; double-stranded, circular
  misc_feature (B) LOCATION 1...828
  hypothetical: NO
  anti-sense: NO
gaccaggtgctaaaaacttgtttgcttctcattggcaaagacactacttttgaattaaaaaattttaataagcaaaatatcaaagagattgaagacaattgggaaaaaattacagaaagcatttataacgctacaaaactattagaaaattttggttatgccggttatctgggttcagtttatattttatccagtttagcctatttttattttttaaaatcaaaaatgaatgagaacgataaagaacaagccctaaaatttgttcgtaacgctcaaatcacgagttatttcactccttcaacggatacaaaattaagcatcatagcccatagcatgaaggatgcgccaacctttgaatcattcaaccacaatttagccaaacaccaaacaagccctttaaaaatcactaatgatgctatagaagaaatgatgtgttctagtagccatgctcgagtctttcctatcttacaaatcttatacccaaacctgaactacaaaaccaccacttttcatatagaccatatttatccaaagtccaagtttaaaaaggaaaataaaaaattggataaagatttctatgagtgtgggaatcatttatacaacctccaacttttagaaggcacagagaaccaagccaaaaaggataaagaccctgaggtgtggctcaaagaagaatataaagataatcaacaagccatagaagagtataaaaaaagaaattatattgaccctaatttaagattagagtgggaaaatatcaaggaatttcgtgaaaaaagagaagaagctatcattgaaaaattaaaggaagtgttattgcctaagtct

SEQ ID NO: 3649 - DNA (genomic), 309 bp, Helicobacter pylori; double-stranded, circular
  misc_feature (B) LOCATION 1...309
  hypothetical: NO
  anti-sense: NO
aggcaagacatgaaaaaaattctactcaccaacgatgacggctaccatgcaaaaggcattaaagctttagaacaagctttagaaaacatggcagaaatctatgtggtcgcccccaagcatgaaaaaagtgcatgctcgcaatgcatcacgatcaccgcgcctttaagagcggagaaaattaaaggcaaagaaggccggcattacaggattgatgatggcacgccaagcgattgcgtgtatctggctattaatgagctttttaaacatgtttgttttgatttagtgatttacagggatcaatcttggctc

SEQ ID NO: 3650 - DNA (genomic), 501 bp, Helicobacter pylori; double-stranded, circular
  misc_feature (B) LOCATION 1...501
  hypothetical: NO
  anti-sense: NO
catggggcgaagatcacgatttattcgggaacggtggccggagcgattgaaggcacgattcagggtgtgccttccattgcgatttctcaaatcctttctaacaaaaacaaaaacactcccttaagttttgatctggctcaaaagatcatccaggatttagtccaaaatgttttcaccaaaggctaccctttaaagggacgcaaactcctaaacgtgaacgtccctaattgctccttacaagaatataagggcgaacgcatcacccctaagggctataggctgtataaaaaagaagtgcataaacgaacagaccccaagaatgaaagctatttttggctagggctgcaccctttaaaatggcaaaagcgcgaaaatgaagacagactctctgattttgacgctatcgcttcaaaccatgcctctatcacgcctttaaatttagacttaaccagttatgatgatctaaaaagcttggaatcttggcatgagggaatgttaaag

SEQ ID NO: 3651 - DNA (genomic), 804 bp, Helicobacter pylori; double-stranded, circular
  misc_feature (B) LOCATION 1...804
  hypothetical: NO
  anti-sense: NO
atgaaaaaaattctactcaccaacgatgacggctaccatgcaaaaggcattaaagctttagaacaagctttagaaaacatggcagaaatctatgtggtcgcccccaagcatgaaaaaagtgcatgctcgcaatgcatcacgatcaccgcgcctttaagagcggagaaaattaaaggcaaagaaggccggcattacaggattgatgatggcacgccaagcgattgcgtgtatctggctattaatgagctttttaaacatgtttgttttgatttagtgatttcagggatcaatcttggctctaacatgggcgaagacacgatttattcgggaacggtggccggagcgattgaaggcacgattcagggtgtgccttccattgcgatttctcaaatcctttctaacaaaaacaaaaacactcccttaagttttgatctggctcaaaagatcatccaggatttagtccaaaatgttttcaccaaaggctaccctttaaagggacgcaaactcctaaacgtgaacgtccctaattgctccttacaagaatataagggcgaacgcatcacccctaagggctataggctgtataaaaaagaagtgcataaacgaacagaccccaagaatgaaagctatttttggctagggctgcaccctttaaaatggcaaaagcgcgaaaatgaagacagactctctgattttgacgctatcgcttcaaaccatgcctctatcacgcctttaaatttagacttaaccagttatgatgatctaaaaagcttggaatcttggcatgagggaatgttaaagtga

SEQ ID NO: 3652 - DNA (genomic), 186 bp, Helicobacter pylori; double-stranded, circular
  misc_feature (B) LOCATION 1...186
  hypothetical: NO
  anti-sense: NO
aaacggctacgcgaaagctttttaaaagatttagaaaaccctcattttaaatctttggtgcatgatcattgcgtctctttttcgcaaggcattcaaagtttgtggcatgataaggactttttccataaaatcattagcgatgaaaaacaatgcttttttcacgctaagcccttacaccaaatccca

SEQ ID NO: 3653 - DNA (genomic), 438 bp, Helicobacter pylori; double-stranded, circular
  misc_feature (B) LOCATION 1...438
  hypothetical: NO
  anti-sense: NO
atggttatcaggcgattgtataaattttgcgctagccatgtggtgcgtaattgctcttctttaaaatgcgctcaaaatatccatgggcataattatgaagtggaagtctttattgaaaccaaccgcttggataacgcgaacatggcactagattttgggttgatgcaacaagaaatgcaaacctttatagactcctttgatcatgcccatcatttttgggataaagaaagccctgagtttcagcgttttatagaaaatcattgcgttcgttacgtgaaatgctcgtttaatttgagcgcggagagttacgccctcatgtttttatactacctgacaaaaattttacaaaaaagcgttttttctaataatgaaggggagttaaaagtctctagcgtgcgcgtgcatgagactaaaaacggctacgcgaaagctttttaa

SEQ ID NO: 3654 - DNA (genomic), 471 bp, Helicobacter pylori; double-stranded, circular
  misc_feature (B) LOCATION 1...471
  hypothetical: NO
  anti-sense: NO
gactgcccctttatcagccatgttataggcaatgaaatggttatcaggcgattgtataaattttgcgctagccatgtggtgcgtaattgctcttctttaaaatgcgctcaaaatatccatgggcataattatgaagtggaagtctttattgaaaccaaccgcttggataacgcgaacatggcactagattttgggttgatgcaacaagaaatgcaaacctttatagactcctttgatcatgcccatcatttttgggataaagaaagccctgagtttcagcgttttatagaaaatcattgcgttcgttacgtgaaatgctcgtttaatttgagcgcggagagttacgccctcatgtttttatactacctgacaaaaattttacaaaaaagcgttttttctaataatgaaggggagttaaaagtctctagcgtgcgcgtgcatgagactaaaaacggctacgcgaaagctttt

SEQ ID NO: 3655 - DNA (genomic), 603 bp, Helicobacter pylori; double-stranded, circular
  misc_feature (B) LOCATION 1...603
  hypothetical: NO
  anti-sense: NO
atggttatcaggcgattgtataaattttgcgctagccatgtggtgcgtaattgctcttctttaaaatgcgctcaaaatatccatgggcataattatgaagtggaagtctttattgaaaccaaccgcttggataacgcgaacatggcactagattttgggttgatgcaacaagaaatgcaaacctttatagactcctttgatcatgcccatcatttttgggataaagaaagccctgagtttcagcgttttatagaaaatcattgcgttcgttacgtgaaatgctcgtttaatttgagcgcggagagttacgccctcatgtttttatactacctgacaaaaattttacaaaaaagcgttttttctaataatgaaggggagttaaaagtctctagcgtgcgcgtgcatgagactaaaaacggctacgctgaaagctttttaaaagatttagaaaaccctcattttaaatctttggtgcatgatcattgcgtctctttttcgcaaggcattcaaagtttgtggcatgataaggactttttccataaaatcattagcgatgaaaaacaatgcttttttcacgctaagcccttacaccaaatcccatga

SEQ ID NO: 3656 - DNA (genomic), 231 bp, Helicobacter pylori; double-stranded, circular
  misc_feature (B) LOCATION 1...231
  hypothetical: NO
  anti-sense: NO
attgccagtatcctttcaagctttaaaaacagaaaaattgacaataaaacggcgtttttgggcgaagtgagtttgaatggcaggattttagaagcccctaatttgaacgccagattgaaagaaatggaaaattacggctttttaaaagccattttgcccaaaaaacccagtcaaaaaacttctatcaaatgctatgaagctaatgtggtgggtaagattgttgagtggatg

SEQ ID NO: 3657 - DNA (genomic), 228 bp, Helicobacter pylori; double-stranded, circular
  misc_feature (B) LOCATION 1...228
  hypothetical: NO
  anti-sense: NO
gccagtatcctttcaagctttaaaaacagaaaaattgacaataaaacggcgtttttgggcgaagtgagtttgaatggcaggattttagaagcccctaatttgaacgccagattgaaagaaatggaaaattacggctttttaaaagccattttgcccaaaaaacccagtcaaaaaacttctatcaaatgctatgaagctaatgtggtgggtaagattgttgagtggatg

SEQ ID NO: 3658 - DNA (genomic), 408 bp, Helicobacter pylori; double-stranded, circular
  misc_feature (B) LOCATION 1...408
  hypothetical: NO
  anti-sense: NO
gtgcgagagatcacttttgagctcatgcgtttggccaaaacaagagatattgctatttttatcatcggccatatcactaaagaagggagcatcgcaggccctagagtgctagagcatatggtagatagcgtgctgtattttgagggcgatcccagtagggaactaaggattttaaggagttttaaaaaccgctttggccctacgagtgaaatcggcttgtttgagatgaaagagcaaggtttggtaagcgccaaagaagcttcaagcttgtttttttctaaagaagagcctatggaagggagcgccattaccatcactttagaaggatcaagggcgttgattttagagattcaggcgttggtgagcgagtgcagttttggggcacccaaacgattaagcgaacgggtt

SEQ ID NO: 3659 - DNA (genomic), 405 bp, Helicobacter pylori; double-stranded, circular
  misc_feature (B) LOCATION 1...405
  hypothetical: NO
  anti-sense: NO
cgagagatcacttttgagctcatgcgtttggccaaaacaagagatattgctatttttatcatcggccatatcactaaagaagggagcatcgcaggccctagagtgctagagcatatggtagatagcgtgctgtattttgagggcgatcccagtagggaactaaggattttaaggagttttaaaaaccgctttggccctacgagtgaaatcggcttgtttgagatgaaagagcaaggtttggtaagcgccaaagaagcttcaagcttgtttttttctaaagaagagcctatggaagggagcgccattaccatcactttagaaggatcaagggcgttgattttagagattcaggcgttggtgagcgagtgcagttttggggcacccaaacgattaagcgaacgggtt

SEQ ID NO: 3660 - DNA (genomic), 555 bp, Helicobacter pylori; double-stranded, circular
  misc_feature (B) LOCATION 1...555
  hypothetical: NO
  anti-sense: NO
ccccacgagtttcactataaagcaaaaccacatttttatctggtctttagctgtgtgattttaaaaaagagagatattttggctaaaaaaacttctttatttgagtgtcagcattgcggttttacaagccctaaatggctaggaaagtgcgttcagtgcaacgcatgggagagctttatagaattgaaccaaacccaaaaggaagttttaaacgcacttaaaaaaccgctcccacaagtgcaaaaaagcgtttctatcgctgaaattgaacatgaagaagtcattaagttttcttccactcaaagcgagttggatattgttttaggtggggggatcgctaaaggggggttgtatttagtgggggggagtcctggggtggggaaatccactctgcttttaaaagtggcttctggcttagccaaaaaccagcaaaaggttttgtacgtgagcggggaagagagcttgagccagattaaaatgcgcgccactagattggattgcatagaagaagaattgtatttgctcaatgaatcaattgcctgtgatcaaagtcaa

SEQ ID NO: 3661 - DNA (genomic), 1371 bp, Helicobacter pylori; double-stranded, circular
  misc_feature (B) LOCATION 1...1371
  hypothetical: NO
  anti-sense: NO
gtgattttaaaaaagagagatattttggctaaaaaaacttctttatttgagtgtcagcattgcggttttacaagccctaaatggctaggaaagtgcgttcagtgcaacgcatgggagagctttatagaattgaaccaaacccaaaaggaagttttaaacgcacttaaaaaaccgctcccacaagtgcaaaaaagcgtttctatcgctgaaattgaacatgaagaagtcattaagttttcttccactcaaagcgagttggatattgttttaggtggggggatcgctaaaggggggttgtatttagtgggggggagtcctggggtggggaaatccactctgcttttaaaagtggcttctggcttagccaaaaaccagcaaaaggttttgtacgtgagcggggaagagagcttgagccagattaaaatgcgcgccactagattggattgcatagaagaagaattgtatttgctcaatgaaatcaattggcctgtgattaaagctaatatggaaagcgaaaattattttgcttgcgtgattgattccatccaaacgctttattcgccagagatttcttcagcccccggctctatttcgcaagtgcgagagatcacttttgagctcatgcgtttggccaaaacaagagatattgctatttttatcatcggccatatcactaaagaagggagcatcgcaggccctagagtgctagagcatatggtagatagcgtgctgtattttgagggcgatcccagtagggaactaaggattttaaggagttttaaaaaccgctttggccctacgagtgaaatcggcttgtttgagatgaaagagcaaggtttggtaagcgccaaagaagcttcaagcttgtttttttctaaagaagagcctatggaagggagcgccattaccatcactttagaaggatcaagggcgttgattttagagattcaggcgttggtgagcgagtgcagttttggggcgcccaaacgattagcgaacgggtttgacactaaccgccttaacatgctcatcgctttattagaaaaaaagctagaaatccccttaaaccgccatgatgtgttcattaatgtgagcggaggcattaaaattagcgagccggcttgcgatttagcggtcattgccagtatcctttcaagctttaaaaacagaaaaattgacaataaaacggcgtttttgggcgaagtgagtttgaatggcaggattttagaagcccctaatttgaacgccagattgaaagaaatggaaaattacggctttttaaaagccattttgcccaaaaaacccagtcaaaaaacttctatcaaatgctatgaagctaatgtggtgggtaagattgttgagtggatgtag

SEQ ID NO: 3662 - DNA (genomic), 210 bp, Helicobacter pylori; double-stranded, circular
  misc_feature (B) LOCATION 1...210
  hypothetical: NO
  anti-sense: NO
aattttaaggagaacactcacttgttacaacgaatttatttagacaataacgctacgactaggattgaccctaaagtcaaagaaatcatggatccttttttaagggatcattacgggaaccctagctcgttgcaccagtttggtacagaaacccacccggccattgcagaagcgctagataaactttataaaggcattacgctagggata

SEQ ID NO: 3663 - DNA (genomic), 273 bp, Helicobacter pylori; double-stranded, circular
  misc_feature (B) LOCATION 1...273
  hypothetical: NO
  anti-sense: NO
gggaatcgagtaaatcgtgtgcctaacacgactttaatcagcgtgagagggattgaaggagaggccatgctgtgggatttgaatcgctctaatatcgccgcttccacagggagcgcgtgtgcgagtgaggatttagaggctaatcctgtaatggtagcgattggggcgagtaaggaattggctcataccgctatcaggctctcgttgagccgttttaacacggaagctgaaattgacaaaacgattctattttgtatgtcccaaattggactc

SEQ ID NO: 3664 - DNA (genomic), 279 bp, Helicobacter pylori; double-stranded, circular
  misc_feature (B) LOCATION 1...279
  hypothetical: NO
  anti-sense: NO
cgcgcacaagtttcatggcctgaagtcattggggggttgtatattagaagtggggtgggattgacccctctttttcatggcggggaacatatgagtggcaggcgcagtgggactttgaatgtgccttatattgtgggcatgggcgaagcgatgaaattagccgtagagcatttagattatgaaaaagaagtggtagggaaattgcgcgacaaattagaagaagcgcttttgaaaattcctgatgtgatggtagtaggggaatcgagtaaatcgtgtgcc

SEQ ID NO: 3665 - DNA (genomic), 1164 bp, Helicobacter pylori; double-stranded, circular
  misc_feature (B) LOCATION 1...1164
  hypothetical: NO
  anti-sense: NO
ttgttacaacgaatttatttagacaataacgctacgactaggattgaccctaaagtcaaagaaatcatggatccttttttaagggatcattacgggaaccctagctcgttgcaccagtttggtacagaaacccacccggccattgcagaagcgctagataaactttataaaggcattaacgctagggatatagacgatgtgatcatcacttcttgcgcgacagagagcaataattgggtgttaaagggcgtgtattttgatgaatgtttgaaaaaaggcaaaaaccatattatcaccacggttgcagagcacccggcggtgcgatccacttgcaattttttagaaagcttgggggtggaggttacttacttgcctattaatgagcatgggagtatcaccgccgatcaagtcaaagaagcgatcacagaaaaaaccgctttagtgagcgtgatgtgggcgaataatgaaaccggtctcattttccctattgaagaaattggggctatctgtaaagaaaagggcgtgttgttccataccgatgcggtgcaagcgattggtaaaatccctgtagatgtgttaaaggcgaacgtggattttctttcttttagcgcgcacaagtttcatgggcctaaaggcattggggggttgtatattagaagtggggtgggattgacccctctttttcatggcggggaacatatgaatggcaggcgcagtgggactttgaatgtgccttatattgtgggcatgggcgaagcgatgaaattagccgtagagcatttagattatgaaaaagaagtggtagggaaattgcgcgacaaattagaagaagcgcttttgaaaattcctgatgtgatggtagtaggggatcgagtccatcgtgtgcctaacacgactttaatcagcgtgagagggattgaaggagaggccatgctgtgggatttgaatcgctctaatatcgccgcttccacagggagcgcgtgtgcgagtgaggatttagaggctaatcctgtaatggtagcgattggggcgagtaaggaattggctcataccgctatcaggctctcgttgagccgttttaacacggaagctgaaattgacaaaacgattgaagttttctctcaagcggctgtaagattgagaaacatttcaagctcttattaa

SEQ ID NO: 3666 - DNA (genomic), 1176 bp, Helicobacter pylori; double-stranded, circular
  misc_feature (B) LOCATION 1...1176
  hypothetical: NO
  anti-sense: NO
ttgttacaacgaatttatttagacaataacgctacgactaggattgaccctaaagtcaaagaaatcatggatccttttttaagggatcattacgggaaccctagctcgttgcaccagtttggtacagaaacccacccggccattgcagaagcgctagataaactttataaaggcattaacgctagggatatagacgatgtgatcatcacttcttgcgcgacagagagcaataattgggtgttaaagggcgtgtattttgatgaatgtttgaaaaaaggcaaaaaccatattatcaccacggttgcagagcacccggcggtgcgatccacttgcaattttttagaaagcttgggggtggaggttacttacttgcctattaatgagcatgggagtatcaccgccgatcaagtcaaagaagcgatcacagaaaaaaccgctttagtgagcgtgatgtgggcgaataatgaaaccggtctcattttccctattgaagaaattggggctatctgtaaagaaaagggcgtgttgttccataccgatgcggtgcaagcgattggtaaaatccctgtagatgtgttaaaggcgaacgtggattttctttcttttagcgcgcacaagtttcatgggcctaaaggcattggggggttgtatattagaagtggggtgggattgacccctctttttcatggcggggaacatatgaatggcaggcgcagtgggactttgaatgtgccttatattgtgggcatgggcgaagcgatgaaattagccgtagagcatttagattatgaaaaagaagtggtagggaaattgcgcgacaaattagaagaagcgcttttgaaaattcctgatgtgatggtagtaggggatcgagtccatcgtgtgcctaacacgactttaatcagcgtgagagggattgaaggagaggccatgctgtgggatttgaatcgctctaatatcgccgcttccacagggagcgcgtgtgcgagtgaggatttagaggctaatcctgtaatggtagcgattggggcgagtaaggaattggctcataccgctatcaggctctcgttgagccgttttaacacggaagctgaaattgacaaaacgattgaagttttctctcaagcggctgtaagattgagaaacattttcaagctcttattaaaaagaatataa

SEQ ID NO: 3667 - DNA (genomic), 939 bp, Helicobacter pylori; double-stranded, circular
  misc_feature (B) LOCATION 1...939
  hypothetical: NO
  anti-sense: NO
ttgaataatttagagcctttgggcgcggaagtgtttgtggggttagacggcattgatgcgatgatagaggagtgcgtttccaatttagtcattaacgccattgtgggcgtagccggattgaaagcgagctttaaaagcttacaaaggaacaaaaaactagccctagcgaataaagaaagtttagtgagcgcggggcatttattagacatttcacaaatcacgcccgttgatagcgagcattttggtttgtgggcgttgttgcaaaacaagactttaaagcctaaatctttaatcattagcgcgagtgggggggcttttagggacacgcccttagatcttatcgctattcaaaatgcgcaaaacgcgctcaagcaccctaattggagcatgggggataaaatcaccattgattcagcgagcatggtcaataaactttttgaaattttagaaacctattggctttttggtgcgtctttaaagattgacgcgctgattgaaagaagttctatcgtgcatgctttggtggagtttgaagacaactctgtcattgcgcatttagcgagtgcggacatgcaattacccataagctatgccattaaccctaaattagcttctttgagtgcttccattaaacccttagatttatacgctttaagcgcgattaaattcgaacccattagcgtggagcgctacactttgtggcgttataaagatttgttgttggaaaacccaaagcttggcgtggtgctgaatgcgagcaatgaagtggcgatgaagaagttcttgaatcaagaaatcgcttttggtggctttatccaaatcatctctcaagctttagaattgtatgctaaaaaatctttcaagctctctagtttagatgaagtgctagcgttagataaggaagttagggagcgttttggaagtgtagcgagagtgtag

SEQ ID NO: 3668 - DNA (genomic), 975 bp, Helicobacter pylori; double-stranded, circular
  misc_feature (B) LOCATION 1...975
  hypothetical: NO
  anti-sense: NO
cggcacccgattgaaaattcgatctgcgatcttagcgagttgaataatttaaagcctttgggcgcggaaatgtttgtggggttagacggcattgatgcgatgatagaggagtgcgtttccaatttagtcattaacgccattgtgggcgtacccggattgaaagcgagctttaaaagcttacaaaggaacaaaaaactagccctagcgaataaagaaagtttagtgagcgcggggcatttattagacatttcacaaatcacgcccgttgatagcgagcattttggtttgtgggcgttgttgcaaaacaagactttaaagcctaaatctttaatcattagcgcgagtgggggggcttttagggacacgcccttagatcttatcgctattcaaaatgcgcaaaacgcgctcaagcaccctaattggagcatgggggataaaatcaccattgattcagcgagcatggtcaataaactttttgaaattttagaaacctattggctttttggtgcgtctttaaagattgacgcgctgattgaaagaaattctatcgtgcatgctttggtggagtttgaagacaactctgtcattgcgcatttagcgagtgcggacatgcaattacccataagctatgccattaaccctaaattagcttctttgagtgcttccattaaacccttagatttatacgctttaagcgcgattaaattcgaacccattagcgtggagcgctacactttgtggcgttataaagatttgttgttggaaaacccaaagcttggcgtggtgctgaatgcgagcaatgaagtggcgatgaagaagttcttgaatcaagaaatcgcttttggtggctttatccaaatcatctctcaagctttagaattgtatgctaaaaaatctttcaagctctctagtttagatgaagtgctagcgttagataaggaagttagggagcgttttggaagtgtagcgagagtg

SEQ ID NO: 3669 - DNA (genomic), 972 bp, Helicobacter pylori; double-stranded, circular
  misc_feature (B) LOCATION 1...972
  hypothetical: NO
  anti-sense: NO
cacccgattgaaaattcgatctgcgatcttagcgagttgaataatttaaagcctttgggcgcggaaatgtttgtggggttagacggcattgatgcgatgatagaggagtgcgtttccaatttagtcattaacgccattgtgggcgtacccggattgaaagcgagctttaaaagcttacaaaggaacaaaaaactagccctagcgaataaagaaagtttagtgagcgcggggcatttattagacatttcacaaatcacgcccgttgatagcgagcattttggtttgtgggcgttgttgcaaaacaagactttaaagcctaaatctttaatcattagcgcgagtgggggggcttttagggacacgcccttagatcttatcgctattcaaaatgcgcaaaacgcgctcaagcaccctaattggagcatgggggataaaatcaccattgattcagcgagcatggtcaataaactttttgaaattttagaaacctattggctttttggtgcgtctttaaagattgacgcgctgattgaaagaaattctatcgtgcatgctttggtggagtttgaagacaactctgtcattgcgcatttagcgagtgcggacatgcaattacccataagctatgccattaaccctaaattagcttctttgagtgcttccattaaacccttagatttatacgctttaagcgcgattaaattcgaacccattagcgtggagcgctacactttgtggcgttataaagatttgttgttggaaaacccaaagcttggcgtggtgctgaatgcgagcaatgaagtggcgatgaagaagttcttgaatcaagaaatcgcttttggtggctttatccaaatcatctctcaagctttagaattgtatgctaaaaaatctttcaagctctctagtttagatgaagtgctagcgttagataaggaagttagggagcgttttggaagtgtagcgagagtg

SEQ ID NO: 3670 - DNA (genomic), 1107 bp, Helicobacter pylori; double-stranded, circular
  misc_feature (B) LOCATION 1...1107
  hypothetical: NO
  anti-sense: NO
atggttgttttaggaagcaccggctctatcgggaaaaacgcccttaaaatcgcaaaaaaatttggtgtaaaaatagaagccttaagctgtgggaaaaatatcgctttaatcaatgaacaaatcaaagttttcaaacccaaaaaagtagcgatcttagatcctaacgatttgaataatttagagcctttgggcgcggaagtgtttgtggggttagacggcattgatgcgatgatagaggagtgcgtttccaatttagtcattaacgccattgtgggcgtagccggattgaaagcgagctttaaaagcttacaaaggaacaaaaaactagccctagcgaataaagaaagtttagtgagcgcggggcatttattagacatttcacaaatcacgcccgttgatagcgagcattttggtttgtgggcgttgttgcaaaacaagactttaaagcctaaatctttaatcattagcgcgagtgggggggcttttagggacacgcccttagatcttatcgctattcaaaatgcgcaaaacgcgctcaagcaccctaattggagcatgggggataaaatcaccattgattcagcgagcatggtcaataaactttttgaaattttagaaacctattggctttttggtgcgtctttaaagattgacgcgctgattgaaagaagttctatcgtgcatgctttggtggagtttgaagacaactctgtcattgcgcatttagcgagtgcggacatgcaattacccataagctatgccattaaccctaaattagcttctttgagtgcttccattaaacccttagatttatacgctttaagcgcgattaaattcgaacccattagcgtggagcgctacactttgtggcgttataaagatttgttgttggaaaacccaaagcttggcgtggtgctgaatgcgagcaatgaagtggcgatgaagaagttcttgaatcaagaaatcgcttttggtggctttatccaaatcatctctcaagctttagaattgtatgctaaaaaatctttcaagctctctagtttagatgaagtgctagcgttagataaggaagttagggagcgttttggaagtgtagcgagagtgtag

SEQ ID NO: 3671 - DNA (genomic), 1107 bp, Helicobacter pylori; double-stranded, circular; identical to SEQ ID NO: 3670
  misc_feature (B) LOCATION 1...1107
  hypothetical: NO
  anti-sense: NO

SEQ ID NO: 3672 - DNA (genomic), 360 bp, Helicobacter pylori; double-stranded, circular
  misc_feature (B) LOCATION 1...360
  hypothetical: NO
  anti-sense: NO
agggattattacctggtggatattctcaaagaagtgcgcgaagaaatggaagctgaaaaacttaaagccaccgctaacaaatcccaaaatggggaattggcttttagggaaatgactatggttcaaaagattaaagcggtggataaagtcattgatgaaaatatccgcgctatgcttatgatggacggaggggatttggagattttagacattaaagaaagcgatgattacattgatgtgtatatccgctacatcggcggcgcatgcgatgggtgcatgagcgcgactaccgggacattatttgccattgaaaacgctttgcaggaattattggatcgcagtatcagggtgttaccgatt

SEQ ID NO: 3673 - DNA (genomic), 846 bp, Helicobacter pylori; double-stranded, circular
  misc_feature (B) LOCATION 1...846
  hypothetical: NO
  anti-sense: NO
gtggcggattacggcgcagaagcatgcggtgatgcggtgaggttgtattggcttgtagatgaaagcacggatattattattgacgcgaagtttaaaagctttggttgcgggacagcgatcgcaagctcagacatgatggtagaattgtgtttgaataaaagagtccaagatgcggtaaaaatcacgaatttagatgtggaaagaggcttaagggatgatccggacacgccggcggtgcctgggcaaaaaatgcactgctccgtgatggcgtatgatgtgattaaaaaagctgccggcatgtatttggggaaaaacgccgaagattttgaagaagaaatcatcgtgtgcgagtgcgctagggtgagtttaggcacgattaaggaagtgattaggctcaatgatttaaaaagcgttgaagaaatcactaattacaccaaagccggcgcgttttgtaaaagctgcgtgagacccggagggcatgaaaaaagggattattacctggtggatattctcaaagaagtgcgcgaagaaatggaagctgaaaaacttaaagccaccgctaacaaatcccaaaatggggaattggcttttagggaaatgactatggttcaaaagattaaagcggtggataaagtcattgatgaaaatatccgcgctatgcttatgatggacggaggggatttggagattttagacattaaagaaagcgatgattacattgatgtgtatatccgctacatgggggcatgcgatgggtgcatgagcgcgactaccgggacattatttgccattgaaaacgctttgcaggaattattggatcgcagtatcagggtgttaccgatttga

SEQ ID NO: 3674 - DNA (genomic), 555 bp, Helicobacter pylori; double-stranded, circular
  misc_feature (B) LOCATION 1...555
  hypothetical: NO
  anti-sense: NO
gtggtctttaaaattttaagtttatggttaggggtgttttgtttccttagggctacgcatttatacttaggcgaagaacccaaatataaagacaatttcacgcattttgaatacgctaaccctaacgctagaaaaggcggtgttttgagaaatgacgctatagggacttttgatagccttaacccttttgcgcttaaaggcactaaagccgaaggcttggatctcatttatgacactttaatggtgcaaagcttagacgaaccttttgcagaataccccttaatcgctaaagacgccgaagtggctaaggataacagctatgtgatttttaccctagataaaagagcgagattcagcaataacgctcccattttagcgagcgatgtgaagtttagctttgatacgataatgaaattaggatcgcccctttataggcagtattaccaagatgttaaaaaggcggttatcttagacaagcaccatgttaaattcatttycaaaaccactgaaaataaagaattgcccctcattttagggcagttgcagatcttttcc

SEQ ID NO: 3675 - DNA (genomic), 1641 bp, Helicobacter pylori; double-stranded, circular
  misc_feature (B) LOCATION 1...1641
  hypothetical: NO
  anti-sense: NO
ttgagaaatgacgctatagggacttttgatagccttaacccttttgcgcttaaaggcactaaagccgaaggcttggatctcatttatgacactttaatggtgcaaagcttagacgaaccttttgcagaataccccttaatcgctaaagacgccgaagtggctaaggataacagctatgtgatttttaccctagataaaagagcgagattcagcaataacgctcccattttagcgagcgatgtgaagtttagctttgatacgataatgaaattaggatcgcccctttataggcagtattaccaagatgttaaaaaggcggttatcttagacaagcaccatgttaaattcattttcaaaaccactgaaaataaagaattgcccctcattttagggcagttgcagatcttttccaaaaaagcgtttcaaaaggattattttgaaaaaaaccctttactcattcctgtttctagtggcccttatgtgatcgcttcttttgatgtgggcaagaaaatcacctaccaaagaaaccctaactattgggcgaaaaatttgcctagcagaaaggggcaattcaattttgatcaaatcaaatttgagtattacaaagatgaaaccgtcgccttacaggcttttttaagcggggcgtatgattggcgccttgaaagcacggctaaggtttgggctaggggctatgtggggaaagctatggataataaaaaaatcactaaatacctcatagcccacaaaatgccaagcggcatgcaagggtttttcttcaacacgcgccgagaaattttcaaggataaaagggtgcgtgaagccttattttatgcgtttgattttgaatgggcgaataaaaatttgtttttttcgcaatacaagcgcaccactagttttttcagtaactctatctatgcgtcccctcctctcccaagccctgaagaaaaagccctgctagccccttatgaaaagagtttggatgaaagggtttttaaagagccttatatcgtgcctagaaccgatgggcctgatgttttaggctataatttgagggaaaatttaaaatacgcccaaaagcttttagagagcgcgggcttttcctacaaaaacatgcgtttggtggataagaataacaagcctttcagtttcactttgcttttaaacagcccggcatttgaaagactggccctagcttttgctaaaaacttaagggtgttagggattgaaatgaaaatccaaagagtggatttaagccagtatgtcaatcggatcaaaagctatgattttgacatgattgtaggagtgattggccaatcgtctttcccaggtaatgagcagcgcttttattttggctctttgagcgcgaaagaaaaaggcacaaggaattatgcgggaatctctagtaaagcggtagatgatttgattgaaaaaatcattaacgctaaagattataaggagcaattggccgccattcaagcgatggatagggtgttgttgtgggggttttatgtgataccgcatttttatttgcctaattacaggatcgcagcgtataattacattggcatgcctgaaatcagccctagctatggattttcgccgtatttatggtggataaaaaaagaaaggggtcctaaatga

SEQ ID NO: 3676 - DNA (genomic), 1782 bp, Helicobacter pylori; double-stranded, circular
  misc_feature (B) LOCATION 1...1782
  hypothetical: NO
  anti-sense: NO
gtggtctttaaaattttaagtttatggttaggggtgttttgtttccttagggctacgcatttatacttaggcgaagaacccaaatataaagacaatttcacgcattttgaatacgctaaccctaacgctagaaaaggcggtgttttgagaaatgacgctatagggacttttgatagccttaacccttttgcgcttaaaggcactaaagccgaaggcttggatctcatttatgacactttaatggtgcaaagcttagacgaaccttttgcagaataccccttaatcgctaaagacgccgaagtggctaaggataacagctatgtgatttttaccctagataaaagagcgagattcagcaataacgctcccattttagcgagcgatgtgaagtttagctttgatacgataatgaaattaggatcgcccctttataggcagtattaccaagatgttaaaaaggcggttatcttagacaagcaccatgttaaattcattttcaaaaccactgaaaataaagaattgcccctcattttagggcagttgcagatcttttccaaaaaagcgtttcaaaaggattattttgaaaaaaaccctttactcattcctgtttctagtggcccttatgtgatcgcttcttttgatgtgggcaagaaaatcacctaccaaagaaaccctaactattgggcgaaaaatttgcctagcagaaaggggcaattcaattttgatcaaatcaaatttgagtattacaaagatgaaaccgtcgccttacaggcttttttaagcggggcgtatgattggcgccttgaaagcacggctaaggtttgggctaggggctatgtggggaaagctatggataataaaaaaatcactaaatacctcatagcccacaaaatgccaagcggcatgcaagggtttttcttcaacacgcgccgagaaattttcaaggataaaagggtgcgtgaagccttattttatgcgtttgattttgaatgggcgaataaaaatttgtttttttcgcaatacaagcgcaccactagttttttcagtaactctatctatgcgtcccctcctctcccaagccctgaagaaaaagccctgctagccccttatgaaaagagtttggatgaaagggtttttaaagagccttatatcgtgcctagaaccgatgggcctgatgttttaggctataatttgagggaaaatttaaaatacgcccaaaagcttttagagagcgcgggcttttcctacaaaaacatgcgtttggtggataagaataacaagcctttcagtttcactttgcttttaaacagcccggcatttgaaagactggccctagcttttgctaaaaacttaagggtgttagggattgaaatgaaaatccaaagagtggatttaagccagtatgtcaatcggatcaaaagctatgattttgacatgattgtaggagtgattggccaatcgtctttcccaggtaatgagcagcgcttttattttggctctttgagcgcgaaagccaaaggcacaaggaattatgcgcgaatctctagtaaagcggtagatgatttgattgaaagaatcattcacgctaaagattataaggagcaattggccgccattcaagcgatggatagggtgttgttgcgggggttttacgcgataccgcatttttatttgcctaattacaggatcgcagcgtataattacattggcatgcctgaaatcagccctagctatggattttcgccgtatttatggtggataaaaaaagaaaggggtcctaaa

SEQ ID NO: 3677 - DNA (genomic), 1935 bp, Helicobacter pylori; double-stranded, circular
  misc_feature (B) LOCATION 1...1935
  hypothetical: NO
  anti-sense: NO
atgcaagggtttttaagaagccttttttttggggttaaaaagatccctaaacgattcgctcccctagtagaaaagggcgttttaaaagaagcgcttcaatcaaacaaggatcgctatcttttaaaagaaggctttgatataggcaagattgaaagggtaaaaaataaggcgtttttcatttctttagcgaaaaattaccctaaagaccctttaatcaaaaacttacccccctcttttaaaacagacgctttgattttatgccaaatagaatgttctaaaaagcgccccatagccttttttaaagccgctcttttaaatgcggatcatgcgatgatagcctacttggctaaagaaaaaaaccagattgtggctatcccttttaaagagccttttaaaaaacctatttctttaaagcacagccaaagatccttattggaattgcccaggcattgcgtggtaaagatcgatcttaaaaagcgtgaaatcagcgaaattttgggggctttagaagaccctttaatagatgaaaacctttctttaagcctttttgacaggattaaggatttttcaaaagattgcttggatttagcgcaatattacgcgcaactcaaagcgagcgattttaaagacaggatcaattactcccacatcccttttatcaccattgaccctaaagacgctaaagattttgacgatgcgattttttacgataaagaaaaaaataccttgtttgtggcggttgctgacgtgagcgaatttgtgccgaaacattccagtttggataaagaagctaggattaggggctttagcgtgtatttccctaatagcgtctatcccatgctgcctttgagtttgtctcaaggggcatgctcattaaaagcgtttgaaaaacgcctggctttagtgtatgaaatccctttagataatttgaaaaacgcccgattatctcaaggcgttattgaagttagggctaattgcgcttatgaagaaatcaatcattttttaaatacccaacaaagctctttaggtaaagatttgcaacaaagccttttggggtttttagaggtggctttaaaattaaaaaaggagcgtttaaaaaaagggtttaatttcaattcctttgaaaacaagctgtatttgaatgaagaagggcgtatagaaaaaattgaaacagaaaaagaaagcggtgcgcacaccctcatagaagaagccatgctcttagccaaccagtctagtgctaggttattagatgggcattttcacaatagggggatataccgcacccacaaagagccgagtttggagcagcaaaaacgcctctacgacaagctttttgattatgagattgtgcgccctaaaaacatgggtttttttccttttttagagcatgccttaaagatatcccaagaaaagagtatagaaagagaagtttcacgcttaatcatcaagtctcaaaatttagccctttatagccccatgcaagaaagccattttggtttggggtttgctagctatacgcatttcacttcgcccattagacgatacagcgatctagccttacacaggcttttaaaagaattattgttccatcaggctaaaggttgctcgtatttgttagaagaaacgcctgaattatgcgctgaattgaacgctttacaaaaaaaggccgctttgattgaaagggatttcatcaagcgcaaattcgcccgcttggctttagaatttttagaaaaagagtttttgggcgtggttttagaggctaaagattgggtggtggtggggttaaaagaatttatagggcttaaagttttgatcaaaacgaacaaggtttttaagccgttagaaaaggtgcgtattaaaatcacgcatgcggatttgattttagggcaagttagaggcgaaatcacagaaaggattaaagagcatgtatcgtaa

SEQ ID NO: 3678 - DNA (genomic), 1953 bp, Helicobacter pylori; double-stranded, circular
  misc_feature (B) LOCATION 1...1953
  hypothetical: NO
  anti-sense: NO
agtcatgcgaagtgttttttgatgcaagggtttttaagaagccttttttttggggttaaaaagatccctaaacgattcgctcccctagtagaaaagggcgttttaaaagaagcgcttcaatcaaacaaggatcgctatcttttaaaagaaggctttgatataggcaagattgaaagggtaaaaaataaggcgtttttcatttctttagcgaaaaattaccctaaagaccctttaatcaaaaacttacccccctcttttaaaacagacgctttgattttatgccaaatagaatgttctaaaaagcgccccatagccttttttaaagccgctcttttaaatgcggatcatgcgatgatagcctacttggctaaagaaaaaaaccagattgtggctatcccttttaaagagccttttaaaaaacctatttctttaaagcacagccaaagatccttattggaattgcccaggcattgcgtggtaaagatcgatcttaaaaagcgtgaaatcagcgaaattttgggggctttagaagaccctttaatagatgaaaacctttctttaagcctttttgacaggattaaggatttttcaaaagattgcttggatttagcgcaatattacgcgcaactcaaagcgagcgattttaaagacaggatcaattactcccacatcccttttatcaccattgaccctaaagacgctaaagattttgacgatgcgattttttacgataaagaaaaaaataccttgtttgtggcggttgctgacgtgagcgaatttgtgccgaaacattccagtttggataaagaagctaggattaggggctttagcgtgtatttccctaatagcgtctatcccatgctgcctttgagtttgtctcaaggggcatgctcattaaaagcgtttgaaaaacgcctggctttagtgtatgaaatccctttagataatttgaaaaacgcccgattatctcaaggcgttattgaagttagggctaattgcgcttatgaagaaatcaatcattttttaaatacccaacaaagctctttaggtaaagatttgcaacaaagccttttggggtttttagaggtggctttaaaattaaaaaaggagcgtttaaaaaaagggtttaatttcaattcctttgaaaacaagctgtatttgaatgaagaagggcgtatagaaaaaattgaaacagaaaaagaaagcggtgcgcacaccctcatagaagaagccatgctcttagccaaccagtctagtgctaggttattagatgggcattttcacaatagggggatataccgcacccacaaagagccgagtttggagcagcaaaaacgcctctacgacaagctttttgattatgagattgtgcgccctaaaaacatgggtttttttccttttttagagcatgccttaaagatatcccaagaaaagagtatagaaagagaagtttcacgcttaatcatcaagtctcaaaatttagccctttatagccccatgcaagaaagccattttggtttggggtttgctagctatacgcatttcacttcgcccattagacgatacagcgatctagccttacacaggcttttaaaagaattattgttccatcaggctaaaggttgctcgtatttgttagaagaaacgcctgaattatgcgctgaattgaacgctttacaaaaaaaggccgctttgattgaaagggatttcatcaagcgcaaattcgcccgcttggctttagaatttttagaaaaagagtttttgggcgtggttttagaggctaaagattgggtggtggtggggttaaaagaatttatagggcttaaagttttgatcaaaacgaacaaggtttttaagccgttagaaaaggtgcgtattaaaatcacgcatgcggatttgattttagggcaagttagaggcgaaatcacagaaaggattaaagagcatgtatcg

SEQ ID NO: 3679 - DNA (genomic), 198 bp, Helicobacter pylori; double-stranded, circular
  misc_feature (B) LOCATION 1...198
  hypothetical: NO
  anti-sense: NO
aatcatcaaggaggaaatatgaaaaatttagtgattctaagtggggctggcatttcagcagaaagcgggattaaaacctttagggacgctggcggtttgtgggaagggcatgacatcatggaagtcgcctcgccttatggctggaaagaacccccaaaaggtgttggatttttacaaccaaaggcgccggcagctttt

SEQ ID NO: 3680 - DNA (genomic), 489 bp, Helicobacter pylori; double-stranded, circular
  misc_feature (B) LOCATION 1...489
  hypothetical: NO
  anti-sense: NO
cggaattggaaaaacactatcaagttaatatccatcacccaaaatgtagatgatttgcatgaaagggcgggttcttctcgcattttgcacttgcatggggaattgttgagcgttcgcagcgagaaagatcctaatttagtttataggtgggaaaaggacttgaatttaggcgacttggcccaagataaagcgcaattacgccctggtattgtgtggtttggcgaagaggtgcctttgcttaaagaagcggtttctttagtcaaacaagtgcaccttttaatcatcattggcacttctttgcaagtctatccggccgctagcctctacacgcatgcaaataaagacgccctcatttgttacattgaccctaaagctgaaaacgcccgtttgccccagaatgtccaatgcattaatgaaaacgcggtgcatgccatgcaagatttaatgcccaaaattcatagatatagccctctcaagaagatgttaaaa

SEQ ID NO: 3681 - DNA (genomic), 732 bp, Helicobacter pylori; double-stranded, circular
  misc_feature (B) LOCATION 1...732
  hypothetical: NO
  anti-sense: NO
atgaaaaatttagtgattctaagtggggctggcatttcagcagaaagcgggattaaaacctttagggacgctggcggtttgtgggaagggcatgacatcatggaagtcgcctcgccttatggctggaaaaagaacccgcaaaaggtgttggatttttacaaccaaaggcgccggcagctttttgaagtctatcctaacaaggctcataaggctttagcggaattggaaaaacactatcaagttaatatcatcacccaaaatgtagatgatttgcatgaaagggcgggttcttctcgcattttgcacttgcatggggaattgttgagcgttcgcagcgagaaagatcctaatttagtttataggtgggaaaaggacttgaatttaggcgacttggcccaagataaagcgcaattacgccctgatattgtgtggtttggcgaagaggtgcctttgcttaaagaagcggtttctttagtcaaacaagtgcaccttttaatcatcattggcacttctttgcaagtctatccggccgctagcctctacacgcatgcaaataaagacgccctcatttattacattgaccctaaagctaaaaacgcccgtttgccccagaatgtccaatgcattaatgaaaacgcggtgcatgccatgcaagatttaatgcccaaactcatagaaatggcctcttcaagagatgttaaaataatttttattttttcagctaacgattag

SEQ ID NO: 3682 - DNA (genomic), 180 bp, Helicobacter pylori; double-stranded, circular
  misc_feature (B) LOCATION 1...180
  hypothetical: NO
  anti-sense: NO
aagaaaaaagcaagggcgcaacaacaagaatcttttgaaagagaaaaggaacttatggaagaagaatttcaagttcaaagagaacttctagaaatctattatggttacccaacacaaaaaaataaacctggaattaaatatgatgacacaatagacatagaacccgaagatgaaaaggac

SEQ ID NO: 3683 - DNA (genomic), 198 bp, Helicobacter pylori; double-stranded, circular
  misc_feature (B) LOCATION 1...198
  hypothetical: NO
  anti-sense: NO
gaaaaggatactattactcgtaggatgaaaatcgctcataatagtcttccggaaacagataggaaagcccacatgaaaccgaagtggcgcgaactagctgacataagatctaaaatgtttgcagaaagtaaaaaacaacttaaagaaagaggcattcaactaaaagaaaaaagcaagggcgcaacaacaagaatcttt

SEQ ID NO: 3684 - DNA (genomic), 372 bp, Helicobacter pylori; double-stranded, circular
  misc_feature (B) LOCATION 1...372
  hypothetical: NO
  anti-sense: NO
atgaatacaaataatcacaacaatgagaaaaagaatactattactcgtaggatgaaaatcgctcataatagtcttccggaaacagataggaaagcccacatggaaccgaagtggcgcgaactagctgacataagatctaaaatgtttgcagaaagtaaaaaacaacttaaagaaagaggcattcaactaaaagaaaaaagcaaggcgcaacaacaagaatcttttgaaagagaaaaggaacttatggaagaagaatttcaagttcaaagagaacttctagaaatctattatggttacccaacacaaaaaaataaacctggaattaaatatgatgacacaatagacatagaacccgaagatgaaaaggactga

SEQ ID NO: 3685 - DNA (genomic), 231 bp, Helicobacter pylori; double-stranded, circular
  misc_feature (B) LOCATION 1...231
  hypothetical: NO
  anti-sense: NO
atgaaacgctttgatttacgccccttaaaagcagatatttttgaacgcttagaagaattgattgaaaaagaaatgcaacctaatgaagtcgctattttcatgtttgaagtgggggatttttctaacatccctaagagcgctgaatttatccaatctaaagggcatgagctcctcaattctttgcgtttcaatcaagcggattggacgattgtcgtgagaaaaaaggcttga

SEQ ID NO: 3686 - DNA (genomic), 228 bp, Helicobacter pylori; double-stranded, circular
  misc_feature (B) LOCATION 1...228
  hypothetical: NO
  anti-sense: NO
atgaaacgctttgatttacgccccttaaaagcagatatttttgaacgcttagaagaattgattgaaaaagaaatgcaacctaatgaagtcgctattttcatgtttgaagtgggggatttttctaacatccctaagagcgctgaatttatccaatctaaagggcatgagctcctcaattctttgcgtttcaatcaagcggattggacgattgtcgtgagaaaaaaggct

SEQ ID NO: 3687 - DNA (genomic), 1020 bp, Helicobacter pylori; double-stranded, circular
  misc_feature (B) LOCATION 1...1020
  hypothetical: NO
  anti-sense: NO
ttggacgattgtcgtgagaaaaaaggcttgattttgagcggctttaaccccttaaattcccctttaagtgcaagctcttcaattagtttgaaagaagcctattgtttagaaaaattatctcttcaaaaagggtttaagatcaattacaaattgagcgaagatagcttaaaccttttagaaaaaagcgatttgtgcgttttgtttgggggtttttcaaacgcttgtttgaatgaaaacgaacgatggattttagaaagcattaaccaatcaaaacgcccctacgccctattaagacccttacaagatacaagagacttgcaagaaaattgcctttttgcatcatatgaaatccacacggaagcggcgattttggccttgattttaaggggcattttggaacaaacttcccaattaaaagggcatgttttagaaaaaatagatgtggggtatttaagctctgaagcgaacatgagcgaagaggaattgcaagagcttattgcgcttattgttaaagcaaaaaaaagggtgcttgttttaaacagagaaatcactaagcatgctaacaacgcctttttatacacccttttaagcgggttgcaaaactacctagaaattttacacatcccttgcaacgattcaaacccaacggtcgctttttatgattctaaagatcaagaatggttgctagaaacagcctttaaagaaggcattttgccttttgaatcacaactccaatcaaaagatttagaacttttagagcgaatgggtgaggctaacggatcgtttgtctatgtttcttacaagagccttaaaacccctaaattgtctttttccaagcaatttaagatcgctaacaagattaaacattctaaagcaaagtttcaaatcttaaatcaaacgctagaatgcgagttagaagaaagcccccatttaaagggcttgattgcgattttagaaggggcgttttttgacacctacccttatatccctattttatcccactctcaaggaatttcatga

SEQ ID NO: 3688 - DNA (genomic), 1050 bp, Helicobacter pylori; double-stranded, circular
  misc_feature (B) LOCATION 1...1050
  hypothetical: NO
  anti-sense: NO
gctcctcaattctttgcgtttcaatcaagcggattggacgattgtcgtgagaaaaaaggcttgattttgagcggctttaaccccttaaattcccctttaagtgcaagctcttcaattagtttgaaagaagcctattgtttagaaaaattatctcttcaaaaagggtttaagatcaattacaaattgagcgaagatagcttaaaccttttagaaaaaagcgatttgtgcgttttgtttgggggtttttcaaacgcttgtttgaatgaaaacgaacgatggattttagaaagcattaaccaatcaaaacgcccctacgccctattaagacccttacaagatacaagagacttgcaagaaaattgcctttttgcatcatatgaaatccacacggaagcggcgattttggccttgattttaaggggcattttggaacaaacttcccaattaaaagggcatgttttagaaaaaatagatgtggggtatttaagctctgaagcgaacatgagcgaagaggaattgcaagagcttattgcgcttattgttaaagcaaaaaaaagggtgcttgttttaaacagagaaatcactaagcatgctaacaacgcctttttatacacccttttaagcgggttgcaaaactacctagaaattttacacatcccttgcaacgattcaaacccaacggtcgctttttatgattctaaagatcaagaatggttgctagaaacagcctttaaagaaggcattttgccttttgaatcacaactccaatcaaaagatttagaacttttagagcgaatgggtgaggctaacggatcgtttgtctatgtttcttacaagagccttaaaacccctaaattgtctttttccaagcaatttaagatcgctaacaagattaaacattctaaagcaaagtttcaaatcttaaatcaaacgctagaatgcgagttagaagaaagcccccatttaaagggcttgattgcgattttagaaggggcgttttttgacacctacccttatatccctattttatcccactctcaaggaatttca

SEQ ID NO: 3689 - DNA (genomic), 246 bp, Helicobacter pylori; double-stranded, circular
  misc_feature (B) LOCATION 1...246
  hypothetical: NO
  anti-sense: NO
aaaagggggttctcccttaaaaagggagtttcaaaaaaaagggttcaaaaaagaaaccccttaaaaaaagaagcccccctaaaacaaagaaagttcaaaacaaagaaagttcaaaacaaagaaagttcaaaacaagaagttcaaaaaaagaagttcaaaaaaagaaagtttaaacaaatgattcaaaacaaagagagttcaaaacaaagggtttcaaaaagaaagggttcaaaaaaagaaacccct

SEQ ID NO: 3690 - DNA (genomic), 330 bp, Helicobacter pylori; double-stranded, circular
  misc_feature (B) LOCATION 1...330
  hypothetical: NO
  anti-sense: NO
aaagatttttcatcaaccctccccaaaaagagagaatttagaaagggggttcaaaagaaaaaagatttttcatcaaacccccccaaaaaacaaagagagttaaaagaaagagagttcaaaacaaagggttcaaaaaagagagttcaaaaatttaaagaaaaagggtttaaaaaagggggttctcccttaaaaagggagtttcaaaaaaaagggtttcaaaaaagaaaccccttaaaaaaagaagcccccctaaaacaaagaaagttcaaaacaaagaaagttcaaaacaaagaaagttcaaaaaaagaagttcaaaaaaagaaagtttaa

SEQ ID NO: 3691 - DNA (genomic), 468 bp, Helicobacter pylori; double-stranded, circular
  misc_feature (B) LOCATION 1...468
  hypothetical: NO
  anti-sense: NO
ataaaatatgcgagaaaaatcatgagactcaaactaacccatatcacccatataagccataagattgccaacgactttatccattcaaaactattagaattaaaagcccctagagaattattgtgtgaattgatagaagggattttagaaaaaagcgttaaaaaagaaaacgccattgatgagcaagccagagagcttttagaagaaaacaccgatgaaatagaattcatgcggatggatgaaaggcagcttttttggatgattaaaagacagatcgctcaaaaagagggctttcatttgttttgggaagaaaggtgcagcgatttatcgcaccagattttgaataaaatcttagatgaagatttgatcatgtttagcgtgtctgaaaatttgataagaaacttgatttacaaatccattgacacctattctaaagcgtatgaaagcattgaaaatgaagtgcatgaa

SEQ ID NO: 3692 - DNA (genomic), 552 bp, Helicobacter pylori; double-stranded, circular
  misc_feature (B) LOCATION 1...552
  hypothetical: NO
  anti-sense: NO
atgagactcaaactaacccatatcacccatataagccataagattgccaacgactttatccattcaaaactattagaattaaaagcccctagagaattattgtgtgaattgatagaagggattttagaaaaaagcgttaaaaaagaaaacgccattgatgagcaagccagagagcttttagaagaaaacaccgatgaaatagaattcatgcggatggatgaaaggcagcttttttggatgattaaaagacagatcgctcaaaaagagggctttcatttgttttgggaagaaaggtgcagcgatttatcgcaccagattttgaataaaatcttagatgaagatttgatcatgtttagcgtgtctgaaaatttgataagaaacttgatttacaaatccattgacacctattctaaagcgtatgaaagcattgaaaatgaagtgcatgaaaagatcaagcattacaaacgcaaactccccgtagggagcgatgaatacgagttggtgtttgaaaggctctatgaagaagaattaagacgaaaaggctttttgtaa

SEQ ID NO: 3693 - DNA (genomic), 279 bp, Helicobacter pylori; double-stranded, circular
  misc_feature (B) LOCATION 1...279
  hypothetical: NO
  anti-sense: NO
agggtaaaggcattggatagcactctcaaacatcttgccattattatggatggtaatggcaggtgggctaaattaaagaataaagctagggcttatgggcataaaaagggcgtaaaaacccttaaagacattacgatctggtgcgctaaccataagttagaatgcttgactttatacgctttttctacggaaaattggaaacgccccaaaagtgaagtggattttttaatgaaaatgcttaaaaaataccttaaagatgagcgatccactttacttgga

SEQ ID NO: 3694 - DNA (genomic), 483 bp, Helicobacter pylori; double-stranded, circular
  misc_feature (B) LOCATION 1...483
  hypothetical: NO
  anti-sense: NO
aaatgcttaaaaaataccttaaagatgagcgatccactttacttggataataacatacgcttcagggcgataggggatttagagggcttttctaaagaactaagggacacgattttacggcttgaaaacgataccaggtattttaaggattttacgcaagttttagcccttaattacggatctaaaaacgagctttcaagggcttttaaaagcttgctagaaaacccgcctaaccatatcaataatatagaaagcttagaaaatgaaatctctcatcgtttagacacgcatgatttaccggaagtggatttgttgttgcgaacagggggggaaatgcgcttgtctaattttttattgtggcagtccagttatgcggaattgtttttcacgccgattttatggcctgatttcacccctaaagatttagaaaacatcattagcgatttttacaaaagagtgcgcaaatttggggaattaaaatgc

SEQ ID NO: 3695 - DNA (genomic), 705 bp, Helicobacter pylori; double-stranded, circular
  misc_feature (B) LOCATION 1...705
  hypothetical: NO
  anti-sense: NO
ttggatagcactctcaaacatcttgccattattatggatggtaatggcaggtgggctaaattaaagaataaagctagggcttatgggcataaaaagggcgtaaaaacccttaaagacattacgatctggtgcgctaaccataagttagaatgcttgactttatacgctttttctacggaaaattggaaacgccccaaaagtgaagtggattttttaatgaaaatgcttaaaaaataccttaaagatgagcgatccacttacttggataataacatacgcttcagggcgataggggatttagagggcttttctaaagaactaagggacacgattttacggcttgaaaacgataccaggtattttaaggattttacgcaagttttagcccttaattacggatctaaaaacgagctttcaagggcttttaaaagcttgctagaaaacccgcctaaccatatcaataatatagaaagcttagaaaatgaaatctctcatcgtttagacacgcatgatttaccggaagtggatttgttgttgcgaacagggggggaaatgcgcttgtctaattttttattgtggcagtccagttatgcggaattgtttttcacgccgattttatggcctgatttcacccctaaagatttagaaaacatcattagcgatttttacaaaagagtgcgcaaatttggggaattaaaatgctag

SEQ ID NO: 3696 - DNA (genomic), 687 bp, Helicobacter pylori; double-stranded, circular
  misc_feature (B) LOCATION 1...687
  hypothetical: NO
  anti-sense: NO
atgctagtagaaatagagaatttgactaaaacttatgggagtttaaaagcgctagacaatatcagtttgaaactacccaaacagcaatttatagggcttttagggcctaatggggcgggtaaaaccactctgttaaaaattttagccggattgaatttgaactatcaaggggaagtgaaaattttaaaccaaaagattggtatagagactaaaaaaagcgtggcgtttttaagcgatggcgattttttagatcctaaattaacgcctttaaaagcgatcgctttttataaggatttttttagcgattttgatgaatcaaaagccctaaatttgttaaaacgcttcagcgtgcctttaaaaagagagttcaaagccctttcaaaaggcatgagggaaaaattgcagctgattttaaccctatcacgaaacgcttctttgtatctttttgatgagccggtggctgggattgaccctattgcaagagaagagatttttgagttaatcgctaaggagtttagccaaaacgcaagcttgctagtctctacgcatttggtggtggatgtggaaaagtatttagacagcgcgatttttttaaaagaagctaaagtggtggcttttggggatgtgggggaattaaaaaaagggtatagcagtttggaggcagcgtataaagaaaggttgaaataa

SEQ ID NO: 3697 - DNA (genomic), 684 bp, Helicobacter pylori; double-stranded, circular
  misc_feature (B) LOCATION 1...684
  hypothetical: NO
  anti-sense: NO
atgctagtagaaatagagaatttgactaaaacttatgggagtttaaaagcgctagacaatatcagtttgaaactacccaaacagcaatttatagggcttttagggcctaatggggcgggtaaaaccactctgttaaaaattttagccggattgaatttgaactatcaaggggaagtgaaaattttaaaccaaaagattggtatagagactaaaaaaagcgtggcgtttttaagcgatggcgattttttagatcctaaattaacgcctttaaaagcgatcgctttttataaggatttttttagcgattttgatgaatcaaaagccctaaatttgttaaaacgcttcagcgtgcctttaaaaagagagttcaaagccctttcaaaaggcatgagggaaaaattgcagctgattttaaccctatcacgaaacgcttctttgtatctttttgatgagccggtggctgggattgaccctattgcaagagaagagatttttgagttaatcgctaaggagtttagccaaaacgcaagcttgctagtctctacgcatttggtggtggatgtggaaaagtatttagacagcgcgatttttttaaaagaagctaaagtggtggcttttggggatgtgggggaattaaaaaaagggtatagcagtttggaggcagcgtataaagaaaggttgaaa

SEQ ID NO: 3698 - DNA (genomic), 723 bp, Helicobacter pylori; double-stranded, circular
  misc_feature (B) LOCATION 1...723
  hypothetical: NO
  anti-sense: NO
cgatttttacaaaagagtgcgcaaatttggggaattaaaatgctagtagaaatagagaatttgactaaaacttatgggagtttaaaagcgctagacaatatcagtttgaaactacccaaacagcaatttatagggcttttagggcctaatggggcgggtaaaaccactctgttaaaaattttagccggattgaatttgaactatcaaggggaagtgaaaattttaaaccaaaagattggtatagagactaaaaaaagcgtggcgtttttaagcgatggcgattttttagatcctaaattaacgcctttaaaagcgatcgctttttataaggatttttttagcgattttgatgaatcaaaagccctaaatttgttaaaacgcttcagcgtgcctttaaaaagagagttcaaagccctttcaaaaggcatgagggaaaaattgcagctgattttaaccctatcacgaaacgcttctttgtatctttttgatgagccggtggctgggattgaccctattgcaagagaagagatttttgagttaatcgctaaggagtttagccaaaacgcaagcttgctagtctctacgcatttggtggtggatgtggaaaagtatttagacagcgcgatttttttaaaagaagctaaagtggtggcttttggggatgtgggggaattaaaaaaagggtatagcagtttggaggcagcgtataaagaaaggttgaaa

SEQ ID NO: 3699 - DNA (genomic), 579 bp, Helicobacter pylori; double-stranded, circular
  misc_feature (B) LOCATION 1...579
  hypothetical: NO
  anti-sense: NO
atggcgcttgaagtggttttatgggattttgatggcgtgatttttgacagcatgcatttaaaatatgaagggtttaaggcgttgtttcaaaagcatggcaacgatagtaaagagggtttgaaacaatttgaagtttatcactatcaaagtggggggatttcaaggaatgaaaagatccaatatttttataacgagattttaaaaacccctatcgctcaagaagaaatagatgcattagccctagagtttggcgctatcatagagcaaaagctttttgatagggggcatttgaatagcgargtgatggcgtttattgataagcattatcaaaattatattttccatatcgcttcagcggccttgcatagcgaattgcaagtgttgtgcgagtttttagggattactaagtattttaagagcgttgaagggagtccgcctgataaacccaagattatcgctaatatcattcaaaaatacgcctatgacccaagccgtatgctaatgatagcgatagcgtcaatgattatgaaagcgctaaggctaataaagtggcgtttttgggctataacagcaaggttt

SEQ ID NO: 3700 - DNA (genomic), 669 bp, Helicobacter pylori; double-stranded, circular
  misc_feature (B) LOCATION 1...669
  hypothetical: NO
  anti-sense: NO
atggcgcttgaagtggttttatgggattttgatggcgtgatttttgacagcatgcatttaaaatatgaagggtttaaggcgttgtttcaaaagcatggcaacgatagtaaagagggtttgaaacaatttgaagtttatcactatcaaagtggggggatttcaaggaatgaaaagatccaatatttttataacgagattttaaaaacccctatcgctcaagaagaaatagatgcattagccctagagtttggcgctatcatagagcaaaagctttttgatagggggcatttgaatagcgaagtgatggcgtttattgataagcattatcaaaattatattttccatatcgcttcagcggccttgcatagcgaattgcaagtgttgtgcgagtttttagggattactaagtattttaagagcgttgaagggagtccgcctgataaacccaagattatcgctaatatcattcaaaaatacgcctatgacccaagccgtatgctaatgataggcgatagcgtcaatgattatgaaagcgctaaggctaataaagtggcgtttttgggctataacagcaaggttttgaaaaatttagtggggcaagatggctatcaagggaagtatttggagagctttaaggggtttgatttacaaaacttcgcaaaagagtaa

SEQ ID NO: 3701 - DNA (genomic), 687 bp, Helicobacter pylori; double-stranded, circular
  misc_feature (B) LOCATION 1...687
  hypothetical: NO
  anti-sense: NO
gcctataaaaaaggggaaatcatggcgcttgaagtggttttatgggattttgatggcgtgatttttgacagcatgcatttaaaatatgaagggtttaaggcgttgtttcaaaagcatggcaacgatagtaaagagggtttgaaacaatttgaagtttatcactatcaaagtggggggatttcaaggaatgaaaagatccaatatttttataacgagattttaaaaacccctatcgctcaagaagaaatagatgcattagccctagagtttggcgctatcatagagcaaaagctttttgatagggggcatttgaatagcgaagtgatggcgtttattgataagcattatcaaaattatattttccatatcgcttcagcggccttgcatagcgaattgcaagtgttgtgcgagtttttagggattactaagtattttaagagcgttgaagggagtccgcctgataaacccaagattatcgctaatatcattcaaaaatacgcctatgacccaagccgtatgctaatgataggcgatagcgtcaatgattatgaaagcgctaaggctaataaagtggcgtttttgggctataacagcaaggttttgaaaaatttagtggggcaagatggctatcaagggaagtatttggagagctttaaggggtttgatttacaaaacttcgcaaaagag

SEQ ID NO: 3702 - DNA (genomic), 231 bp, Helicobacter pylori; double-stranded, circular
  misc_feature (B) LOCATION 1...231
  hypothetical: NO
  anti-sense: NO
atgttccatgaatttagagacgaaatcagcgtgttaaaagcgaataatccgcattttgataagatttttgagaaacacaaccagcttgatgatgacatcaaaaccgctgagcaacaaaacgctagcgacgctgaaatcagccacatgaaaaaacaaaaattaaaattaaaagatgaaatccacagcatgatcatagaatatagagaaaagcaaaaatctgaacgcgcttaa

SEQ ID NO: 3703 - DNA (genomic), 276 bp, Helicobacter pylori; double-stranded, circular
  misc_feature (B) LOCATION 1...276
  hypothetical: NO
  anti-sense: NO
aaagatagtttattatactttaaacatccaaaattaaaggagaaaaccatgttccatgaatttagagacgaaatcagcgtgttaaaagcgaataatccgcattttgataagatttttgagaaacacaaccagcttgatgatgacatcaaaaccgctgagcaacaaaacgctagcgacgctgaaatcagccacatgaaaaaacaaaaattaaaattaaaagatgaaatccacagcatgatcatagaatatagagaaaagcaaaaatctgaacgcgct

SEQ ID NO: 3704 - DNA (genomic), 258 bp, Helicobacter pylori; double-stranded, circular
  misc_feature (B) LOCATION 1...258
  hypothetical: NO
  anti-sense: NO
aaccttgcatgcggtgtatcaattagatcaatgaaaaatttctacgactggatcaaggaatttgtgcgcgatcagggggagtttatcgtccaacaaagcgggtggttggaattagagcgatcaagctatgcaaaactcatcgcgcaaaccatctcgcatgtgcttaatggcggatcgttgttagtgagcgcggattcttctagacgctggtttttaaactacattctttctaatctcaaccctaaagatttaaaagag

SEQ ID NO: 3705 - DNA (genomic), 261 bp, Helicobacter pylori; double-stranded, circular
  misc_feature (B) LOCATION 1...261
  hypothetical: NO
  anti-sense: NO
aaccttgcatgcggtgtatcaattagatcaatgaaaaatttctacgactggatcaaggaatttgtgcgcgatcagggggagtttatcgtccaacaaagcgggtggttggaattagagcgatcaagctatgcaaaactcatcgcgcaaaccatctcgcatgtgcttaatggcggatcgttgttagtgagcgcggattcttctagacgctggtttttaaactacattctttctaatctcaaccctaaagatttaaaagagcgc

SEQ ID NO: 3706 - DNA (genomic), 510 bp, Helicobacter pylori; double-stranded, circular
  misc_feature (B) LOCATION 1...510
  hypothetical: NO
  anti-sense: NO
gtgcgcgatcagggggagtttatcgcccaacaaagcgggtggttggaattagagcgatcaagctatgcaaaactcatcgcgcaaaccatctcgcatgtgcttaatggcggatcgttgttagtgagcgcggattcttctagacgctggtttttaaactacattctttctaatctcaaccctaaagatttaaaagagcgccccttattgtccgtcattgattttaacgcttcttctttctaccctaaaaacgatgcgaatctctctctagccaccatagaattgacttatcaaaaccccatgttttggcatgttgggagggttgaaaatgaaggcttgaaaaccttactattgagtaaaatccctagttttctatggctttttgaagagcttaaagaggattgcttgcttttaaaagagcatgatagtttgttagattataaattattgcaactcttcaaactctttgaaaacgcgctttttagcgcgctatacaataaggttgctttgtga

SEQ ID NO: 3707 - DNA (genomic), 225 bp, Helicobacter pylori; double-stranded, circular
  misc_feature (B) LOCATION 1...225
  hypothetical: NO
  anti-sense: NO
atgctacataaaaaatatcgtcctaatgttgcggccattatcatgtcgccagactaccctaacacatgcgaagtttttatcgctgagcgcatagacattgaaggggcgtggcagttcccccaaggaggcattgatgagggagagacccctttagaagcactctatagagaattactagaagaaattggcacgaatgaaatagagattttggcgcaataccctaga

SEQ ID NO: 3708 - DNA (genomic), 474 bp, Helicobacter pylori; double-stranded, circular
  misc_feature (B) LOCATION 1...474
  hypothetical: NO
  anti-sense: NO
atgctacataaaaaatatcgtcctaatgttgcggccattatcatgtcgccagactaccctaacacatgcgaagtttttatcgctgagcgcatagacattgaaggggcgtggcagttcccccaaggaggcattgatgagggagagacccctttagaagcactctatagagaattactagaagaaattggcacgaatgaaatagagattttggcgcaataccctagatggatcgcctatgatttcccaagcaacatggagcataaattctattcgtttgacgggcaaaagcagcgttattttttagtgcgcctaaagcatgttaacaacattgatttgaacaaacacacgccagaatttagatcctatcaattcatccagcttaaggatttgcttaaaaaaatcgttcccttcaaacgccaagtgtaccgccaagtcatcgcttattttagaaaagaggggtatttggggtgttaa

SEQ ID NO: 3709 - DNA (genomic), 477 bp, Helicobacter pylori; double-stranded, circular
  misc_feature (B) LOCATION 1...477
  hypothetical: NO
  anti-sense: NO
agacctatgctacataaaaaatatcgtcctaatgttgcggccattatcatgtcgccagactaccctaacacatgcgaagtttttatcgctgagcgcatagacattgaaggggcgtggcagttcccccaaggaggcattgatgagggagagacccctttagaagcactctatagagaattactagaagaaattggcacgaatgaaatagagattttggcgcaataccctagatggatcgcctatgatttcccaagcaacatggagcataaattctattcgtttgacgggcaaaagcagcgttattttttagtgcgcctaaagcatgttaacaacattgatttgaacaaacacacgccagaatttagatcctatcaattcatccagcttaaggatttgcttaaaaaaatcgttcccttcaaacgccaagtgtaccgccaagtcatcgcttattttagaaaagaggggtatttggggtgt

SEQ ID NO: 3710 - DNA (genomic), 537 bp, Helicobacter pylori; double-stranded, circular
  misc_feature (B) LOCATION 1...537
  hypothetical: NO
  anti-sense: NO
gacgacaggtttttattcaatgcgcgctattttaggaattacacccaatacgtcaaacgctatgatttgaggaatcaaaatatctatggttttgaatttttaagctccagtagggacactttacaaaaatacttccatcttaagtctaatattgacaacgggcattacattgactttttatacatgaacgatttggactatgtgcgttttgaaaaggttaataagcgcatcacagacgccacgcacatgtctagggcgaattactatttgcaaacagaaaacaattattacggcttgaatatcaagtattttttaaacctgaataaaatcaataacaaccgcactttccaatctgtccctaatttgcaataccataaatatttaaattctttgtattttaggaatttattgtattcagtggattaccagtttagaaacaccgcgagagagattggctatggctatgtgcaaaacgctttgaatgtgccggtgggtttgcaattttctttgtttaagaagtatttgtctttagggctt

SEQ ID NO: 3711 - DNA (genomic), 960 bp, Helicobacter pylori; double-stranded, circular
  misc_feature (B) LOCATION 1...960
  hypothetical: NO
  anti-sense: NO
aatgatctccaattgtttaatgtggctttaatgcaatctaaaaattctttcgtgcctacgatccctaatgaatcaagagaatttggaaactttgtgtcttcgaatttaaccatgtatgttaatacggatttggctagagaatacaacaagcttttccacacgatccaactggaagcgattttcaacatcccttattacacctttaaaaacggcttattttctcaaaacatgtatgctttaagcacgcaagctttaaacagctacacttcacctttattgagagattacgattatcaagggcgcttgtatgactccgtgtggaatcctaatagcattttacctagcgatgcgagcaataaaacggtgaatttaaccctaacgcaatacctttatggcttaggggggcaagagttgttgtattttaaaatatcgcaactcatcaatcttgacgataaagtttcgccctttaaaatgcccctagaaagcaagatcgggttttcgcccttaacgggattgaacatctttgggaatgttttttattcgttttatcaaaaccgcttagaagaaatctctgtgaacgccaattaccaacgcaaatttttaagctttaacctctcttattttttaaggaacaattttagcagtgggattaatagcattgtagaaaatcctgcggattatttaaaggcgggttttagcaatgactttggttacttttccatgagcgcggatgtgggttatgatattagaaataacgtggttttgaattggaatgtggggatttataaaaaaatccgttgttttgggattggctttcaattcgtcaatcaaagacgccctatcctcaccggcgatcccaaccaacctataagagtgtttgaaaataactatgttaagctagaattagacttttcaccgatcactaaaaccaatgtaacttaccgctctttacagcgtaag

SEQ ID NO: 3712 - DNA (genomic), 1527 bp, Helicobacter pylori; double-stranded, circular
  misc_feature (B) LOCATION 1...1527
  hypothetical: NO
  anti-sense: NO
ttgaagcgcgctacatcaactctaagacgcaggtttttattcaatgcgcgctattttaggaattacacccaatacgtcaaacgctatgatttgaggaatcaaaatatctatggttttgaatttttaagctccagtagggacactttacaaaaatacttccatcttaagtctaatattgacaacgggcattacattgactttttatacatgaacgatttggactatgtgcgttttgaaaaggttaataagcgcatcacagacgccacgcacatgtctagggcgaattactatttgcaaacagaaaacaattattacggcttgaatatcaagtattttttaaacctgaataaaatcaataacaaccgcactttccaatctgtccctaatttgcaataccataaatatttaaattctttgtattttaggaatttattgtattcagtggattaccagtttagaaacaccgcgagagagattggctatggctatgtgcaaaacgctttgaatgtgccggtgggtttgcaattttctttgtttaagaagtatttgtctttagggctttggaatgatctccaattgtctaatgtggctttaatgcaatctaaaaattccttcgtgcctacgatccctaatgaatcaagagaatttggaaactttgtgtcttcgaatttttccatgtatgtgaatacggatttggctagagaatacaacaagcttttccacacgatccaactggaagcgattttcaacatcccttattacacctttaaaaacggcttattttctcaaaacatgtatgctttaagcacgcaagctttaaacagctacacttcacctttattgagagattacgattatcaagggcgcttgtatgactccgtgtggaatcctaatagcattttacctagcgatgcgagcaataaaacggtgaatttaaccctaacgcaatacctttatggcttaggggggcaagagttgttgtattttaaaatatcgcaactcatcaatcttgacgataaagtttcgccctttaaaatgcccctagaaagcaagatcgggttttcgcccttaacgggattgaacatctttgggaatgttttttattcgttttatcaaaaccgcttagaagaaatctctgtgaacgccaattaccaacgcaaatttttaagctttaacctctcttattttttaaggaacaattttagcagtgggattaatagcattgtagaaaatcctgcggattatttaaaggcgggttttagcaatgactttggttacttttccatgagcgcggatgtgggttatgatattagaaataacgtggttttgaattggaatgtggggatttataaaaaaatccgttgttttgggattggctttcaattcgtcaatcaaagacgccctatcctcaccggcgatcccaaccaacctataagagtgtttgaaaataactatgttaagctagaattagacttttcaccgatcactaaaaccaatgtaacttaccgctctttacagcgtaagtaa

SEQ ID NO: 3713 - DNA (genomic), 462 bp, Helicobacter pylori; double-stranded, circular
  misc_feature (B) LOCATION 1...462
  hypothetical: NO
  anti-sense: NO
atggctgtttcttctatcaatcagtttgattctaacctctatgggcttttaaacgctaaaagcgctcctaaagaagacctagctcctattgaaggcgcagaaaaaatagagcgagaaaaaaaggacgctccaacagaaaacctcccctttaaccctgacaagcgagagacttacggctttttggttttagaattgatgagcgatagagagtatgaggcttttttaagggctacggccggaatggatgagagccaaaaacgccttgccgcccagtcgctttatagcttgacggatttttataacgggaaattctctaaagaagtggaaaacgcccccaagcaaccggtgaatggcttgcacaaaaaagcctttcaaacctttaacgccaccaaccataacgcttttttgcaacgctaccaaaacgcttacaacaacccttcgtctatggatgtggttctttga

SEQ ID NO: 3714 - DNA (genomic), 468 bp, Helicobacter pylori; double-stranded, circular
  misc_feature (B) LOCATION 1...468
  hypothetical: NO
  anti-sense: NO
gaaattcacttggctgtttcttcaatcaatcattgtgattcgaccctctatgggcttttaaacgctaaaagcgctcctaaagaagacctagctcctattgaaggcgcagaaaaaatagagcgagaaaaaaaggacgctccaacagaaaacctcccctttaaccctgacaagcgagagacttacggctttttggttttagaattgatgagcgatagagagtatgaggcttttttaagggctacggccggaatggatgagagccaaaaacgccttgccgcccagtcgctttatagcttgacggatttttataacgggaaattctctaaagaagtggaaaacgcccccaagcaaccggtgaatggcttgcacaaaaaagcctttcaaacctttaacgccaccaaccataacgcttttttgcaacgctaccaaaacgcttacaacaacccttcgtctatggatgtggttctt

SEQ ID NO: 3715 - DNA (genomic), 339 bp, Helicobacter pylori; double-stranded, circular
  misc_feature (B) LOCATION 1...339
  hypothetical: NO
  anti-sense: NO
atgcttgaagattatgcgatcagtttagaagaagtcaatttcaatgattttattgtcgtagatgtgcgcgagttggacgaatatgaagaattgcatttgcctaacgctacgctcattagcgtcaatgaccaagaaaagcttgctgattttttatctcagcacaaagatcaaaaagtgttgctccattgtagggctggtcgcagggctttagacgcggctaaaagcatgcacgaattaggctatacgccctattatttagagggcaatgtctatgattttgaaaaatacggctttagaatggtctatgatgacacctctttgagcgataaaaaaaactag

SEQ ID NO: 3716 - DNA (genomic), 351 bp, Helicobacter pylori; double-stranded, circular
  misc_feature (B) LOCATION 1...351
  hypothetical: NO
  anti-sense: NO
aaattaaggataaacatgcttgaagattatgcgatcagtttagaagaagtcaatttcaatgattttattgtcgtagatgtgcgcgagttggacgaatatgaagaattgcatttgcctaacgctacgctcattagcgtcaatgaccaagaaaagcttgctgattttttatctcagcacaaagatcaaaaagtgttgctccattgtagggctggtcgcagggctttagacgcggctaaaagcatgcacgaattaggctatacgccctattatttagagggcaatgtctatgattttgaaaaatacggctttagaatggtctatgatgacacctctttgagcgataaaaaaaac

SEQ ID NO: 3717 - DNA (genomic), 249 bp, Helicobacter pylori; double-stranded, circular
  misc_feature (B) LOCATION 1...249
  hypothetical: NO
  anti-sense: NO
atggggttagtcagccaatataaagaatgtaaaaaagcgcatgcccttaaaagatcgctcaataaaaacgccaccaataaactatcgattaaaaacgctaagatgcgccaatacaaggggcataaacgcattttttcacgcacaagaagcgtttctatgatttcagtttcttctttttctaaatttggagaacgcattcaaaacaaacaagacaaacccccttcatttgtcttaaactttaacctttaa

SEQ ID NO: 3718 - DNA (genomic), 246 bp, Helicobacter pylori; double-stranded, circular
  misc_feature (B) LOCATION 1...246
  hypothetical: NO
  anti-sense: NO
atggggttagtcagccaatataaagaatgtaaaaaagcgcatgcccttaaaagatcgctcaataaaaacgccaccaataaactatcgattaaaaacgctaagatgcgccaatacaaggggcataaacgcattttttcacgcacaagaagcgtttctatgatttcagtttcttctttttctaaatttggagaacgcattcaaaacaaacaagacaaacccccttcatttgtcttaaactttaacctt

SEQ ID NO: 3719 - DNA (genomic), 180 bp, Helicobacter pylori; double-stranded, circular
  misc_feature (B) LOCATION 1...180
  hypothetical: NO
  anti-sense: NO
atggcggttgtaattaaagtcgttaatggcaaaatacaggaatatgagaatggtaactataaaagaacttatgatagtaatatcgtagctgcagatactgatgggcatattgttgctgctgttactgcaaagggtaaagtggaagaatataagaatggtattcataaaagaacctactag

SEQ ID NO: 3720 - DNA (genomic), 234 bp, Helicobacter pylori; double-stranded, circular
  misc_feature (B) LOCATION 1...234
  hypothetical: NO
  anti-sense: NO
actagactggtagtttggcgttgggtatatcacaatttatattttaggagatttataatggcggttgtaattaaagtcgttaatggcaaaatacaagaatatgagaatggtaactataaaagaacttatgatagtaatatcgtagctgcagatactgatgggcatattgttgctgctgttactgcaaagggtaaagtggaagaatataagaatggtattcataaaagaacctac

SEQ ID NO: 3721 - DNA (genomic), 237 bp, Helicobacter pylori; double-stranded, circular
  misc_feature (B) LOCATION 1...237
  hypothetical: NO
  anti-sense: NO
aaaggatttttcatcaaccctccccaaaaaagagagaatttaagaaagggggttcaaaagaaaaaagatttttcatcaaacccccccaaaaaacaaagagagttaaaagaaagagagttcaaaacaaagggttcaaaaaagagagttcaaaaatttaaagaaaaagggtttaaaaaagggggttctcccttaaaaagggagtttcaaaaaaaagggttcaaaaaagaaaccccttaa

SEQ ID NO: 3722 - DNA (genomic), 234 bp, Helicobacter pylori; double-stranded, circular
  misc_feature (B) LOCATION 1...234
  hypothetical: NO
  anti-sense: NO
aaaggatttttcatcaaccctccccaaaaaagagagaatttaagaaagggggttcaaaagaaaaaagatttttcatcaaacccccccaaaaaacaaagagagttaaaagaaagagagttcaaaacaaagggttcaaaaaagagagttcaaaaatttaaagaaaaagggtttaaaaaagggggttctcccttaaaaagggagtttcaaaaaaaagggttcaaaaaagaaacccct

SEQ ID NO: 3723 - DNA (genomic), 465 bp, Helicobacter pylori; double-stranded, circular
  misc_feature (B) LOCATION 1...465
  hypothetical: NO
  anti-sense: NO
gtgtggtatgaggtcaagcacttcacgttcaatgaaacaagaggcgcgtttgataattttgatggcaaaattgatctagagcctaacactaaagtgctcagcgtttttgaaggcaatattgatttgaaaagcgtcaatactagggatagaaaaagagataaccacctaaaaacagcggatttttttgatgtagtaaaataccccaaagggagctttaaaatgaccaaatacgaagatggtaaaatccatggggatttgactcttcgtggcgtaaccaaacctgtcgtattggaagccaaaatccaagcccccttacaaaaccccatgaataaaaaagaattcatggtgttacaagctgaaggtaaaatcaaccgcaaggattttggtatcggcaaaacctttagcaatgctgtcgttggagatgaggtaaagattgagatcaaactagaagcttacgctcaataa

SEQ ID NO: 3724 - DNA (genomic), 510 bp, Helicobacter pylori; double-stranded, circular
  misc_feature (B) LOCATION 1...510
  hypothetical: NO
  anti-sense: NO
ttggcgtgggcgacaccttatacgattgataaggcaaactctagcgtgtggtatgaggtcaagcacttcacgttcaatgaaacaagaggcgcgtttgataattttgatggcaaaattgatctagagcctaacactaaagtgctcagcgtttttgaaggcaatattgatttgaaaagcgtcaatactagggatagaaaaagagataaccacctaaaaacagcggatttttttgatgtagtaaaataccccaaagggagctttaaaatgaccaaatacgaagatggtaaaatccatggggatttgactcttcgtggcgtaaccaaacctgtcgtattggaagccaaaatccaagcccccttacaaaaccccatgaataaaaaagaattcatggtgttacaagctgaaggtaaaatcaaccgcaaggattttggtatcggcaaaacctttagcaatgctgtcgttggagatgaggtaaagattgagatcaaactagaagcttacgctcaataa

SEQ ID NO: 3725 - DNA (genomic), 540 bp, Helicobacter pylori; double-stranded, circular
  misc_feature (B) LOCATION 1...540
  hypothetical: NO
  anti-sense: NO
cgaactttaatagtcaccgttcgggcgtctgtttggcgtgggcgacaccttatacgattgtataaggcaaactctagcgtgtggtttgaggtcaagcacttcacgttcaatgaaacaagaggcgcgtttgataattttgatggcaaaattgatctagagcctaacactaaagtgctcagcgtttttgaaggcaatattgatgtgaaaagcgtcaatactagggatagaaaaagagataaccacctaaaaacagcggatttttttgatgtagtaaaataccccaaagggagctttaaaatgaccaaatacgaagatggtaaaatccatggggatttgactcttcgtggcgtaaccaaacctgtcgtattggaagccaaaatccaagcccccttacaaaaccccatgaataaaaaagaattcatggtgttacaagctgaaggtaaaatcaaccgcaaggattttggtatcggcaaaacctttagcaatgctgtcgttggagatgaggtaaagattgagatcaaactagaagcttacgctcaa

SEQ ID NO: 3726 - DNA (genomic), 420 bp, Helicobacter pylori; double-stranded, circular
  misc_feature (B) LOCATION 1...420
  hypothetical: NO
  anti-sense: NO
ttgaataacgagatgagtatccataaccattacattagagagtttcaaatcactcaaaaagaattgcaaaacgcgtgccccactctagcgaataaatcttatacaagctacatgctcgctgaagggtttaaaggttctatcaaagaagttgcggtggctgttctagcttgtggctggagctatttagtgatcgcgcaaaatttgagccaaatccccaacgctttagaagatgccttttatgggcatttgattaagggctatagttccaaagaatttcaagcgtgcgtaacttggaacattaatttgcttgattccttcgccctcgctttttcaaaacaagaaattgaaaaattaaaggagatttttatcgctacaagcgaatacgagtaccagttttgggatatggcgtatcaaagttga

SEQ ID NO: 3727 - DNA (genomic), 591 bp, Helicobacter pylori; double-stranded, circular
  misc_feature (B) LOCATION 1...591
  hypothetical: NO
  anti-sense: NO
atgatcttaaaaaacgctatcgctctcacaggggggataggcactggtaaaagcaccacccttaaaatattagaatcgcaaggctataagatcctagatgcggataagatcgcccaccaattattgcaagagcatcggctagaaatcgcccaacgttttggatcagatattttagaaaaagatattttaaacagaaaaaaacttggcgcgatcgtgtttcaaaacgctaatgaattaaaatggctagaggattttttgcaccccttaatccgtgaatgcatgcttaaaaaagcctgtgaattagagaaaaatcatcaagcgtattttttagacatccctttgttttttgaagtggggggtaaaaaacgctatcctgtgagtagggtggtgttaatctatgcgccaagagctttacaaattgagcgccttttagagcgagacaaactcaaagaagctgaaattttgcagcgtttagcttgtcaaatggatatagagcaaaaacgagccatgagcgattacattatagacaacagctccagtttgaaagatttaaataagcaggttgaacgctttttaaaaacgctcttataa

SEQ ID NO: 3728 - DNA (genomic), 675 bp, Helicobacter pylori; double-stranded, circular
  misc_feature (B) LOCATION 1...675
  hypothetical: NO
  anti-sense: NO
gatactataacgaagacattcatagggccgcattcgctttgcctaaaaatttacaagaagtctttaaagacaatatcaaatcttaaaatgatcttaaaaaacgctatcgctctcacaggggggataggcactggtaaaagcaccacccttaaaatattagaatcgcaaggctataagatcctagatgcggataagatcgcccaccaattattgcaagagcatcggctagaaatcgcccaacgttttggatcagatattttagaaaaagatattttaaacagaaaaaaacttggcgcgatcgtgtttcaaaacgctaatgaattaaaatggctagaggattttttgcaccccttaatccgtgaatgcatgcttaaaaaagcctgtgaattagagaaaaatcatcaagcgtattttttagacatccctttgttttttgaagtggggggtaaaaaacgctatcctgtgagtagggtggtgttaatctatgcgccaagagctttacaaattgagcgccttttagagcgagacaaactcaaagaagctgaaattttgcagcgtttagcttgtcaaatggatatagagcaaaaacgagccatgagcgattacattatagacaacagctccagtttgaaagatttaaataagcaggttgaacgctttttaaaaacgctctta

SEQ ID NO: 3729 - DNA (genomic), 303 bp, Helicobacter pylori; double-stranded, circular
  misc_feature (B) LOCATION 1...303
  hypothetical: NO
  anti-sense: NO
attttttgtaaggctaaacacatgatcactttaaaacaagccctttctttatcccaagatgaattagaaacccttaaaaacgaaattgacgctaaggttagagcttcagatttgaacgcttacattaaagcccctagccttaatggcgctagcgctaaaggggtgccaatccttattaaagacaatatcagcgttaaagggtgggaaatcacttgctccagtaagattttagaaggctatgttgccccttatcatgcgagcgcgattgaaaacttgcaccaaaacggcatggcagggtttggg

SEQ ID NO: 3730 - DNA (genomic), 324 bp, Helicobacter pylori; double-stranded, circular
  misc_feature (B) LOCATION 1...324
  hypothetical: NO
  anti-sense: NO
atgatcactttaaaacaagccctttctttatcccaagatgaattagaaacccttaaaaacgaaattgacgctaaggttagagcttcagatttgaacgcttacattaaagcccctagccttaatggcgctagcgctaaaggggtgccaatccttattaaagacaatatcagcgttaaagggtgggaaatcacttgctccagtaagattttagaaggctatgttgccccttatcatgcgagcgcgattgaaaacttgcaccaaaacggcatggcagggtttgggctttctaacatggacgaatttgcgaattggaagcaccactga

SEQ ID NO: 3731 - DNA (genomic), 741 bp, Helicobacter pylori; double-stranded, circular
  misc_feature (B) LOCATION 1...741
  hypothetical: NO
  anti-sense: NO
atgatcactttaaaacaagccctttctttatcccaagatgaattagaaacccttaaaaacgaaattgacgctaaggttagagcttcagatttgaacgcttacattaaagcccctagccttaatggcgctagcgctaaaggggtgccaatccttattaaagacaatatcagcgttaaagggtgggaaatcacttgctccagtaagattttagaaggctatgttgccccttatcatgcgagcgcgattgaaaacttgcaccaaaacggcatggcagggtttgggctttctaacatggacgagtttgcgatgggaagcaccacggagtctagttgctatgggatcactaaaaacccacgagacaaaaacatagtgcctggagggagcagtggagggagcgcagcagccgtggcgggtggcttaacggtggcggctttagggagcgatacgggcgggtctatcaggcagccggcgagctattgcgggtgcgtggggttaaagcccacttatgggagggtgagccgttatggtgtgatcgcttatcgctctagtttcgatcaaatccggcctatcacgcaaaatgtagaagacgcttctattttatttgacgctattagcgggtatgatagcaaggattccacgagcgctaatctcaaacccacgcacacctttataaaccttatcagagacaaacgctttaaaatcgcgatcttaagggatcacatcaatgacgcgagcaatgat

SEQ ID NO: 3732 - DNA (genomic), 408 bp, Helicobacter pylori; double-stranded, circular
  misc_feature (B) LOCATION 1...408
  hypothetical: NO
  anti-sense: NO
gaattgtctaatgaaaatttaatcgctttttctaagaaatttgacactttacccattaaactggtgagctttgaattgaaaaaagaaatcagcgtgcataattgcagggagtgttattttcaagcgatttccaacagctcgtgggctaatgaagggtatttagtgggccgtcatattgatacgcataacccccaactcatggatttattgaagcgtttgcatgcgagttttgggattggcgtgattgatttgaggactgatgaggataaaagcgctattttattgaacgctaaacacaaagaaaagattgattacaccgtggctttggagcttagcgcgaaaaatgaaaaattcagcggttttttaaagagcgttgtggattatgactccaaactgcccacaccgcta

SEQ ID NO: 3733 - DNA (genomic), 405 bp, Helicobacter pylori; double-stranded, circular
  misc_feature (B) LOCATION 1...405
  hypothetical: NO
  anti-sense: NO
ttgtctaatgaaaatttaatcgctttttctaagaaatttgacactttacccattaaactggtgagctttgaattgaaaaaagaaatcagcgtgcataattgcagggagtgttattttcaagcgatttccaacagctcgtgggctaatgaagggtatttagtgggccgtcatattgatacgcataacccccaactcatggatttattgaagcgtttgcatgcgagttttgggattggcgtgattgatttgaggactgatgaggataaaagcgctattttattgaacgctaaacacaaagaaaagattgattacaccgtggctttggagcttagcgcgaaaaatgaaaaattcagcggttttttaaagagcgttgtggattatgactccaaactgcccacaccgcta

SEQ ID NO: 3734 - DNA (genomic), 942 bp, Helicobacter pylori; double-stranded, circular
  misc_feature (B) LOCATION 1...942
  hypothetical: NO
  anti-sense: NO
atgaaaccgcaagacattgaaatcattcaaagcgttttagaagcgattaaagaacctattaaggttactgagatttatgataaagccaaagagctttttgaaaaaggcgagattgaaagcatgtttgattatgggggcgaaaccccacaccagagcgttagtgctgctatttatacagccttaaacaagggcgaagagctgccttttttgaaagtgcaagaaaagccggttttaatcgctttaaaaggcgcggctaaagagccggttttaaacattgaaaagcccggcgtttcaagcgttaaaatcgtgcataataaaatcatgcatgaaagagatttgcacccctttttaacctacatggcctattataatgaaaatttgaaatgctacacgaaaaccatttttcatgaagagagttcaaaatcgccaaaaggcatggacagatggctttatccggacatggtgggggttaggtttttgcatgctgaattgtctaatgaaaatttaatcgctttttctaagaaatttgacactttacccattaaactggtgagctttgaattgaaaaaagaaatcagcgtgcataattgcagggagtgttattttcaagcgatttccaacagctcgtgggctaatgaagggtatttagtgggccgtcatattgatacgcataacccccaactcatggatttattgaagcgtttgcatgcgagttttgggattggcgtgattgatttgaggactgatgaggataaaagcgctattttattgaacgctaaacacaaagaaaagattgattacaccgtggctttggagcttagcgcgaaaaatgaaaaattcagcggttttttaaagagcgttgtggattatgacccaaaccacccacaccgatataaagatgaatttgatgagatcaaaaagaaagaggagttatacccctaa

SEQ ID NO: 3735 - DNA (genomic), 624 bp, Helicobacter pylori; double-stranded, circular
  misc_feature (B) LOCATION 1...624
  hypothetical: NO
  anti-sense: NO
atgaataaaatagagcgattactccaaactctagcgcctaagggggtggggtttaggaagttgggggaggtgtgtgaaagcaccaataaaaaaacacttaaaataagtgaagtgagcgaagtaaaaaataagggaatgtatccagtgataaattcagggagggaattgtatggttattaccatgattttaataatgatggagaaaatataactattgcatctagaggagaatatgcaggatttataaattactttaatgaaaaattttttgcagggggtctatgttatccctataaagttaaagatactaacgagcttttaacaaaatttttatacttttatctcaaaaccaatgaaacccaaattatggaaaatcttgtttttcgtggtagtatccccgcactcaataaagcagatattgaaactttaaccatccccatcccacccctagagatccaacaagagatcgttacgattttggatcaattttcagccctaactactgatttacaagccggtatccccgctgaaatcaaagccaggaaaaagcaatacgaatattaccgagaaaaattactggccttcaaacccctaaccccactaaataacaaagagcttgcgtaa

SEQ ID NO: 3736 - DNA (genomic), 639 bp, Helicobacter pylori; double-stranded, circular
  misc_feature (B) LOCATION 1...639
  hypothetical: NO
  anti-sense: NO
aaatttaaagggggcaaaatgaataaaatagagcgattactccaaactctagcgcctaagggggtggggtttaggaagttgggggaggtgtgtgaaagcaccaataaaaaaacacttaaaataagtgaagtgagcgaagtaaaaaataagggaatgtatccagtgataaattcagggagggaattgtatggttattaccatgattttaataatgatggagaaaatataactattgcatctagaggagaatatgcaggatttataaattactttaatgaaaaattttttgcagggggtctatgttatccctataaagttaaagatactaacgagcttttaacaaaatttttatacttttatctcaaaaccaatgaaacccaaattatggaaaatcttgtttttcgtggtagtatccccgcactcaataaagcagatattgaaactttaaccatccccatcccacccctagagatccaacaagagatcgttacgattttggatcaattttcagccctaactactgatttacaagccggtatccccgctgaaatcaaagccaggaaaaagcaatacgaatattaccgagaaaaattactggccttcaaacccctaaccccactaaataacaaagagcttgcg

SEQ ID NO: 3737 - DNA (genomic), 693 bp, Helicobacter pylori; double-stranded, circular
  misc_feature (B) LOCATION 1...693
  hypothetical: NO
  anti-sense: NO
atgtttgggaataagcagttacagcttcaaatcagtcaaaaagattctgagattgcggagttaaaaaaagaagtcaatctctatcaaagccttttaaatttgtgcttgcatgagggttttgtaggtattaaaaacaataaagtcgtttttaaaagcgggaatcttgcaagcttaaacaatttagaagaacaaagcgttcattttaaagaaaacgcagaaagcgttaatttacaaggggtttcttattctttgaaaagccaaaatattgacggcgtgcagtatttttcattggctaaaaaaacagggggtgtgggggaataccataaaaatgatttgtttaagactttttgcacgagcttaaaagagggcttagagaacgcgcaagaaagcatgcagtatttccatcaagaaacaggcttgctcttgaatgcggctaaaaatggcgaagagcattctaatgaaggattaataaccgttaataaaacgggtcaagacattgaatcgctttatgaaaagatgcaaaacgccacttcgttagcggactccctcaaccaacggagcaatgaaatcactcaagtcatttctttgattgatgatattgcagagcaaaccaatctcttagccctaaacgccgctattgaggccgcacgagcggtgaacatggcagagggtttgcggtggtggctgatgagg

SEQ ID NO: 3738 - DNA (genomic), 1302 bp, Helicobacter pylori; double-stranded, circular
  misc_feature (B) LOCATION 1...1302
  hypothetical: NO
  anti-sense: NO
atgtttgggaataagcagttacagcttcaaatcagtcaaaaagattctgagattgcggagttaaaaaaagaagtcaatctctatcaaagccttttaaatttgtgcttgcatgagggttttgtaggtattaaaaacaataaagtcgtttttaaaagcgggaatcttgcaagcttaaacaatttagaagaacaaagcgttcattttaaagaaaacgcagaaagcgttaatttacaaggggtttcttattctttgaaaagccaaaatattgacggcgtgcagtatttttcattggctaaaaaaacagggggtgtgggggaataccataaaaatgatttgtttaagactttttgcacgagcttaaaagagggcttagagaacgcgcaagaaagcatgcagtatttccatcaagaaacaggcttgctcttgaatgcggctaaaaatggcgaagagcattctaatgaaggattaataaccgttaataaaacgggtcaagacattgaatcgctttatgaaaagatgcaaaacgccacttcgttagcggactccctcaaccaacggagcaatgaaatcactcaagtcatttctttgattgatgatattgcagagcaaaccaatctcttagccctaaacgccgctattgaggccgcacgagcgggtgaacatggcagagggtttgcggtggtggctgatgaggtgagaaagctcgctgaaaaaacccaaaaagccactaaagaaatcgctgtcgtggttaaaagcatgcaacaagaagcgaacgatattcaaaccaacacccacgatattaattctattgtaggctctattaagggtgatgtggaagagcttaaatccaccgtaaaaaataacatgattgtcgcgcaagccgcaaaatacaccatctacaatatcaataaccgggtgttttgcggtctggctaaactcgatcatgtggtctttaaaaacaatctttatggcatggtctttggtctcaattcctttgacattaccagccataagagttgccgtttaggcaaatggtattatgagggtgcgggtaaagaaaactttgctaacacttcaggctatagagctttagaaagccaccatgcgagcgtgcatgctgaagctaatgatttggttaaagccgttcaagaagatcacgtcaccgattcaaaatacctagaacataaagtgcatttaatggaagatagcgctaagcatgtcaaagaaaatattgataagatgttttatgaaaaacaagatgaactcaataaaatcattgaaaaaattcaaaaaggcgaatga

SEQ ID NO: 3739 - DNA (genomic), 1314 bp, Helicobacter pylori; double-stranded, circular
  misc_feature (B) LOCATION 1...1314
  hypothetical: NO
  anti-sense: NO
ataaggaatgccaccatgtttgggaataagcagttacagcttcaaatcagtcaaaaagattctgagattgcggagttaaaaaaagaagtcaatctctatcaaagccttttaaatttgtgcttgcatgagggttttgtaggtattaaaaacaataaagtcgtttttaaaagcgggaatcttgcaagcttaaacaatttagaagaacaaagcgttcattttaaagaaaacgcagaaagcgttaatttacaaggggtttcttattctttgaaaagccaaaatattgacggcgtgcagtatttttcattggctaaaaaaacagggggtgtgggggaataccataaaaatgatttgtttaagactttttgcacgagcttaaaagagggcttagagaacgcgcaagaaagcatgcagtatttccatcaagaaacaggcttgctcttgaatgcggctaaaaatggcgaagagcattctaatgaaggattaataaccgttaataaaacgggtcaagacattgaatcgctttatgaaaagatgcaaaacgccacttcgttagcggactccctcaaccaacggagcaatgaaatcactcaagtcatttctttgattgatgatattgcagagcaaaccaatctcttagccctaaacgccgctattgaggccgcacgagcgggtgaacatggcagagggtttgcggtggtggctgatgaggtgagaaagctcgctgaaaaaacccaaaaagccactaaagaaatcgctgtcgtggttaaaagcatgcaacaagaagcgaacgatattcaaaccaacacccacgatattaattctattgtaggctctattaagggtgatgtggaagagcttaaatccaccgtaaaaaataacatgattgtcgcgcaagccgcaaaatacaccatctacaatatcaataaccgggtgttttgcggtctggctaaactcgatcatgtggtctttaaaaacaatctttatggcatggtctttggtctcaattcctttgacattaccagccataagagttgccgtttaggcaaatggtattatgagggtgcgggtaaagaaaactttgctaacacttcaggctatagagctttagaaagccaccatgcgagcgtgcatgctgaagctaatgatttggttaaagccgttcaagaagatcacgtcaccgattcaaaatacctagaacataaagtgcatttaatggaagatagcgctaagcatgtcaaagaaaatattgataagatgttttatgaaaaacaagatgaactcaataaaatcattgaaaaaattcaaaaaggcgaa

SEQ ID NO: 3740 - DNA (genomic), 147 bp, Helicobacter pylori; double-stranded, circular
  misc_feature (B) LOCATION 1...147
  hypothetical: NO
  anti-sense: NO
atatccatgacaatgtctttaatttacgaaaatattaccgatgatagggctgatacgattttttatcttaatggcttgaacacttggaattacacgcaagcgagattcgctcaaacctatgtgcgggaaaaacagcgctttagtctt

SEQ ID NO: 3741 - DNA (genomic), 315 bp, Helicobacter pylori; double-stranded, circular
  misc_feature (B) LOCATION 1...315
  hypothetical: NO
  anti-sense: NO
ttgaacacttggaattacacgcaagcgagattcgctcaaacctatggcgggaaaaacagcgctttagtctttaacgccacgactccttgggctaatggtgcgatccctaaatctaacagcacggtgcgttttggggggtatgagggagtcaattgggggaaaacgggctatatcaccggcactttcacagccgatagggtttatatcaccggtaacatgatgtctggcaatggcgctcaaaccggtgggggggcgactttgaattttgtgggcgcgacgaaattaatatcgctggagccacttttaaaaacttaa

SEQ ID NO: 3742 - DNA (genomic), 567 bp, Helicobacter pylori; double-stranded, circular
  misc_feature (B) LOCATION 1...567
  hypothetical: NO
  anti-sense: NO
acacttggaattacacgcaagcgagattcgctcaaacctatgtgcgggaaaaacagcgctttagtctttaacgccacgactccttgggctaatggtgcgatccctaaatctaacagcacggtccgttttgggggttatgagggagtcaattgggggaaaacgggctatatcaccggcactttcacagccgatagggtttatatcaccggtaacatgatgtctggcaatggcgctcaaaccggtgggggggcgactttgaattttgtgggcgcgactgaaattaatagcgcgggagccacttttaaaaacttaaaaaccacttcacaaaactcttacatgacttttatggcgttagggaatggctctgggagtggtaagatcaatgtttctcagtctgatttttacgattggacggatggagggtatgattttaccggtaatggcgtttttgacagcgtgaatttcaacaaggcttattacaaatttcaaggcgctgaaaattcttacaattttaaaaacacgaattttttaagcagggaatttcaaattccagggcaagaccaccat

SEQ ID NO: 3743 - DNA (genomic), 237 bp, Helicobacter pylori; double-stranded, circular
  misc_feature (B) LOCATION 1...237
  hypothetical: NO
  anti-sense: NO
atgacgctcaatgaagccattaaagacaaaacttatgaaattgtagaaatcgctaactgcgatgaagcccttaaaaaacgcttcctctcttttggtattcatgaaggggttcaatgcacccttttgcattcttccatgaaaaaggccacgctttcaattaaaatcaaccgcattcaagtggctttaagatcccatgaagcgcaataccttatcatcaaagaaagcgcgcaagaatga

SEQ ID NO: 3744 - DNA (genomic), 252 bp, Helicobacter pylori; double-stranded, circular
  misc_feature (B) LOCATION 1...252
  hypothetical: NO
  anti-sense: NO
ttcaaaaaggaaattaaaatgacgctcaatgaagccattaaagacaaaacttatgaaattgtagaaatcgctaactgcgatgaagcccttaaaaaacgcttcctctcttttggtattcatgaaggggttcaatgcacccttttgcattcttccatgaaaaaggccacgctttcaattaaaatcaaccgcattcaagtggctttaagatcccatgaagcgcaataccttatcatcaaagaaagcgcgcaagaa

SEQ ID NO: 3745 - DNA (genomic), 288 bp, Helicobacter pylori; double-stranded, circular
  misc_feature (B) LOCATION 1...288
  hypothetical: NO
  anti-sense: NO
gcagggaatttcaaattccagggcaagaccaccattgaaaaatccgttttaaacgacgcttcttacgcttttgatggcgtgaataacgcctttaatgaagacaaatttaatggcggatcgtttaatttcaaccacgcagagcaaacaaacgcttttaataacaactcgtttagtggcggatcgtttagttttaacgccaagcaagtggattttaatgggaattcgtttaatgggggggtgtttaatttcaataaatcccctaaagccagttttactaacaaacacttt

SEQ ID NO: 3746 - DNA (genomic), 486 bp, Helicobacter pylori; double-stranded, circular
  misc_feature (B) LOCATION 1...486
  hypothetical: NO
  anti-sense: NO
atgacttttatggcgttagggaatggctctgggagtggtaagatcaatgtttctcagtctgatttttacgattggacggatggagggtatgattttaccggtaatggcgtttttgacagcgtgaatttcaacaaggcttattacaaatttcaaggcgctgaaaattcttacaattttaaaaacacgaattttttagcagggaatttcaaattccagggcaagaccaccattgaaaaatccgttttaaacgacgcttcttacgcttttgatggcgtgaataacgcctttaatgaagacaaatttaatggcggatcgtttaatttcaaccacgcagagcaaacaaacgcttttaataacaactcgtttagtggcggatcgtttagttttaacgccaagcaagtggattttaatgggaattcgtttaatgggggggtgtttaatttcaataatacccctaaagccagttttactaacgaacacttttaa

SEQ ID NO: 3747 - DNA (genomic), 279 bp, Helicobacter pylori; double-stranded, circular
  misc_feature (B) LOCATION 1...279
  hypothetical: NO
  anti-sense: NO
cggtctctaagcgattttacagagcaacaactcatttttgctaaaaagcaataccagcgatacagcaaaattgggggcgctgtggataaaaacactctagagagttatgaatttacttataggcgcttggaatcagattacgcttattctattgcggtattgaataaaaccattttaagagccccttttgatggcgtgatagcgagcaaaaacattcaggtgggcgaaggggtgagcgcaaataacacggtgttattgagactagtcagccatgctagg

SEQ ID NO: 3748 - DNA (genomic), 705 bp, Helicobacter pylori; double-stranded, circular
  misc_feature (B) LOCATION 1...705
  hypothetical: NO
  anti-sense: NO
atgatacgaaaaattttaataggactttttttgagttttttgagcatggaagctggcgaaagagtgtatgcgattttcaatgtgaaagcgatgcaagattccaaactcaccttagacagcacagggattgtggatagcattaaggttactgaggggagcgtggtcaaaaagggcgatgttttgttgcttttgtataatcaagacaaacaggctcaaagcgattctacagagcaacaactcatttttgctaaaaagcaataccagcgatacagcaaaattgggggcgctgtggataaaaacactctagagagttatgaatttacttataggcgcttggaatcagattacgcttattctattgcggtattgaataaaaccattttaagagccccttttgatggcgtgatagcgagcaaaaacattcaggtgggcgaaggggtgagcgcaaataacacggtgttattgagactagtcagccatgctaggaaattagttattgaatttgattctaaatatattaatgcagtcaaagtgggggatacttacacctattctatagatggggattctaatcagcatgaagctaaaatcactaagatttaccccaccgttgatgaaaacaccagaaaagtgagcgctgaagcccttttgtctaagcctatggcagtagggctttttggcgatgggtttatccaaacgaaataa

SEQ ID NO: 3749 - DNA (genomic), 258 bp, Helicobacter pylori; double-stranded, circular
  misc_feature (B) LOCATION 1...258
  hypothetical: NO
  anti-sense: NO
atgttggcggctggtttgactttgcctgaatttgggtgttatttaagccattatcttttatggaaagaatgcgtcaaattagatcaaccggtcgttattttagaagatgatgtaacgctagartctcatttcatgcaagccttagaagattgtttgaaaagcccttttgattttgtgagactctatgggtgttattggtattaccaacgagacaaaattccatgttttgcccaaagaatttgtatttcctccctttga

SEQ ID NO: 3750 - DNA (genomic), 603 bp, Helicobacter pylori; double-stranded, circular
  misc_feature (B) LOCATION 1...603
  hypothetical: NO
  anti-sense: NO
tctgtgattggtgtctatatcatttctttaaaagaaagtcaaaggcgtttggatactgaaaaactcgttttagaatccaatgaaaaatttaaaggccgttgcgttttccaaatctttgacgccattagccccaaacatcaagattttgaaaaattacttcaagagctttataacgctcaaagtttattgcaatctgattggtatcattcttatgttggcgctggtttgactttgcctgaattggggtgttatttaagccattatcttttatggaaagaatgcgtcaaattagatcaaccggtcgttattttagaagatgatgtaacgctagagtctcatttcatgcaagccttagaagattgtttgaaaagcccttttgattttgtgagactctatgggtgttattggtattaccacgagacaaaattccatgttttgcccaaagaatttgtatttcctccctttgatcattcttttaagaataaccctattttagaaaaatttaaaaaattttttgatgtttctagatttttaaatctttctacccataaagtcatccacctatattctcaaaaaaatacaaaaaagctattacgcaacgca

SEQ ID NO: 3751 - DNA (genomic), 999 bp, Helicobacter pylori; double-stranded, circular
  misc_feature (B) LOCATION 1...999
  hypothetical: NO
  anti-sense: NO
gtgattggtgtctatatcatttctttaaaagaaagtcaaaggcgtttggatactgaaaaactcgttttagaatccaatgaaaaatttaaaggccgttgcgttttccaaatctttgacgccattagccccaaacatcaagattttgaaaaattacttcaagagctttataacgctcaaagtttattgcaatctgattggtatcattcttatgttggcgctggtttgactttgcctgaattggggtgttatttaagccattatcttttatggaaagaatgcgtcaaattagatcaaccggtcgttattttagaagatgatgtaacgctagagtctcatttcatgcaagccttagaagattgtttgaaaagcccttttgattttgtgagactctatgggtgttattggtattaccacgagacaaaattccatgttttgcccaaagaatttgtatttcctccctttgatcattcttttaagaataaccctattttagaaaaatttaaaaaattttttgatgtttctagatttttaaatctttctacccataaagtcatccactatattctcaaaaaaatacaaaaaagctattacgcaacgcatgaaaaagaagccttttttttagagcatttttatctcaccagcgtgtatgtggcttctacagccggttattacttaacccctaagggcgctaaaacttttatagaagccacggagagttttaaaatcatagagccggtggatatgtttatggataattctgcttatcatgatgtggcgaatctgacttatgtgccttgccctgtttctttaagtgagcattctttagacagcaccattcaaaagccccaaaaaaagagcttgaaatcttacccccttccgccccaaaaatcaacttttaagaatcttttttattatagcttgaatgccaaaaaacgcttgaatgccttccaacaatacagcaaacaatacgctcctttaaaaacccctaaagaggtttaa

SEQ ID NO: 3752 - DNA (genomic), 237 bp, Helicobacter pylori; double-stranded, circular
  misc_feature (B) LOCATION 1...237
  hypothetical: NO
  anti-sense: NO
aaaactgcacaaagctatggtattttggtgtgcgccacagggataggcatgagcatgggcgctaatcgctttaaaggtattagagccgctttgtgccttgatgcttacatggctaaaatgactcgcttgcacaataacgccaatgtcttgtgcttgggcgaaaagattagcggtatcggcgtagcagaaagcattttggaagcgtttttctctacagaatttgaacaaggccgtcat

SEQ ID NO: 3753 - DNA (genomic), 414 bp, Helicobacter pylori; double-stranded, circular
  misc_feature (B) LOCATION 1...414
  hypothetical: NO
  anti-sense: NO
atgaataagcccttaaataccgctcaagtttttataggaagcgatcatgcagggttacatcttgcagaatttgttaaacattttttagaagacaagcgttttaagatccaagctttcttacccactacaagggtggattaccctgattacgccaaattagtgtgccaaaaggttttagaaaatgcacaaagctatggtattttggtgtgcgccacagggataggcatgagcatgggcgctaatcgctttaaaggtattagagccgctttgtgccttgatgcttacatggctaaaatgactcgcttgcacaataacgccaatgtcttgtgcttgggcgaaaagattagcggtatcggcgtagcagaaagcattttggaagcgtttttctctacagaatttgaacaaggccgtcat

SEQ ID NO: 3754 - DNA (genomic), 456 bp, Helicobacter pylori; double-stranded, circular
  misc_feature (B) LOCATION 1...456
  hypothetical: NO
  anti-sense: NO
atgaataagcccttaaataccgctcaagtttttataggaagcgatcatgcagggttacatcttgcagaatttgttaaacattttttagaagacaagcgttttaagatccaagctttcttacccactacaagggtggattaccctgattacgccaaattagtgtgccaaaaggttttagaaaatgcacaaagctatggtattttggtgtgcgccacagggataggcatgagcatgggcgctaatcgctttaaaggtattagagccgctttgtgccttgatgcttacatggctaaaatgactcgcttgcacaataacgccaatgtcttgtgcttgggcgaaaagattagcggtatcggcgtagcagaaagcattttggaagcgtttttctctacagaatttgaacaaggccgtcatgtgttgcgtatccaaaagctagatgaatcgctgaaatcatag

SEQ ID NO: 3755 - DNA (genomic), 399 bp, Helicobacter pylori; double-stranded, circular
  misc_feature (B) LOCATION 1...399
  hypothetical: NO
  anti-sense: NO
gtgattggtgtctatatcatttctttaaaagaaagtcaaaggcgtttggatactgaaaaactcattttagaatccaatgaaaaatttaaaggccgttgcgttttccaaatttttgacgccattagccccaaacatcaagattttgaaaaattacttcaagagctttatgattcttcaagtttgttaaaatccgattggttccattctgattattgttatcaagaattattgccccaagaatttgggtgctatttaagccattattttttatggaaagaatgcgttaaatcaaaccaaccggtcgttattttagaagatgatgtaacgctagaatctcatttcatgcaagccttagaagattgcttgaaaagcccttttgattttgtgaggttctatggg

SEQ ID NO: 3756 - DNA (genomic), 432 bp, Helicobacter pylori; double-stranded, circular
  misc_feature (B) LOCATION 1...432
  hypothetical: NO
  anti-sense: NO
atggtagaatgccaaagaataccatatttaggagttcatttgacacaagtttatatcatttctttaaaagaaagtcaaaggcgtttggatactgaaaaactcattttagaatccaatgaaaaatttaaaggccgttgcgttttccaaatttttgacgccattagccccaaacatcaagattttgaaaaattacttcaagagctttatgattcttcaagtttgttaaaatccgattggttccattctgattattgttatcaagaattattgccccaagaatttgggtgctatttaagccattattttttatggaaagaatgcgttaaatcaaaccaaccggtcgttattttagaagatgatgtaacgctagaatctcatttcatgcaagccttagaagattgcttgaaaagcccttttgattttgtgaggttc

SEQ ID NO: 3757 - DNA (genomic), 201 bp, Helicobacter pylori; double-stranded, circular
  misc_feature (B) LOCATION 1...201
  hypothetical: NO
  anti-sense: NO
atgccggaaaattctaaactacaacctgctaagttagggaaaaattttgaccctgtggatcattctaacaggaattttttcttttctctcattctgtctgtattgttacactggttgatttattttttatttgaacacagagaagatttttttccttcaaaacccaagctcgttaaattaaatcctgaaaatttattggty

SEQ ID NO: 3758 - DNA (genomic), 297 bp, Helicobacter pylori; double-stranded, circular
  misc_feature (B) LOCATION 1...297
  hypothetical: NO
  anti-sense: NO
gcacagcccgaaaaagatttcatcaggaataatttaagggatattgggcgcatcacgcaaaagtatttagaataccctcaagtagcggcttatttagggcaagacgggacgaatgcggtggaattttacttgcaccctaacggcgatattaccgatcttaaaatcatcattggctctgaatacaaaatgcttgatgacaacactttaaagaccattcagatcgcttataaggattacccacgccccaaaactaaaaccctcattcgcattagagtgcgttattacttgggaggcaat

SEQ ID NO: 3759 - DNA (genomic), 687 bp, Helicobacter pylori; double-stranded, circular
  misc_feature (B) LOCATION 1...687
  hypothetical: NO
  anti-sense: NO
atgccggaaaattctaaactacaacctgctaagttagggaaaaattttgaccctgtggatcattctaacaggaattttttcttttctctcattctgtctgtattgttacactggttgatttattttttatttgaacacagagaagatttttttccttcaaaacccaagctcgttaaattaaatcctgaaaatttattggttttaaaaagaggccattcacaagatcccagtaaaaacaacccaggcgctcctaaacccacgctagctggccctcaaaaaccccccacaccccccacaccccccactccgccaaccccaccaaaacctatagaaaagccaaagcctgagcctaaaccaaagcccaaaccagaacccaaaaagcccaaccacaaacataaggcgctcaaaaaagtggaaaaagtggaagagaaaaaagtagtagaggagaaaaaagaagagaaaaaagtagtagaacaaaaagtagagcagaaaaaaatagaagagaaaaaacctgtcaaaaaagaatttgaccctaaccagctttctttcttgcctaaagaagttgcgccacccagacaggaaaacaataaaggcttggataaccagactagaagggatattgatgaattgtatggcgaagaatttggagatttaggcacagcccgaaaaagatttcatcaggaataa

SEQ ID NO: 3760 - DNA (genomic), 693 bp, Helicobacter pylori; double-stranded, circular
  misc_feature (B) LOCATION 1...693
  hypothetical: NO
  anti-sense: NO
gaaatttatatgccggaaaattctaaactacaacctgctaagttagggaaaaattttgaccctgtggatcattctaacaggaattttttcttttctctcattctgtctgtattgttacactggttgatttattttttatttgaacacagagaagatttttttccttcaaaacccaagctcgttaaattaaatcctgaaaatttattggttttaaaaagaggccattcacaagatcccagtaaaaacaacccaggcgctcctaaacccacgctagctggccctcaaaaaccccccacaccccccacaccccccactccgccaaccccaccaaaacctatagaaaagccaaagcctgagcctaaaccaaagcccaaaccagaacccaaaaagcccaaccacaaacataaggcgctcaaaaaagtggaaaaagtggaagagaaaaaagtagtagaggagaaaaaagaagagaaaaaagtagtagaacaaaaagtagagcagaaaaaaatagaagagaaaaaacctgtcaaaaaagaatttgaccctaaccagctttctttcttgcctaaagaagttgcgccacccagacaggaaaacaataaaggcttggataaccagactagaagggatattgatgaattgtatggcgaagaatttggagatttaggcacagcccgaaaaagatttcatcaggaa

SEQ ID NO: 3761 - DNA (genomic), 954 bp, Helicobacter pylori; double-stranded, circular
  misc_feature (B) LOCATION 1...954
  hypothetical: NO
  anti-sense: NO
atgccggaaaattctaaactacaacctgctaagttagggaaaaattttgaccctgtggatcattctaacaggaattttttcttttctctcattctgtctgtattgttacactggttgatttattttttatttgaacacagagaagatttttttccttcaaaacccaagctcgttaaattaaatcctgaaaatttattggttttaaaaagaggccattcacaagatcccagtaaaaacaacccaggcgctcctaaacccacgctagctggccctcaaaaaccccccacaccccccacaccccccactccgccaaccccaccaaaacctatagaaaagccaaagcctgagcctaaaccaaagcccaaaccagaacccaaaaagcccaaccacaaacataaggcgctcaaaaaagtggaaaaagtggaagagaaaaaagtagtagaggagaaaaaagaagagaaaaaagtagtagaacaaaaagtagagcagaaaaaaatagaagagaaaaaacctgtcaaaaaagaatttgaccctaaccagctttctttcttgcctaaagaagttgcgccacccagacaggaaaacaataaaggcttggataaccagactagaagggatattgatgaattgtatggcgaagaatttggagatttaggcacagccgaaaaagatttcatcaggaataatttaagggatattgggcgcatcacgcaaaagtatttagaataccctcaagtagcggcttatttagggcaagacgggacgaatgcggtggaattttacttgcaccctaacggcgatattaccgatcttaaaatcatcattggctctgaatacaaaatgcttgatgacaacactttaaagaccattcagatcgcttataaggattacccacgccccaaaactaaaaccctcattcgcattagagtgcgttattacttgggaggcaattaa

SEQ ID NO: 3762 - DNA (genomic), 333 bp, Helicobacter pylori; double-stranded, circular
  misc_feature (B) LOCATION 1...333
  hypothetical: NO
  anti-sense: NO
atggaacaccataaagcgcacacaaccattcaggctttacaagccaaacgcaaaaggttgctaaccgaattagccgagttagaagcagaaataaaggtgagcagcgaacgaaggagcagttttaacgtttcgctctcgccgagtttgttagccgaaatagaagagatagaatacgaagaaaaaatgagcaaagagcgaagaatccatcacaatcttttgctttcgcccagtttcatggctaaagtggatgaatacatgaaagagaaaggttttcctaatcgatcgcttctctttgaaaaagcgttggagttttatatgctaaaacacccataa

SEQ ID NO: 3763 - DNA (genomic), 339 bp, Helicobacter pylori; double-stranded, circular
  misc_feature (B) LOCATION 1...339
  hypothetical: NO
  anti-sense: NO
ggagtaataatggaacaccataaagcgcacacaaccattcaggctttacaagccaaacgcaaaaggttgctaaccgaattagccgagttagaagcagaaataaaggtgagcagcgaacgaaggagcagttttaacgtttcgctctcgccgagtttgttagccgaaatagaagagatagaatacgaagaaaaaatgagcaaagagcgaagaatccatcacaatcttttgctttcgcccagtttcatggctaaagtggatgaatacatgaaagagaaaggttttcctaatcgatcgcttctctttgaaaaagcgttggagttttatatgctaaaacaccca

SEQ ID NO: 3764 - DNA (genomic), 393 bp, Helicobacter pylori; double-stranded, circular
  misc_feature (B) LOCATION 1...393
  hypothetical: NO
  anti-sense: NO
aatggtaaaatagatttaaaggaacgctttagtaaaaaccgctcttttaagggcattaaaaagaaaatcgctaaaaaatatacaatcaaaaactcgctttctataatttattccttaaaaacgcattcaaattcttctctatccattaataaaaaaatcttcttagggctagggttcgtttcggctttgagcgctcaaagtgaagattataatagttcggtgtattggctcaatagcgtgaatgaaaacaataataacaaatcctactatattagccccttacgcacttgggctggggggaataggagttttacgcaaaattataacaatagtcaattatacatagggacaaaaaacgcttccgcaacgcccaatcattcttctgtgtggttt

SEQ ID NO: 3765 - DNA (genomic), 390 bp, Helicobacter pylori; double-stranded, circular
  misc_feature (B) LOCATION 1...390
  hypothetical: NO
  anti-sense: NO
ggtaaaatagatttaaaggaacgctttagtaaaaaccgctcttttaagggcattaaaaagaaaatcgctaaaaaatatacaatcaaaaactcgctttctataatttattccttaaaaacgcattcaaattcttctctatccattaataaaaaaatcttcttagggctagggttcgtttcggctttgagcgctcaaagtgaagattataatagttcggtgtattggctcaatagcgtgaatgaaaacaataataacaaatcctactatattagccccttacgcacttgggctggggggaataggagttttacgcaaaattataacaatagtcaattatacatagggacaaaaaacgcttccgcaacgcccaatcattcttctgtgtggttt

SEQ ID NO: 3766 - DNA (genomic), 399 bp, Helicobacter pylori; double-stranded, circular
  misc_feature (B) LOCATION 1...399
  hypothetical: NO
  anti-sense: NO
gggtgggaattgtattggagggagcatcacttcactaactctaatatcaatcattacaagctcaatcttaacgctaatagcgttacctttaataacagcactctagggagtatgcctaatggcaacgctaacactatagggaatgcctacattcttaatgcaaataatattacttttaataatttgacctttaatgggggttggttcgtttttaatagatctgatgctcatgttaattttcaaggcacaactacgatcaataaccccacttcaccctttgtcaatatgaccggtaaagttaccattaatcctaatgcgatttttaatattcaaaattacacgcccacgatagggaacgcttacacgctctttagcatgaaaaatggcaaatatcgctta

SEQ ID NO: 3767 - DNA (genomic), 1476 bp, Helicobacter pylori; double-stranded, circular
  misc_feature (B) LOCATION 1...1476
  hypothetical: NO
  anti-sense: NO
atgacttatagaaatggcaaaatagatttaaaggaacgctttagtaaaaaccgctcttttaagggcattaaaaagaaaatcgctaaaaaatatacaatcaaaaactcgctttctataatttattccttaaaaacgcattcaaattcttctctatccattaataaaaaaatcttcttagggctagggttcgtttcggctttgagcgctcaaagtgaagattataatagttcggtgtattggctcaatagcgtgaatgaaaacaataataacaaatcctactatattagccccttacgcacttgggctggggggaataggagttttacgcaaaattataacaatagtcaattatacatagggacaaaaaacgcttccgcaacgcccaatcattcttctgtgtggtttggagaaaagggctatatcggttttattacaggggtttttaaggctagagacatttttatcacaggagctgttggatcgggtaatgagttaaaaaccggtgggggggcgatactggtttttgaaagctcaaacgaactaaccactaacggggcttattttcaaaataacagagccgggacacaaacttcttggatcaatttgatttccaataacagcgtgaatttgacaaacacggattttggcaatcaaacccctaatgggggctttaatgttatggggcgaaagattacttataatggtgggagcgtcaatggtgggaattttggctttgataacgtggatagcaatggcgcaaccaccattagcggggtaactttcaacaataacggtgcgctcacttataagggtgggaatggtattggagggagcatcactttcactaactctaatatcaatcattacaagctcaatcttaacgctaatagcgttacctttaataacagcactctagggagtatgcctaatggcaacgctaacactatagggaatgcctacattcttaatgcaaataatattacttttaataatttgacctttaatgggggttggttcgtttttaatagatctgatgctcatgttaattttcaaggcacaactacgatcaataaccccacttcaccctttgtcaatatgaccggtaaagttaccattaatcctaatgcgatttttaatattcaaaattacacgcccacgatagggaacgcttacacgctctttagcatgaaaaatggcaatatcgcttatgatgatgtgaataatttatggaatattatcaggcttaaaaacacgcaagccacaaaagacaatagcaaaaacgccacttccaataacaacacccacacttactatgtaacttacaatttaggcggcacgctctatcatttcaggcaaatttttagccctgattccattgttttacaatccgtctattatggcgcgaataatctttactacaccaatagcgtgaatatccatgacaatgtctttaatttaaaaaatattacacgatga

SEQ ID NO: 3768 - DNA (genomic), 1704 bp, Helicobacter pylori; double-stranded, circular
  misc_feature (B) LOCATION 1...1704
  hypothetical: NO
  anti-sense: NO
atgaaaactactataaaagagatctttcaagaggaaggatacagcatccctaactatcagagggattacgcctggaaggacaagaattttagggatctgtgggaagatctagaagaagcgatagaatacaacaaaaagggttatgggcattttataggcaccatggttgtcgctaagaatgaagacaacaaaaaattgtatgacatcattgacggccagcaacgaacgaccaccatcttcatgctcttgcatgtcttggtaagcaaacaatatgaggaagacaagcgagagacaagaaaatatctataccaaaagggggaattaaaattagaagtcgcctctcaaaaccaaagcttcttcaaaacgctcttggaagtagcagaaaaggggaatatcagccattgcgaaaaagatgcagacaccgagggcaagcaaaatcttttcgaagttttgaaggccatcttggacaaaatcagcaaattgagtgaagaagaagtgaatgagcgtttggaggtgctgttgaaaatggttttgatgcggcttgaagagcccgatcctggaaaggccatcagaacctttcaaagcgtgaatgacagaggcgtgcctctcctcttgctagacaaactaaaatcccttctcatctattactccaacactttttgcgatgggaaaagggggctagaccaatttatcatcgatcattttggggagatctttaagatctttgccaagatcaaaaagagcaaccacatctccagcgttggaggcccagagtttaatgaaggcgatatcttccgctaccacgcagggagccaaagatttgatggaatcgagtttttagggcactacagaacaagcacggacaacacctacgagaaactcaaagctgaactaaaagaaatcaaaaaaagcaaattgaaaagtttcatccaatcctatgtcagcgatttgaaaaatttctatcaggcttttcttgatctattgagcgagattgacaccaacccaaccacccttaaggtcatgctcatcaacagaatcaacccgctttttttcaattcgctcatccgcctgaaaatcaacaacgaactagacgatgaaacgctgaaactctttgccaaaaccgatattgtgtgtttcaaatctactagatatatgcaatcagcggcctacaacctgattaatgcgtatcttagaaagggcaaagagggattgaagagcgggatgattgctcaatgcagaaatgatatagagttggcttttaggcagtctgtaaacgaagcattcaactcatcatgcttccactatatcttctttgaaaagaactgccaggagatgggtttagccgatctcaaaaaattgatccctgggaagcaattctcccaagaaaaagaacacatcatccccatcaatttgttagacttggataatgaaattgagatccaaaaacttggttttgaagacaggaaagatcttagagcttatatttacacatacggcaacctcatctccctagaaaaaccgctcaatattaaaggaaaagataaggatctgtatgaaaaagatgaaatctacaaaagtagtgagatccctttcaacaggcgctttaatgtaaaaggtttcaacaaaaaggttttgataacaaggaatgatgaaatgcaagaatggctgatcgacaccttttttaaggatttcgccacccactaa

SEQ ID NO: 3769 - DNA (genomic), 1701 bp, Helicobacter pylori; double-stranded, circular
  misc_feature (B) LOCATION 1...1701
  hypothetical: NO
  anti-sense: NO
atgaaaactactataaaagagatctttcaagaggaaggatacagcatccctaactatcagagggattacgcctggaaggacaagaattttagggatctgtgggaagatctagaagaagcgatagaatacaacaaaaagggttatgggcattttataggcaccatggttgtcgctaagaatgaagacaacaaaaaattgtatgacatcattgacggccagcaacgaacgaccaccatcttcatgctcttgcatgtcttggtaagcaaacaatatgaggaagacaagcgagagacaagaaaatatctataccaaaagggggaattaaaattagaagtcgcctctcaaaaccaaagcttcttcaaaacgctcttggaagtagcagaaaaggggaatatcagccattgcgaaaaagatgcagacaccgagggcaagcaaaatcttttcgaagttttgaaggccatcttggacaaaatcagcaaattgagtgaagaagaagtgaatgagcgtttggaggtgctgttgaaaatggttttgatgcggcttgaagagcccgatcctggaaaggccatcagaacctttcaaagcgtgaatgacagaggcgtgcctctcctcttgctagacaaactaaaatcccttctcatctattactccaacactttttgcgatgggaaaagggggctagaccaatttatcatcgatcattttggggagatctttaagatctttgccaagatcaaaaagagcaaccacatctccagcgttggaggcccagagtttaatgaaggcgatatcttccgctaccacgcagggagccaaagatttgatggaatcgagtttttagggcactacagaacaagcacggacaacacctacgagaaactcaaagctgaactaaaagaaatcaaaaaaagcaaattgaaaagtttcatccaatcctatgtcagcgatttgaaaaatttctatcaggcttttcttgatctattgagcgagattgacaccaacccaaccacccttaaggtcatgctcatcaacagaatcaacccgctttttttcaattcgctcatccgcctgaaaatcaacaacgaactagacgatgaaacgctgaaactctttgccaaaaccgatattgtgtgtttcaaatctactagatatatgcaatcagcggcctacaacctgattaatgcgtatcttagaaagggcaaagagggattgaagagcgggatgattgctcaatgcagaaatgatatagagttggcttttaggcagtctgtaaacgaagcattcaactcatcatgcttccactatatcttctttgaaaagaactgccaggagatgggtttagccgatctcaaaaaattgatccctgggaagcaattctcccaagaaaaagaacacatcatccccatcaatttgttagacttggataatgaaattgagatccaaaaacttggttttgaagacaggaaagatcttagagcttatatttacacatacggcaacctcatctccctagaaaaaccgctcaatattaaaggaaaagataaggatctgtatgaaaaagatgaaatctacaaaagtagtgagatccctttcaacaggcgctttaatgtaaaaggtttcaacaaaaaggttttgataacaaggaatgatgaaatgcaagaatggctgatcgacaccttttttaaggatttcgccacccac

SEQ ID NO: 3770 - DNA (genomic), 291 bp, Helicobacter pylori; double-stranded, circular
  misc_feature (B) LOCATION 1...291
  hypothetical: NO
  anti-sense: NO
agtggaaaatttaaaactcagcctagagatttagagttcgccctcattgattatggtttggaagaattagaagaagtgggagacaagatcattattagaggggattataacagcttcaagctcttaaatgaggggtttgaaagcttgagattgcccattataaaagcgggtttgcaacgcatcgccacgacgcccattgaattgaatgacgaacaaatggagcttaccgaaaagctactggataggattgaagacgatgatgatgtggtcgcgctttatacgaatattgag

SEQ ID NO: 3771 - DNA (genomic), 459 bp, Helicobacter pylori; double-stranded, circular
  misc_feature (B) LOCATION 1...459
  hypothetical: NO
  anti-sense: NO
atgggacgagcgtttgaatacagaagagcggctaaagaaaaacgatgggataagatgagtaaggttttccccaagctggctaaagcgatcactctagcggcaaaagagggcgggagcgagccggacacgaacgccaaactacgaacggcgattttaaacgctaaagcgcaaaacatgcctaaagacaatattgatgcagcgattaaaagagcgagcagtaaagaagggaatttgagcgagatcacttatgagggtaaggcgaattttggcgtgctaatcatcatggaatgcatgactgataaccccactagaacgatcgccaaccttaaaagctatttcaataaaacgcaaggggcgagcatcgtgcctaatggctctttagagtttatgtttaatagaaaaagcgtgtttgaatgcttgaaaagtgaagtggaaaatttaaaactcagcctagagatt

SEQ ID NO: 3772 - DNA (genomic), 723 bp, Helicobacter pylori; double-stranded, circular
  misc_feature (B) LOCATION 1...723
  hypothetical: NO
  anti-sense: NO
atgggacgagcgtttgaatacagaagagcggctaaagaaaaacgatgggataagatgagtaaggttttccccaagctggctaaagcgatcactctagcggcaaaagagggcgggagcgagccggacacgaacgccaaactacgaacggcgattttaaacgctaaagcgcaaaacatgcctaaagacaatattgatgcagcgattaaaagagcgagcagtaaagaagggaatttgagcgagatcacttatgagggtaaggcgaattttggcgtgctaatcatcatggaatgcatgactgataaccccactagaacgatcgccaaccttaaaagctatttcaataaaacgcaaggggcgagcatcgtgcctaatggctctttagagtttatgtttaatagaaaaagcgtgtttgaatgcttgaaaagtgaagtggaaaatttaaaactcagcctagaagatttagagttcgccctcattgattatggtttggaagaattagaagaagtgggagacaagatcattattagaggggattataacagcttcaagctcttaaatgaggggtttgaaagcttgagattgcccattataaaagcgggtttgcaacgcatcgccacgacgcccattgaattgaatgacgaacaaatggagcttaccgaaaagctactggataggattgaagacgatgatgatgtggtcgcgctttatacgaatattgagtga

SEQ ID NO: 3773 - DNA (genomic), 1221 bp, Helicobacter pylori; double-stranded, circular
  misc_feature (B) LOCATION 1...1221
  hypothetical: NO
  anti-sense: NO
atgtttaatttaaaagaacgctgttttacagacaatgaattgaacgacaattttgtaggtattagaagcatcaataatgatttacaaatttgtttcccactaggatttgatataagcgataataaaaacattagagcagatgtaaaaaagcttgtttctattcttttagaatacaataaaacaattgcatgtgaaaatttgttaaataataaaaatgagattataaactcaaattttccactcacagcgtataaaaatgtcatagaatattttttatcgcatggttattattcagaaaataaaagttattatgaaaataacgcaaaaggcaggataaatttttccaaaacgattaagaaaaatagacctattattcaaacttttaacaataaaaattcttttgtctatactcgtttccaagttaaaaggaagatgataaacgaaaatgaattgataacagctataaacaaatattgtgtgcatgaagcgttttctaaatttggctttgtttttagctcgtttatgccaccaaaatttaacctacccactgataaaaattattgcatttatctgcttgaaaacaagctaaacaacacctttaatgatgacaagaaaatcctttttcaatccatgaaaaatattcttttacaagatgataatatcttggataagactgattttaaatttggaacacatcatttttatgttgtttgggaaagaatgatagacagagcatttggtataaaaaataaagaagtttattttcctaaaacaaaatggaatttgcggtgttctaatcaaaaccctgattatttattgcaaccagatagcatcatgctgtttgacgataaaatttacatattagatgcaaaatattataaatatggcataagtggagttgcaagcgatttgcccaatagtgcatccataataaaacagattgtttatggcgaatatgcggcaaaactagaaacaaaaaaagaggtttacaatatctttttaatgccctttaacagatttaacaatccgctaaaattgggtaatatttttgaaaatataggctttgcaaatggagagtggagagacaatctaaagcaatatgaaaatatacaaggaattttaatagacactaaatttttaatgcaaaactataataagaaatccaatgatcttttaaagttactagcaaaaaatgttgaagaaactaaaaataatttttaa

SEQ ID NO: 3774 - DNA (genomic), 1233 bp, Helicobacter pylori; double-stranded, circular
  misc_feature (B) LOCATION 1...1233
  hypothetical: NO
  anti-sense: NO
aagaacttttattcaatgtttaatttaaaagaacgctgttttacagacaatgaattgaacgacaattttgtaggtattagaagcatcaataatgatttacaaatttgtttcccactaggatttgatataagcgataataaaaacattagagcagatgtaaaaaagcttgtttctattcttttagaatacaataaaacaattgcatgtgaaaatttgttaaataataaaaatgagattataaactcaaattttccactcacagcgtataaaaatgtcatagaatattttttatcgcatggttattattcagaaaataaaagttattatgaaaataacgcaaaaggcaggataaatttttccaaaacgattaagaaaaatagacctattattcaaacttttaacaataaaaattcttttgtctatactcgtttccaagttaaaaggaagatgataaacgaaaatgaattgataacagctataaacaaatattgtgtgcatgaagcgttttctaaatttggctttgtttttagctcgtttatgccaccaaaatttaacctacccactgataaaaattattgcatttatctgcttgaaaacaagctaaacaacacctttaatgatgacaagaaaatcctttttcaatccatgaaaaatattcttttacaagatgataatatcttggataagactgattttaaatttggaacacatcatttttatgttgtttgggaaagaatgatagacagagcatttggtataaaaaataaagaagtttattttcctaaaacaaaatggaatttgcggtgttctaatcaaaaccctgattatttattgcaaccagatagcatcatgctgtttgacgataaaatttacatattagatgcaaaatattataaatatggcataagtggagttgcaagcgatttgcccaatagtgcatccataataaaacagattgtttatggcgaatatgcggcaaaactagaaacaaaaaaagaggtttacaatatctttttaatgccctttaacagatttaacaatccgctaaaattgggtaatatttttgaaaatataggctttgcaaatggagagtggagagacaatctaaagcaatatgaaaatatacaaggaattttaatagacactaaatttttaatgcaaaactataataagaaatccaatgatcttttaaagttactagcaaaaaatgttgaagaaactaaaaataatttt

SEQ ID NO: 3775 - DNA (genomic), 357 bp, Helicobacter pylori; double-stranded, circular
  misc_feature (B) LOCATION 1...357
  hypothetical: NO
  anti-sense: NO
atgcaatttgaaatgcgtaaaatcgcttttaatgcgcctaaagcgttttctttggagcatgagggagtggttttagagggtgaaatcgtgcgggtgggggcgaaattgttccgcttgaaagcacgccttaagggtgaattgatgcttatttgcgatacaagcggtaaagagtttaaaaaaagccttgatgagtcgttggttttgcatatttcagacgggttgtgggatacgcaaagccaaagtttggattttgataatttagacgttattgaatctttcaatggttttattgatttgagcgaaattttacgctctgaagtggagtctattaaattagactaccattatgcagattga

SEQ ID NO: 3776 - DNA (genomic), 360 bp, Helicobacter pylori; double-stranded, circular
  misc_feature (B) LOCATION 1...360
  hypothetical: NO
  anti-sense: NO
ttaagcatgcaatttgaaatgcgtaaaatcgcttttaatgcgcctaaagcgttttctttggagcatgagggagtggttttagagggtgaaatcgtgcgggtgggggcgaaattgttccgcttgaaagcacgccttaagggtgaattgatgcttatttgcgatacaagcggtaaagagtttaaaaaaagccttgatgagtcgttggttttgcatatttcagacgggttgtgggatacgcaaagccaaagtttggattttgataatttagacgttattgaatctttcaatggttttattgatttgagcgaaattttacgctctgaagtggagtctattaaattagactaccattatgcagat

SEQ ID NO: 3777 - DNA (genomic), 183 bp, Helicobacter pylori; double-stranded, circular
  misc_feature (B) LOCATION 1...183
  hypothetical: NO
  anti-sense: NO
gaatttagaaaaatggctggtagaatggaattgaaaaacattatttcagaaacccttaatgaaattgaaaaaatggctaaaaccattgatgatggttttaatacggcgcaaaaaacgccctcttttttcaaaacaccctctcattgcaaaacaccccaaactctaaaaatgctaacacccctt

SEQ ID NO: 3778 - DNA (genomic), 381 bp, Helicobacter pylori; double-stranded, circular
  misc_feature (B) LOCATION 1...381
  hypothetical: NO
  anti-sense: NO
tacggcgcaaaaaacgccctcttttttcaaaacaccctctcattgcaaaacaccccaaactctaaaaatgctaacacccctttagagccaaaaaacgctgctaaaatagaaacgcaagagaaaatcacagaagaaaaagaagaagcaaaagaaatcattacagaagaaatcgtgcaagaaaaccccacgcaagcgttaattccaaacgagcgggtttttttaaaaggcttactagaaagaaccttagtgttgtttaaaggcatgcaggctttagaagaaaaggaagcgctgaagcgtttggatttagtggcgcgtttcttgcaataccaattgagcgtgcttgaaaaacgattggaatctttagagcgagaaaacacagag

SEQ ID NO: 3779 - DNA (genomic), 474 bp, Helicobacter pylori; double-stranded, circular
  misc_feature (B) LOCATION 1...474
  hypothetical: NO
  anti-sense: NO
atggctggtagaatggaattgaaaaacattatttcagaaacccttaatgaaattgaaaaaatggctaaaaccattgatgatggttttaatacggcgcaaaaaacgccctcttttttcaaaacaccctctcatttgcaaaacaccccaaactctaaaaatgctaacacccctttagagccaaaaaacgctgctaaaatagaaacgcaagagaaaatcacagaagaaaaagaagaagcaaaagaaatcattacagaagaaatcgtgcaagaaaaccccacgcaagcgttaattccaaacgagcgggtttttttaaaaggcttactagaaagaaccttagtgttgtttaaaggcatgcaggctttagaagaaaaggaagcgctgaagcgtttggatttagtggcgcgtttcttgcaataccaattgagcgtgcttgaaaaacgattggaatctttagagcgagaaaacacagagtag

SEQ ID NO: 3780 - DNA (genomic), 864 bp, Helicobacter pylori; double-stranded, circular
  misc_feature (B) LOCATION 1...864
  hypothetical: NO
  anti-sense: NO
ttgattagtgtcgctcatagccctgatgctgatgatattttcatgtattatgcgattaagtttggctggatagattgccccattaaaaacaaaatattccacaacattgctttggatattgaaaccctaaaccaagaagccctaaaaaacacttatgatgtgagcgcgatcagtttcgggctataccctaaaattgcgaacgattacgccttactccccacagcaacgagctttgggaatggctatgggcctaaattagtgaaaaaaaagggcgtgaaattgaaaaaagattttagagtcgcgctcagtggggaacacactacaaacgccctcttgtttaagatctattacaaacacgcgcgcatcgcttacatgaattttttagacattgaaaaagcggttttggaaggaaaagcgcatgcgggcgtgctaatccatgagagtatcttggatgtccataatgaattagaagtggaaaaagaattgtgggatgtttggaaagaactcattgaagtggatttacccttacctttagggggcatggcgattaggcgatccatccctttgtatcgcgcgattttgattaaaaaggctttgattaaagcggttgaaaccgctttaaaacaccaggatctgctctctgacatgctattagaacgctcgctcattcgtgtcaataaagagcggttacaaacttatttaagcttgtatgcgaatgaaacttcaacgcgcttaagcgaggttcaaattctcgccatagacaagctttttgaattgggctatcagcacggattttacgctaacttgttaaagactaaagattgcttgctcactgatgaatatttaaaataccgcttttcttaa

SEQ ID NO: 3781 - DNA (genomic), 942 bp, Helicobacter pylori; double-stranded, circular
  misc_feature (B) LOCATION 1...942
  hypothetical: NO
  anti-sense: NO
tcgctaaagaaatcgctttttgtttgtcttcatctattgccattaaatcaccttattgaatttgatttgtttattctatcaaatcctagcctaaaatctattataataaaaggacttaccctatcacaaaaggattttactttgattagtgtcgctcatagccctgatgctgatgatattttcatgtattatgcgattaagtttggctggatagattgccccattaaaaacaaaatattccacaacattgctttggatattgaaaccctaaaccaagaagccctaaaaaacacttatgatgtgagcgcgatcagtttcgggctataccctaaaattgcgaacgattacgccttactccccacagcaacgagctttgggaatggctatgggcctaaattagtgaaaaaaaagggcgtgaaattgaaaaaagattttagagtcgcgctcagtggggaacacactacaaacgccctcttgtttaagatctattacaaacacgcgcgcatcgcttacatgaattttttagacattgaaaaagcggttttggaaggaaaagcgcatgcgggcgtgctaatccatgagagtatcttggatgtccataatgaattagaagtggaaaaagaattgtgggatgtttggaaagaactcattgaagtggatttacccttacctttagggggcatggcgattaggcgatccatccctttgtatcgcgcgattttgattaaaaaggctttgattaaagcggttgaaaccgctttaaaacaccaggatctgctctctgacatgctattagaacgctcgctcattcgtgtcaataaagagcggttacaaacttatttaagcttgtatgcgaatgaaacttcaacgcgcttaagcgaggttcaaattctcgccatagacaagctttttgaattgggctatgcagcacggattttacgc

SEQ ID NO: 3782 - DNA (genomic), 264 bp, Helicobacter pylori; double-stranded, circular
  misc_feature (B) LOCATION 1...264
  hypothetical: NO
  anti-sense: NO
atgccattagaaactatcacgctcgctcatatttatgaagaacaagggttttttgaagaagcgttgcaaatttatactaatattttaaagaaaacccctgacaatacagaggcgttaaagcaaatgaagcgtttggaaaaaatccaaaaaaattgcgctcctttcaaacacgatgcgctgttaaagcaacattatttaaattttatcaaaggggatcgtttgagcgttgagaatttagaaaaatggctggtagaatggaattga

SEQ ID NO: 3783 - DNA (genomic), 270 bp, Helicobacter pylori; double-stranded, circular
  misc_feature (B) LOCATION 1...270
  hypothetical: NO
  anti-sense: NO
gagaaacgcatgccattagaaactatcacgctcgctcatatttatgaagaacaagggttttttgaagaagcgttgcaaatttatactaatattttaaagaaaacccctgacaatacagaggcgttaaagcaaatgaagcgtttggaaaaaatccaaaaaaattgcgctcctttcaaacacgatgcgctgttaaagcaacattatttaaattttatcaaaggggatcgtttgagcgttgagaatttagaaaaatggctggtagaatggaat

SEQ ID NO: 3784 - DNA (genomic), 414 bp, Helicobacter pylori; double-stranded, circular
  misc_feature (B) LOCATION 1...414
  hypothetical: NO
  anti-sense: NO
cgcgaaaaaatcgctaaaatggttaaaaaaatccaagaacctttgcaaaaacaccaagaaatttttgacaatttgcatgcgcatttcccccatgttgaatcttttaaaaccgcgctcaatgagcaacaagaaatcctaaacgcccttaaaagcattgaagaagaagccgctaattgctctgatagctccatgcaagcgatggatattatgcagtttcaagacatccaccgccaaaaaattgaacgagtggtcaatgtcatgcgagcgctcagccaatacatgaattcgctttttgaaggcaaaattgatgattctaagcgcgtgagttcagcgacttatatcactggcgatgacgataaagatttagccagtgctgatgatattgaagccttgatcgcttcttttggagccaag

SEQ ID NO: 3785 - DNA (genomic), 459 bp, Helicobacter pylori; double-stranded, circular
  misc_feature (B) LOCATION 1...459
  hypothetical: NO
  anti-sense: NO
ggaacaacaatgacacaagaagaattagacgctttgatgagtggtggcgatttggaaaacttggaagccctagaggctaaagaagaggctaaagaacccactaaagaagagcctaaagagagtaaagagaattccaattatagtgaaaaaatgaccgtcaaaaaagaggacgctgaaaaatacggcaagattagcccccatgaatggcctccccctccccccactgaagagcataaagtcgtgcatcaattagacgatgttacaagagattctgaagtgaaagccacgcaaatttttgatcaactggatttgatcggggctagcgcgaaaaaatcgctaaaatggttaaaaaaatccaagaacctttgcaaaaacaccaagaaatttttgacaatttgcatgcgcatttcccccatgttgaatcttttaaaaccgcgctcaatgagcaacaagaaatcc

SEQ ID NO: 3786 - DNA (genomic), 732 bp, Helicobacter pylori; double-stranded, circular
  misc_feature (B) LOCATION 1...732
  hypothetical: NO
  anti-sense: NO
atgacacaagaagaattagacgctttgatgagtggtggcgatttggaaaacttggaagccctagaggctaaagaagaggctaaagaacccactaaagaagagcctaaagagagtaaagagaattccaattatagtgaaaaaatgaccgtcaaaaaagaggacgctgaaaaatacggcaagattagcccccatgaatggcctccccctccccccactgaagagcataaagtcgtgcatcaattagacgatgttacaagagattctgaagtgaaagccacgcaaatttttgatcaactggatttgatcggggctagcgctgaaaaaatcgctaaaatggttaaaaaaatccaagaacctttgcaaaaacaccaagaaatttttgacaatttgcatgcgcatttcccccatgttgaatcttttaaaaccgcgctcaatgagcaacaagaaatcctaaacgcccttaaaagcattgaagaagaagccgctaattgctctgatagctccatgcaagcgatggatattatgcagtttcaagacatccaccgccaaaaaattgaacgagtggtcaatgtcatgcgagcgctcagccaatacatgaattcgctttttgaaggcaaaattgatgattctaagcgcgtgagttcagcgacttatatcaccggcgatgacgataaagatttagccagtgctgatgatattgaagccttgatcgcttcttttggagccaagtag

SEQ ID NO: 3787 - DNA (genomic), 330 bp, Helicobacter pylori; double-stranded, circular
  misc_feature (B) LOCATION 1...330
  hypothetical: NO
  anti-sense: NO
gtgaaaacatcgtgtttggttacaatagggaggatccggggcgtttttatcattaaggcgcagttgttgcttcgtgagggaggttttatgaattttaccgcttataacacgaagacgccagggcatttgcatttgtatgtgcataaggggcatacggaattaggcgagggtgaaaggctgattaaaactttatccatgaaattagcgcaagggttgcctaaagaatggagggttttccctagcaatgaatggcctaaggaatttaatattttagctttaccttatgaagtgtttgcaaaagagcgcgggagctcttgggcgaagcattta

SEQ ID NO: 3788 - DNA (genomic), 543 bp, Helicobacter pylori; double-stranded, circular
  misc_feature (B) LOCATION 1...543
  hypothetical: NO
  anti-sense: NO
atgacggaaatggaattaaagctcattaaaatagacacaagccattattttgaaaaaaaaccaggcttgggggagagaatggattatgcgggtcgttgttattataataaattccaaagagtgaatgccatgctcacaagctcgctcattcaaaagcatttgaaaagggagatagaaatcgcgcacaacctcattttgcgtaacgataaggtggaaaacatcgtgtttgattataatgggaggaatccggagcgtttttatcataaggcgcagttattgcttcgtgaggaaggttttatgaattttaccgcttataacacgaagacgccagggcatttgcatttgtatgtgcataaggggcatacggaattaggcgagggtgaaaggctgattaaaactttatccatgaaattagcgcaagggttgcctaaagaatggagggttttccctagcaatgaatggcctaaggaatttaatattttagctttaccttatgaagtgtttgcaaaagagcgcgggagctcttgggcgaagcatttataa

SEQ ID NO: 3789 - DNA (genomic), 549 bp, Helicobacter pylori; double-stranded, circular
  misc_feature (B) LOCATION 1...549
  hypothetical: NO
  anti-sense: NO
ggaagcatgatgacggaaatggaattaaagctcattaaaatagacacaagccattattttgaaaaaaaaccaggcttgggggagagaatggattatgcgggtcgttgttattataataaattccaaagagtgaatgccatgctcacaagctcgctcattcaaaagcatttgaaaagggagatagaaatcgcgcacaacctcattttgcgtaacgataaggtggaaaacatcgtgtttgattataatgggaggaatccggagcgtttttatcataaggcgcagttattgcttcgtgaggaaggttttatgaattttaccgcttataacacgaagacgccagggcatttgcatttgtatgtgcataaggggcatacggaattaggcgagggtgaaaggctgattaaaactttatccatgaaattagcgcaagggttgcctaaagaatggagggttttccctagcaatgaatggcctaaggaatttaatattttagctttaccttatgaagtgtttgcaaaagagcgcgggagctcttgggcgaagcattta

SEQ ID NO: 3790 - DNA (genomic), 1347 bp, Helicobacter pylori; double-stranded, circular
  misc_feature (B) LOCATION 1...1347
  hypothetical: NO
  anti-sense: NO
atgaaagtttatttaaggaaaattgataatcaaatattacataataaacgaatcagtattaaaaaaggtattttagagcatttttttgataaagccaacaaccaagatgaagtagatatgagtggtatcttatccaactataacgataaagttagcatcctcttagcaacagaccctagacttggtggaggcattaagagaatcatcagtgcagaagttgataaaataaaagaaaaccgattggattatgagttaaaaattgatgatattctgctttttacttacatatcttataaaaaatacacattagaaatcattttactagctgatacaagatacaatgttttaaatggcttaatcaataatagcaagcatttattggtttttagcgagaatgaaacgagaactttagatgatggtaaaataaatgaaagcgttagaatagatgggggaaaaaatatcatcctttatggtgttcctggtagcggcaaaagttatactttgcaaagagattattgcaataatagcgtggtagaaaagatagtgttccaccctgattattcttatagtgattttgtgggacagattatgccaagtgtagatgatagcggtatcgttagttataaatttaatcctggaccttttacaaatatccttaaaaaagcgtatcataacccacaaactaagcatgttctagtgattgatgaaataaatcgtggtaatgtgcctgccatatttggagaaatttttcaacttcttgacagacttaaacatgacaaagatggctttaagaaaggctctagtgagtatgctatcaataatacggatattgccaatattgtccataacgataaaaatgcaagtataagaatcccgtcaaatttatggatagtcgctacaatgaatacgagcgatcaaaatgtattcacactagatactgcttttcagcgtagattttctatgcaactcgttgaaaattcctttgaaaatgttgatgatgattttaaaaatatgaaaattttagatactgatatgacttggcaaaaattttgcaccaccatcaatgaaaaaatagctcaaaataacgaggggctgagttctatggaagataagcgatttggcgtttattttgtaagtattgatgatctaaagagcaaagaaaattttgcacataaagttataaaatacctttgggacgatgtttttaaatttgatagaaatataatatttaacactacaaaatttaatacacttgaagctgttgtaaaaaattttatcaaagaaaaagatagaacccaatttgatgtttttagcgatgatataaaagaacttttattcaatgtttaa

SEQ ID NO: 3791 - DNA (genomic), 1347 bp, Helicobacter pylori; double-stranded, circular
  misc_feature (B) LOCATION 1...1347
  hypothetical: NO
  anti-sense: NO
aaaatgaaagtttatttaaggaaaattgataatcaaatattacataataaacgaatcagtattaaaaaaggtattttagagcatttttttgataaagccaacaaccaagatgaagtagatatgagtggtatcttatccaactataacgataaagttagcatcctcttagcaacagaccctagacttggtggaggcattaagagaatcatcagtgcagaagttgataaaataaaagaaaaccgattggattatgagttaaaaattgatgatattctgccttttacttacatatcttataaaaaatacacattagaaatcattttactagctgatacaagatacaatgttttaaatggcttaatcaataatagcaagcatttattggtttttagcgagaatgaaacgagaactttagatgatggtaaaataaatgaaagcgttagaatagatgggggaaaaaatatcatcctttatggtgttcctggtagcggcaaaagttatactttgcaaagagattattgcaataatagcgtggtagaaaagatagtgttccaccctgattattcttatagtgattttgtgggacagattatgccaagtgtagatgatagcggtatcgttagttataaatttaatcctggaccttttacaaatatccttaaaaaagcgtatcataacccacaaactaagcatgttctagtgattgatgaaataaatcgtggtaatgtgcctgccatatttggagaaatttttcaacttcttgacagacttaaacatgacaaagatggctttaagaaaggctctagtgagtatgctatcaataatacggatattgccaatattgtccataacgataaaaatgcaagtataagaatcccgtcaaatttatggatagtcgctacaatgaatacgagcgatcaaaatgtattcacactagatactgcttttcagcgtagattttctatgcaactcgttgaaaattcctttgaaaatgttgatgatgattttaaaaatatgaaaattttagatactgatatgacttggcaaaaattttgcaccaccatcaatgaaaaaatagctcaaaataacgaggggctgagttctatggaagataagcgatttggcgtttattttgtaagtattgatgatctaaagagcaaagaaaattttgcacataaagttataaaatacctttgggacgatgtttttaaatttgatagaaatataatatttaacactacaaaatttaatacacttgaagctgttgtaaaaaattttatcaaagaaaaagatagaacccaatttgatgtttttagcgatgatataaaagaacttttattcaatgtt

SEQ ID NO: 3792 - DNA (genomic), 927 bp, Helicobacter pylori; double-stranded, circular
  misc_feature (B) LOCATION 1...927
  hypothetical: NO
  anti-sense: NO
atggctaaagaaaatctgcctatcgtttttgggcctgttttatccaggcgttttgggaagtctttgggcgtggatttatcgccctctaaaaaacaatgcaattacaattgcatttattgcgagttgggtaaagccaagcccattgaacgcatggaagaagtgataaaagtagaaaccttgattagcaccattcaaaacgctctaaacaacctcaccacccccattgatgttttaaccattaccgctaatggcgaacccacgctataccctcatttattagagcttatccaaagcatcaagccttttttaaagggcgttaaaactttgattttaagcaatggatcattattttatgagccaaaagtccagcaggccttaaaggaatttgacatcgttaaattttctttagacgctattgatttgaaagcctttgaaagagtggataagccctattctaaagacattaacaagattttagaggggattttgagcttttctcaaatttatcaggggcaactggtggctgaagtgctgttaattaagggcgtgaatgatagcgcgaacaacttaaaactcatcgctgactttttaaaaaaaatcaataccgctagagtggatttaagcaccatagacaggccctcaagctttaaagcccctaaattgagcgaagatgaattattaaaatgctctttattttttgaagggctttgcgtgagtttgcctaaacgatccactgctcaagccaaaaaattggtttcttgcggtatagacgaattgctcgctttaatttccaggcgccctttaagcgcagaagaagcccccctaatactggatcctaacgcttttaagcatttggaaactttattaaaccataagcaaattacgattaaaaaagtcggctctttggagttttattgcgcgttttaa

SEQ ID NO: 3793 - DNA (genomic), 933 bp, Helicobacter pylori; double-stranded, circular
  misc_feature (B) LOCATION 1...933
  hypothetical: NO
  anti-sense: NO
aggaagataatggctaaagaaaatctgcctatcgtttttgggcctgttttatccaggcgttttgggaagtctttgggcgtggatttatcgccctctaaaaaacaatgcaattacaattgcatttattgcgagttgggtaaagccaagcccattgaacgcatggaagaagtgataaaagtagaaaccttgattagcaccattcaaaacgctctaaacaacctcaccacccccattgatgttttaaccattaccgctaatggcgaacccacgctataccctcatttattagagcttatccaaagcatcaagccttttttaaagggcgttaaaactttgattttaagcaatggatcattattttatgagccaaaagtccagcaggccttaaaggaatttgacatcgttaaattttctttagacgctattgatttgaaagcctttgaaagagtggataagccctattctaaagacattaacaagattttagaggggattttgagcttttctcaaatttatcaggggcaactggtggctgaagtgctgttaattaagggcgtgaatgatagcgcgaacaacttaaaactcatcgctgactttttaaaaaaaatcaataccgctagagtggatttaagcaccatagacaggccctcaagctttaaagcccctaaattgagcgaagatgaattattaaaatgctctttattttttgaagggctttgcgtgagtttgcctaaacgatccactgctcaagccaaaaaattggtttcttgcggtatagacgaattgctcgctttaatttccaggcgccctttaagcgcagaagaagcccccctaatactggatcctaacgcttttaagcatttggaaactttattaaaccataagcaaattacgattaaaaaagtcggctctttggagttttattgcgcgttt

SEQ ID NO: 3794 - DNA (genomic), 630 bp, Helicobacter pylori; double-stranded, circular
  misc_feature (B) LOCATION 1...630
  hypothetical: NO
  anti-sense: NO
ttgcaacattcacgccttcaaactttacgctccctttatatggagcgtcttttaggcgaaacttatacggatattagccttataaagccccaaaataagccccttaacaaacaagttcatgagggtatagaaaattgtaatttgtgcaaacgccatcaacattcaaaacccatcaccgggctttttaaccccacttccaagctcgctttcatcacgctaacccccatgctggatagccaattacatttcttaaacaatttaaaagcagccatgttagagagcattatccaaaaggtttttaactaccccttaaaagattgcagtatcttatcgctccttaaatgcgactctaacagccttaatttagaagaagaaatcaacgcatgcctaccccatttaacctggcaattagacaacagcgctccaaaagtcattatcgtatttggcgaggttttacccaaacgccttttaaacctttctaaagaagaatcctttgggcgcatcgtgtctttaaaaaccaaacattttttaagcacccatgctttagaagacatgctcaaaaaccccacgctcaaaaaagaagcgttagcacattttaaaatagctctccaattcctcaatcagtcttaa

SEQ ID NO: 3795 - DNA (genomic), 639 bp, Helicobacter pylori; double-stranded, circular
  misc_feature (B) LOCATION 1...639
  hypothetical: NO
  anti-sense: NO
agactgaacgctttgcaacattcacgccttcaaactttacgctccctttatatggagcgtcttttaggcgaaacttatacggatattagccttataaagccccaaaataagccccttaacaaacaagttcatgagggtatagaaaattgtaatttgtgcaaacgccatcaacattcaaaacccatcaccgggctttttaaccccacttccaagctcgctttcatcacgctaacccccatgctggatagccaattacatttcttaaacaatttaaaagcagccatgttagagagcattatccaaaaggtttttaactaccccttaaaagattgcagtatcttatcgctccttaaatgcgactctaacagccttaatttagaagaagaaatcaacgcatgcctaccccatttaacctggcaattagacaacagcgctccaaaagtcattatcgtatttggcgaggttttacccaaacgccttttaaacctttctaaagaagaatcctttgggcgcatcgtgtctttaaaaaccaaacattttttaagcacccatgctttagaagacatgctcaaaaaccccacgctcaaaaaagaagcgttagcacattttaaaatagctctccaattcctcaatcagtct

SEQ ID NO: 3796 - DNA (genomic), 1263 bp, Helicobacter pylori; double-stranded, circular
  misc_feature (B) LOCATION 1...1263
  hypothetical: NO
  anti-sense: NO
ggtgaaaccggggatgagcccccattgaaaatagtcgtagccgagtggtggccaatggataaaagagaaagcaaagggtttaggcgttttatcttgtatttcatcttaagccaacgctacacaatcaccctccaccaaaaccctaacgaaccctccgatcttgtctttggcagtcctattggatcagccagaaaaatcctatcctatcaaaacactaaaagggtgttttacaccggtgaaaatgaagtccctaatttcaacctctttgattacgccataggctttgatgaattggactttagagatcgttatttgagaatgcctttatattacgctagcttgcattataaagccgagagcgtgaatgacaccaccgcgccctacaaactcaaagacaacagcctttatgctttaaaaaagccctcccatcattttaaagaaaaccaccctaatttatgcgcagtagtgaatgatgagagcgatcctttgaaaagagggtttgcgagctttgtcgcgagcaaccctaacgctcctataaggaacgctttctatgacgctttaaattctattgagccagttactgggggagggagcgtgaaaaacactttaggctataacgtcaaaaacaagagcgagtttttaagccaatacaaattcaacctgtgttttgaaaacactcaaggctatggctatgttaccgaaaagatcattgacgcttatttcagccacaccattcccatttattgggggagtcctagcgtggcgaaagactttaaccctaagagttttgtgaacgtttgtgattttaaaaactttgatgaagcgattgattacgtgagatacttgcacacgcacccaaacgcttatttagacatgctctatgaaaaccctttaaacacccttgatgggaaagcttacttttaccaaaatttgagttttaaaaaaatcctagatttttttaaaacgattttagaaaacgacacgatctatcacgataaccctttcattttctatcgcgatttgaatgagcctttagtagctattgatgatttgagggttaattatgatgatttgagggttaattatgatgatttgagggttaattatgatgatttgagggttaattatgatcgccttttacaaaacgcttcgcctttattagaactctctcaaaacaccacttttaaaatctatcgcaaagcctatcaaaaatccttacctttgttgcgcgccataaggagatgggttaaaaaattgggtttg

SEQ ID NO: 3797 - DNA (genomic), 1311 bp, Helicobacter pylori; double-stranded, circular
  misc_feature (B) LOCATION 1...1311
  hypothetical: NO
  anti-sense: NO
atgttccagcccctattagacgcttatacagacagcacccgtttagatgaaaccgattataagcccccattaaatatagccctagccaattggtggcctttggataaaagagaaagcaaagggtttaggcgttttatcttgtatttcatcttaagccaacgctacacaatcaccctccaccaaaaccctaacgaaccctccgatcttgtctttggcagtcctattggatcagccagaaaaatcctatcctatcaaaacactaaaagggtgttttacaccggtgaaaatgaagtccctaatttcaacctctttgattacgccataggctttgatgaattggactttagagatcgttatttgagaatgcctttatattacgctagcttgcattataaagccgagagcgtgaatgacaccaccgcgccctacaaactcaaagacaacagcctttatgctttaaaaaagccctcccatcattttaaagaaaaccaccctaatttatgcgcagtagtgaatgatgagagcgatcctttgaaaagagggtttgcgagctttgtcgcgagcaaccctaacgctcctataaggaacgctttctatgacgctttaaattctattgagccagttactgggggagggagcgtgaaaaacactttaggctataacgtcaaaaacaagagcgagtttttaagccaatacaaattcaatctgtgttttgaaaacactcaaggctatggctatgtaactgaaaaaatcattgacgcttatttcagccacaccattcccatttattgggggagtcctagcgtggcgaaagactttaaccctaagagttttgtgaacgtttgtgattttaaaaactttgatgaagcgattgattacgtgagatacttgcacacgcacccaaacgcttatttagacatgctctatgaaaaccctttaaacacccttgatgggaaagcttacttttaccaaaatttgagttttaaaaaaatcctagatttttttaaaacgattttagaaaacgacacgatctatcacgataaccctttcattttctatcgcgatttgaatgagcctttagtagctattgatgatttgagggttaattatgatgatttgagggttaattatgatgatttgagggttaattatgatgatttgagggttaattatgatcgccttttacaaaacgcttcgcctttattagaactctctcaaaacaccacttttaaaatctatcgcaaagcctatcaaaaatccttacctttgttgcgcgccataaggagatgggttaaaaaattgggtttgtga

SEQ ID NO: 3798 - DNA (genomic), 873 bp, Helicobacter pylori; double-stranded, circular
  misc_feature (B) LOCATION 1...873
  hypothetical: NO
  anti-sense: NO
ttgacacccaacaagaaactttttaaaaaaatctatatagaattaagcgatatttgcgggttgcagtgcggtttttgccctaaccctaaaaatatcagaggcgtgatgcctttagaattgtttgaaaaagtttgtaaagaagcggtccccttaaccccaatgattactttgcatgtcttaggcgatccttgcaagctcaaaaatttaaaccgctatctcaatgccgccaaacgcttttctttaaaagtggatttggttactagcggggcgtatttgcataattttgagacgcttttacaagatgcaatctatcaaatttctatttctttagacgcagggctagacaatcataacaaactcaaccagcaccgctatatccaaaaaattttagaattttgccgctataaatgtgaaaaaaatagcgaagtgtttttgaatttacgcattcaagatagcacccttgacaaacaccagaatttgatcaagccttttttagaaagctttgaatgcgtttctttagagactctaaaatcgcaaggccgcgctcgtttgtttaaaaaaagttttttgaatatccaaaagacctttaaatggccgaatttgaacgcccaaaatcctttaaaccaagaatcaaaaatcccctattgttacggcttgatcaagcaaatcgctattttatctaatggcgttgtcgtgccgtgttgcatggacacgcaagctcatatcaaccttggagatttaaaccatacgcccttaaaagatattttaaacagccaaaaagctatggctatcaaaacccattttttaaagggcgaagcgttagaacttttatgccaaaactgctcctaccctttgatccgctataaaaaatga

SEQ ID NO: 3799 - DNA (genomic), 873 bp, Helicobacter pylori; double-stranded, circular
  misc_feature (B) LOCATION 1...873
  hypothetical: NO
  anti-sense: NO
gaattgacacccaacaagaaactttttaaaaaaatctatatagaattaagcgatatttgcgggttgcagtgcggtttttgccctaaccctaaaaatatcagaggcgtgatgcctttagaattgtttgaaaaagtttgtaaagaagcggtccccttaaccccaatgattactttgcatgtcttaggcgatccttgcaagctcaaaaatttaaaccgctatctcaatgccgccaaacgcttttctttaaaagtggatttggttactagcggggcgtatttgcataattttgagacgcttttacaagatgcaatctatcaaatttctatttctttagacgcagggctagacaatcataacaaactcaaccagcaccgctatatccaaaaaattttagaattttgccgctataaatgtgaaaaaaatagcgaagtgtttttgaatttacgcattcaagatagcacccttgacaaacaccagaatttgatcaagccttttttagaaagctttgaatgcgtttctttagagactctaaaatcgcaaggccgcgctcgtttgtttaaaaaaagttttttgaatatccaaaagacctttaaatggccgaatttgaacgcccaaaatcctttaaaccaagaatcaaaaatcccctattgttacggcttgatcaagcaaatcgctattttatctaatggcgttgtcgtgccgtgttgcatggacacgcaagctcatatcaaccttggagatttaaaccatacgcccttaaaagatattttaaacagccaaaaagctatggctatcaaaacccattttttaaagggcgaagcgttagaacttttatgccaaaactgctcctaccctttgatccgctataaaaaa

SEQ ID NO: 3800 - DNA (genomic), 219 bp, Helicobacter pylori; double-stranded, circular
  misc_feature (B) LOCATION 1...219
  hypothetical: NO
  anti-sense: NO
atgtgcctgacaggcggcttgatgcgttggctcaaatcggtaaagcctgaacgaatcttgcattctgtggtggaatttgtggatattgccggattgattaagggggcgagcaagggggagggtttaggcaatcagtttttagccaatatcaaggaatgcgaagtgatcttgcaagtggtgcgctgttttgaagatgacaatyatcacgcatgtgaacga

SEQ ID NO: 3801 - DNA (genomic), 1101 bp, Helicobacter pylori; double-stranded, circular
  misc_feature (B) LOCATION 1...1101
  hypothetical: NO
  anti-sense: NO
atgggcttgtctgtaggcattgtgggtttgcctaatgtgggcaaatccagcacctttaacgcgctcaccaaaacccaaaacgcccaaagtgcgaattaccctttttgcaccattgaacccaataaagccattgtgaatgtgcctgacaggcggcttgatgcgttggctcaaatcgtaaagcctgaacgaatcttgcattctgtggtggaatttgtggatattgccggattgattaagggggcgagcaagggggagggtttaggcaatcagtttttagccaatatcaaggaatgcgaagtgatcttgcaagtggtgcgctgttttgaagatgacaatatcacgcatgtgaacgataaaattgaccccctaaatgatatagaaaccattgaattggaattgattttggcggatattgccactttagacaaaaggatcgatcgcttgcaaaaagccctaaaaagctcaaaagacgctaaaaatcttttagaatgcgctttgagtttaaaaacgcatttagaagaattgaagccggcgaaaactttccccttaaacacgagcgaggcttttttggaattagacaaggaattgcgttttttatcccataaaaaaatgatctatgtcgctaatgtgggcgaagaagatttaaatattctcaacgagcatgccaaaaaagttgaaaaccatgcgaaagtccaaaatagcgagtttgtcgccttgtgcgctaaattggaagaagaaatggtttctatgagtggagatgaagtcaaagaatttttgcaaagtttgggcgtagaagaaagcgggctagaaaaaaccattcgtttgagttttaaggaattaggcttgatcaattattttaccgctggagtcaaggaagtgcgatcatggacgattaaaaaaggttctagtgcgcctgtggctgctggggtgatccataaggattttgaaaaaggctttattagagctgaaaccatcagttatgacgattttatcgcttataagggcgaagccggggcgaaagaaaagggagcgttacgcattgaaggtaaggattatatcgttcaagatggcgatgtgttgcattttcgcttcaatgtctag

SEQ ID NO: 3802 - DNA (genomic), 1110 bp, Helicobacter pylori; double-stranded, circular
  misc_feature (B) LOCATION 1...1110
  hypothetical: NO
  anti-sense: NO
aaaaggcttgaaatgggcttgtctgtaggcattgtgggtttgcctaatgtgggcaaatccagcacctttaacgcgctcaccaaaacccaaaacgcccaaagtgcgaattaccctttttgcaccattgaacccaataaagccattgtgaatgtgcctgacaggcggcttgatgcgttggctcaaatcgtaaagcctgaacgaatcttgcattctgtggtggaatttgtggatattgccggattgattaagggggcgagcaagggggagggtttaggcaatcagtttttagccaatatcaaggaatgcgaagtgatcttgcaagtggtgcgctgttttgaagatgacaatatcacgcatgtgaacgataaaattgaccccctaaatgatatagaaaccattgaattggaattgattttggcggatattgccactttagacaaaaggatcgatcgcttgcaaaaagccctaaaaagctcaaaagacgctaaaaatcttttagaatgcgctttgagtttaaaaacgcatttagaagaattgaagccggcgaaaactttccccttaaacacgagcgaggcttttttggaattagacaaggaattgcgttttttatcccataaaaaaatgatctatgtcgctaatgtgggcgaagaagatttaaatattctcaacgagcatgccaaaaaagttgaaaaccatgcgaaagtccaaaatagcgagtttgtcgccttgtgcgctaaattggaagaagaaatggtttctatgagtggagatgaagtcaaagaatttttgcaaagtttgggcgtagaagaaagcgggctagaaaaaaccattcgtttgagttttaaggaattaggcttgatcaattattttaccgctggagtcaaggaagtgcgatcatggacgattaaaaaaggttctagtgcgcctgtggctgctggggtgatccataaggattttgaaaaaggctttattagagctgaaaccatcagttatgacgattttatcgcttataagggcgaagccggggcgaaagaaaagggagcgttacgcattgaaggtaaggattatatcgttcaagatggcgatgtgttgcattttcgcttcaatgtc

SEQ ID NO: 3803 - DNA (genomic), 480 bp, Helicobacter pylori; double-stranded, circular
  misc_feature (B) LOCATION 1...480
  hypothetical: NO
  anti-sense: NO
gtgaattcttttctggttcgtttgttagcagttaattcttacgcttttgattggaatatttttaaatacaatctgggtttcaatatgttcatcatggaccatgaaggctcaacgccttattgggtcaatactaacaccaatcttaaaacccgtttgactccaaattttgggatccaattttatacaagaggtgtggagcaaagcttgactgtgggggcgtatttttttcaaaacttccataactacagcactaattttccctaccgttgggggcctactatgtattataaggctagagggaagcgttttactttttatggagggattttccctaggaaaaacctcttagggaggtatggtttgaatatttttgccccttattattggtttatagatcccaacgctaggtgggttttattgcaattcaaaaccattattcgccttcaaaaccctattatgggcatgcggagtttatgctag

SEQ ID NO: 3804 - DNA (genomic), 231 bp, Helicobacter pylori; double-stranded, circular
  misc_feature (B) LOCATION 1...231
  hypothetical: NO
  anti-sense: NO
gtgctaaaataccctacrrtgttcatgtgtgcggatgcggtcattatcagtaaggcggacatgattgaagtgtttaattttagggtttctcaagtcaaagaagacatgcaaaaattaaagcctgaagcgcccatttttttaatgagctccaaagaccctaaaagcttggaagattttaaaaatttccttttagaaaaaaagcgtgaaaattaccaatccacgcattcgttt

SEQ ID NO: 3805 - DNA (genomic), 729 bp, Helicobacter pylori; double-stranded, circular
  misc_feature (B) LOCATION 1...729
  hypothetical: NO
  anti-sense: NO
atgagcgaacaacgaaaagaatcgttacaaaataaccctaatttgagtaaaaaagacatcaaaatcgtggaaaagattttgagcaagaacgacattaaagccgctgaaatgaaagagcgctaccttaaagaagggctgtatgtgttgaatttcatgagttctcccggtagcggtaaaaccacgatgttagaaaatctagcggattttaaagactttaagttttgcgtggtagagggcgatttgcaaaccaacagggatgcggacaggttgcgtaaaaaaggcgtgagcgcgcatcagatcaccaccggcgaagcgtgccatttggaagcgagcatgattgagggggcgtttgatttattaaaagatgagggagcgttagaaaaaagcgattttttaatcattgaaaacgtggggaatctggtttgcccctcaagctataatctaggggcggcgatgaatatcgttttactctctgtcccagagggcgatgataaggtgctaaaataccctacgatgttcatgtgtgcggatgcggtcattatcagtaaggcggacatgattgaagtgtttaattttagggtttctcaagtcaaagaagacatgcaaaaattaaagcctgaagcgcccatttttttaatgagctccaaagaccctaaaagcttggaagattttaaaaatttccttttagaaaaaaagcgtgaaaattaccaatccacgcattcgttttaa

SEQ ID NO: 3806 - DNA (genomic), 738 bp, Helicobacter pylori; double-stranded, circular
  misc_feature (B) LOCATION 1...738
  hypothetical: NO
  anti-sense: NO
aaaggaacaagcatgagcgaacaacgaaaagaatcgttacaaaataaccctaatttgagtaaaaaagacatcaaaatcgtggaaaagattttgagcaagaacgacattaaagccgctgaaatgaaagagcgctaccttaaagaagggtctgtatgtgtgaatttcatgagttctcccggtagcggtaaaaccacgatgttagaaaatctagcggattttaaagactttaagttttgcgtggtagagggcgatttgcaaaccaacagggatgcggacaggttgcgtaaaaaaggcgtgagcgcgcatcagatcaccaccggcgaagcgtgccatttggaagcgagcatgattgagggggcgtttgatttattaaaagatgagggagcgttagaaaaaagcgattttttaatcattgaaaacgtggggaatctggtttgcccctcaagctataatctaggggcggcgatgaatatcgttttactctctgtcccagagggcgatgataaggtgctaaaataccctacgatgttcatgtgtgcggatgcggtcattatcagtaaggcggacatgattgaagtgtttaattttagggtttctcaagtcaaagaagacatgcaaaaattaaagcctgaagcgcccatttttttaatgagctccaaagaccctaaaagcttggaagattttaaaaatttccttttagaaaaaaagcgtgaaaattaccaatccacgcattcgttt

SEQ ID NO: 3807 - DNA (genomic), 735 bp, Helicobacter pylori; double-stranded, circular
  misc_feature (B) LOCATION 1...735
  hypothetical: NO
  anti-sense: NO
ggaacaagcatgagcgaacaacgaaaagaatcgttacaaaataaccctaatttgagtaaaaaagacatcaaaatcgtggaaaagattttgagcaagaacgacattaaagccgctgaaatgaaagagcgctaccttaaagaagggtctgtatgtgtgaatttcatgagttctcccggtagcggtaaaaccacgatgttagaaaatctagcggattttaaagactttaagttttgcgtggtagagggcgatttgcaaaccaacagggatgcggacaggttgcgtaaaaaaggcgtgagcgcgcatcagatcaccaccggcgaagcgtgccatttggaagcgagcatgattgagggggcgtttgatttattaaaagatgagggagcgttagaaaaaagcgattttttaatcattgaaaacgtggggaatctggtttgcccctcaagctataatctaggggcggcgatgaatatcgttttactctctgtcccagagggcgatgataaggtgctaaaataccctacgatgttcatgtgtgcggatgcggtcattatcagtaaggcggacatgattgaagtgtttaattttagggtttctcaagtcaaagaagacatgcaaaaattaaagcctgaagcgcccatttttttaatgagctccaaagaccctaaaagcttggaagattttaaaaatttccttttagaaaaaaagcgtgaaaattaccaatccacgcattcgttt

SEQ ID NO: 3808 - DNA (genomic), 300 bp, Helicobacter pylori; double-stranded, circular
  misc_feature (B) LOCATION 1...300
  hypothetical: NO
  anti-sense: NO
atgagaatggttcattttttagagggcgttcattttgagaaactccacattgaagcgttgagtgaaaattcttccaataaagaaatccgcatttgcatgcccaagggagcgatcatggacaaacacaaggccccgggagctatcagcgtgcaggttttagagggtaaaatcgtttttgaagtgggagatgaaaaaatagaaatgccaaagggggcgttaatcagcctagaagcccaagtttcgcatcgtttggacgctttagaaaatagcgttataagattgtctttgagtaaaaaataa

SEQ ID NO: 3809 - DNA (genomic), 357 bp, Helicobacter pylori; double-stranded, circular
  misc_feature (B) LOCATION 1...357
  hypothetical: NO
  anti-sense: NO
cgaagagttagaaatcgctttacaagccaaagaaatggtagaaaaaataaaggtcgtttaatgagaatggttcattttttagagggcgttcattttgagaaactccacattgaagcgttgagtgaaaattcttccaataaagaaattcgcatttgcatgcccaagggagcgatcatggacaaacacaaggccccgggagctatcagcgtgcaggttttagagggtaaaatcgtttttgaagtgggagatgaaaaaatagaaatgccaaagggggcgttaatcagcctagaagcccaagtttcgcatcgtttggacgctttagaaaatagcgttataagattgtctttgagtaaaaaa

SEQ ID NO: 3810 - DNA (genomic), 384 bp, Helicobacter pylori; double-stranded, circular
  misc_feature (B) LOCATION 1...384
  hypothetical: NO
  anti-sense: NO
aggatagtcatgccatctcctgttaatcccattcacaccaacgcaaacgctttaaacagcggagcgaaaaacgaagttaaagacgccaaaaacgcccctaaaagcgcatcaaaagatttcagtaagatcttaaaccaaaagatctctaaagacaaaaccgcccctaaagaatcgccaaaccatagtgctttaaaagccacgcccaaagacgctaaagaggacgctaaagcgcttgaaaaaacccctaccctaccccaccaacacgctcaaaacctcgctaaagaccaacaagcccctaccctaaaagattggctcaaccacccaaaaacccacccaacagccccacatgaggcccaacatgaaacccatgaggctaatggaaac

SEQ ID NO: 3811 - DNA (genomic), 1278 bp, Helicobacter pylori; double-stranded, circular
  misc_feature (B) LOCATION 1...1278
  hypothetical: NO
  anti-sense: NO
aagattggctcaaccacccaaaaacccacccaacagccccacatgaggcccaacatgaaacccatgaggctaatggaaactaaccccatcacccttaatgaaactttaagtaagaatgtcaaaaagcctaacgaagttgcttctaacgctcatcaaacaaacttgcctaataaaaaccctataacccctaaccacgctaacaacgttatcaaaaaccccaccaccccaacccataacgttaaagatccaaaaacctttaaagacattcaaacgctcagccaaaaacatgacctgaacgccagcaacattcaagcggccacgaccccagaaaataaaaaccccttaaatgcgagcgatcatcttgctttaaaaacaacgcaagcgagcattaaccacacccttacaaagaacgacgctaaaaacaccgccaacctttctagcgttttgcaatctttagaaaaaaaagaaccgcaaaataaagaacacgcaaaccccccaaataatgaaaaaaaaacgccccctttaaaggaagctttacaaatgaacgccattaaaagggataaaacgctttctaaaaaaaagccagaaaaaacccctattcacgctaaaacccagaccatagccccaagtgcgacgccagaaaatgcccctaaaatccctcttaaaacgctccctttaatgcctttaataggagctaaccctccccctaacgataacgctccaacgccattagaaaaagaagaaaaaactaaagaaataagcgacaataaagaaaaagctaaagaaaccaatagcagcgctcaaagcgtgcaaaacacccaagctagcgataagacaagcgacaataaaagcaccactcctaaagagacgatcaggcatttcactcaacaattaaagcaggaaatccaagaatacaaaccccccatgagcaagatctctatggatttattccctaaggaattgggcaaggttgaagtaaccattcaaaaagtgggtaaaaaccttaaagtgagcgtgatctctcacaacaacagcttgcaaacctttttggataaccaacaagatcttaaaaacagcctgaacgctttaggctttgaaggggtgaatttgagcttttcgcaagattcttctaaagagcaacaagcccccaaagatcaaccaaaagagccattcaaagagcaggaattaacccccttaaaagaaaacgccctaaaaagctaccaagagaacacggaccatgaaaaccaagaaacgagcatgcaaatcactctttatgcg

SEQ ID NO: 3812 - DNA (genomic), 1575 bp, Helicobacter pylori; double-stranded, circular
  misc_feature (B) LOCATION 1...1575
  hypothetical: NO
  anti-sense: NO
atgccatctcctgttaatcccattcacaccaacgcaaacgctttaaacagcggagcgaaaaacgaagttaaagacgccaaaaacgcccctaaaagcgcatcaaaagatttcagtaagatcttaaaccaaaagatctctaaagacaaaaccgcccctaaagaatcgccaaaccatagtgctttaaaagccacgcccaaagacgctaaagaggacgctaaagcgcttgaaaaaacccctaccctaccccaccaacacgctcaaaacctcgctaaagaccaacaagcccctaccctaaaagattggctcaaccacccaaaaacccacccaacagccccacatgaggcccaacatgaaacccatgaggctaatgaaactaaccccaaaacccctaacgaaactttaagtaagaatgaaaaaaagcctaacgaagttgcttctaacgctcatcaaacaaacttgcctaataaaaaccctataacccctaaccacgctaacaacgctatcaaaaaccccaccaccccaacccataacgttaaagatccaaaaacccttaaagacattcaaacgctcagccaaaaacatgacctgaacgccagcaacattcaagcggccacgaccccagaaaataaaaaccccttaaatgcgagcgatcatcttgctttaaaaacaacgcaagcgagcattaaccacacccttacaaagaacgacgctaaaaacaccgccaacctttctagcgttttgcaatctttagaaaaaaaagaaccgcaaaataaagaacacgcaaaccccccaaataatgaaaaaaaaacgccccctttaaaggaagctttacaaatgaacgccattaaaagggataaaacgctttctaaaaaaaagccagaaaaaacccctattcacgctaaaacccagaccatagccccaagtgcgacgccagaaaatgcccctaaaatccctcttaaaacgctccctttaatgcctttaataggagctaaccctccccctaacgataacgctccaacgccattagaaaaagaagaaaaaactaaagaaataagcgacaataaagaaaaagctaaagaaaccaatagcagcgctcaaagcgtgcaaaacacccaagctagcgataagacaagcgacaataaaagcaccactcctaaagagacgatcaggcatttcactcaacaattaaagcaggaaatccaagaatacaaaccccccatgagcaagatctctatggatttattccctaaggaattgggcaaggttgaagtaaccattcaaaaagtgggtaaaaaccttaaagtgagcgtgatctctcacaacaacagcttgcaaacctttttggataaccaacaagatcttaaaaacagcctgaacgctttaggctttgaaggggtggatttgagcttttcgcaagattcttctaaagagcaacaagcccccaaagatcaaccaaaagagccattcaaagagcaggaattaacccccttaaaagaaaacgccctaaaaagctaccaagagaacacggaccatgaaaaccaagaaacgagcatgcaaatcactctttatgcgtga

SEQ ID NO: 3813 - DNA (genomic), 582 bp, Helicobacter pylori; double-stranded, circular
  misc_feature (B) LOCATION 1...582
  hypothetical: NO
  anti-sense: NO
atggtacccacacagcttaatgagattgcagaatttttaaaaacgaacccttataatttgtctcaacccttacaagatgggcgattgaattcatctgtcaatgaagaagaaattttaaataccattaaggattattttcctatccaactgccaagagttagagagtggtgggattttagttttgaagaaaataagattttttatcctgtcaatattaaaaccaccaccacaaaaaccgctgacaatcttaatggtaaattagggatttactatgcgttgtgcggcttagtgccggaatttaataacgaaatcgcatgggaaaaatactttcaaaaacttcataaagacttgggcacaaacactaatagagattattattttttgattatcaacaaaaacgatcctaaagatatttttatcaattccttaaaaggcattcaaaccctccaacctaataacttgcccttccaatgcaagtgggataacaacagaaaaatcgttcaaagaagctttattgaaagtaaaaacttcatcttaagcgctttagccaaaagcgttaagttacgatctaatatttattaa

SEQ ID NO: 3814 - DNA (genomic), 588 bp, Helicobacter pylori; double-stranded, circular
  misc_feature (B) LOCATION 1...588
  hypothetical: NO
  anti-sense: NO
ggatatttaatggtacccacacagcttaatgagattgcagaatttttaaaaacgaacccttataatttgtctcaacccttacaagatgggcgattgaattcatctgtcaatgaagaagaaattttaaataccattaaggattattttcctatccaactgccaagagttagagagtggtgggattttagttttgaagaaaataagattttttatcctgtcaatattaaaaccaccaccacaaaaaccgctgacaatcttaatggtaaattagggatttactatgcgttgtgcggcttagtgccggaatttaataacgaaatcgcatgggaaaaatactttcaaaaacttcataaagacttgggcacaaacactaatagagattattattttttgattatcaacaaaaacgatcctaaagatatttttatcaattccttaaaaggcattcaaaccctccaacctaataacttgcccttccaatgcaagtgggataacaacagaaaaatcgttcaaagaagctttattgaaagtaaaaacttcatcttaagcgctttagccaaaagcgttaagttacgatctaatatttat

SEQ ID NO: 3815 - DNA (genomic), 162 bp, Helicobacter pylori; double-stranded, circular
  misc_feature (B) LOCATION 1...162
  hypothetical: NO
  anti-sense: NO
atgtgtttagcgatcccctctaaagtcatagccattaacgataatgtggcactcttagagactttgggcgttcaaagagaagcgagcttggatttaatgggcgagtccgttaaagtgggcgattatgtgctactacacatcggctatgtgatgagtaaagat

SEQ ID NO: 3816 - DNA (genomic), 237 bp, Helicobacter pylori; double-stranded, circular
  misc_feature (B) LOCATION 1...237
  hypothetical: NO
  anti-sense: NO
atgtgtttagcgatcccctctaaagtcatagccattaacgataatgtggcactcttagagactttgggcgttcaaagagaagcgagcttggatttaatgggcgagtccgttaaagtgggcgattatgtgctactacacatcggctatgtgatgagtaagattgatgaaaaagaagccctagaatccattgagctttaccaagaaatgatcgccaaaatgaacgaaacgcatgaataa

SEQ ID NO: 3817 - DNA (genomic), 261 bp, Helicobacter pylori; double-stranded, circular
  misc_feature (B) LOCATION 1...261
  hypothetical: NO
  anti-sense: NO
aaattaccaatccacgcattcgttttaatgtgtttagcgatcccctctaaagtcatagccattaacgataatgtggcactcttagagactttgggcgttcaaagagaagcgagcttggatttaatgggcgagtccgttaaagtgggcgattatgtgctactacacatcggctatgtgatgagtaagattgatgaaaaagaagccctagaatccattgagctttaccaagaaatgatcgccgaagtgaacgaaacgcatgaa

SEQ ID NO: 3818 - DNA (genomic), 381 bp, Helicobacter pylori; double-stranded, circular
  misc_feature (B) LOCATION 1...381
  hypothetical: NO
  anti-sense: NO
gtgcatgcgggcgaatacaaagaaataggcactttcaccagagcatggaaacccaacgaaaaagaatttttgcaaaatttggttaatgagcaataccaaatgtttgtggatgatgtcgctaaagccaggaaattaaacgctaaggattataaggattttgctgaagggaaagtctttagcgctcaaaaggctctaaaattaaaactcattgataaaatcagcacgattaagcaagcccaagatcgcttaatggaattgagtaaggttaaaaaagcttattggctagaaaaaagccctatggagcgcttcattgaaaaagccacgcaatcggttacaagcatcatcacgcaagcgtttggctatcaattattgatgagatga

SEQ ID NO: 3819 - DNA (genomic), 399 bp, Helicobacter pylori; double-stranded, circular
  misc_feature (B) LOCATION 1...399
  hypothetical: NO
  anti-sense: NO
agtgccgtagccactcaaggcgtgcatgcgggcgaatacaaagaaataggcactttcaccagagcatggaaacccaacgaaaaagaatttttgcaaaatttggttaatgagcaataccaaatgtttgtggatgatgtcgctaaagccaggaaattaaacgctaaggattataaggattttgctgaagggaaagtctttagcgctcaaaaggctctaaaattaaaactcattgataaaatcagcacgattaagcaagcccaagatcgcttaatggaattgagtaaggttaaaaaagcttattggctagaaaaaagccctatggagcgcttcattgaaaaagccacgcaatcggttacaagcatcatcacgcaagcgtttggctatcaattattgatgaga

SEQ ID NO: 3820 - DNA (genomic), 1536 bp, Helicobacter pylori; double-stranded, circular
  misc_feature (B) LOCATION 1...1536
  hypothetical: NO
  anti-sense: NO
ggctatcagcaccctaatgccaccttacccgttttacccattttgtggggcgaagccaaaaggggggattttgacgacttggacaaagcctttacgcaactgcttttaaccataggcaagcacaagctctatacccaccacacgccaccctatttgtgcgcttttaacgcttttagaatggaatttatcgcctttaatgacacgatcacaagctttttttataaaagcgatatagatttttctatccccccaagcaaccacaacacagagggttttaaacacgctttagatgcgtttaaagccatgtgtaaaccccataataaacgggtttttgactttaaaacccaaagccaagaatgcaaagaatttatcaaagaccatttaaactctagccatttacacaacaaaatccaaattgacaaaaacaatttctttacgatctatcaaaagtggcttgaaattgtcaaacccaccattaaaatagattgggagctagccaaagccgaagggattttagacgcagactattatttagcggatttgcttagcgatggcgataaaaccattattgagaaattgcgcacgattttaaaatctagccactatgaattgaaatggggttcaaatacgctgaataaattggggttagagggaattacgaaagttggtttcacggataaccaacaagcccatcaagaattctggagcgtttatgaaaggcctcctaaatcagagtttcaagcttctattttagagcggcgcgacttgttagtgccaagcgatgtgagggaaaggaaaggggcgtattttacccctaaaatctgggtagaaaagagtcaagaatatttagctaaagctttggggcaagattatcaagaggattatatcatttgggattgcgctggggggactgggaatttgcttcgaggtttattgaataaagcgaatttgtatctgtctactttagatcataacgatgtggcgattattaaagatctggctagtaaaaaccacttaaagatgctagaaaatcaggttttccaatttgactttttaaacgatgattttttcagcgataaaacgccaaaaagcttgcaagaaatcttaaaagatgaagagaaacgaaaaaagctcatcatttacatcaacccgccttatgcggaagcgacttcagctaaaacgcctagcggcacggggaagaataaagatttagtggctaggggcaatcttatttgcaagaagtataaagatgaattgcataaagccaataacgaacttttcgctcaatttttcatgcgcatttataaggaattgaatggctgcatcatggcgagcttttcaacgctcaaataccttaattctagccattttaaaaaattcagagaagtttttaaggctaaatttttagaggggtttatggtgcctgcggatagctttgataatgtgacagggcaattccccattggctttttagtctgggataccgctaccccccccccccttaaaaccaaccaacgcgttcaatttagaagtgtt

SEQ ID NO: 3821 - DNA (genomic), 1617 bp, Helicobacter pylori; double-stranded, circular
  misc_feature (B) LOCATION 1...1617
  hypothetical: NO
  anti-sense: NO
atgcttttagatttcagcaaccttaatgaagaacccttaaaaatccaaatcaaagccgagttttttaaggatgaaaaattcctttatagcggggataagatagatttcatgctaagctatcagcaccctaatgccaccttacccgttttacccattttgtggggcgaagccaaaaggggggattttgacgacttggacaaagcctttacgcaactgcttttaaccataggcaagcacaagctctatacccaccacacgccaccctatttgtgcgcttttaacgcttttagaatggaatttatcgcctttaatgacacgatcacaagctttttttataaaagcgatatagatttttctatccccccaagcaaccacaacacagagggttttaaacacgctttagatgcgtttaaagccatgtgtaaaccccataataaacgggtttttgactttaaaacccaaagccaagaatgcaaagaatttatcaaagaccatttaaactctagccatttacacaacaaaatccaaattgacaaaaacaatttctttacgatctatcaaaagtggcttgaaattgtcaaacccaccattaaaatagattgggagctagccaaagccgaagggattttagacgcagactattatttagcggatttgcttagcgatggcgataaaaccattattgagaaattgcgcacgattttaaaatctagccactatgaattgaaatggggttcaaatacgctgaataaattggggttagagggaattacgaaagttggtttcacggataaccaacaagcccatcaagaattctggagcgtttatgaaaggcctcctaaatcagagtttcaagcttctattttagagcggcgcgacttgttagtgccaagcgatgtgagggaaaggaaaggggcgtattttacccctaaaatctgggtagaaaagagtcaagaatatttagctaaagctttggggcaagattatcaagaggattatatcatttgggattgcgctggggggactgggaatttgcttcgaggtttattgaataaagcgaatttgtatctgtctactttagatcataacgatgtggcgattattaaagatctggctagtaaaaaccacttaaagatgctagaaaatcaggttttccaatttgactttttaaacgatgattttttcagcgataaaacgccaaaaagcttgcaagaaatcttaaaagatgaagagaaacgaaaaaagctcatcatttacatcaacccgccttatgcggaagcgacttcagctaaaacgcctagcggcacggggaagaataaagatttagtggctaggggcaatcttatttgcaagaagtataaagatgaattgcataaagccaataacgaacttttcgctcaatttttcatgcgcatttataaggaattgaatggctgcatcatggcgagcttttcaacgctcaaataccttaattctagccattttaaaaaattcagagaagtttttaaggctaaatttttagaggggtttatggtgcctgcggatagctttgataatgtgacagggcaattccccattggctttttagtctgggataccgctaccccccccccttaa

SEQ ID NO: 3822 - DNA (genomic), 1653 bp, Helicobacter pylori; double-stranded, circular
  misc_feature (B) LOCATION 1...1653
  hypothetical: NO
  anti-sense: NO
atgcttttagatttcagcaaccttaatgaagaacccttaaaaatccaaatcaaagccgagttttttaaggatgaaaaattcctttatagcggggataagatagatttcatgctaagctatcagcaccctaatgccaccttacccgttttacccattttgtggggcgaagccaaaaggggggattttgacgacttggacaaagcctttacgcaactgcttttaaccataggcaagcacaagctctatacccaccacacgccaccctatttgtgcgcttttaacgcttttagaatggaatttatcgcctttaatgacacgatcacaagctttttttataaaagcgatatagatttttctatccccccaagcaaccacaacacagagggttttaaacacgctttagatgcgtttaaagccatgtgtaaaccccataataaacgggtttttgactttaaaacccaaagccaagaatgcaaagaatttatcaaagaccatttaaactctagccatttacacaacaaaatccaaattgacaaaaacaatttctttacgatctatcaaaagtggcttgaaattgtcaaacccaccattaaaatagattgggagctagccaaagccgaagggattttagacgcagactattatttagcggatttgcttagcgatggcgataaaaccattattgagaaattgcgcacgattttaaaatctagccactatgaattgaaatggggttcaaatacgctgaataaattggggttagagggaattacgaaagttggtttcacggataaccaacaagcccatcaagaattctggagcgtttatgaaaggcctcctaaatcagagtttcaagcttctattttagagcggcgcgacttgttagtgccaagcgatgtgagggaaaggaaaggggcgtattttacccctaaaatctgggtagaaaagagtcaagaatatttagctaaagctttggggcaagattatcaagaggattatatcatttgggattgcgctggggggactgggaatttgcttcgaggtttattgaataaagcgaatttgtatctgtctactttagatcataacgatgtggcgattattaaagatctggctagtaaaaaccacttaaagatgctagaaaatcaggttttccaatttgactttttaaacgatgattttttcagcgataaaacgccaaaaagcttgcaagaaatcttaaaagatgaagagaaacgaaaaaagctcatcatttacatcaacccgccttatgcggaagcgacttcagctaaaacgcctagcggcacggggaagaataaagatttagtggctaggggcaatcttatttgcaagaagtataaagatgaattgcataaagccaataacgaacttttcgctcaatttttcatgcgcatttataaggaattgaatggctgcatcatggcgagcttttcaacgctcaaataccttaattctagccattttaaaaaattcagagaagtttttaaggctaaatttttagaggggtttatggtgcctgcggatagctttgataatgtgacagggcaattccccattggctttttagtctgggataccgctaccccccccccccttaaaaccaaccaacgcgttcaatttagaagtgtttga

SEQ ID NO: 3823 - DNA (genomic), 210 bp, Helicobacter pylori; double-stranded, circular
  misc_feature (B) LOCATION 1...210
  hypothetical: NO
  anti-sense: NO
ttttccagtttagggcttgtgggttttaaagatgaaaagcatttgatcaaagaaattcaagggggcttagaggtgttactaaaatccagcaacgccgaaattttgaataaccctaaaaaattagaagatcacactcgtaatttcatcagaaaagcgctctttaaaaagtttagaaaatacccggctatcatttgtcatgcccattctttt

SEQ ID NO: 3824 - DNA (genomic), 309 bp, Helicobacter pylori; double-stranded, circular
  misc_feature (B) LOCATION 1...309
  hypothetical: NO
  anti-sense: NO
gaatataaccatgtcgcgcgccacaaacaaaccgctattgcttgcggggtgcctgaaaaaaatatctatttaatggaagatggcgatcaggtggaagttggccctgcgttcattaaaaaagtcggcacgattaaaagcgggaaaagctatgtggataaccaaagcaatttgagtattgacacaagcatcgtgcagcaaagagaagaagtcgctagcgcgggggtgtttgcggctacgatttttgtgaataaaaacaaacaagcgcttttagaaagctctctaattttccagtttagggcttgtgggttt

SEQ ID NO: 3825 - DNA (genomic), 1119 bp, Helicobacter pylori; double-stranded, circular
  misc_feature (B) LOCATION 1...1119
  hypothetical: NO
  anti-sense: NO
atggcgaaaagggggttgatgcttcttttaagcgattccaccaactcccataaatccgggaccacgccgagtgaaagcaccatagcgccggcttttgataccctttttaaagaagcgcaagggagggtgattatgagcaccttctctagcaatatccaccgggtccatcaagccatacaatacggcatcaaatacaaccgcaagatcgctgtgatcgggcgctctatggaaaaaaacctagacatcgctagagaattaggctatatccatttgccttatcaatcttttattgaagccaatgaagtcgctaaatacccggacaatgaagtcttaatcgtaacgaccggctcacaaggcgaaaccatgagcgcgctttatcgcatggcgactgatgaacaccgccacatttctatcaaacccaacgatttagtcatcatttccgctaaagccattcctggcaatgaagcgagcgtttcagcggtgttgaattttttgatcaaaaaagaagctaaagtggcttatcaagaatttgacaatatccatgtgagcgggcatgccgcccaagaagagcaaaagctcatgctaagactcattaagcctaagtttttcttacccgtgcatggggaatataaccatgtcgcgcgccacaaacaaaccgctattgcttgcggggtgcctgaaaaaaatatctatttaatggaagatggcgatcaggtggaagttggccctgcgttcattaaaaaagtcggcacgattaaaagcgggaaaagctatgtggataaccaaagcaatttgagtattgacacaagcatcgtgcagcaaagagaagaagtcgctagcgccggggtgtttgcggctacgatttttgtgaataaaaacaaacaagcgcttttagaaagctctcaattttccagtttagggcttgtgggttttaaagatgaaaagcatttgatcaaagaaattcaagggggcttagaggtgttactaaaatccagcaacgccgaaattttgaataaccctaaaaaattagaagatcacactcgtaatttcatcagaaaagcgctctttaaaaagtttagaaaatacccggctatcatttgtcatgcccattctttttga

SEQ ID NO: 3826 - DNA (genomic), 1404 bp, Helicobacter pylori; double-stranded, circular
  misc_feature (B) LOCATION 1...1404
  hypothetical: NO
  anti-sense: NO
agccaaaagaacgctgcaatcgttaaagggaatgatttgtatcggtttttttctaaattgaagcaatgggctggagcggatgaaaaacagaattttagggatttagaagaggatttttctttagaaagctttactcattgcacggattttaaccccatagaaatctatgcttactgcatcagccgcagcatcaacaacatggaaaatggcgtgtttttgaaatactttttatcctaccccatcaagtatgaaaagcatcaggctgaaaaaatcagagagagttttgaaagaggcttgaaaaaatccttaccccggcatgtttttgacgatgaaaaaacggctaaaactttcaaagtggaattgagagcgagcgagccttgcgcgtatgccattagcgctttaaaaagctacgggttttttaaatcagagaagttagacaagccggtttattacggggtgtttgattttgggggaggaacgacggattttgactttggcaaatgggaaaaaagagctagccccaaatttgcctacaaaatgacgcattttagcagcggaggggataaatatttaggcggtgaaaatttattggaattattggcttgggaaacgtatgccaaaaatttccaaacgctaaaagaaaaagatattgtcatcgctaagcccaactatgacaggattgatacgcaactcttcggatcgtttatgcaaaattccagtggagtgcgtttgaatttgcaaacgatcgcttctcaattgcgcccttttttagaaaatttagacgccaatattatagaagcgatagaagaaaatgaaaactttgagataaagggttttgaaaaggattttaaagccatgctgtttgataggaacggggtagaaacagaatgcgatcttaaagttgattgcaaagagcttttaaacctcttaaaaggcaagatagaagatggcgttgccaacttctttgccggattttctaaagtgatggctgaaaacattgatgatcagtgtcgggcgtttcacattttcttaggcaggaatgtgagccgttcggcgttagtcaaacaagcgtttgaaaacgccaaagaaaagcagctcaaagattaccatcaaaagacttctaaaaatgattttaaattcatcatttatgagccgctaggcacagaaaaatcagacaaacagattttagagcttacgggagaagacgtttctaacacgcccgcttatttgaagcccacttgcaaaactggggtggcttttgggcttttagaaagcagggacaaggctcaagggattgaaatgccctctataagctccaaccctgtgtttaaatacgatttaggcattgagatagaggggaaattccacgctaaaatccatagggattctttaaagcctaatgaa

SEQ ID NO: 3827 - DNA (genomic), 1569 bp, Helicobacter pylori; double-stranded, circular
  misc_feature (B) LOCATION 1...1569
  hypothetical: NO
  anti-sense: NO
ttgctctctattggcgggctagtagatgacgcaagcctgacaaagtttgaaaaccctacgatcgtggagttcagacacataaaaaaatttattacagaatacaacgcactagatcaccgccctttcacagaaaagaacgatatagaagtggcgcatgaagcccaaaagaacgctgcaatcgttaaagggaatgatttgtatcggtttttttctaaattgaagcaatgggctggagcggatgaaaaacagaattttagggatttagaagaggatttttctttagaaagctttactcattgcacggattttaaccccatagaaatctatgcttactgcatcagccgcagcatcaacaacatggaaaatggcgtgtttttgaaatactttttatcctaccccatcaagtatgaaaagcatcaggctgaaaaaatcagagagagttttgaaagaggcttgaaaaaatccttaccccggcatgtttttgacgatgaaaaaacggctaaaactttcaaagtggaattgagagcgagcgagccttgcgcgtatgccattagcgctttaaaaagctacgggttttttaaatcagagaagttagacaagccggtttattacggggtgtttgattttgggggaggaacgacggattttgactttggcaaatgggaaaaaagagctagccccaaatttgcctacaaaatgacgcattttagcagcggaggggataaatatttaggcggtgaaaatttattggaattattggcttgggaaacgtatgccaaaaatttccaaacgctaaaagaaaaagatattgtcatcgctaagcccaactatgacaggattgatacgcaactcttcggatcgtttatgcaaaattccagtggagtgcgtttgaatttgcaaacgatcgcttctcaattgcgcccttttttagaaaatttagacgccaatattatagaagcgatagaagaaaatgaaaactttgagataaagggttttgaaaaggattttaaagccatgctgtttgataggaacggggtagaaacagaatgcgatcttaaagttgattgcaaagagcttttaaacctcttaaaaggcaagatagaagatggcgttgccaacttctttgccggattttctaaagtgatggctgaaaacattgatgatcagtgtcgggcgtttcacattttcttaggcaggaatgtgagccgttcggcgttagtcaaacaagcgtttgaaaacgccaaagaaaagcagctcaaagattaccatcaaaagacttctaaaaatgattttaaattcatcatttatgagccgctaggcacagaaaaatcagacaaacagattttagagcttacgggagaagacgtttctaacacgcccgcttatttgaagcccacttgcaaaactggggtggcttttgggcttttagaaagcagggacaaggctcaagggattgaaatgccctctataagctccaaccctgtgtttaaatacgatttaggcattgagatagaggggaaattccacgctaaaatccatagggattctttaaagcctaatgaatactag

SEQ ID NO: 3828 - DNA (genomic), 432 bp, Helicobacter pylori; double-stranded, circular
  misc_feature (B) LOCATION 1...432
  hypothetical: NO
  anti-sense: NO
atggtaaaagaaaaaagtttagaactgcctcttggccaccccttagtagagaaattgtgcgagctgtctttaaacaataaagccgcattcaatgaaaaaagtgagccgaatttcaaagatgaagtgtcagaagaagacaaaatcaaattcaaacaagcgctgcgggtgtttcatgcgatcgtcaataatgagacttctttaaggtatctttctgatgaaaatcaaaaattcctagaggatttagcgcaagctaaaaagatcactaatgagcaaatagaaaaaaccttagagatcgtttctgatagcgatgtggatgtggattttgaaaagcttaaaaaattgatgctcaatgtggatagtgtagcggtaggccttaagagctatagccaaaaccaattgcttgatttggacggagggcattgggatttatag

SEQ ID NO: 3829 - DNA (genomic), 480 bp, Helicobacter pylori; double-stranded, circular
  misc_feature (B) LOCATION 1...480
  hypothetical: NO
  anti-sense: NO
acgagcagctctccaaattgcaaccacaaaaaccacaataaaggaaatatcatggtaaaagaaaaaagtttagaactgcctcttggccaccccttagtagagaaattgtgcgagctgtctttaaacaataaagccgcattcaatgaaaaaagtgagccgaatttcaaagatgaagtgtcagaagaagacaaaatcaaattcaaacaagcgctgcgggtgtttcatgcgatcgtcaataatgagacttctttaaggtatctttctgatgaaaatcaaaaattcctagaggatttagcgcaagctaaaaagatcactaatgagcaaatagaaaaaaccttagagatcgtttctgatagcgatgtggatgtggattttgaaaagcttaaaaaattgatgctcaatgtggatagtgtagcggtaggccttaagagctatagccaaaaccaattgcttgatttggacggagggcattgggattta

SEQ ID NO: 3830 - DNA (genomic), 237 bp, Helicobacter pylori; double-stranded, circular
  misc_feature (B) LOCATION 1...237
  hypothetical: NO
  anti-sense: NO
cgaaaatatgttacgaaatatggaaaccgccatgcggctctatactatggcgagtctcaatttgaatttaaaacaccatttgaaaagcccacgctagcgttattagaaaagctaggggttcaaaatcgtgttttaagttcaaagctggattccaaagaacgcttaaccgtaagcatgccccatagtgagcctaattttaaggtctcactagcgagcgattttaaagtggtcgtaaaa

SEQ ID NO: 3831 - DNA (genomic), 267 bp, Helicobacter pylori; double-stranded, circular
  misc_feature (B) LOCATION 1...267
  hypothetical: NO
  anti-sense: NO
ccgcttggatccctgcttggttactctttatccaacactgggtgtgagatgattatagagcgtttagttggcaatctaagggatttaaaccccttggatttcaatgtggatcatgtggatttggaatggtttgaaacgaagaaaaagatcgctcgttttaaaaccaggcaaggcaaatacatatccatacgccttaaagacgctcccaagttgggtctctctcaaggggatattttatttagagaaaaaaaaagaaattatcgccgt

SEQ ID NO: 3832 - DNA (genomic), 513 bp, Helicobacter pylori; double-stranded, circular
  misc_feature (B) LOCATION 1...513
  hypothetical: NO
  anti-sense: NO
atgatcatagagcgtttagttggcaatctaagggatttaaaccccttggatttcaatgtggatcatgtggatttggaatggtttgaaacgaggaaaaagatcgctcgttttaaaaccaggcaaggcaaagacatagccatacgccttaaagacgctcccaagttgggtctctctcaaggggatattttatttaaagaagagaaggaaattatcgccgttaatatcttggattctgaagtcattcacatccaagccaagagcgtggcagaagtagcgaaaatatgttacgaaataggaaaccgccatgcggctctatactatggcgagtctcaatttgaatttaaaacaccatttgaaaagcccacgctagcgttattagaaaagctaggggttcaaaatcgtgttttaagttcaaagctggattccaaagaacgcttaaccgtaagcatgccccatagtgagcctaattttaaggtctcactagcgagcgattttaaagtggtcgtaaaatag

SEQ ID NO: 3833 - DNA (genomic), 351 bp, Helicobacter pylori; double-stranded, circular
  misc_feature (B) LOCATION 1...351
  hypothetical: NO
  anti-sense: NO
ttgaaagtaacraatccgcatttgttggtggtaatccaagatttaaacgctcgcatcgctttaatgaaactcttattccaaaacgttaagagcgcgaacaaagaattggttttttgcaataaagaaaaacgcttgataaggtcttttgatgcacaaaaagaatacggcatcacgcctgtagaaaatattttaagcgttttagacaccgctatgaatcctaacagcgcgcttgtgatagacaatctcaacgaagcgaaagaattgcacgacaaagtaggggcggaaaagttaaaatcgtttttagaaaaagcccmtagacaacgagcagtattgcgtcatttttgcgcatga

SEQ ID NO: 3834 - DNA (genomic), 669 bp, Helicobacter pylori; double-stranded, circular
  misc_feature (B) LOCATION 1...669
  hypothetical: NO
  anti-sense: NO
gaaaaatcaacgagcaacttgaagaagccaagcgtttggagaagcaagttgatatgcaagatcgccactcacaaagcgagatcgataggcttatgcgtgaagccaaagagcatgaaagagaagctaagaggcgctatggtgaatatcttaaggataaaaatgattgaaataagcgaatggttgcaaaaactagacgatgccttagataaagttgttgctaaaaaagagccagagagttttctcaagccgatcatttcaccaatagaggactaccaaaagagtgtcaggcaaattcaagcgcaattcacagacgcgccgaagttcaatgaagagggtgcttaccctcaatttttaagctgtggtttattgcaagttaggggcaaaaatggtgctaacatggaatttttattgcctaaagtttatcctttcccccctaaaagcttgtatatagagcatgaaaaagacgggcagtttttgagagaaatgctcatgcgcttactctccagcgcgcctttagtgcaattggaagtgatcttaattgatgcgttgagcttggggggcattttcaatctggccagaaggcttttagataaaaacaatgactttatttaccagcaaaggattttgaccgaaagcaaggaaatagaagaagccctaaagcatttgcca

SEQ ID NO: 3835 - DNA (genomic), 888 bp, Helicobacter pylori; double-stranded, circular
  misc_feature (B) LOCATION 1...888
  hypothetical: NO
  anti-sense: NO
gtgaagccaaagagcatgaaagagaagctaagaggcgctatggtgaatatcttaaggataaaaatgattgaaataagcgaatggttgcaaaaactagacgatgccttagataaagttgttgctaaaaaagagccagagagttttctcaagccgatcatttcaccaatagaggactaccaaaagagtgtcaggcaaattcaagcgcaattcacagacgcgccgaagttcaatgaagagggtgcttaccctcaatttttaagctgtggtttattgcaagttaggggcaaaaatggtgctaacatggaatttttattgcctaaagtttatcctttcccccctaaaagcttgtatatagagcatgaaaaagacgggcagtttttgagagaaatgctcatgcgcttactctccagcgcgcctttagtgcaattggaagtgatcttaattgatgcgttgagcttggggggcattttcaatctggccagaaggcttttagataaaaacaatgactttatttaccagcaaaggattttgaccgaaagcaaggaaatagaagaagccctaaagcatttgcatgaatatttaaaggttaatttgcaagaaaaattagccggttttagagattttgtgcattataatgaaaacgccaaagactccttgcctttaaaagcgctttttttaagcggggtggatgctttgagtaaagacgcgctttattatctagaaaagatcatgcgttttggctctaaaaatggggttttgagctttgtcaatttggagagcgaaaaaaacaatcaatccgcagaagatttgaaacgctatgcggagttttttaaagacaggacaagttttgagtgsttaaaataccttaatgtagaaatcatcagcgat

SEQ ID NO: 3836 - DNA (genomic), 1920 bp, Helicobacter pylori; double-stranded, circular
  misc_feature (B) LOCATION 1...1920
  hypothetical: NO
  anti-sense: NO
agcatttgccatgaatatttaaaggttaatttgcaagaaaaattagccggttttagagattttgtgcattataatgaaaacgccaaagactccttgcctttaaaagcgctttttttaagcggggtggatgctttgagtaaagacgcgctttattatctagaaaagatcatgcgttttggctctaaaaatggggttttgagctttgtcaatttggagagcgaaaaaaacaatcaatccgcagaagatttgaaacgctatgcggagttttttaaagacaggacaagttttgaggggttaaaataccttaatgtagaaatcatcagcgatcaaggtattaaatcccaacacatgcaagacttcgctgataaaattaaagcgtattacaagcaaaaaaaagaagttaaaagggagttgaaggacttacaaagagacaaagaattttggactaaaagctctcagcatgaagtaagcgtgccggtggggtgggatattaaccataaggaagtgtgttttaaaatcggtaacgaacaaaaccacacgctcatttgcgaccacagcgggagtgggaaatccaatttcttgcatgtgttgattcaaaatctagctttctactacgatcccgatgaagtccaactctttttgttagactataaagagggggtggaatttaacgcgtatgtagcagatcccgctttagagcatgcgaggttggtgagcgtggcgagttcaatctcttatggcatcactttcttgaaatggctttgtgatgaaatgcaaaaaagagccgatcggttcaagcagtttaatgtgaaagatttaagcgattaccgcaaacatgaaaaaatgcccagactgatcgtggtgattgatgaatttcaggtgctttttagcgataataaatccactaaagcggtggaggggcatttaaacaccctgcttaaaaagggccgtagctatggggtgcatttggttttggccactcaaaccatgcgcggcactgacattaatccaagctttaaggctcaaatcgccaaccgcatcgctttgcctatggatgcagaagacagcagtagtgttttgggcgatgatgcggcttgtgagattcaaaacccagaaggcattttcaacaacaacggagggaatagaaaataccacaccaagatgagtgtccctaaagcccctgatgatttcaaatcttttctcacaaaaatacacgctgaatttaaccaaagaaatctcgcacccatagatcgtaaaatctataatggcgagacacctttaaaaatgcccgacacccttaaggctaatgaaatgcgtttgcatctgggcaaaaaagtggattatgagcaaaaggacctgatagtggagtttgaaagtaacgaatcgcatttgttggtggtgatccaagatttaaacgctcgcatcgctttaatgaaactcttattccaaaacgttaagagcgcgaacaaagaattggttttttgcaataaagaaaaacgcttgataaggtcttttgatgcacaaaaagaatacggcatcacgcctgtagaaaatattttaagcgttttagacaccgctatgaatcctaacagcgcgcttgtgatagacaatctcaacgaagcgaaagaattgcacgacaaagtaggggcggaaaagttaaaatcgtttttagaaaaagccatagacaacgagcagtattgcgtcatttttgcgcatgactttaggcaaattaaaactaattaccattttgacaagttaaaagaattgttaaacaaccacttcaagcaatgcctagcctttaggtgcaatggggaaaacttgaacgctatcaaaagcgatttgcctccaccaagcaaacttaacgtgctattgatagagctttccaaagacagcgttactgaattcaggcctttcagctta

SEQ ID NO: 3837 - DNA (genomic), 2421 bp, Helicobacter pylori; double-stranded, circular
  misc_feature (B) LOCATION 1...2421
  hypothetical: NO
  anti-sense: NO
atgattgaaataagcgaatggttgcaaaaactagacgatgccttagataaagttgttgctaaaaaagagccagagagttttctcaagccgatcatttcaccaatagaggactaccaaaagagtgtcaggcaaattcaagcgcaattcacagacgcgccgaagttcaatgaagagggtgcttaccctcaatttttaagctgtggtttattgcaagttaggggcaaaaatggtgctaacatggaatttttattgcctaaagtttatcctttcccccctaaaagcttgtatatagagcatgaaaaagacgggcagtttttgagagaaatgctcatgcgcttactctccagcgcgcctttagtgcaattggaagtgatcttaattgatgcgttgagcttggggggcattttcaatctggccagaaggcttttagataaaaacaatgactttatttaccagcaaaggattttgaccgaaagcaaggaaatagaagaagccctaaagcatttgcatgaatatttaaaggttaatttgcaagaaaaattagccggttttagagattttgtgcattataatgaaaacgccaaagactccttgcctttaaaagcgctttttttaagcggggtggatgctttgagtaaagacgcgctttattatctagaaaagatcatgcgttttggctctaaaaatggggttttgagctttgtcaatttggagagcgaaaaaaacaatcaatccgcagaagatttgaaacgctatgcggagttttttaaagacaggacaagttttgagtgcttaaaataccttaatgtagaaatcatcagcgatcaaggtattaaatcccaacacatgcaagacttcgctgataaaattaaagcgtattacaagcaaaaaaaagaagttaaaagggagttgaaggacttacaaagagacaaagaattttggactaaaagctctcagcatgaagtaagcgtgccggtggggtgggatattaaccataaggaagtgtgttttaaaatcggtaacgaacaaaaccacacgctcatttgcgaccacagcgggagtgggaaatccaatttcttgcatgtgttgattcaaaatctagctttctactacgatcccgatgaagtccaactctttttgttagactataaagagggggtggaatttaacgcgtatgtagcagatcccgctttaaagcatgcgaggttggtgagcgtggcgagttcaatctcttatggcatcactttcttgaaatggctttgtgatgaaatgcaaaaaagagccgatcggttcaagcagtttaatgtgaaagatttaagcgattaccgcaaacatgaaaaaatgcccagactgatcgtggtgattgatgaatttcaggtgctttttagcgataataaatccactaaagcggtggaggggcatttaaacaccctgcttaaaaagggccgtagctatggggtgcatttggttttggccactcaaaccatgcgcggcactgacattaatccaagctttaaggctcaaatcgccaaccgcatcgctttgcctatggatgcagaagacagcagtagtgttttgggcgatgatgcggcttgtgagattcaaaaaccagaaggcattttcaacaacaacggagggaatagaaaataccacaccaagatgagtgtccctaaagcccctgatgatttcaaatcttttctcacaaaaatacacgctgaatttaaccaaagaaatctcgcacccatagatcgtaaaatctataatggcgagacacctttaaaaatgcccgacacccttaaggctaatgaaatgcgtttgcatctgggcaaaaaagtggattatgagcaaaaggacctgatagtggagtttgaaagtaacgaatcgcatttgttggtggtgatccaagatttaaacgctcgcatcgctttaatgaaactcttattccaaaacgttaagagcgcgaacaaagaattggttttttgcaataaagaaaaacgcttgataaggtcttttgatgcacaaaaagaatacggcatcacgcctgtagaaaatattttaagcgttttagacaccgctatgaatcctaacagcgcgcttgtgatagacaatctcaacgaagcgaaagaattgcacgacaaagtaggggcggaaaagttaaaatcgtttttagaaaaagccatagacaacgagcagtattgcgtcatttttgcgcatgactttaggcaaattaaaactaattaccattttgacaagttaaaagaattgttaaacaaccacttcaagcaatgcctagcctttaggtgcaatggggaaaacttgaacgctatcaaaagcgatttgcctccaccaagcaaacttaacgtgctattgatagagctttccaaagacagcgttactgaattcaggcctttcagcttatag

SEQ ID NO: 3838 - DNA (genomic), 132 bp, Helicobacter pylori; double-stranded, circular
  misc_feature (B) LOCATION 1...132
  hypothetical: NO
  anti-sense: NO
atgatttccatagcgctagaagaggttgaagaagtggaagtgaaggtgtgttgcgtggattcccaaagcattaaagtggggctgtttaaagacggccaattgatctatgaaagcgaggtagaaaaattatga

SEQ ID NO: 3839 - DNA (genomic), 135 bp, Helicobacter pylori; double-stranded, circular
  misc_feature (B) LOCATION 1...135
  hypothetical: NO
  anti-sense: NO
ttgttgtgttggggggttaggtttttgtttagagagagttttttaaaactaaagaagcgcttaaaacagaaccttttgttttttaggttttattttttactttggcttgttttcaaaaatcattttgatttctaa

SEQ ID NO: 3840 - DNA (genomic), 261 bp, Helicobacter pylori; double-stranded, circular
  misc_feature (B) LOCATION 1...261
  hypothetical: NO
  anti-sense: NO
atgagcagagtgcaaatggataccgaagaggtcagggaatttgtagggcatttagaacgctttaaagagttactaaacgaggaagtgaatagcttgaatggccatttccataatttagaatcatggcaagacgctaggagggataaatttagcgaggtgttggataacttgaaaggcactttcaatgaatttaatgaggccgcgcaagagcaaatcgcatggcttaaagagaggattagggttttagaggaagattattga

SEQ ID NO: 3841 - DNA (genomic), 273 bp, Helicobacter pylori; double-stranded, circular
  misc_feature (B) LOCATION 1...273
  hypothetical: NO
  anti-sense: NO
aagaaaggacaaccgatgagcagagtgcaaatggataccgaagaggtcagggaatttgtagggcatttagaacgctttaaagagttactaaacgaggaagtgaatagcttgaatggccatttccataatttagaatcatggcaagacgctaggagggataaatttagcgaggtgttggataacttgaaaggcactttcaatgaatttaatgaggccgcgcaagagcaaatcgcatggcttaaagagaggattagggttttagaggaagattat

SEQ ID NO: 3842 - DNA (genomic), 363 bp, Helicobacter pylori; double-stranded, circular
  misc_feature (B) LOCATION 1...363
  hypothetical: NO
  anti-sense: NO
ttggaagtcaaagatcgcttgaattttaattttgtagcaacaactcacagcgcaatggacttgatcgcatctgttcttagcgatagcaaatactatttagaaagcttttataaccaagcgagccaagaattaggcgataagagaagcgataaaggcgaaaaattagctgaattgtttgatttgctttttgaatatattaaggatagtaaatttgagcgtttgaaagagccaagcgcttatgactattcatgcaaaaagctatacccagagcaaaacacttctcaaaagatgcgaagagtggttttaagaggctataagcacaatgataaaatgtatcacactatcgtggatatgggatcataa

SEQ ID NO: 3843 - DNA (genomic), 489 bp, Helicobacter pylori; double-stranded, circular
  misc_feature (B) LOCATION 1...489
  hypothetical: NO
  anti-sense: NO
agaaaaaacaatctaaacgatcagcttaacgcatcacaaacccaagccgaacaaacgagccgaaaactaaacgagctagagcgaaggcacgctccataccaaaaattagaaaaactctatgaagtctttttggaagtcaaagatcgcttgaattttaattttgtagcaacaactcacagcgcaatggacttgatcgcatctgttcttagcgatagcaaatactatttagaaagcttttataaccaagcgagccaagaattaggcgataagagaagcgataaaggcgaaaaattagctgaattgtttgatttgctttttgaatatattaaggatagtaaatttgagcgtttgaaagagccaagcgcttatgactattcatgcaaaaagctatacccagagcaaaacacttctcaaaagatgcgaagagtggttttaagaggctataagcacaatgataaaatgtatcacactatcgtggatatgggatca

SEQ ID NO: 3844 - DNA (genomic), 285 bp, Helicobacter pylori; double-stranded, circular
  misc_feature (B) LOCATION 1...285
  hypothetical: NO
  anti-sense: NO
tcaaactatggttttagccaattgcgttatttcatggtgggcaatgagtcttacatgttcaaacatgttttgaatttcaatttagagagcttgttgattgatttcatgcaaagcttaaaagaatggttagagcctgaagaaatcgtattcgctaatgacgggtatggggggtattatctttggaataccaccactgatgtggtgctgtttttagacaccgataatggttcaaaaaaagtgctattaaatcttaatatgtttttaaaaaaactggaatcaaggggt

SEQ ID NO: 3845 - DNA (genomic), 420 bp, Helicobacter pylori; double-stranded, circular
  misc_feature (B) LOCATION 1...420
  hypothetical: NO
  anti-sense: NO
atggacagaatttctacagaaacagaattgaattgggaatttgtagagtcgctcaatgaaaatgcgttgagcgattcagaagagcgattggaaataggctttagcgatgcgtttaaggactttatcaaacgatcaaactatggttctagccaattgcgttatttcatggtgggcaatgagttttacatgttcaaacatgttttgaatttcaatttagagagcttgttgattgatttcatgcaaagcttaaaagaatggttagagcctgaagaaatcgtattcgctaatgacgggtatggggggtattatctttggaataccaccactgatgtggtgctgtttttagacaccgataatggttcaaaaaaagtgctattaaatcttaatatgtttttaaaaaaactggaatcaaggggttaa

SEQ ID NO: 3846 - DNA (genomic), 252 bp, Helicobacter pylori; double-stranded, circular
  misc_feature (B) LOCATION 1...252
  hypothetical: NO
  anti-sense: NO
agcggtgtaacaaccatgattggtggcggaaccggtcctgctgatggcactaatgcgactactatcactccaggtagaagaaacttaaaatggatgctcagagcggctgaagaatattctatgaacttaggtttcttagctaaaggtaacgcttctaacgacgcgagcttagcggatcaattgaagccggtgcgattggctttaaaatccacgaagactggggcaacactccttctgcaatcaatcatgcgt

SEQ ID NO: 3847 - DNA (genomic), 339 bp, Helicobacter pylori; double-stranded, circular
  misc_feature (B) LOCATION 1...339
  hypothetical: NO
  anti-sense: NO
aaacatttatgtgcgaacagcttaaattccggtggcggtaaaaccctaagagaaggcatgagccaatccaacaaccctagcaaagaagaactggatttaatcatcactaacgctttaatcgtggattacaccggtatttataaagcggatattggtattaaagacggcaaaatcgctggcattggtaaaggcggtaacaaagacatgcaagatggcgttaaaaacaatcttagcgtgggtcctgctactgaagcgctagctggtgaaggcttaatcgaacggctggtggtattgacacacacagtccacttcatttcaccccaacaaatccctacagtt

SEQ ID NO: 3848 - DNA (genomic), 822 bp, Helicobacter pylori; double-stranded, circular
  misc_feature (B) LOCATION 1...822
  hypothetical: NO
  anti-sense: NO
gcagctattgccggacgcactatgcacactttccacactgaaggcgctggtggcggacacgctcctgacattattaaagtggccggtgaacacaacatcctacccgcttccactaaccccactatccctttcactgtgaatacagaagccgaacacatggacatgctcatggggtgccaccacttggataaaagcattaaagaagatgtccagttcgctgattcaaggatccgccctcaaaccattgcggctgaagacactttgcatgacatggggattttctcaatcaccagttctgactctcaagcgatgggtcgtgtgggtgaagttatcactaggacttggcaaacagctgacaaaaacaaaaaagaatttggccgcttgaaagaagaaaaaggcgataacgacaacttcaggatcaaacgctacttgtttaaatacaccattaacccagcgatcgctcatgggattagcgagtatgtaggttctgtagaagtgggcaaagtggctgacttggtattgtggagtccagcattctttggcgtgaaacccaacatgatcatcaaaggcggattcattgcgttaagccaaatgggcgatgcgaacgcttctatccctaccccacaaccggtttattacagagaaatgttcgctcaccatggtaaagctaaatacgatgcaaacatcacttttgtgtctcaagcggcttatgacaaaggcattaaagaagaattagggcttgaaagacaagtgttgccggttaaaaattgcagaaacatcactaaaaaagacatgcaattcaatgacactacgcgctcacat

SEQ ID NO: 3849 - DNA (genomic), 1710 bp, Helicobacter pylori; double-stranded, circular
  misc_feature (B) LOCATION 1...1710
  hypothetical: NO
  anti-sense: NO
atgaaaaagattagcagaaaagaatatgtttctatgtatggccctaccacaggcgataaagtgagattgggcgatacagatttgatcgctgaagtagaacatgactacaccatttatggcgaagagcttaaattcggtggcggtaaaaccctaagagaaggcatgagccaatccaacaaccctagcaaagaagaactggatttgatcatcactaacgctttaatcgtggattacaccggtatttataaagcggatattggtattaaagacggcaaaatcgctggcattggtaaaggcggtaacaaagacatgcaagatggcgttaaaaacaatcttagcgtgggtcctgctactgaagcgctagctggtgaaggcttaatcgtaacggctggtggtattgacacacacatccacttcatttcaccccaacaaatccctacagcttttgcaagcggtgtaacaaccatgattggtggcggaaccggtcctgctgatggcactaatgcgactactatcactccaggtagaagaaacttaaaatggatgctcagagcggctgaagaatattctatgaacttaggtttcttagctaaaggtaacgcttctaacgacgcgagcttagcggatcaaattgaagccggtgcgattggctttaaaatccacgaagactggggcaccactccttctgcaatcaatcatgcgttagacgttgcggacaaatacgatgtgcaagtcgctatccacacagacactttgaatgaagccggttgcgtggaagacactatggcagctattgccggacgcactatgcacactttccacactgaaggcgctggtggcggacacgctcctgacattattaaagtggccggtgaacacaacatcctacccgcttccactaaccccactatccctttcactgtgaatacagaagccgaacacatggacatgctcatggtgtgccaccacttggataaaagcattaaagaagatgtccagttcgctgattcaaggatccgccctcaaaccattgcggctgaagacactttgcatgacatggggattttctcaatcaccagttctgactctcaagcgatgggtcgtgtgggtgaagttatcactaggacttggcaaacagctgacaaaaacaaaaaagaatttggccgcttgaaagaagaaaaaggcgataacgacaacttcaggatcaaacgctacttgtctaaatacaccattaacccagcgatcgctcatgggattagcgagtatgtaggttctgtagaagtgggcaaagtggctgacttggtattgtggagtccagcattctttggcgtgaaacccaacatgatcatcaaaggcggattcattgcgttaagccaaatgggcgatgcgaacgcttctatccctaccccacaaccggtttattacagagaaatgttcgctcaccatggtaaagctaaatacgatgcaaacatcacttttgtgtctcaagcggcttatgacaaaggcattaaagaagaattagggcttgaaagacaagtgttgccggttaaaaattgcagaaacatcactaaaaaagacatgcaattcaatgacactaccgctcacattgaagtcaatcctgaaacttaccatgtgttcgtggatggcaaagaagtcacttctaaaccagctaataaagtgagcttggctcaactctttagcattttctag

SEQ ID NO: 3850 - DNA (genomic), 150 bp, Helicobacter pylori; double-stranded, circular
  misc_feature (B) LOCATION 1...150
  hypothetical: NO
  anti-sense: NO
cccccctatgtgggagcggacttgaaagtcatggaaagggattctaaaaaaatgcgcggcgaaaagccctttatttttacgaatatccgcgctaaagatagtttagacgatgtgatcgcttggatcaagcgcaacgctttattggaagat

SEQ ID NO: 3851 - DNA (genomic), 513 bp, Helicobacter pylori; double-stranded, circular
  misc_feature (B) LOCATION 1...513
  hypothetical: NO
  anti-sense: NO
tctcaaattgaaaggaattttatggtaaaaattggagtttgtggtcctgtaggaagcggtaaaaccgccttgattgaagctttaacgcgccacatgtcaaaagattatgacatggcggtcatcactaatgatatttacacgaaagaagacgcagagtttatgtgcaaaaattcggtgatgccacgagataggatcattggcgtagaaacaggaggctgtccgcacacggctattagagaagacgcttctatgaatttagaagcggtagaagaaatgcatggccgtttccctaatttggaattgcttttgattgaaagcggaggcgataacctttcagcgacttttaacccggagttggcggattttacgatttttgtgattgatgtggctgagggcgataaaatccccagaaaaggcgggccaggaatcacgcgctcagacttgcttgtcatcaataagattgatttaacccccctatgtgggagcggacttgaaagtcatggaaagggattc

SEQ ID NO: 3852 - DNA (genomic), 600 bp, Helicobacter pylori; double-stranded, circular
  misc_feature (B) LOCATION 1...600
  hypothetical: NO
  anti-sense: NO
atggtaaaaattggagtttgtggtcctgtaggaagcggtaaaaccgccttgattgaagctttaacgcgccacatgtcaaaagattatgacatggcggtcatcactaatgatatttacacgaaagaagacgcagagtttatgtgcaaaaattcggtgatgccacgagataggatcattggcgtagaaacaggaggctgtccgcacacggctattagagaagacgcttctatgaatttagaagcggtagaagaaatgcatggccgtttccctaatttggaattgcttttgattgaaagcggaggcgataacctttcagcgacttttaacccggagttggcggattttacgatttttgtgattgatgtggctgagggcgataaaatccccagaaaaggcgggccaggaatcacgcgctcagacttgcttgtcatcaataagattgatttagccccctatgtgggagcggacttgaaagtcatggaaagggattctaaaaaaatgcgcggcgaaaagccctttatttttacgaatatccgcgctaaagaaggtttagacgatgtgatcgcttggatcaagcgcaacgctttattggaagattga

SEQ ID NO: 3853 - DNA (genomic), 861 bp, Helicobacter pylori; double-stranded, circular
  misc_feature (B) LOCATION 1...861
  hypothetical: NO
  anti-sense: NO
atgggaacgctcattgaaaaatggtttggcttctctcaaatcagagaagaattagaagctcgcatcagtgagttagaagacgaaaacaccgaattgttaagagaaagagaatacttagctgcagaaactagcgagttaaaagacgctaacgatcaattacggcaaaaaaacgacaagttattcataacaaaagacaagctaaccaaagaaaacaccgagttattcgcagaaaacgaaagcttatctgtaaaaatcagcgggttagaacactctaacgatcaattatggcaaaacaataacaagctcactaaagaaaaagcagaactgaaaacggaaaaagacattttagctaaagaaaacacacgcttattagcagccagagatcggctgactgaagaaaaaagagaattgacaacagaaaaagaaaggctaaaaagagaaaacaccgagctaacccataaaatcaccgagctgactaaagaaaataaagcactaaccaccgaaaacgacaagctcaaccaccaagttaccgcgctcactaatgagcgagatagtctcgaacaagagcgagcgcgattgcaagatgcgcatgggtttctagaaaaacgatgcaccaatttagagaaagaaaaccaacgcctaactgacaagctcaaacaattagaaagcgctcaaaaaagcttggaaaacactaacaatcaattacggcaagctttagaaaactctaatgtccaattagcacaagctaaagararaatwgccatagagraaagcgagctggmgcgaagaaatcgcacgcttgaagagcttagagggtatggaagccaaaagscgatctggacttacacawcaggcgtttag

SEQ ID NO: 3854 - DNA (genomic), 984 bp, Helicobacter pylori; double-stranded, circular
  misc_feature (B) LOCATION 1...984
  hypothetical: NO
  anti-sense: NO
atgggaacgctcattgaaaaatggtttggcttctctcaaatcagagaagaattagaagctcgcatcagtgagttagaagacgaaaacaccgaattgttaagagaaagagaatacttagctgcagaaactagcgagttaaaagacgctaacgatcaattacggcaaaaaaacgacaagttattcataacaaaagacaagctaaccaaagaaaacaccgagttattcgcagaaaacgaaagcttatctgtaaaaatcagcgggttagaacactctaacgatcaattatggcaaaacaataacaagctcactaaagaaaaagcagaactgaaaacggaaaaagacattttagctaaagaaaacacacgcttattagcagccagagatcggctgactgaagaaaaaagagaattgacaacagaaaaagaaaggctaaaaagagaaaacaccgagctaacccataaaatcaccgagctgactaaagaaaataaagcactaaccaccgaaaacgacaagctcaaccaccaagttaccgcgctcactaatgagcgagatagtctcgaacaagagcgagcgcgattgcaagatgcgcatgggtttctagaaaaacgatgcaccaatttagagaaagaaaaccaacgcctaactgacaagctcaaacaattagaaagcgctcaaaaaagcttggaaaacactaacaatcaattacggcaagctttagaaaactctaatgtccaattagcacaagctaaagaaaaaatagccatagagaaaagcgagctggagcgagaaatcgcacgcttgaagagcttagagggtatggaagccaaaagcgatctggacttacacaacaggcgtttagcgagcgcaaacgaggatttaaaacgccaaaaccgaaaattagaagaagagaacatcgccctcaaagagagggttgatggcttgaacgagcagctctccaaattgcaaccacaaaaaccacaataa

SEQ ID NO: 3855 - DNA (genomic), 981 bp, Helicobacter pylori; double-stranded, circular
  misc_feature (B) LOCATION 1...981
  hypothetical: NO
  anti-sense: NO
atgggaacgctcattgaaaaatggtttggcttctctcaaatcagagaagaattagaagctcgcatcagtgagttagaagacgaaaacaccgaattgttaagagaaagagaatacttagctgcagaaactagcgagttaaaagacgctaacgatcaattacggcaaaaaaacgacaagttattcataacaaaagacaagctaaccaaagaaaacaccgagttattcgcagaaaacgaaagcttatctgtaaaaatcagcgggttagaacactctaacgatcaattatggcaaaacaataacaagctcactaaagaaaaagcagaactgaaaacggaaaaagacattttagctaaagaaaacacacgcttattagcagccagagatcggctgactgaagaaaaaagagaattgacaacagaaaaagaaaggctaaaaagagaaaacaccgagctaacccataaaatcaccgagctgactaaagaaaataaagcactaaccaccgaaaacgacaagctcaaccaccaagttaccgcgctcactaatgagcgagatagtctcgaacaagagcgagcgcgattgcaagatgcgcatgggtttctagaaaaacgatgcaccaatttagagaaagaaaaccaacgcctaactgacaagctcaaacaattagaaagcgctcaaaaaagcttggaaaacactaacaatcaattacggcaagctttagaaaactctaatgtccaattagcacaagctaaagaaaaaatagccatagagaaaagcgagctggagcgagaaatcgcacgcttgaagagcttagagggtatggaagccaaaagcgatctggacttacacaacaggcgtttagcgagcgcaaacgaggatttaaaacgccaaaaccgaaaattagaagaagagaacatcgccctcaaagagagggttgatggcttgaacgagcagctctccaaattgcaaccacaaaaaccacaa

SEQ ID NO: 3856 - DNA (genomic), 582 bp, Helicobacter pylori; double-stranded, circular
  misc_feature (B) LOCATION 1...582
  hypothetical: NO
  anti-sense: NO
ggatcacttcgcaatcctttgaaaaaatccataacactgaaagacgggtttgccagcagagacatgcatatcgttgtgggggaaaacgcttttttagacttcgcgcctttcccgttaatcccctttgaaaacgcgcattttaagggcaataccacgatttctttgcgctctagctctcaattgctctatagtgaaatcattgtcgccgggcgagtggcgcgcaatgagttgtttaaattcaaccgcttgcacaccaaaatctctattttacaagatgagaaacccatctattatgacaacacgattttagatcccaaaaccaccaacatgaataacatgtgcatgtttgatggctatacgcattatttgaatttggtgcttgtcaattgccccatagagctgtctggtgcgcgagaattgattgaagagagcgaaggagtggatggagccgtgagcaagattgctagttctcatctatgcctaaaaggctttagcgaaaggctcagaacccttgttgcatttaagagaaaaaatcgctcgcttggttacgcaaaccaccacgcaaaaggtttgaaaacgctt

SEQ ID NO: 3857 - DNA (genomic), 798 bp, Helicobacter pylori; double-stranded, circular
  misc_feature (B) LOCATION 1...798
  hypothetical: NO
  anti-sense: NO
atgaacacttacgctcaagaatccaagctcaggttaaaaaccaaaataggggctgatgggcggtgcgtgattgaagacaattttttcacgcccccctttaagctcatggcacccttttaccctaaagacgatttagctgaaatcatgcttttagcggtaagccctggcttaatgaaaggcgatgcgcaagacatgcaattaaatatcggtccaaattgcaagctaaggatcacttcgcaatcctttgaaaaaatccataacactgaagacgggtttgccagcagagacatgcatatcgttgtgggggaaaacgcttttttagacttcgcgcctttcccgttaatcccctttgaaaacgcgcattttaagggcaataccacgatttctttgcgctctagctctcaattgctctatagtgaaatcattgtcgccgggcgagtggcgcgcaatgagttgtttaaattcaaccgcttgcacaccaaaatctctattttacaagatgagaaacccatctattatgacaacacgattttagatcccaaaaccaccaacatgaataacatgtgcatgtttgatggctatacgcattatttgaatttggtgcttgtcaattgccccatagagctgtctggtgcgcgagaattgattgaagagagcgaaggagtggatggagccgtgagcaagattgctagttctcatctatgcctaaaagctttagcgaaaggctcagaacccttgttgcatttaagagaaaaaatcgctcgcttggttacgcaaaccaccacgcaaaaggtttga

SEQ ID NO: 3858 - DNA (genomic), 264 bp, Helicobacter pylori; double-stranded, circular
  misc_feature (B) LOCATION 1...264
  hypothetical: NO
  anti-sense: NO
aggcccaatctctctagccagttcctttacacggaaatgctgagcttaaaactaacctatgaaagcaccctccaacaggatttaaaaaaaatcttagggattgaagaagtcataatgctatccacaagccccatggaattacgattggccaatcaaaagctaggcaatcgtttcattaaaaccttacaagccatgaacgaattagacatgggtgcattttttaacgcttacgctcaaacaacccaaagatcccacccatgccac

SEQ ID NO: 3859 - DNA (genomic), 339 bp, Helicobacter pylori; double-stranded, circular
  misc_feature (B) LOCATION 1...339
  hypothetical: NO
  anti-sense: NO
acatgggtgcattttttaacgcttacgctcaaacaacccaaagatcccacccatgccactagctatggcgtttttgcggcgagtttgaatatggaattgaaaaaggctttaaggcattatctttatgcgcaaacttctaacatggtgatcaactgcgttaaaagcgtccccttatcccaaaacgacgggcaaaaaatcttattgagcttgcaaagcccttttaaccagctcatagaaaaaaccctagaactagacgaaagccacttgtgcgcagcaagcgttcaaaacgacattaaggcgatgcagcatgagagtttatactcgcgcctttatatgtct

SEQ ID NO: 3860 - DNA (genomic), 489 bp, Helicobacter pylori; double-stranded, circular
  misc_feature (B) LOCATION 1...489
  hypothetical: NO
  anti-sense: NO
atgaaagcaccctcccaayaggatttaaaaaaaatcttagggattgaagaagtcataatsstatccacaagccccatggaattacgattggccaatcaaaagctaggcaatcgtttcattaaaaccttacaagccatgaacgaattagacatgggtgcattttttaacgcttacgctcaaacaaccaaagatcccacccatgccactagctatggcgtttttgcggcgagtttgaatatggaattgaaaaaggctttaaggcattatctttatgcgcaaacttctaacatggtgatcaactgcgttaaaagcgtccccttatcccaaaacgacgggcaaaaaatcttattgagcttgcaaagcccttttaaccagctcatagaaaaaaccctagaactagacgaaagccacttgtgcgcagcaagcgttcaaaacgacattaaggcgatgcagcatgagagtttatactcgcgcctttatatgtcttga

SEQ ID NO: 3861 - DNA (genomic), 771 bp, Helicobacter pylori; double-stranded, circular
  misc_feature (B) LOCATION 1...771
  hypothetical: NO
  anti-sense: NO
atggataaaggaaagagcgtgaaaagcactaaaaaaagcgtgggtatgcccccaaaaaccccaaagacagacaacaacgccaatagtcatgtggataacgaatttctgatcttgcaagtcaatgatgcggtgttccctattggctcttacacgcattcttttggactagaaacttacatccagcaaaaaaaggttaccaacaaagaaagcgctttagagtatctaaaggccaatctctctagccagttcctttacacggaaatgctgagcttaaaactaacctatgaaagcaccctccaacaggatttaaaaaaaatcttagggattgaagaagtcataatgctatccacaagccccatggaattacgattggccaatcaaaagctaggcaatcgtttcattaaaaccttacaagccatgaacgaattagacatgggtgcattttttaacgcttacgctcaaacaaccaaagatcccacccatgccactagctatggcgtttttgcggcgagtttgaatatggaattgaaaaaggctttaaggcattatctttatgcgcaaacttctaacatggtgatcaactgcgttaaaagcgtccccttatcccaaaacgacgggcaaaaaatcttattgagcttgcaaagcccttttaaccagctcatagaaaaaaccctagaactagacgaaagccacttgtgcgcagcaagcgttcaaaacgacattaaggcgatgcagcatgagagtttatactcgcgcctttatatgtcttga

SEQ ID NO: 3862 - DNA (genomic), 231 bp, Helicobacter pylori; double-stranded, circular
  misc_feature (B) LOCATION 1...231
  hypothetical: NO
  anti-sense: NO
gtgaatgagttaaaaaactctaagcaagttttagggaatgggaaagccgatctgagcaacgaaaacaccaaggtaaggcagactaaaacaratctgactgaaaaaaatcaaaggctaaccacagaaaaaacagaattaaataacaagattactgggttagccacagaaaaagaaaggttagccgcagacaaagaaaacctaactaaagaaagcagacaaagaaaacctaac

SEQ ID NO: 3863 - DNA (genomic), 663 bp, Helicobacter pylori; double-stranded, circular
  misc_feature (B) LOCATION 1...663
  hypothetical: NO
  anti-sense: NO
ttgtttggaaaatcctctaacgacacccaagaaaacccaaaagacgctttaaaatccaccaatttccacgagaaacacaccaaaccgactgaaaccaccgaactagttgaagaaaataaagcgctaaccacagaaaaagaaaggctagaaagagaaaataaaaacctaactgcagacaaagaaaacctaactaaagaaaaaaccgaattacaaaaacaagtgaatgagttaaaaaactctaagcaagttttagaaaatgaaaaagccgattggctaagagaaaaagaaaatctaaccaaagacagagaaaacctaactaaagaaaaaacagagctgactgaaaaaaataaagtgctaaccacagaaaaagaaaggttagccacagaaaaagaaaacctaactaaagaaaaaaccgaatcacaaaaacaagtgaatgagttaaaaaactctaagcaagttttagaaaatgaaaaagccgatctgaccaacgaaaacaccaagctaaaaacagataaaacagatctgactgaaaaaaatcaaaggctaaccacagaaaaaacagaattaaataacaagattactgggttagccacagaaaaagaaaggttagccgcagacaaagaaaacctaactaaagaaagcagacaaagaaaacctaactaa

SEQ ID NO: 3864 - DNA (genomic), 825 bp, Helicobacter pylori; double-stranded, circular
  misc_feature (B) LOCATION 1...825
  hypothetical: NO
  anti-sense: NO
aaaaaccaaatacttcaaatcccactgcttccacccccccccaataatgaagagcttttaaaatctattacagatcttaaagatcgccttaaaaaattagaagatcttaaattagaagactttgaaccccttagaaaactctctcattttatagttataggtaatttgtttggaaaatcctctaacgacacccaagaaaacccaaaagacgctttaaaatccaccaatttccacgagaaacacaccaaaccgactgaaaccaccgaactagttgaagaaaataaagcgctaaccacagaaaaagaaaggctagaaagagaaaataaaaacctaactgcagacaaagaaaacctaactaaagaaaaaaccgaattacaaaaacaagtgaatgagttaaaaaactctaagcaagttttagaaaatgaaaaagccgattggctaagagaaaaagaaaatctaaccaaagacagagaaaacctaactaaagaaaaaacagagctgactgaaaaaaataaagtgctaaccacagaaaaagaaaggttagccacagaaaaagaaaacctaactaaagaaaaaaccgaatcacaaaaacaagtgaatgagttaaaaaactctaagcaagttttagaaaatgaaaaagccgatctgaccaacgaaaacaccaagctaaaaacagataaaacagatctgactgaaaaaaatcaaaggctaaccacagaaaaaacagaattaaataacaagattactgggttagccacagaaaaagaaaggttagccgcagacaaagaaaacctaactaaagaaagcagacaaagaaaacctaac

SEQ ID NO: 3865 - DNA (genomic), 513 bp, Helicobacter pylori; double-stranded, circular
  misc_feature (B) LOCATION 1...513
  hypothetical: NO
  anti-sense: NO
tgcccatattatggaagagcgagagctggtaaaaagactgcggctgaattgatgcaagaagggcgcactcttttaaaaccggatgatgtgatggatggtgtggcaagcatgatccatgaagtgggtattgaagcgatgtttcctgatgggaccaaactcgtaaccgtgcatacccctattgaggctaatggtaaattggttcctggtgagttgttcttaaaaaatgaagacatcactatcaacgaaggcaaaaaagccgttagcgtgaaagttaaaaacgtgggcgacagaccggttcaaatcggttcacacttccatttctttgaagtgaatagatgcctagactttgacagagaaaaaactttcggcaaacgcttagacattgcgagcgggacagcggtaaggtttgagcctggcgaagaaaaatccgtagaattgattgacattggtggcaacagaagaatctttggatttaacgcattggttgataggcaagcagacacgaaagcaaaa

SEQ ID NO: 3866 - DNA (genomic), 687 bp, Helicobacter pylori; double-stranded, circular
  misc_feature (B) LOCATION 1...687
  hypothetical: NO
  anti-sense: NO
ttgatgctccactacgctggagaattagctaggaaacgcaaagaaaaaggcattaagcttaactatgtggaagcggtagctttgattagtgcccatattatggaagaagcgagagctggtaaaaagactgcggctgaattgatgcaagaagggcgcactcttttaaaaccggatgatgtgatggatggtgtggcaagcatgatccatgaagtgggtattgaagcgatgtttcctgatgggaccaaactcgtaaccgtgcatacccctattgaggctaatggtaaattggttcctggtgagttgttcttaaaaaatgaagacatcactatcaacgaaggcaaaaaagccgttagcgtgaaagttaaaaacgtgggcgacagaccggttcaaatcggttcacacttccatttctttgaagtgaatagatgcctagactttgacagagaaaaaactttcggcaaacgcttagacattgcgagcgggacagcggtaaggtttgagcctggcgaagaaaaatccgtagaattgattgacattggtggcaacagaagaatctttggatttaacgcattggttgataggcaagcagacaacgaaagcaaaaaaattgctttacacagagctaaagagcgtggttttcatggtgctaaaagcgatgacaactatgtaaaaacaattaaggagtaa

SEQ ID NO: 3867 - DNA (genomic), 717 bp, Helicobacter pylori; double-stranded, circular
  misc_feature (B) LOCATION 1...717
  hypothetical: NO
  anti-sense: NO
atgaaactcaccccaaaagagttagataagttgatgctccactacgctggagaattagctaggaaacgcaaagaaaaaggcattaagcttaactatgtggaagcggtagctttgattagtgcccatattatggaagaagcgagagctggtaaaaagactgcggctgaattgatgcaagaagggcgcactcttttaaaaccggatgatgtgatggatggtgtggcaagcatgatccatgaagtgggtattgaagcgatgtttcctgatgggaccaaactcgtaaccgtgcatacccctattgaggctaatggtaaattggttcctggtgagttgttcttaaaaaatgaagacatcactatcaacgaaggcaaaaaagccgttagcgtgaaagttaaaaacgtgggcgacagaccggttcaaatcggttcacacttccatttctttgaagtgaatagatgcctagactttgacagagaaaaaactttcggcaaacgcttagacattgcgagcgggacagcggtaaggtttgagcctggcgaagaaaaatccgtagaattgattgacattggtggcaacagaagaatctttggatttaacgcattggttgataggcaagcagacaacgaaagcaaaaaaattgctttacacagagctaaagagcgtggttttcatggtgctaaaagcgatgacaactatgtaaaaacaattaaggagtaa

SEQ ID NO: 3868 - DNA (genomic), 1857 bp, Helicobacter pylori; double-stranded, circular
  misc_feature (B) LOCATION 1...1857
  hypothetical: NO
  anti-sense: NO
gtgtttgtggcaagcaaacaagctgacgaacaaaaaaagctagttatagagcaagaggttcaaaagcggcagtttcaaaaaatagaagaacttaaagcagacatgcaaaagggtgtcaatcccttttttaaagtcttgtttgatggggggaataggttgtttggtttccctgaaacttttatttattcttctatatttatattgtttgtaacaattgtattatctgttattctttttcaagcctatgaacctgttttgattgtagcgattgttattgtgcttgtagctcttggattcaagaaagattacaggctttatcaaagaatggagcgagcgatgaaatttaaaaaaccttttttgtttaagggcgtgaaaaacaaagcgttcatgagcattttttccatgaagcctagtaaagaaatggctaatgacatccacttaaatccaaacagagaagacaggcttgtgagcgctgcaaactcctatctagcgaataactatgaatgttttttagatgatggggtgatccttactaacaactattctcttttaggcacaatcaaattggggggcattgattttttaaccacttccaaaaaagatctcatagagttacacgcttctatttatagcgtttttaggaattttgttacccctgaattcaaattttattttcacactgttaaaaagaaaatcgttattgatgaaaccaatagggattatggtcttattttttctaatgatttcatgcgagcctataatgagaagcaaaagagagaaagtttttatgatattagtttttatctcaccatagagcaagatttattagacactctcaatgaacccgttatgaataaaaagcattttgcagacaataattttgaagagtttcaaaggattattagagccaagcttgaaaacttcaaagataggatagagctcatagaagagctactgagtaaataccaccccactagattaaaagaatacactaaagatggcattatttactccaaacaatgcgaattttacaattttcttgtgggaatgaatgaagccccttttatttgcaacagaaaagacttgtatctcaaggaaaaaatgcatggtggggtgaaagaagtttattttgccaataagcatggaaaaatcttaaatgacgatttgagtgaaaaatattttagcgctattgagatcagtgaatacgcccctaaatcacagagcgatttgtttgataaaatcaacgctctagacagcgaatttatctttatgcatgcttattcgcctaaaaactcacaagttttaaaggacaaactagctttcacctctagaaggattattattagtggaggctccaaagagcaaggcatgactttgggttgcttgagcgaattagtgggtaatggtgatattacgctaggcagttatggtaattctttagtgctgtttgctgatagctttgaaaaaatgaaacaaagcgttaaggaatgcgtctctagtcttaacgctaaaggttttttagccaacgcagcgactttctctatggaaaattacttttttgccaaacattgctcttttatcacgcttccttttatttttgatgtaacttctaacaattttgctgatttcatagcgatgagagcgatgagttttgatggcaaagaagacaataacgcttggggcaatagcgtgatgacgttaaaaagcgagatcaattcgcctttttatttgaacttccacatgcccactgattttggttcagcttcagcaggacacactttgatacttggctcaaccggttcaggtaagaacagtgtttatgtccatgactctaaacgctatggggcaatttgccta

SEQ ID NO: 3869 - DNA (genomic), 2952 bp, Helicobacter pylori; double-stranded, circular
  misc_feature (B) LOCATION 1...2952
  hypothetical: NO
  anti-sense: NO
gtgtttgtggcaagcaaacaagctgacgaacaaaaaaagctagttatagagcaagaggttcaaaagcggcagtttcaaaaaatagaagaacttaaagcagacatgcaaaagggtgtcaatcccttttttaaagtcttgtttgatggggggaataggttgtttggtttccctgaaacttttatttattcttctatatttatattgtttgtaacaattgtattatctgttattctttttcaagcctatgaacctgttttgattgtagcgattgttattgtgcttgtagctcttggattcaagaaagattacaggctttatcaaagaatggagcgagcgatgaaatttaaaaaaccttttttgtttaagggcgtgaaaaacaaagcgttcatgagcattttttccatgaagcctagtaaagaaatggctaatgacatccacttaaatccaaacagagaagacaggcttgtgagcgctgcaaactcctatctagcgaataactatgaatgttttttagatgatggggtgatccttactaacaactattctcttttaggcacaatcaaattggggggcattgattttttaaccacttccaaaaaagatctcatagagttacacgcttctatttatagcgtttttaggaattttgttacccctgaattcaaattttattttcacactgttaaaaagaaaatcgttattgatgaaaccaatagggattatggtcttattttttctaatgatttcatgcgagcctataatgagaagcaaaagagagaaagtttttatgatattagtttttatctcaccatagagcaagatttattagacactctcaatgaacccgttatgaataaaaagcattttgcagacaataattttgaagagtttcaaaggattattagagccaagcttgaaaacttcaaagataggatagagctcatagaagagctactgagtaaataccaccccactagattaaaagaatacactaaagatggcattatttactccaaacaatgcgaattttacaattttcttgtgggaatgaatgaagccccttttatttgcaacagaaaagacttgtatctcaaggaaaaaatgcatggtggggtgaaagaagtttattttgccaataagcatggaaaaatcttaaatgacgatttgagtgaaaaatattttagcgctattgagatcagtgaatacgcccctaaatcacagagcgatttgtttgataaaatcaacgctctagacagcgaatttatctttatgcatgcttattcgcctaaaaactcacaagttttaaaggacaaactagctttcacctctagaaggattattattagtggaggctccaaagagcaaggcatgactttgggttgcttgagcgaattagtgggtaatggtgatattacgctaggcagttatggtaattctttagtgctgtttgctgatagctttgaaaaaatgaaacaaagcgttaaggaatgcgtctctagtcttaacgctaaaggttttttagccaacgcagcgactttctctatggaaaattacttttttgccaaacattgctcttttatcacgcttccttttatttttgatgtaacttctaacaattttgctgatttcatagcgatgagagcgatgagttttgatggcaaagaagacaataacgcttggggcaatagcgtgatgacgttaaaaagcgagatcaattcgcctttttatttgaacttccacatgcccactgattttggttcagcttcagcaggacacactttgatacttggctcaaccggttcaggtaagacagtgtttatgtccatgactctaaacgctatggggcaatttgcctataattttcctgctaatatcagcaaagacaagcaaaagctcactatggtttatatggataaagattatggcgcttatgggaatattgttgcaatgggtggggagtatgtcaagattgagctagggacagatacaggattaaatccttttgcttgggcagcttgtgtgcaaaaaacaaatgcaacaatggagcaaaaacaaacagctatttctgttgtcaaagagcttgtgaaaaacttagcaactaaaagcgatgaaaaagatgaaaatggcaacagcatctcttttagcctagcagattctaatacgcttgcagcggcagtaaccaaccttatcacaggagatatgaacctagattatcctatcactcaacttattaatgctttcgggaaagaccacaatgatcctaatgggcttgtcgcgcgattagcgcctttttgcaaatcaaccaatggtgaatttcaatggctttttgacaataaagcaacagatcgcttagatttttcaaaaacgattattggcgttgatgggtcaagtttcttagacaataatgacgtttcgccttttatttgtttttaccttttcgctcgtatccaagaagcaatggatgggcgtagatttgtcttagatattgatgaagcgtggaaatatttaggcgatccaaaggtcgcttattttgtgagagacatgctaaaaactgcaaggaaaagaaacgctattgttagacttgcgactcaaagcatcactgatcttttggcttgccctattgctgatacgattagagaacaatgccctacaaagatttttttgagaaacgatgggggtaatctttctgattaccaaagattagccaatgttacagaaaaagaatttgaaatcatcactaaggggctggataggaaaatcctctacaaacaggatggaagccctagcgttatcgctagttttaatttgagaggcattcctaaagaatatttgaaaattttatccacagatactgtatttgtcaaagaaattgacaagattatccaaaaccatagtatcatagataaatatcaggccttgaggcaaatgtatcaacaaataaaggagtattaa

SEQ ID NO: 3870 - DNA (genomic), 2973 bp, Helicobacter pylori; double-stranded, circular
  misc_feature (B) LOCATION 1...2973
  hypothetical: NO
  anti-sense: NO
agcggtatatctataaagagaggggtgtttgtggcaagcaaacaagctgacgaacaaaaaaagctagttatagagcaagaggttcaaaagcggcagtttcaaaaaatagaagaacttaaagcagacatgcaaaagggtgtcaatcccttttttaaagtcttgtttgatggggggaataggttgtttggtttccctgaaacttttatttattcttctatatttatattgtttgtaacaattgtattatctgttattctttttcaagcctatgaacctgttttgattgtagcgattgttattgtgcttgtagctcttggattcaagaaagattacaggctttatcaaagaatggagcgagcgatgaaatttaaaaaaccttttttgtttaagggcgtgaaaaacaaagcgttcatgagcattttttccatgaagcctagtaaagaaatggctaatgacatccacttaaatccaaacagagaagacaggcttgtgagcgctgcaaactcctatctagcgaataactatgaatgttttttagatgatggggtgatccttactaacaactattctcttttaggcacaatcaaattggggggcattgattttttaaccacttccaaaaaagatctcatagagttacacgcttctatttatagcgtttttaggaattttgttacccctgaattcaaattttattttcacactgttaaaaagaaaatcgttattgatgaaaccaatagggattatggtcttattttttctaatgatttcatgcgagcctataatgagaagcaaaagagagaaagtttttatgatattagtttttatctcaccatagagcaagatttattagacactctcaatgaacccgttatgaataaaaagcattttgcagacaataattttgaagagtttcaaaggattattagagccaagcttgaaaacttcaaagataggatagagctcatagaagagctactgagtaaataccaccccactagattaaaagaatacactaaagatggcattatttactccaaacaatgcgaattttacaattttcttgtgggaatgaatgaagccccttttatttgcaacagaaaagacttgtatctcaaggaaaaaatgcatggtggggtgaaagaagtttattttgccaataagcatggaaaaatcttaaatgacgatttgagtgaaaaatattttagcgctattgagatcagtgaatacgcccctaaatcacagagcgatttgtttgataaaatcaacgctctagacagcgaatttatctttatgcatgcttattcgcctaaaaactcacaagttttaaaggacaaactagctttcacctctagaaggattattattagtggaggctccaaagagcaaggcatgactttgggttgcttgagcgaattagtgggtaatggtgatattacgctaggcagttatggtaattctttagtgctgtttgctgatagctttgaaaaaatgaaacaaagcgttaaggaatgcgtctctagtcttaacgctaaaggttttttagccaacgcagcgactttctctatggaaaattacttttttgccaaacattgctcttttatcacgcttccttttatttttgatgtaacttctaacaattttgctgatttcatagcgatgagagcgatgagttttgatggcaaagaagacaataacgcttggggcaatagcgtgatgacgttaaaaagcgagatcaattcgcctttttatttgaacttccacatgcccactgattttggttcagcttcagcaggacacactttgatacttggctcaaccggttcaggtaagacagtgtttatgtccatgactctaaacgctatggggcaatttgcctataattttcctgctaatatcagcaaagacaagcaaaagctcactatggtttatatggataaagattatggcgcttatgggaatattgttgcaatgggtggggagtatgtcaagattgagctagggacagatacaggattaaatccttttgcttgggcagcttgtgtgcaaaaaacaaatgcaacaatggagcaaaaacaaacagctatttctgttgtcaaagagcttgtgaaaaacttagcaactaaaagcgatgaaaaagatgaaaatggcaacagcatctcttttagcctagcagattctaatacgcttgcagcggcagtaaccaaccttatcacaggagatatgaacctagattatcctatcactcaacttattaatgctttcgggaaagaccacaatgatcctaatgggcttgtcgcgcgattagcgcctttttgcaaatcaaccaatggtgaatttcaatggctttttgacaataaagcaacagatcgcttagatttttcaaaaacgattattggcgttgatgggtcaagtttcttagacaataatgacgtttcgccttttatttgtttttaccttttcgctcgtatccaagaagcaatggatgggcgtagatttgtcttagatattgatgaagcgtggaaatatttaggcgatccaaaggtcgcttattttgtgagagacatgctaaaaactgcaaggaaaagaaacgctattgttagacttgcgactcaaagcatcactgatcttttggcttgccctattgctgatacgattagagaacaatgccctacaaagatttttttgagaaacgatgggggtaatctttctgattaccaaagattagccaatgttacagaaaaagaatttgaaatcatcactaaggggctggataggaaaatcctctacaaacaggatggaagccctagcgttatcgctagttttaatttgagaggcattcctaaagaatatttgaaaattttatccacagatactgtatttgtcaaagaaattgacaagattatccaaaaccatagtatcatagataaatatcaggccttgaggcaaatgtatcaacaaataaaggagtat

SEQ ID NO: 3871 - DNA (genomic), 3504 bp, Helicobacter pylori; double-stranded, circular
  misc_feature (B) LOCATION 1...3504
  hypothetical: NO
  anti-sense: NO
atgactaacgaagccattaaccaacaaccacaaaccgaagcggcttttaacccgcagcaatttatcaataatcttcaagtggcttttattaaagttgataatgttgtcgcttcatttgatcctaatcaaaaaccaatcgttgataagaatgatagggataataggcaagcttttgagaaaatctcgcagctaagggaggaattcgctaataaagcgatcaaaaatcctaccaaaaagaatcagtatttttcaagctttatcagtaagagcaatgatttaatcgacaaagacaatctcattgatacaggttcttccataaagagctttcagaaatttgggactcagcgttaccaaatttttatgaattgggtgtcccatcaaaacgatccgtctaaaatcaacacccaaaaaatccgaggttttatggaaaatatcatacaaccccctatctctgatgataaagagaaagcggagtttttgaggtctgccaaacaagcttttgcaggaattatcataggaaaccaaatccgatcggatcaaaaattcatgggcgtgtttgatgaatctttgaaagagaggcaagaagcagaaaaaaatggagagcctaatggagatcctactggtggggattggcttgatatttttttatcatttgtgtttaacaaaaaacaatcttccgatctcaaagaaacgctcaatcaagaaccagttcctcatgtccaaccagatgtagccactaccaccactgacatacaaagcttaccgcctgaagctagggatttgcttgatgaaaggggtaatttttctaaattcactcttggcgatatgaacatgttagatgttgagggagtcgctgacattgatcctaattacaagttcaaccaattattgatccacaataacgctctgtcttctgtgttaatggggagtcataatggcatagaacctgaaaaagtttcattgttgtatggaaacaatggtggtcctgaagctaggcatgattggaacgccaccgttggttataaaaaccaacgaggcgacaatgtggctacactcattaatgtgcatatgaaaaatggcagtgggttagtcatagcaggtggtgagaaagggattaacaaccctagtttttatctctacaaagaagaccaactcacaggctcacaacgagcattgagtcaagaagagatccaaaacaaagtggatttcatggaatttcttgcacaaaataatgctaaattagacaacttgagcaagaaagagaaagaaaaattccaaaatgagattgaagattttcaaaaagactctaaggcttatttagacgccctagggaatgatcacattgcttttgtttctaaaaaagacaaaaaacatttagctttagttgctgagtttggtaatggggaattgagctacactctcaaagattatgggaaaaaagcagataaagctttagatagggaggcaaaaaccactcttcaaggtagcctaaaacatgatggcgtgatgtttgttgattattctaatttcaaatacaccaacgcctccaagagtcctgataagggtgtgggtgctacgaatggcgtttcccatttagaagcaggctttagcaaggtagctgtctttaatttgcctaatttaaataatctcgctatcactagtgtcgtaaggcaggatttagaggataaactaatcgctaaaggattgtccccacaagaagctaataagcttgtcaaagattttttgagcagcaacaaagaattggttggaaaagctttaaacttcaataaagctgtagctgaagctaaaaacacaggcaactatgacgaggtgaaacaagctcagaaagatcttgaaaaatctctaaagaaacgagagcgtttggagaaagatgtagcgaaaaatttggagagcaaaagcggcaacaaaaataaaatggaagcaaaatctcaagctaacagccaaaaagatgagatttttgcgttgatcaataaagaggctaatagggatgcaagagcaatcgcttacgctcagaatcttaaaggcatcaaaagggaattgtctgataaacttgaaaatatcaacaaggatttgaaagactttagtaaatcttttgatgaattcaaaaatggcaaaaataaggatttcagcaaggcagaagaaacactaaaagcccttaaaggctcggtgaaagatttaggtatcaatccagaatggatttcaaaagttgaaaaccttaatgcagctttgaatgaattcaaaaatggcaaaaataaggatttcagcaaggtaacgcaagcaaaaagcgaccttgaaaattccattaaagatgtgatcatcaatcaaaagataacggataaagttgataatctcaatcaagcggtatcagtggctaaagcaacgggtgatttcagtggggtagagcaagcgttagccgatctcaaaaatttctcaaaggagcaattggctcaacaagctcaaaaaaatgaagatttcaatactggaaaaaattctgcactataccaatccgttaagaatggtgtaaacggaaccctagtcggtaatgggttatctaaagcagaagccacaactctttctaaaaacttttcggacatcaagaaagagttgaatgcaaaacttggaaatttcaataacaataacaataatggactcgaaaacagcacagaacccatttatactcaagttgctaaaaaggtaaaagcaaaaattgaccgactcgatcaaatagcaagtggtttgggtgatgtagggcaagcagcgagcttccttttgaaaaggcatgataaagttgatgatctcagtaaggtagggctttcagctaaccatgaacccatttacgctacgattgatgatctcggcggacctttccctttgaaaaggcatgataaagttgatgatctcagtaaggtagggctttcaagggagcaaaaattgactcagaaaattgacaatctcaaccaggcggtatcagaagctaaagcaagtcattttgacaacctagatcaaatgatagacaagctcaaagattctacaaaaaagaatgttgtgaatctatatgttgaaagtgcaaaaaaagtgcctactagtttgtcagcgaaattggacaattacgctactaacagccacacacgcattaatagcaatgtcaaaaatggaacaatcaatgaaaaagcgaccggcatgctaacgcaaaaaaattctgagtggctcaagctcgtgaatgataagatagttgcgcataatgtgggaagtgctcctttgtcagcgtatgataaaattggattcaaccaaaagaatatgaaagattattctgattcgttcaagttttccaccaggttgagcaatgccgtaaaagacattaagtctggctttgtgcaatttttaaccaatatattttctatgggatcttacagcttgatgaaagcaagtgtggaacatggagtcaaaaatactaatacaaaaggtggtttccaaaaatcttaa

SEQ ID NO: 3872 - DNA (genomic), 3534 bp, Helicobacter pylori; double-stranded, circular
  misc_feature (B) LOCATION 1...3534
  hypothetical: NO
  anti-sense: NO
atgataccaaatttagatatagaaggagaaacaatgactaacgaagccattaaccaacaaccacaaaccgaagcggcttttaacccgcagcaatttatcaataatcttcaagtggcttttattaaagttgataatgttgtcgcttcatttgatcctaatcaaaaaccaatcgttgataagaatgatagggataataggcaagcttttgagaaaatctcgcagctaagggaggaattcgctaataaagcgatcaaaaatcctaccaaaaagaatcagtatttttcaagctttatcagtaagagcaatgatttaatcgacaaagacaatctcattgatacaggttcttccataaagagctttcagaaatttgggactcagcgttaccaaatttttatgaattgggtgtcccatcaaaacgatccgtctaaaatcaacacccaaaaaatccgaggttttatggaaaatatcatacaaccccctatctctgatgataaagagaaagcggagtttttgaggtctgccaaacaagcttttgcaggaattatcataggaaaccaaatccgatcggatcaaaaattcatgggcgtgtttgatgaatctttgaaagagaggcaagaagcagaaaaaaatggagagcctaatggagatcctactggtggggattggcttgatatttttttatcatttgtgtttaacaaaaaacaatcttccgatctcaaagaaacgctcaatcaagaaccagttcctcatgtccaaccagatgtagccactaccaccactgacatacaaagcttaccgcctgaagctagggatttgcttgatgaaaggggtaatttttctaaattcactcttggcgatatgaacatgttagatgttgagggagtcgctgacattgatcctaattacaagttcaaccaattattgatccacaataacgctctgtcttctgtgttaatggggagtcataatggcatagaacctgaaaaagtttcattgttgtatggaaacaatggtggtcctgaagctaggcatgattggaacgccaccgttggttataaaaaccaacgaggcgacaatgtggctacactcattaatgtgcatatgaaaaatggcagtgggttagtcatagcaggtggtgagaaagggattaacaaccctagtttttatctctacaaagaagaccaactcacaggctcacaacgagcattgagtcaagaagagatccaaaacaaagtggatttcatggaatttcttgcacaaaataatgctaaattagacaacttgagcaagaaagagaaagaaaaattccaaaatgagattgaagattttcaaaaagactctaaggcttatttagacgccctagggaatgatcacattgcttttgtttctaaaaaagacaaaaaacatttagctttagttgctgagtttggtaatggggaattgagctacactctcaaagattatgggaaaaaagcagataaagctttagatagggaggcaaaaaccactcttcaaggtagcctaaaacatgatggcgtgatgtttgttgattattctaatttcaaatacaccaacgcctccaagagtcctgataagggtgtgggtgctacgaatggcgtttcccatttagaagcaggctttagcaaggtagctgtctttaatttgcctaatttaaataatctcgctatcactagtgtcgtaaggcaggatttagaggataaactaatcgctaaaggattgtccccacaagaagctaataagcttgtcaaagattttttgagcagcaacaaagaattggttggaaaagctttaaacttcaataaagctgtagctgaagctaaaaacacaggcaactatgacgaggtgaaacaagctcagaaagatcttgaaaaatctctaaagaaacgagagcgtttggagaaagatgtagcgaaaaatttggagagcaaaagcggcaacaaaaataaaatggaagcaaaatctcaagctaacagccaaaaagatgagatttttgcgttgatcaataaagaggctaatagggatgcaagagcaatcgcttacgctcagaatcttaaaggcatcaaaagggaattgtctgataaacttgaaaatatcaacaaggatttgaaagactttagtaaatcttttgatgaattcaaaaatggcaaaaataaggatttcagcaaggcagaagaaacactaaaagcccttaaaggctcggtgaaagatttaggtatcaatccagaatggatttcaaaagttgaaaaccttaatgcagctttgaatgaattcaaaaatggcaaaaataaggatttcagcaaggtaacgcaagcaaaaagcgaccttgaaaattccattaaagatgtgatcatcaatcaaaagataacggataaagttgataatctcaatcaagcggtatcagtggctaaagcaacgggtgatttcagtggggtagagcaagcgttagccgatctcaaaaatttctcaaaggagcaattggctcaacaagctcaaaaaaatgaagatttcaatactggaaaaaattctgcactataccaatccgttaagaatggtgtaaacggaaccctagtcggtaatgggttatctaaagcagaagccacaactctttctaaaaacttttcggacatcaagaaagagttgaatgcaaaacttggaaatttcaataacaataacaataatggactcgaaaacagcacagaacccatttatactcaagttgctaaaaaggtaaaagcaaaaattgaccgactcgatcaaatagcaagtggtttgggtgatgtagggcaagcagcgagcttccttttgaaaaggcatgataaagttgatgatctcagtaaggtagggctttcagctaaccatgaacccatttacgctacgattgatgatctcggcggacctttccctttgaaaaggcatgataaagttgatgatctcagtaaggtagggctttcaagggagcaaaaattgactcagaaaattgacaatctcaaccaggcggtatcagaagctaaagcaagtcattttgacaacctagatcaaatgatagacaagctcaaagattctacaaaaaagaatgttgtgaatctatatgttgaaagtgcaaaaaaagtgcctactagtttgtcagcgaaattggacaattacgctactaacagccacacacgcattaatagcaatgtcaaaaatggaacaatcaatgaaaaagcgaccggcatgctaacgcaaaaaaattctgagtggctcaagctcgtgaatgataagatagttgcgcataatgtgggaagtgctcctttgtcagcgtatgataaaattggattcaaccaaaagaatatgaaagattattctgattcgttcaagttttccaccaggttgagcaatgccgtaaaagacattaagtctggctttgtgcaatttttaaccaatatattttctatgggatcttacagcttgatgaaagcaagtgtggaacatggagtcaaaaatactaatacaaaaggtggtttccaaaaatct

SEQ ID NO: 3873 - DNA (genomic), 3549 bp, Helicobacter pylori; double-stranded, circular
  misc_feature (B) LOCATION 1...3549
  hypothetical: NO
  anti-sense: NO
tttttagtagcattaatgataccaaatttagatatagaaggagaaacaatgactaacgaagccattaaccaacaaccacaaaccgaagcggcttttaacccgcagcaatttatcaataatcttcaagtggcttttattaaagttgataatgttgtcgcttcatttgatcctaatcaaaaaccaatcgttgataagaatgatagggataataggcaagcttttgagaaaatctcgcagctaagggaggaattcgctaataaagcgatcaaaaatcctaccaaaaagaatcagtatttttcaagctttatcagtaagagcaatgatttaatcgacaaagacaatctcattgatacaggttcttccataaagagctttcagaaatttgggactcagcgttaccaaatttttatgaattgggtgtcccatcaaaacgatccgtctaaaatcaacacccaaaaaatccgaggttttatggaaaatatcatacaaccccctatctctgatgataaagagaaagcggagtttttgaggtctgccaaacaagcttttgcaggaattatcataggaaaccaaatccgatcggatcaaaaattcatgggcgtgtttgatgaatctttgaaagagaggcaagaagcagaaaaaaatggagagcctaatggagatcctactggtggggattggcttgatatttttttatcatttgtgtttaacaaaaaacaatcttccgatctcaaagaaacgctcaatcaagaaccagttcctcatgtccaaccagatgtagccactaccaccactgacatacaaagcttaccgcctgaagctagggatttgcttgatgaaaggggtaatttttctaaattcactcttggcgatatgaacatgttagatgttgagggagtcgctgacattgatcctaattacaagttcaaccaattattgatccacaataacgctctgtcttctgtgttaatggggagtcataatggcatagaacctgaaaaagtttcattgttgtatggaaacaatggtggtcctgaagctaggcatgattggaacgccaccgttggttataaaaaccaacgaggcgacaatgtggctacactcattaatgtgcatatgaaaaatggcagtgggttagtcatagcaggtggtgagaaagggattaacaaccctagtttttatctctacaaagaagaccaactcacaggctcacaacgagcattgagtcaagaagagatccaaaacaaagtggatttcatggaatttcttgcacaaaataatgctaaattagacaacttgagcaagaaagagaaagaaaaattccaaaatgagattgaagattttcaaaaagactctaaggcttatttagacgccctagggaatgatcacattgcttttgtttctaaaaaagacaaaaaacatttagctttagttgctgagtttggtaatggggaattgagctacactctcaaagattatgggaaaaaagcagataaagctttagatagggaggcaaaaaccactcttcaaggtagcctaaaacatgatggcgtgatgtttgttgattattctaatttcaaatacaccaacgcctccaagagtcctgataagggtgtgggtgctacgaatggcgtttcccatttagaagcaggctttagcaaggtagctgtctttaatttgcctaatttaaataatctcgctatcactagtgtcgtaaggcaggatttagaggataaactaatcgctaaaggattgtccccacaagaagctaataagcttgtcaaagattttttgagcagcaacaaagaattggttggaaaagctttaaacttcaataaagctgtagctgaagctaaaaacacaggcaactatgacgaggtgaaacaagctcagaaagatcttgaaaaatctctaaagaaacgagagcgtttggagaaagatgtagcgaaaaatttggagagcaaaagcggcaacaaaaataaaatggaagcaaaatctcaagctaacagccaaaaagatgagatttttgcgttgatcaataaagaggctaatagggatgcaagagcaatcgcttacgctcagaatcttaaaggcatcaaaagggaattgtctgataaacttgaaaatatcaacaaggatttgaaagactttagtaaatcttttgatgaattcaaaaatggcaaaaataaggatttcagcaaggcagaagaaacactaaaagcccttaaaggctcggtgaaagatttaggtatcaatccagaatggatttcaaaagttgaaaaccttaatgcagctttgaatgaattcaaaaatggcaaaaataaggatttcagcaaggtaacgcaagcaaaaagcgaccttgaaaattccattaaagatgtgatcatcaatcaaaagataacggataaagttgataatctcaatcaagcggtatcagtggctaaagcaacgggtgatttcagtggggtagagcaagcgttagccgatctcaaaaatttctcaaaggagcaattggctcaacaagctcaaaaaaatgaagatttcaatactggaaaaaattctgcactataccaatccgttaagaatggtgtaaacggaaccctagtcggtaatgggttatctaaagcagaagccacaactctttctaaaaacttttcggacatcaagaaagagttgaatgcaaaacttggaaatttcaataacaataacaataatggactcgaaaacagcacagaacccatttatactcaagttgctaaaaaggtaaaagcaaaaattgaccgactcgatcaaatagcaagtggtttgggtgatgtagggcaagcagcgagcttccttttgaaaaggcatgataaagttgatgatctcagtaaggtagggctttcagctaaccatgaacccatttacgctacgattgatgatctcggcggacctttccctttgaaaaggcatgataaagttgatgatctcagtaaggtagggctttcaagggagcaaaaattgactcagaaaattgacaatctcaaccaggcggtatcagaagctaaagcaagtcattttgacaacctagatcaaatgatagacaagctcaaagattctacaaaaaagaatgttgtgaatctatatgttgaaagtgcaaaaaaagtgcctactagtttgtcagcgaaattggacaattacgctactaacagccacacacgcattaatagcaatgtcaaaaatggaacaatcaatgaaaaagcgaccggcatgctaacgcaaaaaaattctgagtggctcaagctcgtgaatgataagatagttgcgcataatgtgggaagtgctcctttgtcagcgtatgataaaattggattcaaccaaaagaatatgaaagattattctgattcgttcaagttttccaccaggttgagcaatgccgtaaaagacattaagtctggctttgtgcaatttttaaccaatatattttctatgggatcttacagcttgatgaaagcaagtgtggaacatggagtcaaaaatactaatacaaaaggtggtttccaaaaatct

SEQ ID NO: 3874 - DNA (genomic), 276 bp, Helicobacter pylori; double-stranded, circular
  misc_feature (B) LOCATION 1...276
  hypothetical: NO
  anti-sense: NO
ttgcgatcagaagtggaaaaatgcggcttcaagaattttgatgagatcaaaatagacactatggatgcctttcaaggcgaggaggcagatattattatttattccaccgtgaaaacttatggtaatctttctttcttgctagattctaaacgcttgaatgtagctatttctagggcaaaagaaaatctcatttttgtgggcaaaaagtctttctttgagaatttacgaagcgataaggacaatatctttaacgctattttgcaagtctgcagatag

SEQ ID NO: 3875 - DNA (genomic), 426 bp, Helicobacter pylori; double-stranded, circular
  misc_feature (B) LOCATION 1...426
  hypothetical: NO
  anti-sense: NO
agagagcatcaactagaaaaaacaagtagctataacaaagatcaagttcaaaaaatcatagagcttttagagcaaatcgatcgcgctcttaaccaaagaaaaatcagaaaaactataggaattatcacaccttataatgcccaaaaaagacgcttgcgatcagaagtggaaaaatgcggcttcaagaattttgatgagatcaaaatagacactatggatgcctttcaaggcgaggaggcagatattattatttattccaccgtgaaaacttatggtaatctttctttcttgctagattctaaacgcttgaatgtagctatttctagggcaaaagaaaatctcatttttgtgggcaaaaagtctttctttgagaatttacgaagcgataaggacaatatctttaacgctattttgcaagtctgcaga

SEQ ID NO: 3876 - DNA (genomic), 825 bp, Helicobacter pylori; double-stranded, circular
  misc_feature (B) LOCATION 1...825
  hypothetical: NO
  anti-sense: NO
ttgacgcatgtttttgaggtttatcctaaagtcaatgtttttttaaaaatccttcacaaagaaggggcttatcataagattatttctcgcatgtgtttagtcaaaaataagctaaaagacattatcagcgttaaaaacgccttatctttctcattaaaaggggattttgactgccctttagaagaaaactcgctctttaaggctctccaagttttaaaaaaatttttagtgcaaaaaaatttttctcattctgtcatcaaatccctagacaccctagcgattgaagtggaaaaaaatatccccactcaagctgggttaggcggtgggagtgctgatgctggggggctattgtatcatttaaatcaaatgtttgattggcgtttgagtttaaaagagctttatactatgggatctttagtgggcgcggacaccaattttttcatctcgcaatacaaaagcgctaacgccacttcttatggcgaagtcattgaaaattttgaagaagagtctttagaagatcgcctagaaatctatgcgccaaatcatgttttttgcagcaccaaagccgtttatcaagcttataagcctgaaacttgcttttttcaagctaaagagtggcttaaaaaaacgagtttggaatgcctaaagacttatgacagaaacgaactaaacgatcttttaaagccggctttacgcactaaccctgccctcaaagatatagaaagccaactcagtaaggagtggttttttagcgggagcgggagtgcgttttttaggctaaaaaatactcaaaagggagcgaatgaaactcattgccagcaataa

SEQ ID NO: 3877 - DNA (genomic), 825 bp, Helicobacter pylori; double-stranded, circular
  misc_feature (B) LOCATION 1...825
  hypothetical: NO
  anti-sense: NO
gccttgacgcatgtttttgaggtttatcctaaagtcaatgtttttttaaaaatccttcacaaagaaggggcttatcataagattatttctcgcatgtgtttagtcaaaaataagctaaaagacattatcagcgttaaaaacgccttatctttctcattaaaaggggattttgactgccctttagaagaaaactcgctctttaaggctctccaagttttaaaaaaatttttagtgcaaaaaaatttttctcattctgtcatcaaatccctagacaccctagcgattgaagtggaaaaaaatatccccactcaagctgggttaggcggtgggagtgctgatgctggggggctattgtatcatttaaatcaaatgtttgattggcgtttgagtttaaaagagctttatactatgggatctttagtgggcgcggacaccaattttttcatctcgcaatacaaaagcgctaacgccacttcttatggcgaagtcattgaaaattttgaagaagagtctttagaagatcgcctagaaatctatgcgccaaatcatgttttttgcagcaccaaagccgtttatcaagcttataagcctgaaacttgcttttttcaagctaaagagtggcttaaaaaaacgagtttggaatgcctaaagacttatgacagaaacgaactaaacgatcttttaaagccggctttacgcactaaccctgccctcaaagatatagaaagccaactcagtaaggagtggttttttagcgggagcgggagtgcgttttttaggctaaaaaatactcaaaagggagcgaatgaaactcattgccagcaa

SEQ ID NO: 3878 - DNA (genomic), 777 bp, Helicobacter pylori; double-stranded, circular
  misc_feature (B) LOCATION 1...777
  hypothetical: NO
  anti-sense: NO
atgcaaaatcctattgaaatcaaagccaaaaccttagaagaagccctcattcaagcttctatcgccttgaattgccccatcattaatttgcaatatgaagtcattcaaatgccctctaaaggttttttaaatataggtaaaaaagaagccattattttagtgggcgttaaagaaagcgttaaagaggttaaagaagagagcgttaaagaaatccatcaaaacgcagaagaaaaacaaagcttagggataaaaacgcctcaagaagaaataatcacccctaaaccccctaaaaaaacccctaaagaagaatctcataatggagacaagctccatgagattaagcaagaattgaaagacttattctcccacttgccttataaaatcaacaaagtggaagtcagtctttatgaaccgggggttttattgattgatattgatggcgaagattccgcccttttgattggcgaaaagggttatcgttacaaagccctttcttacttgctctttaactggatccaccctgcttatggctatagtatccacttagaaatttccacttttttacaaaaccaagaaaaggtcatggaagcgcaactccaaagcacgatcatgaccgtgcatgaggtgggtaaggggcagatgaaagcccctgatggcgttttaacctatatcgctttaaagaaactacgaaaagcgttccccaacaaatatgtctccattaaaaccaacttaaacgatgaaaaatacatcgtcatcaacgactttaacaatgaatga

SEQ ID NO: 3879 - DNA (genomic), 795 bp, Helicobacter pylori; double-stranded, circular
  misc_feature (B) LOCATION 1...795
  hypothetical: NO
  anti-sense: NO
aggaataataaaggaaaattgatgcaaaatcctattgaaatcaaagccaaaaccttagaagaagccctcattcaagcttctatcgccttgaattgccccatcattaatttgcaatatgaagtcattcaaatgccctctaaaggttttttaaatataggtaaaaaagaagccattattttagtgggcgttaaagaaagcgttaaagaggttaaagaagagagcgttaaagaaatccatcaaaacgcagaagaaaaacaaagcttagggataaaaacgcctcaagaagaaataatcacccctaaaccccctaaaaaaacccctaaagaagaatctcataatggagacaagctccatgagattaagcaagaattgaaagacttattctcccacttgccttataaaatcaacaaagtggaagtcagtctttatgaaccgggggttttattgattgatattgatggcgaagattccgcccttttgattggcgaaaagggttatcgttacaaagccctttcttacttgctctttaactggatccaccctgcttatggctatagtatccacttagaaatttccacttttttacaaaaccaagaaaaggtcatggaagcgcaactccaaagcacgatcatgaccgtgcatgaggtgggtaaggggcagatgaaagcccctgatggcgttttaacctatatcgctttaaagaaactacgaaaagcgttccccaacaaatatgtctccattaaaaccaacttaaacgatgaaaaatacatcgtcatcaacgactttaacaatgaa

SEQ ID NO: 3880 - DNA (genomic), 459 bp, Helicobacter pylori; double-stranded, circular
  misc_feature (B) LOCATION 1...459
  hypothetical: NO
  anti-sense: NO
atgaaactcattgccagcaataaaaaagcctattttgattatgagattttggaaactttagaagcaggattagcgcttttaggctctgaagtgaaggctttgaggcaaactagggtgaatttaaaagataattttgttaaaataatcaaaggagaagcttttttatttggtgttcatatatcatatttagatacaatccatgcgtattacaagcccaatgaaaggcgagagcgtaagttgcttttacacaaaaagcaattattgaaatggcaaatggaagcgtctaaagaacgcttgagtatcgtaggattgaaattgtattttaaccaaaaaaatagagctaaaatccaaattgctttagtaaaaggaaaaagattgcacgacaaaagacaaagtctcaaagaaaaagcactcaataaagaaattcttgctgatttaaaacaccactttaaaggataa

SEQ ID NO: 3881 - DNA (genomic), 477 bp, Helicobacter pylori; double-stranded, circular
  misc_feature (B) LOCATION 1...477
  hypothetical: NO
  anti-sense: NO
aaaatactcaaaagggagcgaatgaaactcattgccagcaataaaaaagcctattttgattatgagattttggaaactttagaagcaggattagcgcttttaggctctgaagtgaaggctttgaggcaaactagggtgaatttaaaagataattttgttaaaataatcaaaggagaagcttttttatttggtgttcatatatcatatttagatacaatccatgcgtattacaagcccaatgaaaggcgagagcgtaagttgcttttacacaaaaagcaattattgaaatggcaaatggaagcgtctaaagaacgcttgagtatcgtaggattgaaattgtattttaaccaaaaaaatagagctaaaatccaaattgctttagtaaaaggaaaaagattgcacgacaaaagacaaagtctcaaagaaaaagcactcaataaagaaattcttgctgatttaaaacaccactttaaagga

SEQ ID NO: 3882 - DNA (genomic), 186 bp, Helicobacter pylori; double-stranded, circular
  misc_feature (B) LOCATION 1...186
  hypothetical: NO
  anti-sense: NO
agggttagagtggagggatttagcttgaggatcaaccaatttttagcccattacaccaagcactcgcgcagagaagccgaaaaattggttttagaagggcgggtgaaaatcaatcatgagcatgccaaactcgctagcgtggttaaagaaaacgacaaggtgtttttagacaaacgactcatcaag

SEQ ID NO: 3883 - DNA (genomic), 789 bp, Helicobacter pylori; double-stranded, circular
  misc_feature (B) LOCATION 1...789
  hypothetical: NO
  anti-sense: NO
gtggagggatttagcttgaggatcaaccaatttttagcccattacaccaagcactcgcgcagagaagccgaaaaattggttttagaagggcgggtgaaaatcaatcatgagcatgccaaactcgctagcgtggttaaagaaaacgacaaggtgtttttagacaaacgactcatcaagcccttaaaaaacaaaaaattcagcgtgttagtctatcacaagccaaagggcgaactagtgagtaaggccgatcccttaaaacggcacgtgatttatgaaagcttggagaaaaaatacgcccattttgcgccggtggggcgtttggattttgcgagcgagggggtgctactcttaagcgatagtaaggcggtggtgagcgctttaatgcatgcgaatttagaaaaagagtatcttgttaagattcaaggctttgttacaagagagatggaaaacgccatgcaagagggcttgaaattagaaaacgccactaaaggagcgcaccaaaaaacccccattaaaagcatggaatttgccccttttattggttatgaaatcatcaaaaaccatgccaaatattctaagcttagagtcattattaatgaggggaaaaacagagaattaaggcgtttttttgcgttttttaacgctggagtgttggatttaaggcgcgttcgttatggttttgtgaatttgaatgccttgccggtagggaaagcgcgttttctaaaccgccaagaatacaacgaattgcatgcgtttatggctaatagggctaatgttaaaggggattag

SEQ ID NO: 3884 - DNA (genomic), 252 bp, Helicobacter pylori; double-stranded, circular
  misc_feature (B) LOCATION 1...252
  hypothetical: NO
  anti-sense: NO
gtgctggtggtgggcaaacccaacgaaagctatgcagatacccacgcccgcattgagcattttatcaagcttgtagattttaagggcgaaatcgtttttatcaatgaagataattctagcgtagaagcttatgaaaatttagagcatttgggtaagaaaaataagcggatcgctaccaaagatggccggttagactctttgagcgcttgtaggattttagagcgctattgccagcaggttttaaaaaagggc

SEQ ID NO: 3885 - DNA (genomic), 405 bp, Helicobacter pylori; double-stranded, circular
  misc_feature (B) LOCATION 1...405
  hypothetical: NO
  anti-sense: NO
atgattttagcatgcgatgtggggttaaaacgcattggaatcgctgcgcttttaaacggcgttatcttgcctttggaagcgattttacgccacaacaggaatcaagcctctagggatttgagcgatttattgagaaaaaaagacattcaagtgctggtggtgggcaaacccaacgaaagctatgcagatacccacgcccgcattgagcattttatcaagcttgtagattttaagggcgaaatcgtttttatcaatgaagataattctagcgtagaagcttatgaaaatttagagcatttgggtaagaaaaataagcggatcgctaccaaagatggccggttagactctttgagcgcttgtaggattttagagcgctattgccagcaggttttaaaaaagggctag

SEQ ID NO: 3886 - DNA (genomic), 429 bp, Helicobacter pylori; double-stranded, circular
  misc_feature (B) LOCATION 1...429
  hypothetical: NO
  anti-sense: NO
gcgcatcaatcatctcgtggtgttagcatgattttagcatgcgatgtggggttaaaacgcattggaatcgctgcgcttttaaacggcgttatcttgcctttggaagcgattttacgccacaacaggaatcaagcctctagggatttgagcgatttattgagaaaaaaagacattcaagtgctggtggtgggcaaacccaacgaaagctatgcagatacccacgcccgcattgagcattttatcaagcttgtagattttaagggcgaaatcgtttttatcaatgaagataattctagcgtagaagcttatgaaaatttagagcatttgggtaagaaaaataagcggatcgctaccaaagatggccggttagactctttgagcgcttgtaggattttagagcgctattgccagcaggttttaaaaaagggc

SEQ ID NO: 3887 - DNA (genomic), 327 bp, Helicobacter pylori; double-stranded, circular
  misc_feature (B) LOCATION 1...327
  hypothetical: NO
  anti-sense: NO
cccatgaaaattatgcatcaagtcaaggattttttagatttttgcaaacaaacgatccacaaaaattctaatgaagcgtttcaaaaaaccaaacgagcgctttttaaagaaaaatctcaaaaaatcagggagcaagcggttaaaatcgtagaaaaacgcttgataaaagagaacatgcaactgagcgattttaatgaagaagaattaaaaatcatgtttgaagccgaagaaaaaaggttgttagagcaaatccacgctaaagaattgaaagaaaaacaagaaaaaaccaccaagcattttaaagaagtttgggaaaagggcgaccaa

SEQ ID NO: 3888 - DNA (genomic), 339 bp, Helicobacter pylori; double-stranded, circular
  misc_feature (B) LOCATION 1...339
  hypothetical: NO
  anti-sense: NO
atgaaaattatgcatcaagtcaaggattttttagatttttgcaaacaaacgatccacaaaaattctaatgaagcgtttcaaaaaaccaaacgagcgctttttaaagaaaaatctcaaaaaatcagggagcaagcggttaaaatcgtagaaaaacgcttgataaaagagaacatgcaactgagcgattttaatgaagaagaattaaaaatcatgtttgaagccgaagaaaaaaggttgttagagcaaatccacgctaaagaattgaaagaaaaacaagaaaaaaccaccaagcattttaaagaagtttgggaaaagggcgacaatgaacaagaaaaatag

SEQ ID NO: 3889 - DNA (genomic), 789 bp, Helicobacter pylori; double-stranded, circular
  misc_feature (B) LOCATION 1...789
  hypothetical: NO
  anti-sense: NO
atggcaaaccaaacccctaaagagctttttgatttgggcgtaaagagtaacaaagcgaaagatttcattcaagctaaaaaatattttgaaaaagcttgtaatttaaactatggtggggggtgtggtgctttaggggatctatatgatgatggaaaaggcgtagaaaaaaacttaataaaggccgctcaaccttacactaaagcgtgtgagttaaaagaaggtctggggtgtgagagattatggtcattatattattatggtcgaggcgtagaaaaaaacttaataaaagccgctcaatacgcctctaaagcatgcgatttgaataatggtgtagggtgtaagaatttaggttttctatatgaatatggggaaggagtagaaaaagacttaataaaagccgctcaatacgcctctaaagcatgcgatttgaataatggtagtgggtgtgatgttttaggttttctatatggaagtgggaagggggtggaaaaaaacttaacaaaagccgcttatttttactctaaagcgtgtgatttgaatgagggtttggggtgttttaatttagggggtctatataatggtcaaggcgtagaaaaagacttaacaaaagtcgcttatctttattctaaagcatgcgagttaaaagagagttttgggtgtggtgctttagcggtgctttatattaatggtcaaggcgtagaaaaagacttaacaaaagccgatcaatatatctctaaagcctgcaaattaggagatcaagaggcatgcgaggcgctcaaagaaaaataa

SEQ ID NO: 3890 - DNA (genomic), 843 bp, Helicobacter pylori; double-stranded, circular
  misc_feature (B) LOCATION 1...843
  hypothetical: NO
  anti-sense: NO
gaaatttcaaaaaagcgatttttagggttttatgcttgggtttattggggggggttaatggcaaaccaaacccctaaagagctttttgatttgggcgtaaagagtaacaaagcgaaagatttcattcaagctaaaaaatattttgaaaaagcttgtaatttaaactatggtggggggtgtggtgctttaggggatctatatgatgatggaaaaggcgtagaaaaaaacttaataaaggccgctcaaccttacactaaagcgtgtgagttaaaagaaggtctggggtgtgagagattatggtcattatattattatggtcgaggcgtagaaaaaaacttaataaaagccgctcaatacgcctctaaagcatgcgatttgaataatggtgtagggtgtaagaatttaggttttctatatgaatatggggaaggagtagaaaaagacttaataaaagccgctcaatacgcctctaaagcatgcgatttgaataatggtagtgggtgtgatgttttaggttttctatatggaagtgggaagggggtggaaaaaaacttaacaaaagccgcttatttttactctaaagcgtgtgatttgaatgagggtttggggtgttttaatttagggggtctatataatggtcaaggcgtagaaaaagacttaacaaaagtcgcttatctttattctaaagcatgcgagttaaaagagagttttgggtgtggtgctttagcggtgctttatattaatggtcaaggcgtagaaaaagacttaacaaaagccgatcaatatatctctaaagcctgcaaattaggagatcaagaggcatgcgaggcgctcaaagaaaaa

SEQ ID NO: 3891 - DNA (genomic), 543 bp, Helicobacter pylori; double-stranded, circular
  misc_feature (B) LOCATION 1...543
  hypothetical: NO
  anti-sense: NO
ttgaaaaaaaattattcttataaaaatatccaagcgattgattttacccagttaaacgatgaagaaaagttgttggttttagagtttcgtaaccacccaaacactgccttatggatgtatagcgctaatatttctttaaaaacgcatttgcaattcatagaagatctcaaaaattcgcctagccaccgctattttttgtttaaagaagagagcgtttatttaggggttggttctatcactaaaatcaatttttttcataagcatgggtatttggggatttataaaaacccttttttgaaaaataaggggggaactattttaaaagctttagaacgcatcgcttttgaagagttccaattaaattctttgcacttagaagtgatggaaaacaatttcaaagcgatcgctttttatgaaaaaaaccattatgagttagaagggcgtttgaaaggctttatttctaaagataaggagtttatagatgttcttttatattacaaggataagaaaggatataacgatcaatctcctctaaaactttag

SEQ ID NO: 3892 - DNA (genomic), 573 bp, Helicobacter pylori; double-stranded, circular
  misc_feature (B) LOCATION 1...573
  hypothetical: NO
  anti-sense: NO
gctagagggcgcattgagggagtttttagaaatttgaaaaaaaattattcttataaaaatatccaagcgattgattttacccagttaaacgatgaagaaaagttgttggttttagagtttcgtaaccacccaaacactgccttatggatgtatagcgctaatatttctttaaaaacgcatttgcaattcatagaagatctcaaaaattcgcctagccaccgctattttttgtttaaagaagagagcgtttatttaggggttggttctatcactaaaatcaatttttttcataagcatgggtatttggggatttataaaaacccttttttgaaaaataaggggggaactattttaaaagctttagaacgcatcgcttttgaagagttccaattaaattctttgcacttagaagtgatggaaaacaatttcaaagcgatcgctttttatgaaaaaaaccattatgagttagaagggcgtttgaaaggctttatttctaaagataaggagtttatagatgttcttttatattacaaggataagaaaggatataacgatcaatctcctctaaaactt

SEQ ID NO: 3893 - DNA (genomic), 234 bp, Helicobacter pylori; double-stranded, circular
  misc_feature (B) LOCATION 1...234
  hypothetical: NO
  anti-sense: NO
atgagtttgtttgatttttttaaaaacaaagggagcgcggccaccgcaaccgatagattaaaattgattctagccaaagagcgcaccttaaatttaccctacatggaagagatgcgtaaagaaatcattgccgttattcaaaaatacactaaatcttcagacatccatttcaaaacccttgatggcaaccagagcgtggaaacgattgaagtagagatcatactgcctaaatag

SEQ ID NO: 3894 - DNA (genomic), 252 bp, Helicobacter pylori; double-stranded, circular
  misc_feature (B) LOCATION 1...252
  hypothetical: NO
  anti-sense: NO
cgcgttaaaagggatattttcatgagtttgtttgatttttttaaaaacaaagggagcgcggccaccgcaaccgatagattaaaattgattctagccaaagagcgcaccttaaatttaccctacatggaagagatgcgtaaagaaatcattgccgttattcaaaaatacactaaatcttcagacatccatttcaaaacccttgatggcaaccagagcgtggaaacgattgaagtagagatcatactgcctaaa

SEQ ID NO: 3895 - DNA (genomic), 501 bp, Helicobacter pylori; double-stranded, circular
  misc_feature (B) LOCATION 1...501
  hypothetical: NO
  anti-sense: NO
ttatcgagccgttttgaagaattttttaaactcatcaccccgggcgtgttttttgaagaattgggcattaattatatagggcatattaacgtgcatgatttgggcacgattattgagaccttgaaattagccaaagagcttaaagaaccggtgataatccatgcgcaaaccttaaaaggcaaaggctataaaatcgctgaagggcgctatgaaaaatggcatggggtggggctttttgatttggataccggcttgtctaaaaaatccaaaagcgcgactttatcgcccactgaagcgtattctaacacccttttagaattagccaaaaaagatgaaaaaatcgtaggcgtaaccgctgcgatgcctagcggcacagggttagacaaactcattgacgcttaccctttgcgcttttttgatgtcgctatcgccgaacaacacgctttaattctagcagcggtatggctaaagaggggtttaaacattttgcggcatctctgg

SEQ ID NO: 3896 - DNA (genomic), 645 bp, Helicobacter pylori; double-stranded, circular
  misc_feature (B) LOCATION 1...645
  hypothetical: NO
  anti-sense: NO
ggtgtgattttgcaaaataaaacttttgatttaaaccctaatgatattgcaggcttggagttggtgtgtcaaacgctacggaatcgtattttagaagtggtgagcgctaatggggggcatttaagctcttctttaggggctgtggagctgattgtgggcatgcatgccctgtttgattgccagaaaaaccctttcatttttgacacttcgcaccaagcttacgcccacaagctcttaaccgggcgctttgaaagctttagtactttgaggcagtttcaaggtttgagcggctttactaaacccagcgagagcgcatacgattatttcatcgccgggcatagctccacttctgtatccataggcgtgggggtggctaaagcctttcgtttgaaacaaacgctaggcatgcctatcgctttattaggcgatgggagtattagtgcagggattttttatgaagccttaaacgaactgggcgataggaaataccccatgatcatgattttgaacgataatgaaatgagtatcagcacgcctattggagccttgtctaaagcccttagccagctgatgaaaggcccgttttatcagtctttccgctctaaagttaaaaagatcttaagcaccttacctgaaatcgtgaat

SEQ ID NO: 3897 - DNA (genomic), 1629 bp, Helicobacter pylori; double-stranded, circular
  misc_feature (B) LOCATION 1...1629
  hypothetical: NO
  anti-sense: NO
ttgcaaaataaaacttttgatttaaaccctaatgatattgcaggcttggagttggtgtgtcaaacgctacggaatcgtattttagaagtggtgagcgctaatggggggcatttaagctcttctttaggggctgtggagctgattgtgggcatgcatgccctgtttgattgccagaaaaaccctttcatttttgacacttcgcaccaagcttacgcccacaagctcttaaccgggcgctttgaaagctttagtactttgaggcagtttcaaggtttgagcggctttactaaacccagcgagagcgcatacgattatttcatcgccgggcatagctccacttctgtatccataggcgtgggggtggctaaagcctttcgtttgaaacaaacgctaggcatgcctatcgctttattaggcgatgggagtattagtgcagggattttttatgaagccttaaacgaactgggcgataggaaataccccatgatcatgattttgaacgataatgaaatgagtatcagcacgcctattggagccttgtctaaagcccttagccagctgatgaaaggcccgttttatcagtctttccgctctaaagttaaaaagatcttaagcaccttacctgaaagcgtgaattacttagcgagccgttttgaagaatcttttaaactcatcaccccgggcgtgttttttgaagaattgggcattaattatatagggcctattaacgggcatgatttgggcacgattattgagaccttgaaattagccaaagagcttaaagaaccggtgctaatccatgcgcaaaccttaaaaggcaaaggctataaaatcgctgaagggcgctatgaaaaatggcatggggtggggccttttgatttggataccggcttgtctaaaaaatccaaaagcgcgactttatcgcccactgaagcgtattctaacacccttttagaattagccaaaaaagatgaaaaaatcgtaggcgtaaccgctgcgatgcctagcggcacagggttagacaaactcattgacgcttaccctttgcgcttttttgatgtcgctatcgccgaacaacacgctttaacttctagcagcgctatggctaaagaggggtttaaaccttttgtgagcatttattctacttttttgcagagggcttatgattccattgtgcatgacgcttgcatttctagcttaccgattaaattagctattgacagggccgggattgtgggcgaagatggtgagacgcaccaagggcttttagatgtgtcgtatttgcgctctatccctaacatggtcatttttgccccacgagacaatgagactttaaaaaacgccgtgtattttgctaatgaacacgattcaagcccttgcgcgttccgctaccctagggggtcgtttgcgttaaaagagggggtttttgagcctagcggttttgttttggggcgaagcgaattgttgaaaaaagagggcgaaattttgctcataggctatggtaatggcgtggggcgggcgcatttggtccaactggctttaaaagaaaaaaacatagagtgcgcgcttttggatttgagattccttaaacctttagatcacaatttaagcgcgatttatttgcccctt

SEQ ID NO: 3898 - DNA (genomic), 285 bp, Helicobacter pylori; double-stranded, circular
  misc_feature (B) LOCATION 1...285
  hypothetical: NO
  anti-sense: NO
ggtaacccccccgaccgactgaaaccatctcgctgttttggatatggcgagatgattgctctacaacatatgcttaagatcttgtgcttgcctttaattgggatcattcctgaagatcaccatattatttcagcgaccaataagggcgagccggtgattcgcacggactgcgagagcgcgaaggcttaccaacgcatcaccagacggattttaggcgaagaagtggaatatgtggaacttaaggctaaaagaggcttttttagcgcgttaaaagggatattttca

SEQ ID NO: 3899 - DNA (genomic), 282 bp, Helicobacter pylori; double-stranded, circular
  misc_feature (B) LOCATION 1...282
  hypothetical: NO
  anti-sense: NO
aacccccccgaccgactgaaaccatctcgctgttttggatatggcgagatgattgctctacaacatatgcttaagatcttgtgcttgcctttaattgggatcattcctgaagatcaccatattatttcagcgaccaataagggcgagccggtgattcgcacggactgcgagagcgcgaaggcttaccaacgcatcaccagacggattttaggcgaagaagtggaatatgtggaacttaaggctaaaagaggcttttttagcgcgttaaaagggatattttca

SEQ ID NO: 3900 - DNA (genomic), 807 bp, Helicobacter pylori; double-stranded, circular
  misc_feature (B) LOCATION 1...807
  hypothetical: NO
  anti-sense: NO
atggcaatagtagttactatcacttcaggcaaggggggcgtgggcaaaagcaccaccacggctaatttagcgattggcttggctgagagcggtaaaaaagtcgtagcggttgattttgacataggccttaggaacttggacatgattttaggcttagaaaatcgcattgtttatgatgtggtggatgtgatggaaaaaaattgcaacctttcacaggctttgatcacggataaaaagactaaaaacctttcttttttagcggcctcacaaagtaaggataaaaatattttagataaggaaaaagtagcgattttaatcaacgctttaagggcggattttgactatattttgattgactcaccggctgggattgaaagcggttttgagcatgcgattttgcatgcggacatggcgttagtggtggtaacgccggaagtgagttccttaagggatagcgacagagtgattggcattattgacgcgaagtctaatcgggccaaaagtggcgaagaagtgcataagcatttgataatcaatcgcttaaaacctgagttagtggcaaatggcgagatgatttccatagaagaagtgcttaagatcttgtgcttgcctttaattgggatcattcctgaagatcaccatattatttcagcgaccaataagggcgagccggtgattcgcacggactgcgagagcgcgaaggcttaccaacgcatcaccagacggattttaggcgaagaagtggaatatgtggaatttaaggctaaaagaggcttttttagcgcgttaaaagggatattttcatga

SEQ ID NO: 3901 - DNA (genomic), 243 bp, Helicobacter pylori; double-stranded, circular
  misc_feature (B) LOCATION 1...243
  hypothetical: NO
  anti-sense: NO
ccccactcaccggggcgcacgcaccagatccgcttgcatttaagcagcgtggatcacaggatcgtgggcgaggggctttatggggtggcagatgaaaacgccagagaataccttcaattgaagcgtgaaaataacgccccaaccctcatgctccatgccgctagtttagaatttgaatttaaaggggcgcattataaaatcgcttcccccatgcccgaacgcttcatgccttttttaaaagat

SEQ ID NO: 3902 - DNA (genomic), 741 bp, Helicobacter pylori; double-stranded, circular
  misc_feature (B) LOCATION 1...741
  hypothetical: NO
  anti-sense: NO
aagtttgttgtagtgccttttgttgaagaagaatttgaaattttaaaacccaccaaagccttgtttttggtgcgcgatgttttaaaatgctctctaaaagaagcccaacggcaccttgacaaacaacgcttaaaacaaaaccaacaaaccgtgcgtaaatctcaaatcattcaaggggtcgttcgcttgatttatttcaagcctaatgaaaagcaagaaaagctcgtttttgaggctaaggattttggcgtatttgacaaacccgctcaaatttatacccaccctaaaggctatttttaccatgaaagcttattggattgtatccaatctcattttggcaaaaacgcccacccagcccacagactggactatgaaacgagcgggttggttttagcgggtaaaaccttacagagcactaaggacttaaaagcgctgttcatgcaaaaaaaagtgaaaaaaacttatttagcgctagcgactgggttggtggataaaagtatcatcataaataagcccattctaacgccacaaaacattcaaaaagatttgcgcattcgatctcaaatttctcctttaggcaagccttcaattacccttgttgagcctttaagctataatccttttttggatataagcttgcttaaaataaccccactcaccggggcgcacgcaccagatccgcttgcatttaagcagcgtggatcacaggatcgtgggcgaggggctttatggggtggcaga

SEQ ID NO: 3903 - DNA (genomic), 882 bp, Helicobacter pylori; double-stranded, circular
  misc_feature (B) LOCATION 1...882
  hypothetical: NO
  anti-sense: NO
gtgccttttgttgaagaagaatttgaaattttaaaacccaccaaagccttgtttttggtgcgcgatgttttaaaatgctctctaaaagaagcccaacggcaccttgacaaacaacgcttaaaacaaaaccaacaaaccgtgcgtaaatctcaaatcattcaaggggtcgttcgcttgatttatttcaagcctaatgaaaagcaagaaaagctcgtttttgaggctaaggattttggcgtatttgacaaacccgctcaaatttatacccaccctaaaggctatttttaccatgaaagcttattggattgtatccaatctcattttggcaaaaacgcccacccagcccacagactggactatgaaacgagcgggttggttttagcgggtaaaaccttacagagcactaaggacttaaaagcgcttttcatgcaaaaaaaagtgaaaaaaacttatttagcgctagcgcatgggttggtggataaaagtatcatcataaataagcccattctaacgccacaaaacattcaaaaagatttgcgcattcgatctcaaatttctcctttaggcaagccttcaattacccttgttgagcctttaagctataatccttttttggatataagcttgcttaaaataaccccactcaccgggcgcacgcaccagatccgcttgcatttaagcagcgtggatcacaggatcgtgggcgaggggctttatggggtggcagatgaaaacgccagagaataccttcaattgaagcgtgaaaataacgccccaaccctcatgctccatgccgctagtttagaatttgaatttaaaggggcgcattataaaatcgcttcccccatgcccgaacgcttcatgccttttttaaaagattga

SEQ ID NO: 3904 - DNA (genomic), 204 bp, Helicobacter pylori; double-stranded, circular
  misc_feature (B) LOCATION 1...204
  hypothetical: NO
  anti-sense: NO
ggcccatcaaatccggtaaagccactttctgccctcaaactagcgaagggctctaaaaaccctgtgtatatcaattgcaatgacatgcgtttgaaccaaaacattctaagctcatggcttttaaaatggcatttggaaaagaaaatggatttactcattttagatcgtattgagcgcttggatttcagcctgcctaaggctccc

SEQ ID NO: 3905 - DNA (genomic), 285 bp, Helicobacter pylori; double-stranded, circular
  misc_feature (B) LOCATION 1...285
  hypothetical: NO
  anti-sense: NO
cccctaattttgaaaaccataaaaccaaattgtattctgtgcgattttgccctgccttatagcctgacccctagcccttcgcttttgaatgtttttgaaaacatggtttttttagagctttacaagcaattcccaaattatgagctttacgcccatgataacgggatttttatcttgcgaaatcctaccagtaagctcgccctcatcgcccacgctttccccacgccccattttttagaaaaacagcttttatgggtggttcccccactggggttttttataaaa

SEQ ID NO: 3906 - DNA (genomic), 414 bp, Helicobacter pylori; double-stranded, circular
  misc_feature (B) LOCATION 1...414
  hypothetical: NO
  anti-sense: NO
cagcgcccaattttagcttatggctatgcgttagggttgaattttaaagaatatattagctttttcaaacccaacacccctaaaaacaccctgtttaaccgctttttaagagacggcaacgctttagactcgctttttacagaaaacgagcaagaaaaaatcctaaaaaaacaagaaaatatccaactagcctttcaagcttacgcccccttaatggctaaaatctgctcgtatcaatctaagtttgtgagcgctttttatctttatacgcaactcaaaaaagagcttaaaacctctaaagacaccctctataaattgttacacgcgctagaaaaacagcgcatcatttttttagcccctaattttgaaaaccataaaaccaaattgtattctgtgcgattttgccctgcctta

SEQ ID NO: 3907 - DNA (genomic), 1086 bp, Helicobacter pylori; double-stranded, circular
  misc_feature (B) LOCATION 1...1086
  hypothetical: NO
  anti-sense: NO
atgcccctttcttgcttgcacccttttgggccttttgaaacccctaaagagccggctttaaacaacccgcttttaaaggcgcattcaagcgataaaatctgtcttttagggccgatgaaatccggtaaaaccactttcgccctcaaactagcgaagggctttaaaaaccctgtgtatatcaattgcaatgacatgcgtttgaaccaaaacattctaagctcatggcttttaaaatggcatttggaaaagaaaatggatttactcattttagatcgtattgagcgcttggatttcagcctgcctaagctccctaaaatcgttcttatccctaattatttaagccatataacagcgcccaattttagcttatgctatgcgttagggttgaattttaaagaatatattagctttttcaaacccaacacccctaaaaacaccctgtttaaccgctttttaagagacggcaacgctttagactcgctttttacagaaaacgagcaagaaaaaatcctaaaaaaacaagaaaatatccaactagcctttcaagcttacgcccccttaatggctaaaatctgctcgtatcaatctaagtttgtgagcgctttttatctttatacgcaactcaaaaaagagcttaaaacctctaaagacaccctctataaattgttacacgcgctagaaaaacagcgcatcatttttttagcccctaattttgaaaaccataaaaccaaattgtatctgtgcgattttgccctgccttatagcctgacccctagcccttcgcttttgaatgtttttgaaaacatggtttttttagagctttacaagcaattcccaaattatgagctttacgcccatgataacgggatttttatcttgcgaaatcctaccagtaagctcgccctcatcgcccacgctttccccacgccccattttttagaaaaacagcttttatggtgccacaaacatgggtttttaaaaattgcagtcgtttctatcaacgcccctatttcagccaataatcccccctacaaacaccttaatttcattgatttttctttggatattcaatctattttggtataa

SEQ ID NO: 3908 - DNA (genomic), 300 bp, Helicobacter pylori; double-stranded, circular
  misc_feature (B) LOCATION 1...300
  hypothetical: NO
  anti-sense: NO
atgctcgcatggatgtcttgctcgttaaaaaaagtcgcgctaggccgtaagtctttcatggcgtttttaaggttgatgttagattcttctaacgccacgacatgcgcgtttttagacgccacgacaaaaatttcaatttctttaggtaatttctctaaaaaccgcaaggctaggggtatcccgctcgccccgctgatgcctaaaactaatttcatgaatatcctttataagatttgcgctttagagctgctcaacactttcgcttttaagattttattgctttctaaattcttcgcttga

SEQ ID NO: 3909 - DNA (genomic), 309 bp, Helicobacter pylori; double-stranded, circular
  misc_feature (B) LOCATION 1...309
  hypothetical: NO
  anti-sense: NO
ctccctgaggcgatgctcgcatggatgtcttgctcgttaaaaaaagtcgcgctaggccgtaagtctttcatggcgtttttaaggttgatgttagattcttctaacgccacgacatgcgcgtttttagacgccacgacaaaaacttcaatttctttaggtaatttctctaaaaaccgcaaggctaggggtatcccgctcgccccactgatgcctaaaactaatttcatgaatatcctttataagatttgcgctttagagctgctcaacactttcgcttttaagattttattgctttctaaattcttcgct

SEQ ID NO: 3910 - DNA (genomic), 612 bp, Helicobacter pylori; double-stranded, circular
  misc_feature (B) LOCATION 1...612
  hypothetical: NO
  anti-sense: NO
atgcaaaagtttgattatgaatttaaaaagcgagcgttgattaaagagggatttttagcgttcaagcaagcccattacgctgaagcgttgcgccttttttctgaagttttgtttttggataaagacaaccaaaaagccaaagtgggggcgttattaagcgacatcgctaaagatttccctaaagaagcccatagcttttatgaattgtatcaaagcctgatcgctatgcaaaaacgaagtttaaaaaaccaggctgaagagcagatcaccgctttgatcgcttcttttgatgagggattgaaccaaatggctgaaaagattgatgcgcaaatttctcaaaaaggcgaggaattgaatggcattttgtatgcggatttcaaacgcttgagtctggagcgcggctttaaggaagcgtttggggatttgatgttcagctctagggtgatttttgacaataaagaggatttttatgaatttttgaaagaattgaaccattatggctattacgaattagcggtaaattacattgaaaacatgcatgaagattcttttatttacgatgaatttttgcgttctcttttagaagacgctctcaaatccaataaggcttaa

SEQ ID NO: 3911 - DNA (genomic), 615 bp, Helicobacter pylori; double-stranded, circular
  misc_feature (B) LOCATION 1...615
  hypothetical: NO
  anti-sense: NO
ttaggcatgcaaaagtttgattatgaatttaaaaagcgagcgttgattaaagagggatttttagcgttcaagcaagcccattacgctgaagcgttgcgccttttttctgaagttttgtttttggataaagacaaccaaaaagccaaagtgggggcgttattaagcgacatcgctaaagatttccctaaagaagcccatagcttttatgaattgtatcaaagcctgatcgctatgcaaaaacgaagtttaaaaaaccaggctgaagagcagatcaccgctttgatcgcttcttttgatgagggattgaaccaaatggctgaaaagattgatgcgcaaatttctcaaaaaggcgaggaattgaatggcattttgtatgcggatttcaaacgcttgagtctggagcgcggctttaaggaagcgtttggggatttgatgttcagctctagggtgatttttgacaataaagaggatttttatgaatttttgaaagaattgaaccattatggctattacgaattagcggtaaattacattgaaaacatgcatgaagattcttttatttacgatgaatttttgcgttctcttttagaagacgctctcaaatccaataaggct

SEQ ID NO: 3912 - DNA (genomic), 357 bp, Helicobacter pylori; double-stranded, circular
  misc_feature (B) LOCATION 1...357
  hypothetical: NO
  anti-sense: NO
gtgaaaattctgcaagaacaaggcttgaatacccccctttatggcatcgccattgacgacaaaatcaaatccttttactcgcattccgccgcgcttttaaaaggcttttgtcaagggaatttaaaagccacttacgggcgtttaagggctaataatgctgtttcgtatgccgggaaaagcttagaatttcgcgccaataacccacggaatttcactttcaggggcgatgaaagtttagattatttcttgctagatgatattatcaccaccggcaccaccctaaaagaagccctaaaataccttaaaaccctaaacatcaaagcgcactttgcgatcgcgctttgcagcgcggatgaa

SEQ ID NO: 3913 - DNA (genomic), 576 bp, Helicobacter pylori; double-stranded, circular
  misc_feature (B) LOCATION 1...576
  hypothetical: NO
  anti-sense: NO
atgcgttgtttaacctgtttgaagctttcctttaagcccctttgcccaaattgcctgaacgatttgcccttaagcttaaagttaagggttttagagggcgtgagcgtgtatagtttttacgcttatagcgaaatagaagagcttattaaaagcaaatacgcgctgattggctctcgcattttacccttgctttctcaaaaagccggcgcggaatttgtgaaaatcctgcaagaacaaggcttgaatacccccctttatggcatcgccattgacgataaaatcaaatccttttactcgcattccgccgcgcttttaaaaggcttttgtcaagggaatttaaaagccacttacgggcgtttaagggctaataatgctgtttcgtatgccgggaaaagcttagaatttcgcgccaataacccacggaatttcactttcaggggcgatgaaagtttagattatttcttgctagatgatattatcaccaccggcaccaccctaaaagaagccctaaaataccttaaaaccctaaacatcaaagcgcactttgcgatcgcgctttgcagcgcggatgaatga

SEQ ID NO: 3914 - DNA (genomic), 741 bp, Helicobacter pylori; double-stranded, circular
  misc_feature (B) LOCATION 1...741
  hypothetical: NO
  anti-sense: NO
atgaaaaaagaaaatcgcctcaagcaagaaaaaatcatcaacatgtttgatgatatagccagctcttacgatcaagccaaccgcttgatgagttttggcttagacgttaaatggcgccaaagggcttgcgagcatgcgtttttgtttttggaaaacaagaaagcgttaaggcttgtggatgtggcatgcggaacaggggatatgcttgtggcttggcaaaaaagcgctctcaattgcggtatagagtttaaggagtgtttggggattgacccctctaataacatgcttgaattagccattaaaaaatgtgaagagcttgaaaacaaagcttctttcatccaagctcaagccaaagatttaaaaggcgttgaaaataacagcgtggatattctctccattgcgtatggcttgcgtaatatcgtggaaagacaagaagctttaaaggagttttttagggtgttaaaaaccaggggcgttttagtgattttagaatttttaaaaaaagacaaccccacatggctggataaaatctcagggttttacacgaataaggttttgcctttggtgggaggggctatcagtaagaattatggtgcttattcttatttaccgcagtccattgaggggtttttgagtttggagggtttgaagaatgaattaaaaaacgcagggtttgagattttaaggactgaagattctatcgctcaaatttcaacgaccatgcttgttaaaaaaagctaa

SEQ ID NO: 3915 - DNA (genomic), 270 bp, Helicobacter pylori; double-stranded, circular
  misc_feature (B) LOCATION 1...270
  hypothetical: NO
  anti-sense: NO
atgatagaatttagcgatgaagatttacaaaaaccggtgcgtattgtaatagaaaagatccgcccttacttgctcaaagatggcggtaatattgaagtgctaggggtgaaaagcatgaaaatttatgtggctttagagggagcgtgtaagacttgctctagcagtaaaatcactttaaaaaatgtcattgaaaggcagcttaaaatggacattcaccccaatttagaagtggtgtgtttagaaaacgctaaggagtttgataagctttaa

SEQ ID NO: 3916 - DNA (genomic), 297 bp, Helicobacter pylori; double-stranded, circular
  misc_feature (B) LOCATION 1...297
  hypothetical: NO
  anti-sense: NO
agtaaaattttaaaaataaggtttttaaaaatgatagaatttagcgatgaagatttacaaaaaccggtgcgtattgtaatagaaaagatccgcccttacttgctcaaagatggcggtaatattgaagtgctaggggtgaaaagcatgaaaatttatgtggctttagagggagcgtgtaagacttgctctagcagtaaaatcactttaaaaaatgtcattgaaaggcagcttaaaatggacattcaccccaatttagaagtggtgtgtttagaaaacgctaaggagtttgataagctt

SEQ ID NO: 3917 - DNA (genomic), 261 bp, Helicobacter pylori; double-stranded, circular
  misc_feature (B) LOCATION 1...261
  hypothetical: NO
  anti-sense: NO
atgcaagatgaattatttgaaaccgaaaaagcccctcaaaaaaacgctaaaaacgctaaaaacgcccctaaaaaaagctttgaagagcatgttcattccctagagcgagtcatagatcgcttgaatgatcccaatttatccttaaaagacgggatggatttgtataaaacggccatgcaagaattatttttggctcaaaagcttttagaaaacgcttattcagagtatgaaaaactccaaacgccaaacaaaaaggcttaa

SEQ ID NO: 3918 - DNA (genomic), 267 bp, Helicobacter pylori; double-stranded, circular
  misc_feature (B) LOCATION 1...267
  hypothetical: NO
  anti-sense: NO
aggaatgttatgcaagatgaattatttgaaaccgaaaaagcccctcaaaaaaacgctaaaaacgctaaaaacgcccctaaaaaaagctttgaagagcatgttcattccctagagcgagtcatagatcgcttgaatgatcccaatttatccttaaaagacgggatggatttgtataaaacggccatgcaagaattatttttggctcaaaagcttttagaaaacgcttattcagagtatgaaaaactccaaacgccaaacaaaaaggct

SEQ ID NO: 3919 - DNA (genomic), 780 bp, Helicobacter pylori; double-stranded, circular
  misc_feature (B) LOCATION 1...780
  hypothetical: NO
  anti-sense: NO
atgcattctgaagaagagttaaaaatcattgtgggcgagagtttgagagagggcattattgattcggtggagggggaaatcattaaaaacgcagtggatttttctgacacgagcgctaaagaaatcatgaccccacgaaaagacatggtgtgtttggacgaagaaaacagctatgaagaaaatatagacattgttttaaaaagccacttcacgcgctacccttattgtaaaggctctaaagacaacattatcggcatggtgcatattagggacttgctctctcgctctattttcacccccaaaatgcatgatttcaagcagatcgttaggaaaatgatcatcgtccctgagagcgcttctatttctcaaatccttattaaaatgaaaaaagaacaaatccataccgctttggtgattgatgaatacggcggcacggccgggttgctcactatggaagatattattgaagaaatcatgggagagattagcgatgaatacgacttgaaacaagagggcgtgaacaaacttgaagaaggcgtgtttgaattagagggcatgctggatttagaaagcgtagaagaagtgcttcatatccaatttgacaaagaatgcgagcaggtaacgcttggggggtatgttttcagcttgttagagcgcatgcctatagagggggatacaatcgtttcgcatgggtatgcttttgaagtcttaagcgtggatggggccaggataaaacgcttgaaagcggttaaacaagatcagggagaaaatgaagcatga

SEQ ID NO: 3920 - DNA (genomic), 567 bp, Helicobacter pylori; double-stranded, circular
  misc_feature (B) LOCATION 1...567
  hypothetical: NO
  anti-sense: NO
aaacgcttaaacacttcatcacctccaagcaccagattaaagcgtctccgttttttagggtatcttatgccttttgataattttgaaaaaacccttttgcaattgaaaaaagaacattttaaagccgcgcattttgtaacggcgttccgctattctttagagggcaaaatcacggagggttttagcgacgatggcgagcctaaagcgagttcagggatgcctgtgcttagcgttttaaggcgagaggatttaatcaatataggattagtgagcgtgcgttattttggaggcacgcttttaggggtggggggcttgatgaaagcttatgctaagagcgcgttattgtgtgtagaaaacgctcaaagagaaaacgcttttaaggattttgtggagttggaaactttaagcgcttattattcttacaaagaattagacgctcttcagcgtgaaattaagaaatttagcttacaattaagcaaaaagaatttttcaaaccaaagcgtggaagtggaaatcagcggcacaagagacgatttgcaagcgtttttgcaacaaaataagataaat

SEQ ID NO: 3921 - DNA (genomic), 573 bp, Helicobacter pylori; double-stranded, circular
  misc_feature (B) LOCATION 1...573
  hypothetical: NO
  anti-sense: NO
gtgaaaacgcttaaacacctcatcacctccaagcaccagattaaagcgtctcgttttttagggtatcttatgccttttgataattttgaaaaaacccttttgcaattgaaaaaagaacattttaaagccgcgcattttgtaacggcgttccgctattctttagagggcaaaatcacggagggttttagcgacgatggcgagcctaaagggagttcagggatgcctgtgcttagcgttttaaggcgagaggatttaatcaatataggattagtgagcgtgcgttattttggaggcacgcttttaggggtggggggcttgatgaaagcttatgctaagagcgcgttattgtgtgtagaaaacgctcaaagagaaaacgcttttaaggattttgtggagttggaaactttaagcgcttattattcttacaaagaattagacgctcttcagcgtgaaattaagaaatttagcttacaattaagcaaaaagaatttttcaaaccaaagcgtggaagtggaaatcagcggcacaagagacgatttgcaagcgtttttgcaacaaaataagataaattag

SEQ ID NO: 3922 - DNA (genomic), 195 bp, Helicobacter pylori; double-stranded, circular
  misc_feature (B) LOCATION 1...195
  hypothetical: NO
  anti-sense: NO
ccaaaaagggcaaaatgtgatctgtatctatgtggctattggccaaaaagaatccaccgttgcgcaagtggtccgcaaattagaagaatacggagcgatggaatacagcgtcgtgatcaatgcttcggcttcagactcagctgcgatgcaatatttagccccttatgcgggtgtggctatgggggaatattttag

SEQ ID NO: 3923 - DNA (genomic), 294 bp, Helicobacter pylori; double-stranded, circular
  misc_feature (B) LOCATION 1...294
  hypothetical: NO
  anti-sense: NO
atgatcgatcagttgcaaattgtcccaaaagcgcaagttttaaagaacaatacgatggaaagaagtcttgcattagcattacaaaaggtatctatccctagatctacatcggcgcatagaactttacttatcaatcattttttagaacaagttattttacaaaatataaaaacaattgcttttagaggtattatcaaactcactccacacaatgaaaatcccctattaaaaccctacagtgcatttattacgctcaattccattattcgggcatgcgcctattgccccctatga

SEQ ID NO: 3924 - DNA (genomic), 219 bp, Helicobacter pylori; double-stranded, circular
  misc_feature (B) LOCATION 1...219
  hypothetical: NO
  anti-sense: NO
tggcagtatcgcttatcaaaaattagctcaaagcattcttcaggggtagtgatggcaaaaaataaagtgttgggtaggggtttggcagacattttccctgaaattaatgaagtgtatgagcaagggctatatgaaagagcgaatcgggttgtggagcttggtattgatgaagtgatgcccaatccttaccagcccagaaaaatctttagcgagaaatct

SEQ ID NO: 3925 - DNA (genomic), 222 bp, Helicobacter pylori; double-stranded, circular
  misc_feature (B) LOCATION 1...222
  hypothetical: NO
  anti-sense: NO
tggcagtatcgcttatcaaaaattagctcaaagcattcttcaggggtagtgatggcaaaaaataaagtgttgggtaggggtttggcagacattttccctgaaattaatgaagtgtatgagcaagggctatatgaaagagcgaatcgggttgtggagcttggtattgatgaagtgatgcccaatccttaccagcccagaaaaatctttagcgagaaatcttta

SEQ ID NO: 3926 - DNA (genomic), 375 bp, Helicobacter pylori; double-stranded, circular
  misc_feature (B) LOCATION 1...375
  hypothetical: NO
  anti-sense: NO
atggcaaaaaataaagtgttgggtaggggtttggcagacattttccctgaaattaatgaagtgtatgagcaagggctatatgaaagagcgaatcgggttgtggagcttggtattgatgaggtgatgcccaatccttaccagcccagaaaaatctttagcgaagattctttagaagaattagcgcaatccattaaagaacatggtttgttgcagccggttttagtggtgagtgagaacgggcgttatcatttgatcgcaggcgaaaggcgcttaagagcaagcaaattggctaaaatgcccacgattaaagcgattgttgtggatattgagcaagaaaaaatgcgtgaagtggcgttgattgaaaatatccagtga

SEQ ID NO: 3927 - DNA (genomic), 483 bp, Helicobacter pylori; double-stranded, circular
  misc_feature (B) LOCATION 1...483
  hypothetical: NO
  anti-sense: NO
ttggaattagctagatcgtataaggaattgcttgaaagctatcaaatgacccaagaagagctgtctaaaatcgttaaaaaatctagagctcatgtggctaatatcatgcgtttattgacgctctcttctaaagttcaaaacgctcttttagaagaaaaaatcacctcagggcatgcgaaagtcttggtgggcttggaggaagaaaaacaagaattaatcttaaattccattatagggcagaaactcagcgtgcgccagacagaagatttagcgcgtgattttaaaataaacgcaaattttgacaataaaaaacatggtttcaagcaaacccaaacgctcatcgctgaagatgaattagagcgttttaatcaaagtttgtgggatcgttacaagcttaaagcggctttgaaagggaaaaaaatagttttacgatgttataaaaattctcttttagaggcttttatgaaaaaaatgatgtcttaa

SEQ ID NO: 3928 - DNA (genomic), 495 bp, Helicobacter pylori; double-stranded, circular
  misc_feature (B) LOCATION 1...495
  hypothetical: NO
  anti-sense: NO
gaagatttaaaccctttggaattagctagatcgtataaggaattgcttgaaagctatcaaatgacccaagaagagctgtctaaaatcgttaaaaaatctagagctcatgtggctaatatcatgcgtttattgacgctctcttctaaagttcaaaacgctcttttagaagaaaaaatcacctcagggcatgcgaaagtcttggtgggcttggaggaagaaaaacaagaattaatcttaaattccattatagggcagaaactcagcgtgcgccagacagaagatttagcgcgtgattttaaaataaacgcaaattttgacaataaaaaacatggtttcaagcaaacccaaacgctcatcgctgaagatgaattagagcgttttaatcaaagtttgtgggatcgttacaagcttaaagcggctttgaaagggaaaaaaatagttttacgatgttataaaaattctcttttagaggcttttatgaaaaaaatgatgtct

SEQ ID NO: 3929 - DNA (genomic), 873 bp, Helicobacter pylori; double-stranded, circular
  misc_feature (B) LOCATION 1...873
  hypothetical: NO
  anti-sense: NO
atggcaaaaaataaagtgttgggtaggggtttggcagacattttccctgaaattaatgaagtgtatgagcaagggctatatgaaagagcgaatcgggttgtggagcttggtattgatgaggtgatgcccaatccttaccagcccagaaaaatctttagcgaagattctttagaagaattagcgcaatccattaaagaacatggtttgttgcagccggttttagtggtgagtgagaacgggcgttatcatttgatcgcaggcgaaaggcgcttaagagcaagcaaattggctaaaatgcccacgattaaagcgattgttgtggatattgagcaagaaaaaatgcgtgaagtggcgttgattgaaaatatccagcgagaagatttaaaccctttggaattagctagatcgtataaggaattgcttgaaagctatcaaatgacccaagaagagctgtctaaaatcgttaaaaaatctagagctcatgtggctaatatcatgcgtttattgacgctctcttctaaagttcaaaacgctcttttagaagaaaaaatcacctcagggcatgcgaaagtcttggtgggcttggaggaagaaaaacaagaattaatcttaaattccattatagggcagaaactcagcgtgcgccagacagaagatttagcgcgtgattttaaaataaacgcaaattttgacaataaaaaacatggtttcaagcaaacccaaacgctcatcgctgaagatgaattagagcgttttaatcaaagtttgtgggatcgttacaagcttaaagcggctttgaaagggaaaaaaatagttttacgatgttataaaaattctcttttagaggcttttatgaaaaaaatgatgtcttaa

SEQ ID NO: 3930 - DNA (genomic), 249 bp, Helicobacter pylori; double-stranded, circular
  misc_feature (B) LOCATION 1...249
  hypothetical: NO
  anti-sense: NO
gctaaatatctgttggttaataaaactaaaaatggcatagatatttgcttgaatacggctgaaacaagagctaaaggacttgttatggtcgttttacattctcatttagaaaacgcgctaaaccaattgaaagaattgattgatttaaccgagcgcgatataagagacatcaagctcgctaaacacgccgaaatttttgaaagaaaccatcaaaaacagctagcgattcaagcttttgaacaagaaaaa

SEQ ID NO: 3931 - DNA (genomic), 435 bp, Helicobacter pylori; double-stranded, circular
  misc_feature (B) LOCATION 1...435
  hypothetical: NO
  anti-sense: NO
atggtcgttttacattctcatttagaaaacgcgctaaaccaattgaaagaattgattgatttaaccgagcgcgatataagagacatcaagctcgctaaacacgccgaaatttttgaaagaaaccatcaaaaacagctagcgattcaagcttttgaacaagaaaaaacgaatatagatgcgcaaatgttgtctttaaaaaatcaattccctaataaagaaatgagtgaattattagacgaaaaaacgagcgattttttaaaccaaatgcgagagttcttgcttgttttgaaagaaaaaaacttgatctattcgcgcatggcgtttgcggtttctgagttttattcttcgctcatccaacaaatcatcccccatgacacttgcgattataaaggttctaggcatgtggggagtcattttttaagagtgcaggcgtaa

SEQ ID NO: 3932 - DNA (genomic), 2280 bp, Helicobacter pylori; double-stranded, circular
  misc_feature (B) LOCATION 1...2280
  hypothetical: NO
  anti-sense: NO
atgttaggagaaaatatgggcaataaagacaaacaacagcagaatgtaagcagtgggatttctcaaatctcattaaaaaaggtggcaacttttgatgaaaatggggcgagttttgaaaatttaaagtctattaactttatttatggggctaatgggagcggtaagacaaccacttctagttttttaaaaaatctagctgaaaatgggattgaagacaagtttgctaatagcaaaatagcatggtataacaatgagagtttaaagattgaagtttataacaagcaatttaaagaagagcaattgagaaactctcaagttaaaggcatttttacgctcggtaaaaaaacaaacgagaatttagaaaaaattgagagcaagaaagaatcaataaacaaagagaatgaaaagaaaataaaaaatgaagcaagcttgcaagttttaacacaaaaaaaggaaaaggaagaaaaggattttactgatagttgttggaaaaacctttataagaaaaatgaagaggaatttaaagagatattagagggttttaagcgtaaagagaagtttaaaggaaaaatccttaaggaatttgaaaacgataaacacaatcaaagcgaaatagtagggttagaaaaattaaaggaaaaaattgagattgtttttagtaaaaaccaaacagaattggcgttattagaatgcgatttaacagattttgattctattgaaaaccattctatttgggaacaaaaaattgtagggagtggtgatgtagccattgcaaatttaataaaaacattaagcaatgaggattgggtagctcaaggtagagaatatgtaaaagataatagtatatgccctttctgtcaaaaagaaaccattactgaggaatttaaaaaacaactagaatcttattttgatacaagttatcaagaatccactgacacaatcaaaaaaatgaaagaagactacacaaacaaaactgatgaagcgttggagcgacttgatgaaattattaaaacagagcagaataattcacaaactaaactagatacagaaaatttgaaaagaattattgaaaccttgagaagtaaaatcaaggcgaatcagcaaaagatgattgataaaagtaaagaaatgagcagaaattttaagcttgatagcaataaaaacgagatagacgcaattaaagatttgattaaaaaggctaatgagcaaataaccaatcataacgagacgataaaggatattgaaaaacagaaaaagagttgtaaggaacaaacttggaaatttctaatcaatgaatttaaaagtgatatacaagaatataataaaaagtattgcggtttggagaaaggaataaacaatttagagaaagaaattagtgaaaatcaagaaaaggtaaagaaattagaaaatgaaattaaggaattagaaaaaaacatggtaagcataaagcccattgtcaatgaaatcaatacgcttttaaaagggtatggattcacgaattttagtttggcatgcactgaagatgaaaaattttatcgtattcaaagagaagatggtcaattagtgggagaaacactgagcgaaggtgaagttactttcatcactttcttatattattatcatttagcaaaaggctctttaaaagagaacgatatatcaaagaataaggttttagtgattgatgatcctatttcaagtttggatagcaatatattgtttatggtgagtgttttagttaaggatcttatgaaagaaaccatggaagaaaaaacaaatatcaagcaaattattatactaacccacaacacatatttttacaaggaaattacattagaatatgatttaaaacgctatcaagggaaatattctttttggataattaaaaaggataataatgtttcaaaaattaaaggctataaagaaaatcccattaaaaattcctatgaattgctatggcaagaagtaaaacaagcaaaagaaaataatgcttcttgggtgtctttacaaaatattatgcgaagaattattgagtattactttaggattttaggcggttttaaacataatgatagcttgagtgaatgttttgaaaatattgaagaagaacgagtgtgcaattctttcatttcatggcttaatgatggctctcatgggatttcagatgatttgtttgtgcaaagtcaagatacaagtattgagacatatttaaaagtttttgaaaaaacatttaaagaaaccggtcatgaagctcattataaaatgatgatgagaataaagtaa

SEQ ID NO: 3933 - DNA (genomic), 2286 bp, Helicobacter pylori; double-stranded, circular
  misc_feature (B) LOCATION 1...2286
  hypothetical: NO
  anti-sense: NO
ggtaatattatgttaggagaaaatatgggcaataaagacaaacaacagcagaatgtaagcagtgggatttctcaaatctcattaaaaaaggtggcaacttttgatgaaaatggggcgagttttgaaaatttaaagtctattaactttatttatggggctaatgggagcggtaagacaaccacttctagttttttaaaaaatctagctgaaaatgggattgaagacaagtttgctaatagcaaaatagcatggtataacaatgagagtttaaagattgaagtttataacaagcaatttaaagaagagcaattgagaaactctcaagttaaaggcatttttacgctcggtaaaaaaacaaacgagaatttagaaaaaattgagagcaagaaagaatcaataaacaaagagaatgaaaagaaaataaaaaatgaagcaagcttgcaagttttaacacaaaaaaaggaaaaggaagaaaaggattttactgatagttgttggaaaaacctttataagaaaaatgaagaggaatttaaagagatattagagggttttaagcgtaaagagaagtttaaaggaaaaatccttaaggaatttgaaaacgataaacacaatcaaagcgaaatagtagggttagaaaaattaaaggaaaaaattgagattgtttttagtaaaaaccaaacagaattggcgttattagaatgcgatttaacagattttgattctattgaaaaccattctatttgggaacaaaaaattgtagggagtggtgatgtagccattgcaaatttaataaaaacattaagcaatgaggattgggtagctcaaggtagagaatatgtaaaagataatagtatatgccctttctgtcaaaaagaaaccattactgaggaatttaaaaaacaactagaatcttattttgatacaagttatcaagaatccactgacacaatcaaaaaaatgaaagaagactacacaaacaaaactgatgaagcgttggagcgacttgatgaaattattaaaacagagcagaataattcacaaactaaactagatacagaaaatttgaaaagaattattgaaaccttgagaagtaaaatcaaggcgaatcagcaaaagatgattgataaaagtaaagaaatgagcagaaattttaagcttgatagcaataaaaacgagatagacgcaattaaagatttgattaaaaaggctaatgagcaaataaccaatcataacgagacgataaaggatattgaaaaacagaaaaagagttgtaaggaacaaacttggaaatttctaatcaatgaatttaaaagtgatatacaagaatataataaaaagtattgcggtttggagaaaggaataaacaatttagagaaagaaattagtgaaaatcaagaaaaggtaaagaaattagaaaatgaaattaaggaattagaaaaaaacatggtaagcataaagcccattgtcaatgaaatcaatacgcttttaaaagggtatggattcacgaattttagtttggcatgcactgaagatgaaaaattttatcgtattcaaagagaagatggtcaattagtgggagaaacactgagcgaaggtgaagttactttcatcactttcttatattattatcatttagcaaaaggctctttaaaagagaacgatatatcaaagaataaggttttagtgattgatgatcctatttcaagtttggatagcaatatattgtttatggtgagtgttttagttaaggatcttatgaaagaaaccatggaagaaaaaacaaatatcaagcaaattattatactaacccacaacacatatttttacaaggaaattacattagaatatgatttaaaacgctatcaagggaaatattctttttggataattaaaaaggataataatgtttcaaaaattaaaggctataaagaaaatcccattaaaaattcctatgaattgctatggcaagaagtaaaacaagcaaaagaaaataatgcttcttgggtgtctttacaaaatattatgcgaagaattattgagtattactttaggattttaggcggttttaaacataatgatagcttgagtgaatgttttgaaaatattgaagaagaacgagtgtgcaattctttcatttcatggcttaatgatggctctcatgggatttcagatgatttgtttgtgcaaagtcaagatacaagtattgagacatatttaaaagtttttgaaaaaacatttaaagaaaccggtcatgaagctcattataaaatgatgatgagaataaag

SEQ ID NO: 3934 - DNA (genomic), 795 bp, Helicobacter pylori; double-stranded, circular
  misc_feature (B) LOCATION 1...795
  hypothetical: NO
  anti-sense: NO
atgatgaatgaaatcattgcagtggccaatcaaaaagggggtgtgggcaaaacgacaacagcggtcaatttagcggcttctttagcagcgcatgaaaaaaaaatcttgttgattgattttgacccgcaagccaacgccacttcaagcttgggttttaggcgcgataaaattgattatgatatttatcatgtgctgattggccgtaagcaaatttctcaagtgatcttaaaaacccaaatgccttttttggatctagtgccttctaatttgggtttagctgggtttgaaaaaaccttttatgacagccaagatgagaataaacgaggcgagctcatgctcaaaaacgctttagggagcgtggtaaagctttatgattatattattattgactccccgccggctcttgggcctctcacgatcaattcgctttcagcagcccattcggtgatcattcctatccaatgcgaatttttcgcccttgaaggtactaaattattgcttaacaccattagaatgttgcaaaaaagcacgaaccctaagctcaaaatcagaggttttttacccacaatgcatgtccctcaactcaatttgacaaaaggggttttagcggaattgtttaagtattttgactcagaattttttagagattcagctacaggtgagtatattatgatccctaaaagcgtgaaattagcggaatcgcctagctttggtaagcccattttgctctatgatattaaatctaatggcagtatcgcttatcaaaaattagctcaaagcattcttcaggggtag

SEQ ID NO: 3935 - DNA (genomic), 801 bp, Helicobacter pylori; double-stranded, circular
  misc_feature (B) LOCATION 1...801
  hypothetical: NO
  anti-sense: NO
gatgtgagtatgatgaatgaaatcattgcagtggccaatcaaaaagggggtgtgggcaaaacgacaacagcggtcaatttagcggcttctttagcagcgcatgaaaaaaaaatcttgttgattgattttgacccgcaagccaacgccacttcaagcttgggttttaggcgcgataaaattgattatgatatttatcatgtgctgattggccgtaagcaaatttctcaagtgatcttaaaaacccaaatgccttttttggatctagtgccttctaatttgggtttagctgggtttgaaaaaaccttttatgacagccaagatgagaataaacgaggcgagctcatgctcaaaaacgctttagggagcgtggtaaagctttatgattatattattattgactccccgccggctcttgggcctctcacgatcaattcgctttcagcagcccattcggtgatcattcctatccaatgcgaatttttcgcccttgaaggtactaaattattgcttaacaccattagaatgttgcaaaaaagcacgaaccctaagctcaaaatcagagggtttttacccacaatgcatgtccctcaactcaatttgacaaaaggggttttagcggaattgtttaagtattttgactcagaattttttagagattcagctacaggtgagtatattatgatccctaaaagcgtgaaattagcggaatcgcctagctttggtaagcccattttgctctatgatattaaatctaatggcagtatcgcttatcaaaaattagctcaaagcattcttcagggg

SEQ ID NO: 3936 - DNA (genomic), 609 bp, Helicobacter pylori; double-stranded, circular
  misc_feature (B) LOCATION 1...609
  hypothetical: NO
  anti-sense: NO
atagtgttgaagagattaaaaaagggcaaagagggggcgattgcattcaagtggggacacactagggaatttcaaaattgcgggaaaatttattatgagagcaaacgcactaaagaatttcaaaaagcttgggtggaaaagcttaaaagcgacatgcgagagattggggctgatgtgggggtcattgtgagtgaagcgctgcctaaagagatggagaggatggggttatttgaaggggtgtgggtgtgttcgtttgaagagtttaaggggttgagtgcggtgttaagagagggggttattcaagtgagtttggctaaaaaaagtcaggaaaataagggcgataaagtgaatctgctctatcattatttgacaagctctgaattttctatgcaagtgaatgcgattatagaggggtttgagcaattgagagcggatttagaaagcgaaaaacgcgcaatggctagaatctggaaaagcagggaaaaacaaatagaaaaagtgtttgagagcaccattaacatgtatggctctatcaagggtattgcgggtaatgctattgggcaagtgaaggcactagagcttgggtatgatgagggggatttagagaat

SEQ ID NO: 3937 - DNA (genomic), 762 bp, Helicobacter pylori; double-stranded, circular
  misc_feature (B) LOCATION 1...762
  hypothetical: NO
  anti-sense: NO
gggaaacccatgcaagaaaatcaaaccattccttttaaacgccccaagtgtcaagagccaattaatgtgagtgaggcgctatacaaacagattgaatcagaaaatcaaagccggtttttagcccagcaaaaagcgtttgaaaaagaagtgaatgaaaaaagagcgcagtatcaaagctatttcaaaaatttagagcaaaaagaagaggccctaaaagagcgggcaaaagagcaacaggctcaatttgatgaggcggtcaaacaagcgagcgcgctagctttgcaagatgaaagggctaaaatcattgaagaagccaggaaaaacgcttttttagagcagcaaaagggcttggaattgttgcaaaaagaattagacgagaagtccaaacaagttcaggaattgcaccaaaaagaagcggaaattgaaaggctcaaaagagaaaataacgaagcagagagccgattgaaggctgaaaatgaaaaaaaattgaatgaaaaattggaactggaaagggaaaaaatagaaaaagccttgcatgaaaaaaatgaattgaaattcaagcagcaagaagagcaattggaaatgttaagaaacgagttgaaaaacgctcaaagaaaggcggagttaagctcgcagcaattccagggcgaggtgcaggaattagcgattgaagagtttttgaggcaaaaattccccctagatagtgttgaagagattaaaaaagggcaaagagggggcgattgcattcaagtggggacacac

SEQ ID NO: 3938 - DNA (genomic), 1302 bp, Helicobacter pylori; double-stranded, circular
  misc_feature (B) LOCATION 1...1302
  hypothetical: NO
  anti-sense: NO
atgcaagaaaatcaaaccattccttttaaatgccccaagtgtcaagagccaattaatgtgagtgaggcgctatacaaacagattgaatcagaaaatcaaagccggtttttagcccagcaaaaagcgtttgaaaaagaagtgaatgaaaaaagagcgcagtatcaaagctatttcaaaaatttagagcaaaaagaagaggccctaaaagagcgggcaaaagagcaacaggctcaatttgatgaggcggtcaaacaagcgagcgcgctagctttgcaagatgaaagggctaaaatcattgaagaagccaggaaaaacgcttttttagagcagcaaaagggcttggaattgttgcaaaaagaattagacgagaagtccaaacaagttcaggaattgcaccaaaaagaagcggaaattgaaaggctcaaaagagaaaataacgaagcagagagccgattgaaggctgaaaatgaaaaaaaattgaatgaaaaattggaactggaaagggaaaaaatagaaaaagccttgcatgaaaaaaatgaattgaaattcaagcagcaagaagagcaattggaaatgttaagaaacgagttgaaaaacgctcaaagaaaggcggagttaagctcgcagcaattccagggcgaggtgcaggaattagcgattgaagagtttttgaggcaaaaattccccctagatagtgttgaagagattaaaaaagggcaaagagggggcgattgcattcaagtggtgcacactagggaatttcaaaattgcgggaaaatttattatgagagcaaacgcactaaagaatttcaaaaagcttgggtggaaaagcttaaaagcgacatgcgagagattggggctgatgtgggggtcattgtgagtgaagcgctgcctaaagagatggagaggatggggttatttgaaggggtgtgggtgtgttcgtttgaagagtttaaggggttgagtgcggtgttaagagagggggttattcaagtgagtttggctaaaaaaagtcaggaaaataagggcgataaagtgaatctgctctatcattatttgacaagctctgaattttctatgcaagtgaatgcgattatagaggggtttgagcaattgagagcggatttagaaagcgaaaaacgcgcaatggctagaatctggaaaagcagggaaaaacaaatagaaaaagtgtttgagagcaccattaacatgtatggctctatcaagggtattgcgggtaatgctattgggcaagtgaaggcactagagcttgggtatgatgagggggatttagagaattag

SEQ ID NO: 3939 - DNA (genomic), 333 bp, Helicobacter pylori; double-stranded, circular
  misc_feature (B) LOCATION 1...333
  hypothetical: NO
  anti-sense: NO
cttgcatatgaatttaccaacaaagaacaacaagaattattagcatggttcaaatgtaataaaatgctgattgtttctgatattttaaaaggtaggggtgagtttagtgctgaatgggtgttagtcatacaaaaaattaacttaaacatgaaatgggcgttaaaaaatatcaatgaggtcatgcaacattatcttgatgatggaattgtagaaataagcaaaaaaggctcactcaaaataggaagaattactattcaaagaaaaggaggtgataacggcagagaaagtgcaaacatgttgcagtttaaaattgaccctacaggacttttaggc

SEQ ID NO: 3940 - DNA (genomic), 330 bp, Helicobacter pylori; double-stranded, circular
  misc_feature (B) LOCATION 1...330
  hypothetical: NO
  anti-sense: NO
gcatatgaatttaccaacaaagaacaacaagaattattagcatggttcaaatgtaataaaatgctgattgtttctgatattttaaaaggtaggggtgagtttagtgctgaatgggtgttagtcatacaaaaaattaacttaaacatgaaatgggcgttaaaaaatatcaatgaggtcatgcaacattatcttgatgatggaattgtagaaataagcaaaaaaggctcactcaaaataggaagaattactattcaaagaaaaggaggtgataacggcagagaaagtgcaaacatgttgcagtttaaaattgaccctacaggacttttaggc

SEQ ID NO: 3941 - DNA (genomic), 585 bp, Helicobacter pylori; double-stranded, circular
  misc_feature (B) LOCATION 1...585
  hypothetical: NO
  anti-sense: NO
gtgttaagtgggtataaagctgatgtaaatgtcattatccaaattaaaatgaaacaaaccctagatagtgaaaatctacaagttaaattagtgagcaatctaaaaggttttaatcaaattgataaaagaaagctcagatcttatcaagaaatgtggaatattccccctaatatttatcaattattcgcttattttacaggagagttaaagccgacaagacaagatataaaatatcctaataaaagaatgcttgcatatgaatttaccaacaaagaacaacaagaattattagcatggttaaatgataataaaatgctgattgtttctgatattttaaaaggtaggggtgagtttagtgctgaatgggtgttagtcatacaaaaaattaacttaaacatgaaatgggcgttaaaaaatatcaatgaggtcatgcaacattatcttgatgatggaattgtagaaataagcaaaaaaggctcactcaaaataggaagaattactattcaaagaaaaggaggtgataacggcagagaaagtgcaaacatgttgcagtttaaaattgaccctacaggacttttaggctaa

SEQ ID NO: 3942 - DNA (genomic), 753 bp, Helicobacter pylori; double-stranded, circular
  misc_feature (B) LOCATION 1...753
  hypothetical: NO
  anti-sense: NO
atgaataatcatacaagttcttttggttcatttatagctaaaaatggttttttgaatgaaaaagaagttgcacaaaaattcaatgattatattcatgatagagatgcacaaatttggctaatgattatgggctatgatttaaataagattgagtatgttaaagcgaatgtgttaagtgggtataaagctgatgtaaatgtcattatccaaattaaaatgaaacaaaccctagatagtgaaaatctacaagttaaattagtgagcaatctaaaaggttttaatcaaattgataaaagaaagctcagatcttatcaagaaatgtggaatattccccctaatatttatcaattattcgcttattttacaggagagttaaagccgacaagacaagatataaaatatcctaataaaagaatgcttgcatatgaatttaccaacaaagaacaacaagaattattagcatggttaaatgataataaaatgctgattgtttctgatattttaaaaggtaggggtgagtttagtgctgaatgggtgttagtcatacaaaaaattaacttaaacatgaaatgggcgttaaaaaatatcaatgaggtcatgcaacattatcttgatgatggaattgtagaaataagcaaaaaaggctcactcaaaataggaagaattactattcaaagaaaaggaggtgataacggcagagaaagtgcaaacatgttgcagtttaaaattgaccctacaggacttttaggctaa

SEQ ID NO: 3943 - DNA (genomic), 438 bp, Helicobacter pylori; double-stranded, circular
  misc_feature (B) LOCATION 1...438
  hypothetical: NO
  anti-sense: NO
gcgcgcgaacaaaatcacatgttgattattcatcaaacagacgcttgtcttaatcctggaaattccggcggcgctttaattgatagccgtggaaggttagtggggatcaataccgctatcatttctaaaaccggcggtaaccacggtattggctttgccatcccttctaacatggttaaagatattgtaacccagctcatcaaaaccggtaagaatgaaaaaagttacttgggcgtgggcttgcaaaatttgagcggcgatttgcaaaattcttatgacaataaagaaagggcggtggtcattagcgtagaaaaagactctccggctaaaaaagcagggattttggtgtgggatttgatcactgaagtcaatgggaaaaaggttaaaaacacgaatgagttaagaaccgttgcggctccatgctacccaatcaaagag

SEQ ID NO: 3944 - DNA (genomic), 435 bp, Helicobacter pylori; double-stranded, circular
  misc_feature (B) LOCATION 1...435
  hypothetical: NO
  anti-sense: NO
cgcgaacaaaatcacatgttgattattcatcaaacagacgcttgtcttaatcctggaaattccggcggcgctttaattgatagccgtggaaggttagtggggatcaataccgctatcatttctaaaaccggcggtaaccacggtattggctttgccatcccttctaacatggttaaagatattgtaacccagctcatcaaaaccggtaagaatgaaaaaagttacttgggcgtgggcttgcaaaatttgagcggcgatttgcaaaattcttatgacaataaagaaagggcggtggtcattagcgtagaaaaagactctccggctaaaaaagcagggattttggtgtgggatttgatcactgaagtcaatgggaaaaaggttaaaaacacgaatgagttaagaaccgttgcggctccatgctacccaatcaaagag

SEQ ID NO: 3945 - DNA (genomic), 534 bp, Helicobacter pylori; double-stranded, circular
  misc_feature (B) LOCATION 1...534
  hypothetical: NO
  anti-sense: NO
atggaaagggctttaggcagcggcgtcatcatttctaaagatggctatatcgttacgaataaccatgtgattgatggcgcggataagattaaagtaaccattccagggagctacaaagaatattccgccactttagtaggcacggattctgaaagcgatttagcggtgattcgcatcactaaagacaacttacccacgatcaaattctctgattctaatgatattttagtgggcgatttggtttttgccatcggtaacccttttggcgtgggtgaaagcgttacgcaaggcattgtttcagcgctcaataaaagcgggattgggatcaacagctatgaaaatttcattcaaacagacgcttccattaatcctggaaattccggcggcgctttaattgatagccgtggaaggttagtggggatcaataccgctatcatttctaaaaccggcggtaaccacggtattggctttgccatcccttctaacatggttaaagatattgtaacccagctcatcaaaaccggtaagaattga

SEQ ID NO: 3946 - DNA (genomic), 1164 bp, Helicobacter pylori; double-stranded, circular
  misc_feature (B) LOCATION 1...1164
  hypothetical: NO
  anti-sense: NO
atgatccctaaagaaagaatggaaagggctttaggcagcggcgtcatcatttctaaagatggctatatcgttacgaataaccatgtgattgatggcgcggataagattaaagtaaccattccagggagctacaaagaatattccgccactttagtaggcacggattctgaaagcgatttagcggtgattcgcatcactaaagacaacttacccacgatcaaattctctgattctaatgatattttagtgggcgatttggtttttgccatcggtaacccttttggcgtgggtgaaagcgttacgcaaggcattgtttcagcgctcaataaaagcgggattgggatcaacagctatgaaaatttcattcaaacagacgcttccattaatcctggaaattccggcggcgctttaattgatagccgtggaaggttagtggggatcaataccgctatcatttctaaaaccggcggtaaccacggtattggctttgccatcccttctaacatggttaaagatattgtaacccagctcatcaaaaccggtaagattgaaagaagttacttgggcgtgggcttgcaagatttgagcggcgatttgcaaaattcttatgacaataaagaaggggcggtggtcattagcgtagaaaaagactctccggctaaaaaagcagggattttggtgtgggatttgatcactgaagtcaatgggaaaaaggttaaaaacacgaatgagttaagaaacctaatcggctccatgctacccaatcaaagagtaaccttaaaagtcattagagacaaaaaagaacgcactttcaccctcactcttgctgaaaggaaaaaccctaacaaaaaagaaaccatttctgctcaaaacggtgtgcaaggtcagttgaacgggcttcaagtagaagatttaacccaaaaaaccaaaaggtctatgcgtttgagcgatgacgttcaaggggttttagtctctcaagtgaatgaaaattccccagcagagcaagccggcttcagacaaggcaacatcatcacaaaaattgaagaggttgaagttaaaagcgttgcggattttaaccatgctttagaaaaatataaaggcaaacccaaacgattcttagttttagacttgaaccaaggttatagaatcattttggtgaaatga

SEQ ID NO: 3947 - DNA (genomic), 1164 bp, Helicobacter pylori; double-stranded, circular
  misc_feature (B) LOCATION 1...1164
  hypothetical: NO
  anti-sense: NO
atgatccctaaagaaagaatggaaagggctttaggcagcggcgtcatcatttctaaagatggctatatcgttacgaataaccatgtgattgatggcgcggataagattaaagtaaccattccagggagcaacaaagaatattccgccactttagtaggcacggattctgaaagcgatttagcggtgattcgcatcactaaagacaacttacccacgatcaaattctctgattctaatgatattttagtgggcgatttggtttttgccatcggtaacccttttggcgtgggtgaaagcgttacgcaaggcattgtttcagcgctcaataaaagcgggattgggatcaacagctatgaaaatttcattcaaacagacgcttccattaatcctggaaattccggcggcgctttaattgatagccgtggagggttagtggggatcaataccgctatcatttctaaaaccggcggtaaccacggtattggctttgccatcccttctaacatggttaaagatattgtaacccagctcatcaaaaccggtaagattgaaagaggttacttgggcgtgggcttgcaagatttgagcggcgatttgcaaaattcttatgacaataaagaaggggcggtggtcattagcgtagaaaaagactctccggctaaaaaagcagggattttggtgtgggatttgatcactgaagtcaatgggaaaaaggttaaaaacacgaatgagttaagaaacctaatcggctccatgctacccaatcaaagagtaaccttaaaagtcattagagacaaaaaagaacgcactttcaccctcactcttgctgaaaggaaaaaccctaacaaaaaagaaaccatttctgctcaaaacggtgtgcaaggtcagttgaacgggcttcaagtagaagatttaacccaaaaaaccaaaaggtctatgcgtttgagcgatgacgttcaaggggttttagtctctcaagtgaatgaaaattccccagcagagcaagccggcttcagacaaggcaacatcatcacaaaaattgaagaggttgaagttaaaagcgttgcggattttaaccatgctttagaaaaatataaaggcaaacccaaacgattcttagttttagacttgaaccaaggttatagaatcattttggtgaaatga

SEQ ID NO: 3948 - DNA (genomic), 525 bp, Helicobacter pylori; double-stranded, circular
  misc_feature (B) LOCATION 1...525
  hypothetical: NO
  anti-sense: NO
aagtattatcgcgctctttcatgcattcgttgcgggacttgtttgaaccactgccctgtgtatgataaaatcggtgggcatgcctatctttccacttatcctggccctataggcgtggtggtatcccctcaactctttgggttgaataattacgggcatatccctaatttgtgtagcctttgcgggcgttgcactgaagtatgccccgtagaaatccctttagcagaactcatcagagatttacgatcggataaagtgggcgagggcagaggcgtggtcaagggggctaaaagcacccaacacagcgggatggaaaaattctctatgaaaatgtttgccaaaatggcaagcgatgggaccaagtggcgtttccaattgaaaatggctcaatttttctcgcctttaggcaagcttttagcccccatactgcctttagtcaaagagtgggcgagcgtgaggaccttacccaatatggacacgagtttgcatgccaaagtccaacacttagaaggggtgatttatgag

SEQ ID NO: 3949 - DNA (genomic), 969 bp, Helicobacter pylori; double-stranded, circular
  misc_feature (B) LOCATION 1...969
  hypothetical: NO
  anti-sense: NO
ggaataatcatggaaaaatatcatagcgaccaagaatacgaagaaatcatcaccgaccaattaggcgatatgcaattaagggaaaatttgcgttctgcaatggacaccttaagggctaatcgtaagaatctccttaaaaatcgttacagcgaatgggaaaatttaagggaattgggcaaggaagtcaagcttaagattttatccaggcttgatgaatatttggaattatttgaaaaaaacgccactcaaaacggctttaaaatccattacgctaaagacggcgatgaagccaatgaaatcatttacaacctcgctaaagaaaagaatatcaagcgcattttaaagcaaaaatccatggcgagcgaagaaattggcttgaaccattacctcaaagaaaagggcattcaagcgcaagaaacggatctgggcgaattgattatccagctcatcaatgaacaccctgtgcatattgtcgtgccagccatccataaaaaccgcaagcaaatcggtaagatttttgaagaaaaactcaacgccgcttatgaagaagagcctgaaaagctcaatgcgatcgccagaaagcacatgcgcaaagaatttgaaagctttaaaatggggattagtggggttaatttcgctatcgctaatgagggggcgatctggttagtggaaaatgagggtaatggcagaatgagcaccaccgcatgcgatgtgcatgtcgcaatttgtgggattgaaaaattagtagaaagctttgatgatgcggcgattttaaacaatttgctcgccccgagcgcggtgggcgtgcctatcacttgctatcaaaacatcatcacaggccctagaaaaaacgacgatttagatggccctaaagaaacccatatcattttattagacaacaaccgctccaatattttggctgatgaaagtattatcgcgctctttcatgcattcgttgcgggacttgtt

SEQ ID NO: 3950 - DNA (genomic), 984 bp, Helicobacter pylori; double-stranded, circular
  misc_feature (B) LOCATION 1...984
  hypothetical: NO
  anti-sense: NO
atggaaaaatatcatagcgaccaagaatacgaagaaatcatcaccgaccaattaggcgatatgcaattaagggaaaatttgcgttctgcaatggacaccttaagggctaatcgtaagaatctccttaaaaatcgttacagcgaatgggaaaatttaagggaattgggcaaggaagtcaagcttaagattttatccaggcttgatgaatatttggaattatttgaaaaaaacgccactcaaaacggctttaaaatccattacgctaaagacggcgatgaagccaatgaaatcatttacaacctcgctaaagaaaagaatatcaagcgcattttaaagcaaaaatccatggcgagcgaagaaattggcttgaaccattacctcaaagaaaagggcattcaagcgcaagaaacggatctgggcgaattgattatccagctcatcaatgaacaccctgtgcatattgtcgtgccagccatccataaaaaccgcaagcaaatcggtaagatttttgaagaaaaactcaacgccgcttatgaagaagagcctgaaaagctcaatgcgatcgccagaaagcacatgcgcaaagaatttgaaagctttaaaatggggattagtggggttaatttcgctatcgctaatgagggggcgatctggttagtggaaaatgagggtaatggcagaatgagcaccaccgcatgcgatgtgcatgtcgcaatttgtgggattgaaaaattagtagaaagctttgatgatgcggcgattttaaacaatttgctcgccccgagcgcggtgggcgtgcctatcacttgctatcaaaacatcatcacaggccctagaaaaaacgacgatttagatggccctaaagaaacccatatcattttattagacaacaaccgctccaatattttggctgatagaaaagtattatcgcgctctttcatgcattcgttgcgggacttgtttgaaccactgccctgtgtatga

SEQ ID NO: 3951 - DNA (genomic), 1446 bp, Helicobacter pylori; double-stranded, circular
  misc_feature (B) LOCATION 1...1446
  hypothetical: NO
  anti-sense: NO
atggaaaaatatcatagcgaccaagaatacgaagaaatcatcaccgaccaattaggcgatatgcaattaagggaaaatttgcgttctgcaatggacaccttaagggctaatcgtaagaatctccttaaaaatcgttacagcgaatgggaaaatttaagggaattgggcaaggaagtcaagcttaagattttatccaggcttgatgaatatttggaattatttgaaaaaaacgccactcaaaacggctttaaaatccattacgctaaagacggcgatgaagccaatgaaatcatttacaacctcgctaaagaaaagaatatcaagcgcattttaaagcaaaaatccatggcgagcgaagaaattggcttgaaccattacctcaaagaaaagggcattcaagcgcaagaaacggatctgggcgaattgattatccagctcatcaatgaacaccctgtgcatattgtcgtgccagccatccataaaaaccgcaagcaaatcggtaagatttttgaagaaaaactcaacgccgcttatgaagaagagcctgaaaagctcaatgcgatcgccagaaagcacatgcgcaaagaatttgaaagctttaaaatggggattagtggggttaatttcgctatcgctaatgagggggcgatctggttagtggaaaatgagggtaatggcagaatgagcaccaccgcatgcgatgtgcatgtcgcaatttgtgggattgaaaaattagtagaaagctttgatgatgcggcgattttaaacaatttgctcgccccgagcgcggtgggcgtgcctatcacttgctatcaaaacatcatcacaggccctagaaaaaacgacgatttagatggccctaaagaaacccatatcattttattagacaacaaccgctccaatattttggctgatgaaaagtattatcgcgctctttcatgcattcgttgcgggacttgtttgaaccactgccctgtgtatgataaaatcggtgggcatgcctatctttccacttatcctggccctataggcgtggtggtatcccctcaactctttgggttgaataattacgggcatatccctaatttgtgtagcctttgcgggcgttgcactgaagtatgccccgtagaaatccctttagcagaactcatcagagatttacgatcggataaagtgggcgagggcagaggcgtggtcaagggggctaaaagcacccaacacagcgggatggaaaaattctctatgaaaatgtttgccaaaatggcaagcgatgggaccaagtggcgtttccaattgaaaatggctcaatttttctcgcctttaggcaagcttttagcccccatactgcctttagtcaaagagtgggcgagcgtgaggaccttacccaatatggacacgagtttgcatgccaaagtccaacacttagaaggggtgatttatgagtaa

SEQ ID NO: 3952 - DNA (genomic), 168 bp, Helicobacter pylori; double-stranded, circular
  misc_feature (B) LOCATION 1...168
  hypothetical: NO
  anti-sense: NO
aggataagaatggaaaaattagaagtagggcaattagcccctgattttagattgaaaaacagcgatggcgtggaaatttctttaaaagatttgctccataaaaaagtggtgttgtatttctaccctaaagacaacacccccggatgcaccttagaaagccaaagattt

SEQ ID NO: 3953 - DNA (genomic), 273 bp, Helicobacter pylori; double-stranded, circular
  misc_feature (B) LOCATION 1...273
  hypothetical: NO
  anti-sense: NO
aaagaaaaacgctgttgtcgtgggcgtaagcccgataattctcaatcgcatcaaaaatttatcaggcaatgctctttgaatgtgatcttgctctgtgatgaagataaaaaagtggccaatctttacaaagcttatggcaaacgcatgctttatgggaaggagcatttggggattatccgctccactttcattatcaacacgcaaggcgttttagaaaaatgcttctataatgtcaaagcgaaagggcatgctcaaaaagttttagagagtttg

SEQ ID NO: 3954 - DNA (genomic), 459 bp, Helicobacter pylori; double-stranded, circular
  misc_feature (B) LOCATION 1...459
  hypothetical: NO
  anti-sense: NO
atggaaaaattagaagtagggcaattagcccctgattttagattgaaaaacagcgatggcgtggaaatttctttaaaagatttgctccataaaaaagtggtgttgtatttctaccctaaagacaacacccccggatgcaccttagaagccaaagattttagcgctctgtttagcgaatttgaaaagaaaaacgctgttgtcgtgggcgtaagccctgataattctcaatcgcatcaaaaatttatcagccaatgctctttgaatgtgatcttgctctgcgatgaagataaaaaagtggccaatctttacaaagcttatggcaaacgcatgctttatgggaaggagcatttggggattatccgctccactttcattatcaacacgcaaggcgttttagaaaaatgcttctataatgtcaaagcgaaagggcatgctcaaaaagttttagagagtttgtag

SEQ ID NO: 3955 - DNA (genomic), 2340 bp, Helicobacter pylori; double-stranded, circular
  misc_feature (B) LOCATION 1...2340
  hypothetical: NO
  anti-sense: NO
atgtttgaaatggcgaccggtagcggtaaaaccttagtgatggcgggcttgattttagaatgctacaagcaaggctatcaaaacttcatcttttttgtgaacagcgccagcattttagaaaaaacgaaattgaattttacagacagcgtttcgtcaaaatacctttttagtgaaaatatcaatattaatgatgaaaatacagaaattaaaagcatcaataatttaaacgagagccacaacaacgctatcaatatttattttagcaccattcaaggcttgttctcattattcactagagctaaagaaaacgctatcacactagaggatttaaaagatcagaaattagtttttttagcggatgaagcgcaccacttaaacacagagactaaaaagaaattaaatgatagtgaggctagtgaaaaacgcaactgggaaagcgtggtgaaattagccctagaacaaaataaagacaatttattgctggaatttagcgccactatccctaaagaaaaaagcgttgaagacaaatatgaaaacctaaaggtggtaacttacaccttaaaacaatttagcgaggataaattttgcaaaaacatctactccctttcctatgaaaacaaagaattagaaacgcgctttttaggggcatgcgtttcaagcttatataaagaattactagcccaacaccacaatattgaaaactttaaaccctgtattttgtttaaaagcgaaaggattgaagagagtaaaaaaaatcaagagcgcttcaatgcgtttttagaaaatttaagctttttagatttagaaaattttttcaatcacagccgtaacgctttttttaaagccgctaaaagcttttttgatgagcaaaatcacacccctaaccttgtcgcgcttctacaaaataaattcaaagaaagcgttcaaattaacaccaacaatgaaaaagaattagaaaagagcatgcttttattgaactccctagaagacagagacaaccctaaaagagtgatttttagcgtggataagctcaatgaaggctgggatgtgctgaatttgtttgacattgtcaggcttaaaaacaaagccaaccaaaaagacaccattaaagacgcccagctcatagggcgaggggcgagatactatccctttagctataacgatttcaagccaagccgcatagagttttaccaacgcaaatttgatcttgccaatcccttaagcacactagagaggttagactaccatgccatttataacagcgagtttatcgctaaattaaacaaagggttacaagatttaggattaggattaattgaaaaggaaaaaacaactatccctttaacgcccaccaagcgtttcaaatgctactacgcgagcaacacaaaagacaaaaagaaaaacttatttaatatggactattcagaccctgttgaagccaaactcaaaagcttgcatgtccccttatttgcttttggcgtgcgtgaaaagcaagtggattttaaagaagaaaataaaggcgatagaacttactatatgccccacaccttagataaaatccccataaactattttttaaaagcccttaatttaaaaaacctggatttcaaaacgcttaaaaaagcctttaaaaaacatgcctttaacaataaagtgggatttatagagcaatatatttcgccattaaaaacaaacttccataaaaaccaaaagtttgacgacaacaaaatccttttacaactcgctgtttatatcattgaaaacttaaaagacacgcttttaaaagagcaagataaacctagcgtgagcacgttagaattaaaagaatttgaaacgcacaataaaagccttagtgccagcgaatgggaaaaagacattcccccctatgaatggctgctttttaaggacatgcgaaaactagacagcgatttagaaagggagtttttaggttttatcaacgaccataaagagcttttagacaagaaattcaaagaatggtgcgttttaaggaacgattatttcactgaattaaaagttttttgcaatatagaaggccccttttacgcgcaaggttttgagccggattttatcctttttgcccaaacgcatgaagatgaatttttaggcttcacttgttacatggaagttaaaggcgagcatttagagccttctaacgcttggaaaaaagaatttttagaaatgctagaaaacgccacgcttaaaagccataacaaaaaactccatttaaaaggcttgccttttttcacgctccataatagcgtattcaatggcgattttcaaaccgctttccatcaaacctttaaggacaaagaatgttaa

SEQ ID NO: 3956 - DNA (genomic), 2547 bp, Helicobacter pylori; double-stranded, circular
  misc_feature (B) LOCATION 1...2547
  hypothetical: NO
  anti-sense: NO
gggatttcatgcaagattcattcgcatctgttaccccccccccaatcagcgataaaagatcgcacgccaaataacgcgcccaataataaagaaatagagctacccacccacatcaccagtaatttaaaaaaagagcttagagattaccaaaagcaagcgatagatagttatttagaaaaacgccaatttaaccccactcaaaagcatttcatgtttgaaatggcgaccggtagcggtaaaaccttagtgatggcgggcttgattttagaatgctacaagcaaggctatcaaaacttcatcttttttgtgaacagcgccagcattttagaaaaaacgaaattgaattttacagacagcgtttcgtcaaaatacctttttagtgaaaatatcaatattaatgatgaaaatacagaaattaaaagcatcaataatttaaacgagagccacaacaacgctatcaatatttattttagcaccattcaaggcttgttctcattattcactagagctaaagaaaacgctatcacactagaggatttaaaagatcagaaattagtttttttagcggatgaagcgcaccacttaaacacagagactaaaaagaaattaaatgatagtgaggctagtgaaaaacgcaactgggaaagcgtggtgaaattagccctagaacaaaataaagacaatttattgctggaatttagcgccactatccctaaagaaaaaagcgttgaagacaaatatgaaaacctaaaggtggtaacttacaccttaaaacaatttagcgaggataaattttgcaaaaacatctactccctttcctatgaaaacaaagaattagaaacgcgctttttaggggcatgcgtttcaagcttatataaagaattactagcccaacaccacaatattgaaaactttaaaccctgtattttgtttaaaagcgaaaggattgaagagagtaaaaaaaatcaagagcgcttcaatgcgtttttagaaaatttaagctttttagatttagaaaattttttcaatcacagccgtaacgctttttttaaagccgctaaaagcttttttgatgagcaaaatcacacccctaaccttgtcgcgcttctacaaaataaattcaaagaaagcgttcaaattaacaccaacaatgaaaaagaattagaaaagagcatgcttttattgaactccctagaagacagagacaaccctaaaagagtgatttttagcgtggataagctcaatgaaggctgggatgtgctgaatttgtttgacattgtcaggcttaaaaacaaagccaaccaaaaagacaccattaaagacgcccagctcatagggcgaggggcgagatactatccctttagctataacgatttcaagccaagccgcatagagttttaccaacgcaaatttgatcttgccaatcccttaagcacactagagaggttagactaccatgccatttataacagcgagtttatcgctaaattaaacaaagggttacaagatttaggattaggattaattgaaaaggaaaaaacaactatccctttaacgcccaccaagcgtttcaaatgctactacgcgagcaacacaaaagacaaaaagaaaaacttatttaatatggactattcagaccctgttgaagccaaactcaaaagcttgcatgtccccttatttgcttttggcgtgcgtgaaaagcaagtggattttaaagaagaaaataaaggcgatagaacttactatatgccccacaccttagataaaatccccataaactattttttaaaagcccttaatttaaaaaacctggatttcaaaacgcttaaaaaagcctttaaaaaacatgcctttaacaataaagtgggatttatagagcaatatatttcgccattaaaaacaaacttccataaaaaccaaaagtttgacgacaacaaaatccttttacaactcgctgtttatatcattgaaaacttaaaagacacgcttttaaaagagcaagataaacctagcgtgagcacgttagaattaaaagaatttgaaacgcacaataaaagccttagtgccagcgaatgggaaaaagacattcccccctatgaatggctgctttttaaggacatgcgaaaactagacagcgatttagaaagggagtttttaggttttatcaacgaccataaagagcttttagacaagaaattcaaagaatggtgcgttttaaggaacgattatttcactgaattaaaagttttttgcaatatagaaggccccttttacgcgcaaggttttgagccggattttatcctttttgcccaaacgcatgaagatgaatttttaggcttcacttgttacatggaagttaaaggcgagcatttagagccttctaacgcttggaaaaaagaatttttagaaatgctagaaaacgccacgcttaaaagccataacaaaaaactccatttaaaaggcttgccttttttcacgctccataatagcgtattcaatggcgattttcaaaccgctttccatcaaacctttaaggacaaagaatgt

SEQ ID NO: 3957 - DNA (genomic), 402 bp, Helicobacter pylori; double-stranded, circular
  misc_feature (B) LOCATION 1...402
  hypothetical: NO
  anti-sense: NO
atgcaatcgcctatgatttttgatgtgaaagcacctatcttagggtttgaaaccattcataaaatgcacttgcaaaagattgatgaaatctttttgcgtttgaatagcgcagaagacaattctgtcgtgtctttcacgttggttaatccctttgctttaagaaaatacgaatttgaagtacctacccccttaaaaatccttttagaattagagggagccaagagcgttctagtcgctaatatcatggtcgttcaaacccccattgagctttccaccgtgaattatttagcccctttaattttcaatttggataagcagctcatggggcaagtggttttggattctaaaaaatacccgcactaccatttaagagagaatattctaagccacacgcatgaatga

SEQ ID NO: 3958 - DNA (genomic), 405 bp, Helicobacter pylori; double-stranded, circular
  misc_feature (B) LOCATION 1...405
  hypothetical: NO
  anti-sense: NO
agggaatgcaatcgccctatgatttttgatgtgaaagcacctatcttagggtttgaaaccattcataaaatgcacttgcaaaagattgatgaaatctttttgcgtttgaatagcgcagaagacaattctgtcgtgtctttcacgttggttaatccctttgctttaagaaaatacgaatttgaagtacctacccccttaaaaatccttttagaattagagggagccaagagcgttctagtcgctaatatcatggtcgttcaaacccccattgagctttccaccgtgaattatttagcccctttaattttcaatttggataagcagctcatggggcaagtggttttggattctaaaaaatacccgcactaccatttaagagagaatattctaagccacacgcatgaa

SEQ ID NO: 3959 - DNA (genomic), 864 bp, Helicobacter pylori; double-stranded, circular
  misc_feature (B) LOCATION 1...864
  hypothetical: NO
  anti-sense: NO
atgaaaatttttaaaaactggctctgttttagcctgatcgctatgagttggctccaagcggacatgttggataatttcactaaggctattaacagctacaccgctaaaaagcttaatgaaatcaaagatcaagtcaatagcgctaatcctactaaaaaccacaatcccactcataacgctaatggcatgctcactaacattgattgtaaagtcttaaaaaataacttttattcggtgtgttattctagcgagttaaaaaaccctatttatggcgtgagcgtgttgtttggggatttagtggataaaaacaatattgaaaaacgctatgagtttaagccggacacacgattagcggagtatcaacaagccgttacacaagattacacaagaagcggttttgatagggggcattttgtggcgaatgacgcttcttttgattttgcctctaatcctttaagagagacttacagaatgactaatatcacccctgaagccaaaaacaccaacaggcattctgttttattggtggaaaaagagggccgtaatttggccaggaaataccatcaagtcttagtagaagaactcactatcatcaaacagggttataggacttttagctctaagaatatcgctatccctagcggcttttggtaccactatgatacaagtctaacggatagctatgaaaacgctaaaagcgaatgcttttatatccctaatgacaaccaaaaatatcccttacaagaaatgagaagagattgcaaagaatacgaacgagttgaaaagcaagtggtttttaagaacaataaaaacgctgagttgaatgaattgcctaaatacatgaataattctaagaagtattaa

SEQ ID NO: 3960 - DNA (genomic), 864 bp, Helicobacter pylori; double-stranded, circular
  misc_feature (B) LOCATION 1...864
  hypothetical: NO
  anti-sense: NO
aacatgaaaatttttaaaaactggctctgttttagcctgatcgctatgagttggctccaagcggacatgttggataatttcactaaggctattaacagctacaccgctaaaaagcttaatgaaatcaaagatcaagtcaatagcgctaatcctactaaaaaccacaatcccactcataacgctaatggcatgctcactaacattgattgtaaagtcttaaaaaataacttttattcggtgtgttattctagcgagttaaaaaaccctatttatggcgtgagcgtgttgtttggggatttagtggataaaaacaatattgaaaaacgctatgagtttaagccggacacacgattagcggagtatcaacaagccgttacacaagattacacaagaagcggttttgatagggggcattttgtggcgaatgacgcttcttttgattttgcctctaatcctttaagagagacttacagaatgactaatatcacccctgaagccaaaaacaccaacaggcattctgttttattggtggaaaaagagggccgtaatttggccaggaaataccatcaagtcttagtagaagaactcactatcatcaaacagggttataggacttttagctctaagaatatcgctatccctagcggcttttggtaccactatgatacaagtctaacggatagctatgaaaacgctaaaagcgaatgcttttatatccctaatgacaaccaaaaatatcccttacaagaaatgagaagagattgcaaagaatacgaacgagttgaaaagcaagtggtttttaagaacaataaaaacgctgagttgaatgaattgcctaaatacatgaataattctaagaagtat

SEQ ID NO: 3961 - DNA (genomic), 1035 bp, Helicobacter pylori; double-stranded, circular
  misc_feature (B) LOCATION 1...1035
  hypothetical: NO
  anti-sense: NO
atgagtttgaatgaaagggaaatcgtgcgatcgtttgggaattacatgcaagagtggctttatggcgaaaaggggtattacagaaaggcgctaatcggtccaaaaggggatttttacacttcagtgtctttgagtaagttttttgggggcgctattgcgttttatatcattaggcttttagaagaagaaaaattatttttgcctttaaaaattgtagaaattggatctcatcatgggcattttttaagcgatatagccagttttttaaacgctttgagcgtgggcgtaatggaaaaatgcgaatttgtcagctgtgagcctttaaaggaattgcaaaatatccaacgaactattttcaaacaagccacgcaattggatctgatcagttgtgctttagaagagcttgattttaaagaaaaaaaaagcgcgtttgttgtctctaacgaattgtttgacgcgttcgcttgcgaaatcattaaagacaatcaaatgcttttcattactcatgatcatcaaggcgtttggggcggtattgatgaacccactaaagaacttcttaaaaatttgaatttaaaagaagggtgtgcgccgttatttttagaggcttttattaaaaatttgttagaaaaattgaacgaggcttcttcttgggtgtttttgagctttgattatggcgatgaattagaacgaaaagacatgcatttaagggcttttaaaaaccaccaagcgctggattttaaggatattttaaaccatctggcttctttgtatcagcaaagcgatttgacttatgatgtcaatttttctctggtgcgctttttgtttgaaaaacaccatgcgcaattttcattttttaaaacgcaggctaacgctttattggatatggggcttatggaattactggaaacgttttcaaagagcgtgggttatgaaaggtatttaaaagaagcggctaaaatcaagcccctaattagccctgggggtttaggggagcgtttcaaagcgttagagtttgtgaaaaaaaataaaatgtaa

SEQ ID NO: 3962 - DNA (genomic), 1059 bp, Helicobacter pylori; double-stranded, circular
  misc_feature (B) LOCATION 1...1059
  hypothetical: NO
  anti-sense: NO
aatagcggtctcttatggttggttaagatgagtttgaatgaaagggaaatcgtgcgatcgtttgggaattacatgcaagagtggctttatggcgaaaaggggtattacagaaaggcgctaatcggtccaaaaggggatttttacacttcagtgtctttgagtaagttttttgggggcgctattgcgttttatatcattaggcttttagaagaagaaaaattatttttgcctttaaaaattgtagaaattggatctcatcatgggcattttttaagcgatatagccagttttttaaacgctttgagcgtgggcgtaatggaaaaatgcgaatttgtcagctgtgagcctttaaaggaattgcaaaatatccaacgaactattttcaaacaagccacgcaattggatctgatcagttgtgctttagaagagcttgattttaaagaaaaaaaaagcgcgtttgttgtctctaacgaattgtttgacgcgttcgcttgcgaaatcattaaagacaatcaaatgcttttcattactcatgatcatcaaggcgtttggggcggtattgatgaacccactaaagaacttcttaaaaatttgaatttaaaagaagggtgtgcgccgttatttttagaggcttttattaaaaatttgttagaaaaattgaacgaggcttcttcttgggtgtttttgagctttgattatggcgatgaattagaacgaaaagacatgcatttaagggcttttaaaaaccaccaagcgctggattttaaggatattttaaaccatctggcttctttgtatcagcaaagcgatttgacttatgatgtcaatttttctctggtgcgctttttgtttgaaaaacaccatgcgcaattttcattttttaaaacgcaggctaacgctttattggatatggggcttatggaattactggaaacgttttcaaagagcgtgggttatgaaaggtatttaaaagaagcggctaaaatcaagcccctaattagccctgggggtttaggggagcgtttcaaagcgttagagtttgtgaaaaaaaataaaatg

SEQ ID NO: 3963 - DNA (genomic), 822 bp, Helicobacter pylori; double-stranded, circular
  misc_feature (B) LOCATION 1...822
  hypothetical: NO
  anti-sense: NO
ttgcgtgtttttatcatttctttaaatcaaaaagtgtgcgataaatttggtttggtttttagagacaccacaactttactcaataatatcaacgccacccaccaccaagcgcaaatttttgatgcgatttattccaagacttttgaaggcgggttgcaccccctagttaaaaagcatttacacccttatttcatcacgcaaaatatcaaagacatggggattgcaaccagtctcatcagtgaggtttctaagttttattacgctttaaaataccatgcgaaatttatgagcttgggggagcttgggtgctatgcgagccattattcgttgtggcaaaaatgcatagagctcaatgaagcgatctgtattttagaagacgatataaccttgaaagaggattttaaagagggcttggattttttagaaaaacacatccaagagttaggctatgcgcgtttgatgcatttattgtatgatgccagcgtgaaaagtgagcctttaaaccataaaaaccaagagatacaagagcgtgtggggatcattaaagcttatagccatggggtggggacgcaaggctatgtgatcacgcccaagattgccaaagtttttttgaaacacagccgaaaatgggttgttcctgtggatacgataatggacgctacttttatccatggcgtgaaaaatctggtgttacaaccttttgtgatcgctgatgatgagcaaatctctacgatagcgcgaaaagaagaaccctatagccctaaaatcgctctaatgagagaactccattttaaatttttgaaatggtggcagtttgtataa

SEQ ID NO: 3964 - DNA (genomic), 837 bp, Helicobacter pylori; double-stranded, circular
  misc_feature (B) LOCATION 1...837
  hypothetical: NO
  anti-sense: NO
aaattatgggagtttagcttgcgtgtttttatcatttctttaaatcaaaaagtgtgcgataaatttggtttggtttttagagacaccacaactttactcaataatatcaacgccacccaccaccaagcgcaaatttttgatgcgatttattccaagacttttgaaggcgggttgcaccccctagttaaaaagcatttacacccttatttcatcacgcaaaatatcaaagacatggggattgcaaccagtctcatcagtgaggtttctaagttttattacgctttaaaataccatgcgaaatttatgagcttgggggagcttgggtgctatgcgagccattattcgttgtggcaaaaatgcatagagctcaatgaagcgatctgtattttagaagacgatataaccttgaaagaggattttaaagagggcttggattttttagaaaaacacatccaagagttaggctatgcgcgtttgatgcatttattgtatgatgccagcgtgaaaagtgagcctttaaaccatgaaaaccaagagatacaagagcgtgtggggatcattaaagcttatagccatggggtggggacgcaaggctatgtgatcacgcccaagattgccaaagtttttttgaaacacagccgaaaatgggttgttcctgtggatacgataatggacgctacttttatccatggcgtgaaaaatctggtgttacaaccttttgtgatcgctgatgatgagcaaatctctacgatagcgcgaaaagaagaaccctatagccctaaaatcgctctaatgagagaactccattttaaatttttgaaatggtggcagtttgta

SEQ ID NO: 3965 - DNA (genomic), 327 bp, Helicobacter pylori; double-stranded, circular
  misc_feature (B) LOCATION 1...327
  hypothetical: NO
  anti-sense: NO
ttgaaaatttttctttcttgcaagtctttgttgatccaaaggagtttggaattttatttgagcgattgtctttctcctgtggaagtttgcgatcttgttttaagcgatgatgaaaagctagaaaccaataagcccctatgctttatagaagagcgcttaagaaagcctttcactaaacagagcgtgaaagaagatataaaaaatttttatcgcgctttaaagataagcgaaaaaccttgcgaagagatccaattttctaaagagcaaaagattaagcaattactagaagaatacacccacaaattatgccaaatcatcagccagtaa

SEQ ID NO: 3966 - DNA (genomic), 342 bp, Helicobacter pylori; double-stranded, circular
  misc_feature (B) LOCATION 1...342
  hypothetical: NO
  anti-sense: NO
tgggataaagggggttttttgaaaatttttctttcttgcaagtctttgttgatccaaaggagtttggaattttatttgagcgattgtctttctcctgtggaagtttgcgatcttgttttaagcgatgatgaaaagctagaaaccaataagcccctatgctttatagaagagcgcttaagaaagcctttcactaaacagagcgtgaaagaagatataaaaaatttttatcgcgctttaaagataagcgaaaaaccttgcgaagagatccaattttctaaagagcaaaagattaagcaattactagaagaatacacccacaaattatgccaaatcatcagccag

SEQ ID NO: 3967 - DNA (genomic), 462 bp, Helicobacter pylori; double-stranded, circular
  misc_feature (B) LOCATION 1...462
  hypothetical: NO
  anti-sense: NO
atggaacaaaatattttctccttactcattcaaaaaaagtcttataaaaagcttgaaactcttttgaaactcaaaaagcttaaggtttttatgcctttaagtttacaagaaaatttgctttttatattcatcaaagactctaaattgctttttgcgtttaaagatctttgggcttctaaggaatttaaccagcgattcgctaaagaaatcagccattttttgaacacgcaagggcatgcttgcgggcttgatgagttagacgccttagaaattttaggttatgtgcctaaagactccttagaaaaagccaatttttatgcccctattaaaaaacaagcccaattttatcgccctagcgctttagggttgttccataaccccattaaagacgctcgtttgcatgaatgttttgaaaaagcgcgcgctttgatccactaccaacgcagtttttttgaggaatga

SEQ ID NO: 3968 - DNA (genomic), 468 bp, Helicobacter pylori; double-stranded, circular
  misc_feature (B) LOCATION 1...468
  hypothetical: NO
  anti-sense: NO
gatcggtttatggaacaaaatattttctccttactcattcaaaaaaagtcttataaaaagcttgaaactcttttgaaactcaaaaagcttaaggtttttatgcctttaagtttacaagaaaatttgctttttatattcatcaaagactctaaattgctttttgcgtttaaagatctttgggcttctaaggaatttaaccagcgattcgctaaagaaatcagccattttttgaacacgcaagggcatgcttgcgggcttgatgagttagacgccttagaaattttaggttatgtgcctaaagactccttagaaaaagccaatttttatgcccctattaaaaaacaagcccaattttatcgccctagcgctttagggttgttccataaccccattaaagacgctcgtttgcatgaatgttttgaaaaagcgcgcgctttgatccactaccaacgcagtttttttgaggaa

SEQ ID NO: 3969 - DNA (genomic), 282 bp, Helicobacter pylori; double-stranded, circular
  misc_feature (B) LOCATION 1...282
  hypothetical: NO
  anti-sense: NO
atgctagctttagaaatttatattgatatttgcttgaaagacgctttaatagattatttgtttgaaaaaggctttgatgattttttttatgtggaatgctataaatacgccgcttcttcattgcttttaagccaaaaagaacaggtgagcgggcgtaaagactacgctaaattcaagctttttttaagcgaggaagtggctttacctctagcccaagcgttaaaaaaccagttcgcttctaaagaaatgaaattgttttattctcaaacgcatgggttgtaa

SEQ ID NO: 3970 - DNA (genomic), 735 bp, Helicobacter pylori; double-stranded, circular
  misc_feature (B) LOCATION 1...735
  hypothetical: NO
  anti-sense: NO
ttgacacccccaggagtgaatgatcccatcgcttccagggaagagcgcaccaaagccttattgaaagattgcgatgtggtgtttattgtaagcccttctggtcagtttttaacggatagcgatatgagtttgtttgacagggtttctcataaagaaggccttcaagaaatttattttgtggcaagccaagccgacagcgctgttggctctatgagtgaggtagaaaaatccaaccatcacctccctacagcctttgaaaacgcgcaaaaatccctttcatctcaattaaataatatcatgggagcgttgattgaaaaataccctaaccaacgagaggtttttgaaaaagcgaaacaaaatggcgtcattttgacttcaggggtttgctttagcatgcacaaagattttgaaaaccaagcttcttgggaaagaaaccaaaaaacagaagagtatcacaatgccttacggaatttaagagattcttatcctgacgcttttagtagcgatgataagtctaaagaaagctcactctttttaatcaatatgggcgcgattgaagagcgtttaaaaaaagccgcccaagagaaagaaaaaatcatgtctcaaaaattgcaaaattatgcagagagccaagcaaacaacctccattcattcataacgcagttgttgcaagatttggaagaagaaaaaagagggttaaaaacgctgacattagcgctatcaaaaagcaaatag

SEQ ID NO: 3971 - DNA (genomic), 732 bp, Helicobacter pylori; double-stranded, circular
  misc_feature (B) LOCATION 1...732
  hypothetical: NO
  anti-sense: NO
ttgacacccccaggagtgaatgatcccatcgcttccagggaagagcgcaccaaagccttattgaaagattgcgatgtggtgtttattgtaagcccttctggtcagtttttaacggatagcgatatgagtttgtttgacagggtttctcataaagaaggccttcaagaaatttattttgtggcaagccaagccgacagcgctgttggctctatgagtgaggtagaaaaatccaaccatcacctccctacagcctttgaaaacgcgcaaaaatccctttcatctcaattaaataatatcatgggagcgttgattgaaaaataccctaaccaacgagaggtttttgaaaaagcgaaacaaaatggcgtcattttgacttcaggggtttgctttagcatgcacaaagattttgaaaaccaagcttcttgggaaagaaaccaaaaaacagaagagtatcacaatgccttacggaatttaagagattcttatcctgacgcttttagtagcgatgataagtctaaagaaagctcactctttttaatcaatatgggcgcgattgaagagcgtttaaaaaaagccgcccaagagaaagaaaaaatcatgtctcaaaaattgcaaaattatgcagagagccaagcaaacaacctccattcattcataacgcagttgttgcaagatttggaagaagaaaaaagagggttaaaaacgctgacattagcgctatcaaaaagcaaa

SEQ ID NO: 3972 - DNA (genomic), 681 bp, Helicobacter pylori; double-stranded, circular
  misc_feature (B) LOCATION 1...681
  hypothetical: NO
  anti-sense: NO
atgagcattaatttttttaatgacaaatttagcacgactgagaaccaccacaatatagagccggtgagcttaaaagaacgctacgatttgatcgctcgtattttaaacgccaaaacaagcaatgaagggctagaagaataccagagcattttagccaacgagtttttaaagttcgctagcggcgtggattcgctcaaagaaaaggaaatagcgttactgatgctccaagaaatccaaaaagaattgcaattggtggcgagctaccctagtttgttccaaaaaaccatcgttgcggtggggggagggtttagcgcgggcaaatccacttttttaaacaacttgttgggcttgaaattaaaactccctgaagacatgaatcccaccacagctatccccacttattgcttaaagggtgaaagggaagttttaatggggttttctcaaaatggaggcatggtggaattaccccatctcgcttttgatcatcagtttttaaaatcccttggctttaatctcaaagaaatcatgcccttcatgctcttaagcgctcctagcgtgccttttgaatttttgtgcttcatagacacgcctggttttaaccctgccaatcaaggctatacgggtggggacaaagaagcctctaaagaatccctaaagcacgccaaacacattaaaagataa

SEQ ID NO: 3973 - DNA (genomic), 792 bp, Helicobacter pylori; double-stranded, circular
  misc_feature (B) LOCATION 1...792
  hypothetical: NO
  anti-sense: NO
tggggtgctttcaaaactccaacaagacatgcaaaatttgcacaatcaagcgcaaaacaaagcgcaatccatcgctcaattagacgcaaaaatcaacgctttaaaggagatccaatgagcattaatttttttaatgacaaatttagcacgactgagaaccaccacaatatagagccggtgagcttaaaagaacgctacgatttgatcgctcgtattttaaacgccaaaacaagcaatgaagggctagaagaataccagagcattttagccaacgagtttttaaagttcgctagcggcgtggattcgctcaaagaaaaggaaatagcgttactgatgctccaagaaatccaaaaagaattgcaattggtggcgagctaccctagtttgttccaaaaaaccatcgttgcggtggggggagggtttagcgcgggcaaatccacttttttaaacaacttgttgggcttgaaattaaaactccctgaagacatgaatcccaccacagctatccccacttattgcttaaagggtgaaagggaagttttaatggggttttctcaaaatggaggcatggtggaattaccccatctcgcttttgatcatcagtttttaaaatcccttggctttaatctcaaagaaatcatgcccttcatgctcttaagcgctcctagcgtgccttttgaatttttgtgcttcatagacacgcctggttttaaccctgccaatcaaggctatacgggtggggacaaagaagcctctaaagaatccctaaagcacgccaaacacattaaaaga

SEQ ID NO: 3974 - DNA (genomic), 399 bp, Helicobacter pylori; double-stranded, circular
  misc_feature (B) LOCATION 1...399
  hypothetical: NO
  anti-sense: NO
atgaagtttagggaagcgtatgaagaatttatcttgcatttcatcaacaatattagagttggcttggaagaaacgttgaagaaagctatccaaacggctaaggtgggcgctgaagaagagggagtagagcgttacactgaaagagtggagcaaggcggtttgggaggttgggcaagatggtttggtagcgtttttggtgaaaaagattggggttatgaggaagtaggacgcacaagagcagtgattaaagccggagcggtgcttgattatttgacagagatgcatggaagctgcgaaggagctttgaatgacagcgctaattctccaaagtcgctttcacaaaagaactctacgctaaagtctttcctcaattgcgtgaaatcatctctgatgatttga

SEQ ID NO: 3975 - DNA (genomic), 465 bp, Helicobacter pylori; double-stranded, circular
  misc_feature (B) LOCATION 1...465
  hypothetical: NO
  anti-sense: NO
agagcgtttaaaaaaagccgcccaagagaaagaaaaaatcatgtctcaaaaattgcaaaattatgcagagagccaagcaaacaacctccattcattcataacgcagttgttgcaagatttggaagaagaaaaaagagggttaaaaacgctgacattagcgctatcaaaaagcaaatagaggcttatgaaaaactctctggtaacattgaaatgaagtttagggaagcgtatgaagaatttatcttgcatttcatcaacaatattagagttggcttggaagaaacgttgaagaaagctatccaaacggctaaggtgggcgctgaagaagagggagtagagcgttacactgaaagagtggagcaggcggttggaggttgtcacatggcttggagctttttggtgaaaagatggagttatagaagtaggcgcacaagcagtgattacgccgggcggtgcttgattatt

SEQ ID NO: 3976 - DNA (genomic), 318 bp, Helicobacter pylori; double-stranded, circular
  misc_feature (B) LOCATION 1...318
  hypothetical: NO
  anti-sense: NO
tgtgctgttagaaaaatcaaattgtctttgggggtgggacaattagcgtgcgtcagaagtgctcaaatgattaaagatttagcgtttgtgtgcggatcgggagcgtccatgttttcttctttaaaagcgcaaagctgtttgattacaggcgatgtgaaataccatgacgctatgatcgctcaatctttagggataagcttgattgacgccacgcattattatagcgaaaggggttttgcgctgattgtggctgaaattttgcattcttttaattatttggttacaatagagaattttaaaaaccccttgcaaatcatt

SEQ ID NO: 3977 - DNA (genomic), 465 bp, Helicobacter pylori; double-stranded, circular
  misc_feature (B) LOCATION 1...465
  hypothetical: NO
  anti-sense: NO
caaaggcttaaaatggcgttagtcaaagaagtgttggaagttttgaaccgcctttcgccttttgaactccaagaatcgtgggataatagcgggctgaatgtggggagtggaaatagcgagtttagccagattatcgcatgcttagaaatcacgcttcaaatcgctctaaacgctcaagaaaacgccctaatcatcacgcaccaccctttaattttcaagcccttaaaaacgcttaatgatgaggcgtatccggggaatattttaaaaatcctaatccaaaaaaacatttcagtcatcagcatgcacacgaattttgacaaaacgcatttaaacaagcatttcgcgcgcgcgcttttaaggtttgatggtttgatagaaaaaggccttatgttagtgaaagaaaacgctaatatagaatttgatgtgctgttagaaaaatcaaattgtctttgggggtgggacaat

SEQ ID NO: 3978 - DNA (genomic), 732 bp, Helicobacter pylori; double-stranded, circular
  misc_feature (B) LOCATION 1...732
  hypothetical: NO
  anti-sense: NO
atggcgttagtcaaagaagtgttggaagttttgaaccgcctttcgccttttgaactccaagaatcgtgggataatagcgggctgaatgtggggagtggaaatagcgagtttagccagattatcgcatgcttagaaatcacgcttcaaatcgctctaaacgctcaagaaaacgccctaatcatcacgcaccaccctttaattttcaagcccttaaaaacgcttaatgatgaggcgtatccggggaatattttaaaaatcctaatccaaaaaaacatttcagtcatcagcatgcacacgaattttgacaaaacgcatttaaacaagcatttcgcgcgcgcgcttttaaggtttgatggtttgatagaaaaaggccttatgttagtgaaagaaaacgctaatatagaatttgatgtgctgttagaaaaaatcaaattgtctttaggggtgggacaattagcgtgcgtcaaaagttctcaaatgattaaagatttagcgtttgtgtgcggatcgggagcgtccatgttttcttctttaaaagcgcaaagctgtttgattacaggcgatgtgaaataccatgacgctatgatcgctcaatctttagggataagcttgattgacgccacgcattattatagcgaaaggggttttgcgctgattgtggctgaaattttgcattcttttaattatttggttacaatagagaattttaaaaaccccttgcaaatcatttaa

SEQ ID NO: 3979 - DNA (genomic), 321 bp, Helicobacter pylori; double-stranded, circular
  misc_feature (B) LOCATION 1...321
  hypothetical: NO
  anti-sense: NO
ttgcgggagtggagggatttaaaaaacacaccggaagaagaaaattacagagaatttgaagaaatcaaaaaaatggtgttgtattttagggattggtgcatgtttcgtttagattggtataaattgagacaagaagagatccaaaaacatagagatttgatggataatgataatagactgctccaattagactattctttaaaaaatttgtcaatacttaaaagatttaaagaaataaacgaaaaaaattatcaagaccacttaaacaatgagaagcttcaaaacgatttgcgagagtggaggcgatcaaaacggcggtga

SEQ ID NO: 3980 - DNA (genomic), 405 bp, Helicobacter pylori; double-stranded, circular
  misc_feature (B) LOCATION 1...405
  hypothetical: NO
  anti-sense: NO
aaaatttgcaaacgcttagggagacttaaagaagaagcggacaacaactatcaagaatctttaaacgatgagaagcttcaaaataatttgcgggagtggagggatttaaaaaacacaccggaagaagaaaattacagagaatttgaagaaatcaaaaaaatggtgttgtattttagggattggtgcatgtttcgtttagattggtataaattgagacaagaagagatccaaaaacatagagatttgatggataatgataatagactgctccaattagactattctttaaaaaatttgtcaatacttaaaagatttaaagaaataaacgaaaaaaattatcaagaccacttaaacaatgagaagcttcaaaacgatttgcgagagtggaggcgatcaaaacggcgg

SEQ ID NO: 3981 - DNA (genomic), 507 bp, Helicobacter pylori; double-stranded, circular
  misc_feature (B) LOCATION 1...507
  hypothetical: NO
  anti-sense: NO
gtgtgtttggcgtatgaaaaggctattaagcaagacgctagtaaattcaaacgctaccaaaaggctttgcattctgtcaaactggatttgatgcaaaaaggctttgatgattttagcgatgctacctttaataaaattcattcgctcaaaaaagaattttctgagcaagagcgatccaaagaagagggtttagtgcgattgaacgaggtgattggcttgtttaaagaaagcgttgataaagtctttgatcgcgtgagcgctttcacttgggaaaaatacaaagcaaaaaacgaagacgaagaggacgacgaagcaaactacagggaatttgaaaaaatcaaaaaaatggcgctgtattttagggattattgcatgttttgtttagattggtatgaattgagccaagaaaaaatccaagaagaatatagagattgtatagattatgataataaactgctccaactgcactactctttagaaaatttgcaaacgcttagggagacttaa

SEQ ID NO: 3982 - DNA (genomic), 693 bp, Helicobacter pylori; double-stranded, circular
  misc_feature (B) LOCATION 1...693
  hypothetical: NO
  anti-sense: NO
agcacgccaaacacattaaaagataatggcattgagtttaaagggatttgcgcttacagcgctacaaggtatcaagaatacaaagagttcagcgaaaaaagcaaagtttttaactcgcttgaaaaatttttaaaaaaattaaatcaaaggagcgagaaacaaaacgaaattttaagcgttttatacggtgtgtgtttggcgtatgaaaaggctattaagcaagacgctagtaaattcaaacgctaccaaaaggctttgcattctgtcaaactggatttgatgcaaaaaggctttgatgattttagcgatgctacctttaataaaattcattcgctcaaaaaagaattttctgagcaagagcgatccaaagaagagggtttagtgcgattgaacgaggtgattggcttgtttaaagaaagcgttgataaagtctttgatcgcgtgagcgctttcacttgggaaaaatacaaagcaaaaaacgaagacgaagaggacgacgaagcaaactacagggaatttgaaaaaatcaaaaaaatggcgctgtattttagggattattgcatgttttgtttagattggtatgaattgagccaagaaaaaatccaagaagaatatagagattgtatagattatgataataaactgctccaactgcactactctttagaaaatttgcaaacgcttagggagact

SEQ ID NO: 3983 - DNA (genomic), 885 bp, Helicobacter pylori; double-stranded, circular
  misc_feature (B) LOCATION 1...885
  hypothetical: NO
  anti-sense: NO
gtgtgtttggcgtatgaaaaggctattaagcaagacgctagtaaattcaaacgctaccaaaaggctttgcattctgtcaaactggatttgatgcaaaaaggctttgatgattttagcgatgctacctttaataaaattcattcgctcaaaaaagaattttctgagcaagagcgatccaaagaagagggtttagtgcgattgaacgaggtgattggcttgtttaaagaaagcgttgataaagtctttgatcgcgtgagcgctttcacttgggaaaaatacaaagcaaaaaacgaagacgaagaggacgacgaagcaaactacagggaatttgaaaaaatcaaaaaaatggcgctgtattttagggattattgcatgttttgtttagattggtatgaattgagccaagaaaaaatccaagaagaatatagagattgtatagattatgataataaactgctccaactgcactactctttagaaaatttgcaaacgcttagggagcttaaagaagaagcggacaacaactatcaagaatctttaaacgatgagaagcttcaaaataatttgcgggagtggagggatttaaaaaacacaccggaagaagaaaattacagagaatttgaagaaatcaaaaaaatggtgttgtattttagggattggtgcatgtttcgtttagattggtataaattgagacaagaagagatccaaaaacatagagatttgatggataatgataatagactgctccaattagactattctttaaaaaatttgtcaatacttaaaagatttaaagaaataaacgaaaaaaattatcaagaccacttaaacaatgagaagcttcaaaacgatttgcgagagtggaggcgatcaaaacggcggtga

SEQ ID NO: 3984 - DNA (genomic), 348 bp, Helicobacter pylori; double-stranded, circular
  misc_feature (B) LOCATION 1...348
  hypothetical: NO
  anti-sense: NO
cttttaaaaggtttattgactttgttgcctaatatcatcgcttcattctttagaaacgaggaaaaagagcgggcgaaattagaaaatctgattgaagtcaaagtgataccagaggttcaatacaagcttaaaaaagttttaccgggcttgtttaatgaatgcttggaaaattccctaaaaggtttaaaagatcggtgcgaattagaaatcacgcataaaaaacaagaaatcgcgctcgctcaaaaggaaaaagaaaaacaccttaacgatttagaagatcaaaaacaaatcttagaaaacaagatcaacgctttaagcgatctagaacaacaatatttaaaggatcaa

SEQ ID NO: 3985 - DNA (genomic), 345 bp, Helicobacter pylori; double-stranded, circular
  misc_feature (B) LOCATION 1...345
  hypothetical: NO
  anti-sense: NO
ttaaaaggtttattgactttgttgcctaatatcatcgcttcattctttagaaacgaggaaaaagagcgggcgaaattagaaaatctgattgaagtcaaagtgataccagaggttcaatacaagcttaaaaaagttttaccgggcttgtttaatgaatgcttggaaaattccctaaaaggtttaaaagatcggtgcgaattagaaatcacgcataaaaaacaagaaatcgcgctcgctcaaaaggaaaaagaaaaacaccttaacgatttagaagatcaaaaacaaatcttagaaaacaagatcaacgctttaagcgatctagaacaacaatatttaaaggatcaa

SEQ ID NO: 3986 - DNA (genomic), 558 bp, Helicobacter pylori; double-stranded, circular
  misc_feature (B) LOCATION 1...558
  hypothetical: NO
  anti-sense: NO
ggagttaaaaaccttttagagtttgacaaaggccttagctttattttgagtaaaacgaatttaaggacgccttcgcaagtgggagaaatctctcactacattcaagagcaaatccaggatcaccttgatttgacaacgcatcttatccattccaataaagacaataacgctcttttagaggtggcggataaaatagacgctgaaaagctttttagcgctttgtatttgaaacgattgaagtttttaaattcccagttacaaaacagcctaaaaagcgtgattgaaagctttgattactctaaagaaaaggctttagaagagatcaaggctttggatttgggcgttaaagacattgaaaaaacctatgaaaaattaagggctaatttagaagaagagtattctagcgtggctgtaaattctgtggttaaaaaagtcatagaagaggtcagggatcaaaagccctatttagcctctttaatcgacaagcctaacgagttcaatagcgaaatagaaagcgtcatgcaacgaaacttgatcgaaaacgctaaattaagagat

SEQ ID NO: 3987 - DNA (genomic), 1023 bp, Helicobacter pylori; double-stranded, circular
  misc_feature (B) LOCATION 1...1023
  hypothetical: NO
  anti-sense: NO
gtgggagaaatctctcactacattcaagagcaaatccaggatcaccttgatttgacaacgcatcttatccattccaataaagacaataacgctcttttagaggtggcggataaaatagacgctgaaaagctttttagcgctttgtatttgaaacgattgaagtttttaaattcccagttacaaaacagcctaaaaagcgtgattgaaagctttgattactctaaagaaaaggctttagaagagatcaaggctttggatttgggcgttaaagacattgaaaaaacctatgaaaaattaagggctaatttagaagaagagtattctagcgtggctgtaaattctgtggttaaaaaagtcatagaagaggtcagggatcaaaagccctatttagcctctttaatcaacaagcctaacgagttcaatagcgaaatagaaagcatcatgcaacaaaacttgatcaaaaacgctaaattagagattgaaaagatcaacctttctttttcaaaagatttttgcgcggaatttgcaagcttgaacaacacgcagctttctagcggtttgtctgtgaatttagagcatggccttgaattagggatcaacgccttaagcgtgatcttagccaagaacccggttacaagacccttcgcgctgatcttgcaagggttaaaacctcttttaaaagatttattgactttgttgcctaatatcatcgcttcattctttagaaacgaggaaaaagagcgggcgaaattagaaaatctgattgaagtcaaagtgataccagaggttcaatacaagcttaaaaaagttttaccgggcttgtttaatgaatgcttggaaaattccctaaaaggtttaaaagatcggtgcgaattagaaatcacgcataaaaaacaagaaatcgcgctcgctcaaaaggaaaaagaaaaacaccttaacgatttagaagatcaaaaacaaatcttagaaaacaagatcaacgctttaagcgatctagaacaacaatatttaaaggatcaataa

SEQ ID NO: 3988 - DNA (genomic), 1056 bp, Helicobacter pylori; double-stranded, circular
  misc_feature (B) LOCATION 1...1056
  hypothetical: NO
  anti-sense: NO
ttgagtaaaacgaatttaaggacgccttcgcaagtgggagaaatctctcactacattcaagagcaaatccaggatcaccttgatttgacaacgcatcttatccattccaataaagacaataacgctcttttagaggtggcggataaaatagacgctgaaaagctttttagcgctttgtatttgaaacgattgaagtttttaaattcccagttacaaaacagcctaaaaagcgtgattgaaagctttgattactctaaagaaaaggctttagaagagatcaaggctttggatttgggcgttaaagacattgaaaaaacctatgaaaaattaagggctaatttagaagaagagtattctagcgtggctgtaaattctgtggttaaaaaagtcatagaagaggtcagggatcaaaagccctatttagcctctttaatcaacaagcctaacgagttcaatagcgaaatagaaagcatcatgcaacaaaacttgatcaaaaacgctaaattagagattgaaaagatcaacctttctttttcaaaagatttttgcgcggaatttgcaagcttgaacaacacgcagctttctagcggtttgtctgtgaatttagagcatggccttgaattagggatcaacgccttaagcgtgatcttagccaagaacccggttacaagacccttcgcgctgatcttgcaagggttaaaacctcttttaaaagatttattgactttgttgcctaatatcatcgcttcattctttagaaacgaggaaaaagagcgggcgaaattagaaaatctgattgaagtcaaagtgataccagaggttcaatacaagcttaaaaaagttttaccgggcttgtttaatgaatgcttggaaaattccctaaaaggtttaaaagatcggtgcgaattagaaatcacgcataaaaaacaagaaatcgcgctcgctcaaaaggaaaaagaaaaacaccttaacgatttagaagatcaaaaacaaatcttagaaaacaagatcaacgctttaagcgatctagaacaacaatatttaaaggatcaataa

SEQ ID NO: 3989 - DNA (genomic), 756 bp, Helicobacter pylori; double-stranded, circular
  misc_feature (B) LOCATION 1...756
  hypothetical: NO
  anti-sense: NO
acttattattgtaaaatggtgagttttacaatcaatgagattaggaatttaatggaaattgcagtatttggtggcggggcgtgggggagggctttagcctttgcttttggagaaaagaatgaagtgaaaatcatttcaaggcgcgatctaaacgagccgctaaaaaagctcaatgacgccttgatttctaaaggttctgcccccatagagcaagtggatttagaaagaggcttaaaagcggcactctatgtcatcgctattagcgtgcagcacttaagggaatggtttcaaaacgcttctttacccaaaaacgctaaggttttaatcgcttctaaagggatagaggtgttaaataaggcgtttgtgagcgagatcgcaaaggattttatcgatcctaacgctttgtgttttttagccggcccgagttttgcggctgaaatcattcaaggcctgccttgcgcgttagtcatccattccaataatcaggctttagcgctagaatttgccaataaaaccccctcttttatcagagcctacgcccaacaagacatcatagggggtgaaatcgccggggcgtataaaaacgtgatagccattgcggggggggtttgtgatggcttgaaattaggcaatagcgctaaagcgagtttgttgtctaggggtttagtggaaatgcaacgctttggggcgttctttgggggcaagacagagacttttttagggctttctggggctggggagatcgtttttaaccgc

SEQ ID NO: 3990 - DNA (genomic), 777 bp, Helicobacter pylori; double-stranded, circular
  misc_feature (B) LOCATION 1...777
  hypothetical: NO
  anti-sense: NO
atggaaattgcagtatttggtggcggggcgtgggggagggctttagcctttgcttttggagaaaagaatgaagtgaaaatcatttcaaggcgcgatctaaacgagccgctaaaaaagctcaatgacgccttgatttctaaaggttctgcccccatagagcaagtggatttagaaagaggcttaaaagcggcactctatgtcatcgctattagcgtgcagcacttaagggaatggtttcaaaacgcttctttacccaaaaacgctaaggttttaatcgcttctaaagggatagaggtgttaaataaggcgtttgtgagcgagatcgcaaaggattttatcgatcctaacgctttgtgttttttagccggcccgagttttgcggctgaaatcattcaaggcctgccttgcgcgttagtcatccattccaataatcaggctttagcgctagaatttgccaataaaaccccctcttttatcagagcctacgcccaacaagacatcatagggggtgaaatcgccggggcgtataaaaacgtgatagccattgcggggggggtttgtgatggcttgaaattaggcaatagcgctaaagcgagtttgttgtctaggggtttagtggaaatgcaacgctttggggcgttctttgggggcaagacagagacttttttagggctttctggggctggggatttgtttttaaccgctaattctattttatccaggaattatcgtgtgggcatgggtctatcccaaaacaagcctttagaggtggtttta

SEQ ID NO: 3991 - DNA (genomic), 975 bp, Helicobacter pylori; double-stranded, circular
  misc_feature (B) LOCATION 1...975
  hypothetical: NO
  anti-sense: NO
atggtgagttttacaatcaatgagattaggaatttaatggaaattgcagtatttggtggcggggcgtgggggagggctttagcctttgcttttggagaaaagaatgaagtgaaaatcatttcaaggcgcgatctaaacgagccgctaaaaaagctcaatgacgccttgatttctaaaggttctgcccccatagagcaagtggatttagaaagaggcttaaaagcggcactctatgtcatcgctattagcgtgcagcacttaagggaatggtttcaaaacgcttctttacccaaaaacgctaaggttttaatcgcttctaaagggatagaggtgttaaataaggcgtttgtgagcgagatcgcaaaggattttatcgatcctaacgctttgtgttttttagccggcccgagttttgcggctgaaatcattcaaggcctgccttgcgcgttagtcatccattccaataatcaggctttagcgctagaatttgccaataaaaccccctcttttatcagagcctacgcccaacaagacatcatagggggtgaaatcgccggggcgtataaaaacgtgatagccattgcggggggggtttgtgatggcttgaaattaggcaatagcgctaaagcgagtttgttgtctaggggtttagtggaaatgcaacgctttggggcgttctttgggggcaagacagagacttttttagggctttctggggctggggatttgtttttaaccgctaattctattttatccaggaattatcgtgtgggcttgggtctagcccaaaacaagcctttagaggtggttttagaagaattgggcgaagtggctgagggggtgaaaacgaccaacgctattgtggaaatcgctagaaaatacggcatttatacgcccattgcgagcgaattagccttgcttttaaagggtaagagtgtgctagagagcatgaacgatttgatcagacgcgcttaa

SEQ ID NO: 3992 - DNA (genomic), 456 bp, Helicobacter pylori; double-stranded, circular
  misc_feature (B) LOCATION 1...456
  hypothetical: NO
  anti-sense: NO
ttgatgcgttgcgtggtgtattctatcgctaaaaattcgcccctagagttagtgaaaagctatcaaaagcaatgcaagcgatttgattgcgagttggaattagtggatttattccctaaaaataccgccaacgctcaaaaagtttctaaagagctcgctcaaaaaagctactctctagcctttgagccgtatttaagccctaaggcaaaaaatattgccttacaccctgaagctcaaaggggcgacagctttgcgtttagtaaaatgttagaaaatcatcttaatattaatttttttatcgctggagcgtatgggtttgaagaaaagtttttaaaggattgtcaagcttggagtttgagcgagatgacttttagccatgaagtggctaaaattgtcttgtgcgagcaaatttatagggctttgagcattatttttaagcatccataccataaatag

SEQ ID NO: 3993 - DNA (genomic), 489 bp, Helicobacter pylori; double-stranded, circular
  misc_feature (B) LOCATION 1...489
  hypothetical: NO
  anti-sense: NO
cgcataagacttcaaagattttttaaagttttaagattgatgcgttgcgtggtgtattctatcgctaaaaattcgcccctagagttagtgaaaagctatcaaaagcaatgcaagcgatttgattgcgagttggaattagtggatttattccctaaaaataccgccaacgctcaaaaagtttctaaagagctcgctcaaaaaagctactctctagcctttgagccgtatttaagccctaaggcaaaaaatattgccttacaccctgaagctcaaaggggcgacagctttgcgtttagtaaaatgttagaaaatcatcttaatattaatttttttatcgctggagcgtatgggtttgaagaaaagtttttaaaggattgtcaagcttggagtttgagcgagatgacttttagccatgaagtggctaaaattgtcttgtgcgagcaaatttatagggctttgagcattatttttaagcatccataccataaa

SEQ ID NO: 3994 - DNA (genomic), 360 bp, Helicobacter pylori; double-stranded, circular
  misc_feature (B) LOCATION 1...360
  hypothetical: NO
  anti-sense: NO
ggggaaacatcgggaagatcaagcgtgtcggtggtgttagacaaaggctctaacacgattttagccaccgccttattagatgagggcaattaccatgtgggggaaatggtagaaatgtatattcaaggctcacagcctaaagactcggttttgatcccttcaaacgctttgattagaaacgggaaggattacctggtgtttgtgaggacgcctaaaggttttaggcctgtagtggttcaagttttagaagagcgcagcaagatttttatcgtgaacgctcagaatttacaccctaatgacagcgtggcagtggggtcattgatagggttaaaaggcatgatcaacaatttaggggaagaa

SEQ ID NO: 3995 - DNA (genomic), 429 bp, Helicobacter pylori; double-stranded, circular
  misc_feature (B) LOCATION 1...429
  hypothetical: NO
  anti-sense: NO
gaaaaaaacttgcaacccatggggttaaaggtgattaaattagataaagaaatctttagtaaagggcttccttttaacgcttatattgattttgatagtaaaagctctgtggtgcagagcttgagttttgatgcgtctgtggtcgctgtttataaaagagagggcgagcaggtgaaggctggagatgcgatctgtgaagtgagctctattgatttgagcaatttgtattttgaattgcaaaacaaccaaaataaattaaaaattgctaaagatattactaaaaaagatttagaactttatagggtcggggtgatccccaaaagggagtatcaaactagctttttagccagtcaggaaatgggcttaaaggtggaacaattagagagcgcgtttaaaagctttggcgtggattctaaaaaccctaaaggg

SEQ ID NO: 3996 - DNA (genomic), 426 bp, Helicobacter pylori; double-stranded, circular
  misc_feature (B) LOCATION 1...426
  hypothetical: NO
  anti-sense: NO
aaaaacttgcaacccatggggttaaaggtgattaaattagataaagaaatctttagtaaagggcttccttttaacgcttatattgattttgatagtaaaagctctgtggtgcagagcttgagttttgatgcgtctgtggtcgctgtttataaaagagagggcgagcaggtgaaggctggagatgcgatctgtgaagtgagctctattgatttgagcaatttgtattttgaattgcaaaacaaccaaaataaattaaaaattgctaaagatattactaaaaaagatttagaactttatagggtcggggtgatccccaaaagggagtatcaaactagctttttagccagtcaggaaatgggcttaaaggtggaacaattagagagcgcgtttaaaagctttggcgtggattctaaaaaccctaaaggg

SEQ ID NO: 3997 - DNA (genomic), 978 bp, Helicobacter pylori; double-stranded, circular
  misc_feature (B) LOCATION 1...978
  hypothetical: NO
  anti-sense: NO
ttgcaacccatggggttaaaggtgattaaattagataaagaaatctttagtaaagggcttccttttaacgcttatattgattttgatagtaaaagctctgtggtgcagagcttgagttttgatgcgtctgtggtcgctgtttataaaagagagggcgagcaggtgaaggctggagatgcgatctgtgaagtgagctctattgatttgagcaatttgtattttgaattgcaaaacaaccaaaataaattaaaaattgctaaagatattactaaaaaagatttagaactttatagggccggggtgatccctaaaagggagtatcaaactagctttttagccagtcaggaaatgggcttaaaggtggaacaattagagagcgcgtttaaaagctttggcgtggatcctaaaaaccctaaagggcattatggttttaggattgtggctagcgatagcggtcttttggcgttagcgcctaaaaatgtgggcgagaagattttagctttcactagctatgtgcgtatttcaaaaagcgatgatttgatcgctcaaatcaaattgcctgtaggcgtttctaaatccattaaaagagattcgccggtctataatgaagagggggaaaaaatcgggaagattcaaagcgtttcggtggtgttagacaaaggctctaacacgattttagccaccgctttattagatgagggcaattaccatgtgggggaaatggtagaaatgtatattcaaggctcacagcctaaagactcggttttgatcccttcaaacgctttgattagaaacgggaaggattacctggtgtttgtgaggacgcctaaaggttttaggcctgtagtggttcaagttttagaagagcgcagcaagatttttatcgtgaacgctcagaatttacaccctaatgacagcgtggcagtggggtcattgatagggttaaaaggcatgatcaacaatttaggggaagaataa

SEQ ID NO: 3998 - DNA (genomic), 1080 bp, Helicobacter pylori; double-stranded, circular
  misc_feature (B) LOCATION 1...1080
  hypothetical: NO
  anti-sense: NO
ttgaagcgggcgttattgtggtttatgttaatgggcgttttttcaatgggtgtttctttaaaagccaaagagtatccagaaatcgttttagaagaaaaaaacttgcaacccatggggttaaaggtgattaaattagataaagaaatctttagtaaagggcttccttttaacgcttatattgattttgatagtaaaagctctgtggtgcagagcttgagttttgatgcgtctgtggtcgctgtttataaaagagagggcgagcaggtgaaggctggagatgcgatctgtgaagtgagctctattgatttgagcaatttgtattttgaattgcaaaacaaccaaaataaattaaaaattgctaaagatattactaaaaaagatttagaactttatagggccggggtgatccctaaaagggagtatcaaactagctttttagccagtcaggaaatgggcttaaaggtggaacaattagagagcgcgtttaaaagctttggcgtggatcctaaaaaccctaaagggcattatggttttaggattgtggctagcgatagcggtcttttggcgttagcgcctaaaaatgtgggcgagaagattttagctttcactagctatgtgcgtatttcaaaaagcgatgatttgatcgctcaaatcaaattgcctgtaggcgtttctaaatccattaaaagagattcgccggtctataatgaagagggggaaaaaatcgggaagattcaaagcgtttcggtggtgttagacaaaggctctaacacgattttagccaccgctttattagatgagggcaattaccatgtgggggaaatggtagaaatgtatattcaaggctcacagcctaaagactcggttttgatcccttcaaacgctttgattagaaacgggaaggattacctggtgtttgtgaggacgcctaaaggttttaggcctgtagtggttcaagttttagaagagcgcagcaagatttttatcgtgaacgctcagaatttacaccctaatgacagcgtggcagtggggtcattgatagggttaaaaggcatgatcaacaatttaggggaagaataa

SEQ ID NO: 3999 - DNA (genomic), 270 bp, Helicobacter pylori; double-stranded, circular
  misc_feature (B) LOCATION 1...270
  hypothetical: NO
  anti-sense: NO
cgatttagaagatcaaaaacaaatcttagaaaacaagatcaacgctttaagcgatctagaacaacaatatttaaaggatcaataatgaacgcgcaagaactcattaaaaaaagcactttaattgaaaaggtgctacaagaacaaggtttgcaagaaaaagcgaagccttttatgagcgataacgctgtgattaaaaccgaagagttagagaaaacgctaaaagaaatgcaggctgaagatagggctcttaagtcggtatcatcgggcatg

SEQ ID NO: 4000 - DNA (genomic), 621 bp, Helicobacter pylori; double-stranded, circular
  misc_feature (B) LOCATION 1...621
  hypothetical: NO
  anti-sense: NO
gtcggtatcatcgggcatgtgaaagcgggcaaaagctcgctcttaaacgctttgatttttgagggtgtagaggttttacctaaagcggcaacgcccatgaccgctagccttaccattttaaaatacgccaataccctgagtgctgaagtggagttttatagcctaaaggatattgcagagctagaaaacgaacatgaaaagtatgaaagggagtttaacaggattgttgaagaagaagtcaaaaagcaaaaagaaaaacagagtctttcaaacagagctaaagagggaattaggaatgttggtaacaaaatgcttggcagaaataaaagcgatgaagaaatagaaaaaagggctgaaaggatcgctaaaaacgagctagaaaaggacacaaaactcgtttcatcacacgatcaatacgaaaaaataaaaaaaagcggatcgctcaacacgaaaaacttagatccgcgcattcaagccaacagcttacaagagctgaatcaaaagttgctccaattcgtgggcgcggacgggaagtatatgccctacactaaagcggtgcgaatttctttgaataaccccaaccttaaggatttggaagtgattgacacccccaggagtgaa

SEQ ID NO: 4001 - DNA (genomic), 792 bp, Helicobacter pylori; double-stranded, circular
  misc_feature (B) LOCATION 1...792
  hypothetical: NO
  anti-sense: NO
atgaacgcgcaagaactcattaaaaaaagcactttaattgaaaaggtgctacaagaacaaggtttgcaagaaaaagcgaagccttttatgagcgataacgctgtgattaaaaccgaagagttagagaaaacgctaaaagaaatgcaggctgaagatagggatcttaaagtcggtatcatcgggcatgtgaaagcgggcaaaagctcgctcttaaacgctttgatttttgagggtgtagaggttttacctaaagcggcaacgcccatgaccgctagccttaccattttaaaatacgccaataccctgagtgctgaagtggagttttatagcctaaaggatattgcagagcttgaaaacgaacatgaaaagtatgaaagggagtttaacaggattgttgaagaagaagtcaaaaagcaaaaagaaaaacagagtctttcaaacagagctaaagagggaattaggaatgttggtaacaaaatgcttggcagaaataaaagcgatgaagaaatagaaaaaagggctgaaaggatcgctaaaaacgagctagaaaaggacacaaaactcgtttcatcacacgatcaatacgaaaaaataaaaaaaagcggatcgctcaacacgaaaaacttagatccgcgcattcaagccaacagcttacaagagctgaatcaaaagttgctccaattcgtgggcgcggacgggaagtatatgccctacactaaagcggtgcgaatttctttgaataaccccaaccttaaggatttggaagtgattgacacccccaggagtgaatga

SEQ ID NO: 4002 - DNA (genomic), 348 bp, Helicobacter pylori; double-stranded, circular
  misc_feature (B) LOCATION 1...348
  hypothetical: NO
  anti-sense: NO
aggataaacatggaaaaagcttacaaattattgagcgttcaagaaaacatttcgcataaaaaagctaaagctctgatcgattcagggttagtgagcataggggggcagaaattgatggttgccagaaaggaattgccccaaaacacgcgctttagcgtccaaaaagttgaaaaacccagcgtgatttttgaagatgaaaacattctagccctttttaaaccccttattatagagagctatgatttagtttcttttttcaaaggttgggcgttgttgcaccgcttggataaagaaacaagcgggatgattttattggtgggaagaaaattcagaattccatttaaaagc

SEQ ID NO: 4003 - DNA (genomic), 429 bp, Helicobacter pylori; double-stranded, circular
  misc_feature (B) LOCATION 1...429
  hypothetical: NO
  anti-sense: NO
ttttattggtgggaagaaaattcagaattccatttaaaagctaaaaaggcttttaaagacagggcggttaaaaaggagtatttagcgatcgttcaaggcatcatagaagaagagcgagagatcaacgcccccattcttaccattaaaaccactaaagctttcagtaaaatctctaaaaaagggcaagaagcggttacgattatcacgcccttaaaaatcatcaacaaaaaaacccttttaaaagtggggatcaaaaccggaagaacccaccagatcagagtccatttaaagcatatcaaccaccccattataggcgatacgctctataataacgagccaagttcagccaaacgcttgatgctccatgcgcataaaatcgcgctgttagggtatgaatttgaagcaatcgctcctaaagaatttgaaatt

SEQ ID NO: 4004 - DNA (genomic), 729 bp, Helicobacter pylori; double-stranded, circular
  misc_feature (B) LOCATION 1...729
  hypothetical: NO
  anti-sense: NO
atggaaaaagcttacaaattattgagcgttcaagaaaacatttcgcataaaaaagctaaagctctgatcgattcagggttagtgagcataggggggcagaaattgatggttgccagaaaggaattgccccaaaacacgcgctttagcgtccaaaaagttgaaaaacccagcgtgatttttgaagatgaaaacattctagccctttttaaacccccttttatagagagctatgatttagtttcttttttcaaaggttgggcgttgttgcaccgcttggataaagaaacaagcggggtgattttattggtgaaagaaaattcagaattccatttaaaagctaaaaaggcttttaaagacagggcggttaaaaaggagtatttagcgatcgttcaaggcatcatagaagaagagcgagagatcaacgcccccattcttaccattaaaaccactaaagctttcagtaaaatctctaaaaaagggcaagaagcggttacgattatcacgcccttaaaaatcatcaacaaaaaaacccttttaaaagtggggatcaaaaccggaagaacccaccagatcagagtccatttaaagcatatcaaccaccccattataggcgatacgctctataataacgagccaagttcagccaaacgcttgatgctccatgcgcataaaatcgcgctgttagggtatgaatttgaagcgatcgctcctaaagaatttgaaatttaa

SEQ ID NO: 4005 - DNA (genomic), 282 bp, Helicobacter pylori; double-stranded, circular
  misc_feature (B) LOCATION 1...282
  hypothetical: NO
  anti-sense: NO
atgcaaattgatgacgcattattgcaacgcttagaaaaattgagcatgctagagattaaagacgagcataaagagagcgttaaaggccatttggcggaggttttaggctttgtagaaaacatcttcgctttagaaactaataatctaaaaacagatacgcatcttagcacccctttaagagaagacgaacccaaaagccaaccccacatcgccaaagagattttaagccaaaacaaacacagccaggatcattacttcgttgtgcctaaaatcattgaatag

SEQ ID NO: 4006 - DNA (genomic), 288 bp, Helicobacter pylori; double-stranded, circular
  misc_feature (B) LOCATION 1...288
  hypothetical: NO
  anti-sense: NO
aggaaaagaatgcaaattgatgacgcattattgcaacgcttagaaaaattgagcatgctagagattaaagacgagcataaagagagcgttaaaggccatttggcggaggttttaggctttgtagaaaacatcttcgctttagaaactaataatctaaaaacagatacgcatcttagcacccctttaagagaagacgaacccaaaagccaaccccacatcgccaaagagattttaagccaaaacaaacacagccaggatcattacttcgttgtgcctaaaatcattgaa

SEQ ID NO: 4007 - DNA (genomic), 174 bp, Helicobacter pylori; double-stranded, circular
  misc_feature (B) LOCATION 1...174
  hypothetical: NO
  anti-sense: NO
gtgctaacgagtggggacatgatcacttgtccgtattgcgggcgtattttrtacgctgagagtacgcatgaaagtaacgctcaacctccaaaagaaagccaaccaaaagaaagccaagaagaaagccaagaagaaagccaagaagaaagccaagaagccgtccgtttgattgtt

SEQ ID NO: 4008 - DNA (genomic), 804 bp, Helicobacter pylori; double-stranded, circular
  misc_feature (B) LOCATION 1...804
  hypothetical: NO
  anti-sense: NO
atgaacacccacctcaaacaattgattgaaatttcgcatttggataaagaaattgactctttagagccgttgatcagagaaaaacggaaagacttggataaagccttgaatgataaagaagctaaaaataaagcgattttgaatttggaagaagaaaaattagccctaaaattacaggtttctaaaaacgagcaaaccctacaagacacgaacgctaaaatcgccagtatccaaaagaaaatgagcgagatcaaatccgaaagggagttgcgctctttaaacattgaagaagatattgctaaagagcgatccaatcaagccaacagagaaattgaaaacctgcaaaatgaaatcaagcacaaaagcgaaaaacaagaagttttgaaaaaggaaatgctagagcttgaaaaattagcgttggaattggaaaatttagtggaaaacgaagtcaaaaacatcaaagaaacccaacagatcatctttaaaaagaaagaagaactcgtggaaaaaaccgagcctaaaatctatagcttttatgaaaggattaggaggtgggcgaaaaacacgagcatcgtaacgatcaaaaaacaggcttgtgggggttgttttattcggttgaacgataagatttatgccgaagtgctaacgagtggggacatgatcacttgtccgtattgcgggcgtattttatacgctgagagtacgcatgaaagtaacgctcaacctccaaaagaaagccaaccaaaagaaagccaagaagaaagccaagaagaaagccaagaagaaagccaagaatccgtttga

SEQ ID NO: 4009 - DNA (genomic), 810 bp, Helicobacter pylori; double-stranded, circular
  misc_feature (B) LOCATION 1...810
  hypothetical: NO
  anti-sense: NO
aggaaagcgatgaacacccacctcaaacaattgattgaaatttcgcacttggataaagaaattgactctttagagccgttgatcagagaaaaacggaaagacttggataaagccttgaatgataaagaagctaaaaataaagcgattttgaatttggaagaagaaaaattagccctaaaattacaggtttctaaaaacgagcaaaccctacaagacacgaacgctaaaatcgccagtatccaaaagaaaatgagcgagatcaaatccgaaagggagttgcgctctttaaacattgaagaagatattgctaaagagcgatccaatcaagccaacagagaaattgaaaacctgcaaaatgaaatcaagcacaaaagcgaaaaacaagaagttttgaaaaaggaaatgctagagcttgaaaaattagcgttggaattggaaaatttagtggaaaacgaagtcaaaaacatcaaagaaacccaacagatcatctttaaaaagaaagaagaactcgtggaaaaaaccgagcctaaaatctatagcttttatgaaaggattaggaggtgggcgaaaaacacgagcatcgtaacgatcaaaaaacaggcttgtgggggttgttttattcggttgaacgataagatttatgccgaagtgctaacgagtggggacatgatcacttgtccgtattgcgggcgtattttatacgctgagagtacgcatgaaagtaacgctcaacctccaaaagaaagccaaccaaaagaaagccaagaagaaagccaagaagaaagccaagaagaaagccaagaatccgtt

SEQ ID NO: 4010 - DNA (genomic), 303 bp, Helicobacter pylori; double-stranded, circular
  misc_feature (B) LOCATION 1...303
  hypothetical: NO
  anti-sense: NO
agattggggatattaaagaaattgcgatttagttctttcaaacgcaaagtccggcgtttttgtttgggggtagcttttttaataagcggtgcgggcacgcttgatgcgaaaacctttaccctacaagagttttttaaagaagtggaaattaattcaatggagttgatcggcaaaaaagccgattttaaaagccgtttgaatgagcaacgctccgtgaacgcgtgggatttcccttatatttttaatgaaacttctatggtaaagaacttccaaggcattgtagagcgcagcccagaacccttt

SEQ ID NO: 4011 - DNA (genomic), 519 bp, Helicobacter pylori; double-stranded, circular
  misc_feature (B) LOCATION 1...519
  hypothetical: NO
  anti-sense: NO
aacttctatggtaaagaacttccaaggcattgtagagcgcagcccagaacccttttaatggtaagacccaagctcccatgggtgagctcgcttttatccaaaagcctttctattaaaaccattcaatacgataaaagctatcaattgaataaaaatctcgcttttattggcgctaaacgcttgtatttgacttatgtgatgactacagaaaagtatcaggtgtatacacaccgggaagcaaatttttattcgcagctcaaaatcgccaaagaaaaagtcaaagccggtagcatgagcgaaaaggactatatcaacttcaataattattatttggaatccaaactcgctaaaaccaatgtggaaaccaaactcatagatttagaaaaaatgctagacacgatgctagcgattgtggagccagtcaaagatggagcgcattttgacacttatttagaccatttgcatgacgtcaaggtgatcggtttggattttgaatacgtgcgattagaacctgagctt

SEQ ID NO: 4012 - DNA (genomic), 1296 bp, Helicobacter pylori; double-stranded, circular
  misc_feature (B) LOCATION 1...1296
  hypothetical: NO
  anti-sense: NO
ttgcgatttagttctttcaaacgcaaagtccggcgtttttgtttgggggtagcttttttaataagcggtgcgggcacgcttgatgcgaaaacctttaccctacaagagttttttaaagaagtggaaattaattcaatggagttgatcggcaaaaaagccgattttaaaagccgtttgaatgagcaacgctccgtgaacgcgtgggatttcccttatatttttaatgaaacttctatggtaaagaacttccaaggcattgtagaagcgcagcccagaacccttttaatggtaagacccaagctcccatgggtgagctcgcttttatccaaaagcctttctattaaaaccattcaatacgataaaagctatcaattgaataaaaatctcgcttttattggcgctaaacgcttgtatttgacttatgtgatgactaaagaaaagtatcaggtgtatgcacaacgggaagcaaatttttattcgcagctcaaaatcgccaaagaaaaagtcaaagccggtagcatgagcgaaaaggactatatcaacttcaataattcttatttggaatccaaactcgctaaaaccaatgtggaaaccaaactcatagatttagaaaaaatgctagacacgatgctagcgattgtggagccagtcaaagatggagcgcattttgacacttatttagaccatttgcatgacgtcaaggtgatcggtttggattttgaatacgtgcgattagaacctgaagctttaaagttcaaattggatcgctcgttgtatgtggatattttggatttgacggctaaagattatcaggtgaatgcgaaattggctaatagggatgtgtttaatgcatttgaatttgggattggctctgaaagctataactcttccactaatctttctataaaattgcatatccctttaccggtaacccctaaaaatatctatcaaaaccttaaatttttggatttgcaaagcgggacgctcgcgcaaaatgaattgatgaaacaaaacattagaatcaacgctaactcctacttaaaccagctcaaaaccaaaaaagcatactttgaaacccaaaaaaaacccattgccaataaaaaccttttgatggaaatggggcgcatcgcttatgaagcccaaaaaatcgggctttttgaatacttgatttatcaaaattcttacatggacgccctcatcactctagcggaagccaaaattgaatacattgatattagcgcgcttttaaaaaaaactttaggggagagcttgaccaaattaggattattgcattga

SEQ ID NO: 4013 - DNA (genomic), 168 bp, Helicobacter pylori; double-stranded, circular
  misc_feature (B) LOCATION 1...168
  hypothetical: NO
  anti-sense: NO
aaggccatatccaaggctttaacagaggatctaggagaacaagattttgctaatggggtgctttcaaaactccaacaagacatgcaaaatttgcacaatcaagcgcaaaacaaagcgcaatccatcgctcaattagacgcaaaaatcaacgctttaaaggagatccaa

SEQ ID NO: 4014 - DNA (genomic), 252 bp, Helicobacter pylori; double-stranded, circular
  misc_feature (B) LOCATION 1...252
  hypothetical: NO
  anti-sense: NO
ttgattgatgaggtggctttcaaaaaaagcgtggatgctgtcccaaatcccattgaatctgaagagtttgattatgccgataagcttcctggccagataagggggaaaacgggctttttaaaaggcgatgaagctaatgctttcatacaaagcgtggaaaatcatgtgagaggttttgaagctgaggctaaacaagatgtgaaaggccatatccaaggctttaacagaggatctaggagaacaagattttgc

SEQ ID NO: 4015 - DNA (genomic), 396 bp, Helicobacter pylori; double-stranded, circular
  misc_feature (B) LOCATION 1...396
  hypothetical: NO
  anti-sense: NO
ttgcgtgaaatcatctctgatgatttgattgatgaggtggctttcaaaaaaagcgtggatgctgttttaaatcccattgaatttgaagagtttgattatgccgataagcttcctggccagataagggggaaaacgggctttttaaaaggcgatgaagctaatgctttcatacaaagcgtggaaaatcatgtgagaggttttgaagctgaggctaaacaagatgtgaaaggccatatccaaggtttaagagaggatctaggagaacaagattttgctaatggggtgctttcaaaactccaacaagacatgcaaaatttgcacaatcaagcgcaaaacaaagcgcaatccatcgctcaattagacgcaaaaatcaacgctttaaaggagatccaatga

SEQ ID NO: 4016 - DNA (genomic), 330 bp, Helicobacter pylori; double-stranded, circular
  misc_feature (B) LOCATION 1...330
  hypothetical: NO
  anti-sense: NO
aaccgcattaaagacattagggatattaagggcttgaaggcggctaacactttaagctccacttatggggaaatcgctttcaaatacgacgctcaaatcgtttcggtggattctatggcgcaagccttgttgttagtggcacaaaaacgagccgatttgactttaaatagttctttagcgatcttaaactacctaaacacccataaaaacagcccctttaaaatcgcatgggagtccaaagaaaaggatgggggcgcttcctttgttattaacaagcaccaagaaaaaaccttagaacttatcaatcaagcgatgcgaaaaaatgatcaa

SEQ ID NO: 4017 - DNA (genomic), 357 bp, Helicobacter pylori; double-stranded, circular
  misc_feature (B) LOCATION 1...357
  hypothetical: NO
  anti-sense: NO
ttgaaggcggctaacactttaagctccacttatggggaaatcgctttcaaatacgacgctcaaatcgtttcggtggattctatggcgcaagccttgttgttagtggcacaaaaacgagccgatttgactttaaatagttctttagcgatcttaaactacctaaacacccataaaaacagcccctttaaaatcgcatgggagtccaaagaaaaggatgggggcgcttcctttgttattaacaagcaccaagaaaaagccttagaacttatcaatcaagcgatgcgaagattgatcaataaaggggttttaaaacgcttaggcgaacaattttttggaaaagatgtcagccagccctaa

SEQ ID NO: 4018 - DNA (genomic), 774 bp, Helicobacter pylori; double-stranded, circular
  misc_feature (B) LOCATION 1...774
  hypothetical: NO
  anti-sense: NO
atgaaaaaaatttcatgcctattgttggtaataagcctttttgggggttttttgaacgcttctagcttgtatgaaaagcttgtcaataaagagactatcagcgttggcacagaaggcatttacccccctttcacttaccatgataaagagggcaagctcaccggctatgatgtggaagtggctagggagttggctaaagagcttggcgtgaaaatcaaattccacgaaacttcatgggatattatgcttacaggcttgaaatcagggcgttttgacatggtcgctaatcaagtgagtttgacgactaaaaaacgccaagcggcttttgacaaaagcctgccttatagctattcaggcaccatcatgctagtcaggaaagatgaaaaccgcattaaagacattagggatattaagggcttgaaggcggctaacactttaagctccacttatggggaaatcgctttcaaatacgacgctcaaatcgtttcggtggattctatggcgcaagccttgttgttagtggcacaaaaacgagccgatttgactttaaatagttctttagcgatcttaaactacctaaacacccataaaaacagcccctttaaaatcgcatgggagtccaaagaaaaggatgggggcgcttcctttgttattaacaagcaccaagaaaaagccttagaacttatcaatcaagcgatgcgaagattgatcaataaaggggttttaaaacgcttaggcgaacaattttttggaaaagatgtcagccagccctaa

SEQ ID NO: 4019 - DNA (genomic), 402 bp, Helicobacter pylori; double-stranded, circular
  misc_feature (B) LOCATION 1...402
  hypothetical: NO
  anti-sense: NO
atgaattacgataactattgggatgaggacaaaccagaactcaatatcacgcctttagtggatgtgatgcttgttttattggctattcttatggtaacgacgcccactctcacctataaagaagagattgccttgccttctggttcaaaaactgctagagccactcaagataaagtgatagagatacgcatggataaagacgcaaaaatctatatagatagtcaaacctatgaatacaactctttcccggacactttcaatttgctttctaaaaaatacgataaagatactagggtgagtatccgtgcggacaagcgattgacctatgacaaagtgatttatttgttaaaaacgattaaagaagcggggtttttgaaagtttctttaatcacaagtccttaa

SEQ ID NO: 4020 - DNA (genomic), 402 bp, Helicobacter pylori; double-stranded, circular
  misc_feature (B) LOCATION 1...402
  hypothetical: NO
  anti-sense: NO
atgaattacgataactattgggatgaggacaaaccagaactcaatatcacgcctttagtggatgtgatgcttgttttattggctattcttatggtaacgacgcccactctcacctataaagaagagattgccttgccttctggttcaaaaactgctagagccactcaagataaagtgatagagatacgcatggataaagacgcaaaaatctatatagatagtcaaacctatgaatacamctctttcccggacactttcaatttgctttctaaaaaatacgataaagatactagggtgagtatccgtgcggacaagcgattgacctatgacaaagtgatttatttgttaaaaacgattaaagaagcggggtttttgaaagtttctttaatcacaagtccttaa

SEQ ID NO: 4021 - DNA (genomic), 408 bp, Helicobacter pylori; double-stranded, circular
  misc_feature (B) LOCATION 1...408
  hypothetical: NO
  anti-sense: NO
aaggtttttatgaattacgataactattgggatgaggacaaaccagaactcaatatcacgcctttagtggatgtgatgcttgttttattggctattcttatggtaacgacgcccactctcacctataaagaagagattgccttgccttctggttcaaaaactgctagagccactcaagataaagtgatagagatacgcatggataaagacgcaaaaatctatatagatagtcaaacctatgaatacaactctttcccggacactttcaatttgctttctaaaaaatacgataaagatactagggtgagtatccgtgcggacaagcgattgacctatgacaaagtgatttatttgttaaaaacgattaaagaagcggggtttttgaaagtttctttaatcacaagtcct

SEQ ID NO: 4022 - DNA (genomic), 273 bp, Helicobacter pylori; double-stranded, circular
  misc_feature (B) LOCATION 1...273
  hypothetical: NO
  anti-sense: NO
agacaggatagtatcgtgtatgtgagccgagaaaaccttaatgaatttggcaaaacggtgtttaatttgaatttgatcgctctaaacagcaagtatatccgcaggcttaccgtgaatggctctaaccagatgcctaggttttctatggatgggagaaatatcatgtatatcaaaaagacatctcaagaatacgccatggggcttattttgctagactataatcagagttttttattccctttaaagaatgtgaaaatacaagcctttgattgg

SEQ ID NO: 4023 - DNA (genomic), 285 bp, Helicobacter pylori; double-stranded, circular
  misc_feature (B) LOCATION 1...285
  hypothetical: NO
  anti-sense: NO
ctctcaaggaatggcgtggtctctagcgtgagttctgatggctctaaaattttaatgtctttagcccctgatggccaaccggatgtttatttgtatgacacgcataaaaaaactaaaaccaaaataacgcgctatccggggatagatgtttcaggcgtgtttttagaagatgacaagtctatggcttttgtttcagatagatccggttatcctaacatctatatgaagaaattggggttaaaagagaggcggagcaactcctttatgaaggaagaagcaatgaat

SEQ ID NO: 4024 - DNA (genomic), 645 bp, Helicobacter pylori; double-stranded, circular
  misc_feature (B) LOCATION 1...645
  hypothetical: NO
  anti-sense: NO
ggaagaacaatgaaatatttatggctttttttaatatacgctatagggctttttgcaacagataaaacgctagatattattaaaaccattcaaaaacttcctaagattgaagtgcgctactccatagataacgatgccaattacgctttaaaattgcatgaagtcttagcgaacgatttaaagactagccagcattttgatgtttctcaaaacaaagagcaaggtgctatcaattacgcagaactcaaggataaaaaagtccatcttgtagcgcttgtgagcgtggcggtagaaaacggcaataaaatttcacgattaaaactttatgatgtggatacaggaacgctcaaaaagacttttgactaccccattgtaagtttagatctatacccttttgcagcgcacaacatggccattgtggtgaatgattatttaaaagccccttctatcgcttggatgaagcgcctgattgttttttctaaatacattggaccaggaatcacaaacatcgcactagcggattatacgatgcgttatcaaaaagaaatcatcaaaaacaaccgactcaatattttccccaaatgggcgaacgctgagcaaacggagttttattacacgcagatggcggaaaaacgcccatggttt

SEQ ID NO: 4025 - DNA (genomic), 972 bp, Helicobacter pylori; double-stranded, circular
  misc_feature (B) LOCATION 1...972
  hypothetical: NO
  anti-sense: NO
atgaaatatttatggctttttttaatatacgctatagggctttttgcaacagataaaacgctagatattattaaaaccattcaaaaacttcctaagattgaagtgcgctactccatagataacgatgccaattacgctttaaaattgcatgaagtcttagcgaacgatttaaagactagccagcattttgatgtttctcaaaacaaagagcaaggtgctatcaattacgcagaactcaaggataaaaaagtccatcttgtagcgcttgtgagcgtggcggtagaaaacggcaataaaatttcacgattaaaactttatgatgtggatacaggaacgctcaaaaagacttttgactaccccattgtaagtttagatctatacccttttgcagcgcacaacatggccattgtggtgaatgattatttaaaagccccttctatcgcttggatgaagcgcctgattgttttttctaaatacattggaccaggaatcacaaacatcgcactagcggattatacgatgcgttatcaaaaagaaatcatcaaaaacaaccgactcaatattttccccaaatgggcgaacgctgagcaaacggagttttattacacgcagtatggcgaaaaaacgcccatgattttaaaatacaacattcaaaaagccactcatgagaatatcgctagctctcaaggaatggctgtggtctctagcgtgagttctgatggctctaaaattttaatgtctttagcccctgatggccaaccggatgtttatttgtatgacacgcataaaaaaactaaaaccaaaataacgcgctatccggggatagatgtttcaggcgtgtttttagaagatgacaagtctatggcttttgtttcagatagatccggttatcctaacatctatatgaagaaattggggttaaaagagagcgcggagcaactcctttatgaaggaagaagcaatgaatccatt

SEQ ID NO: 4026 - DNA (genomic), 1254 bp, Helicobacter pylori; double-stranded, circular
  misc_feature (B) LOCATION 1...1254
  hypothetical: NO
  anti-sense: NO
atgaaatatttatggctttttttaatatacgctatagggctttttgcaacagataaaacgctagatattattaaaaccattcaaaaacttcctaagattgaagtgcgctactccatagataacgatgccaattacgctttaaaattgcatgaagtcttagcgaacgatttaaagactagccagcattttgatgtttctcaaaacaaagagcaaggtgctatcaattacgcagaactcaaggataaaaaagtccatcttgtagcgcttgtgagcgtggcggtagaaaacggcaataaaatttcacgattaaaactttatgatgtggatacaggaacgctcaaaaagacttttgactaccccattgtaagtttagatctatacccttttgcagcgcacaacatggccattgtggtgaatgattatttaaaagccccttctatcgcttggatgaagcgcctgattgttttttctaaatacattggaccaggaatcacaaacatcgcactagcggattatacgatgcgttatcaaaaagaaatcatcaaaaacaaccgactcaatattttccccaaatgggcgaacgctgagcaaacggagttttattacacgcagtatggcgaaaaaacgcccatgattttaaaatacaacattcaaaaagccactcatgagaatatcgctagctctcaaggaatggctgtggtctctagcgtgagttctgatggctctaaaattttaatgtctttagcccctgatggccaaccggatgtttatttgtatgacacgcataaaaaaactaaaaccaaaataacgcgctatccggggatagatgtttcaggcgtgtttttagaagatgacaagtctatggcttttgtttcagatagatccggttatcctaacatctatatgaagaaattggggttaaaagagagcgcggagcaactcctttatgaaggaagaagcaatgaatccattgacgcctataaggatagtatcgtgtatgtgagccgagaaaaccttaatgaatttggcaaaacggtgtttaatttgaatttgatcgctctaaacagcaagtatatccgcaggcttaccgtgaatggctctaaccagatgcctaggttttctatggatgggagaaatatcatgtatatcaaaaagacatctcaagaatacgccatggggcttattttgctagactataatcagagttttttattccctttaaagaatgtgaaaatacaagcctttgattggtaa

SEQ ID NO: 4027 - DNA (genomic), 1791 bp, Helicobacter pylori; double-stranded, circular
  misc_feature (B) LOCATION 1...1791
  hypothetical: NO
  anti-sense: NO
atgtctaatcaagaatacaccttccaaactgaaatcaaccagcttttggatttgatgatccactctttgtattctaataaagagatttttttaagggagttgatttctaacgcgagcgacgctttggataagctgaattatttgatgctaaccgatgagaaattaaaagggctgaataccacgcctagcatccatttgagttttgatagccaaaaaaaaaccttaacgattaaagacaatggtataggcatggataaaagcgatctcatcgagcatttaggcacgatcgctaaatcaggcacgaagagttttttaagcgctttgagtggggataagaaaaaagatagcgccttaattggccaatttggcgtgggcttttattcggcgttcatggtagcgagtaagattgtcgttcaaaccaaaaaagttaccagtcatcaagcttatgcatgggtgagcgatggtaagggcaagtttgaaatcagcgaatgcgtcaaagaggagcaaggcacagaaatcaccctctttttaaaagaagaagattctcattttgcgagccgttgggagattgatagcgttgttaaaaagtattctgagcatatccctttccctatttttttaacttacaccgatacgaaatttgagggcgaaggggataataaaaaagaagttaaagaagaaaaatgcgatcagatcaatcaagcgagcgctttatggaaaatgaataagagcgaattgaaagaaaaggattacaaagacttttaccaatcgtttgcgcatgataacagcgagcctttgagctatatccataataaagtggaaggctctttagaatacacgacgcttttttatatccctagcaaagcgccctttgatttgtttagggtggattataaaagcggggtcaaactttatgttaaacgggtgtttatcactgatgatgacaaagaattgttgccgtcttatttgaggtttgttaaaggcgtgattgacagcgaagatttgcccttgaacgtgagtcgtgaaatcttacagcagaataagattttagccaatatccgttcggcttcagtgaaaaagattttaagcgagattgaaaggctgagcaaggataacaagaattaccataaattctatgagccttttgggaaagtgttaaaagaaggcttgtatggggattttgaaaacaaagaaaaacttttagaattgttgagattctattctaaagacaaaggagaatggatttctttaaaagaatacaaagaaaatttaaaagaaaatcaaaaaagcatttactaccttttaggcgaaaatttagacttattaaaagcgtccccccttttagaaaaatacgctcaaaaaggctatgatgttttgttattgagcgatgaaattgatgcgtttgtgatgccaggcgtgaatgaatacgataaaacgccctttagagacgctagccatagtgagagtttgaaagagcttggtttggcagaaatccatgatgaggtaaaagatcagtttaaagatttaatcaaagcgtttgaagaaaatcttaaagatgagattaagggcgtagagctttctggtcatctcacttcagcggtggctttaataggcgatgaaccaaatgcgatgatggctaattggatgcgtcaaatggggcaaagcgtgcctgaaagcaagaaaactttagaattaaaccctaaccatgcgattttgcaaaaactcttaaaatgcgaagataaagagcagttgagcgcttttatctggttgctttatgatgggcgaagcttt

SEQ ID NO: 4028 - DNA (genomic), 1866 bp, Helicobacter pylori; double-stranded, circular
  misc_feature (B) LOCATION 1...1866
  hypothetical: NO
  anti-sense: NO
atgtctaatcaagaatacaccttccaaactgaaatcaaccagcttttggatttgatgatccactctttgtattctaataaagagatttttttaagggagttgatttctaacgcgagcgacgctttggataagctgaattatttgatgctaaccgatgagaaattaaaagggctgaataccacgcctagcatccatttgagttttgatagccaaaaaaaaaccttaacgattaaagacaatggtataggcatggataaaagcgatctcatcgagcatttaggcacgatcgctaaatcaggcacgaagagttttttaagcgctttgagtggggataagaaaaaagatagcgccttaattggccaatttggcgtgggcttttattcggcgttcatggtagcgagtaagattgtcgttcaaaccaaaaaagttaccagtcatcaagcttatgcatgggtgagcgatggtaagggcaagtttgaaatcagcgaatgcgtcaaagaggagcaaggcacagaaatcaccctctttttaaaagaagaagattctcattttgcgagccgttgggagattgatagcgttgttaaaaagtattctgagcatatccctttccctatttttttaacttacaccgatacgaaatttgagggcgaaggggataataaaaaagaagttaaagaagaaaaatgcgatcagatcaatcaagcgagcgctttatggaaaatgaataagagcgaattgaaagaaaaggattacaaagacttttaccaatcgtttgcgcatgataacagcgagcctttgagctatatccataataaagtggaaggctctttagaatacacgacgcttttttatatccctagcaaagcgccctttgatttgtttagggtggattataaaagcggggtcaaactttatgttaaacgggtgtttatcactgatgatgacaaagaattgttgccgtcttatttgaggtttgttaaaggcgtgattgacagcgaagatttgcccttgaacgtgagtcgtgaaatcttacagcagaataagattttagccaatatccgttcggcttcagtgaaaaagattttaagcgagattgaaaggctgagcaaggataacaagaattaccataaattctatgagccttttgggaaagtgttaaaagaaggcttgtatggggattttgaaaacaaagaaaaacttttagaattgttgagattctattctaaagacaaaggagaatggatttctttaaaagaatacaaagaaaatttaaaagaaaatcaaaaaagcatttactaccttttaggcgaaaatttagacttattaaaagcgtccccccttttagaaaaatacgctcaaaaaggctatgatgttttgttattgagcgatgaaattgatgcgtttgtgatgccaggcgtgaatgaatacgataaaacgccctttagagacgctagccatagtgagagtttgaaagagcttggtttggcagaaatccatgatgaggtaaaagatcagtttaaagatttaatcaaagcgtttgaagaaaatcttaaagatgagattaagggcgtagagctttctggtcatctcacttcagcggtggctttaataggcgatgaaccaaatgcgatgatggctaattggatgcgtcaaatggggcaaagcgtgcctgaaagcaagaaaactttagaattaaaccctaaccatgcgattttgcaaaaactcttaaaatgcgaagataaagagcagttgagcgcttttatctggttgctttatgatggggcgaagcttttagaaaaaggggctttaaaagacgctaaaagttttaacgaacgcctaaatagcgtgctattgaaggcgttgtag

SEQ ID NO: 4029 - DNA (genomic), 1905 bp, Helicobacter pylori; double-stranded, circular
  misc_feature (B) LOCATION 1...1905
  hypothetical: NO
  anti-sense: NO
ttgtataatcttaaaaattttattaaaggaaaaagttcaatgtctaatcaagaatacaccttccaaactgaaatcaaccagcttttggatttgatgatccactctttgtattctaataaagagatttttttaagggagttgatttctaacgcgagcgacgctttggataagctgaattatttgatgctaaccgatgagaaattaaaagggctgaataccacgcctagcatccatttgagttttgatagccaaaaaaaaaccttaacgattaaagacaatggtataggcatggataaaagcgatctcatcgagcatttaggcacgatcgctaaatcaggcacgaagagttttttaagcgctttgagtggggataagaaaaaagatagcgccttaattggccaatttggcgtgggcttttattcggcgttcatggtagcgagtaagattgtcgttcaaaccaaaaaagttaccagtcatcaagcttatgcatgggtgagcgatggtaagggcaagtttgaaatcagcgaatgcgtcaaagaggagcaaggcacagaaatcaccctctttttaaaagaagaagattctcattttgcgagccgttgggagattgatagcgttgttaaaaagtattctgagcatatccctttccctatttttttaacttacaccgatacgaaatttgagggcgaaggggataataaaaaagaagttaaagaagaaaaatgcgatcagatcaatcaagcgagcgctttatggaaaatgaataagagcgaattgaaagaaaaggattacaaagacttttaccaatcgtttgcgcatgataacagcgagcctttgagctatatccataataaagtggaaggctctttagaatacacgacgcttttttatatccctagcaaagcgccctttgatttgtttagggtggattataaaagcggggtcaaactttatgttaaacgggtgtttatcactgatgatgacaaagaattgttgccgtcttatttgaggtttgttaaaggcgtgattgacagcgaagatttgcccttgaacgtgagtcgtgaaatcttacagcagaataagattttagccaatatccgttcggcttcagtgaaaaagattttaagcgagattgaaaggctgagcaaggataacaagaattaccataaattctatgagccttttgggaaagtgttaaaagaaggcttgtatggggattttgaaaacaaagaaaaacttttagaattgttgagattctattctaaagacaaaggagaatggatttctttaaaagaatacaaagaaaatttaaaagaaaatcaaaaaagcatttactaccttttaggcgaaaatttagacttattaaaagcgtccccccttttagaaaaatacgctcaaaaaggctatgatgttttgttattgagcgatgaaattgatgcgtttgtgatgccaggcgtgaatgaatacgataaaacgccctttagagacgctagccatagtgagagtttgaaagagcttggtttggcagaaatccatgatgaggtaaaagatcagtttaaagatttaatcaaagcgtttgaagaaaatcttaaagatgagattaagggcgtagagctttctggtcatctcacttcagcggtggctttaataggcgatgaaccaaatgcgatgatggctaattggatgcgtcaaatggggcaaagcgtgcctgaaagcaagaaaactttagaattaaaccctaaccatgcgattttgcaaaaactcttaaaatgcgaagataaagagcagttgagcgcttttatctggttgctttatgatggggcgaagcttttagaaaaaggggctttaaaagacgctaaaagttttaacgaacgcctaaatagcgtgctattgaaggcgttgtag

SEQ ID NO: 4030 - DNA (genomic), 1914 bp, Helicobacter pylori; double-stranded, circular
  misc_feature (B) LOCATION 1...1914
  hypothetical: NO
  anti-sense: NO
gcgcggcttttattgtataatcttaaaaattttattaaaggaaaaagttcaatgtctaatcaagaatacaccttccaaactgaaatcaaccagcttttggatttgatgatccactctttgtattctaataaagagatttttttaagggagttgatttctaacgcgagcgacgctttggataagctgaattatttgatgctaaccgatgagaaattaaaagggctgaataccacgcctagcatccatttgagttttgatagccaaaaaaaaaccttaacgattaaagacaatggtataggcatggataaaagcgatctcatcgagcatttaggcacgatcgctaaatcaggcacgaagagttttttaagcgctttgagtggggataagaaaaaagatagcgccttaattggccaatttggcgtgggcttttattcggcgttcatggtagcgagtaagattgtcgttcaaaccaaaaaagttaccagtcatcaagcttatgcatgggtgagcgatggtaagggcaagtttgaaatcagcgaatgcgtcaaagaggagcaaggcacagaaatcaccctctttttaaaagaagaagattctcattttgcgagccgttgggagattgatagcgttgttaaaaagtattctgagcatatccctttccctatttttttaacttacaccgatacgaaatttgagggcgaaggggataataaaaaagaagttaaagaagaaaaatgcgatcagatcaatcaagcgagcgctttatggaaaatgaataagagcgaattgaaagaaaaggattacaaagacttttaccaatcgtttgcgcatgataacagcgagcctttgagctatatccataataaagtggaaggctctttagaatacacgacgcttttttatatccctagcaaagcgccctttgatttgtttagggtggattataaaagcggggtcaaactttatgttaaacgggtgtttatcactgatgatgacaaagaattgttgccgtcttatttgaggtttgttaaaggcgtgattgacagcgaagatttgcccttgaacgtgagtcgtgaaatcttacagcagaataagattttagccaatatccgttcggcttcagtgaaaaagattttaagcgagattgaaaggctgagcaaggataacaagaattaccataaattctatgagccttttgggaaagtgttaaaagaaggcttgtatggggattttgaaaacaaagaaaaacttttagaattgttgagattctattctaaagacaaaggagaatggatttctttaaaagaatacaaagaaaatttaaaagaaaatcaaaaaagcatttactaccttttaggcgaaaatttagacttattaaaagcgtccccccttttagaaaaatacgctcaaaaaggctatgatgttttgttattgagcgatgaaattgatgcgtttgtgatgccaggcgtgaatgaatacgataaaacgccctttagagacgctagccatagtgagagtttgaaagagcttggtttggcagaaatccatgatgaggtaaaagatcagtttaaagatttaatcaaagcgtttgaagaaaatcttaaagatgagattaagggcgtagagctttctggtcatctcacttcagcggtggctttaataggcgatgaaccaaatgcgatgatggctaattggatgcgtcaaatggggcaaagcgtgcctgaaagcaagaaaactttagaattaaaccctaaccatgcgattttgcaaaaactcttaaaatgcgaagataaagagcagttgagcgcttttatctggttgctttatgatggggcgaagcttttagaaaaaggggctttaaaagacgctaaaagttttaacgaacgcctaaatagcgtgctattgaaggcgttg

SEQ ID NO: 4031 - DNA (genomic), 825 bp, Helicobacter pylori; double-stranded, circular
  misc_feature (B) LOCATION 1...825
  hypothetical: NO
  anti-sense: NO
atgttagttactcgttttaaaaaagccttcatttcttattctttaggcgtgcttgttgtttcattattattgaatgtgtgcaacgcttcagcacaagaagtcaaagtcaaggattattttggggagcaaaccataaagcttcctgtttccaaaatagcctatatagggagttatgtagaagtgcctgccatgcttaatgtttgggatagggttgtaggcgtttctgattatgcctttaaggatgacattgtcaaagccactctcaaaggcgaggatcttaaacgagtcaaacacatgagcaccgatcatacagccgcgttgaatgtggaattattaaaaaagcttagccctgatcttgtggtaacctttgtgggtaaccctaaagcggtagagcatgcgaaaaaatttgggatttcattcctttctttccaagagacaacgattgcagaggccatgcaagctatgcaagctcaagccacggtcttagaaattgacgcttccaaaaaattcgccaaaatgcaagaaactttggactttattgctgatcgtttgaagggcgttaaaaagaaaaagggggtggagcttttccataaagccaataaaatcagcggccatcaagccattaactcagacattttacaacaagggggtattgataattttggcttgaaatacgtcaagtttggacgcgctgacattagtgtggaaaaaatcgttaaagaaaaccctgaaatcattttcattaggtgggtaaccccactcactcctgattacgtgttgaacaacccaaaattttctactatcaatgccattaaaaacatataa

SEQ ID NO: 4032 - DNA (genomic), 909 bp, Helicobacter pylori; double-stranded, circular
  misc_feature (B) LOCATION 1...909
  hypothetical: NO
  anti-sense: NO
ttgcagaagtgcctgccatgttcaatacttgggatagggtcgtgggcatttcggattacgcttttaaatctgatattgttaaagccacccatgcttaatgtttgggatagggttgtaggcgtttctgattatgcctttaaggatgacattgtcaaagccactctcaaaggcgaggatcttaaacgagtcaaacacatgagcaccgatcatacagccgcgttgaatgtggaattattaaaaaagcttagccctgatcttgtggtaacctttgtgggtaaccctaaagcggtagagcatgcgaaaaaatttgggatttcattcctttctttccaagagacaacgattgcagaggccatgcaagctatgcaagctcaagccacggtcttagaaattgacgcttccaaaaaattcgccaaaatgcaagaaactttggactttattgctgagcgtttgaagggcgttaaaaagaaaaagggggtggagcttttccataaagccaataaaatcagcggccatcaagccattagctcagacattttagaaaaagggggtatagataattttggcttgaaatacgttaagtttggacgcgctgacattagtgtggaaaaaatcgttaaagaaaaccctgaaatcattttcatttggtgggtaagcccactcactcctgaagacgtgttgaacaaccctaaattttccactatcaaagccattaaaaataagcaagtctataagctccccacgatggatattggcggtcctagagccccactcattagtctttttatcgctttaaaagcccaccctgaagcctttaaaggcgtggatattaatgcgatagtcaaagattattataaagtggtctttgatttgaatgatgcggaaattgagccattcttatggcactga

SEQ ID NO: 4033 - DNA (genomic), 1008 bp, Helicobacter pylori; double-stranded, circular
  misc_feature (B) LOCATION 1...1008
  hypothetical: NO
  anti-sense: NO
atgttagttactcgttttaaaaaagccttcatttcttattctttaggcgtgcttgttgtttcattattattgaatgtgtgcaacgcttcagcacaagaagtcaaagtcaaggattattttggggagcaaaccataaagcttcctgtttccaaaatagcctatatagggagttatgtagaagtgcctgccatgcttaatgtttgggatagggttgtaggcgtttctgattatgcctttaaggatgacattgtcaaagccactctcaaaggcgaggatcttaaacgagtcaaacacatgagcaccgatcatacagccgcgttgaatgtggaattattaaaaaagcttagccctgatcttgtggtaacctttgtgggtaaccctaaagcggtagagcatgcgaaaaaatttgggatttcattcctttctttccaagagacaacgattgcagaggccatgcaagctatgcaagctcaagccacggtcttagaaattgacgcttccaaaaaattcgccaaaatgcaagaaactttggactttattgctgagcgtttgaagggcgttaaaaagaaaaagggggtggagcttttccataaagccaataaaatcagcggccatcaagccattagctcagacattttagaaaaagggggtatagataattttggcttgaaatacgttaagtttggacgcgctgacattagtgtggaaaaaatcgttaaagaaaaccctgaaatcattttcatttggtgggtaagcccactcactcctgaagacgtgttgaacaaccctaaattttccactatcaaagccattaaaaataagcaagtctataagctccccacgatggatattggcggtcctagagccccactcattagtctttttatcgctttaaaagcccaccctgaagcctttaaaggcgtggatattaatgcgatagtcaaagattattataaagtggtctttgatttgaatgatgcggaaattgagccattcttatggcactga

SEQ ID NO: 4034 - DNA (genomic), 1002 bp, Helicobacter pylori; double-stranded, circular
  misc_feature (B) LOCATION 1...1002
  hypothetical: NO
  anti-sense: NO
atgctaatcgctcgctttaaaaaagctttaatttcctattctttaggggttcttcttgtttcatcgttattaggcgtggctaacgcttctaatcaagagatccaagtcaaggattattttggggagcaaaccataaagcttcctgtttctaaaataatctacttgggcagctttgcagaagtgcctgccatgttcaatacttgggatagggtcgtgggcatttcggattacgcttttaaatctgatattgttaaagccactctcaaagatcctgaacgcattaaacccatgagcagtgatcatgtggcggcgttgaatgtggaattattaaaaaagcttagccctgatcttgtggtaacctttgtgggtaaccctaaagcggtagagcatgcgaaaaaatttgggatttcattcctttctttccaagaaaaaaccattgtagaggtcatggaagatattgacgctcaagctaaggccttagaagttgacgcttctaaaaaattggctaaaatgcaagaaactttggattttatcaaagagcgtttgaaaaatgtcaaaaagaaaaagggggtggagcttttccataaagccaataaaatcagcggccatcaagcccttgattcagatattttagaaaaagggggcatagacaattttggcttgaaatacgtcaagtttgggcgcgctgacattagtgtggaaaaaatcgttaaagaaaaccctgagattatttttatttggtggataagcccgcttagccctgaagacgtgttgaacaaccctaaattttccactatcaaagccattaaaaacaagcaagtctataagctccccacaatggatattggcggacctagagccccactcattagtctttttatcgctttaaaagcccaccctgaagcgtttaagggcgtggatattaatgcgataatcaaagattactataaagtggtctttgatttgaatgacgcggaagttgaaccctttttgtggcactga

SEQ ID NO: 4035 - DNA (genomic), 1002 bp, Helicobacter pylori; double-stranded, circular; identical to SEQ ID NO: 4034
  misc_feature (B) LOCATION 1...1002
  hypothetical: NO
  anti-sense: NO

SEQ ID NO: 4036 - DNA (genomic), 1059 bp, Helicobacter pylori; double-stranded, circular
  misc_feature (B) LOCATION 1...1059
  hypothetical: NO
  anti-sense: NO
ttgtatttccttaatggtggttataatcggcttcataaatcatacgaaaggattgtcatgctaatcgctcgctttaaaaaagctttaatttcctattctttaggggttcttcttgtttcatcgttattaggcgtggctaacgcttctaatcaagagatccaagtcaaggattattttggggagcaaaccataaagcttcctgtttctaaaataatctacttgggcagctttgcagaagtgcctgccatgttcaatacttgggatagggtcgtgggcatttcggattacgcttttaaatctgatattgttaaagccactctcaaagatcctgaacgcattaaacccatgagcagtgatcatgtggcggcgttgaatgtggaattattaaaaaagcttagccctgatcttgtggtaacctttgtgggtaaccctaaagcggtagagcatgcgaaaaaatttgggatttcattcctttctttccaagaaaaaaccattgtagaggtcatggaagatattgacgctcaagctaaggccttagaagttgacgcttctaaaaaattggctaaaatgcaagaaactttggattttatcaaagagcgtttgaaaaatgtcaaaaagaaaaagggggtggagcttttccataaagccaataaaatcagcggccatcaagcccttgattcagatattttagaaaaagggggcatagacaattttggcttgaaatacgtcaagtttgggcgcgctgacattagtgtggaaaaaatcgttaaagaaaaccctgagattatttttatttggtggataagcccgcttagccctgaagacgtgttgaacaaccctaaattttccactatcaaagccattaaaaacaagcaagtctataagctccccacaatggatattggcggacctagagccccactcattagtctttttatcgctttaaaagcccaccctgaagcgtttaagggcgtggatattaatgcgataatcaaagattactataaagtggtctttgatttgaatgacgcggaagttgaaccctttttgtggcactga

SEQ ID NO: 4037 - DNA (genomic), 1071 bp, Helicobacter pylori; double-stranded, circular
  misc_feature (B) LOCATION 1...1071
  hypothetical: NO
  anti-sense: NO
tttcatttttactgcttgtatttccttaatggtggttataatcggcttcataaatcatacgaaaggattgtcatgctaatcgctcgctttaaaaaagctttaatttcctattctttaggggttcttcttgtttcatcgttattaggcgtggctaacgcttctaatcaagagatccaagtcaaggattattttggggagcaaaccataaagcttcctgtttctaaaataatctacttgggcagctttgcagaagtgcctgccatgttcaatacttgggatagggtcgtgggcatttcggattacgcttttaaatctgatattgttaaagccactctcaaagatcttgaacgcattaaacccatgagcagtgatcatgtggcggcgttgaatgtggaattattaaaaaagcttagccctaatcttgtggtaacctttgtgggtaaccctaaagcggtagagcatgcgaaaaaatttgggatttcattcctttctttccaagaaaaaaccattgtagaggtcatggaagatattgacgctcaagctaaggccttagaagttgacgcttctaaaaaattggctaaaatgcaagaaactttggattttatcaaagagcgtttgaaaaatgtcaaaaagaaaaagggggtggagcttttccataaagccaataaaatcagcggccatcaagcccttgattcagacattttagaaaaagggggtatagataattttggcttgaaatacgttaagtttggacgcgctgacattagtgtggaaaaaatcgttaaagaaaaccctgaaatcattttcatttggtgggtaagcccactcactcctgaagacgtgttgaacaaccctaaattttccactatcaaagccattaaaaacaagcaagtctataagctccccacaatggatattggcggacctagagccccactcattagtctttttatcgctttaaaagcccaccctgaagcgtttaagggcgtggatattaatgcgataatcaaagattactataaagtggtctttgatttgaatgacgcggaagttgaaccctttttgtggcac

SEQ ID NO: 4038 - DNA (genomic), 258 bp, Helicobacter pylori; double-stranded, circular
  misc_feature (B) LOCATION 1...258
  hypothetical: NO
  anti-sense: NO
cattttaacatctttacagaagataatcgtgaaatcagcgggagcactgacaagctcagttataacgcgctgaatggggaatacaaattattgcaaaatgcggtggttagagaagtgggaaaatctaatgtcatcaccggcgatgaaatcattttaaacaaaaccaagggttatgctgatgtgttggggagcgcgaagcgcccgctaaatttgtgtttgatatggaagacattaatgaagaaaatcgtaaggctaaat

SEQ ID NO: 4039 - DNA (genomic), 255 bp, Helicobacter pylori; double-stranded, circular
  misc_feature (B) LOCATION 1...255
  hypothetical: NO
  anti-sense: NO
tttaacatctttacagaagataatcgtgaaatcagcgggagcactgacaagctcagttataacgcgctgaatggggaatacaaattattgcaaaatgcggtggttagagaagtgggaaaatctaatgtcatcaccggcgatgaaatcattttaaacaaaaccaagggttatgctgatgtgttggggagcgcgaagcgcccgctaaatttgtgtttgatatggaagacattaatgaagaaaatcgtaaggctaaat

SEQ ID NO: 4040 - DNA (genomic), 315 bp, Helicobacter pylori; double-stranded, circular
  misc_feature (B) LOCATION 1...315
  hypothetical: NO
  anti-sense: NO
aatcaaacaaagccagaaagaaaagaaaaaattccccactttcaaaggagggttttaatgcgttggtggtgttttttggtgtgttgtttgagcgttttaagcgtgatggacgctaaaaaattagagaataaaggcttgaaaaaagaaagagagcttttagaaattaccggcaaccaatttgtagcgaacgacaaaaccaaaaccgccgttattcaaggcaatgtgcagatcaaaaaaggtaaagaccggttgtttgcggataaagtgagcgtgtttttaaacgataaacgaaagccagaacgctatgaagcagca

SEQ ID NO: 4041 - DNA (genomic), 558 bp, Helicobacter pylori; double-stranded, circular
  misc_feature (B) LOCATION 1...558
  hypothetical: NO
  anti-sense: NO
atgcgttggtggtgttttttggtgtgttgtttgagcgttttaagcgtgatggacgctaaaaaattagagaataaaggcttgaaaaaagaaagagagcttttagaaattaccggcaaccaatttgtagcgaacgacaaaaccaaaaccgccgttattcaaggcaatgtgcagatcaaaaaaggtaaagaccggttgtttgcggataaagtgagcgtgtttttaaacgataaacgaaagccagaacgctatgaagccacagggaacacgcattttaacatctttacagaagataatcgtgaaatcagcgggagcactgacaagctcatttataacgcgctgaatggggaatacaaattattgcaaaatgcggtggttagagaagtgggaaaatctaatgtcatcaccggcgatgaaatcattttaaacaaaaccaagggttatgctgatgtgttggggagcgcgaagcggcccgctaaatttgtgtttgatatggaagacattaatgaagaaaatcgtaaggctaaattgaagaaaaaaggcgctaaggaaaaaccatga

SEQ ID NO: 4042 - DNA (genomic), 612 bp, Helicobacter pylori; double-stranded, circular
  misc_feature (B) LOCATION 1...612
  hypothetical: NO
  anti-sense: NO
aaatgttatgatacgctcaaattagtcaagcaaacaagcaaaaaaattaaaagggttagattgaaaatattcgttctgttgatgtcggtaattttaggaatatcattaacaggttgcataggctatcgtatggacttagaacattttaacacgctctattatgaagaaagccctaaaaaagcttatgaatattccaaacaattcacgaagaaaaaaaagaacgctcttttatgggacttgcaaaacggcttgagcgctttatacgcaagggattataagacttctttaggggtattggatcaagccgagcaacgctttgataaaacccaaagcgctttcacaagaggggctggttatgtgggcgctaccatgattaatgataatgtacgcgcttatggggggaatatttatgagggcgttttaatcaattattacaaagcgatagactacatgcttttaaacgataggcgaaagctagggtgcaattcaaccgcgcgaatgaacgccaacgcagggctaaagaattttattatgaggaagtgcaaaaagccattaaagaaatcgattctagcaaaaagcacaatattaatatggaacgctctagggcagaag

SEQ ID NO: 4043 - DNA (genomic), 999 bp, Helicobacter pylori; double-stranded, circular
  misc_feature (B) LOCATION 1...999
  hypothetical: NO
  anti-sense: NO
gcgaaagctagggtgcaattcaaccgcgcgaatgaacgccaacgcagggctaaagaattttattatgaggaagtgcaaaaagccattaaagaaatcgattctagcaaaaagcacaatattaatatggaacgctctagggcagaagtgagcgagattttaaacaacacctattctaatttagacaaatacgaagcttatcaaggcttgcttaacccggcggtttcgtatctttcagggttgttttacgctttaaatggggataagaataagggattaggctatcttaatgaagcctatgggatcagtcaaagccctttcgtggctcaagacttggtttttttcaaaaaccctaacaggagccatttcacttggatcatcattgaagatggtaaagagccgcaaaaaagcgaatttaaaattgatgtgcctatttttatgattgattcggtttataacgtgagcgtggccttgcccaagctagaaaaaggggaagcgttttatcaaaatttcaccctcaaggacggagaaaaagtaacaccctttgacactttagcctcaatagatgcggtggtcgctagcgaattcaggaagcaattgccctacattatcactagggctattttatcggccacttttaaagtgggcatgcaagcggtggcgaactattatttagggtttgttggcgggttagtaacttcgttgtattcaggtgtgagcacctttgcagacaccagaaacacgagcatttttgcccataaaatctacctcatgcgcatcaaaaacaaagcctttgaaagttatgaagttcgagccgattccattgacgctttttcgttttcattaaagccttgtaaaagatcgcttgaaagccctaaaatcattgacgctagggaattgctttcagggtttgtaacagccccacaagtcttttgctctaaccgccataatattttatatgtgcgcagctttaaaaacgggtttgttttgagtcatttaaaa

SEQ ID NO: 4044 - DNA (genomic), 1410 bp, Helicobacter pylori; double-stranded, circular
  misc_feature (B) LOCATION 1...1410
  hypothetical: NO
  anti-sense: NO
ttgaaaatattcgttctgttgatgtcggtaattttaggaatatcattaacaggttgcataggctatcgtatggacttagaacattttaacacgctctattatgaagaaagccctaaaaaagcttatgaatattccaaacaattcacgaagaaaaaaaagaacgctcttttatgggacttgcaaaacggcttgagcgctttatacgcaagggattataagacttctttaggggtattggatcaagccgagcaacgctttgataaaacccaaagcgctttcacaagaggggctggttatgtgggcgctaccatgattaatgataatgtacgcgcttatggggggaatatttatgagggcgttttaatcaattattacaaagcgatagactacatgcttttaaacgatagcgcgaaagctagggtgcaattcaaccgcgcgaatgaacgccaacgcagggctaaagaattttattatgaggaagtgcaaaaagccattaaagaaatcgattctagcaaaaagcacaatattaatatggaacgctctagggcagaagtgagcgagattttaaacaacacctattctaatttagacaaatacgaagcttatcaaggcttgcttaacccggcggtttcgtatctttcagggttgttttacgctttaaatggggataagaataagggattaggctatcttaatgaagcctatgggatcagtcaaagccctttcgtggctcaagacttggtttttttcaaaaaccctaacaggagccatttcacttggatcatcattgaagatggtaaagagccgcaaaaaagcgaatttaaaattgatgtgcctatttttatgattgattcggtttataacgtgagcgtggccttgcccaagctagaaaaaggggaagcgttttatcaaaatttcaccctcaaggacggagaaaaagtaacaccctttgacactttagcctcaatagatgcggtggtcgctagcgaattcaggaagcaattgccctacattatcactagggctattttatcggccacttttaaagtgggcatgcaagcggtggcgaactattatttagggtttgttggcgggttagtaacttcgttgtattcaggtgtgagcacctttgcagacaccagaaacacgagcatttttgcccataaaatctacctcatgcgcatcaaaaacaaagcctttgaaagttatgaagttcgagccgattccattgacgctttttcgttttcattaaagccttgtaaaagatcgcttgaaagccctaaaatcattgacgctagggaattgctttcagggtttgtaacagccccacaagtcttttgctctaaccgccataatattttatatgtgcgcagctttaaaaacgggtttgttttgagtcatttaaaatga

SEQ ID NO: 4045 - DNA (genomic), 423 bp, Helicobacter pylori; double-stranded, circular
  misc_feature (B) LOCATION 1...423
  hypothetical: NO
  anti-sense: NO
atgctaaaaaagttattgctcatttcactatttttagggtttttaagagcagagggcgaacattatgaaatcatcgctgaactttccaaggcttttttgaaagccaaagaggttttgactgcgatcaataaaacctgtattgaaaccgggcatgatcgcactcaaatacgccttcaaaacgattttttagagaatttgtctcaaacagagcaacaatttgatgattattttgaaaaggattttaaaagcgtaggggttttaaaaaccttgcttaaagacatccaatccttagaaaaaacttccaacaagctcgtatgcgttgccccaaaaaacgctaaaaattttgaaatattagagggagcgataacgcaaatcataggattagaagagcagatgaatcaatttatcaatggcgcgaaataa

SEQ ID NO: 4046 - DNA (genomic), 438 bp, Helicobacter pylori; double-stranded, circular
  misc_feature (B) LOCATION 1...438
  hypothetical: NO
  anti-sense: NO
ggggataaaatgctaaaaaagttattgctcatttcactatttttagggtttttaagagcagagggcgaacattatgaaatcatcgctgaactttccaaggcttttttgaaagccaaagaggttttgactgcgatcaataaaacctataaaacctgtattgaaaccgggcatgatcgcactcaaatacgccttcaaaacgattttttagagaatttgtctcaaacagagcaacaatttgatgattattttgaaaaggattttaaaagcgtaggggttttaaaaaccttgcttaaagacatccaatccttagaaaaaacttccaacaagctcgtatgcgttgccccaaaaaacgctaaaaattttgaaatattagagggagcgataacgcaaatcataggattagaagagcagatgaatcaatttatcaatggcgcgaaa

SEQ ID NO: 4047 - DNA (genomic), 489 bp, Helicobacter pylori; double-stranded, circular
  misc_feature (B) LOCATION 1...489
  hypothetical: NO
  anti-sense: NO
gctttatcgcgctgtcttagcgatcgttttaatcagtatcctgccctacaaaaaaccgaacaccatttcgtggattttttaaaccaggacaagcattacgccattatccaaagagcggataaaagcatttccagtaatgaagcgttggctcgttcgctcattggggcgtatgtgttaaaccgagagagcattaatcgcattgacgataaatcccgctatgaactggtgcgcttgcaaagcagctctaaagtgtggcaacgctttgaagatttgattaaagcccaaaacagcatctatgtgcaaagccatttagaaagagaagtccatatcgtcaatattgcgatctatcagcaagacaataaccccattgcgagcgtgtccattgcggctaaacttttgaatgaaaacaagctcgtgtatgaaaagcgttataaaatcgtattgagctatttgtttgacaccccggattttgattacgcttccatgccc

SEQ ID NO: 4048 - DNA (genomic), 528 bp, Helicobacter pylori; double-stranded, circular
  misc_feature (B) LOCATION 1...528
  hypothetical: NO
  anti-sense: NO
ttgaaaatcgcttacaggcttttaggtttgatgagctttatcgcgcttgtcttagcgatcgttttaatcagtatcctgcccttacaaaaaaccgaacaccatttcgtggattttttaaaccaggacaagcattacgccattatccaaagagcggataaaagcatttccagtaatgaagcgttggctcgttcgctcattggggcgtatgtgttaaaccgagagagcattaatcgcattgacgataaatcccgctatgaactggtgcgcttgcaaagcagctctaaagtgtggcaacgctttgaagatttgattaaagcccaaaacagcatctatgtgcaaagccatttagaaagagaagtccatatcgtcaatattgcgatctatcagcaagacaataaccccattgcgagcgtgtccattgcggctaaacttttgaatgaaaacaagctcgtgtatgaaaagcgttataaaatcgtattgagctatttgtttgacaccccggattttgattacgcttccatgccctaa

SEQ ID NO: 4049 - DNA (genomic), 762 bp, Helicobacter pylori; double-stranded, circular
  misc_feature (B) LOCATION 1...762
  hypothetical: NO
  anti-sense: NO
aaacaggttaaatctcgcatgaaagaaaagccgttcaatagcgagcagatggcttttttagaagagcttttaagccaccaagaaaagcatttagagagcaagctttctggtttttcggtgaatgatttggacatgcaaagcgtgtttcggctagaaaggaaccgcttgaaaatcgcttacaggcttttaggtttgatgagctttatcgcgcttgtcttagcgatcgttttaatcagtatcctgcccttacaaaaaaccgaacaccatttcgtggattttttaaaccaggacaagcattacgccattatccaaagagcggataaaagcatttccagtaatgaagcgttggctcgttcgctcattggggcgtatgtgttaaaccgagagagcattaatcgcattgacgataaatcccgctatgaactggtgcgcttgcaaagcagctctaaagtgtggcaacgctttgaagatttgattaaagcccaaaacagcatctatgtgcaaagccatttagaaagagaagtccatatcgtcaatattgcgatctatcagcaagacaataaccccattgcgagcgtgtccattgcggctaaacttttgaatgaaaacaagctcgtgtatgaaaagcgttataaaatcgtattgagctatttgtttgacaccccggattttgattacgcttccatgcctaaaaaccctaccggctttaaaatcactcgctacagcatcactgaaatcgcgccgactaataggaatgattga

SEQ ID NO: 4050 - DNA (genomic), 834 bp, Helicobacter pylori; double-stranded, circular
  misc_feature (B) LOCATION 1...834
  hypothetical: NO
  anti-sense: NO
ttgatgcgtaaggttttatacgctctcatgggctttttgttggtttttagtgctttaaaagccgatgattttttagaagaagcgaacgaaacagccccagcgaatttaaaccaccccatgcaggatttaaacgccattcaagggagcttttttgacaaaaaccgctccaaaatgtccaacactttgaacattgattactttcaagggcaaacttataaaatccgcttgcgttatgcgatggcgactttattgtttttttcaaaacccattagcgattttgttttgggggataaggtgggttttgatgcgaaaattttagaaagcaatgatcgcattttactcatcaaacccttacaaatcggcgtggattctaatatcagcgtgattgatagcgagggtaagattttttctttctatgtgttttctaccactttcaccagctccaaacaccctaatttacaggtttttatagaagataaaaactattacactaacgcttttatcaagccccaaaaagaaaatcaagaaaatatgtctgaaaatgcccctaaagatgcccaaaaaaataataagcccctaaaagaagaaaaagaagaaactaaagaaaaagaagaagagactataattattggcgataacaccaacgcgatgaaaattattaaaaaagacatccaaaaaggctataaggctttaaaaagctctcaaaggaaatggtattgtttatgggcttgttctaaaaaatccaaactctccttaatgcctaaagaaatctttaacgacaagcaattcacttatttcaaatttgacaaaagattagcactctctaaatcccgg

SEQ ID NO: 4051 - DNA (genomic), 987 bp, Helicobacter pylori; double-stranded, circular
  misc_feature (B) LOCATION 1...987
  hypothetical: NO
  anti-sense: NO
atgcgtaaggttttatacgctctcatgggctttttgttggtttttagtgctttaaaagccgatgattttttagaagaagcgaacgaaacagccccagcgaatttaaaccaccccatgcaggatttaaacgccattcaagggagcttttttgacaaaaaccgctccaaaatgtccaacactttgaacattgattactttcaagggcaaacttataaaatccgcttgcgttatgcgatggcgactttattgtttttttcaaaacccattagcgattttgttttgggggataaggtgggttttgatgcgaaaattttagaaagcaatgatcgcattttactcatcaaacccttacaaatcggcgtggattctaatatcagcgtgattgatagcgagggtaagattttttctttctatgtgttttctaccactttcaccagctccaaacaccctaatttacaggtttttatagaagataaaaactattacactaacgcttttatcaagccccaaaaagaaaatcaagaaaatatgtctgaaaatgcccctaaagatgcccaaaaaaataataagcccctaaaagaagaaaaagaagaaactaaagaaaaagaagaagagactataattattggcgataacaccaacgcgatgaaaattattaaaaaagacatccaaaaaggctataaggctttaaaaagctctcaaaggaaatggtattgtttatgggcttgttctaaaaaatccaaactctccttaatgcctaaagaaatctttaacgacaagcaattcacttatttcaaatttgacaaaagattagcactctctaaattcccggtgatttataaggtcgttgatggttatgataatccggtgaatacaaggattgtgggcgattacattatcgctgaagacgtttctactaaatggactttaaggttgggtaaggattatctgtgtatccgttttgtcaaaaggcgcaaaggtgaataa

SEQ ID NO: 4052 - DNA (genomic), 1008 bp, Helicobacter pylori; double-stranded, circular
  misc_feature (B) LOCATION 1...1008
  hypothetical: NO
  anti-sense: NO
gtgatgtttcacaaagcccttattacctttatcgttctatggttttttttgaatggcttaggggcttatgatttcaagcattgtcaggctttttttaaaaaagcgagccttcaaaaagggggcgtggctttaaaggaattgcctaagggcgtgtatttgtattattctaaaacctaccccaaacacgctaaagtcatcaaatccgatccttttatagggctgtatttgttgcaaagcgcgccaagcgagtatgtttatacattaagggatttagacaaagacgcccttataagacccatggccagtataggggctaatcaagccacagaagcgcgattattggtagggcaaaaaggctatgaccgctacgctcaaatttcacaaaaaacccaaaaaaatggcgttatcagcaatatttgttatcaaatgctagggctaggggtaggggggaacggctttatagaaacgaaattcatcaagcgctttttaaaccaacaagagccttattatggggatattggggtgcgtttagaagaacgtcataagcgtttggtggtagcgcaatttgatccctttttccctaaaaacccttttttaaaaaacgatgaaatcctagcgatcaatgattacaagatccactcgttagcggagtttgaatgggtggtgagcaatctttcataccaaagcctcgccaaagtgaaaatcaaacgaaaccatcaaatcaaagaagtaacgctcaaagtcaataaacgctatggggggtttttgctcaaagacacttttttagagcgctatggcatcgctttagacgagcgttttatcatcactaaaataggcgctcatttgcccaaaggcttggattttttaaagcttggggataggattttatgggtgaatcatagaagcgtttcgttcaacccgaaagctttaagagaagcgttaagcacgcctaaaattgaattattagtctggcgtcaaggctttgaattttacattaaagtccgttga

SEQ ID NO: 4053 - DNA (genomic), 1029 bp, Helicobacter pylori; double-stranded, circular
  misc_feature (B) LOCATION 1...1029
  hypothetical: NO
  anti-sense: NO
catgctagggaattttgccaagttgtgatgtttcacaaagcccttattacctttatcgttctatggttttttttgaatggcttaggggcttatgatttcaagcattgtcaggctttttttaaaaaagcgagccttcaaaaagggggcgtggctttaaaggaattgcctaagggcgtgtatttgtattattctaaaacctaccccaaacacgctaaagtcatcaaatccgatccttttatagggctgtatttgttgcaaagcgcgccaagcgagtatgtttatacattaagggatttagacaaagacgcccttataagacccatggccagtataggggctaatcaagccacagaagcgcgattattggtagggcaaaaaggctatgaccgctacgctcaaatttcacaaaaaacccaaaaaaatggcgttatcagcaatatttgttatcaaatgctagggctaggggtaggggggaacggctttatagaaacgaaattcatcaagcgctttttaaaccaacaagagccttattatggggatattggggtgcgtttagaagaacgtcataagcgtttggtggtagcgcaatttgatccctttttccctaaaaacccttttttaaaaaacgatgaaatcctagcgatcaatgattacaagatccactcgttagcggagtttgaatgggtggtgagcaatctttcataccaaagcctcgccaaagtgaaaatcaaacgaaaccatcaaatcaaagaagtaacgctcaaagtcaataaacgctatggggggtttttgctcaaagacacttttttagagcgctatggcatcgctttagacgagcgttttatcatcactaaaataggcgctcatttgcccaaaggcttggattttttaaagcttggggataggattttatgggtgaatcatagaagcgtttcgttcaacccgaaagctttaagagaagcgttaagcacgcctaaaattgaattattagtctggcgtcaaggctttgaattttacattaaagtccgt

SEQ ID NO: 4054 - DNA (genomic), 1251 bp, Helicobacter pylori; double-stranded, circular
  misc_feature (B) LOCATION 1...1251
  hypothetical: NO
  anti-sense: NO
atgaaaaaattagtttttagcatgcttttatgttgtaaaagcgtgtttgcagagggggaaactcctttgattgtcaatgacccagaaacccatgtaagtcaagccactatcataggcaaaatggtagatagtatcaaaagatacgaagagattatttctaaggctcaagctcaagtcaatcagttacaaaaagtcaataacatgataaatacgactaattctttgattagtagtagtgctatcactttagccaatcctatgcaagttttacaaaacgctcagtatcaaatagagagcattagatacaactatgagaatttaaagcaaagcatagaaaattggaacgcacaaaatttgttaagaaacaaatacttacagcaacaatgcccttggcttaatgtcaatgctcttactaacaataagattgtcaatcttaaagatctcaataacctaatcaccaaaaatggcgaacaaacccaaaccgcaagagatgtgcaaaatctcattcagtccattagtggcagtggctatggaaacatgcaatcacttgctggggaattgagtggtagagcgtggggggaaatgttgtgtaaaatggtaaacgatagtaattatgaaagcgagcaagctcttttagcaacaggcaataacccagaagagcaaaaacgaagatttttgcttagagtaaagaaaaaggttaatgataataagcagttaaaagataaacttgacccatttctaaaaagacttgatgtcctacaaactgagtttggtgtaactgaccctacagctaaccataataagcaagggatacattattgcacagaaaataaagagacaggtaaatgcgaccctattaaaaatgtatttaggacaactcgcttagataacgaattagaacaagaaatccaaacgctcacacttgatttaatcaaagcctccaataaagacgctcaaagccaagcctacgcaaatttcaatcaaaggattaaattacttactctaaaatatttaaaagaaattaccaatcaaatgctctttttaaatcaaacaatggcaatgcaaagcgagattatgacagatgattattttaggcaaaataatgatggctttggggaaaaagaaaaccatatagacaaacaattaacgcaaaaaagaataaacgaaagagaaagagctagaatatactttcaaaaccctaatgttaaatttgaccaatttggctttcccatttttagtatatgggattaa

SEQ ID NO: 4055 - DNA (genomic), 1263 bp, Helicobacter pylori; double-stranded, circular
  misc_feature (B) LOCATION 1...1263
  hypothetical: NO
  anti-sense: NO
atgaaaggtttaacaatgaaaaaattagtttttagcatgcttttatgttgtaaaagcgtgtttgcagagggggaaactcctttgattgtcaatgacccagaaacccatgtaagtcaagccactatcataggcaaaatggtagatagtatcaaaagatacgaagagattatttctaaggctcaagctcaagtcaatcagttacaaaaagtcaataacatgataaatacgactaattctttgattagtagtagtgctatcactttagccaatcctatgcaagttttacaaaacgctcagtatcaaatagagagcattagatacaactatgagaatttaaagcaaagcatagaaaattggaacgcacaaaatttgttaagaaacaaatacttacagcaacaatgcccttggcttaatgtcaatgctcttactaacaataagattgtcaatcttaaagatctcaataacctaatcaccaaaaatggcgaacaaacccaaaccgcaagagatgtgcaaaatctcattcagtccattagtggcagtggctatggaaacatgcaatcacttgctggggaattgagtggtagagcgtggggggaaatgttgtgtaaaatggtaaacgatagtaattatgaaagcgagcaagctcttttagcaacaggcaataacccagaagagcaaaaacgaagatttttgcttagagtaaagaaaaaggttaatgataataagcagttaaaagataaacttgacccatttctaaaaagacttgatgtcctacaaactgagtttggtgtaactgaccctacagctaaccataataagcaagggatacattattgcacagaaaataaagagacaggtaaatgcgaccctattaaaaatgtatttaggacaactcgcttagataacgaattagaacaagaaatccaaacgctcacacttgatttaatcaaagcctccaataaagacgctcaaagccaagcctacgcaaatttcaatcaaaggattaaattacttactctaaaatatttaaaagaaattaccaatcaaatgctctttttaaatcaaacaatggcaatgcaaagcgagattatgacagatgattattttaggcaaaataatgatggctttggggaaaaagaaaaccatatagacgaacaattaacgcaaaaaagaataaacgaaagagaaagagctagaatatactttcaaaaccctaatgttaaatttgaccaatttggctttcccatttttagtatatgggat

SEQ ID NO: 4056 - DNA (genomic), 1263 bp, Helicobacter pylori; double-stranded, circular
  misc_feature (B) LOCATION 1...1263
  hypothetical: NO
  anti-sense: NO
atgaaaggtttaacaatgaaaaaattagtttttagcatgcttttatgttgtaaaagcgtgtttgcagagggggaaactcctttgattgtcaatgacccagaaacccatgtaagtcaagccactatcataggcaaaatggtagatagtatcaaaagatacgaagagattatttctaaggctcaagctcaagtcaatcagttacaaaaagtcaataacatgataaatacgactaattctttgattagtagtagtgctatcactttagccaatcctatgcaagttttacaaaacgctcagtatcaaatagagagcattagatacaactatgagaatttaaagcaaagcatagaaaattggaacgcacaaaatttgttaagaaacaaatacttacagcaacaatgcccttggcttaatgtcaatgctcttactaacaataagattgtcaatcttaaagatctcaataacctaatcaccaaaaatggcgaacaaacccaaaccgcaagagatgtgcaaaatctcattcagtccattagtggcagtggctatggaaacatgcaatcacttgctggggaattgagtggtagagcgtggggggaaatgttgtgtaaaatggtaaacgatagtaattatgaaagcgagcaagctcttttagcaacaggcaataacccagaagagcaaaaacgaagatttttgcttagagtaaagaaaaaggttaatgataataagcagttaaaagataaacttgacccatttctaaaaagacttgatgtcctacaaactgagtttggtgtaactgaccctacagctaaccataataagcaagggatacattattgcacagaaaataaagagacaggtaaatgcgaccctattaaaaatgtatttaggacaactcgcttagataacgaattagaacaagaaatccaaacgctcacacttgatttaaccaaagcctccaataaagacgctcaaagccaagcctacgcaaatttcaatcaaaggattaaattacttactctaaaatatttaaaagaaattaccaatcaaatgctctttttaaatcaaacaatggcaatgcaaagcgagattatgacagatgattattttaggcaaaataatgatggctttggggaaaaagaaaaccatatagacaaacaattaacgcaaaaaagaataaacgaaagagaaagagctagaatatactttcaaaaccctaatgttaaatttgaccaatttggctttcccatttttagtatatgggat

SEQ ID NO: 4057 - DNA (genomic), 483 bp, Helicobacter pylori; double-stranded, circular
  misc_feature (B) LOCATION 1...483
  hypothetical: NO
  anti-sense: NO
atgtttggcatgggcttttttgaaatccttgtggtgttgattgtagcgattatttttttaggaccagaaaaattccctcaagctgtcgtggatatagtgaaattttttcgcgcggttaaaaaaacgctcaatgacgctaaggacactttagataaagaaatcaatattgaagaaatcaaaaaagaaaccttagagtatcaaaaactctttgaaaacaaagtggagagtcttaaaggcgttaagattgaagaattagaagacgctaaagtaactgcagaaaatgagattaaaagcattcaggatttgatgcaagattataaacgcagcttagaaaccaacacgattcctaaccatttaaatgaagaagtttccaatgaagaagctttaaataaagaagtttcaagcgatgaatctcctaaagaagtccaattaacaaccgataacaacgccaaagaacacgacaaagaaaaagagcatgtttga

SEQ ID NO: 4058 - DNA (genomic), 486 bp, Helicobacter pylori; double-stranded, circular
  misc_feature (B) LOCATION 1...486
  hypothetical: NO
  anti-sense: NO
atcattatgtttggcatgggcttttttgaaatccttgtggtgttgattgtagcgattatttttttaggaccagaaaaattccctcaagctgtcgtggatatagtgaaattttttcgcgcggttaaaaaaacgctcaatgacgctaaggacactttagataaagaaatcaatattgaagaaatcaaaaaagaaaccttagagtatcaaaaactctttgaaaacaaagtggagagtcttaaaggcgttaagattgaagaattagaagacgctaaagtaactgcagaaaatgagattaaaagcattcaggatttgatgcaagattataaacgcagcttagaaaccaacacgattcctaaccatttaaatgaagaagtttccaatgaagaagctttaaataaagaagtttcaagcgatgaatctcctaaagaagtccaattaacaaccgataacaacgccaaagaacacgacaaagaaaaagagcatgtt

SEQ ID NO: 4059 - DNA (genomic), 243 bp, Helicobacter pylori; double-stranded, circular
  misc_feature (B) LOCATION 1...243
  hypothetical: NO
  anti-sense: NO
atgttaagaattttaatccccttactcattattgtgtgggttttatggcgtttgtttttgaggcaaaaaccccacaaagatgaccacagagacaaccactcttacacgcaacaaacccccaaagaattagaagatcacatgattgtatgctctaaatgccaaacttatgtctctagtaaagacgccatttatagtggggcggtagcctattgcagtgaaacttgtttgaaggataaggggtaa

SEQ ID NO: 4060 - DNA (genomic), 294 bp, Helicobacter pylori; double-stranded, circular
  misc_feature (B) LOCATION 1...294
  hypothetical: NO
  anti-sense: NO
atgctttatgcatcaaaagcgcgtttatttttacaaatcaaaggaaagtttatgttaagaattttaatccccttactcattattgtgtgggttttatggcgtttgtttttgaggcaaaaaccccacaaagatgaccacagagacaaccactcttacacgcaacaaacccccaaagaattagaagatcacatgattgtatgctctaaatgccaaacttatgtctctagtaaagacgccatttatagtggggcggtagcctattgcagtgaaacttgtttgaaggataaggggtaa

SEQ ID NO: 4061 - DNA (genomic), 291 bp, Helicobacter pylori; double-stranded, circular
  misc_feature (B) LOCATION 1...291
  hypothetical: NO
  anti-sense: NO
atgctttatgcatcaaaagcgcgtttatttttacaaatcaaaggaaagtttatgttaagaattttaatccccttactcattattgtgtgggttttatggcgtttgtttttgaggcaaaaaccccacaaagatgaccacagagacaaccactcttacacgcaacaaacccccaaagaattagaagatcacatgattgtatgctctaaatgccaaacttatgtctctagtaaagacgccatttatagtggggcggtagcctattgcagtgaaacttgtttgaaggataagggg

SEQ ID NO: 4062 - DNA (genomic), 204 bp, Helicobacter pylori; double-stranded, circular
  misc_feature (B) LOCATION 1...204
  hypothetical: NO
  anti-sense: NO
atgtgttctaaaaaaataagaaatctcattttatgctttggttttattttaagcttgtgcgctgaagaaaatatcaccaaagaaaacatgactgaaacgaacacgactgaagaaaacacccctaaagacgctcccattcttttggaagaaaaacgcgcccaaactctagagcttaaagaagaaaatgaagtggcaaaaaagatt

SEQ ID NO: 4063 - DNA (genomic), 870 bp, Helicobacter pylori; double-stranded, circular
  misc_feature (B) LOCATION 1...870
  hypothetical: NO
  anti-sense: NO
ttgggtatcaatatgtgttctaaaaaaataagaaatctcattttatgctttggttttattttaagcttgtgcgctgaagaaaatatcaccaaagaaaacatgactgaaacgaacacgactgaagaaaacacccctaaagacgctcccattcttttggaagaaaaacgcgcccaaactctagagcttaaagaagaaaatgaagtggcaaaaaagattgatgaaaaaagcctgcttgaagaaatccataagaaaaaacgccagctttacatgctcaaaggggaattgcatgaaaagaatgaatccatcttattccaacaaatggctaaaaataagagcggcttttttataggcgtgatccttggcgatatagggattaacgctaatccttatgagaagtttgaacttttaagcaatattcaagcttctcccttgctgtatggtttaaggagcgggtatcaaaagtatttcgctaacgggattagcgccttacgcttttatggggaatatttagggggggcgatgaaagggtttaaaagcgattctttagcttcttatcaaaccgcaagcttgaatattgatctgttgatggataagcctattgacaaagaaaaaaggtttgcgttagggatatttggaggcgttggagtggggtggaatgggatgtatcaaaatttaaaagagattagagggtattcacagcctaacgcctttgggttggtgttaaatttaggggtgagcatgacgctcaacctcaaacaccgctttgaattagccctaaaaatgcctcccttaaaagaaacttcgcaaacctttttatattattttaaaagcactaatatttattatattagttacaactatttattgtaa

SEQ ID NO: 4064 - DNA (genomic), 873 bp, Helicobacter pylori; double-stranded, circular
  misc_feature (B) LOCATION 1...873
  hypothetical: NO
  anti-sense: NO
caagcattgggtatcaatatgtgttctaaaaaaataagaaatctcattttatgctttggttttattttaagcttgtgcgctgaagaaaatatcaccaaagaaaacatgactgaaacgaacacgactgaagaaaacacccctaaagacgctcccattcttttggaagaaaaacgcgcccaaactctagagcttaaagaagaaaatgaagtggcaaaaaagattgatgaaaaaagcctgcttgaagaaatccataagaaaaaacgccagctttacatgctcaaaggggaattgcatgaaaagaatgaatccatcttattccaacaaatggctaaaaataagagcggcttttttataggcgtgatccttggcgatatagggattaacgctaatccttatgagaagtttgaacttttaagcaatattcaagcttctcccttgctgtatggtttaaggagcgggtatcaaaagtatttcgctaacgggattagcgccttacgcttttatggggaatatttagggggggcgatgaaagggtttaaaagcgattctttagcttcttatcaaaccgcaagcttgaatattgatctgttgatggataagcctattgacaaagaaaaaaggtttgcgttagggatatttggaggcgttggagtggggtggaatgggatgtatcaaaatttaaaagagattagagggtattcacagcctaacgcctttgggttggtgttaaatttaggggtgagcatgacgctcaacctcaaacaccgctttgaattagccctaaaaatgcctcccttaaaagaaacttcgcaaacctttttatattattttaaaagcactaatatttattatattagttacaactatttattg

SEQ ID NO: 4065 - DNA (genomic), 624 bp, Helicobacter pylori; double-stranded, circular
  misc_feature (B) LOCATION 1...624
  hypothetical: NO
  anti-sense: NO
atgttaagggttttaagcgttggtgttgtttttattttactagggtgtcagtttttcaacaaaacgactctgcatttaaaatataaggattaccccaaaaacagccctttaaaaaccgcttccactttaaccccccctaaaatcttttttaacgctcattttgtgccgcccttttaccaaaaagaatttaaaaaagcgctcgcccagcaaatcgcttattttttaaaggataaaagcgctctcactttcaatatttcaggcaatgtttttttttcttttgaagagagtcctaaggatttaaaagccattaaagaaaggcttaaaaagacgattgagcctaacactgacccaaaagccgtcatgcgttttttaaaccttcaagcgagcttgattttagaatgtgtcccacaaaccgcttgcccatttgacacccttttaatccccaccgctctcagcgtgcctattgattacgccaatcgtttgggcgataacccctctctttttccccaagaagataaatcctatcataacgctttaatcaaagcccttaataaggcttactattctcttatggagggtttagaaaagcgtttgaacgctatagaaaatgcggcatggctttag

SEQ ID NO: 4066 - DNA (genomic), 654 bp, Helicobacter pylori; double-stranded, circular
  misc_feature (B) LOCATION 1...654
  hypothetical: NO
  anti-sense: NO
gcatgtgaaattagagcatgggcgtttgatagaatgttaagggttttaagcgttggtgttgtttttattttactagggtgtcagtttttcaacaaaacgactctgcatttaaaatataaggattaccccaaaaacagccctttaaaaaccgcttccactttaaccccccctaaaatcttttttaacgctcattttgtgccgcccttttaccaaaaagaatttaaaaaagcgctcgcccagcaaatcgcttattttttaaaggataaaagcgctctcactttcaatatttcaggcaatgtttttttttcttttgaagagagtcctaaggatttaaaagccattaaagaaaggcttaaaaagacgattgagcctaacactgacccaaaagccgtcatgcgttttttaaaccttcaagcgagcttgattttagaatgtgtcccacaaaccgcttgcccatttgacacccttttaatccccaccgctctcagcgtgcctattgattacgccaatcgtttgggcgataacccctctctttttccccaagaagataaatcctatcataacgctttaatcaaagcccttaataaggcttactattctcttatggagggtttagaaaagcgtttgaacgctatagaaaatgcggcatggctt

SEQ ID NO: 4067 - DNA (genomic), 1308 bp, Helicobacter pylori; double-stranded, circular
  misc_feature (B) LOCATION 1...1308
  hypothetical: NO
  anti-sense: NO
ttgattttcttaaaaaaatctctttgcgcgttgttaatttcaggttttttcataccacccttaatgaaagcggctagttttgtctatgacttgaagtttatgagctttaatttcaatctggcttcccctccaaataacccctattggaatagcctaaccaaaatgcaaggtcgtctcatgcctcaaattggcgtccaattagacaaaagacaggccttgatgtttggggcgtggttcattcaaaatttgcacacgcattatagctatttcccttattcgtggggggttaccatgtattaccaatacatagggaaaaatttgagattttttttaggcattgtgccacgaagctatcaaatagggcattaccctttaagcgcttttaaaaaacttttctggtttatagaccctacttttaggggaggagcgttccaattcaaaccggcttatgatcccaatcgttggtggaatgggtggtttgagggcgttgtggattggtatggggggcgtaattggaacaaccagcccaaaaagaaaaattacgattttgatcaattcttgtattttgtttcttcagaatttcagtttcttaaagggtatttaggtttggggggacagcttgtcatttttcataacgccaactctcatagtatgggggataactacccttatggcgggaattcctacttaaaaccaggcgatgcaaccccacaatggcctaatggctacccttatttcagccaaaaagataacccacaaggcggagaaatagggaaatactctaaccctaccattttagacagggtttattaccatgcttatttaaaagcagattttaaaaatctcatgccttatatggacaatattttcatgacctttggcacgcagtcgtctcaaacccattattgcgtgcgttatgctagcgagtgtaaaaacgcccgattttataacagctttgggggggaattttacgctcaagcgcaatacaaaggctttgggatctttaacagatactatttttccaacaaaccccaaatgcatttttatgccacttatggccaatccctttataccggattgccatggtatagagcccctaattttgacatgatagggctttattatctttataaaaacaaatggttaagcgtgcgagcggatgcgttttttagctttgtgggtgggggcgatgggtaccatttgtatggcaaggggggtaagtggtttgtgatgtatcagcaatttttaaccctaaccatagacacaagagagttgattgattttgtcaaatctaaaatccctaaataa

SEQ ID NO: 4068 - DNA (genomic), 1323 bp, Helicobacter pylori; double-stranded, circular
  misc_feature (B) LOCATION 1...1323
  hypothetical: NO
  anti-sense: NO
aaggggctgtattttagtttgattttcttaaaaaaatctctttgcgcgttgttaatttcaggttttttcataccacccttaatgaaagcggctagttttgtctatgacttgaagtttatgagctttaatttcaatctggcttcccctccaaataacccctattggaatagcctaaccaaaatgcaaggtcgtctcatgcctcaaattggcgtccaattagacaaaagacaggccttgatgtttggggcgtggttcattcaaaatttgcacacgcattatagctatttcccttattcgtggggggttaccatgtattaccaatacatagggaaaaatttgagattttttttaggcattgtgccacgaagctatcaaatagggcattaccctttaagcgcttttaaaaaacttttctggtttatagaccctacttttaggggaggagcgttccaattcaaaccggcttatgatcccaatcgttggtggaatgggtggtttgagggcgttgtggattggtatggggggcgtaattggaacaaccagcccaaaaagaaaaattacgattttgatcaattcttgtattttgtttcttcagaatttcagtttcttaaagggtatttaggtttggggggacagcttgtcatttttcataacgccaactctcatagtatgggggataactacccttatggcgggaattcctacttaaaaccaggcgatgcaaccccacaatggcctaatggctacccttatttcagccaaaaagataacccacaaggcggagaaatagggaaatactctaaccctaccattttagacagggtttattaccatgcttatttaaaagcagattttaaaaatctcatgccttatatggacaatattttcatgacctttggcacgcagtcgtctcaaacccattattgcgtgcgttatgctagcgagtgtaaaaacgcccgattttataacagctttgggggggaattttacgctcaagcgcaatacaaaggctttgggatctttaacagatactatttttccaacaaaccccaaatgcatttttatgccacttatggccaatccctttataccggattgccatggtatagagcccctaattttgacatgatagggctttattatctttataaaaacaaatggttaagcgtgcgagcggatgcgttttttagctttgtgggtgggggcgatgggtaccatttgtatggcaaggggggtaagtggtttgtgatgtatcagcaatttttaaccctaaccatagacacaagagagttgattgattttgtcaaatctaaaatccctaaa

SEQ ID NO: 4069 - DNA (genomic), 873 bp, Helicobacter pylori; double-stranded, circular
  misc_feature (B) LOCATION 1...873
  hypothetical: NO
  anti-sense: NO
atgttagaaaatgtcaaaaaatccctttttagggttttgtgcttgggcgcgttgtgtttaggggggctaatggcagagcaagaccctaaagagcttgtcggtttgggggcaaagagctacaaagagcaggatttcactcaggctaagaaatattttgaaaaagcttgcgatttgaaagaaaatagcgggtgttttaatttaggggtgctttattatcaagggcatggggtggaaaagaatttgaaaaaagccgcttcattttactctaaagcttgcgatttaaattacagcaatgggtgtcatttgctagggaatttatattatagcgggcaaggcgtgtcccaaaacaccaacaaagccttgcaatactactctaaagcgtgcgatttgaaatacgctgaagggtgtgcgagcttaggggggatctatcatgatggcaaagtggttactagggattttaaaaaagcggtggaatatttcactaaagcttgcgatttgaacgatggcgatggttgcacgatattagggagcttgtatgatgcaggcagaggcacgcctaaagatttgaaaaaagcgctcgcttcgtatgataaagcttgcgacttaaaagacagcccagggtgctttaacgcagggaacatgtatcatcatggcgaaggtgcggcgaagaattttaaagaggccctcgctcgttattctaaggcatgcgagttggaaaatggcggagggtgtttcaatttaggggctatgcaatacaatggcgaaggcgcaacaaggaatgaaaagcaagccatagaaaactttaaaaaaggctgtaaattaggcgctaaaggggcatgcgatattctcaagcagctcaaaatcaaagtttag

SEQ ID NO: 4070 - DNA (genomic), 939 bp, Helicobacter pylori; double-stranded, circular
  misc_feature (B) LOCATION 1...939
  hypothetical: NO
  anti-sense: NO
caaagagatcatggcgttttgtatttgcttaataacactataataaaatttttaataaggagatacatcatgttagaaaatgtcaaaaaatccctttttagggttttgtgcttgggcgcgttgtgtttaggggggctaatagcagagcaagaccctaaagagcttgtcaatttgggaacaaagagctacaaagagcaggatttcactcaggctaagaaatattttgaaaaagcttgcgatttgaaagaaaatagcgggtgttttaatttaggggtgctttattatcaagggcatggggtggaaaagaatttgaaaaaagccgcttcattttactctaaagcttgcgatttaaattacagcaatgggtgtcatttgctagggaatttatattatagcgggcaaggcgtgtcccaaaacaccaacaaagcctggcaatactactctaaagcgtgcgatttgaaatacgctgaagggtgtgcgagcttaggggggatctatcatgatggcaaagtgtttactagggattttaaaaaagcggtggaatatttcactaaagcttgcgatttgaacgatggcgatggttgcacgatattagggagcttgtatgatgcaggcagaggcacgcctaaagatttgaaaaaagcgctcgcttcgtatgataaagcttgcgacttaaaagacagcccagggtgctttaacgcagggaacatgtatcatcatggcgaaggtgcggcgaagaattttaaagaggccctcgctcgttattctaaggcatgcgagttggaaaatggcggagggtgtttcaatttaggggctatgcaatacaatggcgaaggcgcaacaaggaatgaaaagcaagccatagaaaactttaaaaaaggctgtaaattaggcgctaaaggggcatgcgatattctcaagcagctcaaaatcaaagtt

SEQ ID NO: 4071 - DNA (genomic), 558 bp, Helicobacter pylori; double-stranded, circular
  misc_feature (B) LOCATION 1...558
  hypothetical: NO
  anti-sense: NO
atgyatgaaaatggtaggggtgtacctaaagattacaagaaagcggttgaatatttccaaaaagctgttgataacgatatacctagagggtataacaatttgggcgtgatgtataaagagggtaagggagttcctaaagatgaaaagaaagcggtggaatattttagaatagctacagagaaaggttatactaacgcttatatcaacttaggcatcatgtatatggagggcaggggagttccaagtaactatgcgaaagcgacagaatgttttagaaaagcgatgcataagggcaatgtgraagcttatattctcctaggggatatttattatagcggaatgatcaattgggtattgagccggacaaagataaggctggtccattataaaatggcggccgatgtragttcttcyagagcytatraagggttgtcagagtcytatcsgtatgggytaggcgtggaaaaagakwaaaaaaaggcygaagaatacatgcaaaaagcatgcgattttgacattgataaaaattgtaagaaaaagaacacttcaagccgataa

SEQ ID NO: 4072 - DNA (genomic), 771 bp, Helicobacter pylori; double-stranded, circular
  misc_feature (B) LOCATION 1...771
  hypothetical: NO
  anti-sense: NO
atgggatacgcaagcaaattagctttaaagatttgtttggtaggtttatgtttatttagcacccttggtgcagaacaccttgagcaaaaagggaattatatttataagggagaggaggcttataataataaggaatatgagcgagcggcttctttttataagagcgctattaaaaatggtgagtcgcttgcttatattcttttagggatcatgtatgaaaatggtaggggtgtacctaaagattacaagaaagcggttgaatatttccaaaaagctgttgataacgatatacctagagggtataacaatttgggcgtgatgtataaagagggtaagggagttcctaaagatgaaaagaaagcggtggaatattttagaatagctacagagaaaggttatactaacgcttatatcaacttaggcatcatgtatatggagggcaggggagttccaagtaactatgcgaaagcgacagaatgttttagaaaagcgatgcataagggcaatgtggaagcttatattctcctaggggatatttattatagcgggaatgatcaattgggtattgagccggacaaagataaggctgttgtctattataaaatggcggctgatgtgagttcttctagagcttatgaagggttgtcagagtcttatcggtatgggttaggcgtggaaaaagataaaaaaaaggctgaagaatacatgcaaaaagcatgcgattttgacattgataaaaattgtaagaaaaagaacacttcaagccgataa

SEQ ID NO: 4073 - DNA (genomic), 822 bp, Helicobacter pylori; double-stranded, circular
  misc_feature (B) LOCATION 1...822
  hypothetical: NO
  anti-sense: NO
gacgcacgtagtttctttttaagattggtagctatggcattatgtttgatcttaattaatagtagaggagtagcgatgggatacgcaagcaaattagctttaaagatttgtttggtaggtttatgtttatttagcacccttggtgacgaacaccttgagcaaaaagggaattatatttataagggagaggaggcttataataataaggaatatgagcgagcggcttctttttataagagcgctattaaaaatggtgagtcgcttgcttatattcttttagggatcatgtatgaaaatggtaggggtgtacctaaagattacaagaaagcggttgaatatttccaaaaagctgttgataacgatatacctagagggtataacaatttgggcgtgatgtataaagagggtaagggagttcctaaagatgaaaagaaagcggtggaatattttagaatagctacagagaaaggttatactaacgcttatatcaacttaggcatcatgtatatggagggcaggggagttccaagtaactatgcgaaagcgacagaatgttttagaaaagcgatgcataagggcaatgtggaagcttatattctcctaggggatatttattatagcgggaatgatcaattgggtattgagccggacaaagataaggctgttgtctattataaaatggcggccgatgtgagttcttctagagcttatgaagggttgtcagagccttaccggtatgggttaggcgtggaaaaagataaaaaaaaggctgaagaatacatgcaaaaagcatgcgattttgacattgataaaaattgtaag

SEQ ID NO: 4074 - DNA (genomic), 825 bp, Helicobacter pylori; double-stranded, circular
  misc_feature (B) LOCATION 1...825
  hypothetical: NO
  anti-sense: NO
gacgcacgtagtttctttttaagattggtagctatggcattatgtttgatcttaattaatagtagaggagtagcgatgggatacgcaagcaaattagctttaaagatttgtttggtaggtttatgtttatttagcacccttggtgacgaacaccttgagcaaaaagggaattatatttataagggagaggaggcttataataataaggaatatgagcgagcggcttctttttataagagcgctattaaaaatggtgagtcgcttgcttatattcttttagggatcatgtatgaaaatggtaggggtgtacctaaagattacaagaaagcggttgaatatttccaaaaagctgttgataacgatatacctagagggtataacaatttgggcgtgatgtataaagagggtaagggagttcctaaagatgaaaagaaagcggtggaatattttagaatagctacagagaaaggttatactaacgcttatatcaacttaggcatcatgtatatggagggcaggggagttccaagtaactatgcgaaagcgacagaatgttttagaaaagcgatgcataagggcaatgtggaagcttatattctcctaggggatatttattatagcgggaatgatcaattgggtattgagccggacaaagataaggctgttgtctattataaaatggcggccgatgtgagttcttctagagcttatgaagggttgtcagagccttaccggtatgggttaggcgtggaaaaagataaaaaaaaggctgaagaatacatgcaaaaagcatgcgattttgacattgataaaaattgtaagaaa

SEQ ID NO: 4075 - DNA (genomic), 843 bp, Helicobacter pylori; double-stranded, circular
  misc_feature (B) LOCATION 1...843
  hypothetical: NO
  anti-sense: NO
atgaaactgagagcaagtgttttaatcggtgtggcaattctgtgcttaattttaagtgcgtgcagtaactatgcgaaaaaagtggtgaaacaaaagaaccatgtttatacgcctgtgtataatgaactgatagagaagtatagtgagatccccttaaatgacaaactcaaagacacaccattcatggtgcaagtgaagttgccaaattacaaggactatttgttggataataaacaagttgtactaactttcaaacttgttcaccattctaaaaagattacgctcataggcgatgccaataagatcctccaatacaagaattacttccaagctaacggggcaagatctgacattgatttttacttgcaacccactttgaatcaaaagggtgtggtgatgatagcgagtaactacaatgataatcccaacaacaaagaaaaaccacagacctttgatgtgttgcaaggaagtcagccaatgctaggagctaacacaaaaaacttgcatggctatgatgtgagtggagcaaacaacaagcaagtgatcaatgaagtggcaagagaaaaagctcagctagaaaaaatcaatcagtattacaagactctcttgcaagacaaggaacaagaatataccactaggaaaaataaccaacgagaaattttagaaacattgagtaatcgtgcaggttatcaaatgaggcagaatgtgattagttctgagatttttaagaatggcaacttgaacatgcaagccaaagaagaagaagttagggagaagctacaagaagaaagagagaatgaatacttgcgcaatcaaatcagaagtttgctcagtggtaagtga

SEQ ID NO: 4076 - DNA (genomic), 852 bp, Helicobacter pylori; double-stranded, circular
  misc_feature (B) LOCATION 1...852
  hypothetical: NO
  anti-sense: NO
ggagaaacaacaatgaaactgagagcaagtgttttaatcggtgtggcaattctgtgcttaattttaagtgcgtgcagtaactatgcgaaaaaagtggtgaaacaaaagaaccatgtttatacgcctgtgtataatgaactgatagagaagtatagtgagatccccttaaatgacaaactcaaagacacaccattcatggtgcaagtgaagttgccaaattacaaggactatttgttggataataaacaagttgtactaactttcaaacttgttcaccattctaaaaagattacgctcataggcgatgccaataagatcctccaatacaagaattacttccaagctaacggggcaagatctgacattgatttttacttgcaacccactttgaatcaaaagggtgtggtgatgatagcgagtaactacaatgataatcccaacaacaaagaaaaaccacagacctttgatgtgttgcaaggaagtcagccaatgctaggagctaacacaaaaaacttgcatggctatgatgtgagtggagcaaacaacaagcaagtgatcaatgaagtggcaagagaaaaagctcagctagaaaaaatcaatcagtattacaagactctcttgcaagacaaggaacaagaatataccactaggaaaaataaccaacgagaaattttagaaacattgagtaatcgtgcaggttatcaaatgaggcagaatgtgattagttctgagatttttaagaatggcaacttgaacatgcaagccaaagaagaagaagttagggagaagctacaagaagaaagagagaatgaatacttgcgcaatcaaatcagaagtttgctcagtggtaag

SEQ ID NO: 4077 - DNA (genomic), 351 bp, Helicobacter pylori; double-stranded, circular
  misc_feature (B) LOCATION 1...351
  hypothetical: NO
  anti-sense: NO
ttgaatctccattttatgaaaggatttgttatgagtggattaagaacatttagttgtgtagtggttttatgcggtgcaatggttaatgtagctgtagctggtcctaaaatagaggcaaggggtgaattaggcaaatttgtagggggagctgttggaaattttgttggtgataaaatgggcggatttgttggtggtgcaataggaggatatattgggtctgaagtaggcgatagggtagaagattatatccgtggcgttgatagagagccacaaaacaaagaaccacaaaccccaagagaacctatccgtgatttttatgattacggctatagttttgggcatgcttggtga

SEQ ID NO: 4078 - DNA (genomic), 969 bp, Helicobacter pylori; double-stranded, circular
  misc_feature (B) LOCATION 1...969
  hypothetical: NO
  anti-sense: NO
gtgcaacacttcaatttcctctataaagattctttattttctatcgctttattcactttcattatcgctcttgtgattttattagaacaggctagagcgtatttcacccgaaagagaaacaaaaaatttttgcaaaaattcgcccaaaatcaaaacgcctatgcgagcagcgagaatttagacgagcttttaaagcatgctaaaatttccagtttgatgtttttagctagggcgtattctaaagcggatgtggaaatgagcattgaaatcttaaaagggcttttgaatcgccccttaaaagatgaagaaaaaatcgctgttttagatttattggctaaaaattattttagcgtggggtatttgcagaaaacaaaagacaccgtgaaagaaattttgcgcttttccccaaggaatgtggaagcgttgttgaagcttttgcatgcgtatgaattagaaaaagattattcaaaggctttagaaactttggaatgtttggaagaattagaggtgcctaaaattgaaacgattaaaaattacctctatttaatgcatttaatagagaataaggaagatgcggctaaaatcttgcatgtttcaaaagcgtcgttagatttgaaaaaaatcgctctgaatcacttaaaatcgcatgatgaaaatcttttttggcaagaaattgatacaaccgaacggctagaaaatgtgatcgatcttttatgggatatgaatatccctgcttttattttagaaaaacatgcccttttgcaggacatcgcgcgatctcaagggttgcttttggatcacaaaccttgccaaatttttgaattagaggttttacgcgctctattgcatagccctataaaagcgagtctgacttttgaataccgctgcaagcattgcaaacaaatctttccttttgaaagccataggtgtcctgtgtgttaccagttagcgtttatggatatggtggct

SEQ ID NO: 4079 - DNA (genomic), 1008 bp, Helicobacter pylori; double-stranded, circular
  misc_feature (B) LOCATION 1...1008
  hypothetical: NO
  anti-sense: NO
gtgcaacacttcaatttcctctataaagattctttattttctatcgctttattcactttcattatcgctcttgtgattttattagaacaggctagagcgtatttcacccgaaagagaaacaaaaaatttttgcaaaaattcgcccaaaatcaaaacgcctatgcgagcagcgagaatttagacgagcttttaaagcatgctaaaatttccagtttgatgtttttagctagggcgtattctaaagcggatgtggaaatgagcattgaaatcttaaaagggcttttgaatcgccccttaaaagatgaagaaaaaatcgctgttttagatttattggctaaaaattattttagcgtggggtatttgcagaaaacaaaagacaccgtgaaagaaattttgcgcttttccccaaggaatgtggaagcgttgttgaagcttttgcatgcgtatgaattagaaaaagattattcaaaggctttagaaactttggaatgtttggaagaattagaggtgcctaaaattgaaacgattaaaaattacctctatttaatgcatttaatagagaataaggaagatgcggctaaaatcttgcatgtttcaaaagcgtcgttagatttgaaaaaaatcgctctgaatcacttaaaatcgcatgatgaaaatcttttttggcaagaaattgatacaaccgaacggctagaaaatgtgatcgatcttttatgggatatgaatatccctgcttttattttagaaaaacatgcccttttgcaggacatcgcgcgatctcaagggttgcttttggatcacaaaccttgccaaatttttgaattagaggttttacgcgctctattgcatagccctataaaagcgagtctgacttttgaataccgctgcaagcattgcaaacaaatctttccttttgaaagccataggtgtcctgtgtgttaccagttagcgtttatggatatggtgcttaaaatctctaaaaaaacgcatgctatgggagtggattaa

SEQ ID NO: 4080 - DNA (genomic), 1008 bp, Helicobacter pylori; double-stranded, circular
  misc_feature (B) LOCATION 1...1008
  hypothetical: NO
  anti-sense: NO
attgtgcaacacttcaatttcctctataaagattctttattttctatcgctttattcactttcattatcgctcttgtgattttattagaacaggctagagcgtatttcacccgaaagagaaacaaaaaatttttgcaaaaattcgcccaaaatcaaaacgcctatgcgagcagcgagaatttagacgagcttttaaagcatgctaaaatttccagtttgatgtttttagctagggcgtattctaaagcggatgtggaaatgagcattgaaatcttaaaagggcttttgaatcgccccttaaaagatgaagaaaaaatcgctgttttagatttattggctaaaaattattttagcgtggggtatttgcagaaaacaaaagacaccgtgaaagaaattttgcgcttttccccaaggaatgtggaagcgttgttgaagcttttgcatgcgtatgaattagaaaaagattattcaaaggctttagaaactttggaatgtttggaagaattagaggtgcctaaaattgaaacgattaaaaattacctctatttaatgcatttaatagagaataaggaagatgcggctaaaatcttgcatgtttcaaaagcgtcgttagatttgaaaaaaatcgctctgaatcacttaaaatcgcatgatgaaaatcttttttggcaagaaattgatacaaccgaacggctagaaaatgtgatcgatcttttatgggatatgaatatccctgcttttattttagaaaaacatgcccttttgcaggacatcgcgcgatctcaagggttgcttttggatcacaaaccttgccaaatttttgaattagaggttttacgcgctctattgcatagccctataaaagcgagtctgacttttgaataccgctgcaagcattgcaaacaaatctttccttttgaaagccataggtgtcctgtgtgttaccagttagcgtttatggatatggtgcttaaaatctctaaaaaaacgcatgctatgggagtggat

SEQ ID NO: 4081 - DNA (genomic), 591 bp, Helicobacter pylori; double-stranded, circular
  misc_feature (B) LOCATION 1...591
  hypothetical: NO
  anti-sense: NO
ttgatgaggaaaattttttcttatatttctaaggttctattatttattggggtggtttatgcagagcctgattctaaagtggaagccttagaagggaggaagcaagagtcttctttggataaaaaaatccgccaagaattgaagagtaaggaattgaagaataaggaattaaagaacaaggatttgaaaaataaagaagaaaagaaagaaacaaaagccaagagaaaacccagagcagaagtccatcatggggacgccaaaaatcccactccaaagatcacgcctcctaaaatcaaagggagtagtaagggcgttcaaaatcaaggcgttcaaaacaacgcgccaaaacctgaagaaaaagatacaacccctcaagctactgaaaaaaataaggaaacaagccctagctctcaattcaattccatttttggtaatcctaataacgctaccaacaacacccttgaagataaggtcgtagggggcatttcattgcttgttaatggttcgcctatcacgctgtatcaaatccaagaagagcaagaaaaatctaaagtgagyaasgctcragctagggatcgtttgaktckctga

SEQ ID NO: 4082 - DNA (genomic), 1242 bp, Helicobacter pylori; double-stranded, circular
  misc_feature (B) LOCATION 1...1242
  hypothetical: NO
  anti-sense: NO
atgaggaaaattttttcttatatttctaaggttctattatttattggggtggtttatgcagagcctgattctaaagtggaagccttagaagggaggaagcaagagtcttctttggataaaaaaatccgccaagaattgaagagtaaggaattgaagaataaggaattaaagaataaggatttgaaaaataaagaagaaaagaaagaaacaaaagccaagagaaaacccagagcagaagtccatcatggggacgccaaaaatcccactccaaagatcacgcctcctaaaatcaaagggagtagtaagggcgttcaaaatcaaggcgttcaaaacaacgcgccaaaacctgaagaaaaagatacaacccctcaagctactgaaaaaaataaggaaacaagccctagctctcaattcaattccatttttggtaatcctaataacgctaccaacaacacccttgaagataaggtcgtagggggcatttcattgcttgttaatggttcgcctatcacgctgtatcaaatccaagaagagcaagaaaaatctaaagtgagtaaggctcaagctagggatcgtttgatcgctgaacgcattaaaaaccaagaaattgagcgcttaaaaatccatgtagatgatgacaagctagaccaagaaatggcgatgatggcgcaacaacaaggcatggatttagaccatttcaaacagatgcttatggctgaggggcattataaactctatagagatcaacttaaagagcatttagaaatgcaagaattgttgcgtaatattttgctcacgaatgtggataccagctctgaaaccaaaatgcgcgaatattacaacaaacacaaggagcaattcagtatccccacagaaatagaaaccgtgcgctacacttccaccaatcaagaggatttagaaagggctatggcagaccctaatttggaagtcccaggggtgagtaaggccaatgaaaaaatagagatgaaaaccctaaaccctcaaatcgcccaagtctttatttcgcatgagcaaggctctttcacgcccgttatgaatgggggtggggggcagttcatcaccttttatatcaaggaaaaaaggggtaaaaatgaagtgagcttcagtcaggccaagcaattcatcgcccaaaaattagtggaagaatctaaggataagattttagaagagcattttgaaaaattgcgcgttaagtctaggattgtgatgatcagagagtga

SEQ ID NO: 4083 - DNA (genomic), 1275 bp, Helicobacter pylori; double-stranded, circular
  misc_feature (B) LOCATION 1...1275
  hypothetical: NO
  anti-sense: NO
cgtggtgaatgctattttgaaagagaaattggattgatgaggaaaattttttcttatatttctaaggttctattatttattggggtggtttatgcagagcctgattctaaagtggaagccttagaagggaggaagcaagagtcttctttggataaaaaaatccgccaagaattgaagagtaaggaattgaagaataaggaattaaagaataaggatttgaaaaataaagaagaaaagaaagaaacaaaagccaagagaaaacccagagcagaagtccatcatggggacgccaaaaatcccactccaaagatcacgcctcctaaaatcaaagggagtagtaagggcgttcaaaatcaaggcgttcaaaacaacgcgccaaaacctgaagaaaaagatacaacccctcaagctactgaaaaaaataaggaaacaagccctagctctcaattcaattccatttttggtaatcctaataacgctaccaacaacacccttgaagataaggtcgtagggggcatttcattgcttgttaatggttcgcctatcacgctgtatcaaatccaagaagagcaagaaaaatctaaagtgagtaaggctcaagctagggatcgtttgatcgctgaacgcattaaaaaccaagaaattgagcgcttaaaaatccatgtagatgatgacaagctaaaccaagaaatggcgatgatggcgcaacaacaaggcatggatttagaccatttcaaacagatgcttatggctgaggggcattataaactctatagagatcaacttaaagagcatttagaaatgcaagaattgttgcgtaatattttgctcacgaatgtggataccagctctgaaaccaaaatgcgcgaatattacaacaaacacaaggagcaattcagtatccccacagaaatagaaaccgtgcgctacacttccaccaatcaagaggatttagaaagggctatggcagaccctaatttggaagtcccaggggtgagtaaggccaatgaaaaaatagagatgaaaaccctaaaccctcaaatcgcccaagtctttatttcgcatgagcaaggctctttcacgcccgttatgaatgggggtggggggcagttcatcaccttttatatcaaggaaaaaaggggtaaaaatgaagtgagcttcagtcaggccaagcaattcatcgcccaaaaattagtggaagaatctaaggataagattttagaagagcattttgaaaaattgcgcgttaagtctaggattgtgatgatcagagag

SEQ ID NO: 4084 - DNA (genomic), 258 bp, Helicobacter pylori; double-stranded, circular
  misc_feature (B) LOCATION 1...258
  hypothetical: NO
  anti-sense: NO
tatagcgtgtatatccgctccaacttttctaaagtggcgcattttgcgagcgggtatttgcaaaccaagctcagcactcaagctaaaagcgttgccttagccaaaaaaacaactaaagaatttatagaaaaaggcatgacgcaacaagaattagacgacgctaaaaagtttttactaggctctgagcctttaaggaatgaaacgatctcaagccgcttgaacaccacttacaattattttatttgggtttgcctttag

SEQ ID NO: 4085 - DNA (genomic), 252 bp, Helicobacter pylori; double-stranded, circular
  misc_feature (B) LOCATION 1...252
  hypothetical: NO
  anti-sense: NO
agcgtgtatatccgctccaacttttctaaagtggcgcattttgcgagcgggtatttgcaaaccaagctcagcactcaagctaaaagcgttgccttagccaaaaaaacaactaaagaatttatagaaaaaggcatgacgcaacaagaattagacgacgctaaaaagtttttactaggctctgagcctttaaggaatgaaacgatctcaagccgcttgaacaccacttacaattattttatttgggtttgcctt

SEQ ID NO: 4086 - DNA (genomic), 309 bp, Helicobacter pylori; double-stranded, circular
  misc_feature (B) LOCATION 1...309
  hypothetical: NO
  anti-sense: NO
ccggttgggctctacccccttgaatcccctttaatttatgaagaaaaccatttgttacccatggggtttatccatttagcctttagagggggtgggagcttgagcgataaaaaccagttgggtttggcgaaattgttcgcgcaagttttaaacgaaggcactaaagagcttggcgcggtggggtttgcgcaacttttagagcaaaaagcgatcagtttgaatgtggataccagcgcagaagatttgcaaatcactttagaatttttaaaagaatacgaagatgaagccataatgcgcttaaaagagctt

SEQ ID NO: 4087 - DNA (genomic), 1308 bp, Helicobacter pylori; double-stranded, circular
  misc_feature (B) LOCATION 1...1308
  hypothetical: NO
  anti-sense: NO
atgaaaaaaattttaatcactttaatcactttattattaggagtttttatggggttacaagcgagtgctttgacacaccaagaaatcaatcaagctaaagtccctgtgatttatgaagaaaaccatttgttacccatggggtttatccatttagcctttagagggggtgggagcttgagcgataaaaaccagttgggtttggcgaaattgttcgcgcaagttttaaacgaaggcactaaagagcttggcgcggtggggtttgcgcaacttttagagcaaaaagcgatcagtttgaatgtggataccagcgcagaagatttgcaaatcactttagaatttttaaaagaatacgaagatgaagccataatgcgcttaaaagagcttttaaaatcccctaatttcacgcaaaacgctttagaaaaagtcaaaaccagaatgttagcccaacttttacaaaaagaaagcgactttgattatttggctaaactgactttaaaacaagagctttttgctaacacccctttagctaatgcggccttaggcactaaagagagtcttcaaaaaatcaagctagacgatttgaaacagcaatttgctaaggtttttgaactcaataaactcgtggtggtgcttgggggcgatttgaaagtcaatcaaacgctcaatcgtttaaataacgccctcaatttcttgccgcaaggtaaagcctatgaagagccttattttgaagcgagcgataaaaaaagtgaaaaagtcctctataaagacactgagcaggctttcgtgtattttggcgtgccctttaaaatcaaggatctaaaacaggatttagcgaaatctaaagtcatgatgtttgtgcttgggggggggtttggctctcgtttgatggaaaaaatcagggttcaagagggcttggcttatagcgtgtatatccgctccaacttttctaaagtggcgcattttgcgagcgggtatttgcaaaccaagctcagcactcaagctaaaagcgttgccttagttaaaaaaataattaaagaatttatagaaaaaggcatgacgcaacaagaattagacgacgctaaaaagtttttactaggctctgagcctttaaggaatgaaacgatctcaagccgcttgaacaccacttacaattatttttatttgggtttgcctttagatttcaaccaaacgctactcaatcaaatccaaaaaatgagtttgaaagagatcaatgatttcattaaagagcataccgaaatcaacgacttgacctttgctattgtgagcaataaaaagaaggacaaataa

SEQ ID NO: 4088 - DNA (genomic), 381 bp, Helicobacter pylori; double-stranded, circular
  misc_feature (B) LOCATION 1...381
  hypothetical: NO
  anti-sense: NO
atgtttaaaaaaatgtgtttgagcctgctaatgataagcggtgtttgtgtgggggcaaaggatttggatttcaagctggattatcgcgcgactggggggaaattcatggggaaaatgacggactctagtcttttaagtatcacttctatgaacgatgaaccggtggtgattaaaaaccttattgtcaataggggaaattcagtcgaagcgactaaaaaagtagaacccaaatttggcgataagtttaaaaaagaaaaactctttgatcatgaattaaaatactcgcaacagatattttaccgcctggattgcaagcctaaccaattgttagaagttaaaatcatcacggacaagggcgaatattaccataaattttccaaa

SEQ ID NO: 4089 - DNA (genomic), 384 bp, Helicobacter pylori; double-stranded, circular
  misc_feature (B) LOCATION 1...384
  hypothetical: NO
  anti-sense: NO
atgtttaaaaaaatgtgtttgagcctgctaatgataagcggtgtttgtgtgggggcaaaggatttggatttcaagctggattatcgcgcgactggggggaaattcatggggaaaatgacggactctagtcttttaagtatcacttctatgaacgatgaaccggtggtgattaaaaaccttattgtcaataggggaaattcatgcgaagcgactaaaaaagtagaacccaaatttggcgataagtttaaaaaagaaaaactctttgatcatgaattaaaatactcgcaacagatattttaccgcctggattgcaagcctaaccaattgttagaagttaaaatcatcacggacaagggcgaatattaccataaattttccaaatag

SEQ ID NO: 4090 - DNA (genomic), 387 bp, Helicobacter pylori; double-stranded, circular
  misc_feature (B) LOCATION 1...387
  hypothetical: NO
  anti-sense: NO
ttgatgtttaaaaaaatgtgtttgagcctgctaatgataagcggtgtttgtgtgggggcaaaggatttggatttcaagctggattatcgcgcgactggggggaaattcatggggaaaatgacggactctagtcttttaagtatcacttctatgaacgatgaaccggtggtgattaaaaaccttattgtcaataggggaaattcatgcgaagcgactaaaaaagtagaacccaaatttggcgataagtttaaaaaagaaaaactctttgatcatgaattaaaatactcgcaacagatattttaccgcctggattgcaagcctaaccaattgttagaagttaaaatcatcacggacaagggcgaatattaccataaattttccaaatag

SEQ ID NO: 4091 - DNA (genomic), 414 bp, Helicobacter pylori; double-stranded, circular
  misc_feature (B) LOCATION 1...414
  hypothetical: NO
  anti-sense: NO
taccctacaaatactattattgaaaggattttgatgtttaaaaaaatgtgtttgagcctgctaatgataagcggtgtttgtgtgggggcaaaggatttggatttcaagctggattatcgcgcgactggggggaaattcatggggaaaatgacggactctagtcttttaagtatcacttctatgaacgatgaaccggtggtgattaaaaaccttattgtcaataggggaaattcagtcgaagcgactaaaaaagtagaacccaaatttggcgataagtttaaaaaagaaaaactctttgatcatgaattaaaatactcgcaacagatattttaccgcctggattgcaagcctaaccaattgttagaagttaaaatcatcacggacaagggcgaatattaccataaattttccaaa

SEQ ID NO: 4092 - DNA (genomic), 753 bp, Helicobacter pylori; double-stranded, circular
  misc_feature (B) LOCATION 1...753
  hypothetical: NO
  anti-sense: NO
atgctaggaagcgttaaaaaaaccctttttggggtcttgtgtttgggcgcgttgtgtttgagagggttaatggcagagccagacgctaaagaacttgttagtttaggtatagagagcgtgaagaaacaagatttcgctcaagctaaagcgcattttgaaaaagcgtgtgagttaaaagaaggttttgggtgtgtttttttaggggcgttttatgaagaagggaaaggagtgggaaaagacttgaaaaaagccattcaattttacactaaaggttgtgaattaaatgatggttatgggtgtcgcctactaggaaatttatactataacggacaaggcgtttctaaagacgccaaaaaagcctcacaatattactctaaatcttgtgaattgaaccatgctgaagggtgtacggtcttaggaagcctacaccattatggcgtaggcacgcctaaggatttaagaaaggctcttgatttgtatgaaaaagcttgcgatttaaaagacagccctgggtgtattaatgcaggatacatgtatggtgtggcaaagaattttaaggaggctatcgttcgttattctaaagcatgcgaattaaaagatggtagggggtgctataatttaggggttatgcaatacaacgcccaaggcacagcaaaggacgaaaagcaagcggtagaaaactttaaaaaaggctgcaaatcaagcgttaaagaagcatgcgacgctctcaaggaattaaaaatagagctttag

SEQ ID NO: 4093 - DNA (genomic), 807 bp, Helicobacter pylori; double-stranded, circular
  misc_feature (B) LOCATION 1...807
  hypothetical: NO
  anti-sense: NO
tcgtcaatatttgattataattataagggattacatttctccaataagagatatatcatgctaggaagcgttaaaaaaaccctttttggggtcttgtgtttgggcgcgttgtgtttgagagggttaatggcagagccagacgctaaagaacttgttagtttaggtatagagagcgtgaagaaacaagatttcgctcaagctaaagcgcattttgaaaaagcgtgtgagttaaaagaaggttttgggtgtgtttttttaggggcgttttatgaagaagggaaaggagtgggaaaagacttgaaaaaagccattcaattttacactaaaggttgtgaattaaatgatggttatgggtgtcgcctactaggaaatttatactataacggacaaggcgtttctaaagacgccaaaaaagcctcacaatattactctaaatcttgtgaattgaaccatgctgaagggtgtacggtcttaggaagcctacaccattatggcgtaggcacgcctaaggatttaagaaaggctcttgatttgtatgaaaaagcttgcgatttaaaagacagccctgggtgtattaatgcaggatacatgtatggtgtggcaaagaattttaaggaggctatcgttcgttattctaaagcatgcgaattaaaagatggtagggggtgctataatttaggggttatgcaatacaacgcccaaggcacagcaaaggacgaaaagcaagcggtagaaaactttaaaaaaggctgcaaatcaagcgttaaagaagcatgcgacgctctcaaggaattaaaaatagagctt

SEQ ID NO: 4094 - DNA (genomic), 150 bp, Helicobacter pylori; double-stranded, circular
  misc_feature (B) LOCATION 1...150
  hypothetical: NO
  anti-sense: NO
atgaatacagaaattttaaccatcatgttagttgtctccgtgcttatgggattggtaggcttaatagcgtttttatggggggttaaaagcggtcagtttgacgatgaaaaacgcatgcttgaaagcgtgttgtatgacgcgcgagcgact

SEQ ID NO: 4095 - DNA (genomic), 192 bp, Helicobacter pylori; double-stranded, circular
  misc_feature (B) LOCATION 1...192
  hypothetical: NO
  anti-sense: NO
atgaatacagaaattttaaccatcatgttagttgtctccgtgcttatgggattggtaggcttaatagcgtttttatggggggttaaaagcggtcagtttgacgatgaaaaacgcatgcttgaaagcgtgttgtatgacagcgcgagcgacttgaacgaagcgattttacaagaaaaacgccaaaagaattaa

SEQ ID NO: 4096 - DNA (genomic), 222 bp, Helicobacter pylori; double-stranded, circular
  misc_feature (B) LOCATION 1...222
  hypothetical: NO
  anti-sense: NO
cagcattatcctaataacctaaaagatatagagatgaatacagaaattttaaccatcatgttagttgtctccgtgcttatgggattggtaggcttaatagcgtttttatggggggttaaaagcggtcagtttgacgatgaaaaacgcatgcttgaaagcgtgttgtatgacagcgcgagcgacttgaacgaagcgattttacaagaaaaacgccaaaagaat

SEQ ID NO: 4097 - DNA (genomic), 852 bp, Helicobacter pylori; double-stranded, circular
  misc_feature (B) LOCATION 1...852
  hypothetical: NO
  anti-sense: NO
atgtttgaagatttttatcgcactaccctctcttttttaaggtctttattgcttttattgggtttattgttgccgttttcgctttgtatagctgatgaatatattagcataagtgatgattgggatgaaagggcgcgaaatcagtgggatgaaactgcgcgaaatcataagacatattattttgaaaatggtttagaccattttaatcaaggccaatacaagcaagcctttaaagattttaaattggcgcaagaatacagcatcgggcttggcaacgtttatttagccaaaatgtatttggagggaaagggcgtgaaagtggattacaaaaaagcgcaattctatgcacaaaacgctatcaaagggtatgggagcgggttgttagggggcgctcttattttaggacgcatgcaagcagaaggcttagggatgaaaaaggatttgaaacaagcactcaagacttacaggcatgtggttcgcatgttttctaataaaagtgcaaattttgctaacaaatttggatcaaaccttgcggaatttactagtatgcttattggatcgcgattcattgatctttcaggtttgagcgcgaatcctataaaatttggaaataaatttggaatacttgttaagaaagcccttcaaatcaaagataatacactttcttgggaagacattgctgaaatttcaagcaatattattttactcaaacaacaaatgggggaaatcctttataggattgggatcgcttataaagaagggcttggcactagaaagaaaaaggacagggctaaaaaattcttgcaaaaatccgcagaatttggctatgaaaaagccatggaagctctgtag

SEQ ID NO: 4098 - DNA (genomic), 879 bp, Helicobacter pylori; double-stranded, circular
  misc_feature (B) LOCATION 1...879
  hypothetical: NO
  anti-sense: NO
agaatggctcaaattgtaaaaggatctgacatgtttgaagatttttatcgcactaccctctcttttttaaggtctttattgcttttattgggtttattgttgccgttttcgctttgtatagctgatgaatatattagcataagtgatgattgggatgaaagggcgcgaaatcagtgggatgaaactgcgcgaaatcataagacatattattttgaaaatggtttagaccattttaatcaaggccaatacaagcaagcctttaaagattttaaattggcgcaagaatacagcatcgggcttggcaacgtttatttagccaaaatgtatttggagggaaagggcgtgaaagtggattacaaaaaagcgcaattctatgcacaaaacgctatcaaagggtatgggagcgggttgttagggggcgctcttattttaggacgcatgcaagcagaaggcttagggatgaaaaaggatttgaaacaagcactcaagacttacaggcatgtggttcgcatgttttctaataaaagtgcaaattttgctaacaaatttggatcaaaccttgcggaatttactagtatgcttattggatcgcgattcattgatctttcaggtttgagcgcgaatcctataaaatttggaaataaatttggaatacttgttaagaaagcccttcaaatcaaagataatacactttcttgggaagacattgctgaaatttcaagcaatattattttactcaaacaacaaatgggggaaatcctttataggattgggatcgcttataaagaagggcttggcactagaaagaaaaaggacagggctaaaaaattcttgcaaaaatccgcagaatttggctatgaaaaagccatggaagctctg

SEQ ID NO: 4099 - DNA (genomic), 714 bp, Helicobacter pylori; double-stranded, circular
  misc_feature (B) LOCATION 1...714
  hypothetical: NO
  anti-sense: NO
atgaaaacactcgtgaaaaataccatatattcttttttgctattgtctgttttgatggcagaagatataacaagcggcttaaagcaactggataacacctaccaagagaccaaccaacaagtgctcaaaaacctagatgagattttttcaaccactagccctagcgctaataataaaataggtcaagaagatgctctaaacatcaaaaaagcggccattgctttgagaggagatttagcgttattgaaagccaattttgaagcgaatgagttatttttcatctcagaagatgtgatttttaagacttatatgtctagccctgaacttttattaacctatatgaaaatcaatcccttagaccaaaagactgctgagcaacaatgcggaatatccgataaagttttagttctttattgtgaggggaagctgaaaatcgagcaagaaaaacaaaatataagagagcgtttagaaacttctctaaaggcatatcagagcaacattggaggtacagcttccttaatcactgcttcacagacgcttgtagaaagcctaaaaaataaaaatttcatcaaaggaatcaaaaagcttatgttagctcacaacaaggtctttttaaattatttagaggagttggacgcattagaaagatccctagaacaaagtaagcgacaatacctacaagaaaggcaatcaagtaagatcattgttaaatga

SEQ ID NO: 4100 - DNA (genomic), 711 bp, Helicobacter pylori; double-stranded, circular
  misc_feature (B) LOCATION 1...711
  hypothetical: NO
  anti-sense: NO
atgaaaacactcgtgaaaaataccatatattcttttttgctattgtctgttttgatggcagaagatataacaagcggcttaaagcaactggataacacctaccaagagaccaaccaacaagtgctcaaaaacctagatgagattttttcaaccactagccctagcgctaataataaaataggtcaagaagatgctctaaacatcaaaaaagcggccattgctttgagaggagatttagcgttattgaaagccaattttgaagcgaatgagttatttttcatctcagaagatgtgatttttaagacttatatgtctagccctgaacttttattaacctatatgaaaatcaatcccttagaccaaaagactgctgagcaacaatgcggaatatccgataaagttttagttctttattgtgaggggaagctgaaaatcgagcaagaaaaacaaaatataagagagcgtttagaaacttctctaaaggcatatcagagcaacattggaggtacagcttccttaatcactgcttcacagacgcttgtagaaagcctaaaaaataaaaatttcatcaaaggaatcaaaaagcttatgttagctcacaacaaggtctttttaaattatttagaggagttggacgcattagaaagatccctagaacaaagtaagcgacaatacctacaagaaaggcaatcaagtaagatcattgttaaa

SEQ ID NO: 4101 - DNA (genomic), 723 bp, Helicobacter pylori; double-stranded, circular
  misc_feature (B) LOCATION 1...723
  hypothetical: NO
  anti-sense: NO
agttattgtcaaatgaaaacactcgtgaaaaataccatatattcttttttgctattgtctgttttgatggcagaagatataacaagcggcttaaagcaactggataacacctaccaagagaccaaccaacaagtgctcaaaaacctagatgagattttttcaaccactagccctagcgctaataataaaataggtcaagaagatgctctaaacatcaaaaaagcggccattgctttgagaggagatttagcgttattgaaagccaattttgaagcgaatgagttatttttcatctcagaagatgtgatttttaagacttatatgtctagccctgaacttttattaacctatatgaaaatcaatcccttagaccaaaagactgctgagcaacaatgcggaatatccgataaagttttagttctttattgtgaggggaagctgaaaatcgagcaagaaaaacaaaatataagagagcgtttagaaacttctctaaaggcatatcagagcaacattggaggtacagcttccttaatcactgcttcacagacgcttgtagaaagcctaaaaaataaaaatttcatcaaaggaatcaaaaagcttatgttagctcacaacaaggtctttttaaattatttagaggagttggacgcattagaaagatccctagaacaaagtaagcgacaatacctacaagaaaggcaatcaagtaagatcattgttaaa

SEQ ID NO: 4102 - DNA (genomic), 1131 bp, Helicobacter pylori; double-stranded, circular
  misc_feature (B) LOCATION 1...1131
  hypothetical: NO
  anti-sense: NO
atgcttgcaaaaatcgtttttagctcattggttgcgtttggagttttgtcggctaatgtggagcagtttggttcatttttcaacgagataaaaaaagaacaagaagaagtggccgcaaaagaagacgctcttaaagctcgcaagaagctcttaaacaatacgcatgatttcttagaagacttggtttttagaaaacaaaaaatcaaagagcttgtggattacagagctaaagttcttttagatttagaaaacaagtacaaaaaagaaaaagaggctctagagaaagagacaagaggtaaaatccttactgctaagtcaaaggcttatggtgatctagagcaagccttaaaagataaccctctttataagaaacttcttcctaacccttatgcttatgttttaaaccaagaaacattcacgcaagaagataaggagcgtttgagttattactacccccaagtgaaaacgagcagtatttttaaaaaaactaccgctaccactaaagataaggctcaggctttgcttcaaatgggtgtgttttctttagatgaagagcaaaacaaaaaagcgagccgattagctttatcttacaagcaagcgattgaagaatattccaataacatttctaatttattgagcagaaaagaattggataatatagattattacttgcagcttgaaagaaacaaatttgactccaaagcaaaagatattgctcaaaaagccaccaacacgcttatttttaactcggaacgcttggcgtttagcatggcgattgataagatcaatgagaaatacttaaggggctatgaagctttttctaacttgttgaaaaatgtcaaagatgatgtggagttgaatactttgactaaaaacttcaccaatcaaaaattgagtttcgcacaaaaacaaaaattgtgtttgttggttttagacagcttcaattttgatacccaatccaaaaaatctatattaaaaaagactaatgaatacaatatcttcgtagatagcgatcctatgatgagcgacaaaacaactatgcaaaaagaacactacaagatatttaatttcttcaaaacagtggtttctgcataccggaacaatgttgccaagaataacccctttgaatag

SEQ ID NO: 4103 - DNA (genomic), 1128 bp, Helicobacter pylori; double-stranded, circular
  misc_feature (B) LOCATION 1...1128
  hypothetical: NO
  anti-sense: NO
atgcttgcaaaaatcgtttttagctcattggttgcgtttggagttttgtcggctaatgtggagcagtttggttcatttttcaacgagataaaaaaagaacaagaagaagtggccgcaaaagaagacgctcttaaagctcgcaagaagctcttaaacaatacgcatgatttcttagaagacttggtttttagaaaacaaaaaatcaaagagcttgtggattacagagctaaagttcttttagatttagaaaacaagtacaaaaaagaaaaagaggctctagagaaagagacaagaggtaaaatccttactgctaagtcaaaggcttatggtgatctagagcaagccttaaaagataaccctctttataagaaacttcttcctaacccttatgcttatgttttaaaccaagaaacattcacgcaagaagataaggagcgtttgagttattactacccccaagtgaaaacgagcagtatttttaaaaaaactaccgctaccactaaagataaggctcaggctttgcttcaaatgggtgtgttttctttagatgaagagcaaaacaaaaaagcgagccgattagctttatcttacaagcaagcgattgaagaatattccaataacatttctaatttattgagcagaaaagaattggataatatagattattacttgcagcttgaaagaaacaaatttgactccaaagcaaaagatattgctcaaaaagccaccaacacgcttatttttaactcggaacgcttggcgtttagcatggcgattgataagatcaatgagaaatacttaaggggctatgaagctttttctaacttgttgaaaaatgtcaaagatgatgtggagttgaatactttgactaaaaacttcaccaatcaaaaattgagtttcgcacaaaaacaaaaattgtgtttgttggttttagacagcttcaattttgatacccaatccaaaaaatctatattaaaaaagactaatgaatacaatatcttcgtagatagcgatcctatgatgagcgacaaaacaactatgcaaaaagaacactacaagatatttaatttcttcaaaacagtggtttctgcataccggaacaatgttgccaagaataacccctttgaa

SEQ ID NO: 4104 - DNA (genomic), 1146 bp, Helicobacter pylori; double-stranded, circular
  misc_feature (B) LOCATION 1...1146
  hypothetical: NO
  anti-sense: NO
ggttacaaaaactataagatgcttgcaaaaatcgtttttagctcattggttgcgtttggagttttgtcggctaatgtggagcagtttggttcatttttcaacgagataaaaaaagaacaagaagaagtggccgcaaaagaagacgctcttaaagctcgcaagaagctcttaaacaatacgcatgatttcttagaagacttggtttttagaaaacaaaaaatcaaagagcttgtggattacagagctaaagttcttttagatttagaaaacaagtacaaaaaagaaaaagaggctctagagaaagagacaagaggtaaaatccttactgctaagtcaaaggcttatggtgatctagagcaagccttaaaagataaccctctttataagaaacttcttcctaacccttatgcttatgttttaaaccaagaaacattcacgcaagaagataaggagcgtttgagttattactacccccaagtgaaaacgagcagtatttttaaaaaaactaccgctaccactaaagataaggctcaggctttgcttcaaatgggtgtgttttctttagatgaagagcaaaacaaaaaagcgagccgattagctttatcttacaagcaagcgattgaagaatattccaataacatttctaatttattgagcagaaaagaattggataatatagattattacttgcagcttgaaagaaacaaatttgactccaaagcaaaagatattgctcaaaaagccaccaacacgcttatttttaactcggaacgcttggcgtttagcatggcgattgataagatcaatgagaaatacttaaggggctatgaagctttttctaacttgttgaaaaatgtcaaagatgatgtggagttgaatactttgactaaaaacttcaccaatcaaaaattgagtttcgcacaaaaacaaaaattgtgtttgttggttttagacagcttcaattttgatacccaatccaaaaaatctatattaaaaaagactaatgaatacaatatcttcgtagatagcgatcctatgatgagcgacaaaacaactatgcaaaaagaacactacaagatatttaatttcttcaaaacagtggtttctgcataccggaacaatgttgccaagaataacccctttgaa

SEQ ID NO: 4105 - DNA (genomic), 504 bp, Helicobacter pylori; double-stranded, circular
  misc_feature (B) LOCATION 1...504
  hypothetical: NO
  anti-sense: NO
ggattgaaaaaaatattaccggctttgttaatggggtttgtgggattgaatgctagtgatcgtttgttagaaatcatgcgcctttatcaaaaacaaggcttggaagtggtgggtcaaaaattggattcttatttagcggataagtctttttgggcagaagagcttcaaaacaaggacacggattttggctattatcaaaacaagcagtttttatttgtggcggataaatccaagcccagtttggagttttatgaaatagaaaataacatgcttaaaaaaatcaacagctctaaagcccttgtaggctctaaaaagggcgataaaactttagagggcgatttggccacgcctattggagtgtatcgtatcacgcagaaattagagcgtttggatcaatattatggcgttttggcttttgtaacgaattaccctaatttgtatgacactttgaaaaaacgcaccggggcatggcatttgggtgcatggaatgcctttaaatggcga

SEQ ID NO: 4106 - DNA (genomic), 543 bp, Helicobacter pylori; double-stranded, circular
  misc_feature (B) LOCATION 1...543
  hypothetical: NO
  anti-sense: NO
aaaaacgcaccggggcatggcatttgggtgcatggaatgcctttaaatggcgataggaatgaattgaacactaagggttgcattgcgattgaaaaccctattctaagctcttatgacaaagtgttaaaaggcgaaaaagcgttccttatcacttatgaagacaagttttcccctagcactaaagaagaattgagcatgattttaagctcccttttccaatggaaagaagcttgggctaggggcgattttgaacgctacatgcgtttttataaccccaatttcactcgctatgacggcatgagttttaacgcttttaaagagtataaaaaaagggtgtttgcaaaaaatgaaaaaaagaatatcgctttttcctctatcaatgtgatcccttaccccaactctcaaaacaaacgcttgttttatgtggtatttgaccaagattacaaagcctaccagcaaaacaagctctcttatagctccaattctcaaaaagaactctatgtagagattgaaaacaatcaagcgtctattataatggaaaaa

SEQ ID NO: 4107 - DNA (genomic), 993 bp, Helicobacter pylori; double-stranded, circular
  misc_feature (B) LOCATION 1...993
  hypothetical: NO
  anti-sense: NO
ttgaaaaaaatattaccggctttgttaatggggtttgtgggattgaatgctagtgatcgtttgttagaaatcatgcgcctttatcaaaaacaaggcttggaagtggtgggtcaaaaattggattcttatttagcggataagtctttttgggcagaagagcttcaaaacaaggacacggattttggctattatcaaaacaagcagtttttatttgtggcggataaatccaagcccagtttggagttttatgaaatagaaaataacatgcttaaaaaaatcaacagctctaaagcccttgtaggctctaaaaagggcgataaaactttagagggcgatttggccacgcctattggagtgtatcgtatcacgcagaaattagagcgtttggatcaatattatggcgttttggcttttgtaacgaattaccctaatttgtatgacactttgaaaaaacgcaccgggcatggcatttgggtgcatggaatgcctttaaatggcgataggaatgaattgaacactaagggttgcattgcgattgaaaaccctattctaagctcttatgacaaagtgttaaaaggcgaaaaagcgttccttatcacttatgaagacaagttttcccctagcactaaagaagaattgagcatgattttaagctcccttttccaatggaaagaagcttgggctaggggcgattttgaacgctacatgcgtttttataaccccaatttcactcgctatgacggcatgagttttaacgcttttaaagagtataaaaaaagggtgtttgcaaaaaatgaaaaaaagaatatcgctttttcctctatcaatgtgatcccttaccccaactctcaaaacaaacgcttgttttatgtggtatttgaccaagattacaaagcctaccagcaaaacaagctctcttatagctccaattctcaaaaagaactctatgtagagattgaaaacaatcaagcgtctattataatggaaaaataa

SEQ ID NO: 4108 - DNA (genomic), 1446 bp, Helicobacter pylori; double-stranded, circular
  misc_feature (B) LOCATION 1...1446
  hypothetical: NO
  anti-sense: NO
atgtttagaaaactagcaacctctgtatcgctcataagcctactaatctccaacgctctttatgctaaagaaataagtgaagccgataaggtcattaaggccactaaagaaactaaagagaccaagaaagaggctaaacgcctcaaaaaagaagctaaacagcgccaacagatccctgataataagaaacctcaatatgtctctgttgatgacacaaaaactcaagcgctttttgatatatatgacactttgaatgtgaatgacaaaagctttggggattggtttggtaatagcgctttgaaaaacaaaacttatctctacgctatggatctattggattataacaactacttatccatagaaaaccctattatcaaaacaagagcgatgggaacttatgcagatctgattatcatcacaggttcgttagaacaagtcaatgggtattacaatattctaaaagcgctcaacaaacgcaacgctaagtttgtgttaaaaatcaatgacaaaataccttatgcccaagcgacttttttgagagtgccaaaaagaagcgatcccaacgcccacacgcttgataagggagcgtcaattgatgaaagcaagctttttgaacaacaaaagaaaatgtatttcaactacgccaacgatgtgatctgcagacccaacgatgaagtgtgttcgcccctaagagatgaaatggtagctatgcccactaacgatagcgttactcaaaaacccaatatcattgctccttatagcctgtatagactaaaagagacaaataacgccaatgaagcccaaccatcaccttatgccactcaaaccgctcctgaaaacagcaaagagaagctcatagaagagctaatcgccaactcccaactcatagccaatgaagaagagagggaaaagaaactcttagcagaaaaagaaaaacaagagactgaattggctaaatacaagctcaaagatttagaaaatcaaaagaaactaaaagctttagaagcagagttgaaaaagaaaaacactaagaaacctagagtagtggaagtgcctattcctcctaaaacaagtgattctgatgaaacaatgagagttatcaaagaaaaagaaaactataatgggttattagtggataaagagaccacgatcaaaagaagctataaggggactttgatcagtgaaaattcttacagcaaaaaaacacccatcaaccttgaggacttgagaagcttagaagaagaaattaagagctactatgtcaagtctaatggcttgtgttacgctaatggcattaacctctatgtaaaaatcaaaaacgatccctacaaagagggaatgctgtgtggttatgagagcgttcaaaaactgctttcaccactaagggacaagctcaaatacgacaagcagaagttacaaaaagcgttactgaaagatttaaagtaa

SEQ ID NO: 4109 - DNA (genomic), 1458 bp, Helicobacter pylori; double-stranded, circular
  misc_feature (B) LOCATION 1...1458
  hypothetical: NO
  anti-sense: NO
aaaaaaaggaaaccaatgtttagaaaactagcaacctctgtatcgctcataagcctactaatctccaacgctctttatgctaaagaaataagtgaagccgataaggtcattaaggccactaaagaaactaaagagaccaagaaagaggctaaacgcctcaaaaaagaagctaaacagcgccaacagatccctgataataagaaacctcaatatgtctctgttgatgacacaaaaactcaagcgctttttgatatatatgacactttgaatgtgaatgacaaaagctttggggattggtttggtaatagcgctttgaaaaacaaaacttatctctacgctatggatctattggattataacaactacttatccatagaaaaccctattatcaaaacaagagcgatgggaacttatgcagatctgattatcatcacaggttcgttagaacaagtcaatgggtattacaatattctaaaagcgctcaacaaacgcaacgctaagtttgtgttaaaaatcaatgacaaaataccttatgcccaagcgacttttttgagagtgccaaaaagaagcgatcccaacgcccacacgcttgataagggagcgtcaattgatgaaagcaagctttttgaacaacaaaagaaaatgtatttcaactacgccaacgatgtgatctgcagacccaacgatgaagtgtgttcgcccctaagagatgaaatggtagctatgcccactaacgatagcgttactcaaaaacccaatatcattgctccttatagcctgtatagactaaaagagacaaataacgccaatgaagcccaaccatcaccttatgccactcaaaccgctcctgaaaacagcaaagagaagctcatagaagagctaatcgccaactcccaactcatagccaatgaagaagagagggaaaagaaactcttagcagaaaaagaaaaacaagagactgaattggctaaatacaagctcaaagatttagaaaatcaaaagaaactaaaagctttagaagcagagttgaaaaagaaaaacactaagaaacctagagtagtggaagtgcctattcctcctaaaacaagtgattctgatgaaacaatgagagttatcaaagaaaaagaaaactataatgggttattagtggataaagagaccacgatcaaaagaagctataaggggactttgatcagtgaaaattcttacagcaaaaaaacacccatcaaccttgaggacttgagaagcttagaagaagaaattaagagctactatgtcaagtctaatggcttgtgttacgctaatggcattaacctctatgtaaaaatcaaaaacgatccctacaaagagggaatgctgtgtggttatgagagcgttcaaaaactgctttcaccactaagggacaagctcaaatacgacaagcagaagttacaaaaagcgttactgaaagatttaaag

SEQ ID NO: 4110 - DNA (genomic), 180 bp, Helicobacter pylori; double-stranded, circular
  misc_feature (B) LOCATION 1...180
  hypothetical: NO
  anti-sense: NO
ttgctttcccggtctatgcccaaaattcacgccgttttcaaagcttttatccctattccattcgccctcttcgctatccacttcgtagtattgggaattggaagcgtctttaatcttaatagaatcaaagataaaaaattcattctccgcgccaaaataagccacatcgcccaagcctaa

SEQ ID NO: 4111 - DNA (genomic), 243 bp, Helicobacter pylori; double-stranded, circular
  misc_feature (B) LOCATION 1...243
  hypothetical: NO
  anti-sense: NO
gactttcacgatttctgtgcgaatatccatcatcgtatccgttggaggcacaggcatatagcctccttgctttcccggtctatgcccaaaattcacgccgttttcaaagcttttatccctattccattcgccctcttcgctatccacttcgtagtattgggaattggaagcgtctttaatcttaatagaatcaaagataaaaaattcattctccgcgccaaaataagccacatcgcccaagcc

SEQ ID NO: 4112 - DNA (genomic), 297 bp, Helicobacter pylori; double-stranded, circular
  misc_feature (B) LOCATION 1...297
  hypothetical: NO
  anti-sense: NO
atgaaaaaaattggtttgagcttgtgtttggttttgagtttgggttttttaaaagcccatgaagtgagcgctgaagagattgcggatattttctacaaactcaacgccaaagagcctaaaatgaaaatcaaccacacgaaggggttttgcgctaaaggcgtgttcctccctaacccgcaagcaagagaggatttagaggtgccactactcaatgaaaaagaaatccctgcgtctgtaaggtattctttagggggcgtggtcgattggacgataaaagcaaggttaggggaatggcgt

SEQ ID NO: 4113 - DNA (genomic), 423 bp, Helicobacter pylori; double-stranded, circular
  misc_feature (B) LOCATION 1...423
  hypothetical: NO
  anti-sense: NO
agcaagaatcaaaaagctctacgaagaagtcccctcttacaggaattcgccgcctatatgaaaacgatagggattagctcaagcgtggctaatacgccttattatagcgtgcatgcgttcaagtttaaagataagaaagaaaaattattgcctgcgaggtggaaatttgtgcctaaagagggcgttaaatacttaaatcctcaagaattaaagcaaaaagattcaaattatctgctctcttcattccaacaacaccttaaaaataaacccatagaataccaaatgtatttggtgtttgcgaatcaaaatgatgccaccaacgacacgaccgcgctttggatatgcgagcataaggaattattagtggggaacttgaaagttgaaaaatacgaaagaacgggtgcaataagacgtttttcgcgg

SEQ ID NO: 4114 - DNA (genomic), 432 bp, Helicobacter pylori; double-stranded, circular
  misc_feature (B) LOCATION 1...432
  hypothetical: NO
  anti-sense: NO
ggagcaaaaatgaaaaaaattggtttgagcttgtgtttggttttgagtttgggttttttaaaagcccatgaagtgagcgctgaagagattgcggatattttctacaaactcaacgccaaagagcctaaaatgaaaatcaaccacacgaaggggttttgcgctaaaggcgtgttcctccctaacccgcaagcaagagaggatttagaggtgccactactcaatgaaaaagaaatccctgcgtctgtaaggtattctttagggggcgtggcgatggacgataaaagcaaggttaggggaatggcgttaaaactagaaaatcaaaacgctagttggacaatggtgatgctcaatacagaaatcaattttgccaaaaaccctgaagaattcgcccaattttttgaaatgagacttcctaaaaatggccaaggtaga

SEQ ID NO: 4115 - DNA (genomic), 789 bp, Helicobacter pylori; double-stranded, circular
  misc_feature (B) LOCATION 1...789
  hypothetical: NO
  anti-sense: NO
atgaaaaaaattggtttgagcttgtgtttggttttgagtttgggttttttaaaagcccatgaagtgagcgctgaagagattgcggatattttctacaaactcaacgccaaagagcctaaaatgaaaatcaaccacacgaaggggttttgcgctaaaggcgtgttcctccctaacccgcaagcaagagaggatttagaggtgccactactcaatgaaaaagaaatccctgcgtctgtaaggtattctttagggggcgtggcgatggacgataaaagcaaggttaggggaatggcgttaaaactagaaaatcaaaacgctagttggacaatggtgatgctcaatacagaaatcaattttgccaaaaaccctgaagaattcgcccaattttttgaaatgagacttcctaaaaatggcaaggtagatgaagcaagaatcaaaaagctttacgaagaagtcccctcttataggaattttgccgcctatatgaaaacgatagggattagctcaagcgtggctaatacgccttattatagcgtgcatgcgttcaagtttaaagataagaaagaaaaattattgcctgcgaggtggaaatttgtgcctaaagagggcgttaaatacttaaatcctcaagaattaaagcaaaaagattcaaattatctgctctcttcattccaacaacaccttaaaaataaacccatagaataccaaatgtatttggtgtttgcgaatcaaaatgatgccaccaacgacacgaccgcgctttggaaaggcagcataaggaattattag

SEQ ID NO: 4116 - DNA (genomic), 345 bp, Helicobacter pylori; double-stranded, circular
  misc_feature (B) LOCATION 1...345
  hypothetical: NO
  anti-sense: NO
atgaaacgaccgatcagcaaattgaaacaaaactttttacaattcaaacattctttcaacaaacatttagataagtacagcctttattataggctgttcaatatcagctctatcgttataggttttttaatagcgcttttttcttatggggcaggggtgattttagtttatccaatattattcttgtttgctcttataataaaacctagctttttttattacactacttatcttttgctactcgtttctctcagcataataagcaaatactatctcctaagccacgcaaatttcacaatgaagctaatcatgcttatgactcaatggcaaaattggttcttatga

SEQ ID NO: 4117 - DNA (genomic), 342 bp, Helicobacter pylori; double-stranded, circular
  misc_feature (B) LOCATION 1...342
  hypothetical: NO
  anti-sense: NO
atgaaacgaccgatcagcaaattgaaacaaaactttttacaattcaaacattctttcaacaaacatttagataagtacagcctttattataggctgttcaatatcagctctatcgttataggttttttaatagcgcttttttcttatggggcaggggtgattttagtttatccaatattattcttgtttgctcttataataaaacctagctttttttattacactacttatcttttgctactcgtttctctcagcataataagcaaatactatctcctaagccacgcaaatttcacaatgaagctaatcatgcttatgactcaatggcaaaattggttctta

SEQ ID NO: 4118 - DNA (genomic), 363 bp, Helicobacter pylori; double-stranded, circular
  misc_feature (B) LOCATION 1...363
  hypothetical: NO
  anti-sense: NO
actagttctttcaaaaccaaaatgaaacgaccgatcagcaaattgaaacaaaactttttacaattcaaacattctttcaacaaacatttagataagtacagcctttattataggctgttcaatatcagctctatcgttataggttttttaatagcgcttttttcttatggggcaggggtgattttagtttatccaatattattcttgtttgctcttataataaaacctagctttttttattacactacttatcttttgctactcgtttctctcagcataataagcaaatactatctcctaagccacgcaaatttcacaatgaagctaatcatgcttatgactcaatggcaaaattggttctta

SEQ ID NO: 4119 - DNA (genomic), 345 bp, Helicobacter pylori; double-stranded, circular
  misc_feature (B) LOCATION 1...345
  hypothetical: NO
  anti-sense: NO
cgcttacgcaaggcatgcgttttaaaacaccctgagagttgctacaatttaggcatcatttatgatagaaaaatcaaaggcaatgccgctcaagcggttacttactatcaaaaaagctgtaattttgatatggctaaggggtgttatattttaggcactgcctatgaaaaaagctttttaaaattcaaacaaagcaaccataaagccgttatctattatttgaaagcgtgccgattgaatgaggggcaggcttgccgagcgttagggagtttgtttgaaaatggcgatgcagggcttgatgaagattttgaagtggcgtttgattatttgcaaaaagcttgcgct

SEQ ID NO: 4120 - DNA (genomic), 384 bp, Helicobacter pylori; double-stranded, circular
  misc_feature (B) LOCATION 1...384
  hypothetical: NO
  anti-sense: NO
atgaatatcaaaattttaaaaatattagttggagggttattttttttgagcttgaacgcccatttatgggggaaacaagacaatagctttttagggattggtgaaagagcctataaaagcgggaattattctaaagcggcgtcttattttaaaaaagcatgcaacgatggggtgagtgaaggctgcacgcaattaggaatcatttatgaaaacgggcaaggcactagaatagattataaaaaagccctagaatattataaaaccgcatgccaggctgatgatagggaagggtgttttggcttaggggggctttatgatgagggtttaggcacggctcaaaattatcaagaagccmttgacgcttacgcaaggcatgcgttttaa

SEQ ID NO: 4121 - DNA (genomic), 381 bp, Helicobacter pylori; double-stranded, circular
  misc_feature (B) LOCATION 1...381
  hypothetical: NO
  anti-sense: NO
ttatttgcaaaaagcttgcgcttaaacaattctggtggttgcgcgagtttaggctctatgtatatgttgggcaggtatgttaaaaaagacccccaaaaggcttttaactatttcaagcaagcatgcgatatggggagcgcggtgagttgctctaggatgggctttatgtattcgcaaggggacactgtttcaaaagacttgaggaaagcccttgataattatgaaagaggttgcgatatgggcgatgaagtgggttgcttcgctctagcgggcatgtattacaacatgaaagataaagaaaacgccataatgatttatgacaagggctgtaaattgggcatgaaacaggcatgcgaaaatctcaccaaactcagggggtat

SEQ ID NO: 4122 - DNA (genomic), 393 bp, Helicobacter pylori; double-stranded, circular
  misc_feature (B) LOCATION 1...393
  hypothetical: NO
  anti-sense: NO
aagaaggtaaagatgaatatcaaaattttaaaaatattagttggagggttattttttttgagcttgaacgcccatttatgggggaaacaagacaatagctttttagggattggtgaaagagcctataaaagcgggaattattctaaagcggcgtcttattttaaaaaagcatgcaacgatggggtgagtgaaggctgcacgcaattaggaatcatttatgaaaacgggcaaggcactagaatagattataaaaaagccctagaatattataaaaccgcatgccaggctgatgatagggaagggtgttttggcttaggggggctttatgatgagggtttaggcacggctcaaaattatcaagaagccattgacgcttacgcaaggcatgcgttt

SEQ ID NO: 4123 - DNA (genomic), 1068 bp, Helicobacter pylori; double-stranded, circular
  misc_feature (B) LOCATION 1...1068
  hypothetical: NO
  anti-sense: NO
atgaatatcaaaattttaaaaatattagttggagggttattttttttgagcttgaacgcccatttatgggggaaacaagacaatagctttttagggattggtgaaagagcctataaaagcgggaattattctaaagcggcgtcttattttaaaaaagcatgcaacgatggggtgagtgaaggctgcacgcaattaggaatcatttatgaaaacgggcaaggcactagaatagattataaaaaagccctagaatattataaaaccgcatgccaggctgatgatagggaagggtgttttggcttaggggggctttatgatgagggtttaggcacggctcaaaattatcaagaagccattgacgcttacgctaaggcatgcgttttaaaacaccctgagagttgctacaatttaggcatcatttatgatagaaaaatcaaaggcaatgccgctcaagcggttacttactatcaaaaaagctgtaattttgatatggctaaggggtgttatattttaggcactgcctatgaaaaaggctttttagaagtcaaacagagcaaccataaagccgttatctattatttgaaagcgtgccgattgaatgaggggcaggcttgccgagcgttagggagtttgtttgaaaatggcgatgcagggcttgatgaagattttgaagtggcgtttgattatttgcaaaaagcttgcgctttaaacaattctggtggttgcgcgagtttaggctctatgtatatgttgggcaggtatgttaaaaaagacccccaaaaggcttttaactatttcaagcaagcatgcgatatggggagcgcggtgagttgctctaggatgggctttatgtattcgcaaggggacactgtttcaaaagacttgaggaaagcccttgataattatgaaagaggttgcgatatgggcgatgaagtgggttgcttcgctctagcgggcatgtattacaacatgaaagataaagaaaacgccataatgatttatgacaagggctgtaaattgggcatgaaacaggcatgcgaaaatctcaccaaactcagggggtattag

SEQ ID NO: 4124 - DNA (genomic), 372 bp, Helicobacter pylori; double-stranded, circular
  misc_feature (B) LOCATION 1...372
  hypothetical: NO
  anti-sense: NO
atgcgtttattgatcgcgctagttttgttcttatggtggttaaatttaggcgctaaagaagcggatttcatctctgattgggaatacggactggccctttataaaaaccctaggggtgttgcgtgcgcaaaatgccatggcattaaaggcgaacaacaagaaatcaccttttattatgaaaaaggcgaaaaaaaaatcctttacgcccctaaaatcaaccatttggattttaaaacctttaaagacgccttgagtttgggcaaaggcatgatgcctaaatacaacctgaatttagaagaaatccaagcgatttacctttacatcacctctttagggcataaagacgagcgtaaggatccttccaagccttaa

SEQ ID NO: 4125 - DNA (genomic), 444 bp, Helicobacter pylori; double-stranded, circular
  misc_feature (B) LOCATION 1...444
  hypothetical: NO
  anti-sense: NO
tttggttcaagagcttttagaagaatttttacaaagtggggcgaaagagattttagaaaaggcgcagttgttttaatgcgtttattgatcgcgctagttttgttcttatggtggttaaatttaggcgctaaagaagcggatttcatctctgattgggaatacggactggccctttataaaaaccctaggggtgttgcgtgcgccaaatgccatggcattaaaggcgaacaacaagaaatcaccttttattatgaaaaaggcgaaaaaaaaatcctttacgcccctaaaatcaaccatttggattttaaaacctttaaagacgccttgagtttgggtttttgtatgatgcctacatacaacctgaatttagaagaaatccaagcgatttacctttacatcacctctttagggcataaagacgagcgtaaggatccttccaagcct

SEQ ID NO: 4126 - DNA (genomic), 138 bp, Helicobacter pylori; double-stranded, circular
  misc_feature (B) LOCATION 1...138
  hypothetical: NO
  anti-sense: NO
agcaattcggctaaaaaagcggctttgatccaagaagaaatggcgaaagctagggctaggggagcgagcgtggaagataaaatctctattctcgaaaagatttattccacccaatacgatataacgtcaaaaagagcc

SEQ ID NO: 4127 - DNA (genomic), 495 bp, Helicobacter pylori; double-stranded, circular
  misc_feature (B) LOCATION 1...495
  hypothetical: NO
  anti-sense: NO
atgcaggataatttagtgagcgtgattgaaaaacaaaccaataaaaaggtgcgtatgttagaaatcaaacctttaaaatccagccaggatttaaaaatggtcgttattgaagatccggacactaaatacaatatcccgcttgtagtgagtaaggatggtaattcagtcatagggcttagcaatatcttttttagcaataaaagcgatgatgtgaaattagttgcagaaaccaatcaaaaaatccaagcccttaacgctacccagcaaaacagcgcgaaattgaacgctatttttaatgaaataccggctgattatgcgatagagttgccctctactaacgctgaaaataaggataaaatcctttacattgtttctgatcccatgtgcccgcattgccaaaaagagctcactaaactcagggatcacttaaaagaaaacactgtgagaatggttgtagtggggtggcttgaagcaattcggctaaaaaagcggctt

SEQ ID NO: 4128 - DNA (genomic), 492 bp, Helicobacter pylori; double-stranded, circular
  misc_feature (B) LOCATION 1...492
  hypothetical: NO
  anti-sense: NO
caggataatttagtgagcgtgattgaaaaacaaaccaataaaaaggtgcgtatgttagaaatcaaacctttaaaatccagccaggatttaaaaatggtcgttattgaagatccggacactaaatacaatatcccgcttgtagtgagtaaggatggtaattcagtcatagggcttagcaatatcttttttagcaataaaagcgatgatgtgaaattagttgcagaaaccaatcaaaaaatccaagcccttaacgctacccagcaaaacagcgcgaaattgaacgctatttttaatgaaataccggctgattatgcgatagagttgccctctactaacgctgaaaataaggataaaatcctttacattgtttctgatcccatgtgcccgcattgccaaaaagagctcactaaactcagggatcacttaaaagaaaacactgtgagaatggttgtagtggggtggcttgaagcaattcggctaaaaaagcggctt

SEQ ID NO: 4129 - DNA (genomic), 798 bp, Helicobacter pylori; double-stranded, circular
  misc_feature (B) LOCATION 1...798
  hypothetical: NO
  anti-sense: NO
atgatattaagagcgagcgtgttgagcgcgttacttcttgtaggcttaggggcagcccctaaacattcagtttcagctagtgacaaacggatgcaggataatttagtgagcgtgattgaaaaacaaaccaataaaaaggtgcgtattttagaaatcaaacctttaaaatccagccaggatttaaaaatggtcgttattgaagatccggacactaaatacaatatcccgcttgtagtgagtaaggatggtaattcagtcatagggcttagcaatatcttttttagcaataaaagcgatgatgtgaaattagttgcagaaaccaatcaaaaaatccaagcccttaacgctacccagcaaaacagcgcgaaattgaacgctatttttaatgaaataccggctgattatgcgatagagttgccctctactaacgctgaaaataaggataaaatcctttacattgtttctgatcccatgtgcccgcattgccaaaaagagctcactaaactcagggatcacttaaaagaaaacactgtgagaatggttgtagtggggtggcttggagtcaattcggctaaaaaagcggctttgatccaagaagaaatggcgaaagctagggctaggggagcgagcgtggaagataaaatctctattcttgaaaagatttattccacccaatacgatattaacgctcaaaaagagcctgaagatttacgcactaaagtggaaaataccactaaaaagatttttgaatctggcgtgattaagggtgtgcctttcttgtatcattataaggcatga

SEQ ID NO: 4130 - DNA (genomic), 345 bp, Helicobacter pylori; double-stranded, circular
  misc_feature (B) LOCATION 1...345
  hypothetical: NO
  anti-sense: NO
aggagtgggaatacgactttgccttacaaaagatcaagctccctaacggcgagagccttagttttgagtagcgatcctgtggagtttaaggaagcgagcgggaaatattggctgagcgtgaatcaaaacgcgtatttaaaaataagctccaataaccctttgtggcaacccaaaatcattttttatgatgaaaacttaaagatcattcaaatcattgctaaagaaaacagacaacaagaaatcgctcttaacttgcttgatggcgtgcgttttatccatatcactgacgcaaaaaaccctatcattttaaaaaatgggattagcgtggtttttgatgcgatgcct

SEQ ID NO: 4131 - DNA (genomic), 567 bp, Helicobacter pylori; double-stranded, circular
  misc_feature (B) LOCATION 1...567
  hypothetical: NO
  anti-sense: NO
ggcccaatacaaagcgctccagcaatgaacaagctttttttagcttttattgttgggggaatgcttttaagtgctgatgctttaaacgataagattgagaatttaatgggggagcgatcctaccacatgaacaagctttttttagagcgtttgtttaaaaatcgtaaggatttctatgaaatggggcgtttggattccttaaaactactcaacactctcaaagaaaacgggcttttatcgtttaattttgacaaaccaagcgtgttaaaaatcactttcaaggcttcaagtaatcccctagcgtttgccaaaagcatcaacaattctttgaatatgatggggtattcgtatgttttgcctattagaatgcaaagctcttcaggcgagaatgttttttcatacgagcttaaaacggaatacgttttagaccctaacattttgatagagacgatgaaaaggcatggttttgattttatggatattagacgggtgtctttaaaggagtgggaatacgactttgccttacaaaagatcaagctccctaacggcgagagccttagttttgag

SEQ ID NO: 4132 - DNA (genomic), 822 bp, Helicobacter pylori; double-stranded, circular
  misc_feature (B) LOCATION 1...822
  hypothetical: NO
  anti-sense: NO
atgaacaagctttttttagcttttattgttgggggaatgcttttaagtgctgatgctttaaacgataagattgagaatttaatgggggagcgatcctaccacatgaacaagctttttttagagcgtttgtttaaaaatcgtaaggatttctatgaaatggggcgtttggattccttaaaactactcaacactctcaaagaaaacgggcttttatcgtttaattttgacaaaccaagcgtgttaaaaatcactttcaaggcttcaagtaatcccctagcgtttgccaaaagcatcaacaattctttgaatatgatggggtattcgtatgttttgcctattagaatgcaaagctcttcaggcgagaatgttttttcatacgagcttaaaacggaatacgttttagaccctaacattttgatagagacgatgaaaaggcatggttttgattttatggatattagacgggtgtctttaaaggagtgggaatacgactttgccttacaaaagatcaagctccctaacgcgagagccttagttttgagtagcgatcctgtggagtttaaggaagcgagcgggaaatattggctgagcgtgaatcaaaacgcgtatttaaaaataagctccaataaccctttgtggcaacccaaaatcattttttatgatgaaaacttaaagatcattcaaatcattgctaaagaaaacagacaacaagaaatcgctcttaacttgcttgatggcgtgcgttttatccatatcactgacgcaaaaaaccctatcattttaaaaaatgggattagcgtggtttttgatgcgatgccttaa

SEQ ID NO: 4133 - DNA (genomic), 819 bp, Helicobacter pylori; double-stranded, circular
  misc_feature (B) LOCATION 1...819
  hypothetical: NO
  anti-sense: NO
atgaacaagctttttttagcttttattgttgggggaatgcttttaagtgctgatgctttaaacgataagattgagaatttaatgggggagcgatcctaccacatgaacaagctttttttagagcgtttgtttaaaaatcgtaaggatttctatgaaatggggcgtttggattccttaaaactactcaacactctcaaagaaaacgggcttttatcgtttaattttgacaaaccaagcgtgttaaaaatcactttcaaggcttcaagtaatcccctagcgtttgccaaaagcatcaacaattctttgaatatgatggggtattcgtatgttttgcctattagaatgcaaagctcttcaggcgagaatgttttttcatacgagcttaaaacggaatacgttttagaccctaacattttgatagagacgatgaaaaggcatggttttgattttatggatattagacgggtgtctttaaaggagtgggaatacgactttgccttacaaaagatcaagctccctaacgcgagagccttagttttgagtagcgatcctgtggagtttaaggaagcgagcgggaaatattggctgagcgtgaatcaaaacgcgtatttaaaaataagctccaataaccctttgtggcaacccaaaatcattttttatgatgaaaacttaaagatcattcaaatcattgctaaagaaaacagacaacaagaaatcgctcttaacttgcttgatggcgtgcgttttatccatatcactgacgcaaaaaaccctatcattttaaaaaatgggattagcgtggtttttgatgcgatgcct

SEQ ID NO: 4134 - DNA (genomic), 354 bp, Helicobacter pylori; double-stranded, circular
  misc_feature (B) LOCATION 1...354
  hypothetical: NO
  anti-sense: NO
gtgatgctaatggcaatttttaccccttatattcttattttgaaaatgatgaaaaagtctatgagtttattcgccaatatggggttggagcaaattttttgcaacagagacattaaagatttaaatgattttgtttttggtatagaagtggggcttgatagcaatgcgagaaaaaatcgtagcagaaaggctatggaaaatcatcttatcggtctttttgtccaagctcaattaaattttaaagaacaagtagatattagagaatttgaggatttacgccaggcttttggaaatgatactaaaaaatttgattttgttatttttagcaaagagaaaacttattttcatagaagc

SEQ ID NO: 4135 - DNA (genomic), 357 bp, Helicobacter pylori; double-stranded, circular
  misc_feature (B) LOCATION 1...357
  hypothetical: NO
  anti-sense: NO
gtgatgctaatggcaatttttaccccttatattcttattttgaaaatgatgaaaaagtctatgagtttattcgccaatatggggttggagcaaattttttgcaacagagacattaaagatttaaatgattttgtttttggtatagaagtggggcttgatagcaatgcgagaaaaaatcgtagcagaaaggctatggaaaatcatcttatcggtctttttgtccaagctcaattaaattttaaagaacaagtagatattagagaatttgaggatttacgccaggcttttggaaatgatactaaaaaatttgattttgttatttttagcaaagagaaaacttattttcatagaagctaa

SEQ ID NO: 4136 - DNA (genomic), 357 bp, Helicobacter pylori; double-stranded, circular
  misc_feature (B) LOCATION 1...357
  hypothetical: NO
  anti-sense: NO
tgcgtgatgctaatggcaatttttaccccttatattcttattttgaaaatgatgaaaaagtctatgagtttattcgccaatatggggttggagcaaattttttgcaacagagacattaaagatttaaatgattttgtttttggtatagaagtggggcttgatagcaatgcgagaaaaaatcgtagcagaaaggctatggaaaatcatcttatcggtctttttgtccaagctcaattaaattttaaagaacaagtagatattagagaatttgaggatttacgccaggcttttggaaatgatactaaaaaatttgattttgttatttttagcaaagagaaaacttattttcatagaagc

SEQ ID NO: 4137 - DNA (genomic), 345 bp, Helicobacter pylori; double-stranded, circular
  misc_feature (B) LOCATION 1...345
  hypothetical: NO
  anti-sense: NO
atgcgcattatcataaggttactttcatttaaaatgaacgcttttttaaaactcgcgctcgcttctttgatgggggggctttggtatgctttcaatggcgaaggctctgagattgtcgctatagggatttttgtgttgatcttgtttgttttttttatccgccctgtgagtttccaagacccagaaaaacgagaagaatacatagaacggcttaaaaaaaaccatgagaggaaaatgatcttacaagacaagcaaaaagaagagcaaatgcgcctctatcaagccaaaaaagagcgagagagcaggcaaaaacaagaccttaaagaacaaatgaaaaaatactca

SEQ ID NO: 4138 - DNA (genomic), 351 bp, Helicobacter pylori; double-stranded, circular
  misc_feature (B) LOCATION 1...351
  hypothetical: NO
  anti-sense: NO
ttgatgcgcattatcataaggttactttcatttaaaatgaacgcttttttaaaactcgcgctcgcttctttgatgggggggctttggtatgctttcaatggcgaaggctctgagattgtcgctatagggatttttgtgttgatcttgtttgttttttttatccgccctgtgagtttccaagacccagaaaaacgagaagaatacatagaacggcttaaaaaaaaccatgagaggaaaatgatcttacaagacaagcaaaaagaagagcaaatgcgcctctatcaagccaaaaaagagcgagagagcaggcaaaaacaagaccttaaagaacaaatgaaaaaatactcataa

SEQ ID NO: 4139 - DNA (genomic), 351 bp, Helicobacter pylori; double-stranded, circular
  misc_feature (B) LOCATION 1...351
  hypothetical: NO
  anti-sense: NO
ggcttgatgcgcattatcataaggttactttcatttaaaatgaacgcttttttaaaactcgcgctcgcttctttgatgggggggctttggtatgctttcaatggcgaaggctctgagattgtcgctatagggatttttgtgttgatcttgtttgttttttttatccgccctgtgagtttccaagacccagaaaaacgagaagaatacatagaacggcttaaaaaaaaccatgagaggaaaatgatcttacaagacaagcaaaaagaagagcaaatgcgcctctatcaagccaaaaaagagcgagagagcaggcaaaaacaagaccttaaagaacaaatgaaaaaatactca

SEQ ID NO: 4140 - DNA (genomic), 660 bp, Helicobacter pylori; double-stranded, circular
  misc_feature (B) LOCATION 1...660
  hypothetical: NO
  anti-sense: NO
gtgggcaatgccggggtggctttagcgggtttgatgagcgatgaaatttatttgtgcgctttagattgcgcttatatcaaagggtttaaaaagcacgctcaaaattcctattatggagatgaaaaagagattgacacctcatctttaatcagcgtagagggtaatgttgaaggttatgaaacttttagcgactcgctttttttgctctctaaagaaaggattgaagaagcccttcattattaccagcctaaaaaagtctataatttaagctatggggcgaaaatcaagcacgccgttagcctcaatcactctcaagtgaaattgaaacaaatcaacaaacaagacgctatcgttcgcattaaaagcatgtttagccctagaagtaatcatgctaaggatttaaaaaatttacaaaaaaatctgattcgttttaaagaggattttttcacgcatttaaacacgccttgtaaaaccaagcaagaagcatttgaatgggtggatagcttgagtggattttgccaaacagccagcgctaaaacccccactataggcattttatttgaagggagtgtcgcccatatcttacaaagcgttctaatcgtttcattgcatcttaaagaaaatgagctgacgcttttatcaaattctctcaaaacgcct

SEQ ID NO: 4141 - DNA (genomic), 717 bp, Helicobacter pylori; double-stranded, circular
  misc_feature (B) LOCATION 1...717
  hypothetical: NO
  anti-sense: NO
atgatttatggcgttttagacggcttgtttttggctattttacaggctcaaaattaccgcttccattcgctttatttgtttgaagaaaatttagacttgtttaaaatcagttgctattttgcgcgttatgaagatttgattaaaaaaggggctaaactttttattcaagggttttttaaccctaatgaattgaaaatggattttttgaaacgccctatcacgcattcttttttaaagctagaaatcatgccctataaaagcgcttttaatttgcgcatgcgagaaaacattcaaagctattacaaacaagccttaaggggttgggggagttttgaagacgaattgctagggttaaagaacacgcttaaaaacttacccctataccaaaccctaaaaaccaaacccaaaaaaattaacgcccccatttgcgtggtgggtaatgggccaagcctggatttattgttagattttttaaaagaaaatgaagaaaaattcatcattttttcatgcggaaccgctttaaagcctttaaaagcgcatggcgttaaagtggattttcaaatagaagtggagcgcatagactatcttaaggaggttttagaaagagcccccctagaagacacccccttaatgggcgctaacatgctcaatcctaacgcttttgatttagccaaagaagcgttgatgtttatgcgtggggggagcgcttgcgcagta

SEQ ID NO: 4142 - DNA (genomic), 726 bp, Helicobacter pylori; double-stranded, circular
  misc_feature (B) LOCATION 1...726
  hypothetical: NO
  anti-sense: NO
tgtttatgcgtggggggagcgcttgcgcatataagccctttgagtatagaatacgcagcgccttttgtgggcaatgccggggtggctttagcgggtttgatgagcgatgaaatttatttgtgcgctttagattgcgcttatatcaaagggtttaaaaagcacgctcaaaattcctattatggagatgaaaaagagattgacacctcatctttaatcagcgtagagggtaatgttgaaggttatgaaacttttagcgactcgctttttttgctctctaaagaaaggattgaagaagcccttcattattaccagcctaaaaaagtctataatttaagctatggggcgaaaatcaagcacgccgttagcctcaatcactctcaagtgaaattgaaacaaatcaacaaacaagacgctatcgttcgcattaaaagcatgtttagccctagaagtaatcatgctaaggatttaaaaaatttacaaaaaaatctgattcgttttaaagaggattttttcacgcatttaaacacgccttgtaaaaccaagcaagaagcatttgaatgggtggatagcttgagtggattttgccaaacagccagcgctaaaacccccactataggcattttatttgaagggagtgtcgcccatatcttacaaagcgttctaatcgtttcattgcatcttaaagaaaatgagctgacgcttttatcaaattctctcaaaacgcct

SEQ ID NO: 4143 - DNA (genomic), 1215 bp, Helicobacter pylori; double-stranded, circular
  misc_feature (B) LOCATION 1...1215
  hypothetical: NO
  anti-sense: NO
atgccctttttaaaagccctagcatcttttgatgcgccctttttagaaaaagaaatttcaaagcgttttagggataatttagtttttttcaaatcttatcaccctaatctgtttaacgccctcaatacgccttttaaaaattaccaattgctttttgaaacaaaccatcttaatctcttacacacgcccacgaacgctttaagctaccctaaacatcaaatgatagaaaccgcttttaacatggctaaaaaccccttgaataatcccagatggtcattagacaataaccacctctctttacattatttaaaatctcaaaacaaccacaaactccccctaacccttaaagccacgcatgcgatctcaaactttttagataatcatcaaacgccttgctctttaaagaaattcctaccccctaccatgatttatggcgttttagacggcttgtttttggctattttacaggctcaaaattaccgcttccattcgctttatttgtttgaagaaaatttagacttgtttaaaatcagttgctattttgcgcgttatgaagatttgattaaaaaaggggctaaactttttattcaagggttttttaaccctaatgaattgaaaatggattttttgaaacgccctatcacgcattcttttttaaagctagaaatcatgccctataaaagcgcttttaatttgcgcatgcgagaaaacattcaaagctattacaaacaagccttaaggggttgggggagttttgaagacgaattgctaggggtaaagaacacgcttaaaaacttacccctatgccaaaccctaaaaaccaaacccaaaaaaattaacgcccccatttgcgtggtgggtaatgggccaagcctggatttattgttagattttttaaaagaaaatgaagaaaaattcatcattttttcatgcggaaccgctttaaagcctttaaaagcgcatggcgttaaagtggattttcaaatagaagtggagcgcatagactatcttaaggaggttttagaaagagcccccctagaagacacccccttaatgggcgctaacatgctcaatcctaacgcttttgatttagccaaagaagcgttgatgtttatgcgtggggggagcgcttgcgcatataagccctttgagtatagaatacgcagcgccttttgtgggcaatgccggggtggctttagcgggtttgatgagcga

SEQ ID NO: 4144 - DNA (genomic), 1896 bp, Helicobacter pylori; double-stranded, circular
  misc_feature (B) LOCATION 1...1896
  hypothetical: NO
  anti-sense: NO
atgccctttttaaaagccctagcatcttttgatgcgccctttttagaaaaagaaatttcaaagcgttttagggataatttagtttttttcaaatcttatcaccctaatctgtttaacgccctcaatacgccttttaaaaattaccaattgctttttgaaacaaaccatcttaatctcttacacacgcccacgaacgctttaagctaccctaaacatcaaatgatagaaaccgcttttaacatggctaaaaaccccttgaataatcccagatggtcattagacaataaccacctctctttacattatttaaaatctcaaaacaaccacaaactccccctaacccttaaagccacgcatgcgatctcaaactttttagataatcatcaaacgccttgctctttaaagaaattcctaccccctaccatgatttatggcgttttagacggcttgtttttggctattttacaggctcaaaattaccgcttccattcgctttatttgtttgaagaaaatttagacttgtttaaaatcagttgctattttgcgcgttatgaagatttgattaaaaaaggggctaaactttttattcaagggttttttaaccctaatgaattgaaaatggattttttgaaacgccctatcacgcattcttttttaaagctagaaatcatgccctataaaagcgcttttaatttgcgcatgcgagaaaacattcaaagctattacaaacaagccttaaggggttgggggagttttgaagacgaattgctagggttaaagaacacgcttaaaaacttacccctataccaaaccctaaaaaccaaacccaaaaaaattaacgcccccatttgcgtggtgggtaatgggccaagcctggatttattgttagattttttaaaagaaaatgaagaaaaattcatcattttttcatgcggaaccgctttaaagcctttaaaagcgcatggcgttaaagtggattttcaaatagaagtggagcgcatagactatcttaaggaggttttagaaagagcccccctagaagacacccccttaatgggcgctaacatgctcaatcctaacgcttttgatttagccaaagaagcgttgatgtttatgcgtggggggagcgcttgcgcgtatataagccctttgagtatagaatacgcagcgccttttgtgggcaatgccggggtggctttagcgggtttgatgagcgatgaaatttatttgtgcgctttagattgcgcttatatcaaagggtttaaaaagcacgctcaaaattcctattatggagatgaaaaagagattgacacctcatctttaatcagcgtagagggtaatgttgaaggttatgaaacttttagcgactcgctttttttgctctctaaagaaaggattgaagaagcccttcattattaccagcctaaaaaagtctataatttaagctatggggcgaaaatcaagcacgccgttagcctcaatcactctcaagtgaaattgaaacaaatcaacaaacaagacgctatcgttcgcattaaaagcatgtttagccctagaagtaatcatgctaaggatttaaaaaatttacaaaaaaatctgattcgttttaaagaggattttttcacgcatttaaacacgccttgtaaaaccaagcaagaagcatttgaatgggtggatagcttgagtggattttgccaaacagccagcgctaaaacccccactataggcattttatttgaagggagtgtcgcccatatcttacaaagcgttctaatcgtttcattgcatcttaaagaaaatgagctgacgcgttttatcaaattctctcaaaacgccttaaaacaattccttaaaaaagcttgtttgttattgcaaatgcaactcaaacaaccatga

SEQ ID NO: 4145 - DNA (genomic), 252 bp, Helicobacter pylori; double-stranded, circular
  misc_feature (B) LOCATION 1...252
  hypothetical: NO
  anti-sense: NO
atgaattacgatgttttaatgggatttttagcactaatcttgctaattctttggtatgcctatggattaaggcaatatcttaaattaaaagataagaataagagattaaaagagaaattacaacgctgtaattgtaatattaaaattcctagtattcttgaaatggcgcataaacctatcattatggatattaagggggaattgctaccacatcttacagagagttatagaaaatcaaaatttaaggagtaa

SEQ ID NO: 4146 - DNA (genomic), 261 bp, Helicobacter pylori; double-stranded, circular
  misc_feature (B) LOCATION 1...261
  hypothetical: NO
  anti-sense: NO
ggagttaaagcaatgaattacgatgttttaatgggatttttagcactaatcttgctaattctttggtatgcctatggattaaggcaatatcttaaattaaaagataagaataagagattaaaagagaaattacaacgctgtaattgtaatattaaaattcctagtattcttgaaatggcgcataaacctatcattatggatattaagggggaattgctaccacatcttacagagagttatagaaaatcaaaatttaaggag

SEQ ID NO: 4147 - DNA (genomic), 774 bp, Helicobacter pylori; double-stranded, circular
  misc_feature (B) LOCATION 1...774
  hypothetical: NO
  anti-sense: NO
ctccttaaaaatattgatgagaaaaagctttccgtaagtaaggtaaatgaaaaaaggcacatggattttaaaaaatgccctaattttgaaaaaaaatgtgcgtttctttgtttctcaaatttggttttacttattgaaatccactctaaaggactacacatgcaaaaaaagaaacccaagaacccgcaaccgaatttatttagcatcttagataagggcgatgttgcaacaaacaatcctgttgaagagtcagacaaggccaataaaatacaagagccactcccttatgtcgtgaaaacgcaaatcaataaagcaagcatgatttctagagatcctattgaatgggcaaagtatttaagctttgaaaaacgagtctataaggataatagtaaagaagatgtcaatttctttgccaatggtgagataaaagaaagttctcgtgtttatgaagcgaataaagaagggtttgaaaggcgcatcactaaaagatacgatctgattgatagaaatattgatagaaatagagaattttttataaaagaaattgaaattctaacccacacaaacagcttaaaagaattgaaagagcaagggttagaaatccaattgacccaccataatgaaacgcataagaaagccttagaaaatggcaatgaaatcgttaaagaatacgaccatcttaaagatatttaccaagaagtagaaagaacaaaagatggtggattggtaagagaaataatccccagtatttctagcgctgagtatttcaccctt

SEQ ID NO: 4148 - DNA (genomic), 1299 bp, Helicobacter pylori; double-stranded, circular
  misc_feature (B) LOCATION 1...1299
  hypothetical: NO
  anti-sense: NO
atgcaaaaaaagaaacccaagaacccgcaaccgaatttatttagcatcttagataagggcgatgttgcaacaaacaatcctgttgaagagtcagacaaggccaataaaatacaagagccactcccttatgtcgtgaaaacgcaaatcaataaagcaagcatgatttctagagatcctattgaatgggcaaagtatttaagctttgaaaaacgagtctataaggataatagtaaagaagatgtcaatttctttgccaatggtgagataaaagaaagttctcgtgtttatgaagcgaataaagaagggtttgaaaggcgcatcactaaaagatacgatctgattgatagaaatattgatagaaatagagaattttttataaaagaaattgaaattctaacccacacaaacagcttaaaagaattgaaagagcaagggttagaaatccaattgacccaccataatgaaacgcataagaaagccttagaaaatggcaatgaaatcgttaaagaatacgaccatcttaaagatatttaccaagaagtagaaagaacaaaagatggtggattggtaagagaaataatccccagtatttctagcgctgagtatttcaagctttacaacaaactgccttttgaatcaataaacaatgaaaataccaaactgaatactaacgacaatgaagaagttaaaaaactagaatttgaattagctaaagaagtgcatattttaatcctagagcaacaattgctttcagcaacaaattattattcttggatagataaagatgataatgcgaattttgcttggaaaatgcataggcttatcaatgaaaataaactcaaagaaaaccatctcagcgccaataacgctaataagattaagcaatttttctttaataatggttctattttaggctggactaaagaagaacaaagcgctatacaagaaaacagagattattctttaagaagcgctcttttaagtttagaagaaatcgctcaagcaaaaattgaattgcaaaaatactatgaaagcgtttatgttaatggtgatgggaataaaagagaaatcaagccttttaaagaaattttaagagacaccaacaattttgaaaaagcttataaggagcgttatgacaaattggtaagcttgagtgcagcaatcattcaagctaaagagggtggtaatgagcgacaaaattctagtgcaaataacaataaccctattaaaaatacaatagagactaatacttctaacaatattattcaaaataatgataatataatcatccaaatttaa

SEQ ID NO: 4149 - DNA (genomic), 1326 bp, Helicobacter pylori; double-stranded, circular
  misc_feature (B) LOCATION 1...1326
  hypothetical: NO
  anti-sense: NO
aaggagcaacaaatggcttacaaacctaacaaaaagaagttaaaagaattaagagagcaaccgaatttatttagcatcttagataagggcgatgttgcaacaaacaatcctgttgaagagtcagacaaggccaataaaatacaagagccactcccttatgtcgtgaaaacgcaaatcaataaagcaagcatgatttctagagatcctattgaatgggcaaagtatttaagctttgaaaaacgagtctataaggataatagtaaagaagatgtcaatttctttgccaatggtgagataaaagaaagttctcgtgtttatgaagcgaataaagaagggtttgaaaggcgcatcactaaaagatacgatctgattgatagaaatattgatagaaatagagaattttttataaaagaaattgaaattctaacccacacaaacagcttaaaagaattgaaagagcaagggttagaaatccaattgacccaccataatgaaacgcataagaaagccttagaaaatggcaatgaaatcgttaaagaatacgaccatcttaaagatatttaccaagaagtagaaagaacaaaagatggtggattggtaagagaaataatccccagtatttctagcgctgagtatttcaagctttacaacaaactgccttttgaatcaataaacaatgaaaataccaaactgaatactaacgacaatgaagaagttaaaaaactagaatttgaattagctaaagaagtgcatattttaatcctagagcaacaattgctttcagcaacaaattattattcttggatagataaagatgataatgcgaattttgcttggaaaatgcataggcttatcaatgaaaataaactcaaagaaaaccatctcagcgccaataacgctaataagattaagcaatttttctttaataatggttctattttaggctggactaaagaagaacaaagcgctatacaagaaaacagagattattctttaagaagcgctcttttaagtttagaagaaatcgctcaagcaaaaattgaattgcaaaaatactatgaaagcgtttatgttaatggtgatgggaataaaagagaaatcaagccttttaaagaaattttaagagacaccaacaattttgaaaaagcttataaggagcgttatgacaaattggtaagcttgagtgcagcaatcattcaagctaaagagggtggtaatgagcgacaaaattctagtgcaaataacaataaccctattaaaaatacaatagagactaatacttctaacaatattattcaaaataatgataatataatcatccaaatt

SEQ ID NO: 4150 - DNA (genomic), 1398 bp, Helicobacter pylori; double-stranded, circular
  misc_feature (B) LOCATION 1...1398
  hypothetical: NO
  anti-sense: NO
atggattttaaaaaatgccctaattttgaaaaaaaatgtgcgtttctttgtttctcaaatttggttttacttattgaaatccactctaaaggactacacatgcaaaaaaagaaacccaagaacccgcaaccgaatttatttagcatcttagataagggcgatgttgcaacaaacaatcctgttgaagagtcagacaaggccaataaaatacaagagccactcccttatgtcgtgaaaacgcaaatcaataaagcaagcatgatttctagagatcctattgaatgggcaaagtatttaagctttgaaaaacgagtctataaggataatagtaaagaagatgtcaatttctttgccaatggtgagataaaagaaagttctcgtgtttatgaagcgaataaagaagggtttgaaaggcgcatcactaaaagatacgatctgattgatagaaatattgatagaaatagagaattttttataaaagaaattgaaattctaacccacacaaacagcttaaaagaattgaaagagcaagggttagaaatccaattgacccaccataatgaaacgcataagaaagccttagaaaatggcaatgaaatcgttaaagaatacgaccatcttaaagatatttaccaagaagtagaaagaacaaaagatggtggattggtaagagaaataatccccagtatttctagcgctgagtatttcaagctttacaacaaactgccttttgaatcaataaacaatgaaaataccaaactgaatactaacgacaatgaagaagttaaaaaactagaatttgaattagctaaagaagtgcatattttaatcctagagcaacaattgctttcagcaacaaattattattcttggatagataaagatgataatgcgaattttgcttggaaaatgcataggcttatcaatgaaaataaactcaaagaaaaccatctcagcgccaataacgctaataagattaagcaatttttctttaataatggttctattttaggctggactaaagaagaacaaagcgctatacaagaaaacagagattattctttaagaagcgctcttttaagtttagaagaaatcgctcaagcaaaaattgaattgcaaaaatactatgaaagcgtttatgttaatggtgatgggaataaaagagaaatcaagccttttaaagaaattttaagagacaccaacaattttgaaaaagcttataaggagcgttatgacaaattggtaagcttgagtgcagcaatcattcaagctaaagagggtggtaatgagcgacaaaattctagtgcaaataacaataaccctattaaaaatacaatagagactaatacttctaacaatattattcaaaataatgataatataatcatccaaatttaa

SEQ ID NO: 4151 - DNA (genomic), 1395 bp, Helicobacter pylori; double-stranded, circular
  misc_feature (B) LOCATION 1...1395
  hypothetical: NO
  anti-sense: NO
atggattttaaaaaatgccctaattttgaaaaaaaatgtgcgtttctttgtttctcaaatttggttttacttattgaaatccactctaaaggactacacatgcaaaaaaagaaacccaagaacccgcaaccgaatttatttagcatcttagataagggcgatgttgcaacaaacaatcctgttgaagagtcagacaaggccaataaaatacaagagccactcccttatgtcgtgaaaacgcaaatcaataaagcaagcatgatttctagagatcctattgaatgggcaaagtatttaagctttgaaaaacgagtctataaggataatagtaaagaagatgtcaatttctttgccaatggtgagataaaagaaagttctcgtgtttatgaagcgaataaagaagggtttgaaaggcgcatcactaaaagatacgatctgattgatagaaatattgatagaaatagagaattttttataaaagaaattgaaattctaacccacacaaacagcttaaaagaattgaaagagcaagggttagaaatccaattgacccaccataatgaaacgcataagaaagccttagaaaatggcaatgaaatcgttaaagaatacgaccatcttaaagatatttaccaagaagtagaaagaacaaaagatggtggattggtaagagaaataatccccagtatttctagcgctgagtatttcaagctttacaacaaactgccttttgaatcaataaacaatgaaaataccaaactgaatactaacgacaatgaagaagttaaaaaactagaatttgaattagctaaagaagtgcatattttaatcctagagcaacaattgctttcagcaacaaattattattcttggatagataaagatgataatgcgaattttgcttggaaaatgcataggcttatcaatgaaaataaactcaaagaaaaccatctcagcgccaataacgctaataagattaagcaatttttctttaataatggttctattttaggctggactaaagaagaacaaagcgctatacaagaaaacagagattattctttaagaagcgctcttttaagtttagaagaaatcgctcaagcaaaaattgaattgcaaaaatactatgaaagcgtttatgttaatggtgatgggaataaaagagaaatcaagccttttaaagaaattttaagagacaccaacaattttgaaaaagcttataaggagcgttatgacaaattggtaagcttgagtgcagcaatcattcaagctaaagagggtggtaatgagcgacaaaattctagtgcaaataacaataaccctattaaaaatacaatagagactaatacttctaacaatattattcaaaataatgataatataatcatccaaatt

SEQ ID NO: 4152 - DNA (genomic), 219 bp, Helicobacter pylori; double-stranded, circular
  misc_feature (B) LOCATION 1...219
  hypothetical: NO
  anti-sense: NO
atgatggatttagaaagtttgagaggttttgcgtatgcgttttttaccattctttttacgctctttttgtatgcttatatttttagcatgtatagaaagcaaaaaaagggcatcgtggattatgagcgatacgggtatttagcgttaaatgatgctttagaagacgagttgattgaaccacgccataaagaagttcatgataaaggcataaaggaaagt

SEQ ID NO: 4153 - DNA (genomic), 222 bp, Helicobacter pylori; double-stranded, circular
  misc_feature (B) LOCATION 1...222
  hypothetical: NO
  anti-sense: NO
atgatggatttagaaagtttgagaggttttgcgtatgcgttttttaccattctttttacgctctttttgtatgcttatatttttagcatgtatagaaagcaaaaaaagggcatcgtggattatgagcgatacgggtatttagcgttaaatgatgctttagaagacgagttgattgaaccacgccataaagaagttcatgataaaggcataaaggaaagttga

SEQ ID NO: 4154 - DNA (genomic), 456 bp, Helicobacter pylori; double-stranded, circular
  misc_feature (B) LOCATION 1...456
  hypothetical: NO
  anti-sense: NO
atgagaaaaacgatttcagcgttgtttttatcagcgtgtatagggttatcgtctgttcatgcgagtaacgctttgattttacaaacagattttagcctaaaagatggggccgtctcggcgatgaaaggcgtcgctttcagcgttgattctaatcttaaaatctttgatttaacgcacgaaatccccccgtataacatttgggaaggcgcttaccgcttgtatcagaccgctagttattggccaaaaggctcggtatttgtgagcgtagtggatccgggcgtaggcactaatcgtaaatcggtggtattgaaaactaaaaacggccagtatttcgtctctccagataacggcacgctgactttggtagcgcaaactttggggattgatagccgagctgaaattgatgaaaattccatccgtctgaaaggttcgaaattcctgtcttcccgtccggtg

SEQ ID NO: 4155 - DNA (genomic), 540 bp, Helicobacter pylori; double-stranded, circular
  misc_feature (B) LOCATION 1...540
  hypothetical: NO
  anti-sense: NO
accgtgacaaatatagggcgtgacgtcacagtgcgtgaaattgatgaaaagaccaaccgcttgaaaggttctgaaaaatcctatactttccatggccgtgatgtgtatgcttacactggggcgcgcttggcttctggggcgatcacattcgagcaggtcgggccagagcttcctataaaagttgttgaaattccttaccaaaaagcgaaagccacaaaagggggagtgaaaggcaatatcccgattttggatattcaatatggcaatgtttggagcaatatcagcgataaactgctcaatcaagcagggatcaaacgaaacgatacagtgtgtgtaactatttttaaaaattccaagaaacaatacgagggaaaaatgccgtatgtcgcgagctttggcgatgtgccagaaggccagccgttggtctatttaaacagcttgttgaatgtttccgtggcgttgaatatggataatttcgcgcaaaaacatcaaattaaatctggtgctgactggaatattgatataaagaagtgcgctaaa

SEQ ID NO: 4156 - DNA (genomic), 792 bp, Helicobacter pylori; double-stranded, circular
  misc_feature (B) LOCATION 1...792
  hypothetical: NO
  anti-sense: NO
atgagaaaaacgatttcagcgttgtttttatcagcgtgtatagggttatcgtctgttcatgcgagtaacgctttgattttacaaacagattttagcctaaaagatggggccgtctcggcgatgaaaggcgtcgctttcagcgttgattctaatcttaaaatctttgatttaacgcacgaaatccccccgtataacatttgggaaggcgcttaccgcttgtatcagaccgctagttattggccaaaaggctcggtatttgtgagcgtagtggatccgggcgtaggcactaatcgtaaatcggtggtattgaaaactaaaaacggccagtatttcgtctctccagataacggcacgctgactttggtagcgcaaactttggggattgatagcgtgcgtgaaattgatgaaaaagccaaccgcttgaaaggttctgaaaaatcctatactttccatggccgtgatgtgtatgcttacactggggcgcgcttggcttctggggcgatcacattcgagcaggtcgggccagagcttcctataaaagttgttgaaattccttaccaaaaagcgaaagccacaaaagggggagtgaaaggcaatatcccgattttggatattcaatatggcaatgtttggagcaatatcagcgataaactgctcaatcaagcagggatcaaacgaaacgatacagtgtgtgtaactattttaaaaattccaagaaacaatacgaagggaaaatgccgtatgtcgcgagctttggcgatgtgccagaaggccagccgttggtctatttaa

SEQ ID NO: 4157 - DNA (genomic), 903 bp, Helicobacter pylori; double-stranded, circular
  misc_feature (B) LOCATION 1...903
  hypothetical: NO
  anti-sense: NO
atgagaaaaacgatttcagcgttgtttttatcagcgtgtatagggttatcgtctgttcatgcgagtaacgctttgattttacaaacagattttagcctaaaagatggggccgtctcggcgatgaaaggcgtcgctttcagcgttgattctaatcttaaaatctttgatttaacgcacgaaatccccccgtataacatttgggaaggcgcttaccgcttgtatcagaccgctagttattggccaaaaggctcggtatttgtgagcgtagtggatccgggcgtaggcactaatcgtaaatcggtggtattgaaaactaaaaacggccagtatttcgtctctccagataacggcacgctgactttggtagcgcaaactttggggattgatagcgtgcgtgaaattgatgaaaaagccaaccgcttgaaaggttctgaaaaatcctatactttccatggccgtgatgtgtatgcttacactggggcgcgcttggcttctggggcgatcacattcgagcaggtcgggccagagcttcctataaaagttgttgaaattccttaccaaaaagcgaaagccacaaaagggggagtgaaaggcaatatcccgattttggatattcaatatggcaatgtttggagcaatatcagcgataaactgctcaatcaagcagggatcaaacgaaacgatacagtgtgtgtaactatttttaaaaattccaagaaacaatacgaagggaaaatgccgtatgtcgcgagctttggcgatgtgccagaaggccagccgttggtctatttaaacagcttgttgaatgtttccgtggcgttgaatatggataatttcgcgcaaaaacatcaaattaaatctggtgctgactggaatattgatataaagaagtgcgctaaataa

SEQ ID NO: 4158 - DNA (genomic), 903 bp, Helicobacter pylori; double-stranded, circular; identical to SEQ ID NO: 4157
  misc_feature (B) LOCATION 1...903
  hypothetical: NO
  anti-sense: NO

SEQ ID NO: 4159 - DNA (genomic), 423 bp, Helicobacter pylori; double-stranded, circular
  misc_feature (B) LOCATION 1...423
  hypothetical: NO
  anti-sense: NO
atgagaaggagtttggctttttgccttttagctttgcttggattacaggttttaggtgctagagacttttcgcaactcaaaaacgaagaacttttaaaattagcaggaactctgccttctaatgaagcgattgattatcgcatggaagtgtctaaacgccttaaagccttaagtgctgaagacgctaagaaattccgcgcgaatttcagccggatcgctaggaagaatctttctaaaatgagcgaagaggatttcaaaaaaatgcgtgaagaagtgcgtaaagaattagaagaaaaaaccaaaggtctaagcgctgaagaaatcaaggcaaaaggacttaatgtgagcgtttgcagcggcgatacgagaaaagtttggtgtagggctgttaagaaaaaagacgaacattgctctcctaagtga

SEQ ID NO: 4160 - DNA (genomic), 495 bp, Helicobacter pylori; double-stranded, circular
  misc_feature (B) LOCATION 1...495
  hypothetical: NO
  anti-sense: NO
attaaaattaacatggtagaatgccaaaatttgctgtcgtcatgcggcaaaaatttagacaacaaggaattgggaatgagaaggagtttggctttttgccttttagctttgcttggattacaggttttaggtgctagagacttttcgcaactcaaaaacgaagaacttttaaaattagcaggaactctgccttctaatgaagcgattgattatcgcatggaagtgtctaaacgccttatagccttaagtgctgaagacgctaagaatttccgcgcgaatttcagccggatcgctaggaagaatctttctaaaatgagcgaagaggatttcaaaaaaatgcgtgaagaagtgcgtaaagaattagaagaaaaaaccaaaggtctaagcgctgaagaaatcaaggcaaaaggacttaatgtgagcgtttgcagcggcgatacgagaaaagtttggtgtagggctgttaagaaaaaagacgaacattgctctcctaag

SEQ ID NO: 4161 - DNA (genomic), 459 bp, Helicobacter pylori; double-stranded, circular
  misc_feature (B) LOCATION 1...459
  hypothetical: NO
  anti-sense: NO
atgaaaaaagcgttgaaaatactttctgttggcgcgttgctatttgtggctttaaacgccaaagatttcagcaaaacaagcgatgaagatttggctaaaatggctggcgttgtcgctccgcaggatattgtggattacacaaaagagttgaaaaagcgcatggaaaagatgcctgaagacaagagaaaggcgttccataaacaattgcatgaatacgcgactaaaaacacagacaaaatgaccgtggcggattttgaagcccgccaaaaagccattaaagaagcgcttaaaaaaggcaatatggaagacatggatgatgattttgggttgagatcatgcaagcatgggaaaaagcacaaacacgataagcatggcaagaagcatggcaaaaaacatgacaaagatcatgacgataaagaccatgaccaccatgatgaagatcacagcgataagcactaa

SEQ ID NO: 4162 - DNA (genomic), 471 bp, Helicobacter pylori; double-stranded, circular
  misc_feature (B) LOCATION 1...471
  hypothetical: NO
  anti-sense: NO
tttaaaaggaaaaacatgaaaaaagcgttgaaaatactttctgttggcgcgttgctatttgtggctttaaacgccaaagatttcagcaaaacaagcgatgaagatttggctaaaatggctggcgttgtcgctccgcaggatattgtggattacacaaaagagttgaaaaagcgcatggaaaagatgcctgaagacaagagaaaggcgttccataaacaattgcatgaatacgcgactaaaaacacagacaaaatgaccgtggcggattttgaagcccgccaaaaagccattaaagaagcgcttaaaaaaggcaatatggaagacatggatgatgattttgggttgagatcatgcaagcatgggaaaaagcacaaacacgataagcatggcaagaagcatggcaaaaaacatgacaaagatcatgacgataaagaccatgaccaccatgatgaagatcacagcgataagcac

SEQ ID NO: 4163 - DNA (genomic), 426 bp, Helicobacter pylori; double-stranded, circular
  misc_feature (B) LOCATION 1...426
  hypothetical: NO
  anti-sense: NO
tatgatttcctaggggtttccttgcatgcccttagccccctagaagaacaagaatttttaatttcgtaccgcttgaaaatcgttgattctagagtgatgggtgaagagtattctgtttctaaacctatcgttagtcgcattaaaacagccccctatgttttagactatcattgctctatcatcactcgcaacttgcccgatttgaaaaaccccttgctccaaataaagctagaacgcttccttttagaaatagcgttaaaaaaagaaaaagagcgagtcattgactgccttttaaaaagccaagtcgctatcacgcattatgatcacagctataaaaacggcaccactaccacaagcattcttaacctcaaagccttaagcgttaaagcgagtttagatgggagatatgctgtctttagatatttt

SEQ ID NO: 4164 - DNA (genomic), 477 bp, Helicobacter pylori; double-stranded, circular
  misc_feature (B) LOCATION 1...477
  hypothetical: NO
  anti-sense: NO
gtgatgcgtttcttttcattctgttattttttattttattttttaggggtttctttgcatgcccttagccccctagaagaacaagaatttttaatttcgtaccgcttgaaaatcgttgattctagagtgatgggtgaagagtattctgtttctaaacctatcgttagtcgcattaaaacagccccctatgttttagactatcattgctctatcatcactcgcaacttgcccgatttgaaaaaccccttgctccaaataaagctagaacgcttccttttagaaatagcgttaaaaaaagaaaaagagcgagtcattgactgccttttaaaaagccaagtcgctatcacgcattatgatcacagctataaaaacggcaccactaccacaagcattcttaacctcaaagccttaagcgttaaagcgagtttagagggagatatgctgtctttagatatttttagaaaggaagaagaatga

SEQ ID NO: 4165 - DNA (genomic), 465 bp, Helicobacter pylori; double-stranded, circular
  misc_feature (B) LOCATION 1...465
  hypothetical: NO
  anti-sense: NO
atgaaattggtgagtcttattgtagcgttagttttttgttgttttttaggggctgtagagttgcctggagtttatcaaactcaagaatttttatacatgaaaagctcttttgtggagttttttgagcataacgggaagttctatgcctatggtatttctgatgtgratgrctctaaagccaaaaaagacaaactcaatcctaacccaaagctaaggaatcgcagcgataaaggcgtggtgtttttaagcgatttgattaaggttggggaacaatcttataaaggcggtaaggcgtrtaatttttrtgacggcaagacctmccatgtgagagtcactcaaarttcaaacggggatttgraattcacttcaagctatgrcaaatgggggtatgtgggcaaaaccttcacctggaaacgcctgagcgatgaagaaatcaaaaatctaaagctcaagcgttttaactga

SEQ ID NO: 4166 - DNA (genomic), 504 bp, Helicobacter pylori; double-stranded, circular
  misc_feature (B) LOCATION 1...504
  hypothetical: NO
  anti-sense: NO
atgaaattggtgagtcttattgtagcgttagttttttgttgttttttaggggctgtagagttgcctggagtttatcaaactcaagaatttttatacatgaaaagctcttttgtggagttttttgagcataacgggaagttctatgcctatggtatttctgatgtggatggctctaaagccaaaaaagacaaactcaatcctaacccaaagctaaggaatcgcagcgataaaggcgtggtgtttttaagcgatttgattaaggttggggaacaatcttataaaggcggtaaggcgtataatttttatgacggcaagacctaccatgtgagagtcactcaaaattcaaacggggatttggaattcacttcaagctatgacaaatgggggtatgtgggcaaaaccttcacctggaaacgcctgagcgatgaagaaatcaaaaatctaaagctcaagcgttttaacttggacgaagtccttaaaaccctcaaagatagccctatttaa

SEQ ID NO: 4167 - DNA (genomic), 543 bp, Helicobacter pylori; double-stranded, circular
  misc_feature (B) LOCATION 1...543
  hypothetical: NO
  anti-sense: NO
aggattgatcaaattaaaattatgaaattggtgagtcttattgtagcgttagttttttgttgttttttaggggctgtagagttgcctggagtttatcaaactcaagaatttttatacatgaaaagctcttttgtggagttttttgagcataacgggaagttctatgcctatggtatttctgatgtggatggctctaaagccaaaaaagacaaactcaatcctaacccaaagctaaggaatcgcagcgataaaggcgtggtgtttttaagcgatttgattaaggttggggaacaatcttataaaggcggtaaggcgtataatttttatgacggcaagacctaccatgtgagagtcactcaaaattcaaacggggatttggaattcacttcaagctatgacaaatgggggtatgtgggcaataccttcactttgaaacgcgtgaggggtgccgaaatcagtattttaaagctcaagcgttttaatctcatgcgctctttttacaggcagacccaccttttttctattggtaaggcctacgcgaca

SEQ ID NO: 4168 - DNA (genomic), 327 bp, Helicobacter pylori; double-stranded, circular
  misc_feature (B) LOCATION 1...327
  hypothetical: NO
  anti-sense: NO
atgaaaccaatctttagcctctttttcctccttattgttttaaaagcgcaccccataaaccccttattagagccgttatatttccccagttacacgcaatttttagatttagaacctcattttgtcattaaaaaaaagcgcgcttacaggccttttcaatgggggaacactattattatcaaacgccatgatttagaagagcgccagagcaaccaaccaagcgatattttccgccagaacgctgaaatcaatgtgtcttctcaaacttttttaagaggaatcagcagcgcttcttcacgcatagtgatcgattcggtcgctcagtaa

SEQ ID NO: 4169 - DNA (genomic), 483 bp, Helicobacter pylori; double-stranded, circular
  misc_feature (B) LOCATION 1...483
  hypothetical: NO
  anti-sense: NO
ccctttctaaaaaagaataaatttttacaaatttgtcaatattttagcgcgcatttcaagcaagtgttaaaaaatgaaaagcccttagtttattatggggttttaaaggctaaagcccctaattgggctttatgggtttatgaaaaacccttaaaaaaagaaatttacatgaacgataaggaagtggtggtttatgagcctaatttattccaagcgactatcacgcccttaaaagacaagacggattttttcaccattctcaagcaattgaaaaagcagactgacggctcttttaaaacgactatcaacaagaccacttatcgtttggtttttaaagacggcaagcctttttcgttggaatttaaagatgacatgaataatcttgttacgatcactttttctcaagcagaaatcaaccctaaaattcctaatgaaatctttgtttttaaccctaaagatgaaaatattgatattgtacgccag

SEQ ID NO: 4170 - DNA (genomic), 555 bp, Helicobacter pylori; double-stranded, circular
  misc_feature (B) LOCATION 1...555
  hypothetical: NO
  anti-sense: NO
atgaaagcttttttaaagatttgcatggttttgatttttgtgggtgtcgctcatgctaaaaatcctttaaccctttctaaagaagaagaagttttacaaaatttgcaaagttttagcgcgcatttcaagcaagtgttaaaaaatgaaaagcccttagtttattatggggttttaaaggctaaagcccctaattgggctttatgggtttatgaaaaacccttaaaaaaagaaatttacatgaacgataaggaagtggtggtttatgagcctaatttattccaagcgactatcacgcccttaaaagacaagacggattttttcaccattctcaagcaattgaaaaagcagactgacggctcttttaaaacgactatcaacaagaccacttatcgtttggtttttaaagacggcaagcctttttcgttggaatttaaagatgacatgaataatcttgttacgatcactttttctcaagcagaaatcaaccctaaaattcctaatgaaatctttgtttttaaccctaaagatgaaaatattgatattgtacgccagtga

SEQ ID NO: 4171 - DNA (genomic), 396 bp, Helicobacter pylori; double-stranded, circular
  misc_feature (B) LOCATION 1...396
  hypothetical: NO
  anti-sense: NO
ccaagaatacacgatatgggcgatttagattctctaaacatcagcccggatcctaacacccctaccctattgattttaagcgctttagataattctttaaaagattacgcccccacctttaacgtcttaaaaaaaacttttaaagatcgtttgagggtgcttattttactcaatcaaccctattcaagcgatgcaatcaaaggctttattgcgccttctcaaactgatttgatgattttaaaccctaaagataccgctctttttgatcatttaaaccatgacgctttaaaccattcttttaacatgctcttatatgacaaacaccaattgattaaaatgtatcaagggatcgtgccagcagaaatgctccaatttgatatttccaatttaaaggac

SEQ ID NO: 4172 - DNA (genomic), 558 bp, Helicobacter pylori; double-stranded, circular
  misc_feature (B) LOCATION 1...558
  hypothetical: NO
  anti-sense: NO
atgagaattaaggcttattttttgcgttttatcgcactggtttttatcgttttgttgggttttagcgcttgtaaaaactctcaaaaatctcaagattctcaaaacaataccacccaacaagatagccctaaaacctacaccgctatggatctgaataaccaagaatacacgattatgggcgatttagattctctaaacatcagcccggatcctaacacccctaccctattgattttaagcgctttagataattctttaaaagattacgcccccacctttaacgtcttaaaaaaaacttttaaagatcgtttgagggtgcttattttactcaatcaaccctattcaagcgatgcaatcaaaggctttattgcgccttctcaaactgatttgatgattttaaaccctaaagataccgctctttttgatcatttaaaccatgacgctttaaaccattcttttaacatgctcttatatgacaaacaccaattgattaaaatgtatcaagggatcgtgccagcagaaatgctccaatttgatatttccaatttaaaggactga

SEQ ID NO: 4173 - DNA (genomic), 267 bp, Helicobacter pylori; double-stranded, circular
  misc_feature (B) LOCATION 1...267
  hypothetical: NO
  anti-sense: NO
atgaaaaaaatcgttgtgagtttatgcgtggcgttaggttttttaagcgcggatccagcgcaggccaataaagcgatcagtgatgcggatttgattgaagagataagggacttgaaaaaaatcatcagcgcacaaaacacggagattaaccaattaagaaaagtgcaagaagtcttatctgggcaattaggggacatgcgtaaggatatattaagcactagagattactgtatcagcttaaggccttatatttataattggcgctag

SEQ ID NO: 4174 - DNA (genomic), 270 bp, Helicobacter pylori; double-stranded, circular
  misc_feature (B) LOCATION 1...270
  hypothetical: NO
  anti-sense: NO
gtgatgaaaaaaatcgttgtgagtttatgcgtggcgttaggttttttaagcgcggatccagcgcaggccaataaagcgatcagtgatgcggatttgattgaagagataagggacttgaaaaaaatcatcagcgcacaaaacacggagattaaccaattaagaaaagtgcaagaagtcttatctgggcaattaggggacatgcgtaaggatatattaagcactagagattactgtatcagcttaaggccttatatttataattggcgctag

SEQ ID NO: 4175 - DNA (genomic), 288 bp, Helicobacter pylori; double-stranded, circular
  misc_feature (B) LOCATION 1...288
  hypothetical: NO
  anti-sense: NO
gagaggataaaaaggagagcggtgatgaaaaaaatcgttgtgagtttatgcgtggcgttaggttttttaagcgcggatccagcgcaggccaataaagcgatcagtgatgcggatttgattgaagagataagggacttgaaaaaaatcatcagcgcacaaaacacggagattaaccaattaagaaaagtgcaagaagtcttatctgggcaattaggggacatgcgtaaggatatattaagcactagagattactgtatcagcttaaggccttatatttataattggcgc

SEQ ID NO: 4176 - DNA (genomic), 1257 bp, Helicobacter pylori; double-stranded, circular
  misc_feature (B) LOCATION 1...1257
  hypothetical: NO
  anti-sense: NO
atgaggtcttggatgaagaaaaaatacttcacgcttttattgcaaagtagtgtggtattagcggtttttatagggtgttcttctaccaggaatcatactttttcagcccttagtaatcaagaaaatacagacgataagctcccagtggtccattccattaaaacgattaacgatgtgagttcagtgggctttgaatggtctaaagtcgctgacacttatgacattgacgggtttgttttgtatcgtttgaaaaaagactccaagcttaaaagaatcgccaccattaaaaacccttatgcgacccactattatgatgaggggttagaaacagagagttcctacacttaccaattagccacctacaagggcgataaaatttccaaactttcagaacccattttagtaaaaacctcctttatcaatcctgtagaaagcgtgtttgcaagccttgaataccctaaaagcgtgaaagtcttttggagcccgcacccaaatcccagcgtttctaaatacatcattcaaaggcagaataaagacggcaaatttttaaatgtgggggctgtaaaaaaccgcttattcgtggagttttttgataaagatttagaagatgggcaaaaataccgctaccaaatcatcgccgaaaatttcatgggggataaatccaggcctagcgtgatagtggaggggaaaaccaaagacttgcccaaagaaatcgctaatgttagagtgagtcaaaacctcacacgacaaattgaattgagttgggataaatccccagaagaagatgtgatagcttatcgcatttacgcttccaataaccgcaacgataaatacaaattcatcgctcaaaccaccaacacttcctatgtggataagatagaaaaagacaatctcactcgttattataaagtcgtcgccgtagataaaacgcatcttgaaggggcgttacccaaagagcctgccatgggtgagacctctgataggcctgaagcccctatcatcactaaagggactattcaagactcttcggccttgatccaatgggaaaacaacccaagccctaaaatagccacttatgcggtgtatcgttttgaagccaactccaaaacccctttgcgttttgggaatatcacacaaaaccagttcgtggataaggacatgaaagtgggcgtggcttatcgctatcaggtggtgagcgtggataaagatggtttagagtcgcacccaagcaaagaagtgcgtttgtttttagagcgc

SEQ ID NO: 4177 - DNA (genomic), 1260 bp, Helicobacter pylori; double-stranded, circular
  misc_feature (B) LOCATION 1...1260
  hypothetical: NO
  anti-sense: NO
atgaggtcttggatgaagaaaaaatacttcacgcttttattgcaaagtagtgtggtattagcggtttttatagggtgttcttctaccaggaatcatactttttcagcccttagtaatcaagaaaatacagacgataagctcccagtggtccattccattaaaacgattaacgatgtgagttcagtgggctttgaatggtctaaagtcgctgacacttatgacattgacgggtttgttttgtatcgtttgaaaaaagactccaagcttaaaagaatcgccaccattaaaaacccttatgcgacccactattatgatgaggggttagaaacagagagttcctacacttaccaattagccacctacaagggcgataaaatttccaaactttcagaacccattttagtaaaaacctcctttatcaatcctgtagaaagcgtgtttgcaagccttgaataccctaaaagcgtgaaagtcttttggagcccgcacccaaatcccagcgtttctaaatacatcattcaaaggcagaataaagacggcaaatttttaaatgtgggggctgtaaaaaaccgcttattcgtggagttttttgataaagatttagaagatgggcaaaaataccgctaccaaatcatcgccgaaaatttcatgggggataaatccaggcctagcgtgatagtggaggggaaaaccaaagacttgcccaaagaaatcgctaatgttagagtgagtcaaaacctcacacgacaaattgaattgagttgggataaatccccagaagaagatgtgatagcttatcgcatttacgcttccaataaccgcaacgataaatacaaattcatcgctcaaaccaccaacacttcctatgtggataagatagaaaaagacaatctcactcgttattataaagtcgtcgccgtagataaaacgcatcttgaaggggcgttacccaaagagcctgccatgggtgagacctctgataggcctgaagcccctatcatcactaaagggactattcaagactcttcggccttgatccaatgggaaaacaacccaagccctaaaatagccacttatgcggtgtatcgttttgaagccaactccaaaacccctttgcgttttgggaatatcacacaaaaccagttcgtggataaggacatgaaagtgggcgtggcttatcgctatcaggtggtgagcgtggataaagatggtttagagtcgcacccaagcaaagaagtgcgtttgtttttagagcgctaa

SEQ ID NO: 4178 - DNA (genomic), 1257 bp, Helicobacter pylori; double-stranded, circular
  misc_feature (B) LOCATION 1...1257
  hypothetical: NO
  anti-sense: NO
atgaggtcttggatgaagaaaaaatacttcacgcttttattgcaaagtagtgtggtattagcggtttttatagggtgttcttctaccaggaatcatactttttcagcccttagtaatcaagaaaatacagacgataagctcccagtggtccattccattaaaacgattaacgatgtgagttcagtgggctttgaatggtctaaagtcgctgacacttatgacattgacgggtttgttttgtatcgtttgaaaaaagactccaagcttaaaagaatcgccaccattaaaaacccttatgcgacccactattatgatgaggggttagaaacagagagttcctacacttaccaattagccacctacaagggcgataaaatttccaaactttcagaacccattttagtaaaaacctcctttatcaatcctgtagaaagcgtgtttgcaagccttgaataccctaaaagcgtgaaagtcttttggagcccgcacccaaatcccagcgtttctaaatacatcattcaaaggcagaataaagacggcaaatttttaaatgtgggggctgtaaaaaaccgcttattcgtggagttttttgataaagatttagaagatgggcaaaaataccgctaccaaatcatcgccgaaaatttcatgggggataaatccaggcctagcgtgatagtggaggggaaaaccaaagacttgcccaaagaaatcgctaatgttagagtgagtcaaaacctcacacgacaaattgaattgagttgggataaatccccagaagaagatgtgatagcttatcgcatttacgcttccaataaccgcaacgataaatacaaattcatcgctcaaaccaccaacacttcctatgtggataagatagaaaaagacaatctcactcgttattataaagtcgtcgccgtagataaaacgcatcttgaaggggcgttacccaaagagcctgccatgggtgaaacctctgataggcctgaagcccctatcatcactaaagggactattcaagactcttcggccttgatccaatgggaaaacaacccaagccctaaaatagccacttatgcggtgtatcgttttgaagccaactccaaaacccctttgcgttttgggaatatcacacaaaaccagttcgtggataaggacatgaaagtgggcgtggcttatcgctatcaggtggtgagcgtggataaagatggtttagagtcgcacccaagcaaagaagtgcgtttgtttttagagcgc

SEQ ID NO: 4179 - DNA (genomic), 429 bp, Helicobacter pylori; double-stranded, circular
  misc_feature (B) LOCATION 1...429
  hypothetical: NO
  anti-sense: NO
atgtataaattaggaatatttttattagccaccttactatcagctaacacgcaaaaagtgagcgatattgctaaagacatccaacataaagaaacccttttgaaaaaaacccatgaagaaaaaaaccaactgaacagtcgtttgagttctttaggcgaagcgatccgctctaaagagcttcaaaaggttgagattgaacgccaaatggtcgccttaaaaaagagtcttgaaaaaaatcgtaacgaaagtttggtgcaagaaaaagtcctaaccaactaccgcaagtctttagatcatttgcaaaaacaacgatcgtttttacaaaagagagtgtttgatacgcttttagaggattttcttttctcacaagccctaaaggggcagaatttagcctcttctaatgatgtgattttgctaagtggcgtttga

SEQ ID NO: 4180 - DNA (genomic), 441 bp, Helicobacter pylori; double-stranded, circular
  misc_feature (B) LOCATION 1...441
  hypothetical: NO
  anti-sense: NO
cttggaggactagacatgtataaattaggaatatttttattagccaccttactatcagctaacacgcaaaaagtgagcgatattgctaaagacatccaacataaagaaacccttttgaaaaaaacccatgaagaaaaaaaccaactgaacagtcgtttgagttctttaggcgaagcgatccgctctaaagagcttcaaaaggttgagattgaacgccaaatggtcgccttaaaaaagagtcttgaaaaaaatcgtaacgaaagtttggtgcaagaaaaagtcctaaccaactaccgcaagtctttagatcatttgcaaaaacaacgatcgtttttacaaaagagagtgtttgatacgcttttagaggattttcttttctcacaagccctaaaggggcagaatttagcctcttctaatgatgtgattttgctaagtggcgtt

SEQ ID NO: 4181 - DNA (genomic), 579 bp, Helicobacter pylori; double-stranded, circular
  misc_feature (B) LOCATION 1...579
  hypothetical: NO
  anti-sense: NO
atgcgatctactaaccaacggctatcccttttagaaaaagaacgccagaatttaaacgctcttttaaaacgcttgaatatcatcaaacaaaatgggaaaaatgaagagagggtcagtttgaaaaaatcttctcaagctttagaagtcaaacaagtggctagctcttatcaaaatatcaacaccacgagctataacgggccaaaaacgatcgctcccttgaacgattacgaagtggtgcaaaaatttggcccctatattgacccggtttataatttaaaaatttttagcgagtctatcacgctagtgtcaaaaaccccaaacgctttggtgcgtaatgttttagacgggaaaatcgtgttcgctaaagaaatcaacatgcttaaaaaagtcgttatcattgagcataaaaacgggatccgcacgatttattctcaattggataaaatcgcccccaccattaaaagcggcatgcggatccaaaaaggctatgttttaggacgcattgatcaacgcttgggctttgaagttaccatgagagaaaagcacattaaccccttagaactcatcgcgcgcaattaa

SEQ ID NO: 4182 - DNA (genomic), 591 bp, Helicobacter pylori; double-stranded, circular
  misc_feature (B) LOCATION 1...591
  hypothetical: NO
  anti-sense: NO
gcatgcaaaaagataatgcgatctactaaccaacggctatcccttttagaaaaagaacgccagaatttaaacgctcttttaaaacgcttgaatatcatcagacaaaatagggaaaatgaagagagggtcagtttgaaaaaatcttctcaagctttagaagtcaaacaagtggctagctcttatcaaaatatcaacaccacgagctataacgggccaaaaacgatcgctcccttgaacgattacgaagtggtgcaaaaatttggcccctatattgacccggtttataatttaaaaatttttagcgagtctatcacgctagtgtcaaaaaccccaaacgctttggtgcgtaatgttttagacgggaaaatcgtgttcgctaaagaaatcaacatgcttaaaaaagtcgttatcattgagcataaaaacgggatccgcacgatttattctcaattggataaaatcgcccccaccattaaaagcggcatgcggatccaaaaaggctatgttttaggacgcattgatcaacgcttgggctttgaagttaccatgagagaaaagcacattaaccccttagaactcatcgcgcgcaat

SEQ ID NO: 4183 - DNA (genomic), 786 bp, Helicobacter pylori; double-stranded, circular
  misc_feature (B) LOCATION 1...786
  hypothetical: NO
  anti-sense: NO
gtggcgtttgaaaacttgcaccaaagcaccctgtctaaaatgtcgcaactgagccaagaagaaaagaagctcaatgtgcaagctttagaagtcaaaagcagcattcaaaaaatctcctctgtcatagatgagcaaaaaactcgtgaatcaaccttaaaatccttgcaaaccgaacaaaataagctcattttgagcatgcaaaaagattatgcgatctataaccaacggctatcccttttagaaaaagaacgccagaatttaaacgctcttttaaaacgcttgaatatcatcaaacaaaatagggaaaatgaagagagggtcagtttgaaaaaatcttctcaagctttagaagtcaaacaagtggctagctcttatcaaaatatcaacaccacgagctataacgggccaaaaacgatcgctcccttgaacgattacgaagtggtgcaaaaatttggcccctatattgacccggtttataatttaaaaatttttagcgagtctatcacgctagtgtcaaaaaccccaaacgctttggtgcgtaatgttttagacgggaaaatcgtgttcgctaaagaaatcaacatgcttaaaaaagtcgttatcattgagcataaaaacgggatccgcacgatttattctcaattggataaaatcgcccccaccattaaaagcggcatgcggatccaaaaaggctatgttttaggacgcattgatcaacgcttgggctttgaagttaccatgagagaaaagcacattaaccccttagaactcatcgcgcgcaattaa

SEQ ID NO: 4184 - DNA (genomic), 1203 bp, Helicobacter pylori; double-stranded, circular
  misc_feature (B) LOCATION 1...1203
  hypothetical: NO
  anti-sense: NO
atgtataaattaggaatatttttattagccaccttactatcagctaacacgcaaaaagtgagcgatattgctaaagacatccaacataaagaaacccttttgaaaaaaacccatgaagaaaaaaaccaactgaacagtcgtttgagttctttaggcgaagcgatccgctctaaagagcttcaaaaggttgagattgaacgccaaatggtcgccttaaaaaagagtcttgaaaaaaatcgtaacgaaagtttggtgcaagaaaaagtcctaaccaactaccgcaagtctttagatcatttgcaaaaacaacgatcgtttttacaaaagagagtgtttgatacgcttttagaggattttcttttctcacaagccctaaaggggcagaatttagcctcttctaatgatgtgattttgcaagtggcgtttgaaaacttgcaccaaagcaccctgtctaaaatgtcgcaactgagccaagaagaaaagaagctcaatgtgcaagctttagaagtcaaaagcagcattcaaaaaatctcctctgtcatagatgagcaaaaaactcgtgaatcaaccttaaaatccttgcaaaccgaacaaaataagctcattttgagcatgcaaaaagattatgcgatctataaccaacggctatcccttttagaaaaagaacgccagaatttaaacgctcttttaaaacgcttgaatatcatcaaacaaaatagggaaaatgaagagagggtcagtttgaaaaaatcttctcaagctttagaagtcaaacaagtggctagctcttatcaaaatatcaacaccacgagctataacgggccaaaaacgatcgctcccttgaacgattacgaagtggtgcaaaaatttggcccctatattgacccggtttataatttaaaaatttttagcgagtctatcacgctagtgtcaaaaaccccaaacgctttggtgcgtaatgttttagacgggaaaatcgtgttcgctaaagaaatcaacatgcttaaaaaagtcgttatcattgagcataaaaacgggatccgcacgatttattctcaattggataaaatcgcccccaccattaaaagcggcatgcggatccaaaaaggctatgttttaggacgcattgatcaacgcttgggctttgaagttaccatgagagaaaagcacattaaccccttagaactcatcgcgcgcaattaa

SEQ ID NO: 4185 - DNA (genomic), 165 bp, Helicobacter pylori; double-stranded, circular
  misc_feature (B) LOCATION 1...165
  hypothetical: NO
  anti-sense: NO
atgaaaaagcaaatcttgacaggtgttttgttatcagttttggcagtgagttctgcatacgctcacaaagataaaaaagacgctaaaaaacctgagttaagctctcaattagtggctcacaaagataaaaaagacgccaaaaaacctaaaaactcagtggcctaa

SEQ ID NO: 4186 - DNA (genomic), 183 bp, Helicobacter pylori; double-stranded, circular
  misc_feature (B) LOCATION 1...183
  hypothetical: NO
  anti-sense: NO
gatcatcacaaggagtttcgtatgaaaaagcaaatcttgacaggtgttttgttatcagttttggcagtgagttctgcatacgctcacaaagataaaaaagacgctaaaaaacctgagttaagctctcaattagtggctcacaaagataaaaaagacgccaaaaaacctaaaaactcagtggcc

SEQ ID NO: 4187 - DNA (genomic), 1401 bp, Helicobacter pylori; double-stranded, circular
  misc_feature (B) LOCATION 1...1401
  hypothetical: NO
  anti-sense: NO
atgaaagcgttgaagacttttttaaaaaaatcccttattctgttactagcaattgccttaaaccacttaaacgctgtggctatgattgtggataatcctacgcagaacgcttggaatggtgctaaaagagcatgggatgaaagcaagtgggctaaacatttagccactattactgaaaggatcaagctcgctcaagacacattagatagggctaatcagacgcttaattccatcaacaaagtgaatgatgttttgaacaaaaccaatcaatttctaacaggcagtattttaagcatccccaatcccatgcagtatgtagaaaaaatccaaagttttgccaagcaagttcaagccaatactgaaaggatcaaagaaaatgcacaaaactatgatatacgcaatcaaattgcagccaaacgcatctctgaaaaatgccctgaactcaattgggatgtcagtcaagacgcgagccctacagagaaaaacttacaccaatttttcacgagcaaggggaaagaaagcgctaacacaaaggctctaaaggattttgctaacgccataggtaacactcaaatcagcacggcgaacgatttaggagctggacttagaggcagagccttattagaatacatttgcattcaaaaaggcaatttagaagcggctaaaaaaatccaattattagacagccaaatgactttagctctactcaataacgactatacggcttatgaaaaacttagagctgaaaaagaagaattaaaaagacaaatcgcttcaaatgtgtatgcgaaagtcaaacagcttgttgtagcttcccaagatagagcgtttagtcaaatggataatgagttgggcgttaaaacttttgggttcaacgatgagaatgttaaaaaaggttattgcaagaaagaaaacagaaatggcaaaagcgagtgcatccctaacatgctcaatgttaatcgcttaaaagcgcaatttgatgagcttaatttagattatagtagggatattgctggtaaaaaaggtgaagcagccgctaaagtgttcaatgactacaaacaccgattccaacaattaagcgtagaaactgctttagaaatcgctcaaaatttaagttttatgaataagacgctaggtttaatggtgcaaatgcaaagctatgcattcaagcaacaaatgggctattttgaagatattattcctgctgacgccctaaaagatgacaaagagcatcaagaaaatcttgaacaaaaacaacaagaaatagagaaagtctatagggctaaattagacgcttatggtttccctaatggtagtgtaggaaaggcaagtggcgtgaattcaaatagtaataatgaagccccaagctctgataatatccagtcgtttaatccgtattga

SEQ ID NO: 4188 - DNA (genomic), 1398 bp, Helicobacter pylori; double-stranded, circular
  misc_feature (B) LOCATION 1...1398
  hypothetical: NO
  anti-sense: NO
atgaaagcgttgaagacttttttaaaaaaatcccttattctgttactagcaattgccttaaaccacttaaacgctgtggctatgattgtggataatcctacgcagaacgcttggaatggtgctaaaagagcatgggatgaaagcaagtgggctaaacatttagccactattactgaaaggatcaagctcgctcaagacacattagatagggctaatcagacgcttaattccatcaacaaagtgaatgatgttttgaacaaaaccaatcaatttctaacaggcagtattttaagcatccccaatcccatgcagtatgtagaaaaaatccaaagttttgccaagcaagttcaagccaatactgaaaggatcaaagaaaatgcacaaaactatgatatacgcaatcaaattgcagccaaacgcatctctgaaaaatgccctgaactcaattgggatgtcagtcaagacgcgagccctacagagaaaaacttacaccaatttttcacgagcaaggggaaagaaagcgctaacacaaaggctctaaaggattttgctaacgccataggtaacactcaaatcagcacggcgaacgatttaggagctggacttagaggcagagccttattagaatacatttgcattcaaaaaggcaatttagaagcggctaaaaaaatccaattattagacagccaaatgactttagctctactcaataacgactatacggcttatgaaaaacttagagctgaaaaagaagaattaaaaagacaaatcgcttcaaatgtgtatgcgaaagtcaaacagcttgttgtagcttcccaagatagagcgtttagtcaaatggataatgagttgggcgttaaaacttttgggttcaacgatgagaatgttaaaaaaggttattgcaagaaagaaaacagaaatggcaaaagcgagtgcatccctaacatgctcaatgttaatcgcttaaaagcgcaatttgatgagcttaatttagattatagtagggatattgctggtaaaaaaggtgaagcagccgctaaagtgttcaatgactacaaacaccgattccaacaattaagcgtagaaactgctttagaaatcgctcaaaatttaagttttatgaataagacgctaggtttaatggtgcaaatgcaaagctatgcattcaagcaacaaatgggctattttgaagatattattcctgctgacgccctaaaagatgacaaagagcatcaagaaaatcttgaacaaaaacaacaagaaatagagaaagtctatagggctaaattagacgcttatggtttccctaatggtagtgtaggaaaggcaagtggcgtgaattcaaatagtaataatgaagccccaagctctgataatatccagtcgtttaatccgtat

SEQ ID NO: 4189 - DNA (genomic), 1401 bp, Helicobacter pylori; double-stranded, circular
  misc_feature (B) LOCATION 1...1401
  hypothetical: NO
  anti-sense: NO
ggcatgaaagcgttgaagacttttttaaaaaaatcccttattctgttactagcaattgccttaaaccacttaaacgctgtggctatgattgtggataatcctacgcagaacgcttggaatggtgctaaaagagcatgggatgaaagcaagtgggctaaacatttagccactattactgaaaggatcaagctcgctcaagacacattagatagggctaatcagacgcttaattccatcaacaaagtgaatgatgttttgaacaaaaccaatcaatttctaacaggcagtattttaagcatccccaatcccatgcagtatgtagaaaaaatccaaagttttgccaagcaagttcaagccaatactgaaaggatcaaagaaaatgcacaaaactatgatatacgcaatcaaattgcagccaaacgcatctctgaaaaatgccctgaactcaattgggatgtcagtcaagacgcgagccctacagagaaaaacttacaccaatttttcacgagcaaggggaaagaaagcgctaacacaaaggctctaaaggattttgctaacgccataggtaacactcaaatcagcacggcgaacgatttaggagctggacttagaggcagagccttattagaatacatttgcattcaaaaaggcaatttagaagcggctaaaaaaatccaattattagacagccaaatgactttagctctactcaataacgactatacggcttatgaaaaacttagagctgaaaaagaagaattaaaaagacaaatcgcttcaaatgtgtatgcgaaagtcaaacagcttgttgtagcttcccaagatagagcgtttagtcaaatggataatgagttgggcgttaaaacttttgggttcaacgatgagaatgttaaaaaaggttattgcaagaaagaaaacagaaatggcaaaagcgagtgcatccctaacatgctcaatgttaatcgcttaaaagcgcaatttgatgagcttaatttagattatagtagggatattgctggtaaaaaaggtgaagcagccgctaaagtgttcaatgactacaaacaccgattccaacaattaagcgtagaaactgctttagaaatcgctcaaaatttaagttttatgaataagacgctaggtttaatggtgcaaatgcaaagctatgcattcaagcaacaaatgggctattttgaagatattattcctgctgacgccctaaaagatgacaaagagcatcaagaaaatcttgaacaaaaacaacaagaaatagagaaagtctatagggctaaattagacgcttatggtttccctaatggtagtgtaggaaaggcaagtggcgtgaattcaaatagtaataatgaagccccaagctctgataatatccagtcgtttaatccgtat

SEQ ID NO: 4190 - DNA (genomic), 279 bp, Helicobacter pylori; double-stranded, circular
  misc_feature (B) LOCATION 1...279
  hypothetical: NO
  anti-sense: NO
atgtttaaaagcagattaaattcatggattttattagggattttaggggttttagtggtggttttttgggatgtcataaaatacaaaatagaagatttgcaacatgatcattatctatcacaagtgaaagaaagggaagaatattataaaaaccacatagaagaagctttgaaaaaggatagcgaatgctttgaaaaaggaggcgataaagtggattgctcggctgctatgagaatagctgctggtgaaagaaatagaagaatgttagagattaaataa

SEQ ID NO: 4191 - DNA (genomic), 276 bp, Helicobacter pylori; double-stranded, circular
  misc_feature (B) LOCATION 1...276
  hypothetical: NO
  anti-sense: NO
atgtttaaaagcagattaaattcatggattttattagggattttaggggttttagtggtggttttttgggatgtcataaaatacaaaatagaagatttgcaacatgatcattatctatcacaagtgaaagaaagggaagaatattataaaaaccacatagaagaagctttgaaaaaggatagcgaatgctttgaaaaaggaggcgataaagtggattgctcggctgctatgagaatagctgctggtgaaagaaatagaagaatgttagagattaaa

SEQ ID NO: 4192 - DNA (genomic), 300 bp, Helicobacter pylori; double-stranded, circular
  misc_feature (B) LOCATION 1...300
  hypothetical: NO
  anti-sense: NO
tcaaattttaaaaaaggattttttatgtttaaaagcagattaaattcatggattttattagggattttaggggttttagtggtggttttttgggatgtcataaaatacaaaatagaagatttgcaacatgatcattatctatcacaagtgaaagaaagggaagaatattataaaaaccacatagaagaagctttgaaaaaggatagcgaatgctttgaaaaaggaggcgataaagtggattgctcggctgctatgagaatagctgctggtgaaagaaatagaagaatgttagagattaaa

SEQ ID NO: 4193 - DNA (genomic), 621 bp, Helicobacter pylori; double-stranded, circular
  misc_feature (B) LOCATION 1...621
  hypothetical: NO
  anti-sense: NO
ttgaagtttcaaattgtgagtttgttattggcttttttattagcctcttgtttgccccctaagggccatcattctggtttggtgaatatgtatattgcgcatcaaggccagagcgtacgcacttattggcgcaaagtggatagaggagttgtcgccaaacacaatgaaacgcttaaagaaaaccccaaaataaagctcaaagaccctaaggggcctttgttcatgctagggagcaatcgtttcatgcttttatggaaaaaccgctatactttagctaaagtccaatcgttcaagctagagcctgggttttattacttggattcttttagcgtggaaactcaaaaaggcatcttgcaaagcgctcctggctattcatacaccaaaaatggctacgattttaagaacaaccgcccctttttcctagcctttgaagtcaaacctgacagcaagatcgttctccctagcgtggaattgagcttgattaaaacccctagaggctttttaggggtgtttttatttgacaacaacgaaaagggggctaataccccatggattgaggggagcttgaatttaaagcttaaaaacgcttcttttaaagacgcatgggagttggaacgataa

SEQ ID NO: 4194 - DNA (genomic), 627 bp, Helicobacter pylori; double-stranded, circular
  misc_feature (B) LOCATION 1...627
  hypothetical: NO
  anti-sense: NO
ggaatttgtttgaagtttcaaattgtgagtttgttattggcttttttattagcctcttgtttgccccctaagggccatcattctggtttggtgaatatgtatattgcgcatcaaggccagagcgtacgcacttattggcgcaaagtggatagaggagttgtcgccaaacacaatgaaacgcttaaagaaaaccccaaaataaagctcaaagaccctaaggggcctttgttcatgctagggagcaatcgtttcatgcttttatggaaaaaccgctatactttagctaaagtccaatcgttcaagctagagcctgggttttattacttggattcttttagcgtggaaactcaaaaaggcatcttgcaaagcgctcctggctattcatacaccaaaaatggctacgattttaagaacaaccgcccctttttcctagcctttgaagtcaaacctgacagcaagatcgttctccctagcgtggaattgagcttgattaaaacccctagaggctttttaggggtgtttttatttgacaacaacgaaaagggggctaataccccatggattgaggggagcttgaatttaaagcttaaaaacgcttcttttaaagacgcatgggagttggaacga

SEQ ID NO: 4195 - DNA (genomic), 204 bp, Helicobacter pylori; double-stranded, circular
  misc_feature (B) LOCATION 1...204
  hypothetical: NO
  anti-sense: NO
tggggatttgcagatacagtgtcgctagagataagcgtgatgctgctcgatattgtcaagccgagcgacgctttaaaaaacgatgtagccgctttgggcaagcaaatgattggcgaatttttaggccaagacacgctcaattctttagaaagcttgctgcaaaaccagcagattaaaagcgttttaaacaaagtcctagcgggc

SEQ ID NO: 4196 - DNA (genomic), 315 bp, Helicobacter pylori; double-stranded, circular
  misc_feature (B) LOCATION 1...315
  hypothetical: NO
  anti-sense: NO
agattatggtctatttatgaacaaggtttgggggatttgatccctaatcttggtaaaaaggggattttcgctccctatggcttgagtcaagtgtggcaaaaaggggattttagtttcaacgcgcaaggcaatgtttttgtgcaaaattccactttctctaacgctaatggaggcacgctcagttttaacgcaggaaattcgctcatttttgccggaaacaaccacatcgctttcactaaccattctggaacgctcaatttgttgtctaatcaagtttctaacattaacgtcaccatgcttaacgcagcaacggcc

SEQ ID NO: 4197 - DNA (genomic), 381 bp, Helicobacter pylori; double-stranded, circular
  misc_feature (B) LOCATION 1...381
  hypothetical: NO
  anti-sense: NO
gtgcccttgagtttgggaggcaacctcttaaaccctaacaacagtagcgtgctgaatttaaaaaacagccagcttgtttttagcgatcaagggagcttgaatatcgctaacattgatttactaagcgatctgaatggtaataaaaatcgtgtgtataacatcattcaagcggacatgaatggtaattggtatgagcgtatcaacttctttggcatgcgcattaatgatgggatttatgacgctaaaaaccaaacttatagtttcactaaccctctcaataacgccgtaaaattcaccgagagctttttcatacaccgcctgtgcggttcgctctctcaaatacaaaaaaaaaaaaacacaatagtctcacctcggctctga

SEQ ID NO: 4198 - DNA (genomic), 465 bp, Helicobacter pylori; double-stranded, circular
  misc_feature (B) LOCATION 1...465
  hypothetical: NO
  anti-sense: NO
ggggcggtctctttacgaaggcagtttaatttaagcaataattcttctttagattttcaaggctctagcgctatcacctctaacacggcgtttaatttctatgataacgctttttctcaaagccccatcactttccatcaagcccttgacattaaagtgcccttgagtttgggaggcaacctcttaaaccctaacaacagtagcgtgctgaatttaaaaaacagccagcttgtttttagcgatcaagggagcttgaatatcgctaacattgatttactaagcgatctgaatggtaataaaaatcgtgtgtataacatcattcaagcggacatgaatggtaattggtatgagcgtatcaacttctttggcatgcgcattaatgatgggatttatgacgctaaaaaccaaacttatagtttcactaaccctctcaataacgccctaaaatcaccgagagctttaaaa

SEQ ID NO: 4199 - DNA (genomic), 675 bp, Helicobacter pylori; double-stranded, circular
  misc_feature (B) LOCATION 1...675
  hypothetical: NO
  anti-sense: NO
ccactgagcgttacgctctctcaatcccgggcattaaaaacacgctctataacattgactctgaagtctttaactaccagaaggtttactaacaacgctaatgacgtgtgttcttctagcgctgacgcacacggcgtgttttatctcacgagcagcgtgaaaggctattacaaccccaaccaatcctatcaagccagcggcagcaataacaccacgaaaaataacaatctaacctctgaatcttctgtcatttcgcaaacctataacgcgcaaggcaaccctatcagcgcgttacacgtctataacaagggctataatttcagtaatatcaaagcgttagggcaaatggcgctcaaactctaccctgaaatcaaaaagatattagggaatgatttttcgctttcaagtttgagcaatttaaaaggcgatgcgctaaaccagcttaccaagctcatcacgcctagcgattggaaaaacattaacgagttgattgataacgcaaacaattcggtcgtgcaaaatttcaataacggcactttgattataggagcgactaaaatagggcaaacagacaccaatagtgcggtggtttttgggggcttgggctatcaaaagccttgcgattacactgatattgtgtgccaaaaatttagaggcacttatttggggcagctt

SEQ ID NO: 4200 - DNA (genomic), 1032 bp, Helicobacter pylori; double-stranded, circular
  misc_feature (B) LOCATION 1...1032
  hypothetical: NO
  anti-sense: NO
gtcaagtgtggcaaaaaggggattttagtttcaacgcgcaaggcaatgtttttgtgcaaaattccactttctctaacgctaatggaggcacgctcagttttaacgcaggaaattcgctcatttttgccggaaacaaccacatcgctttcactaaccattctggaacgctcaatttgttgtctaatcaagtttctaacattaacgtcaccatgcttaacgcagcaacggcctaagattaacgccactaataacaatgtttccgtgtctcaaggcaatctgtttatcaacgctagctgcgtgcaacaaagcgatccaacgacagctagcgccacaaacccttgcaccaccgctcaaaataacgcttcttctagtaatgcgtcaaacaacgcgccaatcgccttaaataataacgatgaaagcttggtggttacggcgaatggtttcaatttttcaggcaatatttacgctaacggggtggttgatttttcaaaaattaaaggctctgcaaacgttaaaaacctgtatctttacaataacgctcaattccaagccaacaacctcacgatttccaaccaagcggtattagagaaaaacgctagctttgtaacgaataacttaaacattcaaggagcgtttaacaacaacgccacgcaaaaaatagaggtgcttcaaaatttagtgatcgcttcaaacgcttctttaagcaccgggatttatgggttagaagtagggggggcattgaataatttgggagcgatccattttaatttagaaaattctcaaacgcctgtaaatccgctcattcaagtaggggggatcattaatctcaacaccacccaaacgccttttatgaatgtcagcgtggctaatggcggaacttacactttattaaaaagcagccgttatattgattacaatatcaaccctaacagcttgcaatcgtatttgaagctctataccttaatcaatatcaacggaaaccacatagaggaaaaaaacggcgtattgacttatttgggccaacgggtttta

SEQ ID NO: 4201 - DNA (genomic), 1374 bp, Helicobacter pylori; double-stranded, circular
  misc_feature (B) LOCATION 1...1374
  hypothetical: NO
  anti-sense: NO
caagataaggggttattattgagtgtagcactacctaactcaaacaacgcctctcaaaacaacattttaagcctttctgtccttcacaaccagattaaaatgtcttatggtaataaagtgatggactttacccctcccaccttacaggattacattgtgggcattcaaggacaaagcgcactcaatcaaattgaagctgttggggggaataacgctatcaagtggctttcaacattgatgatggagactaaagaaaacccgctttttgcgccgatttatttagaaaaccactctttaaatgaaatcttaggcgtaacaaaagatcttcaaaacaccgcaagcttgatttctaaccctaattttagaaataacgctaccagccttttagaaatggcgagttacacccaacaaaccagccgtttgacaaaactctctgattttagggctagagagggagagtccaatttttcagagcgcttgttagagcttaaaaacaagcgttttagcgatcctaaccctagtgaggtttttgtcaaatactctcaactcagcaaacaccccaataacctttggattcaaggggtgggaggagcgagctttatttctgggggcaatggcacgctttatggcttgaatgtgggctatgaccgattggttaaaagcgtgatccttgggggttatgtggcttatggctatagcggttttaacgggaacatcatgcattctttggctaataatgtggatgtggggatgtatgcgagggcttttttgaaaagaaacgaattcactttgagcgcgaatgaaacttatggaggcaatgcgagtcatatcaattcttctaattccttgctctctgtgttgaaccaacgctacaactacaacacctggacaacgagcgtgaatgggaattacggctatgatttcatgttcaaacaaaaaagcgtggtgctaaaacctcaagtgggcttgagctatcatttcataggcttgagcgggatgaaaggtaaaatgcaaaatccagcttaccaacaattcgtcatgcattcaaacccttctaacgaatcggttttaacgctcaacatggggttagagagccgtaaatattttggtaaaaattcctattattttgtaacggcgaggttgggtagggatcttttgatcaaagctaaaggcgacaatgtggtgcgttttgtgggtgaaaacactttattgtaccgcaagggggaaatttttaacacttttgcgagcgtgatcacaggaggcgaaatgcatttgtggcgtttgatgtatgtgaatgcgggggtggggcttaaaatgggcttgcaataccaagatcttaatatcactgggaatgtgggcatgcgagtggcgttt

SEQ ID NO: 4202 - DNA (genomic), 1698 bp, Helicobacter pylori; double-stranded, circular
  misc_feature (B) LOCATION 1...1698
  hypothetical: NO
  anti-sense: NO
gtgtattcttatagcgatgacgcacaaggcgtgttttatctcacgagcagcgtgaaaggctattacaaccccaaccaatcctatcaagccagcggcagcaataacaccacgaaaaataacaatctaacctctgaatcttctgtcatttcgcaaacctataacgcgcaaggcaaccctatcagcgcgttacacgtctataacaagggctataatttcagtaatatcaaagcgttagggcaaatggcgctcaaactctaccctgaaatcaaaaagatattagggaatgatttttcgctttcaagtttgagcaatttaaaaggcgatgcgctaaaccagcttaccaagctcatcacgcctagcgattggaaaaacattaacgagttgattgataacgcaaacaattcggtcgtgcaaaatttcaataacggcactttgattataggagcgactaaaatagggcaaacagacaccaatagtgcggtggtttttgggggcttgggctatcaaaagccttgcgattacactgatattgtgtgccaaaaatttagaggcacttatttggggcagcttttggagtccaactccgctgatttgggctatattgacacgacttttaacgctaaagaaatttatcttaccggcactttagggagcgggaacgcatgggggactggggggagtgcgagcgtaacttttaacagccaaacttcgctcattctcaaccaagcgaatatcgtaagctcgcaaaccgatgggatttttagcatgctgggtcaagagggcatcaataaggttttcaatcaagccgggctcgctaatattttgggcgaagtggcaatgcaatccattaacaaagccgggggattagggaatttgatagtaaatacgctagggagtgatagcgtgattggggggtatttaacgcctgagcaaaaaaatcaaaccctaagccagcttttggggcagaataattttgataacctcatgaacgatagcggtttgaacacggcgattaaggatttgatcagacaaaaattaggcttttggaccgggctagtggggggattagccggactggggggcattgatttgcaaaaccctgaaaagcttataggcagcatgtccatcaatgatttattgagtaaaaaggggttgttcaatcagatcaccggctttatttccgctaacgatatagggcaagtcataagcgtgatgctgcaagatattgtcaagccgagcgacgctttaaaaaacgatgtagccgctttgggcaagcaaatgattggcgaatttttaggccaagacacgctcaattctttagaaagcttgctgcaaaaccagcagattaaaagcgttttagacaaagtcttagcggctaaaggattagggtctatttatgaacaaggtttgggggatttgatccctaatcttggtaaaaaggggattttcgctccctatggcttgagtcaagtgtggcaaaaaggggattttagtttcaacgcgcaaggcaatgtttttgtgcaaaattccactttctctaacgctaatggaggcacgctcagttttaacgcaggaaattcgctcatttttgccggaaacaaccacatcgctttcactaaccattctggaacgctcaatttgttgtctaatcaagtttctaacattaacgtcaccatgcttaacgcagcaacggcctaa

SEQ ID NO: 4203 - DNA (genomic), 2361 bp, Helicobacter pylori; double-stranded, circular
  misc_feature (B) LOCATION 1...2361
  hypothetical: NO
  anti-sense: NO
ttgtgcaaaattccactttctctaacgctaatggaggcacgctcagttttaacgcaggaaattcgctcatttttgccggaaacaaccacatcgctttcactaaccattctggaacgctcaatttgttgtctaatcaagtttctaacattaacgtcaccatgcttaacgcagcaacggcctaagattaacgccactaataacaatgtttccgtgtctcaaggcaatctgtttatcaacgctagctgcgtgcaacaaagcgatccaacgacagctagcgccacaaacccttgcaccaccgctcaaaataacgcttcttctagtaatgcgtcaaacaacgcgccaatcgccttaaataataacgatgaaagcttggtggttacggcgaatggtttcaatttttcaggcaatatttacgctaacggggtggttgatttttcaaaaattaaaggctctgcaaacgttaaaaacctgtatctttacaataacgctcaattccaagccaacaacctcacgatttccaaccaagcggtattagagaaaaacgctagctttgtaacgaataacttaaacattcaaggagcgtttaacaacaacgccacgcaaaaaatagaggtgcttcaaaatttagtgatcgcttcaaacgcttctttaagcaccgggatttatgggttagaagtagggggggcattgaataatttgggagcgatccattttaatttagaaaattctcaaacgcctgtaaatccgctcattcaagtaggggggatcattaatctcaacaccacccaaacgccttttatgaatgtcagcgtggctaatggcggaacttacactttattaaaaagcagccgttatattgattacaatatcaaccctaacagcttgcaatcgtatttgaagctctataccttaatcaatatcaacggaaaccacatagaggaaaaaaacggcgtattgacttatttgggccaacgggttttattacaagataaggggttattattgagtgtagcactacctaactcaaacaacgcctctcaaaacaacattttaagcctttctgtccttcacaaccagattaaaatgtcttatggtaataaagtgatggactttacccctcccaccttacaggattacattgtgggcattcaaggacaaagcgcactcaatcaaattgaagctgttggggggaataacgctatcaagtggctttcaacattgatgatggagactaaagaaaacccgctttttgcgccgatttatttagaaaaccactctttaaatgaaatcttaggcgtaacaaaagatcttcaaaacaccgcaagcttgatttctaaccctaattttagaaataacgctaccagccttttagaaatggcgagttacacccaacaaaccagccgtttgacaaaactctctgattttagggctagagagggagagtccaatttttcagagcgcttgttagagcttaaaaacaagcgttttagcgatcctaaccctagtgaggtttttgtcaaatactctcaactcagcaaacaccccaataacctttggattcaaggggtgggaggagcgagctttatttctgggggcaatggcacgctttatggcttgaatgtgggctatgaccgattggttaaaagcgtgatccttgggggttatgtggcttatggctatagcggttttaacgggaacatcatgcattctttggctaataatgtggatgtggggatgtatgcgagggcttttttgaaaagaaacgaattcactttgagcgcgaatgaaacttatggaggcaatgcgagtcatatcaattcttctaattccttgctctctgtgttgaaccaacgctacaactacaacacctggacaacgagcgtgaatgggaattacggctatgatttcatgttcaaacaaaaaagcgtggtgctaaaacctcaagtgggcttgagctatcatttcataggcttgagcgggatgaaaggtaaaatgcaaaatccagcttaccaacaattcgtcatgcattcaaacccttctaacgaatcggttttaacgctcaacatggggttagagagccgtaaatattttggtaaaaattcctattattttgtaacggcgaggttgggtagggatcttttgatcaaagctaaaggcgacaatgtggtgcgttttgtgggtgaaaacactttattgtaccgcaagggggaaatttttaacacttttgcgagcgtgatcacaggaggcgaaatgcatttgtggcgtttgatgtatgtgaatgcgggggtggggcttaaaatgggcttgcaataccaagatcttaatatcactgggaatgtgggcatgcgagtggcgttttag

SEQ ID NO: 4204 - DNA (genomic), 4455 bp, Helicobacter pylori; double-stranded, circular
  misc_feature (B) LOCATION 1...4455
  hypothetical: NO
  anti-sense: NO
ggggcggtctctttacgagggcagtttaatttaagcaataattcttctttagattttcaaggctctagcgctatcacctctaacacggcgtttaatttctatgataacgctttttctcaaagccccatcactttccatcaagcccttgacattaaagtgcccttgagtttgggaggcaacctcttaaaccctaacaacagtagcgtgctgaatttaaaaaacagccagcttgtttttagcgatcaagggagcttgaatatcgctaacattgatttactaagcgatctgaatggtaataaaaatcgtgtgtataacatcattcaagcggacatgaatggtaattggtatgagcgtatcaacttctttggcatgcgcattaatgatgggatttatgacgctaaaaaccaaacttatagtttcactaaccctctcaataacgccctaaaaatcaccgagagctttaaaaataaccaactgagcgttacgctctctcaaatcccgggcattaaaaacacgctctataacattggctctgaaatctttaactaccaaaaggtttataacaacgctaatggcgtgtattcttatagcgatgacgcacaaggcgtgttttatctcacgagcagcgtgaaaggctattacaaccccaaccaatcctatcaagccagcggcagcaataacaccacgaaaaataacaatctaacctctgaatcttctgtcatttcgcaaacctataacgcgcaaggcaaccctatcagcgcgttacacgtctataacaagggctataatttcagtaatatcaaagcgttagggcaaatggcgctcaaactctaccctgaaatcaaaaagatattagggaatgatttttcgctttcaagtttgagcaatttaaaaggcgatgcgctaaaccagcttaccaagctcatcacgcctagcgattggaaaaacattaacgagttgattgataacgcaaacaattcggtcgtgcaaaatttcaataacggcactttgattataggagcgactaaaatagggcaaacagacaccaatagtgcggtggtttttgggggcttgggctatcaaaagccttgcgattacactgatattgtgtgccaaaaatttagaggcacttatttggggcagcttttggagtccatctcggctgatttgggctatattgacacgacttttaacgctaaagaaatttatcttaccggcactttagggagcgggaacgcatgggggactggggggagtgcgagcgtaacttttaacagccaaacttcgctcattctcaaccaagcgaatatcgtaagctcgcaaaccgatgggatttttagcatgctgggtcaagagggcatcaataaggttttcaatcaagccgggctcgctaatattttgggcgaagtggcaatgcaatccattaacaaagccgggggattagggaatttgatagtaaatacgctagggagtgatagcgtgattggggggtatttaacgcctgagcaaaaaaatcaaaccctaagccagcttttggggcagaataattttgataacctcatgaacgatagcggtttgaacacggcgattaaggatttgatcagacaaaaattaggcttttggaccgggctagtggggggattagccggactggggggcattgatttgcaaaaccctgaaaagcttataggcagcatgtccatcaatgatttattgagtaaaaaggggttgttcaatcagatcaccggctttatttccgctaacgatatagggcaagtcataagcgtgatgctgcaagatattgtcaagccgagcgacgctttaaaaaacgatgtagccgctttgggcaagcaaatgattggcgaatttttaggccaagacacgctcaattctttagaaagcttgctgcaaaaccagcagattaaaagcgttttagacaaagtcttagcggctaaaggattagggtctatttatgaacaaggtttgggggatttgatccctaatcttggtaaaaaggggattttcgctccctatggcttgagtcaagtgtggcaaaaaggggattttagtttcaacgcgcaaggcaatgtttttgtgcaaaattccactttctctaacgctaatggaggcacgctcagttttaacgcaggaaattcgctcatttttgccggaaacaaccacatcgctttcactaaccattctggaacgctcaatttgttgtctaatcaagtttctaacattaacgtcaccatgcttaacgctagcaacggccttaagattaacgccactaataacaatgtttccgtgtctcaaggcaatctgtttatcaacgctagctgcgtgcaacaaagcgatccaacgacagctagcgccacaaacccttgcaccaccgctcaaaataacgcttcttctagtaatgcgtcaaacaacgcgccaatcgccttaaataataacgatgaaagcttggtggttacggcgaatggtttcaatttttcaggcaatatttacgctaacggggtggttgatttttcaaaaattaaaggctctgcaaacgttaaaaacctgtatctttacaataacgctcaattccaagccaacaacctcacgatttccaaccaagcggtattagagaaaaacgctagctttgtaacgaataacttaaacattcaaggagcgtttaacaacaacgccacgcaaaaaatagaggtgcttcaaaatttagtgatcgcttcaaacgcttctttaagcaccgggatttatgggttagaagtagggggggcattgaataatttgggagcgatccattttaatttagaaaattctcaaacgcctgtaaatccgctcattcaagtaggggggatcattaatctcaacaccacccaaacgccttttatgaatgtcagcgtggctaatggcggaacttacactttattaaaaagcagccgttatattgattacaatatcaaccctaacagcttgcaatcgtatttgaagctctataccttaatcaatatcaacggaaaccacatagaggaaaaaaacggcgtattgacttatttgggccaacgggttttattacaagataaggggttattattgagtgtagcactacctaactcaaacaacgcctctcaaaacaacattttaagcctttctgtccttcacaaccagattaaaatgtcttatggtaataaagtgatggactttacccctcccaccttacaggattacattgtgggcattcaaggacaaagcgcactcaatcaaattgaagctgttggggggaataacgctatcaagtggctttcaacattgatgatggagactaaagaaaacccgctttttgcgccgatttatttagaaaaccactctttaaatgaaatcttaggcgtaacaaaagatcttcaaaacaccgcaagcttgatttctaaccctaattttagaaataacgctaccagccttttagaaatggcgagttacacccaacaaaccagccgtttgacaaaactctctgattttagggctagagagggagagtccaatttttcagagcgcttgttagagcttaaaaacaagcgttttagcgatcctaaccctagtgaggtttttgtcaaatactctcaactcagcaaacaccccaataacctttggattcaaggggtgggaggagcgagctttatttctgggggcaatggcacgctttatggcttgaatgtgggctatgaccgattggttaaaagcgtgatccttgggggttatgtggcttatggctatagcggttttaacgggaacatcatgcattctttggctaataatgtggatgtggggatgtatgcgagggcttttttgaaaagaaacgaattcactttgagcgcgaatgaaacttatggaggcaatgcgagtcatatcaattcttctaattccttgctctctgtgttgaaccaacgctacaactacaacacctggacaacgagcgtgaatgggaattacggctatgatttcatgttcaaacaaaaaagcgtggtgctaaaacctcaagtgggcttgagctatcatttcataggcttgagcgggatgaaaggtaaaatgcaaaatccagcttaccaacaattcgtcatgcattcaaacccttctaacgaatcggttttaacgctcaacatggggttagagagccgtaaatattttggtaaaaattcctattattttgtaacggcgaggttgggtagggatcttttgatcaaagctaaaggcgacaatgtggtgcgttttgtgggtgaaaacactttattgtaccgcaagggggaaatttttaacacttttgcgagcgtgatcacaggaggcgaaatgcatttgtggcgtttgatgtatgtgaatgcgggggtggggcttaaaatgggcttgcaataccaagatcttaatatcactgggaatgtgggcatgcgagtggcgttttag

SEQ ID NO: 4205 - DNA (genomic), 540 bp, Helicobacter pylori; double-stranded, circular
  misc_feature (B) LOCATION 1...540
  hypothetical: NO
  anti-sense: NO
atggcgtctcttgcctttgttcaagcttttttggagtcttttaagggatttttaagccaagcgaccttaattagcgttttaatagcgagcgttttaatccttttttgcgcgattttgctccttttggctctgcttttaagaaaccgctgggctagttatataacaacagcagcttttttgggcgcgtttttaagcatgccttttgttttgaacgttttactcactcaagcgatttaccccatagaaacgcgcatcttgcacgctaatcccttaagttatagcaacgccttttctttgcaagtgggagtcaaaaacatttccaaattcagtctaaacaaatgcgttttacgcctagaagtccttaaaaaccctcacaattttgtggaagagcgagcttttaaatggtttgtcaaaaaaagctatgaaaaaacctttaaagaaaagattttgcctgaagaatccaaggtcttttcattctttattgacgactacccttattcaaaaacggccccttatcaagtttctttgttttgtttgtag

SEQ ID NO: 4206 - DNA (genomic), 552 bp, Helicobacter pylori; double-stranded, circular
  misc_feature (B) LOCATION 1...552
  hypothetical: NO
  anti-sense: NO
agagccttaaaaacgcatggcgctcttgcctttgttcaagcttttttggagtcttttaagggatttttaagccaagcgaccttaattagcgttttaatagcgagcgttttaatccttttttgcgcgattttgctccttttggctctgcttttaagaaaccgctgggctagttatataacaacagcagcttttttgggcgcgtttttaagcatgccttttgttttgaacgttttactcactcaagcgatttaccccatagaaacgcgcatcttgcacgctaatcccttaagttatagcaacgccttttctttgcaagtgggagtcaaaaacatttccaaattcagtctaaacaaatgcgttttacgtctagaagtccttaaaaaccctcacaattttgtggaagagcgagcttttaaatggtttgtcaaaaaaagctatgaaaaaacctttaaagaaaagattttgcctgaagaatccaaggtcttttcattctttattgacgactacccttattcaaaaacggccccttatcaagtttctttgttttgtttg

SEQ ID NO: 4207 - DNA (genomic), 309 bp, Helicobacter pylori; double-stranded, circular
  misc_feature (B) LOCATION 1...309
  hypothetical: NO
  anti-sense: NO
attttgaagggggggtttttagggttttttatcgtggcgttgtcttcgtattacggcgttaaaaagcgtttggatttgaggaaacaagattcaaaagaaaaagaagaaaagcaaaaattccaaaaattcgccctaggtttggaaatgtctttcaatgtgtggcgtttaggggggtatggggttttattaggtattttaggagtgcttttattcttgcatctttttaacggattgccgtttcttatcggcgtgtttgtgagctcgctctctagcgcgttattacgattcttaaacaataatggtaagttt

SEQ ID NO: 4208 - DNA (genomic), 405 bp, Helicobacter pylori; double-stranded, circular
  misc_feature (B) LOCATION 1...405
  hypothetical: NO
  anti-sense: NO
atgtgccaaatccaatgcttgcttattttgctttctatcaatatagttagcgcgattatcgtttattttttccaagcatttcaaggggttttgaattttgaaggggggtttttagggttttttatcgtggcgttgtcttcgtattacggcgttaaaaagcgtttggatttgaggaaacaagattcaaaagaaaaagaagaaaagcaaaaattccaaaaattcgccctaggtttggaaatgtctttcaatgtgtggcgtttaggggggtatggggttttattaggtattttaggagtgcttttattcttgcatctttttaacggattgccgtttcttatcggcgtgtttgtgagctcgctctctagcgcgttattacgattcttaaacaataatggtaagttttga

SEQ ID NO: 4209 - DNA (genomic), 276 bp, Helicobacter pylori; double-stranded, circular
  misc_feature (B) LOCATION 1...276
  hypothetical: NO
  anti-sense: NO
atggcgtgtgaatttttgaaaaagccaaagtattacaagtttatagagggggcgaattatttgagcttagggctttctatggtggtggcgatccttatgggcgtggctataggctatgggcttaaaaaactcactcacatttcgtggcttttttggcttggggttatttggggcgtgttagcgagctttctcaatgtctataaggcttataaaaacatgcaaaaagactatgaagaactagccaaagaccctaaatacacgcaaaataaaacaaaa

SEQ ID NO: 4210 - DNA (genomic), 279 bp, Helicobacter pylori; double-stranded, circular
  misc_feature (B) LOCATION 1...279
  hypothetical: NO
  anti-sense: NO
atggcgtgtgaatttttgaaaaagccaaagtattacaagtttatagagggggcgaattatttgagcttagggctttctatggtggtggcgatccttatgggcgtggctataggctatgggcttaaaaaactcactcacatttcgtggcttttttggcttggggttatttggggcgtgttagcgagctttctcaatgtctataaggcttataaaaacatgcaaaaagactatgaagaactagccaaagaccctaaatacacgcaaaataaaacaaaataa

SEQ ID NO: 4211 - DNA (genomic), 243 bp, Helicobacter pylori; double-stranded, circular
  misc_feature (B) LOCATION 1...243
  hypothetical: NO
  anti-sense: NO
cgcgcatggagaatgaaaagcatgcgttttagttacattgagccaagagcgaaatacttaatcagcaagctttctaaaatttgggttttttacatttttttatcttttgtgctaataggggggttagtgtggtttatgcacaacgccattaaacgcgctcaagacaacgcgtctagtctgacgatccaagaagagctttaccgctgttacatcacccgcttgtctgttaagatgattatactc

SEQ ID NO: 4212 - DNA (genomic), 372 bp, Helicobacter pylori; double-stranded, circular
  misc_feature (B) LOCATION 1...372
  hypothetical: NO
  anti-sense: NO
acgatccaagaaaggctttaccgccatgaaatcagccgcttgcaggtaaagactgatgaaactttaaaactcattaaagaagccaaaaagcgtttgaattataacgatgatatacgagatgttttgcaagggcttttgaatattgtgccggatcttatcaccattaatagcattgaaatagaccaacaaagcgtggtggttagcggtaaaaccccctctaaagaagccttttactttttgtttcaaaacaaactaaaccccatgtttgattattctagggcggaatttttccctttaagcgacgggtggtttaattttgtctccaccaacttttctaattccttactgataaaaaacccggagtctattaaa

SEQ ID NO: 4213 - DNA (genomic), 369 bp, Helicobacter pylori; double-stranded, circular
  misc_feature (B) LOCATION 1...369
  hypothetical: NO
  anti-sense: NO
atccaagaaaggctttaccgccatgaaatcagccgcttgcaggtaaagactgatgaaactttaaaactcattaaagaagccaaaaagcgtttgaattataacgatgatatacgagatgttttgcaagggcttttgaatattgtgccggatcttatcaccattaatagcattgaaatagaccaacaaagcgtggtggttagcggtaaaaccccctctaaagaagccttttactttttgtttcaaaacaaactaaaccccatgtttgattattctagggcggaatttttccctttaagcgacgggtggtttaattttgtctccaccaacttttctaattccttactgataaaaaacccggagtctattaaa

SEQ ID NO: 4214 - DNA (genomic), 534 bp, Helicobacter pylori; double-stranded, circular
  misc_feature (B) LOCATION 1...534
  hypothetical: NO
  anti-sense: NO
atgcgttttagttacattgagccaagagcgaaatacttaatcagcaagctttctaaaatttgggttttttacatttttttatcttttgtgctaataggggggttagtgtggtttatgcacaacgccattaaacgcgctcaagacaacgcgtctagtttgacgatccaagaaaggctttaccgccatgaaatcagccgcttgcaggtaaagactgatgaaactttaaaactcattaaagaagccaaaaagcgtttgaattataacgatgatatacgagatgttttgcaagggcttttgaatattgtgccggatcttatcaccattaatagcattgaaatagaccaacaaagcgtggtggttagcggtaaaaccccctctaaagaagccttttactttttgtttcaaaacaaactaaaccccatgtttgattattctagggcggaatttttccctttaagcgacgggtggtttaattttgtctccaccaacttttctaattccttactgataaaaaacccggagtctattaaatga

SEQ ID NO: 4215 - DNA (genomic), 468 bp, Helicobacter pylori; double-stranded, circular
  misc_feature (B) LOCATION 1...468
  hypothetical: NO
  anti-sense: NO
ttttacactggcaaaaagggggcttgcatgcgtaagatcttgttaatgggcttgattttacaagcgctctttggcgaagaaaccgcgcaagaattgttgcaatgctctgcgatttttgaatctaaaaaagccgaattgaaagaggatttgcgccaattgagtgaaaaagagcagtctttgaggatcttgcaaaccgaaaacgcccgccttttagatgaaaaaagcgatctgttaaacaagaaagaaaaagaaatagacgaaaaactgaaaaatttagccgctaaagaagaagcctttaaaaccttacaaacagaagaaaaaaaacgccttaaaaatttgatagaagaaaatgaaggcattttaagagaaatcaagcaggctaaagacagcaagattggcgagacttattctaaaatgaaagattctaaatcggctctgattttagaaaatttacccactcaaaacgct

SEQ ID NO: 4216 - DNA (genomic), 471 bp, Helicobacter pylori; double-stranded, circular
  misc_feature (B) LOCATION 1...471
  hypothetical: NO
  anti-sense: NO
ttttacactggcaaaaagggggcttgcatgcgtaagatcttgttaatgggcttgattttacaagcgctctttggcgaagaaaccgcgcaagaattgttgcaatgctctgcgatttttgaatctaaaaaagccgaattgaaagaggatttgcgccaattgagtgaaaaagagcagtctttgaggatcttgcaaaccgaaaacgcccgccttttagatgaaaaaagcgatctgttaaacaagaaagaaaaagaaatagacgaaaaactgaaaaatttagccgctaaagaagaagcctttaaaaccttacaaacagaagaaaaaaaacgccttaaaaatttgatagaagaaaatgaaggcattttaagagaaatcaagcaggctaaagacagcaagattggcgagacttattctaaaatgaaagattctaaatcggctctgattttagaaaatttacccactcaaaacgcttta

SEQ ID NO: 4217 - DNA (genomic), 669 bp, Helicobacter pylori; double-stranded, circular
  misc_feature (B) LOCATION 1...669
  hypothetical: NO
  anti-sense: NO
atgcgtaagatcttgttaatgggcttgattttacaagcgctctttggcgaagaagccgcgcaagaattgttgcaatgctctgcgatttttgaatctaaaaaagccgaattgaaagaggatttgcgccaattgagtgaaaaagagcagtctttgaggatcttgcaaaccgaaaacgcccgccttttagatgaaaaaagcgatctgttaaacaagaaagaaaaagaaatagacgaaaaactgaaaaatttagccgctaaagaagaagcctttaaaaccttacaaacagaagaaaaaaaacgccttaaaaatttgatagaagaaaatgaaggcattttaagagaaatcaagcaggctaaagacagcaagattggcgagacttattctaaaatgaaagattctaaatcggctctgattttagaaaatttacccactcaaaacgctttagaaattttaatggcgctaaagcctcaagaattaggcaaaattctagccaaaatggatcctaaaaaagcggcggctttgacagagttgtggcaaaaacccccaaaagaaaataaagaaaataaagaaagccaaaaaaccacagatcccacgccccccacaccacccacgcctcctaaagagccaaccctaaaagatcctaatgtaaaagagccaacaggggtatga

SEQ ID NO: 4218 - DNA (genomic), 201 bp, Helicobacter pylori; double-stranded, circular
  misc_feature (B) LOCATION 1...201
  hypothetical: NO
  anti-sense: NO
tacaaaaaaggaaatcaaataatgaatattcaaacaaagaaaagatttttagcaaatttattgctttttagcctgttttcttgccttaaggctgaaaccctttcagaagaccatcaaatcctgttgagttcagacgctttccatagaggggattttgccaccgctcaaaaaggctatatgaatctctatagagcaaaccaa

SEQ ID NO: 4219 - DNA (genomic), 1134 bp, Helicobacter pylori; double-stranded, circular
  misc_feature (B) LOCATION 1...1134
  hypothetical: NO
  anti-sense: NO
atctctatagagcaaaccaataaagtggtgtatgctaaagaggcggccatttcagcggcgagtttaggggacattaaaaccgctatgcatttagccatgctttatcaaaaaatcaccaataatcgtaacgatgtttctatcaataagattttagtggatggctatgcacaaatggggcagattgataaggcgattgaactattacacaagattcgtaaggaagaaaaaaccatagccacagacaatgtgttagggactttgtatttgactcaaaagcgtttggataaggctttcccgttgttgaataagttttataaccaagtgcatgatgaagacagcctagaaaaactcattacgatctattttttacaaaaccgcaaaaaagagggtttggttctgttgcaatctcatatagacaggtatggttgctcagagcaattgtgccaaaaagcgctcaacaccttcacgcaatttaacgagcttgatttggctaaaacgactttcgctcgtttgtatgaaaaaaaccctattgttcaaaacgcccaattttacataggggtattaatcttgttaaaagagtttgataaggcccagcaaatcgcagaattattcccctttgacaggcgtttgttgctagacttatacaccgcgcaaaaaaaatttgatcaagcttccaaacaggcttctttaatctatcaagaaagaaaagaccctaaattcttaggcttagaggcgatttatcattatgaaagcttgagcgcgaataagaaaaagctcaccaaagaagagatgttgcccatcattcaaaaattagagcaagccaccaaagagcgccaagcatggcttgctaaaactaaagataaagaagacgcgcaagacgctttcttttataattttttagggtattccttaatagattatgacatggatgttaaaaggggcatggatcttgtgaggaaagccttagcgttagattctaactcagtgctttatttggattctttagcatggggttattacaaattagggaattgtttggaggctaaaaaaatcttttctagcatcgctaaagagcttatccaaaacgaacccgaattgaaagaacacaataaaatcattcaagaatgcaagaaa

SEQ ID NO: 4220 - DNA (genomic), 1296 bp, Helicobacter pylori; double-stranded, circular
  misc_feature (B) LOCATION 1...1296
  hypothetical: NO
  anti-sense: NO
atgaatattcaaacaaagaaaagatttttagcaaatttattgctttttagcctgttttcttgccttaaggctgaaaccctttcagaagaccatcaaatcctgttgagttcagacgctttccatagaggggattttgccaccgctcaaaaaggctatatgaatctctataagcaaaccaataaagtggtgtatgctaaagaggcggccatttcagcggcgagtttaggggacattaaaaccgctatgcatttagccatgctttatcaaaaaatcaccaataatcgtaacgatgtttctatcaataagattttagtggatggctatgcacaaatggggcagattgataaggcgattgaactattacacaagattcgtaaggaagaaaaaaccatagccacagacaatgtgttagggactttgtatttgactcaaaagcgtttggataaggctttcccgttgttgaataagttttataaccaagtgcatgatgaagacagcctagaaaaactcattacgatctattttttacaaaaccgcaaaaaagagggtttggatctgttgcaatctcatatagacaggtatggttgctcagagcaattgtgccaaaaagcgctcaacaccttcacgcaatttaacgagcttgatttggctaaaacgactttcgctcgtttgtatgaaaaaaaccctattgttcaaaacgcccaattttacataggggtattaatcttgttaaaagagtttgataaggcccagcaaatcgcagaattattcccctttgacaggcgtttgttgctagacttatacaccgcgcaaaaaaaatttgatcaagcttccaaacaggcttctttaatctatcaagaaagaaaagaccctaaattcttaggcttagaggcgatttatcattatgaaagcttgagcgcgaataagaaaaagctcaccaaagaagagatgttgcccatcattcaaaaattagagcaagccaccaaagagcgccaagcatggcttgctaaaactaaagataaagaagacgcgcaagacgctttcttttataattttttagggtattccttaatagattatgacatggatgttaaaaggggcatggatcttgtgaggaaagccttagcgttagattctaactcagtgctttatttggattctttagcatggggttattacaaattagggaattgtttggaggctaaaaaaatcttttctagcatcgctaaagagcttatccaaaacgaacccgaattgaaagaacacaataaaatcattcaagaatgcaagaaatag

SEQ ID NO: 4221 - DNA (genomic), 303 bp, Helicobacter pylori; double-stranded, circular
  misc_feature (B) LOCATION 1...303
  hypothetical: NO
  anti-sense: NO
gcaaaaaatactatttttaataacgctaattttaacaacagcacttcttttaatttcaataattctagcgcgaccacttcgtttgtgggggatttcactaacgctaattcaaatttgcaaatcgctgggaacgctgtttttgggaactctactaatggctctcaaaataccgctaattttaataataccggctctgttaatattgcagggaatgcaacctttgataacgtggtatttaacagccctacgaacacaggcgtgaaagggaaagttactctcaataacatcactttaaaaacttga

SEQ ID NO: 4222 - DNA (genomic), 297 bp, Helicobacter pylori; double-stranded, circular
  misc_feature (B) LOCATION 1...297
  hypothetical: NO
  anti-sense: NO
aaaaatactatttttaataacgctaattttaacaacagcacttcttttaatttcaataattctagcgcgaccacttcgtttgtgggggatttcactaacgctaattcaaatttgcaaatcgctgggaacgctgtttttgggaactctactaatggctctcaaaataccgctaattttaataataccggctctgttaatattgcagggaatgcaacctttgataacgtggtatttaacagccctacgaacacaggcgtgaaagggaaagttactctcaataacatcactttaaaaact

SEQ ID NO: 4223 - DNA (genomic), 387 bp, Helicobacter pylori; double-stranded, circular
  misc_feature (B) LOCATION 1...387
  hypothetical: NO
  anti-sense: NO
aaacttgaacgctcctttgtctttggcgatgggacgattgtttttagcgctcattcggtgattaatattggtgaagctatcacaaatggcaaccctatcacccttgtaagctcttctaaagcaattgaatacaacgacgctttcagtaaaaatctatggcagctcatcaactaccaagggcatgggggtagcaggaaaaagtcgtttctagtgcgggtaatggcgtctatgatgtggtgtattctctcaacaaccaaacctacaatttccaagaggttttttcacccaacagcatttctatccggcgtttgggcgttggcatggtgtttgattatgtggatatggaaaaatcggatcgtttgtattatcaaaacgctctcggtttta

SEQ ID NO: 4224 - DNA (genomic), 606 bp, Helicobacter pylori; double-stranded, circular
  misc_feature (B) LOCATION 1...606
  hypothetical: NO
  anti-sense: NO
caggaaaaagtcgtttctagtgcgggtaatggcgtctatgatgtggtgtattctctcaacaaccaaacctacaatttccaagaggttttttcacccaacagcatttctatccggcgtttgggcgttggcatggtgtttgattatgtggatatggaaaaatcggatcgtttgtattatcaaaacgctctcggttttatgacctacatgcctaatagctataacaataatttagggaatttaaacaacaccatttactattacgacaacagcattgacttttatgcgagcgggaaaactctattcactaaagcggaattttctcaaacgttcactgggcaaaacagcgcgatcgtttttggggctaaaaatatatggacgagcgtaagcgatgcgccgcaatctaatgtgatcattcgctttggggacaataagggagcagggagtaatgatgcgagtgggcattgctggaatttgcaatgcataggctttatcacagggcattatgaagcgcaaaagatttacatcaccggcagtattgaaagcgggaaccgcatttctagcggtggggcgcgagccttaattttaacgggcttcaaggcattcttt

SEQ ID NO: 4225 - DNA (genomic), 738 bp, Helicobacter pylori; double-stranded, circular
  misc_feature (B) LOCATION 1...738
  hypothetical: NO
  anti-sense: NO
atgaaacaatttaaaaagaaaccaaaaaagataaaacgatcgcatcaaaatcaaaaaacaatcttaaagcgtcctttatggcttatgcctttactgattggcgggtttgctagtggggtgtatgcggatggaacagacattttggggcttagttggggggaaaaaagccaaaaggtatgcgtgcatcgtccatggtatgctatatggagttgcgataaatgggaggaaaaaacacaacaatttacaggaaaccaactcatcacaaaaacttgggcagggggtaatgcggctaactactaccactctcaaaacaaccaagacatcacagccaatttaaaaaatgataacggcacttattttttaagcggtctgtataactacaccggaggggaatataatggggggaatttagacattgaattaggcagtaacgctacttttaatctaggtgcgagtagtgggaatagcttcacttcttggtatcctaatgggcatactgatgttacttttagcgctgggactatcaatgtgaataacagcgtagaagtgggcaatcgtgtgggatcgggagctggcacgcacaccggcacagccactttaaacttgaacgctaataaggttactatcaattccaatatcagcgcgtataaaacttcgcaagtgaatgtaggcaatgctaacagcgttattaccattaattcggtttctttaaatggggaatacttgcagttctttagc

SEQ ID NO: 4226 - DNA (genomic), 741 bp, Helicobacter pylori; double-stranded, circular
  misc_feature (B) LOCATION 1...741
  hypothetical: NO
  anti-sense: NO
atgaaacaatttaaaaagaaaccaaaaaagataaaacgatcgcatcaaaatcaaaaaacaatcttaaagcgtcctttatggcttatgcctttactgattggcgggtttgctagtggggtgtatgcggatggaacagacattttggggcttagttggggggaaaaaagccaaaaggtatgcgtgcatcgtccatggtatgctatatggagttgcgataaatgggaggaaaaaacacaacaatttacaggaaaccaactcatcacaaaaacttgggcagggggtaatgcggctaactactaccactctcaaaacaaccaagacatcacagccaatttaaaaaatgataacggcacttattttttaagcggtctgtataactacaccggaggggaatataatggggggaatttagacattgaattaggcagtaacgctacttttaatctaggtgcgagtagtgggaatagcttcacttcttggtatcctaatgggcatactgatgttacttttagcgctgggactatcaatgtgaataacagcgtagaagtgggcaatcgtgtgggatcgggagctggcacgcacaccggcacagccactttaaacttgaacgctaataaggttactatcaattccaatatcagcgcgtataaaacttcgcaagtgaatgtaggcaatgctaacagcgttattaccattaattcggtttctttaaatggggaatacttgcagttctttagctag

SEQ ID NO: 4227 - DNA (genomic), 978 bp, Helicobacter pylori; double-stranded, circular
  misc_feature (B) LOCATION 1...978
  hypothetical: NO
  anti-sense: NO
ttggcgggtttgcyagtggggtgtatrcggatgaaacaaacattttgggracttagttggggggaaaaaagccaaaaggtatgcgtgcatcgtccatggtatgctatatggagttgcgataaatgggaggaaaaaacacaacaatttacaggaaaccaactcatcacaaaaacttgggcagggggtaatgcggctaactactaccactctcaaaacaaccaagacatcacagccaatttaaaaaatgataacggcacttattttttaagcggtctgtataactacaccggaggggaatataatggggggaatttagacattgaattaggcagtaacgctacttttaatctaggtgcgagtagtgggaatagcttcacttcttggtatcctaatgggcatactgatgttacttttagcgctgggactatcaatgtgaataacagcgtagaagtgggcaatcgtgtgggatcgggagctggcacgcacaccggcacagccactttaaacttgaacgctaataaggttactatcaattccaatatcagcgcgtataaaacttcgcaagtgaatgtaggcaatgctaacagcgttattaccattaattcggtttctttaaatggggaaacttgcagktctttagctagggtgggcgtaggggctaattgctccacttctgggcctagctattcttttaaagggacsactaacgctactaacacsacttttagcaawtcaagcggsagtttcacttttgaagaraacgccacttttagcggggcgaaattaaatgggggggcattcactttcaataaaaagtttaacgctaccaataataccgcttttaatagcggtagttttacttttaaaggcacaagctcttttaatggtgcgaattttagtaacgcttcctatacttttaataatcaagccactttccaaaacagctcctttaatggggggacttttacttttaattga

SEQ ID NO: 4228 - DNA (genomic), 1296 bp, Helicobacter pylori; double-stranded, circular
  misc_feature (B) LOCATION 1...1296
  hypothetical: NO
  anti-sense: NO
atggggaatacttgcagttctttagctagggtgggcgtaggggctaattgctccacttctgggcctagctattcttttaaagggacgactaacgctactaacacgacttttagcaattcaagcggcagtttcacttttgaagagaacgccacttttagcggggcgaaattaaatgggggggcattcactttcaataaaaagtttaacgctaccaataataccgcttttaatagcggtagttttacttttaaaggcacaagctcttttaatggtgcgaattttagtaacgcttcctatacttttaataatcaagccactttccaaaacagctcctttaatggggggacttttacttttaatgaccagaccaatcaaagcacccagcacccccaaattcaaaacagctcttttagcggcagtgctaccactcttaagggttttgcgacttttgagcaagcctttaacaattcaaaccaccaactaacgatacaaaacgcttcctttaataacgctactttcaacaataccggtaaaatcactatagaaaaagatgcgagctttaataacacttcgttcaacactcctgttgatacaaacaacatgactattagtggtggcgttactttaagcggtaaaaatgacttgaaaaatggtgcaacccttgattttgggagttctaaaatcactctcactcaagggacgactttcaacctcacaagtttaggcagtgagaagagcgtaacgattttaaattctagaggtgggatcacttacaatcatcttttaaaccatgcgatcaatagcttgacaaacgccctaaaaacgaacgaaagctcttcaaaaccgcaaagtttcgctcaaggtttgtgggatatgatcacttacaatggggttaccgggcagcttttgaatgaaaacgctgcaacatctaaacccactgactcttcgccctctaaatcctctacaaactctacgcaagtctatcaagtgggttacaaaataggggatactatctacaaactgcaagaaactttcagccacaattccattattattcaggctttagagagcgggacttacacgccaccccctgtcattaacggctccaaatttgacttatccgcttcaaattatatcaatgctgacatgccttggtataaccataaatattatattcctaaatcccaaaaattttacagagagcgggacttattcaattgccgagcgttcaaatatgggggagctacactaactcgtttaaacaaacctttagcgcaagtaatagcaatctggtga

SEQ ID NO: 4229 - DNA (genomic), 1716 bp, Helicobacter pylori; double-stranded, circular
  misc_feature (B) LOCATION 1...1716
  hypothetical: NO
  anti-sense: NO
ttgccgagcgttcaaatatgggggagctacactaactcgtttaaacaaacctttagcgcaagtaatagcaatctggtgattgggtataacgcaacatggactgatcccaatgtttcttctagcgacacggtggcttttggggacccttcagggagcgctcttaatgggcattgcgggccttggccctattaccaatgcacaggcacgactaacggcacttatagcgcttatcatgtctatatcacagcgaatctgcgttctggcaatcgtataggcaccggtggggcagccaatctaatctttaatggggtagatagtatcaatatcgctaacgctaccatcacgcaacataacgccggggcttattcaagctctatgactttttccacgcaaaacatggacaattcgcagaatttgaatggcctaaattctaacggcaagcttttggtgtatggcacaactttcactaaccaagccaaagacgggaaattcattttcaatgcagggcaagcgacttttgaaaacaccaactttaatggagggagttaccaattcagcggcgatagcttgaatttttcaaataacaaccagttcaatagcggttcgtttgagattggcgcaaaaaatactatttttaataacgctaattttaacaacagcacttcttttaatttcaataattctagcgcgaccacttcgtttgtgggggatttcactaacgctaattcaaatttgcaaatcgctgggaacgctgtttttgggaactctactaatggctctcaaaataccgctaattttaataataccggctctgttaatattgcagggaatgcaacctttgataacgtggtatttaacagccctacgaacacgagcgtgaaagggaaagttactctcaataacatcactttaaaaaacttgaacgctcctttgtcttttggcgatgggacgattgtttttagcgctcattcggtgattaatattggtgaagctatcacaaatggcaaccctatcacccttgtaagctcttctaaagcaattgaatacaacgacgctttcagtaaaaatctatggcagctcatcaactaccaagggcatggggctagcagtgaaaagctcgtttctagtgcgggtaatggcgtctatgatgtggtgtattctctcaacaaccaaacctacaatttccaagaggttttttcacccaacagcatttctatccggcgtttgggcgttggcatggtgtttgattatgtggatatggaaaaatcggatcgtttgtattatcaaaacgctctcggttttatgacctacatgcctaatagctataacaataatttagggaatttaaacaacaccatttactattacgacaacagcattgacttttatgcgagcgggaaaactctattcactaaagcggaattttctcaaacgttcactgggcaaaacagcgcgatcgtttttggggctaaaaatatatggacgagcgtaagcgatgcgccgcaatctaatgtgatcattcgctttggggacaataagggagcagggagtaatgatgcgagtgggcattgctggaatttgcaatgcataggctttatcacagggcattatgaagcgcaaaagatttacatcaccggcagtattgaaagcgggaaccgcatttctagcggtggggcgcgagccttaattttaacgggcttcaaggcattcttttaa

SEQ ID NO: 4230 - DNA (genomic), 1782 bp, Helicobacter pylori; double-stranded, circular
  misc_feature (B) LOCATION 1...1782
  hypothetical: NO
  anti-sense: NO
atggggaatacttgcagttctttagctagggtgggcgtaggggctaattgctccacttctgggcctagctattcttttaaagggacgactaacgctactaacacgacttttagcaattcaagcggcagtttcacttttgaagagaacgccacttttagcggggcgaaattaaatgggggggcattcactttcaataaaaagtttaacgctaccaataataccgcttttaatagcggtagttttacttttaaaggcacaagctcttttaatggtgcgaattttagtaacgcttcctatacttttaataatcaagccactttccaaaacagctcctttaatggggggacttttacttttaatgaccagaccaatcaaagcacccagcacccccaaattcaaaacagctcttttagcggcagtgctaccactcttaagggttttgcgacttttgagcaagcctttaacaattcaaaccaccaactaacgatacaaaacgcttcctttaataacgctactttcaacaataccggtaaaatcactatagaaaaagatgcgagctttaataacacttcgttcaacactcctgttgatacaaacaacatgactattagtggtggcgttactttaagcggtaaaaatgacttgaaaaatggtgcaacccttgattttgggagttctaaaatcactctcactcaagggacgactttcaacctcacaagtttaggcagtgagaagagcgtaacgattttaaattctagaggtgggatcacttacaatcatcttttaaaccatgcgatcaatagcttgacaaacgccctaaaaacgaacgaaagctcttcaaaaccgcaaagtttcgctcaaggtttgtgggatatgatcacttacaatggggttaccgggcagcttttgaatgaaaacgctgcaacatctaaacccactgactcttcgccctctaaatcctctacaaactctacgcaagtctatcaagtgggttacaaaataggggatactatctacaaactgcaagaaactttcagccacaattccattattattcaggctttagagagcgggacttacacgccaccccctgtcattaacggctccaaatttgacttatccgcttcaaattatatcaatgctgacatgccttggtataaccataaatattatattcctaaatcccaaattttacagagagcgggacttattcaattgccgagcgttcaaatatgggggagctacactaactcgtttaaacaaacctttagcgcaagtaatagcaatctggtgattgggtataacgcaacatggactgatcccaatgtttcttctagcgacacggtggcttttggggacccttcagggagcgctcttaatgggcattgcgggccttggccctattaccaatgcacaggcacgactaacggcacttatagcgcttatcatgtctatatcacagcgaatctgcgttctggcaatcgtataggcaccggtggggcagccaatctaatctttaatggggtagatagtatcaatatcgctaacgctaccatcacgcaacataacgccggggcttattcaagctctatgactttttccacgcaaaacatggacaattcgcagaatttgaatggcctaaattctaacggcaagcttttggtgtatggcacaactttcactaaccaagccaaagacgggaaattcattttcaatgcagggcaagcgacttttgaaaacaccaactttaatggagggagttaccaattcagcgcgatagct

SEQ ID NO: 4231 - DNA (genomic), 3642 bp, Helicobacter pylori; double-stranded, circular
  misc_feature (B) LOCATION 1...3642
  hypothetical: NO
  anti-sense: NO
atgaaacaatttaaaaagaaaccaaaaaagataaaacgatcgcatcaaaatcaaaaaacaatcttaaagcgtcctttatggcttatgcctttactgattggcgggtttgctagtggggtgtatgcggatggaacagacattttggggcttagttggggggaaaaaagccaaaaggtatgcgtgcatcgtccatggtatgctatatggagttgcgataaatgggaggaaaaaacacaacaatttacaggaaaccaactcatcacaaaaacttgggcagggggtaatgcggctaactactaccactctcaaaacaaccaagacatcacagccaatttaaaaaatgataacggcacttattttttaagcggtctgtataactacaccggaggggaatataatggggggaatttagacattgaattaggcagtaacgctacttttaatctaggtgcgagtagtgggaatagcttcacttcttggtatcctaatgggcatactgatgttacttttagcgctgggactatcaatgtgaataacagcgtagaagtgggcaatcgtgtgggatcgggagctggcacgcacaccggcacagccactttaaacttgaacgctaataaggttactatcaattccaatatcagcgcgtataaaacttcgcaagtgaatgtaggcaatgctaacagcgttattaccattaattcggtttctttaaatggggatacttgcagttctttagctagggtgggcgtaggggctaattgctccacttctgggcctagctattcttttaaagggacgactaacgctactaacacgacttttagcaattcaagcggcagtttcacttttgaagagaacgccacttttagcggggcgaaattaaatgggggggcattcactttcaataaaaagtttaacgctaccaataataccgcttttaatagcggtagttttacttttaaaggcacaagctcttttaatggtgcgaattttagtaacgcttcctatacttttaataatcaagccactttccaaaacagctcctttaatggggggacttttacttttaatgaccagaccaatcaaagcacccagcacccccaaattcaaaacagctcttttagcggcagtgctaccactcttaagggttttgcgacttttgagcaagcctttaacaattcaaaccaccaactaacgatacaaaacgcttcctttaataacgctactttcaacaataccggtaaaatcactatagaaaaagatgcgagctttaataacacttcgttcaacactcctgttgatacaaacaacatgactattagtggtggcgttactttaagcggtaaaaatgacttgaaaaatggtgcaacccttgattttgggagttctaaaatcactctcactcaagggacgactttcaacctcacaagtttaggcagtgagaagagcgtaacgattttaaattctagaggtgggatcacttacaatcatcttttaaaccatgcgatcaatagcttgacaaacgccctaaaaacgaacgaaagctcttcaaaaccgcaaagtttcgctcaaggtttgtgggatatgatcacttacaatggggttaccgggcagcttttgaatgaaaacgctgcaacatctaaacccactgactcttcgccctctaaatcctctacaaactctacgcaagtctatcaagtgggttacaaaataggggatactatctacaaactgcaagaaactttcagccacaattccattattattcaggctttagagagcgggacttacacgccaccccctgtcattaacggctccaaatttgacttatccgcttcaaattatatcaatgctgacatgccttggtataaccataaatattatattcctaaatcccaaaattttacagagagcgggacttattacttgccgagcgttcaaatatgggggagctacactaactcgtttaaacaaacctttagcgcaagtaatagcaatctggtgattgggtataacgcaacatggactgatcacaatgtttcttctagcgacacggtggcttttggggacacttcagggagcgctcttaatgggcattgcgggccttggccctattaccaatgcacaggcacgactaacggcacttatagcgcttatcatgtctatatcacagcgaatctgcgttctggcaatcgtataggcaccggtggggcagccaatctaatctttaatggggtagatagtatcaatatcgctaacgctaccatcacgcaacataacgccggggcttattcaagctctatgactttttccacgcaaaacatggacaattcgcagaatttgaatggcctaaattctaacggcaagcttttggtgtatggcacaactttcactaaccaagccaaagacgggaaattcattttcaatgcagggcaagcgacttttgaaaacaccaactttaatggagggagttaccaattcagcggcgatagcttgaatttttcaaataacaaccagttcaatagcggttcgtttgagattggcgcaaaaaatactatttttaataacgctaattttaacaacagcacttcttttaatttcaataattctagcgcgaccacttcgtttgtgggggatttcactaacgctaattcaaatttgcaaatcgctgggaacgctgtttttgggaactctactaatggctctcaaaataccgctaattttaataataccggctctgttaatattgcagggaatgcaacctttgataacgtggtatttaacagccctacgaacacgagcgtgaaagggaaagttactctcaataacatcactttaaaaaacttgaacgctcctttgtcttttggcgatgggacgattgtttttagcgctcattcggtgattaatattggtgaagctatcacaaatggcaaccctatcacccttgtaagctcttctaaagcaattgaatacaacgacgctttcagtaaaaatctatggcagctcatcaactaccaagggcatggggctagcagtgaaaagctcgtttctagtgcgggtaatggcgtctatgatgtggtgtattctttcaacaaccaaacctacaatttccaagaggttttttcacccaacagcatttctatccggcgtttgggcgttggcatggtgtttgattatgtggatatggaaaaatcggatcgtttgtattatcaaaacgctctcggttttatgacctacatgcctaatagctataacaataatttagggaatttaaacaacaccatttactattacgacaacagcattgacttttatgcgagcgggaaaactctattcactaaagcggaattttctcaaacgttcactgggcaaaacagcgcgatcgtttttggggctaaaaatatatggacgagcgtaagcgatgcgccgcaatctaatgtgatcattcgctttggggacaataagggagcagggagtaatgatgcgagtgggcattgctggaatttgcaatgcataggctttatcacagggcattatgaagcgcaaaagatttacatcaccggcagtattgaaagcgggaaccgcatttctagcggtggggcgcgagccttaattttaacgggcttcaaggcattcttttaa

SEQ ID NO: 4232 - DNA (genomic), 576 bp, Helicobacter pylori; double-stranded, circular
  misc_feature (B) LOCATION 1...576
  hypothetical: NO
  anti-sense: NO
atgctatcttttataagcgcgtttgataaaaggggcgtttcaatacgccttctaacagccttgttactgctttttagtttgggtttggctaaagatttagaaatccaaacttttgtggctaaatacctttctaaaaatcaaaaaatacaagccctacaggagcaaattgacgctttagattctcaagaaaaagtcgttagcaaatgggataaccctattttgtatttaggctataacaacgctaacgtgagcgattttttcaggctggatagcaccttaatgcaaaacatgagcttgggtttgtctcaaaaagtggatttaaatggtaaaaaactcacgcagtctaaaatgatcaatttagaaaaacaaaaaaaaatattagagcttaaaaaaaccaagcagcaattggtgattaatttaatgataaacggcattgaaaactataaaaaccaacaagaaatagagcttttaaacacagcgattaaaaatttagaaaacaccctctatcaagccaaccattccagttcgcccgatttaatagygatygycaagttrgaaawtttaaaaatcgccawt

SEQ ID NO: 4233 - DNA (genomic), 651 bp, Helicobacter pylori; double-stranded, circular
  misc_feature (B) LOCATION 1...651
  hypothetical: NO
  anti-sense: NO
aaaaacgatttagtagtagcgctctctagcagccattattccatgggcgaattgacttttaaagaaaacgagattttaagcattgcccctaaaaattttgaattcaataacgagcaagagctgcataacattagcgccactaattacgatattgcgatcgccaggcttgatgaagaaaaagcacaaaaagacatcactctggctaaaaaaagctttttagaagacataaacgttaccggggtgtattatttccgctccaaacaatactataactacgacatgtttagcgtcgctttgtctatccctttacctctttatggcaagcaggctaaattagtggagcaaaagaaaaaagaaagcttggcgtttaaaagcgaagtggaaaacgccaaaaacaaaacgcgccacctggccctaaaactccttaaaaaattagaaaccttgcaaaaaaacctggaatcgatcaataaaatcatcaaacagaatgaaaaaatcgcgcaaatttatgcgcttgatttgaaaactaatggcgattacaacgcttattacaacgccttgaatgacaaaatcactattcaaatcacccagcttgaaaccttaagcgctctaaatagtgcttatttgtccttacaaaatctcaaaggattagaa

SEQ ID NO: 4234 - DNA (genomic), 666 bp, Helicobacter pylori; double-stranded, circular
  misc_feature (B) LOCATION 1...666
  hypothetical: NO
  anti-sense: NO
acgggacatggcaggttagggtggatattaaatccaaagaaggccaagtttatcgcactaaaacaagcctggatttatgagcgcatgctatcttttataagcgcgtttgataaaaggggcgtttcaatacgccttctaacagccttgttactgctttttagtttgggtttggctaaagatttagaaatccaaacttttgtggctaaatacctttctaaaaatcaaaaaatacaagccctacaggagcaaattgacgctttagattctcaagaaaaagtcgttagcaaatgggataaccctattttgtatttaggctataacaacgctaacgtgagcgattttttcaggctggatagcaccttaatgcaaaacatgagcttgggtttgtctcaaaaagtggatttaaatggtaaaaaactcacgcagtctaaaatgatcaatttagaaaaacaaaaaaaaatattagagcttaaaaaaaccaagcagcaattggtgattaatttaatgataaacggcattgaaaactataaaaaccaacaagaaatagagcttttaaacacagcgattaaaaatttagaaaacaccctctatcaagccaaccattccagttcgcccgatttaatagcgatcgccaagttagaaattttaaaatcgcaattagaaatc

SEQ ID NO: 4235 - DNA (genomic), 1239 bp, Helicobacter pylori; double-stranded, circular
  misc_feature (B) LOCATION 1...1239
  hypothetical: NO
  anti-sense: NO
atgctatcttttataagcgcgtttgataaaaggggcgtttcaatacgccttctaacagccttgttactgctttttagtttgggtttggctaaagatttagaaatccaaacttttgtggctaaatacctttctaaaaatcaaaaaatacaagccctacaggagcaaattgacgctttagattctcaagaaaaagtcgttagcaaatgggataaccctattttgtatttaggctataacaacgctaacgtgagcgattttttcaggctggatagcaccttaatgcaaaacatgagcttgggtttgtctcaaaaagtggatttaaatggtaaaaaactcacgcagtctaaaatgatcaatttagaaaaacaaaaaaaaatattagagcttaaaaaaaccaagcagcaattggtgattaatttaatgataaacggcattgaaaactataaaaaccaacaagaaatagagcttttaaacacagcgattaaaaatttagaaaacaccctctatcaagccaaccattccagttcgcccgatttaatagcgatcgccaagttagaaattttaaaatcgctattagaaatccaaaaaaacgatttagaagtagcgctctctagcagccattattccatgggcgaattgacttttaaagaaaacgagattttaagcattgcccctaaaaattttgaattcaataacgagcaagagctgcataacattagcgccactaattacgatattgcgatcgccaggcttgatgaagaaaaagcacaaaaagacatcactctggctaaaaaaagctttttagaagacataaacgttaccggggtgtattatttccgctccaaacaatactataactacgacatgtttagcgtcgctttgtctatccctttacctctttatggcaagcaggctaaattagtggagcaaaagaaaaaagaaagcttggcgtttaaaagcgaagtggaaaacgccaaaaacaaaacgcgccacctggccctaaaactccttaaaaaattagaaaccttgcaaaaaaacctggaatcgatcaataaaatcatcaaacagaatgaaaaaatcgcgcaaatttatgcgcttgatttgaaaactaatggcgattacaacgcttattacaacgccttgaatgacaaaatcactattcaaatcacccagcttgaaaccttaagcgctctaaatagtgcttatttgtccttacaaaatctcaaaggattagaatga

SEQ ID NO: 4236 - DNA (genomic), 378 bp, Helicobacter pylori; double-stranded, circular
  misc_feature (B) LOCATION 1...378
  hypothetical: NO
  anti-sense: NO
atgaaaaagttagccgctttatttttagtaagcgcgttgggggttatgagtttgaacgcatgggagcaaaccctaaaagctaatgatttggaagtgaaaatcaaatccgtgggcaaccccattaaaggcgataacacttttgtgcttagccccactttaaaaggtaaggctttagaaaaagctatcgttagggtgcagtttatgatgcctgaaatgcccggcatgccagcgatgaaagaaatggcgcaagtgagtgaaaaaaacggcctttatgaagctaaaaccaatctttccatgaacgggacatggcaggttagggtggatattaaatccaaagaaggccaagtttatcgcactaaaacaagcctggatttatga

SEQ ID NO: 4237 - DNA (genomic), 516 bp, Helicobacter pylori; double-stranded, circular
  misc_feature (B) LOCATION 1...516
  hypothetical: NO
  anti-sense: NO
aaaaataggcataaactcttataccttctacttaaaaaccttaattttttaaaaaccatttccacaatttttacacaaaagagggttatcattcgttcgcaacaaggattttcttgttatcttaatttaaaggtcaaaacgatgaaaaagttagccgctttatttttagtaagcgcgttgggggttatgagtttgaacgcatgggagcaaaccctaaaagctaatgatttggaagtgaaaatcaaatccgtgggcaaccccattaaaggcgataacacttttgtgcttagccccactttaaaaggtaaggctttagaaaaagctatcgttagggtgcagtttatgatgcctgaaatgcccggcatgccagcgatgaaagaaatggcgcaagtgagtgaaaaaaacggcctttatgaagctaaaaccaatctttccatgaacgggacatggcaggttagggtggatattaaatccaaagaaggccaagtttatcgcactaaaacaagcctggattta

SEQ ID NO: 4238 - DNA (genomic), 222 bp, Helicobacter pylori; double-stranded, circular
  misc_feature (B) LOCATION 1...222
  hypothetical: NO
  anti-sense: NO
tgcttatttgtccttacaaaatctcaaaggattagaatgaaacggcttttattgttagccttggccctcttttttagcctctcatgcactaacgctcaagaaattaaagaaactcaagagactaaaaaaactaaagaaactaaaagccaaacccgttttaacatttccaccactaaggtcatagaaaaagaattttctcaaagccggcgctattacgcgctt

SEQ ID NO: 4239 - DNA (genomic), 735 bp, Helicobacter pylori; double-stranded, circular
  misc_feature (B) LOCATION 1...735
  hypothetical: NO
  anti-sense: NO
ggtcatagaaaaagaattttctcaaagccggcgctattacgcgctttagagcctaatgaagcgctgattttttctcaaaccctgcgttttgatggctatgtggaaaagctttatgcgaataaaacctatacccccattaaaaagggcgataggctattgagcgtgtattcccctgaattagcgggcgttcaaagcgagctgttatcgtcattgaaattcaaccagcaagtgggagcgattaaagaaaaattaaaactactagggctagaaaactttagcattgaaaaaatcatcagcagccataaagtccaaaatgaaatcactatttactctcgtttcaacggcgttatttttaaaaaaagcccggatctcaatgaggggagtttcattaaaaaagggcaagagcttttcaaaatcatagatttaagccgattgtgggcgcttgttaaagtcaatcaagaggatttagaatttttaaaaaacacgcatcaagcgattttgttcgtagagggggttaaaggcaagcaagcaatcacgcttgaaaacatcaaccccatcataaatgcgcaagataaaatgctagaagcgcgcttcaatgtgcctaatcttaaattgctttattaccctaacatgttcgctcaagtagaaatctttcacaaaccccaaaaaatgaagatcttgcctaaagaagcggttttgattaagggggggaaagctatcgtgtttaaaaaagat

SEQ ID NO: 4240 - DNA (genomic), 738 bp, Helicobacter pylori; double-stranded, circular
  misc_feature (B) LOCATION 1...738
  hypothetical: NO
  anti-sense: NO
ggtcatagaaaaagaattttctcaaagccggcgctattacgcgctttagagcctaatgaagcgctgattttttctcaaaccctgcgttttgatggctatgtggaaaagctttatgcgaataaaacctatacccccattaaaaagggcgataggctattgagcgtgtattcccctgaattagcgggcgttcaaagcgagctgttatcgtcattgaaattcaaccagcaagtgggagcgattaaagaaaaattaaaactactagggctagaaaactttagcattgaaaaaatcatcagcagccataaagtccaaaatgaaatcactatttactctcgtttcaacggcgttatttttaaaaaaagcccggatctcaatgaggggagtttcattaaaaaagggcaagagcttttcaaaatcatagatttaagccgattgtgggcgcttgttaaagtcaatcaagaggatttagaatttttaaaaaacacgcatcaagcgattttgttcgtagagggggttaaaggcaagcaagcaatcacgcttgaaaacatcaaccccatcataaatgcgcaagataaaatgctagaagcgcgcttcaatgtgcctaatcttaaattgctttattaccctaacatgttcgctcaagtagaaatctttcacaaaccccaaaaaatgaagatcttgcctaaagaagcggttttgattaagggggggaaagctatcgtgtttaaaaaagatgat

SEQ ID NO: 4241 - DNA (genomic), 1026 bp, Helicobacter pylori; double-stranded, circular
  misc_feature (B) LOCATION 1...1026
  hypothetical: NO
  anti-sense: NO
atgaaacggcttttattgttagccttggccctcttttttagcctctcatgcactaacgctcaagaaattaaagaaactcaagagactaaaaaaactaaagaaactaaaagccaaacccgttttaacatttccaccactaaggtcatagaaaaagaattttctcaaagccggcgctattacgcgcttttagagcctaatgaagcgctgattttttctcaaaccctgcgttttgatggctatgtggaaaagctttatgcgaataaaacctatacccccattaaaaagggcgataggctattgagcgtgtattcccctgaattagcgggcgttcaaagcgagctgttatcgtcattgaaattcaaccagcaagtgggagcgattaaagaaaaattaaaactactagggctagaaaactttagcattgaaaaaatcatcagcagccataaagtccaaaatgaaatcactatttactctcgtttcaacggcgttatttttaaaaaaagcccggatctcaatgaggggagtttcattaaaaaagggcaagagcttttcaaaatcatagatttaagccgattgtgggcgcttgttaaagtcaatcaagaggatttagaatttttaaaaaacacgcatcaagcgattttgttcgtagagggggttaaaggcaagcaagcaatcacgcttgaaaacatcaaccccatcataaatgcgcaagataaaatgctagaagcgcgcttcaatgtgcctaatcttaaattgctttattaccctaacatgttcgctcaagtagaaatctttcacaaaccccaaaaaatgaagatcttgcctaaagaagcggttttgattaagggggggaaagctatcgtgtttaaaaaagatgattttggcttaagcccgttagaaattaaagccgtccgcttgagcgatgggagttatgaaattttagagggtttaaaagcgggcgaagaagtcgctaataacgctttattcgtgctagacgctgacgctcaaaacaatggggattattga

SEQ ID NO: 4242 - DNA (genomic), 363 bp, Helicobacter pylori; double-stranded, circular
  misc_feature (B) LOCATION 1...363
  hypothetical: NO
  anti-sense: NO
atgggcgtagcggttgttttatttttaacgctaattttattgtttttagttttaagggattttggtttagctagccccaaacaaaagattttagcttttttaatcgtagggattataggagcgagcatcagcgtttatacttataaacaaaaccaacaaaaccaacaagaaatcgctttgcaaagagcgtttttaaggggggaaaccttgttgtgtaaaggcatcaaagtcaataaccaaacctttaatttagtgagcgggactttgagctttttaggcaaaaaacaaacccctatgaaagatgttcttgtggatttggattcttgtcagacgcttcaaaaagatcccttaatccaaccttaa

SEQ ID NO: 4243 - DNA (genomic), 423 bp, Helicobacter pylori; double-stranded, circular
  misc_feature (B) LOCATION 1...423
  hypothetical: NO
  anti-sense: NO
aaaaggctttgtgataggctttggagcgggggatattacctatcagttgagaggcgaaatgtaatgggcgtagcggttgttttatttttaacgctaattttattgtttttagttttaagggattttggtttagctagccccaaacaaaagattttagcttttttaatcgtagggattataggagcgagcatcagcgtttatacttataaacaaaaccaacaaaaccaacaagaaatcgctttgcaaagagcgtttttaaggggggaaaccttgttgtgtaaaggcatcaaagtcaataaccaaacctttaatttagtgagcgggactttgagctttttaggcaaaaaacaaacccctatgaaagatgttcttgtggatttggattcttgtcagacgcttcaaaaagatcccttaatccaacct

SEQ ID NO: 4244 - DNA (genomic), 207 bp, Helicobacter pylori; double-stranded, circular
  misc_feature (B) LOCATION 1...207
  hypothetical: NO
  anti-sense: NO
aataccgggttttcaaatctattaaacaataaaggttattacatgttttcactttcttatgtttccaagaaatttttaagcgtgttgctattgatttcgctgtttttaagcgcttgcaaatccaacaataaagacaaattggatgaaaatcttttaagctccggcactcccagctccccagaaattttcgaacagcgagaacatcgt

SEQ ID NO: 4245 - DNA (genomic), 378 bp, Helicobacter pylori; double-stranded, circular
  misc_feature (B) LOCATION 1...378
  hypothetical: NO
  anti-sense: NO
ggctctaaaatgtcaaagaattgcgcaactatattaaagagcattttggtgcttacctatgtcaatatcagctattctaaagagcataattttaaagtcggcgataaggataaaaatgatgaaaaagaaatcaaaatgtccacagaagaattagcgcaaatttatgccgtccaatccacccctacgattgttttatccgataaaaccggcaaaaccatctatgaattgccgggctatatgccttctgtgcaatttttagccgtgttagaatttatcggcgatgggaagtatcaagacacgaaaaacgatgaggatctcactaaaaaattaaaggcttacatcaagtataaaaccaacctttctaagagcaagtccagc

SEQ ID NO: 4246 - DNA (genomic), 672 bp, Helicobacter pylori; double-stranded, circular
  misc_feature (B) LOCATION 1...672
  hypothetical: NO
  anti-sense: NO
atgttttcactttcttatgtttccaagaaatttttaagcgtgttgctattgatttcgctgtttttaagcgcttgcaaatccaacaataaagacaaattggatgaaaatcttttaagctccggcactcaaagctccaaagaattaaacgacaagcgagacaatatagacaaaaagagctacgctggtttagaagatgtttttttagacaacaagtccattagccctaatgataaatacatgcttttagtttttggccgtaatggttgctcctattgtgaaaggcttaaaaaagatctcaaaaatgtcaaagaattgcgcaactatattaaagagcattttagtgcttactatgtcaatatcagctattctaaagagcataattttaaagtcggcgataaggataaaaatgatgaaaaagaaatcaaaatgtccacagaagaattagcgcaaatttatgccgtccaatccacccctacgattgttttatccgataaaaccggcaaaaccatctatgaattgccgggctatatgccttctgtgcaatttttagccgtgttagaatttatcggcgatgggaagtatcaagacacgaaaaacgatgaggatctcactaaaaaattaaaggcttacatcaagtataaaaccaacctttctaagagcaagtccagctag

SEQ ID NO: 4247 - DNA (genomic), 351 bp, Helicobacter pylori; double-stranded, circular
  misc_feature (B) LOCATION 1...351
  hypothetical: NO
  anti-sense: NO
ttgatgaaatctaaaatcactcattttatcgttatctcttttgttttaagcgtgttgagcgcctgcaaagatgagcctaaaaaatcgtcccaatcgcaccaaaacaacactaaaaccactcaaaacaatcaaatcaatcaacctaataaggatataaaaaagattgagcatgaagaagaagatgaaaaagtcaccaaagaagtgaatgatctgatcaataacgaaaataaaattgatgaaatcaataatgaagaaaacgctgatccttcgcaaaaaagaacgaacaatgttttgcaacgagccactaaccaccaagacaatctcagttccccactcaacaggaagtattaa

SEQ ID NO: 4248 - DNA (genomic), 348 bp, Helicobacter pylori; double-stranded, circular
  misc_feature (B) LOCATION 1...348
  hypothetical: NO
  anti-sense: NO
ttgatgaaatctaaaatcactcattttatcgatatctaccttgttaaaagcgtgttgagcgcacgcaaagatgagcctaaaaaattgtcccaatcgcaccaaaacaacactaaaaccactcaaaacaatcaaatcaatcaacctaataaggatataaaaaagattgagcatgaagaagaagatgaaaaagtcaccaaagaagtgaatgatctgatcaataacgaaaataaaattgatgaaatcaataatgaagaaaacgctgatccttcgcaaaaaagaacgaacaatgttttgcaacgagccactaaccaccaagacaatctcagttccccactcaacaggaagtat

SEQ ID NO: 4249 - DNA (genomic), 201 bp, Helicobacter pylori; double-stranded, circular
  misc_feature (B) LOCATION 1...201
  hypothetical: NO
  anti-sense: NO
ttgagtggggaactgagattgtcttggtggttagtggctcgttgcaaaacattgttcgttcttttttgcgaaggatcagcgttttcttcattattgatttcatcaattttattttcgttattgatcagatcattcacttctttggtgactttttcatcttcttcttcatgctcaatcttttttatatccttattaggttga

SEQ ID NO: 4250 - DNA (genomic), 207 bp, Helicobacter pylori; double-stranded, circular
  misc_feature (B) LOCATION 1...207
  hypothetical: NO
  anti-sense: NO
tacttcctgttgagtggggaactgagattgtcttggtggttagtggctcgttgcaaaacattgttcgttcttttttgcgaaggatcagcgttttcttcattattgatttcatcaattttattttcgttattgatcagatcattcacttctttggtgactttttcatcttcttcttcatgctcaatcttttttatatccttattaggt

SEQ ID NO: 4251 - DNA (genomic), 270 bp, Helicobacter pylori; double-stranded, circular
  misc_feature (B) LOCATION 1...270
  hypothetical: NO
  anti-sense: NO
ttggtggttagtggctcgttgcaaaacattgttcgttcttttttgcgaaggatcagcgttttcttcattattgatttcatcaattttattttcgttattgatcagatcattcacttctttggtgactttttcatcttcttcttcatgctcaatcttttttatatccttattaggttgattgatttgattgttttgagtggttttagtgttgttttggtgcgattgggacgattttttaggctcatctttgcaggcgctcaacacgcttaa

SEQ ID NO: 4252 - DNA (genomic), 270 bp, Helicobacter pylori; double-stranded, circular
  misc_feature (B) LOCATION 1...270
  hypothetical: NO
  anti-sense: NO
ttggtggttagtggctcgttgcaaaacattgttcgttcttttttgcgaaggatcagcgttttcttcattattgatttcatcaattttattttcgttattgatcagatcattcacttctttggtgactttttcatcttcttcttcatgctcaatcttttttatatccttattaggttgattgatttgattgttttgagtggttttagtgttgttttggtgcgattgggaygattttttaggctcatctttgcatgcgctcaacacgcttaa

SEQ ID NO: 4253 - DNA (genomic), 408 bp, Helicobacter pylori; double-stranded, circular
  misc_feature (B) LOCATION 1...408
  hypothetical: NO
  anti-sense: NO
aaaaaatttcacactttaatacttcctgttgagtggggaactgagattgtcttggtggttagtggctcgttgcaaaacattgttcgttcttttttgcgaaggatcagcgttttcttcattattgatttcatcaattttattttcgttattgatcagatcattcacttctttggtgactttttcatcttcttcttcatgctcaatcttttttatatccttattaggttgattgatttgattgttttgagtggttttagtgttgttttggtgcgattgggacaattttttaggctcatctttgcgtgcgctcaacacgcttttaacaaggtagatatcgataaaatgagtgattttagatttcatcaattaagtttctttaaatcagtgtataatttgtttattttatca

SEQ ID NO: 4254 - DNA (genomic), 924 bp, Helicobacter pylori; double-stranded, circular
  misc_feature (B) LOCATION 1...924
  hypothetical: NO
  anti-sense: NO
atgccacaaaaccagcttgtgatcaccatcattgatgaatcaggctctaagcaactcaaattttctaaaaatttaaaacgcaacctcatcatttctgttgtcattcttttattgatcgtggggcttggcgtggggtttttaaaatttttaatcgctaaaatggatacgatgacaagcgagaggaatgcggttttaagggattttaggggtttgtatcaaaaaaattacgccctagcgaaagagattaaaaacaagcgagaagagctttttattgtggggcaaaagatccgtgggctagaatccttgattgaaatcaaaaagggggctaatgggggagggcatctctatgatgaagtggatttagaaaatttgagcttaaatcaaaaacatttagcactcatgctcattcctaatggcatgcccctaaaaacttatagcgctatcaaacccactaaagaaaggaaccaccccattaaaaagattaagggcgttgaatccgggatcgattttatcgcgccattgaacacgcctgtgtatgcgagcgctgatgggattgtggattttgtgaagactcgttctaatgcggggtatgggaacttggtgcgcattgaacatgcgtttggtttcagctccatttatacgcacttagatcatgtcaatgtgcagcctaaaagcttcatccaaaaagggcagttgattggctatagcgggaagagcggtaatagcggcggcgaaaaattgcattatgaagtgcggtttttgggtaaaattttagacgcagaaaaattcctagcatgggatttggatcattttcaaagcgctttagaagaaaataaatttattgaatggaagaatctgttttgggttttagaagacatcgtccagctccaagagcatgtggataaagacaccttaaaaggtcag

SEQ ID NO: 4255 - DNA (genomic), 927 bp, Helicobacter pylori; double-stranded, circular
  misc_feature (B) LOCATION 1...927
  hypothetical: NO
  anti-sense: NO
atgccacaaaaccagcttgtgatcaccatcattgatgaatcaggctctaagcaactcaaattttctaaaaatttaaaacgcaacctcatcatttctgttgtcattcttttattgatcgtggggcttggcgtggggtttttaaaatttttaatcgctaaaatggatacgatgacaagcgagaggaatgcggttttaagggattttaggggtttgtatcaaaaaaattacgccctagcgaaagagattaaaaacaagcgagaagagctttttattgtggggcaaaagatccgtgggctagaatccttgattgaaatcaaaaagggggctaatgggggagggcatctctatgatgaagtggatttagaaaatttgagcttaaatcaaaaacatttagcactcatgctcattcctaatggcatgcccctaaaaacttatagcgctatcaaacccactaaagaaaggaaccaccccattaaaaagattaagggcgttgaatccgggatcgattttatcgcgccattgaacacgcctgtgtatgcgagcgctgatgggattgtggattttgtgaagactcgttctaatgcggggtatgggaacttggtgcgcattgaacatgcgtttggtttcagctccatttatacgcacttagatcatgtcaatgtgcagcctaaaagcttcatccaaaaagggcagttgattggctatagcgggaagagcggtaatagcggcggcgaaaaattgcattatgaagtgcggtttttgggtaaaattttagacgcagaaaaattcctagcatgggatttggatcattttcaaagcgctttagaagaaaataaatttattgaatggaagaatctgttttgggttttagaagacatcgtccagctccaagagcatgtggataaagacaccttaaaaggtcagtag

SEQ ID NO: 4256 - DNA (genomic), 930 bp, Helicobacter pylori; double-stranded, circular
  misc_feature (B) LOCATION 1...930
  hypothetical: NO
  anti-sense: NO
ttgatgccacaaaaccagcttgtgatcaccatcattgatgaatcaggctctaagcaactcaaattttctaaaaatttaaaacgcaacctcatcatttctgttgtcattcttttattgatcgtggggcttggcgtggggtttttaaaatttttaatcgctaaaatggatacgatgacaagcgagaggaatgcggttttaagggattttaggggtttgtatcaaaaaaattacgccctagcgaaagagattaaaaacaagcgagaagagctttttattgtggggcaaaagatccgtgggctagaatccttgattgaaatcaaaaagggggctaatgggggagggcatctctatgatgaagtggatttagaaaatttgagcttaaatcaaaaacatttagcactcatgctcattcctaatggcatgcccctaaaaacttatagcgctatcaaacccactaaagaaaggaaccaccccattaaaaagattaagggcgttgaatccgggatcgattttatcgcgccattgaacacgcctgtgtatgcgagcgctgatgggattgtggattttgtgaagactcgttctaatgcggggtatgggaacttggtgcgcattgaacatgcgtttggtttcagctccatttatacgcacttagatcatgtcaatgtgcagcctaaaagcttcatccaaaaagggcagttgattggctatagcgggaagagcggtaatagcggcggcgaaaaattgcattatgaagtgcggtttttgggtaaaattttagacgcagaaaaattcctagcatgggatttggatcattttcaaagcgctttagaagaaaataaatttattgaatggaagaatctgttttgggttttagaagacatcgtccagctccaagagcatgtggataaagacaccttaaaaggtcagtag

SEQ ID NO: 4257 - DNA (genomic), 948 bp, Helicobacter pylori; double-stranded, circular
  misc_feature (B) LOCATION 1...948
  hypothetical: NO
  anti-sense: NO
acgctatccaaagaagagggattgatgccacaaaaccagcttgtgatcaccatcattgatgaatcaggctctaagcaactcaaattttctaaaaatttaaaacgcaacctcatcatttctgttgtcattcttttattgatcgtggggcttggcgtggggtttttaaaatttttaatcgctaaaatggatacgatgacaagcgagaggaatgcggttttaagggattttaggggtttgtatcaaaaaaattacgccctagcgaaagagattaaaaacaagcgagaagagctttttattgtggggcaaaagatccgtgggctagaatccttgattgaaatcaaaaagggggctaatgggggagggcatctctatgatgaagtggatttagaaaatttgagcttaaatcaaaaacatttagcactcatgctcattcctaatggcatgcccctaaaaacttatagcgctatcaaacccactaaagaaaggaaccaccccattaaaaagattaagggcgttgaatccgggatcgattttatcgcgccattgaacacgcctgtgtatgcgagcgctgatgggattgtggattttgtgaagactcgttctaatgcggggtatgggaacttggtgcgcattgaacatgcgtttggtttcagctccatttatacgcacttagatcatgtcaatgtgcagcctaaaagcttcatccaaaaagggcagttgattggctatagcgggaagagcggtaatagcggcggcgaaaaattgcattatgaagtgcggtttttgggtaaaattttagacgcagaaaaattcctagcatgggatttggatcattttcaaagcgctttagaagaaaataaatttattgaatggaagaatctgttttgggttttagaagacatcgtccagctccaagagcatgtggataaagacaccttaaaaggtcag

SEQ ID NO: 4258 - DNA (genomic), 771 bp, Helicobacter pylori; double-stranded, circular
  misc_feature (B) LOCATION 1...771
  hypothetical: NO
  anti-sense: NO
atgttggggagcgtcaaaaaagcggtttttagggttttgtgtttgggggcgttgtgtttatgcggggggttaatggcagagcaagatcctaaagagcttatattttcaggtataactatttacacggataaaaatttcactagagctaagaaatattttgaaaaagcttgcaaatcaaacgatgctgatggctgtgcaatcttaagagaggtttattctagtggtaaagccatagcgagagaaaacgcaagagagagcattgaaaaagctcttgaacacaccgctactgctaaagtttgtaaattaaacgatgctgaaaaatgcaaggacttagcagagttttattttaatgtaaacgatcttaaaaatgctttagaatattactctaaatcttgtaagttaaataatgttgaagggtgtatgctgtcagcaactttttataacgatatgataaagggtttgaaaaaagataaaaaagatctagaatattattctaaagcttgcgagttaaataacggtggagggtgttctaaattaggaggggattatttttttggtgaaggcgtaacaaaagatttcaaaaaagcttttgaatattctgccaaagcttgtgagttgaacgatgctaaagggtgttacgctctagcagcgttttataatgagggtaaaggcgtggcaaaggatgaaaagcaaacgacagaaaaccttgaaaagagttgcaagctaggattaaaagaagcatgcgatattctcaaagaacaaaaacaataa

SEQ ID NO: 4259 - DNA (genomic), 774 bp, Helicobacter pylori; double-stranded, circular
  misc_feature (B) LOCATION 1...774
  hypothetical: NO
  anti-sense: NO
gtgtcatgttggggagcgtcaaaaaagcggtttttagggttttgtgtttgggggcgttgtgtttatgcgggggggttaatggcagagcaagatcctaaagagcttatattttcaggtataactatttacacggataaaaatttcactagagctaagaaatattttgaaaaagcttgcaaatcaaacgatgctgatggctgtgcaatcttaagagaggtttattctagtggtaaagccatagcgagagaaaacgcaagagagagcattgaaaaagctcttgaacacaccgctactgctaaagtttgtaaattaaacgatgctgaaaaatgcaaggacttagcagagttttattttaatgtaaacgatcttaaaaatgctttagaatattactctaaatcttgtaagttaaataatgttgaagggtgtatgctgtcagcaactttttataacgatatgataaagggtttgaaaaaagataaaaaagatctagaatattattctaaagcttgcgagttaaataacggtggagggtgttctaaattaggaggggattatttttttggtgaaggcgtaacaaaagatttcaaaaaagcttttgaatattctgccaaagcttgtgagttgaacgatgctaaagggtgttacgctctagcagcgttttataatgagggtaaaggcgtggcaaaggatgaaaagcaaacgacagaaaaccttgaaaagagttgcaagctaggattaaaagaagcatgcgatattctcaaagaacaaaaacaa

SEQ ID NO: 4260 - DNA (genomic), 825 bp, Helicobacter pylori; double-stranded, circular
  misc_feature (B) LOCATION 1...825
  hypothetical: NO
  anti-sense: NO
gtgtcaatactagttataatagaaccttacactttttacaaaagggaggagagtgtcatgttggggagcgtcaaaaaagcggtttttagggttttgtgtttgggggcgttgtgtttatgcggggggttaatggcagagcaagatcctaaagagcttatattttcaggtataactatttacacggataaaaatttcactagagctaagaaatattttgaaaaagcttgcaaatcaaacgatgctgatggctgtgcaatcttaagagaggtttattctagtggtaaagccatagcgagagaaaacgcaagagagagcattgaaaaagctcttgaacacaccgctactgctaaagtttgtaaattaaacgatgctgaaaaatgcaaggacttagcagagttttattttaatgtaaacgatcttaaaaatgctttagaatattactctaaatcttgtaagttaaataatgttgaagggtgtatgctgtcagcaactttttataacgatatgataaagggtttgaaaaaagataaaaaagatctagaatattattctaaagcttgcgagttaaataacggtggagggtgttctaaattaggaggggattatttttttggtgaaggcgtaacaaaagatttcaaaaaagcttttgaatattctgccaaagcttgtgagttgaacgatgctaaagggtgttacgctctagcagcgttttataatgagggtaaaggcgtggcaaaggatgaaaagcaaacgacagaaaaccttgaaaagagttgcaagctaggattaaaagaagcatgcgatattctcaaagaacaaaaacaa

SEQ ID NO: 4261 - DNA (genomic), 828 bp, Helicobacter pylori; double-stranded, circular
  misc_feature (B) LOCATION 1...828
  hypothetical: NO
  anti-sense: NO
gtgtcaatactagttataatagaaccttacactttttacaaaagggaggagagtgtcatgttggggagcgtcaaaaaagcggtttttagggttttgtgtttgggggcgttgtgtttatgcggggggttaatggcagagcaagatcctaaagagcttatattttcaggtataactatttacacggataaaaatttcactagagctaagaaatattttgaaaaagcttgcaaatcaaacgatgctgatggctgtgcaatcttaagagaggtttattctagtggtaaagccatagcgagagaaaacgcaagagagagcattgaaaaagctcttgaacacaccgctactgctaaagtttgtaaattaaacgatgctgaaaaatgcaaggacttagcagagttttattttaatgtaaacgatcttaaaaatgctttagaatattactctaaatcttgtaagttaaataatgttgaagggtgtatgctgtcagcaactttttataacgatatgataaagggtttgaaaaaagataaaaaagatctagaatattattctaaagcttgcgagttaaataacggtggagggtgttctaaattaggaggggattatttttttggtgaaggcgtaacaaaagatttcaaaaaagcttttgaatattctgccaaagcttgtgagttgaacgatgctaaagggtgttacgctctagcagcgttttataatgagggtaaaggcgtggcaaaggatgaaaagcaaacgacagaaaaccttgaaaagagttgcaagctaggattaaaagaagcatgcgatattctcaaagaacaaaaacaataa

SEQ ID NO: 4262 - DNA (genomic), 357 bp, Helicobacter pylori; double-stranded, circular
  misc_feature (B) LOCATION 1...357
  hypothetical: NO
  anti-sense: NO
atgaaaaaatccctttgtttgtctttctttctgaccttctctaaccctcttcaagcccttgtcattgagcttttagaagagattaaaacttcgccgcataaaggcacttttaaggctaaagtccttgattctaaagaaccaagacaagttttaggcgtttataatatctccccacacaaaaaactcacgctcactatcactcacatatccacggcaatcgtctatcaaccccttgatgaaaaactttctttagaaacgaccttaagccctaaccgccctactatccctagaaacacccaaatcgttttttcttcaaaagaattgaaagaaccgcactcaaacccaataccttcttaa

SEQ ID NO: 4263 - DNA (genomic), 366 bp, Helicobacter pylori; double-stranded, circular
  misc_feature (B) LOCATION 1...366
  hypothetical: NO
  anti-sense: NO
aaaggaataagcatgaaaaaatccctttgtttgtctttctttctgaccttctctaaccctcttcaagcccttgtcattgagcttttagaagagattaaaacttcgccgcataaaggcacttttaaggctaaagtccttgattctaaagaaccaagacaagttttaggcgtttataatatctccccacacaaaaaactcacgctcactatcactcacatatccacggcaatcgtctatcaaccccttgatgaaaaactttctttagaaacgaccttaagccctaaccgccctactatccctagaaacacccaaatcgttttttcttcaaaagaattgaaagaaccgcactcaaacccaataccttct

SEQ ID NO: 4264 - DNA (genomic), 1074 bp, Helicobacter pylori; double-stranded, circular
  misc_feature (B) LOCATION 1...1074
  hypothetical: NO
  anti-sense: NO
atgcaaaaaccacaaaataaacccagctcatcgcaacaatctcctcaaaacttttcttacccagagtccaaactaggctctaaaaactctaaaaacagccttttacagcctttagtaactcctagcaaagtaagccccactaacgaagttaaaacgccaacaaacgacgctaatccccctttaaagcattcttcacaagatcaagaaaacaacctctttgtagcgccacccactgaaaaaacgctccctaacaacacctctagtgctgatgcgagtgaaaacaatgaaagcaacgaaaatagggataatgtggaaaaacaagcgattagagatcctaatatcaaagaattcgcatgcgggaagtgggtttatgatgatgaaaatttacaagcctatcgcccaagcattttaaaacgcgttgataaagacaaagagattacaacagacattaccccttgcgattacagcaccgctgaaaataaaagcggtaaaatcattaccccctatactaaaatctctgttcataaaacagagcctttagaagaccctcaaacttttgaagctaaaaataatttcgccattctccaagccagaagctctacagaaaagtgtaaaagggctagagcgagaaaagacggcacgaccaggcaatgctatctgatagaagagcctttaaaacaagcgtgggagagcgagtatgaaatcaccacgcaattagtgaaagccatatatgaacgccccaaacaagacgatcaagtagagccgactttttatgaaaccagcgaattggcttattcttccacacgaaaaagcgaaataacgcgtaatgaattgaatttgaatgaaaaattcatggaatttgtggaagtgtatgaggggcattatttaaacgatataatcaaagagagcagcgaatacaaagaatgggttaaaaaccatgtgcgctttaaagaaggggtgtgcatggccttagaaatagaagagcaaccacgagccaaaagcacgcctttgagtattgaaaactctcgtgttgtgtgtgtcaaaaaggggaattatttattcaatgaagtttaa

SEQ ID NO: 4265 - DNA (genomic), 1146 bp, Helicobacter pylori; double-stranded, circular
  misc_feature (B) LOCATION 1...1146
  hypothetical: NO
  anti-sense: NO
aaacacccaaatcgttttttcttcaaaagaattgaaagaaccgcactcaaacccaataccttcttaaacgcgcccatgcaaaaaccacaaaataaacccagctcatcgcaacaatctcctcaaaacttttcttacccagagtccaaactaggctctaaaaactctaaaaacagccttttacagcctttagtaactcctagcaaagtaagccccactaacgaagttaaaacgccaacaaacgacgctaatccccctttaaagcattcttcacaagatcaagaaaacaacctctttgtagcgccacccactgaaaaaacgctccctaacaacacctctagtgctgatgcgagtgaaaacaatgaaagcaacgaaaatagggataatgtggaaaaacaagcgattagagatcctaatatcaaagaattcgcatgcgggaagtgggtttatgatgatgaaaatttacaagcctatcgcccaagcattttaaaacgcgttgataaagacaaagagattacaacagacattaccccttgcgattacagcaccgctgaaaataaaagcggtaaaatcattaccccctatactaaaatctctgttcataaaacagagcctttagaagaccctcaaacttttgaagctaaaaataatttcgccattctccaagccagaagctctacagaaaagtgtaaaagggctagagcgagaaaagacggcacgaccaggcaatgctatctgatagaagagcctttaaaacaagcgtgggagagcgagtatgaaatcaccacgcaattagtgaaagccatatatgaacgccccaaacaagacgatcaagtagagccgactttttatgaaaccagcgaattggcttattcttccacacgaaaaagcgaaataacgcgtaatgaattgaatttgaatgaaaaattcatggaatttgtggaagtgtatgagggtcattatttaaacgatataatcaaagagagcagcgaatacaaagaatgggttaaaaaccatgtgcgctttaaagaaagggtgtgcatggccttaaaaataaaaaagcaaccacgagccaaaagcacgcctttgagtattgaaaactctcgtgttgtgtgtgtcaaaaaggggaattatttattcaatgaagtt

SEQ ID NO: 4266 - DNA (genomic), 1440 bp, Helicobacter pylori; double-stranded, circular
  misc_feature (B) LOCATION 1...1440
  hypothetical: NO
  anti-sense: NO
atgaaaaaatccctttgtttgtctttctttctgaccttctctaaccctcttcaagcccttgtcattgagcttttagaagagattaaaacttcgccgcataaaggcacttttaaggctaaagtccttgattctaaagaaccaagacaagttttaggcgtttataatatctccccacacaaaaaactcacgctcactatcactcacatatccacggcaatcgtctatcaaccccttgatgaaaaactttctttagaaacgaccttaagccctaaccgccctactatccctagaaacacccaaatcgttttttcttcaaaagaattgaaagaaccgcactcaaacccaataccttctttaaacgcgcccatgcaaaaaccacaaaataaacccagctcatcgcaacaatctcctcaaaacttttcttacccagagtccaaactaggctctaaaaactctaaaaacagccttttacagcctttagtaactcctagcaaagtaagccccactaacgaagttaaaacgccaacaaacgacgctaatccccctttaaagcattcttcacaagatcaagaaaacaacctctttgtagcgccacccactgaaaaaacgctccctaacaacacctctagtgctgatgcgagtgaaaacaatgaaagcaacgaaaatagggataatgtggaaaaacaagcgattagagatcctaatatcaaagaattcgcatgcgggaagtgggtttatgatgatgaaaatttacaagcctatcgcccaagcattttaaaacgcgttgataaagacaaagagattacaacagacattaccccttgcgattacagcaccgctgaaaataaaagcggtaaaatcattaccccctatactaaaatctctgttcataaaacagagcctttagaagaccctcaaacttttgaagctaaaaataatttcgccattctccaagccagaagctctacagaaaagtgtaaaagggctagagcgagaaaagacggcacgaccaggcaatgctatctgatagaagagcctttaaaacaagcgtgggagagcgagtatgaaatcaccacgcaattagtgaaagccatatatgaacgccccaaacaagacgatcaagtagagccgactttttatgaaaccagcgaattggcttattcttccacacgaaaaagcgaaataacgcgtaatgaattgaatttgaatgaaaaattcatggaatttgtggaagtgtatgaggggcattatttaaacgatataatcaaagagagcagcgaatacaaagaatgggttaaaaaccatgtgcgctttaaagaaggggtgtgcatggccttagaaatagaagagcaaccacgagccaaaagcacgcctttgagtattgaaaactctcgtgttgtgtgtgtcaaaaaggggaattatttattcaatgaagtttaa

SEQ ID NO: 4267 - DNA (genomic), 1440 bp, Helicobacter pylori; double-stranded, circular; identical to SEQ ID NO: 4266
  misc_feature (B) LOCATION 1...1440
  hypothetical: NO
  anti-sense: NO

SEQ ID NO: 4268 - DNA (genomic), 294 bp, Helicobacter pylori; double-stranded, circular
  misc_feature (B) LOCATION 1...294
  hypothetical: NO
  anti-sense: NO
atgggacaaactaaagaaattataacgacgcttttaccccttttggtgttgtttcttattttttattttttgatcgttcgcccgcaacgccaacagcaaaaaaagcataaagaaatgatagagggcttgactaagggcgataaaattgtcactcaaggagggctgatcgttgaagtgcttaaagcggaagcgaatttttttagcgtgaaactcaatgatgacaccaccgctaaactttctaaaaactatgtagcgttcaaattagacgaagaaacaacacccaacaacaactaa

SEQ ID NO: 4269 - DNA (genomic), 300 bp, Helicobacter pylori; double-stranded, circular
  misc_feature (B) LOCATION 1...300
  hypothetical: NO
  anti-sense: NO
ggaaatttaatgggacaaactaaagaaattataacgacgcttttaccccttttggtgttgtttcttattttttattttttgatcgttcgcccgcaacgccaacagcaaaaaaagcataaagaaatgatagagggcttgactaagggcgataaaattgtcactcaaggagggctgatcgttgaagtgcttaaagcggaagcgaatttttttagcgtgaaactcaatgatgacaccaccgctaaactttctaaaaactatgtagcgttcaaattagacgaagaaacaacacccaacaacaac

SEQ ID NO: 4270 - DNA (genomic), 714 bp, Helicobacter pylori; double-stranded, circular
  misc_feature (B) LOCATION 1...714
  hypothetical: NO
  anti-sense: NO
atgaagtcaaataaaaagtccaatcatttaagagcgatttatagggctttagtgatcgctataggcttagccgttatcattgttttcaattattttaaccgcaaaaacaataacgcccgctccagccgtagggcttgttcgtgttttttttctctcaccggggttaatttagaaaaaataggttcctttgacacgggcgctaaactcattgtcttaaaccaccaaagcttactagacattatttatttagaagcctaccaccctagtaatatttgctggatcgctaaaaaagagctgggcgaaatccctttttatgggcatgctctaacggataccggaatgatcttaattgacagagaggataaaaaggggatagtgagccttttgaaagcatgtaaagaaaagctagatcaaaaccgccctttagtgatttttcctgaaggcactagaggcaaaggaggagaaaaattcctcccctttaagcaaggggctaaaatcatcgctgaaaaattccagctcaaaatccagcccatggtgttaatcaattccattaaaatctttaattccaagcccctagaagcttataaagcgcgcacccgtttggtcatgctagaaagctatacgcctgattttagctcgcccacctggtatgaagaattacaagaacgcatgcaaaaagaatatttaaaacactaccacgaactaaacgcatga

SEQ ID NO: 4271 - DNA (genomic), 726 bp, Helicobacter pylori; double-stranded, circular
  misc_feature (B) LOCATION 1...726
  hypothetical: NO
  anti-sense: NO
gatgggtcaaaaaagatgaagtcaaataaaaagtccaatcatttaagagcgatttatagggctttagtgatcgctataggcttagccgttatcattgttttcaattattttaaccgcaaaaacaataacgcccgctccagccgtagggcttgttcgtgtttttttccccccaccggggttaatttagaaaaaataggttcctttgacacgggcgctaaactcattgtcttaaaccaccaaagcttactagacattatttatttagaagcctaccaccctagtaatatttgctggatcgctaaaaaagagctgggcgaaatccctttttatgggcatgctctaacggataccggaatgatcttaattgacagagaggataaaaaggggatagtgagccttttgaaagcatgtaaagaaaagctagatcaaaaccgccctttagtgatttttcctgaaggcactagaggcaaaggaggagaaaaattcctcccctttaagcaaggggctaaaatcatcgctgaaaaattccagctcaaaatccagcccatggtgttaatcaattccattaaaatctttaattccaagcccctagaagcttataaagcgcgcacccgtttggtcatgctagaaagctatacgcctgattttagctcgcccacctggtatgaagaattacaagaacgcatgcaaaaagaatatttaaaacactaccacgaactaaacgca

SEQ ID NO: 4272 - DNA (genomic), 222 bp, Helicobacter pylori; double-stranded, circular
  misc_feature (B) LOCATION 1...222
  hypothetical: NO
  anti-sense: NO
cacaagcggattcttacacccacttcaaacctccacctcaaaaaacttgatgataacacccctatttccaaagaggcggatatagactataatagcgaacaggacatagatgtcactcctataatgatcaatgatgatattcagctaaaaaccgctattgacagcttgaaaacctggtctatcgtagatgagaaaatggatgaaaaagtgcctaagaagaaa

SEQ ID NO: 4273 - DNA (genomic), 1095 bp, Helicobacter pylori; double-stranded, circular
  misc_feature (B) LOCATION 1...1095
  hypothetical: NO
  anti-sense: NO
ttcttctatccctggtgtgtattccatcccaccaccttggttgttacgattctcttcgtgagttcatggtgtgaagtaggaaccgtccaccggtcccagaagatcccaagaattacggctagggtggaagcgttcagtcgtttctctaatgtggttacagaaattgaaaaaaagtatgcggacaagatcagtatttctgagatcatgactaaagcgattgaaggcttactctctaatttggacgcgcattcagcgtatttgaatgaaaagaagtttaaggaatttcaggcccaaaccgagggcgaatttggggggcttgggatcacggtgggcatgcgcgatggcgttttgaccgttattgcacctttagagggcactccagcttacaaggctggggttaaatcaggcgatagcattttaaaaatcaataacgaaagcacgctgagcatgagcattgatgatgcggttaatctcatgcgcggcaagccaaaaacctctattcagatcactgttgttaggaaaaatgagccaaaacccttggtatttaatatcgttagggatattatcaagatcccctctgtctatgtgaaaaagattaaagacacaccttatttgtacgtgagagtcaattcttttgataaaaatgttaccaaatcggttttagacggcttgaaggctaaccctaacattaagggcgttgtgttgaatttgagggggaatcctggagggctattaaaccaggcggtaggcttgtctaaccttttcattaaagagggagttttagtctctcaaagaggcaaaaataaggaggaaaacttagaatacaaggctaatgggcagagtccctttataccaatttacctgttgtgggtgttagctaatggcggctcagcgagccgcgagcgagatcgtcgcaggggcactgcaagaccacaagcgagcctatcatttactggtgaaaaaacctttgggaagggaagcgtgtcaagtgttgctcctagtcaatatatgatgaaacctttaatatcacgaccgcgcgctattatttgccgagcgggcgcaccattcaagctaaggggatcacgcctgatattg

SEQ ID NO: 4274 - DNA (genomic), 1380 bp, Helicobacter pylori; double-stranded, circular
  misc_feature (B) LOCATION 1...1380
  hypothetical: NO
  anti-sense: NO
gtggtgttattaacaatgacaaaacgactttttaaagggttgttagcgatttctcttgcggtgagtttgcatggtggtgaagttaaggaaaaaaagccggtcaagccggtcaaagaagatccgcaagaattagcggctaaaagggtggaagcgttcagtcgtttctctaatgtggttacagaaattgaaaaaaagtatgtggataagatcagtatttctgagatcatgactaaagcgattgaaggcttactctctaatttggacgcgcattcagcgtatttgaatgaaaagaagtttaaggaatttcaggcccaaaccgagggcgaatttggggggcttgggatcacggtgggcatgcgcgatggcgttttgaccgttattgcacctttagagggcactccagcttacaaggctggggttaaatcaggcgatagcattttaaaaatcaataacgaaagcacgctgagcatgagcattgatgatgcggttaatctcatgcgcggcaagccaaaaacctctattcagatcactgttgttaggaaaaatgagccaaaacccttggtatttaatatcgttagggatattatcaagatcccctctgtctatgtgaaaaagattaaagacacaccttatttgtacgtgagagtcaattcttttgataaaaatgttaccaaatcggttttagacggcttgaaggctaaccctaacattaagggcgttgtgttggatttgagggggaatcctggagggctattaaaccaggcggtaggcttgtctaaccttttcattaaagagggggttttagtctctcaaagaggcaaaaataaggaggaaaacttagaatacaaggctaatggcagagccccttataccaatttacctgttgtggtgttagtcaatggcggttcagcgagcgcgagcgagatcgtcgcaggggcactgcaagatcacaagcgagccatcattatcggtgaaaaaacctttggtaagggaagcgtgcaagtgttgctccctgtcaataaagacgaagccattaaaatcacgaccgcgcgctattatttgccgagcgggcgcaccattcaagctaaggggatcacgcctgatattgtgatttatccgggtaaagtgccagaaaatgaaaataaattcagtttgaaagaagcggatttaaaacaccatttagagcaagagcttaaaaaacttgatgataaaacccctatttccaaagaggcggataaagacaagaaaagcgaagaggaaaaagaggttactcctaaaatgatcaatgatgatattcagctaaaaaccgctattgacagcttgaaaacctggtctatcgtagatgagaaaatggatgaaaaagtgcctaagaagaaataa

SEQ ID NO: 4275 - DNA (genomic), 255 bp, Helicobacter pylori; double-stranded, circular
  misc_feature (B) LOCATION 1...255
  hypothetical: NO
  anti-sense: NO
gtgaataaaaagcaccgcttggcttttttagggctaattgttggggttctattcttctttagcgcgtgccaacaccgcctgcacatggggtattattcagaagttacaggggattatttgttcaattataattccactatcgtggtggcttatgacagaagcgatgcgatgacttcttattatatcaatgtgattgtttatgaattgcaaaaattaggcttttataatgtcttcacgcaagcgaattcccgctag

SEQ ID NO: 4276 - DNA (genomic), 264 bp, Helicobacter pylori; double-stranded, circular
  misc_feature (B) LOCATION 1...264
  hypothetical: NO
  anti-sense: NO
gggaatgttaaagtgaataaaaagcaccgcttggcttttttagggctaattgttggggttctattcttctttagcgcgtgccaacaccgcctgcacatggggtattattcagaagttacaggggattatttgttcaattataattccactatcgtggtggcttatgacagaagcgatgcgatgacttcttattatatcaatgtgattgtttatgaattgcaaaaattaggcttttataatgtcttcacgcaagcgaattcccgc

SEQ ID NO: 4277 - DNA (genomic), 390 bp, Helicobacter pylori; double-stranded, circular
  misc_feature (B) LOCATION 1...390
  hypothetical: NO
  anti-sense: NO
gtgatctatgtgcgtattgtccgtaatatctcggctgtgccgttttatcaatacaattaccaactgatcgatcaagtcaataagccttgttattttcttggggggcagttttattgctcccaaacccctacggattactacgctatcaatggctttagcgagcaaattttgatgagcgctaattcgcattttattttggattggtatgatgtggtgctgcaaaaacgggttttatatgtggatgggagcgtgagcgggaggacttgtggctatcagatgctttatagagatttgattaaaagcacgatcaaacgcattgattttaaccgccctgaacgctactactacaatttaagactgcccctttatcagccatgttataggcaatga

SEQ ID NO: 4278 - DNA (genomic), 429 bp, Helicobacter pylori; double-stranded, circular
  misc_feature (B) LOCATION 1...429
  hypothetical: NO
  anti-sense: NO
tgtcttcacgcaagcgaattcccgctagataaagcaaaaaatgtgatctatgtgcgtattgtccgtaatatctcggctgtgccgttttatcaatacaattaccaactgatcgatcaagtcaataagccttgttattttcttggggggcagttttattgctcccaaacccctacggattactacgctatcaatggctttagcgagcaaattttgatgagcgctaattcgcattttattttggattggtatgatgtggtgctgcaaaaacgggttttatatgtggatgggagcgtgagcgggaggacttgtggctatcagatgctttatagagatttgattaaaagcacgatcaaacgcattgattttaaccgccctgaacgctactactacaatttaagactgcccctttatcagccatgttataggcaa

SEQ ID NO: 4279 - DNA (genomic), 660 bp, Helicobacter pylori; double-stranded, circular
  misc_feature (B) LOCATION 1...660
  hypothetical: NO
  anti-sense: NO
gtgaataaaaagcaccgcttggcttttttagggctaattgttggggttctattcttctttagcgcgtgccaacaccgcctgcacatggggtattattcagaagttacaggggattatttgttcaattataattccactatcgtggtggcttatgacagaagcgatgcgatgacttcttattatatcaatgtgattgtttatgaattgcaaaaattaggcttttataatgtcttcacgcaagcggaattcccgctagataaagcaaaaaatgtgatctatgtgcgtattgtccgtaatatctcggctgtgccgttttatcaatacaattaccaactgatcgatcaagtcaataagccttgttattttcttggggggcagttttattgctcccaaacccctacggattactacgctatcaatggctttagcgagcaaattttgatgagcgctaattcgcattttattttggattggtatgatgtggtgctgcaaaaacgggttttatatgtggatgggagcgtgagcgggaggacttgtggctatcagatgctttatagagatttgattaaaagcacgatcaaacgcattgattttaaccgccctgaacgctactactacaatttaagactgcccctttatcagccatgttataggcaatga

SEQ ID NO: 4280 - DNA (genomic), 621 bp, Helicobacter pylori; double-stranded, circular
  misc_feature (B) LOCATION 1...621
  hypothetical: NO
  anti-sense: NO
atggcttacaaacctaacaaaaagaagttaaaagaattaagagagcaaccgaatttatttagcatcttagataagggcgatgttgcaacaaacaatcctgttgaagagtcagacaaggccaataaaatacaagagccactcccttatgtcgtgaaaacgcaaatcaataaagcaagcatgatttctagagatcctattgaatgggcaaagtatttaagctttgaaaaacgagtctataaggataatagtaaagaagatgtcaatttctttgccaatggtgagataaaagaaagttctcgtgtttatgaagcgaataaagaagggtttgaaaggcgcatcactaaaagatacgatctgattgatagaaatagagaattttttataaaagaaattgaaattctaacccacacaaacagcttaaaagaattgaaagagcaagggttagaaatccaattgacccaccataatgaaacgcataagaaagccttagaaaatggcaatgaaatcgttaaagaatacgaccatcttaaagatatttaccaagaagtagaaagaacaaaagatggtggattggtaagagaaataatccccgtatttctagcgctgagtatttcaagcttt

SEQ ID NO: 4281 - DNA (genomic), 1317 bp, Helicobacter pylori; double-stranded, circular
  misc_feature (B) LOCATION 1...1317
  hypothetical: NO
  anti-sense: NO
atggcttacaaacctaacaaaaagaagttaaaagaattaagagagcaaccgaatttatttagcatcttagataagggcgatgttgcaacaaacaatcctgttgaagagtcagacaaggccaataaaatacaagagccactcccttatgtcgtgaaaacgcaaatcaataaagcaagcatgatttctagagatcctattgaatgggcaaagtatttaagctttgaaaaacgagtctataaggataatagtaaagaagatgtcaatttctttgccaatggtgagataaaagaaagttctcgtgtttatgaagcgaataaagaagggtttgaaaggcgcatcactaaaagatacgatctgattgatagaaatattgatagaaatagagaattttttataaaagaaattgaaattctaacccacacaaacagcttaaaagaattgaaagagcaagggttagaaatccaattgacccaccataatgaaacgcataagaaagccttagaaaatggcaatgaaatcgttaaagaatacgaccatcttaaagatatttaccaagaagtagaaagaacaaaagatggtggattggtaagagaaataatccccagtatttctagcgctgagtatttcaagctttacaacaaactgccttttgaatcaataaacaatgaaaataccaaactgaatactaacgacaatgaagaagttaaaaaactagaatttgaattagctaaagaagtgcatattttaatcctagagcaacaattgctttcagcaacaaattattattcttggatagataaagatgataatgcgaattttgcttggaaaatgcataggcttatcaatgaaaataaactcaaagaaaaccatctcagcgccaataacgctaataagattaagcaatttttctttaataatggttctattttaggctggactaaagaagaacaaagcgctatacaagaaaacagagattattctttaagaagcgctcttttaagtttagaagaaatcgctcaagcaaaaattgaattgcaaaaatactatgaaagcgtttatgttaatggtgatgggaataaaagagaaatcaagccttttaaagaaattttaagagacaccaacaattttgaaaaagcttataaggagcgttatgacaaattggtaagcttgagtgcagcaatcattcaagctaaagagggtggtaatgagcgaccaaattctagtgcaaataacaataaccctattaaaaatacaatagagactaatacttctaacaatattattcaaaataatgataatataatcatccaaatttaa

SEQ ID NO: 4282 - DNA (genomic), 204 bp, Helicobacter pylori; double-stranded, circular
  misc_feature (B) LOCATION 1...204
  hypothetical: NO
  anti-sense: NO
tgggtaaaaaaacctctagagtataaagtcgcagtcagtggcgtgaacgtgcgcgcttttcctagcacaaaaggcaaaatcattggctcgcttataaaaaataaaagcgtgaaggttttagaaatccaaaacgattgggctgaaattgaattttctcacgaaacaaagggatatgtgtttttaaaacttttaaaaaaggctgaa

SEQ ID NO: 4283 - DNA (genomic), 495 bp, Helicobacter pylori; double-stranded, circular
  misc_feature (B) LOCATION 1...495
  hypothetical: NO
  anti-sense: NO
aaagcgttgatggtaggaatgaaaactggagcatggaccggtttaaaactttttgcacagcctttgttggtggttttagcgttcatgttgttgtatgctttagcgcatgctgtgcttggtttttacgtgaaaaaagacagcgctccaatgagtccaaatgtagaaaaaagcgagacagagcgccaaaacagcacgttttcgcctaaagaagaagccaacgcaaccacaaccgccacagaacaaaaccccaccaaagacacagtgccacctttagacacagccacacaaaaacaagagattaaacaagagattaaacaagagattaaacaagagattaaacaagagattaaacaagagattaaacaagagattaaacaagaaactaaacaagagcaagaaaaagaaaataagcctaaacaaaacagtgtctcgcccgttcaaaacgatcaaaaaacccccacaacccccttaatgggtaaaaaaacctctagagta

SEQ ID NO: 4284 - DNA (genomic), 648 bp, Helicobacter pylori; double-stranded, circular
  misc_feature (B) LOCATION 1...648
  hypothetical: NO
  anti-sense: NO
atgaaatcttttttaaaactttttgcacagcctttgttggtggttttagcgttcatgttgttgtatgctttagcgcatgctgtgcttggtttttacgtgaaaaaagacagcgctccaatgagtccaaatgtagaaaaaagcgagacagagcgccaaaacagcacgttttcgcctaaagaagaagccaacgcaaccacaaccgccacagaacaaaaccccaccaaagacacagtgccacctttagacacagccacacaaaaacaagagattaaacaagagattaaacaagagattaaacaagagattaaacaagagattaaacaagagattaaacaagagattaaacaagaaactaaacaagagcaagaaaaagaaaataagcctaaacaaaacagtgtctcgcccgttcaaaacgatcaaaaaacccccacaacccccttaatgggaaaaaaacctctagagtataaagtcgcagtcagtggcgtgaacgtgcgcgcttttcctagcacaaaaggcaaaatcattggctcgcttataaaaaataaaagcgtgaaggttttagaaatccaaaacgattgggctgaaattgaattttctcacgaaacaaagggatatgtgtttttaaaacttttaaaaaaggctgaatga

SEQ ID NO: 4285 - DNA (genomic), 669 bp, Helicobacter pylori; double-stranded, circular
  misc_feature (B) LOCATION 1...669
  hypothetical: NO
  anti-sense: NO
atggtaggaatgaaaactgagatgaaatcttttttaaaactttttgcacagcctttgttggtggttttagcgttcatgttgttgtatgctttagcgcatgctgtgcttggtttttacgtgaaaaaagacagcgctccaatgagtccaaatgtagaaaaaagcgagacagagcgccaaaacagcacgttttcgcctaaagaagaagccaacgcaaccacaaccgccacagaacaaaaccccaccaaagacacagtgccacctttagacacagccacacaaaaacaagagattaaacaagagattaaacaagagattaaacaagagattaaacaagagattaaacaagagattaaacaagagattaaacaagaaactaaacaagagcaagaaaaagaaaataagcctaaacaaaacagtgtctcgcccgttcaaaacgatcaaaaaacccccacaacccccttaatgggaaaaaaacctctagagtataaagtcgcagtcagtggcgtgaacgtgcgcgcttttcctagcacaaaaggcaaaatcattggctcgcttataaaaaataaaagcgtgaaggttttagaaatccaaaacgattgggctgaaattgaattttctcacgaaacaaagggatatgtgtttttaaaacttttaaaaaaggctgaatga

SEQ ID NO: 4286 - DNA (genomic), 702 bp, Helicobacter pylori; double-stranded, circular
  misc_feature (B) LOCATION 1...702
  hypothetical: NO
  anti-sense: NO
ttgagtttgatgastgtgttaaatgccaaagaatgcgttycgcccataacaagaagcgttaagtatcatcagcaaagtgcsgagatcagagccttgcaattacaaagttacaaaatggcgaaaatggcgctagacaataaccttaagctcgttaaagacaaaaagccagccgtcatcttggatttagatgaaaccgttttgaacacttttgattatgcgggctatttagtcaaaaactgcattaaatacaccccagaaacttgggataaatttgaaaaagaaggctctcttacgctcattcctggagcgctagactttttagaatacgctaattctaagggcgttaagattttttacatttctaaccgcacccaaaaaaataaggcattcactttaaaaacgctcaaaagctttaagctcccccaagtgagtgaagaatccgttttgttaaaggaaaaaggcaagcctaaagccgttaggcgggagttagtcgctaaggattatgcgattgttttacaagtgggcgacactttgcatgattttgacgccatttttgctaaagacgctaaaaacagccaagaacaacaagccaaagtcttgcaaaacgctcaaaaattcggcacagaatggatcattttacccaactctctttatggcacatgggaagatgggcctataaaagcatggcaaaataaaaaataa

SEQ ID NO: 4287 - DNA (genomic), 738 bp, Helicobacter pylori; double-stranded, circular
  misc_feature (B) LOCATION 1...738
  hypothetical: NO
  anti-sense: NO
atgataaaaaagacccttgcatcggttttattaggattgagtttgatgagtgtgttaaatgccaaagaatgcgtttcgcccataacaagaagcgttaagtatcatcagcaaagtgctgagatcagagccttgcaattacaaagttacaaaatggcgaaaatggcgctagacaataaccttaagctcgttaaagacaaaaagccagccgtcatcttggatttagatgaaaccgttttgaacacttttgattatgcgggctatttagtcaaaaactgcattaaatacaccccagaaacttgggataaatttgaaaaagaaggctctcttacgctcattcctggagcgctagactttttagaatacgctaattctaagggcgttaagattttttacatttctaaccgcacccaaaaaaataaggcattcactttaaaaacgctcaaaagctttaagctcccccaagtgagtgaagaatccgttttgttaaaggaaaaaggcaagcctaaagccgttaggcgggagttagtcgctaaggattatgcgattgttttacaagtgggcgacactttgcatgattttgacgccatttttgctaaagacgctaaaaacagccaagaacaacaagccaaagtcttgcaaaacgctcaaaaattcggcacagaatggatcattttacccaactctctttatggcacatgggaagatgggcctataaaagcatggcaaaataaaaaataa

SEQ ID NO: 4288 - DNA (genomic), 747 bp, Helicobacter pylori; double-stranded, circular
  misc_feature (B) LOCATION 1...747
  hypothetical: NO
  anti-sense: NO
gtaggtgttgttatgataaaaaagacccttgcatcggttttattaggattgagtttgatgagtgtgttaaatgccaaagaatgcgtttcgcccataacaagaagcgttaagtatcatcagcaaagtgctgagatcagagccttgcaattacaaagttacaaaatggcgaaaatggcgctagacaataaccttaagctcgttaaagacaaaaagccagccgtcatcttggatttagatgaaaccgttttgaacacttttgattatgcgggctatttagtcaaaaactgcattaaatacaccccagaaacttgggataaatttgaaaaagaaggctctcttacgctcattcctggagcgctagactttttagaatacgctaattctaagggcgttaagattttttacatttctaaccgcacccaaaaaaataaggcattcactttaaaaacgctcaaaagctttaagctcccccaagtgagtgaagaatccgttttgttaaaggaaaaaggcaagcctaaagccgttaggcgggagttagtcgctaaggattatgcgattgttttacaagtgggcgacactttgcatgattttgacgccatttttgctaaagacgctaaaaacagccaagaacaacaagccaaagtcttgcaaaacgctcaaaaattcggcacagaatggattattttacccaactctctttatggcacatgggaagatgggcctataaaagcatggcaaaataaaaaa

SEQ ID NO: 4289 - DNA (genomic), 666 bp, Helicobacter pylori; double-stranded, circular
  misc_feature (B) LOCATION 1...666
  hypothetical: NO
  anti-sense: NO
atgaagaaaaaagcaaaagtcttttggtgttgttttaaaatgattcgttggttgtatttggcggtcttttttttgttgagcgtatcagacgctaaagaaatcgctatgcaacgatttgacaaacaaaaccataagatttttgaaatccttgcggataaagtgagcgccaaagacaatgtgataaccgcctcagggaatgcgatcctattgaattatgacgtgtatattctagcggrtaaggtgcgttatgacaccaagactaaagaagcgttattagaaggcaatattaaggtttataggggcgagggcttgctcgttaaaaccgattatgtgaaattgagtttgaacgaaaaatatgagatcattttccccttttatgtccaagacagcgtgagcgggatttgggtgagcgcggatattgctagcgggaaggatcaaaaatataagattaaaaacatgagcgcttcagggtgcagcattgacaaccccatttggcatgtcaatgcgacttcaggctcatttaacatgcaaaaatcgcatttgtcaatgtggaatcctaagatttatgtcggcgatattcctgtattgtatttgccctatattttcatgtccacgagcaataaaagaactaccgggtttttataccctgagtttggcacttccmac

SEQ ID NO: 4290 - DNA (genomic), 831 bp, Helicobacter pylori; double-stranded, circular
  misc_feature (B) LOCATION 1...831
  hypothetical: NO
  anti-sense: NO
atgaagaaaaaagcaaaagtcttttggtgttgttttaaaatgattcgttggttgtatttggcggtcttttttttgttgagcgtatcagacgctaaagaaatcgctatgcaacgatttgacaaacaaaaccataagatttttgaaatccttgcggataaagtgagcgccaaagacaatgtgataaccgcctcagggaatgcgatcctattgaattatgacgtgtatattctagcggataaggtgcgttatgacaccaagactaaagaagcgttattagaaggcaatattaaggtttataggggcgagggcttgctcgttaaaaccgattatgtgaaattgagtttgaacgaaaaatatgagatcattttccccttttatgtccaagacagcgtgagcgggatttgggtgagcgcggatattgctagcgggaaggatcaaaaatataagattaaaaacatgagcgcttcagggtgcagcattgacaaccccatttggcatgtcaatgcgacttcaggctcatttaacatgcaaaaatcgcatttgtcaatgtggaatcctaagatttatgtcggcgatattcctgtattgtatttgccctatattttcatgtccacgagcaataaaagaactaccgggtttttataccctgagtttggcacttccaacttagacggctttatttatttgcaacccttttatttagcccccaaaaactcatgggatatgacctttaccccacaaatccgttacaaaaggggttttggcttgaattttgaagcgcgctacatcaactctaagacgcaggtttttattcaatgcgcgctattttag

SEQ ID NO: 4291 - DNA (genomic), 864 bp, Helicobacter pylori; double-stranded, circular
  misc_feature (B) LOCATION 1...864
  hypothetical: NO
  anti-sense: NO
aaatcgtggtttttctatgcccctttttatggtttgtggtgtttaaaaacccctatcatagggcatggcatgaagaaaaaagcaaaagtcttttggtgttgttttaaaatgattcgttggttgtatttggcggtcttttttttgttgagcgtatcagacgctaaagaaatcgctatgcaacgatttgacaaacaaaaccataagatttttgaaatccttgcggataaagtgagcgccaaagacaatgtgataaccgcctcagggaatgcgatcctattgaattatgacgtgtatattctagcggataaggtgcgttatgacaccaagactaaagaagcgttattagaaggcaatattaaggtttataggggcgagggcttgctcgttaaaaccgattatgtgaaattgagtttgaacgaaaaatatgagatcattttccccttttatgtccaagacagcgtgagcgggatttgggtgagcgcggatattgctagcgggaaggatcaaaaatataagattaaaaacatgagcgcttcagggtgcagcattgacaaccccatttggcatgtcaatgcgacttcaggctcatttaacatgcaaaaatcgcatttgtcaatgtggaatcctaagatttatgtcggcgatattcctgtattgtatttgccctatattttcatgtccacgagcaataaaagaactaccgggtttttataccctgagtttggcacttcccacttagacggctttatttatttgcaacccttttatttagcccccaaaaactcatgggatatgacctttaccccacaaatccgttacaaaaggggttttggcttgaattttgaagcgcgctacatcaaccct

SEQ ID NO: 4292 - DNA (genomic), 867 bp, Helicobacter pylori; double-stranded, circular
  misc_feature (B) LOCATION 1...867
  hypothetical: NO
  anti-sense: NO
ttgtggtgtttaaaaacccctatcatagggcatggcatgaagaaaaaagcaaaagtcttttggtgttgttttaaaatgattcgttggttgtatttggcggtcttttttttgttgagcgtatcagacgctaaagaaatcgctatgcaacgatttgacaaacaaaaccataagatttttgaaatccttgcggataaagtgagcgccaaagacaatgtgataaccgcctcagggaatgcgatcctattgaattatgacgtgtatattctagcggataaggtgcgttatgacaccaagactaaagaagcgttattagaaggcaatattaaggtttataggggcgagggcttgctcgttaaaaccgattatgtgaaattgagtttgaacgaaaaatatgagatcattttccccttttatgtccaagacagcgtgagcgggatttgggtgagcgcggatattgctagcgggaaggatcaaaaatataagattaaaaacatgagcgcttcagggtgcagcattgacaaccccatttggcatgtcaatgcgacttcaggctcatttaacatgcaaaaatcgcatttgtcaatgtggaatcctaagatttatgtcggcgatattcctgtattgtatttgccctatattttcatgtccacgagcaataaaagaactaccgggtttttataccctgagtttggcacttccaacttagacggctttatttatttgcaacccttttatttagcccccaaaaactcatgggatatgacctttaccccacaaatccgttacaaaaggggttttggcttgaattttgaagcgcgctacatcaactctaagacgcaggtttttattcaatgcgcgctattttag

SEQ ID NO: 4293 - DNA (genomic), 237 bp, Helicobacter pylori; double-stranded, circular
  misc_feature (B) LOCATION 1...237
  hypothetical: NO
  anti-sense: NO
atgaaaaaggttattgtggctttaggcgttttggcgttcgcaaatgttttaatggcaaccgatgttaaggctcttgtaaaaggttgtgccgcttgccatggggttaagtttgaaaagaaagctttaggtaaaagcaaaatcgttaacatgatgagcgaaaaagagattgaagaggatcttatggcttttaaaagcggtgccaacaagaatcctgtcatgacccgcaagctaaaaaat

SEQ ID NO: 4294 - DNA (genomic), 291 bp, Helicobacter pylori; double-stranded, circular
  misc_feature (B) LOCATION 1...291
  hypothetical: NO
  anti-sense: NO
atgaaaaaggttattgtggctttaggcgttttggcgttcgcaaatgttttaatggcaaccgatgttaaggctcttgtaaaaggttgtgccgcttgccatggggttaagtttgaaaagaaagctttaggtaaaagcaaaatcgttaacatgatgagcgaaaaagagattgaagaggatcttatggcttttaaaagcggtgccaacaagaatcctgtcatgaccgcgcaagctaaaaaattaagcgatgaagacatcaaagctttagccaaatacatccccactctcaaataa

SEQ ID NO: 4295 - DNA (genomic), 303 bp, Helicobacter pylori; double-stranded, circular
  misc_feature (B) LOCATION 1...303
  hypothetical: NO
  anti-sense: NO
gtaaggagacaaactatgaaaaaggttattgtggctttaggcgttttggcgttcgcaaatgttttaatggcaaccgatgttaaggctcttgtaaaaggttgtgccgcttgccatggggttaagtttgaaaagaaagctttaggtaaaagcaaaatcgttaacatgatgagcgaaaaagagattgaagaggatcttatggcttttaaaagcggtgccaacaagaatcctgtcatgaccgcgcaagctaaaaaattaagcgatgaagacatcaaagctttagccatatacatccccactctcaaa

SEQ ID NO: 4296 - DNA (genomic), 864 bp, Helicobacter pylori; double-stranded, circular
  misc_feature (B) LOCATION 1...864
  hypothetical: NO
  anti-sense: NO
gtggtaataatgattttagtctgctttttagcttgctcgcaagagagctttatcaaaatgcaaaaaaaagcccaagagcaagaaaatgacggctctaaacgccccagctatgtggattcggattatgaagtctttagcgaaacgatttttttacaaaacatggtgtatcagcctatagaggaaagaaacgcttttttccaactgactaaagatgaagacaattcttttaaccctgaaaattccgtgattttactgaatgagccaagcgataatagtgaaaaaaacctactctcatacccaaacgatcccaataacaatgaagacaacgctaataatagtcaaaaaaatccgttcctttacaagcccaaaagaaaaacaaaaaacccaaaactcattgaatattcccaacaagatttctaccccctaaaaaatggggatattatcatgagtaaagaaggggatcaatggttgatagaaatccaatccaaagccttgaagcgttttttaaaagatcaaaacgataaagatcgccagatccaaactttcacttttaatgacactaaaacgcaaatcgcgcaaattaagggcaaaatttcttcgtatgtttataccaccaataacggtagcttgagtttaaggccyttttatgaatcgtttttgttagaaaaaaagagcgataatgtttatacgatagagaataaggctttagatactatggagatttcaaagtgtcaaatggtgttaaaaaagcattcaaccgataaattagacagccagcataaagccatcagtattgatttggattttaaaaaagagcgctttaagagcgatacggaactctttttagaatgtcttaaggaaagt

SEQ ID NO: 4297 - DNA (genomic), 891 bp, Helicobacter pylori; double-stranded, circular
  misc_feature (B) LOCATION 1...891
  hypothetical: NO
  anti-sense: NO
ttgtttttagtcaaaaaaataggcgtggtaataatgattttagtctgctttttagcttgctcgcaagagagctttatcaaaatgcaaaaaaaagcccaagagcaagaaaatgacggctctaaacgccccagctatgtggattcggattatgaagtctttagcgaaacgatttttttacaaaacatggtgtatcagcctatagaggaaagaaacgcttttttccaactgactaaagatgaagacaattcttttaaccctgaaaattccgtgattttactgaatgagccaagcgataatagtgaaaaaaacctactctcatacccaaacgatcccaataacaatgaagacaacgctaataatagtcaaaaaaatccgttcctttacaagcccaaaagaaaaacaaaaaacccaaaactcattgaatattcccaacaagatttctaccccctaaaaaatggggatattatcatgagtaaagaaggggatcaatggttgatagaaatccaatccaaagccttgaagcgttttttaaaagatcaaaacgataaagatcgccagatccaaactttcacttttaatgacactaaaacgcaaatcgcgcaaattaagggcaaaatttcttcgtatgtttataccaccaataacggtagcttgagtttaaggcctttttatgaatcgtttttgttagaaaaaaagagcgataatgtttatacgatagagaataaggctttagatactatggagatttcaaagtgtcaaatggtgttaaaaaagcattcaaccgataaattagacagccagcataaagccatcagtattgatttggattttaaaaaagagcgctttaagagcgatacggaactctttttagaatgtcttaaggaaagttag

SEQ ID NO: 4298 - DNA (genomic), 909 bp, Helicobacter pylori; double-stranded, circular
  misc_feature (B) LOCATION 1...909
  hypothetical: NO
  anti-sense: NO
agcttaaataagggtctggcattgtttttagtcaaaaaaataggcgtggtaataatgattttagtctgctttttagcttgctcgcaagagagctttatcaaaatgcaaaaaaaagcccaagagcaagaaaatgacggctctaaacgccccagctatgtggattcggattatgaagtctttagcgaaacgatttttttacaaaacatggtgtatcagcctatagaggaaagaaacgcttttttccaactgactaaagatgaagacaattcttttaaccctgaaaattccgtgattttactgaatgagccaagcgataatagtgaaaaaaacctactctcatacccaaacgatcccaataacaatgaagacaacgctaataatagtcaaaaaaatccgttcctttacaagcccaaaagaaaaacaaaaaacccaaaactcattgaatattcccaacaagatttctaccccctaaaaaatggggatattatcatgagtaaagaaggggatcaatggttgatagaaatccaatccaaagccttgaagcgttttttaaaagatcaaaacgataaagatcgccagatccaaactttcacttttaatgacactaaaacgcaaatcgcgcaaattaagggcaaaatttcttcgtatgtttataccaccaataacggtagcttgagtttaaggcctttttatgaatcgtttttgttagaaaaaaagagcgataatgtttatacgatagagaataaggctttagatactatggagatttcaaagtgtcaaatggtgttaaaaaagcattcaaccgataaattagacagccagcataaagccatcagtattgatttggattttaaaaaagagcgctttaagagcgatacggaactctttttagaatgtcttaaggaaagt

SEQ ID NO: 4299 - DNA (genomic), 618 bp, Helicobacter pylori; double-stranded, circular
  misc_feature (B) LOCATION 1...618
  hypothetical: NO
  anti-sense: NO
atgcggtattttagaagcgcttttttattatttttcatgacgcttttttttgtttcttgctctaagcaccctttttctaagcaaacccctaagactaaggagcggatccgacaagaagaagccaataaaaaaagagaagagactttgaatgccttgcgccaattcagactcatttacattaacacgccggtttttcgcttttatgattacggcacgatcaaaaccgataaagaccacaatactgaagtaaccctttataagctcagccaaaaagtgggcgatatttacatgactaaacggagcatttgttttagccaaaaatgttcggccaaatggattgctgcaagggatttgtttggcaaggtgagctatggggatttgtttgatgatattgttttagggagggatatttttaaaggtttagggaaacgccacctaacccctgaatatgtgatccaaaggtttcaaaaaagcggggaaattatcctttatgaaagaaaaaatggcctgatttctttccaaaacttgactcaaaaaattgctattaggattgaaccctatgagccttctttgcaagatttagaagacaatgaaaacgctgatagcgagcttcaatga

SEQ ID NO: 4300 - DNA (genomic), 615 bp, Helicobacter pylori; double-stranded, circular
  misc_feature (B) LOCATION 1...615
  hypothetical: NO
  anti-sense: NO
atgcggtattttagaagcgcttttttattatttttcatgacgcttttttttgtttcttgctctaagcaccctttttctaagcaaacccctaagactaaggagcggatccgacaagaagaagccaataaaaaaagagaagagactttgaatgccttgcgccaattcagactcatttacattaacacgccggtttttcgcttttatgattacggcacgatcaaaaccgataaagaccacaatactgaagtaaccctttataagctcagccaaaaagtgggcgatatttacatgactaaacggagcatttgttttagccaaaaatgttcggccaaatggattgctgcaagggatttgtttggcaaggtgagctatggggatttgtttgatgatattgttttagggagggatatttttaaaggtttagggaaacgccacctaacccctgaatatgtgatccaaaggtttcaaaaaagcggggaaattatcctttatgaaagaaaaaatggcctgatttctttccaaaacttgactcaaaaaattgctattaggattgaaccctatgagccttctttgcaagatttagaagacaatgaaaacgctgatagcgagcttcaa

SEQ ID NO: 4301 - DNA (genomic), 651 bp, Helicobacter pylori; double-stranded, circular
  misc_feature (B) LOCATION 1...651
  hypothetical: NO
  anti-sense: NO
gcggatcgagaggataaactctctcactctataatcatgcggtattttagaagcgcttttttattatttttcatgacgcttttttttgtttcttgctctaagcaccctttttctaagcaaacccctaagactaaggagcggatccgacaagaagaagccaataaaaaaagagaagagactttgaatgccttgcgccaattcagactcatttacattaacacgccggtttttcgcttttatgattacggcacgatcaaaaccgataaagaccacaatactgaagtaaccctttataagctcagccaaaaagtgggcgatatttacatgactaaacggagcatttgttttagccaaaaatgttcggccaaatggattgctgcaagggatttgtttggcaaggtgagctatggggatttgtttgatgatattgttttagggagggatatttttaaaggtttagggaaacgccacctaacccctgaatatgtgatccaaaggtttcaaaaaagcggggaaattatcctttatgaaagaaaaaatggcctgatttctttccaaaacttgactcaaaaaattgctattaggattgaaccctatgagccttctttgcaagatttagaagacaatgaaaacgctgatagcgagcttcaa

SEQ ID NO: 4302 - DNA (genomic), 315 bp, Helicobacter pylori; double-stranded, circular
  misc_feature (B) LOCATION 1...315
  hypothetical: NO
  anti-sense: NO
gtgaatgcggtgggcatgggtgtggctccagaatccaccatttcgccctctcaagctctagctttagctaagcgagcggctattgttgatggctaccgccagttgggtgaaaaaatgtatggcatcagagtgaacgctcaagacaccgtcaaagacatggttttacaaaattccgtgattaaaacgagagtgaatgccctcattcgtaacgctgaaatcactgagactatctataaagacggcttgtgccaggtaagcatggagcttaaattagacggcaggatttggtatcgtattttgagcggatcgagagga

SEQ ID NO: 4303 - DNA (genomic), 606 bp, Helicobacter pylori; double-stranded, circular
  misc_feature (B) LOCATION 1...606
  hypothetical: NO
  anti-sense: NO
atgcgtttgcacactgccttttttggtattaattcgttgcttgtcgccactcttttgataagcggttgcagtctctttaaaaagcgtaacactaacgctcagctaatccccccttcagctaacgggttgcaagcccccatttatcccccaaccaatttcacccccagaaagagcattcagcctctcccaagccctcgccttgagaataacgatcagcccatcattagctctaatcccactaacgctatccctaacacccccattctcacgcccaataatgtcattgagttgaatgcggtgggcatgggtgtggctccagaatccaccatttcgccctctcaagctctagctttagctaagcgagcggctattgttgatggctaccgccagttgggtgaaaaaatgtatggcatcagagtgaacgctcaagacaccgtcaaagacatggttttacaaaattccgtgattaaaacgagagtgaatgccctcattcgtaacgctgaaatcactgagactatctataaagacggcttgtgccaggtaagcatggagcttaaattagacggcaggatttggtatcgtattttgagcggatcgagaggataa

SEQ ID NO: 4304 - DNA (genomic), 273 bp, Helicobacter pylori; double-stranded, circular
  misc_feature (B) LOCATION 1...273
  hypothetical: NO
  anti-sense: NO
ggggtgggttaccctaaaatcgccttaggctatcagcttcaaattttaggggctaagattgataagtatcaattcaatatccaatcagcggtggggagtgtgggcttgtttttcaatgcggctaaaaattttggcttgagtatagaagcaaggggcggtatccctttttatttcattcagagcaggttttctaaggctttcggcacgccacgattgaatatctattctgttggtatcacattcactttttatgactttacgagatttttaggg

SEQ ID NO: 4305 - DNA (genomic), 618 bp, Helicobacter pylori; double-stranded, circular
  misc_feature (B) LOCATION 1...618
  hypothetical: NO
  anti-sense: NO
ttgatttttagatttttcttaatcttaagccttttaaaaggggttttactggccaaaaaggattggaattttttcaaacctttagagcctactaaaaaatattttggctcttttaaaatcggctatctttaccaacatgcagaaacgactaaaagattccccatccgccctaaaaaccgcccgcctattttaatggataaaatttaccatgacgcttctttgggttttgacgcagggtatgttttgaaaaagaaagctttattgggggggtatttggatgcaggaatgggcgattcgtatttcatgagcgctgggctagtcgctggggtgaggctttttaaggggtgggttatccctaaaatcgccttaggctatcagcttcaaattttaggggctaagattgataagtatcaattcaatatccaatcagcggtggggagtgtgggcttgtttttcaatgcggctaaaaattttggcttgagtatagaagcaaggggcggtatccctttttatttcattcagagcaggttttctaaggctttcggcacgccacgattgaatatctattctgttggtatcacattcactttttatgactttacgagatttttagggtaa

SEQ ID NO: 4306 - DNA (genomic), 351 bp, Helicobacter pylori; double-stranded, circular
  misc_feature (B) LOCATION 1...351
  hypothetical: NO
  anti-sense: NO
atggcgatagccattaaggatttattgagcgcttataaagtcgttttacctttggataaaatcagcatgccatctagcgcggatttgaagctcactttgcaattcttaaaaaacaccgcccccttatttagcgttcaaggcagcgttaatttgcaagaaggcactttctcgctctataatatccccctttacacgcaaagcgctcaaatcaatttggacatcgcccaagaataccaatacatctacatagacacgatccacacgcgctatgcaaacatgckggatttagacgctaaaatcgctttagatttaggtcaaaaaaacctytcyykggakkcyytaggkccataa

SEQ ID NO: 4307 - DNA (genomic), 2937 bp, Helicobacter pylori; double-stranded, circular
  misc_feature (B) LOCATION 1...2937
  hypothetical: NO
  anti-sense: NO
atgaagaaaagaaaacatgtatccaagaaagtgtttaatgtcattatcttgtttgtggcagtattcactcttttagtcgtcattcacaaaaccctttcaaacggcattcacatacaaaatttaaaaattggaaaacttggcatttctgaattatacttaaaactcaataacaagctttctttggaagttgagcgggttgatctctcttctttcttccatcaaaaacccactaaaaagcgtttagaagtttctgatttgattaaaaatatccgttatggcatttgggcggtgtcttattttgaaaaacttaaagtcaaagaaatcattttagacgataaaaataaagccaatatcttttttgatgggaataaatacgagttagaatttccaggaatcaaaggggaattttccctagaagacgataaaaatatcaagcttaaaatcatcaatttgctttttaaagatgttaaagtccaagtggatggcaacgcccactattcacccaaagccaggaaaatggcgttcaatttgattgtcaagcccttagttgaacccagcgctgcaatttatttgcaagggctaaccgatttaaaaaccatagaattaaaaattaacacttctccaatgaaaagcctagcgtttttaaagcctcttttccaacgccaatcgcaaaaaaatttaaaaacgtggatttttgacaagatccaatttgccagctttaagattgataacgctttaatcaaggctaatttcactcctagcgagtttatcccatcgcttttggaaaattctgtagttaaagccactttgattaagccttcagtcgtttttaatgatggcttatcgcccattaaaatggataaaaccgaattgattttcaaaaacaaacagctcctcatacagccccaaaaaatcacttatgaaaccatggaattaaccggctcttacgccactttttccaatttgttagaagcccctaagttggaggtttttttaaaaacgacccctaattattatggcgatagcattaaggatttattgagcgcttataaagtcgttttacctttggataaaatcagcatgccatctagcgcggatttgaagctcactttgcaattcttaaaaaacaccgcccccttatttagcgttcaaggcagcgttaatttgcaagaaggcactttctcgctctataatatccccctttacacgcaaagcgctcaaatcaatttggacatcgcccaagaataccaatacatctacatagacacgatccacacgcgctatgcaaacatgctggatttagacgctaaaatcgctttagatttaggtcaaaaaaacctttctttggattctttagtccataaaatccaagtcaataccaataacaatatcaacatgcgctcttatgatcccaataacactcaagaagatccgcaaactaactttactttggatctaaaaagcttgcattctatcattcaagagggtgaaaattcagaagtttttagaagaaaaatcatagacaccattaaagcccaaagcgaagataaattcactaaagatgttttttacgccacaggagacactctcaaaagcctgtcgttgagttttgatttttccaaccccgatcacatacaatggagcgtgccacaactcttattagaaggcgaatttaaagataacgcctatacttttaagatcaaagatttgaaaaagatcaagccctattcccccattatggactatattgccctaaaagacggctctttagaggtttctacgagcgattttgtcaatattgatttttttgctaaagatttgaaaatcaacctccccatttataggagcgatggatcgcattttgattctttttctttatttggctctatcaataaagatgaaatttctgtctatactccaagcaaaagcatatccataaaagttaagggggatcaaaaggatattacccttaataacattgatttgagtattgatgatttcttggatagtaaaatgccagctattgcgggattattctcaaaagaacgaaaagaaaagcctagctctaaagaaatccaagatgaagatgttttcattagcgccaaacaacgctatgaaaaagcccacaaaattatccccatctctacacgcatccatgctaaagatgtcgtgctgatctataaaaaaatgccttttcctttagaaaatcttgatattgtcgctcaagacgatagggtgaaaattgatggcaattataaaaacgccatgatcatggcggatttagtgcatggggctttgtatcttaaggctcataattttagcggggattatatcaacaccattcttcaaaaagatttcgtagaaggaggcttattcacgcttattggggctcttgaagatcaggttttcaatggcgaattgaaattccaaaacacaagcttaaagaatttcgccctcatgcaaaacatggtcaatctcatcaacaccattccctccctcattgtctttagaaaccctcatttaggggctaatggctatcaaatcaaaaccggctccgttgtgtttgggatcactaaagaatatttagggttagaaaaaattgatcttgtcggcaaaacgcttgatattgctggcaatggaatcattgaattagacaaaaacaaattagatttaaacttagaagtttccactatcaaggctttgagtaatgtcttaaataaaatccctatcgtgggctatctcgttttaggaaaaggaggtaaaatcaccactaacgtgaatgtcaaaggcacgttggataagcctaaaacccaagtaactttagcgtcagatattatccaagcgccttttaaaatcttacgccgtattttcacgcctattgacatcatcgtggatgaagtcaagaaaaacattgattcaaaaaggaaattaaaatga

SEQ ID NO: 4308 - DNA (genomic), 2946 bp, Helicobacter pylori; double-stranded, circular
  misc_feature (B) LOCATION 1...2946
  hypothetical: NO
  anti-sense: NO
aaaagaatactgatgaagaaaagaaaacatgtatccaagaaagtgtttaatgtcattatcttgtttgtggcagtattcactcttttagtcgtcattcacaaaaccctttcaaacggcattcacatacaaaatttaaaaattggaaaacttggcatttctgaattatacttaaaactcaataacaagctttctttggaagttgagcgggttgatctctcttctttcttccatcaaaaacccactaaaaagcgtttagaagtttctgatttgattaaaaatatccgttatggcatttgggcggtgtcttattttgaaaaacttaaagtcaaagaaatcattttagacgataaaaataaagccaatatcttttttgatgggaataaatacgagttagaatttccaggaatcaaaggggaattttccctagaagacgataaaaatatcaagcttaaaatcatcaatttgctttttaaagatgttaaagtccaagtggatggcaacgcccactattcacccaaagccaggaaaatggcgttcaatttgattgtcaagcccttagttgaacccagcgctgcaatttatttgcaagggctaaccgatttaaaaaccatagaattaaaaattaacacttctccaatgaaaagcctagcgtttttaaagcctcttttccaacgccaatcgcaaaaaaatttaaaaacgtggatttttgacaagatccaatttgccagctttaagattgataacgctttaatcaaggctaatttcactcctagcgagtttatcccatcgcttttggaaaattctgtagttaaagccactttgattaagccttcagtcgtttttaatgatggcttatcgcccattaaaatggataaaaccgaattgattttcaaaaacaaacagctcctcatacagccccaaaaaatcacttatgaaaccatggaattaaccggctcttacgccactttttccaatttgttagaagcccctaagttggaggtttttttaaaaacgacccctaattattatggcgatagcattaaggatttattgagcgcttataaagtcgttttacctttggataaaatcagcatgccatctagcgcggatttgaagctcactttgcaattcttaaaaaacaccgcccccttatttagcgttcaaggcagcgttaatttgcaagaaggcactttctcgctctataatatccccctttacacgcaaagcgctcaaatcaatttggacatcgcccaagaataccaatacatctacatagacacgatccacacgcgctatgcaaacatgctggatttagacgctaaaatcgctttagatttaggtcaaaaaaacctttctttggattctttagtccataaaatccaagtcaataccaataacaatatcaacatgcgctcttatgatcccaataacactcaagaagatccgcaaactaactttactttggatctaaaaagcttgcattctatcattcaagagggtgaaaattcagaagtttttagaagaaaaatcatagacaccattaaagcccaaagcgaagataaattcactaaagatgttttttacgccacaggagacactctcaaaagcctgtcgttgagttttgatttttccaaccccgatcacatacaatggagcgtgccacaactcttattagaaggcgaatttaaagataacgcctatacttttaagatcaaagatttgaaaaagatcaagccctattcccccattatggactatattgccctaaaagacggctctttagaggtttctacgagcgattttgtcaatattgatttttttgctaaagatttgaaaatcaacctccccatttataggagcgatggatcgcattttgattctttttctttatttggctctatcaataaagatgaaatttctgtctatactccaagcaaaagcatatccataaaagttaagggggatcaaaaggatattacccttaataacattgatttgagtattgatgatttcttggatagtaaaatgccagctattgcgggattattctcaaaagaacgaaaagaaaagcctagctctaaagaaatccaagatgaagatgttttcattagcgccaaacaacgctatgaaaaagcccacaaaattatccccatctctacacgcatccatgctaaagatgtcgtgctgatctataaaaaaatgccttttcctttagaaaatcttgatattgtcgctcaagacgatagggtgaaaattgatggcaattataaaaacgccatgatcatggcggatttagtgcatggggctttgtatcttaaggctcataattttagcggggattatatcaacaccattcttcaaaaagatttcgtagaaggaggcttattcacgcttattggggctcttgaagatcaggttttcaatggcgaattgaaattccaaaacacaagcttaaagaatttcgccctcatgcaaaacatggtcaatctcatcaacaccattccctcccttattgtctttagaaaccctcatttaggggctaatggctatcaaatcaaaaccggctccgttgtgtttgggatcactaaagaatatttagggttagaaaaaattgatcttgtcggcaaaacgcttgatattgctggcaatggaatcattgaattagacaaaaacaaattagatttaaacttagaagtttccactatcaaggctttgagtaatgtcttaaataaaatccctatcgtgggctatctcgttttaggaaaaggaggtaaaatcaccactaacgtgaatgtcaaaggcacgttggataagcctaaaacccaagtaactttagcgtcagatattatccaagcgccttttaaaatcttacgccgtattttcacgcctattgacatcatcgtggatgaagtcaagaaaaacattgattcaaaaaggaaattaaaa

SEQ ID NO: 4309 - DNA (genomic), 240 bp, Helicobacter pylori; double-stranded, circular
  misc_feature (B) LOCATION 1...240
  hypothetical: NO
  anti-sense: NO
ttattgttaaatcttaagatttatgttacactctgtaaaatccaaggggatagcgtgttagaaaaatcttttttaaaaagcaagcaattggttttatgcgggttgggtgtttttatgttgcaggctttgcacttcgcccaaacacttcacaaagaaattcttttttacaagatgtgccttattggatgttgcaaaatcgcagccagtatctcacgcaaggggtggatagctcgcacattg

SEQ ID NO: 4310 - DNA (genomic), 579 bp, Helicobacter pylori; double-stranded, circular
  misc_feature (B) LOCATION 1...579
  hypothetical: NO
  anti-sense: NO
gtgttagaaaaatcttttttaaaaagcaagcaattggttttatgcgggttgggtgttttaatgttgcaggcttgcacttgcccaaacacttcacaaagaaattcttttttacaagatgtgccttattggatgttgcaaaatcgcagccagtatctcacgcaaggggtggatagctcgcacattgtagatggtaaggcaactgaagagatagagaaaatcgctaccaaaagagcgacaataagagtggcgcaaaatatcgtgcataaacttaaagaagcttatctttctaaatccaaccgcatcaagcaaaagatcactaatgaaatgtttatccaaatgacaaagcccatttttgacagcttgatgaatgtggatcgtttagggatttatatcaatcctaacaatgaagaagtgtttgcgttggtgcgcgcgcgttcctttgataaggacgctttgagcgaagggttgcataaaatgtctttagacgatcaagcggtgagtatccttgtttctaaagtggaagaaatctttaaagattctatcaattacggagacgttaaagtccctatagccatgtag

SEQ ID NO: 4311 - DNA (genomic), 276 bp, Helicobacter pylori; double-stranded, circular
  misc_feature (B) LOCATION 1...276
  hypothetical: NO
  anti-sense: NO
atggctagtggcctttttgaaaacgatgaaatcaaaaacaacaaagcgcgagattttttttatagccatagctcccttattgtctttttcctcttactgcttgggtttgggtattatttagggaagttgctttttgggggttcttctttagaggtctatttggatttaagagacaagcatgaacgattgcaacaagaaatcaccgaattgcaaagcaagaatgtgcgcttgcaaaagcgtttgtttgagttgagggaattacggcctagagattag

SEQ ID NO: 4312 - DNA (genomic), 309 bp, Helicobacter pylori; double-stranded, circular
  misc_feature (B) LOCATION 1...309
  hypothetical: NO
  anti-sense: NO
aaggggggatttatatcggcaaagagttgtttaagcatggctagtggcctttttgaaaacgatgaaatcaaaaacaacaaagcgcgagattttttttatagccatagctcccttattgtctttttcctcttactgcttgggtttgggtattatttagggaagttgctttttgggggttcttctttagaggtctatttggatttaagagacaagcatgaacgattgcaacaagaaatcaccgaattgcaaagcaagaatgtgcgcttgcaaaagcgtttgtttgagttgagggaattacggcctagagat

SEQ ID NO: 4313 - DNA (genomic), 582 bp, Helicobacter pylori; double-stranded, circular
  misc_feature (B) LOCATION 1...582
  hypothetical: NO
  anti-sense: NO
atgaaagaaaaaaacttttggcctttaggaatcatgagcgtgcttatttttgggcttgggatcgtggtgtttttagtggtgtttgccctaaaaaattcgcctaaaaatgatttagtgtatttcaagggtcataacgaagtggatttaaactttaacgccatgcttaaaacttatgaaaactttaaatccaattatcgtttttcagtgggtttaaagcctcttaccgaaagccctaaaacccccattttgccctatttttctaaaggcacgcatggggataaaaaaatccaagaaaaccttttaaacaacgctttgattttagaaaagtccaacacgctttatgcacaattgcaaccgctcaaacccgctttagattcgccaaatattcaagtgtatttagcgttctatcccagccaatcccagcccagattattaggaacgcttgattgtaaaaacgcatgcgaacctttaaaatttgatttgttagagggcgataaagtggggcgctataagatcctttttaaatttgtttttaaaaataaagaagaattgattttggagcaactggctttttttaagtag

SEQ ID NO: 4314 - DNA (genomic), 591 bp, Helicobacter pylori; double-stranded, circular
  misc_feature (B) LOCATION 1...591
  hypothetical: NO
  anti-sense: NO
gagggaaaatcaatgaaagaaaaaaacttttggcctttaggaatcatgagcgtgcttatttttgggcttgggatcgtggtgtttttagtggtgtttgccctaaaaaattcgcctaaaaatgatttagtgtatttcaagggtcataacgaagtggatttaaactttaacgccatgcttaaaacttatgaaaactttaaatccaattatcgtttttcagtgggtttaaagcctcttaccgaaagccctaaaacccccattttgccctatttttctaaaggcacgcatggggataaaaaaatccaagaaaaccttttaaacaacgctttgattttagaaaagtccaacacgctttatgcacaattgcaaccgctcaaacccgctttagattcgccaaatattcaagtgtatttagcgttctatcccagccaatcccagcccagattattaggaacgcttgattgtaaaaacgcatgcgaacctttaaaatttgatttgttagagggcgataaagtggggcgctataagatcctttttaaatttgtttttaaaaataaagaagaattgattttggagcaactggctttttttaag

SEQ ID NO: 4315 - DNA (genomic), 642 bp, Helicobacter pylori; double-stranded, circular
  misc_feature (B) LOCATION 1...642
  hypothetical: NO
  anti-sense: NO
atgaaagaaaaaaacttttggcctttaggaatcatgagcgtgcttatttttgggcttgggatcgtggtgtttttagtggtgtttgccctaaaaaattcgcctaaaaatgatttagtgtatttcaagggtcataacgaagtggatttaaactttaacgccatgcttaaaacttatgaaaactttaaatccaattatcgtttttcagtgggtttaaagcctcttaccgaaagccctaaaacccccattttgccctatttttctaaaggcacgcatggggataaaaaaatccaagaaaaccttttaaacaacgctttgattttagaaaagtccaacacgctttatgcacaattgcaaccgctcaaacccgctttagattcgccaaatattcaagtgtatttagcgttctatcccagccaatcccagcccagattattaggaacgcttgattgtaaaaacgcatgcgaacctttaaaatttgatttgttagagggcgataaagtggggcgctataagatcctttttaaatttgtttttaaaaataaagaagaattgattttggagcaactgctttttttaagtagcatggcttgtatgggtatatcaattttaaaaaacgctaaagcattttttaaatacaaaata

SEQ ID NO: 4316 - DNA (genomic), 918 bp, Helicobacter pylori; double-stranded, circular
  misc_feature (B) LOCATION 1...918
  hypothetical: NO
  anti-sense: NO
atgataaagagttggactaaaaagtggtttttgattttatttttaatggcaagctgttttggtcatttggtggctacaaccggtgagaaatattttaagatggctaatcaagcccttaagagaggggattaccatagagcggtggctttttataagaggagctgtaatttgaggatgggggttggttgcacgagtttaggctctatgtatgaatatggcgatggcgtggatcagaatatttcaaaagccgttttttattacagaagagggtgtaatttgaggaatcatctcgcttgcgcgagtttaggctctatgtatgaagatggcgatggcgtgcaaaaagactttccaaaggctatctattattataggagagggtgccacttaaaaggtggggtgagctgcggtagtttgggttttatgtatttcaatggtacgggcgttaaacaaaattacgccaaagccctttctttttctaaatacgcttgcagtttgaattatggcattagttgtaactttgtagggtatatgtataagagcgccaaaggcgtggagaaggatttgaaaaaagcccttgcgaattttaaaagagggtgccatttaaaagacggggcgagctgtgtgagcttgggatacttgtatgaagccggtatggatgtcaaacaaaatgaagagcaggctttgaatctttataaaaagggttgctctttaaaagaagggagcggttgtcataatgtggcggtgatgtattacacgggtaagggagctccaaaagatttggagaaagccacttcatattataagaaagggtgcgctttaggctttagtggtagttgtaaggtgttagaagtgattggcaaggagtctgataatttgcaagatgacgcgcaaaacgacacgcaagatagcgtgcaataa

SEQ ID NO: 4317 - DNA (genomic), 996 bp, Helicobacter pylori; double-stranded, circular
  misc_feature (B) LOCATION 1...996
  hypothetical: NO
  anti-sense: NO
ttatactataatagccaattaaattggggttttactgatttgtctttgtgcgagctttggcttagttttgtaaggaatgagatgataaagagttggactaaaaagtggtttttgattttatttttaatggcaagctgttttggtcatttggtggctacaaccggtgagaaatattttaagatggctaatcaagcccttaagagaggggattaccatagagcggtggctttttataagaggagctgtaatttgaggatgggggttggttgcacgagtttaggctctatgtatgaatatggcgatggcgtggatcagaatatttcaaaagccgttttttattacagaagagggtgtaatttgaggaattatctcgcttgcgcgagtttaggctctatgtatgaagatggcgatggcgtgcaaaaagactttccaaaggctatctattattataggagagggtgccacttaaaaggtggggtgagctgcggtagtttgggttttatgtatttcaatggtacgggcgttaaacaaaattacgccaaagccctttctttttctaaatacgcttgcagtttgaattatggcattagttgtaactttgtagggtatatgtataagagcgccaaaggcgtggagaaggatttgaaaaaagcccttgcgaattttaaaagagggtgccatttaaaagacggggcgagctgtgtgagcttgggatacttgtatgaagccggtatggatgtcaaacaaaatgaagagcaggctttgaatctttataaaaagggttgctctttaaaagaagggagcggttgtcataatgtggcggtgatgtattacacgggtaagggagctccaaaagatttggagaaagccacttcatattataagaaagggtgcgctttaggctttagtggtagttgtaaggtgttagaagtgattggcaaggagtctgataatttgcaagatgacgcgcaaaacgacacgcaagatagcgtgcaa

SEQ ID NO: 4318 - DNA (genomic), 807 bp, Helicobacter pylori; double-stranded, circular
  misc_feature (B) LOCATION 1...807
  hypothetical: NO
  anti-sense: NO
atgtcagaaaaagaaagactgaatgaagtgatcttagaagaagagaataatgggagtggtactaaaaaggtgtttttgatcgtggccatagccattatcattttggcggtgcttttaatggtgttttggaaaagcaccagagtcgctcctaaagagacttttttacaaaccgatagtggcatgcaaaaaataggcaacactaaagatgagaaaaaagacgatgagtttgaaagcttgaatatggattctcccaaacaagaagacaagttagacaaagtggtggataatattaaaaaacaagagagtgaaaattctatgcccattcaaaccgatcaagctcaaatggagatgaaaacaacagaagaaaaacaagaatctcaaaaagaattaaaagctgttgagcctattcccatgagcactcaaaaagaatctcaggctgtggctaaaaaagaaaccccccataaaaagcctaaagtagcgccaaaagataaagaagcgcataaagataaagctaagcatgcagctaaagagccaaaagtcaaaaaagaagctcgtaaagaagtttctaagaaagctaattctaaaaccaatcttactaaagggcattatttgcaagtgggggtttttgcgcacacgcccaacaaagcctttttacaagagtttaatcaattcccccataaaattgaagataggggggctactaaacgctacctcataggcccttataagagcaagcaagaagccttaatgcatgccgatgaagtcagcaagaagatgactaaaccggttgtcatagaagtgcggtag

SEQ ID NO: 4319 - DNA (genomic), 804 bp, Helicobacter pylori; double-stranded, circular
  misc_feature (B) LOCATION 1...804
  hypothetical: NO
  anti-sense: NO
atgtcagaaaaagaaagactgaatgaagtgatcttagaagaagagaataatgggagtggtactaaaaaggtgtttttgatcgtggccatagccattatcattttggcggtgcttttaatggtgttttggaaaagcaccagagtcgctcctaaagagacttttttacaaaccgatagtggcatgcaaaaaataggcaacactaaagatgagaaaaaagacgatgagtttgaaagcttgaatatggattctcccaaacaagaagacaagttagacaaagtggtggataatattaaaaaacaagagagtgaaaattctatgcccattcaaaccgatcaagctcaaatggagatgaaaacaacagaagaaaaacaagaatctcaaaaagaattaaaagctgttgagcctattcccatgagcactcaaaaagaatctcaggctgtggctaaaaaagaaaccccccataaaaagcctaaagtagcgccaaaagataaagaagcgcataaagrtaaagctaagcatgcagctaargagccaaaagtcaaaaaagaagctcgtaaagaagtttctaagaaagctaattctaaaaccaatcttactaaagggcattatttgcaagtgggggtttttgcgcacacgcccaacaaagcctttttacaagagtttaatcaattcccccataaaattgaagataggggggctactaaacgctacctyataggyccttataagagcaagcaagaagccttaatgcatgccgatgaagtcagcaagaagatgactaaaccggttgtcatagaagtgcgg

SEQ ID NO: 4320 - DNA (genomic), 825 bp, Helicobacter pylori; double-stranded, circular
  misc_feature (B) LOCATION 1...825
  hypothetical: NO
  anti-sense: NO
ccatttttgaaaggatttttgatgtcagaaaaagaaagactgaatgaagtgatcttagaagaagagaataatgggagtggtactaaaaaggtgtttttgatcgtggccatagccattatcattttggcggtgcttttaatggtgttttggaaaagcaccagagtcgctcctaaagagacttttttacaaaccgatagtggcatgcaaaaaataggcaacactaaagatgagaaaaaagacgatgagtttgaaagcttgaatatggattctcccaaacaagaagacaagttagacaaagtggtggataatattaaaaaacaagagagtgaaaattctatgcccattcaaaccgatcaagctcaaatggagatgaaaacaacagaagaaaaacaagaatctcaaaaagaattaaaagctgttgagcctattcccatgagcactcaaaaagaatctcaggctgtggctaaaaaagaaaccccccataaaaagcctaaagtagcgccaaaagataaagaagcgcataaagataaagctaagcatgcagctaaagagccaaaagtcaaaaaagaagctcgtaaagaagtttctaagaaagctaattctaaaaccaatcttactaaagggcattatttgcaagtgggggtttttgcgcacacgcccaacaaagcctttttacaagagtttaatcaattcccccataaaattgaagataggggggctactaaacgctacctcataggcccttataagagcaagcaagaagccttaatgcatgccgatgaagtcagcaagaagatgactaaaccggttgtcatagaagtgcgg

SEQ ID NO: 4321 - DNA (genomic), 618 bp, Helicobacter pylori; double-stranded, circular
  misc_feature (B) LOCATION 1...618
  hypothetical: NO
  anti-sense: NO
cacgccttgtattcgcccatcaaaatcgcttttgaaaaagcccttaaaaacgctaaagaatccgtttttatcgcttcatcgtattttattccaggtaaaaagataatgaaaatctttaaaaatcaaatttctaaggggattgaattgaatattcttaccaattccctttcatctacggacgctatcgtggtctatggggcgtgggaaaggtatcgcaataaattagtgcgaatgggcgcgaatgtctatgaaatacgaaacgattttttcaaccgccagattaaagggcgctttagcaccaaacattccttacacggcaagacaattgtttttgacgatgccctaacgcttctagggagttttaatattgatccgcgctctgcatatattaacactgaaagtgcggtcttgtttgacaacccgtcttttgccaaaagggtgcgtttgtcgcttaaagatcatgcccaacaatcatggcatttagtcttgtatcggcatagagtgatttgggaagctacagaagaaggcatcttaatccatgaaaaaaactcgcctgatacctctttctttttgcgtttgattaaagaatggtctaaagtccttcctgaaagagaactt

SEQ ID NO: 4322 - DNA (genomic), 672 bp, Helicobacter pylori; double-stranded, circular
  misc_feature (B) LOCATION 1...672
  hypothetical: NO
  anti-sense: NO
tttctttttagtgggtcgtttttgaaaatctttttagttattctaagcgtctttttttttaatgggtgttttgggctagcctataagactcccatttcaaacccccctatctcttatgacccctacactaccaccattgggagcttgtatgctaaaaatttaaaagaaaaccctaaacatagtgcggccattcttttagaagacggctttgatgccttgttgcacagagtgggtcttattagaatgagccaaaaaagcattgacatgcaaacttatatctataaaaacgacctttcttctcaagtgatcgctaaagaacttttaaacgcggccaatcgtggggtaaaagtgcgcatccttttagatgacaacgggttagattcagatttttcagacatcatgcttttaaatttccacaaaaacattgaagtgaaaatctttaacccctactatatccgcaataaaggcttgcgttattttgaaatgcttgcggattatgaacgcattaaaaaacgcatgcacaacaagcttttcatcgtggataatttcgctgtcattataggggggcgcaacattggggacaattattttgataacgatttagacacgaattttttagatttagacgctttgttttttgggggggttgctacagatgtccaacaaaacttt

SEQ ID NO: 4323 - DNA (genomic), 1509 bp, Helicobacter pylori; double-stranded, circular
  misc_feature (B) LOCATION 1...1509
  hypothetical: NO
  anti-sense: NO
ttgaaaatctttttagttattctaagcgtctttttttttaatgggtgttttgggctagtctataagactcccatttcaaacccccctatctcttatgacccctacactaccaccattgggagcttgtatgctaaaaatttaaaagaaaaccctaaacatagtgcggccattcttttagaagacggctttgatgccttgttgcacagagtgggtcttattagaatgagccaaaaaagcattgacatgcaaacttatatctataaaaacgacctttcttctcaagtgatcgctaaagaacttttaaacgcggccaatcgtggggtaaaagtgcgcatccttttagatgacaacgggttagattcagatttttcagacatcatgcttttaaatttccacaaaaacattgaagtgaaaatctttaacccctactatatccgcaataaaggcttgcgttattttgaaatgcttgcggattatgaacgcattaaaaaacgcatgcacaacaagcttttcatcgtggataatttcgctgtcattataggggggcgcaacattggggacaattattttgataacgatttagacacgaattttttagatttagacgctttgttttttgggggggttgcttcaaaggccaaagaaagctttgaaaattattggcgattccaccgctctatccctgtttcattattaagaacccataaaagactcaaaaacaacgttaaagaaatcgctaagctccatgaaaaaatccctatcagcgctgaagacgcaaacgaatttgaaaaaaaagtcaatgattttatagaacgcttccaaaaataccaataccccatttattatgggaatgccatttttctagccgatttgcccgccaaaattgacacgcccttgtattcgcccatcaaaatcgcttttgaaaaagcccttaaaaacgctaaagactccgtttttatcgcttcatcgtattttattccaggtaaaaagataatgaaaatctttaaaaatcaaatttctaaggggattgaattgaatattcttaccaattccctttcatctacggacgctatcgtggtctatggggcgtgggaaaggtatcgcaataaattagtgcgaatgggcgcgaatgtctatgaaatacgaaacgattttttcaaccgccagattaaagggcgctttagcaccaaacattccttacacggcaagacaattgtttttgacgatgccctaacgcttctagggagttttaatattgatccgcgctctgcatatattaacactgaaagtgcggtcttgtttgacaacccgtcttttgccaaaagggtgcgtttgtcgcttaaagatcatgcccaacaatcatggcatttagtcttgtatcggcatagagtgatttgggaagctacagaagaaggcatcttaatccatgaaaaaaactcgcctgatacctctttctttttgcgtttgattaaagaatggtctaaagtccttcctgaaagagaactttaa

SEQ ID NO: 4324 - DNA (genomic), 1509 bp, Helicobacter pylori; double-stranded, circular
  misc_feature (B) LOCATION 1...1509
  hypothetical: NO
  anti-sense: NO
ttgaaaatctttttagttattctaagcgtctttttttttaatgggtgttttgggctagcctataagactcccatttcaaacccccctatctcttatgacccctacactaccaccattgggagcttgtatgctaaaaatttaaaagaaaaccctaaacatagtgcggccattcttttagaagacggctttgatgccttgttgcacagagtgggtcttattagaatgagccaaaaaagcattgacatgcaaacttatatctataaaaacgacctttcttctcaagtgatcgctaaagaacttttaaacgcggccaatcgtggggtaaaagtgcgcatccttttagatgacaacgggttagattcagatttttcagacatcatgcttttaaatttccacaaaaacattgaagtgaaaatctttaacccctactatatccgcaataaaggcttgcgttattttgaaatgcttgcggattatgaacgcattaaaaaacgcatgcacaacaagcttttcatcgtggataatttcgctgtcattataggggggcgcaacattggggacaattattttgataacgatttagacacgaattttttagatttagacgctttgttttttgggggggttgcttcaaaggccaaagaaagctttgaaaattattggcgattccaccgctctatccctgtttcattattaagaacccataaaagactcaaaaacaacgttaaagaaatcgctaagctccatgaaaaaatccctatcagcgctgaagacgcaaacgaatttgaaaaaaaagtcaatgattttatagaacgcttccaaaaataccaataccccatttattatgggaatgccatttttctagccgatttgcccgccaaaattgacacgcccttgtattcgcccatcaaaatcgcttttgaaaaagcccttaaaaacgctaaagactccgtttttatcgcttcatcgtattttattccaggtaaaaagataatgaaaatctttaaaaatcaaatttctaaggggattgaattgaatattcttaccaattccctttcatctacggacgctatcgtggtctatggggcgtgggaaaggtatcgcaataaattagtgcgaatgggcgcgaatgtctatgaaatacgaaacgattttttcaaccgccagattaaagggcgctttagcaccaaacattccttacacggcaagacaattgtttttgacgatgccctaacgcttctagggagttttaatattgatccgcgctctgcatatattaacactgaaagtgcggtcttgtttgacaacccgtcttttgccaaaagggtgcgtttgtcgcttaaagatcatgcccaacaatcatggcatttagtcttgtatcggcatagagtgatttgggaagctacagaagaaggcatcttaatccatgaaaaaaactcgcctgatacctctttctttttgcgtttgattaaagaatggtctaaagtccttcctgaaagagaactttaa

SEQ ID NO: 4325 - DNA (genomic), 597 bp, Helicobacter pylori; double-stranded, circular
  misc_feature (B) LOCATION 1...597
  hypothetical: NO
  anti-sense: NO
gtgttaaaaaagatgataggtttggtggcggttttaagcgttttattagccagagacaacccttttgagcctgaaatcaattccaagaatttgcaagggggctttagcgggatctatgatgactacctcaaagaaatccatgtggatttgcccacgagcgctaggatcttaaaaaaaatcacgctcacttaccaagatattgatggctctatccattctaaagtcgtgggtattgataaaagcattgattggcactaccccttaaaactttcccaacacacccttaatcaagacgcctttgaaaaacgctaccagatccaagattttgattttttaatggcaaacaacacgatgattttgcgttccccttataaaattttgcgctcttttgtgttagtcaatccttatagaatcgtgttagacacgcaaaaaggccctttggatatttatcaaaacatggatttaaaccagaagtttttttctcacattaaagtcggcacgcacaaagattattaccgcatcacgctcattttagacgggaaataccgctatcttttggaagaaaaaaacggggcgtatgaattaaaactgaaataa

SEQ ID NO: 4326 - DNA (genomic), 600 bp, Helicobacter pylori; double-stranded, circular
  misc_feature (B) LOCATION 1...600
  hypothetical: NO
  anti-sense: NO
atggcagtgttaaaaaagatgataggtttggtggcggttttaagcgttttattagccagagacaacccttttgagcctgaaatcaattccaagaatttgcaagggggctttagcgggatctatgatgactacctcaaagaaatccatgtggatttgcccacgagcgctaggatcttaaaaaaaatcacgctcacttaccaagatattgatggctctatccattctaaagtcgtgggtattgataaaagcattgattggcactaccccttaaaactttcccaacacacccttaatcaagacgcctttgaaaaacgctaccagatccaagattttgattttttaatggcaaacaacacgatgattttgcgttccccttataaaattttgcgctcttttgtgttagtcaatccttatagaatcgtgttagacacgcaaaaaggccctttggatatttatcaaaacatggatttaaaccagaagtttttttctcacattaaagtcggcacgcacaaagattattaccgcatcacgctcattttagacgggaaataccgctatcttttggaagaaaaaaacggggcgtatgaattaaaactgaaa

SEQ ID NO: 4327 - DNA (genomic), 633 bp, Helicobacter pylori; double-stranded, circular
  misc_feature (B) LOCATION 1...633
  hypothetical: NO
  anti-sense: NO
gggaattacggcctagagattagatttaaggaaatggcagtgttaaaaaagatgataggtttggtggcggttttaagcgttttattagccagagacaacccttttgagcctgaaatcaattccaagaatttgcaagggggctttagcgggatctatgatgactacctcaaagaaatccatgtggatttgcccacgagcgctaggatcttaaaaaaaatcacgctcacttaccaagatattgatggctctatccattctaaagtcgtgggtattgataaaagcattgattggcactaccccttaaaactttcccaacacacccttaatcaagacgcctttgaaaaacgctaccagatccaagattttgattttttaatggcaaacaacacgatgattttgcgttccccttataaaattttgcgctcttttgtgttagtcaatccttatagaatcgtgttagacacgcaaaaaggccctttggatatttatcaaaacatggatttaaaccagaagtttttttctcacattaaagtcggcacgcacaaagattattaccgcatcacgctcattttagacgggaaataccgctatcttttggaagaaaaaaacggggcgtatgaattaaaactgaaa

SEQ ID NO: 4328 - DNA (genomic), 189 bp, Helicobacter pylori; double-stranded, circular
  misc_feature (B) LOCATION 1...189
  hypothetical: NO
  anti-sense: NO
aagattaaaggaaaagagatgaaatttttaaacggattagcagggaatttactgattgtggttatcttattgtgtgtggtcgtttttttcgcgctcaaagcgatccatatccaaaaagagcaagccaccaattattaccgctataaggatattaacgctttagaggcaaaaaacacccaaaaccacgct

SEQ ID NO: 4329 - DNA (genomic), 207 bp, Helicobacter pylori; double-stranded, circular
  misc_feature (B) LOCATION 1...207
  hypothetical: NO
  anti-sense: NO
atgaaatttttaaacggattagcagggaatttactgattgtggttatcttattgtgtgtggtcgtttttttcgcgctcaaagcgatccatatccaaaaagagcaagccaccaattattaccgctataaggatattaacgctttagaggcaaaaaacacccaaaaccacgctaattatgaattagtcaatcaagggagtaaaaaatga

SEQ ID NO: 4330 - DNA (genomic), 342 bp, Helicobacter pylori; double-stranded, circular
  misc_feature (B) LOCATION 1...342
  hypothetical: NO
  anti-sense: NO
caacaactattagagcaagcagggaaagtcgctcctagcgaagttccagagtttcgcacagaagtcaataaacgattagaagcgatgaaagaagaagagcgtcaaaaatataaagcggattttaagaaagcgatggataagaatttggcttctttaagccaagaagatcgcaacaagcgtaaaaaagaaatccttgaagtcattgctaacaaaaagaaaacaatgaccatgaaagagtatcgtgaagaggggttggatttgcatgattgcgcatgcgaaggcccttttcatgatcatgaaaaaaaggggcaaaaagggaaaaaaccaagccatcataagcat

SEQ ID NO: 4331 - DNA (genomic), 450 bp, Helicobacter pylori; double-stranded, circular
  misc_feature (B) LOCATION 1...450
  hypothetical: NO
  anti-sense: NO
ttgaattgggagcatttgatgaaaaaattagcgttttctttattatttacagggacttttttggggctttttttgaatgcgagtgattttaagagcatggataacaagcaactattagagcaagcagggaaagtcgctcctagcgaagttccagagtttcgcacagaagtcaataaacgattagaagcgatgaaagaagaagagcgtcaaaaatataaagcggattttaagaaagcgatggataagaatttggcttctttaagccaagaagatcgcaacaagcgtaaaaaagaaatccttgaagtcattgctaacaaaaagaaaacaatgaccatgaaagagtatcgtgaagaggggttggatttgcatgattgcgcatgcgaaggcccttttcatgatcatgaaaaaaaggggcaaaaagggaaaaaaccaagccatcataagcattag

SEQ ID NO: 4332 - DNA (genomic), 858 bp, Helicobacter pylori; double-stranded, circular
  misc_feature (B) LOCATION 1...858
  hypothetical: NO
  anti-sense: NO
gtgaagcgaattttattttttttagcggctacgacttttttgttgagagcagaaacggcttctgctactattaacactacagttgatcccaatgttatgttttctgaaagctccacagggaatgtgaaaaaagaccgcaagagggttttaaagagcatggttgatttagaaaaagagcgcgtgaagaattttaaccagtattctgaaaccaagatgagtaagggcgatttatccgcttttggagctttctttaaggggagtttggaagattgcgtggagcaaaagatttgttactatgagcataggaatggcaaggtttcttttgtggtgaatgacagagaaaagttttataagcatgtgcttaaagacttagggacagagctttcactccccttgttcaactggctttacaaaggctcagattttggggctttgcatgagcagtttggggacatgtatgatgggtatatcaaatacttgatcagcatggttagggtgagccaaaaagaaaaggctagaaaagtggatgcaatcgttcttaaaaaaatggaagaacaagctgagaaagacactaaggcagcattccaaaagaggagcagtggggagcttgaaagccatactgatagccctgaatttataagctcttctaagacacagaattcttctaacccagatctagaccctatgactaacgctaacacgctcaaagaaacagcttcaaaagagccagagacttcttcaaaaaaggaaaaaaagcccaagaaaaaacgacgcctttcaaagaaagaaaagcaacaacaggccttacaacaagagtttgaaaagcaaattagcgactctagtaagtctgaaaaatag

SEQ ID NO: 4333 - DNA (genomic), 864 bp, Helicobacter pylori; double-stranded, circular
  misc_feature (B) LOCATION 1...864
  hypothetical: NO
  anti-sense: NO
gagtttggtgtgaagcgaattttattttttttagcggctacgacttttttgttgagagcagaaacggcttctgctactattaacactacagttgatcccaatgttatgttttctgaaagctccacagggaatgtgaaaaaagaccgcaagagggttttaaagagcatggttgatttagaaaaagagcgcgtgaagaattttaaccagtattctgaaaccaagatgagtaagggcgatttatccgcttttggagctttctttaaggggagtttggaagattgcgtggagcaaaagatttgttactatgagcataggaatggcaaggtttcttttgtggtgaatgacagagaaaagttttataagcatgtgcttaaagacttagggacagagctttcactccccttgttcaactggctttacaaaggctcagattttggggctttgcatgagcagtttggggacatgtatgatgggtatatcaaatacttgatcagcatggttagggtgagccaaaaagaaaaggctagaaaagtggatgcaatcgttcttaaaaaaatggaagaacaagctgagaaagacactaaggcagcattccaaaagaggagcagtggggagcttgaaagccatactgatagccctgaatttataagctcttctaagacacagaattcttctaacccagatctagaccctatgactaacgctaacacgctcaaagaaacagcttcaaaagagccagagacttcttcaaaaaaggaaaaaaagcccaagaaaaaacgacgcctttcaaagaaagaaaagcaacaacaggccttacaacaagagtttgaaaagcaaattagcgactctagtaagtctgaaaaa

SEQ ID NO: 4334 - DNA (genomic), 333 bp, Helicobacter pylori; double-stranded, circular
  misc_feature (B) LOCATION 1...333
  hypothetical: NO
  anti-sense: NO
gtgtttgagccggttatcgcttacaagcttttccattcctttgtgattttagggtgcgcgattgaaactttaacgactaaatgcgtggaaggcatcacggctaatgaaaagatttgccacgattatgtttttaacagcattggcattgttaccgcgctcaaccctcatatcggctatgaaaaatccgctatgatcgccaaagaagccttaaaaagcgatcgctctatctatgatatcgctttagaaaagaaaatcttaaccaaagagcaactggacgatattttcaagccagaaaacatgctaagyyctcacgctttcaaaaagcataaagac

SEQ ID NO: 4335 - DNA (genomic), 348 bp, Helicobacter pylori; double-stranded, circular
  misc_feature (B) LOCATION 1...348
  hypothetical: NO
  anti-sense: NO
ttgcaactcaatgtgtttgagccggttatcgcttacaagcttttccattcctttgtgattttagggcgcgcgattgaaactttaacgactaaatgcgtggaaggcatcacggctaatgaaaagatttgccacgattatgtttttaacagcattggcattgttaccgcgctcaaccctcatatcggctatgaaaaatccgctatgatcgccaaagaagccttaaaaagcgatcgctctatctatgatatcgctttagaaaagaaaatcttaaccaaagagcaactggacgatattttcaagccagaaaacatgctaagccctcacgctttcaaaaagcataaagactga

SEQ ID NO: 4336 - DNA (genomic), 348 bp, Helicobacter pylori; double-stranded, circular
  misc_feature (B) LOCATION 1...348
  hypothetical: NO
  anti-sense: NO
ttgcaactcaatgtgtttgagccggttatcgcttacaagcttttccattcctttgtgattttagggtgcgcgattgaaactttaacgactaaatgcgtggaaggcatcacggctaatgaaaagatttgccacgattatgtttttaacagcattggcattgttaccgcgctcaaccctcatatcggctatgaaaaatccgctatgatcgccaaagaagccttaaaaagcgatcgctctatctatgatatcgctttagaaaagaaaatcttaaccaaagagcaactggacgatattttcaagccagaaaacatgctaagccctcacgctttcaaaaagcataaagactga

SEQ ID NO: 4337 - DNA (genomic), 357 bp, Helicobacter pylori; double-stranded, circular
  misc_feature (B) LOCATION 1...357
  hypothetical: NO
  anti-sense: NO
ccagaaggagggaatgaactcaatgtgtttgagccggttatcgcttacaagcttttccattcctttgtgattttagggtgcgcgattgaaactttaacgactaaatgcgtggaaggcatcacggctaatgaaaagatttgccacgattatgtttttaacagcattggcattgttaccgcgctcaaccctcatatcggctatgaaaaatccgctatgatcgccaaagaagccttaaaaagcgatcgctctatctatgatatcgctttagaaaagaaaatcttaaccaaagagcaactggacgatattttcaagccagaaaacatgctaagccctcacgctttcaaaaagcataaagac

SEQ ID NO: 4338 - DNA (genomic), 195 bp, Helicobacter pylori; double-stranded, circular
  misc_feature (B) LOCATION 1...195
  hypothetical: NO
  anti-sense: NO
ggcaacgatgatacgggtaacactaacgacgacatgggtaatagcaacgacatgggcgatgacatgaataacgcgaacgacatgaacgacgacatgggtaacagcaacgatgacatgggcgatatgggggacatgaacgatgacatgggtggcgatatgggagacatgggggatatgggtggcgatatggggaat

SEQ ID NO: 4339 - DNA (genomic), 1494 bp, Helicobacter pylori; double-stranded, circular
  misc_feature (B) LOCATION 1...1494
  hypothetical: NO
  anti-sense: NO
tctataatcgtcgcagagatattttttaaggttatcaatgaaagcgataaaaatacttcttataatgacactcagtttaacgctatcagcgtgaatagggcgttgtttgatttaaaagattcgcaattaaaaggggaattaacgccaaaaatagtggattttgggggttataaaagcaacaccacagagtggggagctacggctttaaactatatcaatgcggctaatggcgatgcgaaaaaattcagcgcgttagtggaaaaaatgcgttttaactctggtatcttggggaattttagagcgcatgcacatttgaggcaagccctaaaattgcaaaagaatttgaaatattgccttaaaatcatcgctagggattctttttatagttaccgcaccggtatttatatccccttaggcatttctttaaaagatcaaaaaacggctcaaaaaatgctcgctgatttgagcgtggtaggggcgtatcttaaaagcaaccaggagaatgaaaaggctcaaagcccttattacaggagcaacaactattacaactcctactatagcccttattatggcatgtatggcatgtatggaatgggcatgtatggaatgtatggcatgggcatgtatgatttttatgacttttatgatggcatgtatgggttctaccctaacatgtttttcatgatgcaagttcaagactacttgatgttagaaaattacatgtatgcactcgatcaagaagagattttagaccatgacgcttccatcaaccaacttgatacgcctactgatgatgacagagacgataaagacgataaatcttcgcaaccagcgaatctcatgagcttttatcgtgatcccaaattcagcaaagacattcaaaccaaccgcttgaatagcgccttagtcaatttagacaacagccacatgctcaaagacaattcgctcttccacactaaagccatgcccactaaaagcgtggatgcgatcacttctcaagctaaagagcttaaccatttggtggggcaaatcaaagagatgaagcaagacggggcgagtcctaataagattgattcagtggtcaataaagctatggaggttagggacaaattagacaacaacctcaaccaactagacaatgacttaaaagatcaaaaagggctttcaagcgagcagcaagcccaagtggataaagccttagacagcgtgcaacaattaagccatagcagcgatgtggtagggaattatttagacgggagtttgaaaattgatggcgatgacagagacgatttgaatgatgcgatcaataaccctatgcaacaacctgcgcaacaaacgcctattaacaacatggacaacacccatgcaaatgacagcaaagatcaagggggtaacgcgctcataaaccctaacaacgccaccaacgatgatcacaacgatgatcacatggacactaacaccactgacactaggcaacgcaaacgacacccccac

SEQ ID NO: 4340 - DNA (genomic), 1773 bp, Helicobacter pylori; double-stranded, circular
  misc_feature (B) LOCATION 1...1773
  hypothetical: NO
  anti-sense: NO
atgaaagcgataaaaatacttcttataatgacactcagtttaaacgctatcagcgtgaatagggcgttgtttgatttaaaagattcgcaattaaaaggggaattaacgccaaaaatagtggattttgggggttataaaagcaacaccacagagtggggagctacggctttaaactatatcaatgcggctaatggcgatgcgaaaaaattcagcgcgttagtggaaaaaatgcgttttaactctggtatcttggggaattttagagcgcatgcacatttgaggcaagccctaaaattgcaaaagaatttgaaatattgccttaaaatcatcgctagggattctttttatagttaccgcaccggtatttatatccccttaggcatttctttaaaagatcaaaaaacggctcaaaaaatgctcgctgatttgagcgtggtaggggcgtatcttaaaaagcaacaggagaatgaaaaggctcaaagcccttattacaggagcaacaactattacaactcctactatagcccttattatggcatgtatggcatgtatggaatgggcatgtatggaatgtatggcatgggcatgtatgatttttatgacttttatgatggcatgtatgggttctaccctaacatgtttttcatgatgcaagttcaagactacttgatgttagaaaattacatgtatgcactcgatcaagaagagattttagaccatgacgcttccatcaaccaacttgatacgcctactgatgatgacagagacgataaagacgataaatcttcgcaaccagcgaatctcatgagcttttatcgtgatcccaaattcagcaaagacattcaaaccaaccgcttgaatagcgccttagtcaatttagacaacagccacatgctcaaagacaattcgctcttccacactaaagccatgcccactaaaagcgtggatgcgatcacttctcaagctaaagagcttaaccatttggtggggcaaatcaaagagatgaagcaagacggggcgagtcctaataagattgattcagtggtcaataaagctatggaggttagggacaaattagacaacaacctcaaccaactagacaatgacttaaaagatcaaaaagggctttcaagcgagcagcaagcccaagtggataaagccttagacagcgtgcaacaattaagccatagcagcgatgtggtagggaattatttagacgggagtttgaaaattgatggcgatgacagagacgatttgaatgatgcgatcaataaccctatgcaacaacctgcgcaacaaacgcctattaacaacatggacaacacccatgcaaatgacagcaaagatcaagggggtaacgcgctcataaaccctaacaacgccaccaacgatgatcacaacgatgatcacatggacactaacaccactgacactagcaacgcaaacgacacccccactgatgataaagatgctagcggcaacaataccggcgatatgaataacaccgacaccggcaatacggacactggcaacaccgacaccggtaacactgatgatatgagcaacatgaacaacggcaacgatgatacgggtaacactaacgacgacatgggtaatagcaacgacatgggcgatgacatgaataacgcgaacgacatgaacgacgacatgggtaacagcaacgatgacatgggcgatatgggggacatgaacgatgacatgggtggcgatatgggagacatgggggatatgggtggcgatatggggaattga

SEQ ID NO: 4341 - DNA (genomic), 324 bp, Helicobacter pylori; double-stranded, circular
  misc_feature (B) LOCATION 1...324
  hypothetical: NO
  anti-sense: NO
atgaaaacgaacttttataaaattaaattactatttgcttggtgtcttatcattggcatgtttaacgctccgcttaacgctgaccaaaacacggatataaaagatattagtcctgaagatatggcgctaaatagcgtggggcttgtttctagagatcagctaaaaatagagatccctaaagaaaccctagagcaaaaagtgaccatactcaatgactataatgataagaatgttaatatcaagtttgacgacataagtttagggagtttccaacctaatgataatctaggtatcaatgcgatgtggggcattcaaaatcttctm

SEQ ID NO: 4342 - DNA (genomic), 429 bp, Helicobacter pylori; double-stranded, circular
  misc_feature (B) LOCATION 1...429
  hypothetical: NO
  anti-sense: NO
atgaaaacgaacttttataaaattaaattactatttgcttggtgtcttatcattggcatgtttaacgctccgcttaacgctgaccaaaacacggatataaaagatattagtcctgaagatatggcgctaaatagcgtggggcttgtttctagagatcagctaaaaatagagatccctaaagaaaccctagagcaaaaagtggccatactcaatgactataatgataagaatgttaatatcaagtttgacgacataagtttagggagtttccaacctaatgataatctaggtatcaatgcgatgtggggcattcaaaatcttctcatgagccaaatgatgagcaattacggtccaaacaattctttcatgtatggctatgcgccaacatactcagattcatcgtttttaccaccgatcttagggtattaa

SEQ ID NO: 4343 - DNA (genomic), 462 bp, Helicobacter pylori; double-stranded, circular
  misc_feature (B) LOCATION 1...462
  hypothetical: NO
  anti-sense: NO
aataatgctaaaaataagaataaaggagtcaaaagtatgaaaacgaacttttataaaattaaattactatttgcttggtgtcttatcattggcatgtttaacgctccgcttaacgctgaccaaaacacggatataaaagatattagtcctgaagatatggcgctaaatagcgtggggcttgtttctagagatcagctaaaaatagagatccctaaagaaaccctagagcaaaaagtggccatactcaatgactataatgataagaatgttaatatcaagtttgacgacataagtttagggagtttccaacctaatgataatctaggtatcaatgcgatgtggggcattcaaaatcttctcatgagccaaatgatgagcaattacggtccaaacaattctttcatgtatggctatgcgccaacatactcagattcatcgtttttaccaccgatcttagggtat

SEQ ID NO: 4344 - DNA (genomic), 627 bp, Helicobacter pylori; double-stranded, circular
  misc_feature (B) LOCATION 1...627
  hypothetical: NO
  anti-sense: NO
ttgatcaacaataataataacaataaaaaactgagaggcttttttttgaaagttctcttaagtctcgttgttttcagttcgtatgggtcagcaaatgacgataaagaagccaaaaaagaagcgctagaaaaagaaaaaaacactcccaatgggcttgtttatacgaatttagattttgatagttttaaagcgactatcaaaaatttgaaagacaagaaagtaactttcaaagaagtcaatcccgatattatcaaagatgaagtttttgacttcgtgattgtcaatagagtccttaaaaaaataaaggatttgaagcattacgatccagttattgaaaaaatctttgatgaaaagggtaaagaaatgggattgaatgtagaattacagatcaatcctgaagtgaaagacttttttactttcaaaagcatcagcacgaccaacaaacaacgctgctttctatcattgcacggagaaacaagagaaattttatgcgatgataagctatataatgttttattggccgtattcaattcttatgatcctaatgatcttttgaaacacattagcaccatagagtctctcaaaaaaatcttttatacgattacatgtgaagcggtatatctataa

SEQ ID NO: 4345 - DNA (genomic), 642 bp, Helicobacter pylori; double-stranded, circular
  misc_feature (B) LOCATION 1...642
  hypothetical: NO
  anti-sense: NO
gtggaggagctagctaaattgatcaacaataataataacaataaaaaactgagaggcttttttttgaaagttctcttaagtctcgttgttttcagttcgtatgggtcagcaaatgacgataaagaagccaaaaaagaagcgctagaaaaagaaaaaaacactcccaatgggcttgtttatacgaatttagattttgatagttttaaagcgactatcaaaaatttgaaagacaagaaagtaactttcaaagaagtcaatcccgatattatcaaagatgaagtttttgacttcgtgattgtcaatagagtccttaaaaaaataaaggatttgaagcattacgatccagttattgaaaaaatctttgatgaaaagggtaaagaaatgggattgaatgtagaattacagatcaatcctgaagtgaaagacttttttactttcaaaagcatcagcacgaccaacaaacaacgctgctttctatcattgcacggagaaacaagagaaattttatgcgatgataagctatataatgttttattggccgtattcaattcttatgatcctaatgatcttttgaaacacattagcaccatagagtctctcaaaaaaatcttttatacgattacatgtgaagcggtatatcta

SEQ ID NO: 4346 - DNA (genomic), 672 bp, Helicobacter pylori; double-stranded, circular
  misc_feature (B) LOCATION 1...672
  hypothetical: NO
  anti-sense: NO
gcactaagtttggcttcaatattggcgagagtggaggagctagctaaattgatcaacaataataataacaataaaaaactgagaggcttttttttgaaagttctcttaagtctcgttgttttcagttcgtatgggtcagcaaatgacgataaagaagccaaaaaagaagcgctagaaaaagaaaaaaacactcccaatgggcttgtttatacgaatttagattttgatagttttaaagcgactatcaaaaatttgaaagacaagaaagtaactttcaaagaagtcaatcccgatattatcaaagatgaagtttttgacttcgtgattgtcaatagagtccttaaaaaaataaaggatttgaagcattacgatccagttattgaaaaaatctttgatgaaaagggtaaagaaatgggattgaatgtagaattacagatcaatcctgaagtgaaagacttttttactttcaaaagcatcagcacgaccaacaaacaacgctgctttctatcattgcacggagaaacaagagaaattttatgcgatgataagctatataatgttttattggccgtattcaattcttatgatcctaatgatcttttgaaacacattagcaccatagagtctctcaaaaaaatcttttatacgattacatgtgaagcggtatatcta

SEQ ID NO: 4347 - DNA (genomic), 207 bp, Helicobacter pylori; double-stranded, circular
  misc_feature (B) LOCATION 1...207
  hypothetical: NO
  anti-sense: NO
atggcaggcacacaagctatatatgaatcatcttctgcaggattcttatcgcaagtctcctcaatcatctcaagcacaagtggtgtcgcagggccatttgcaggaatagtagcgggcgctatgacagcagcgattattcctattgttgtgggatttactaatccgcaaatgaccgytatyattracccaatayaatcaaagcatcgc

SEQ ID NO: 4348 - DNA (genomic), 327 bp, Helicobacter pylori; double-stranded, circular
  misc_feature (B) LOCATION 1...327
  hypothetical: NO
  anti-sense: NO
ggtattaaactagggggtattaacatggcaggcacacaagctatatatgaatcatcttctgcaggattcttatcgcaagtctcctcaatcatctcaagcacaagtggtgtcgcagggccatttgcaggaatagtagcgggcgctatgacagcagcgattattcctattgttgtgggatttactaatccgcaaatgaccgctatcatgacccaatacaatcaaagcatcgctgaagctgtaagcgtgcctatgaaagccgctaaccaacaatacagccaattgtatcaaggttttaacgatcaaagcatggctgtgggaacaatatct

SEQ ID NO: 4349 - DNA (genomic), 396 bp, Helicobacter pylori; double-stranded, circular
  misc_feature (B) LOCATION 1...396
  hypothetical: NO
  anti-sense: NO
aagccgctaaccaacaatacagccaattgtatcaaggttttaacgatcaaagcatggctgtgggaacaatatcttaaatatcagcaaattaacagggggaatttaacgcgcaagggcaacacgcaaagcgcgcaaattagtgctgtcaatagtcagattgcaagcattttagcgagtaacactacccctaaaaatcctagcgctattgaagcttatgcgacgaatcaaatcgctgttcctagcgtgccaacaacggttgaaatgatgagcggtatattaggcaatattacaagcgcagcaccaaaatacgccctagctctacaagagcaactgcgttctcaagcaagcaacagctcaatgaatgatacagccgattcccttgatagctgtaccgct

SEQ ID NO: 4350 - DNA (genomic), 738 bp, Helicobacter pylori; double-stranded, circular
  misc_feature (B) LOCATION 1...738
  hypothetical: NO
  anti-sense: NO
atggcaggcacacaagctatatatgaatcatcttctgcaggattcttatcgcaagtctcctcaatcatctcaagcacaagtggtgtcgcagggccatttgcaggaatagtagcgggcgctatgacagcagcgattattcctattgttgtgggatttactaatccgcaaatgaccgctatcatgacccaatacaatcaaagcatcgctgaagctgtaagcgtgcctatgaaagccgctaaccaacaatacaaccaattgtatcaaggttttaacgatcaaagcatggctgtggggaacaatatcttaaatatcagcaaattaacaggggaatttaacgcgcaaggcaacacgcaaagcgcgcaaattagtgctgtcaatagtcagattgcaagcattttagcgagtaacactacccctaaaaatcctagcgctattgaagcttatgcgacgaatcaaatcgctgttcctagcgtgccaacaacggttgaaatgatgagcggtatattaggcaatattacaagcgcagcaccaaaatacgccctagctctacaagagcaactgcgttctcaagcaagcaacagctcaatgaatgatacagccgattcccttgatagctgtaccgctttaggcgcacttgttggctcatcaaaagtgtttttcagttgcatgcaaatttctatgactcctatgagtgtttctatgcccactgttatgccaaataccagcggttgccactaa

SEQ ID NO: 4351 - DNA (genomic), 342 bp, Helicobacter pylori; double-stranded, circular
  misc_feature (B) LOCATION 1...342
  hypothetical: NO
  anti-sense: NO
atgaaacgccttgctgttgcgcttattttggtgttgggagtggtgtgggggaaatccttgcctaagtgggcaaaagattgctcaaaagagatgcggattgaaaagacccaaaccaaagatgaaaaaattttagtgtgtgggatgagcgatatattgctttcagatatggattatagcttgtcctcagccagacaaaacgccttagagaaagtgatggaagctttcaagggggatagaatagagattaaggctggtgagctaaaggccacttttattgatacggataaagtttatgtgcttctaagaatcactaagaagcatgtcgctttaatgaatgagtga

SEQ ID NO: 4352 - DNA (genomic), 339 bp, Helicobacter pylori; double-stranded, circular
  misc_feature (B) LOCATION 1...339
  hypothetical: NO
  anti-sense: NO
atgaaacgccttgctgttgcgcttattttggtgttgggagtggtgtgggggaaatccttgcctaagtgggcaaaagattgctcaaaagagatgcggattgaaaagacccaaaccaaagatgaaaaaattttagtgtgtgggatgagcgatatattgctttcagatatggattatagcttgtcctcagccagacaaaacgccttagagaaagtgatggaagctttcaagggggatagaatagagattaaggctggtgagctaaaggccacttttattgatacggataaagtttatgtgcttctaagaatcactaagaagcatgtcgctttaatgaatgag

SEQ ID NO: 4353 - DNA (genomic), 363 bp, Helicobacter pylori; double-stranded, circular
  misc_feature (B) LOCATION 1...363
  hypothetical: NO
  anti-sense: NO
gcatggttaaaaagtagggttttaatgaaacgccttgctgttgcgcttattttggtgttgggagtggtgtgggggaaatccttgcctaagtgggcaaaagattgctcaaaagagatgcggattgaaaagacccaaaccaaagatgaaaaaattttagtgtgtgggatgagcgatatattgctttcagatatggattatagcttgtcctcagccagacaaaacgccttagagaaagtgatggaagctttcaagggggatagaatagagattaaggctggtgagctaaaggccacttttattgatacggataaagtttatgtgcttctaagaatcactaagaagcatgtcgctttaatgaatgag

SEQ ID NO: 4354 - DNA (genomic), 678 bp, Helicobacter pylori; double-stranded, circular
  misc_feature (B) LOCATION 1...678
  hypothetical: NO
  anti-sense: NO
atgagagctacggcgataaaaatcttttcattctcatcagcgctcgccctattgcttcagggttgcttgagcattaatttaaaacaaatgctgccagaaatcagaacttatgatttaaatgcgagttcttttgaaatgacgcaatgccctaaacctttgactgaagtgaggctcattagcattttgagcgcggatttattcaacactaaagagatcgtgtttaaagcgcaagacgggcagatcacgcatgggaagcaccaaaaatggatagacttgcctcgcaacatgttaaaaaccatgttcatgcaagaagcgcaaaaagcatgcttaggcgtggctttgcccccttatggcgcgggcgcgcccacttatgcggttcgttttacgattttatcgttttctcttttagaaaaagaaaattctacttacagggcggaattcgcgctaggctatgatattagcgtgaaaggcgattcgcattctggagtgatcattaagcatgaaaatatttctagcttggaaaataaaacgaccaaaacgagtaaaaatggcagtcaagatttccaagaaagcgcgatacaatccctccaacatgtcagcacgcaagcgatgcaagaagcgatttctttgattaaaaaagcggttgaagcgcaaagcgtaagcccgttaaaaaaataa

SEQ ID NO: 4355 - DNA (genomic), 702 bp, Helicobacter pylori; double-stranded, circular
  misc_feature (B) LOCATION 1...702
  hypothetical: NO
  anti-sense: NO
aacgatttttggagaaaggaaataaccatgagagctacggcgataaaaatcttttcattctcatcagcgctcgccctattgcttcagggttgcttgagcattaatttaaaacaaatgctgccagaaatcagaacttatgatttaaatgcgagttcttttgaaatgacgcaatgccctaaacctttgactgaagtgaggctcattatcattttgagcgcggatttattcaacactaaagagatcgtgtttaaagcgcaagacgggcagattacgcatgggaagcaccaaaaatggatagacttgcctcgcaacatgttaaaaaccatgttcatgcaagaagcgcaaaaagcatgcttaggcgtggctttgcccccttatggcgcgggcgcgcccacttatgcggttcgttttacgattttatcgttttctcttttagaaaaagaaaattctacttacagggcggaattcgcgctaggctatgatattagcgtgaaaggcgattcgcattctggagtgatcattaagcatgaaaatatttctagcttggaaaataaaacgaccaaaacgagtaaaaatggcagtcaagatttccaagaaagcgcgatacaatccctccaacatgtcagcacgcaagcgatgcaagaagcgatttctttgattaaaaaagcggttgaagcgcaaagcgtaagcccgttaaaaaaa

SEQ ID NO: 4356 - DNA (genomic), 780 bp, Helicobacter pylori; double-stranded, circular
  misc_feature (B) LOCATION 1...780
  hypothetical: NO
  anti-sense: NO
atggcgtgttggcataaaagattggcagttggttgttgtatcgttttattgtcatgcgtaatgagtgctaataatgttagtatcgttagagacgatccgccccttgatccaacgctccctgcatggatttattctgttgcgttattgaaagtgtattttagcgatgggacttataaagaaggctatgcgactttgctagaaaacgggcgttatatcgcttcttctgaaacgctctattctaatggcttgtatcctaaaatgattttagccaaaatgcaagacagcagtgctaaagagctgatttgcatagccagcttgcaccttgaagcgatggatagggatcaagggctttcgctcttaaaaaccgccgattttagagacgattattgtcataaaagagaagagagctattatcatgcaaggatttatgccaaatacgctcaaactttccattcaaatccttataccaatcaaaaaacacccacttccgatctctactacccggcgttaaatgaggggaattctttttccatacagacaacggacatttctgtggctgaacttttgaaatctaaaaagtttctttcgcttgatgcttcttttaaaaaggggagcgtgttgtggggagggaggccttattttagcgaggtaggggagtttatgggaatggctagcagcactttagaaaaccaagaaagtttggtgattatccctaaagaaaagattgcgcgatttttaagcgctctaaaaaatcaaaatatttttccaaacattccctaa

SEQ ID NO: 4357 - DNA (genomic), 792 bp, Helicobacter pylori; double-stranded, circular
  misc_feature (B) LOCATION 1...792
  hypothetical: NO
  anti-sense: NO
gcggtaagttggataatggcgtgttggcataaaagattggcagttggttgttgtatcgttttattgtcatgcgtaatgagtgctaataatgttagtatcgttagagacgatccgccccttgatccaacgctccctgcatggatttattctgttgcgttattgaaagtgtattttagcgatgggacttataaagaaggctatgcgactttgctagaaaacgggcgttatatcgcttcttctgaaacgctctattctaatggcttgtatcctaaaatgattttagccaaaatgcaagacagcagtgctaaagagctgatttgcatagccagcttgcaccttgaagcgatggatagggatcaagggctttcgctcttaaaaaccgccgattttagagacgattattgtcataaaagagaagagagctattatcatgcaaggatttatgccaaatacgctcaaactttccattcaaatccttataccaatcaaaaaacacccacttccgatctctactacccggcgttaaatgaggggaattctttttccatacagacaacggacatttctgtggctgaacttttgaaatctaaaaagtttctttcgcttgatgcttcttttaaaaaggggagcgtgttgtggggagggagaccttattttagcgaggtaggggagtttatgggaatgactagcagcactttagaaaaccaagaaagtttggtgattatccctaaagaaaagattgcgcgatttttaagcgctctaaaaaatcaaaatatttttccaaacattccc

SEQ ID NO: 4358 - DNA (genomic), 588 bp, Helicobacter pylori; double-stranded, circular
  misc_feature (B) LOCATION 1...588
  hypothetical: NO
  anti-sense: NO
ttgaatttacgattggctggagcaagcgttttaacggcttgtgtcttttcggggtgtttttttttaaaaatgtttgacaaaaaactttctagcaacgattggcatatccaaaaagtagaaatgaaccatcaagtgtatgacattgaaaccatgctcgctgatagcgcttttagagagcatgaagaagagcaagactcctctttaaataccgctttgcctgaagataaaacagcgattgaagccaaagagcaagagcaaaaagaaaaaaggaaacactggtatgagctttttaaaaagaagccaaagcccaaaagctctatgggagagtttgtgtttgatcaaaaagaaaatcgtatttatgggaaaggctattgcaaccggtattttgctagctacacatggcagggcgataggcacatcgcaattgaagatagcgggatttcaagaaaagtgtgtagagatgagcatttgatggcgtttgaattggaatttatggagaattttaagggtaattttgcggtaactaagggcaaggacacgctcattttagacaaccaaaaaatgaaaatttatttgaaaacgccatga

SEQ ID NO: 4359 - DNA (genomic), 603 bp, Helicobacter pylori; double-stranded, circular
  misc_feature (B) LOCATION 1...603
  hypothetical: NO
  anti-sense: NO
aaaataaggaggaattgtttgaatttacgattggctggagcaagcgttttaacggcttgtgtcttttcggggtgtttttttttaaaaatgtttgacaaaaaactttctagcaacgattggcatatccaaaaagtagaaatgaaccatcaagtgtatgacattgaaaccatgctcgctgatagcgcttttagagagcatgaagaagagcaagactcctctttaaataccgctttgcctgaagataaaacagcgattgaagccaaagagcaagagcaaaaagaaaaaaggaaacactggtatgagctttttaaaaagaagccaaagcccaaaagctctatgggagagtttgtgtttgatcaaaaagaaaatcgtatttatgggaaaggctattgcaaccggtattttgctagctacacatggcagggcgataggcacatcgcaattgaagatagcgggatttcaagaaaagtgtgtagagatgagcatttgatggcgtttgaattggaatttatggagaattttaagggtaattttgcggtaactaagggcaaggacacgctcattttagacaaccaaaaaatgaaaatttatttgaaaacgcca

SEQ ID NO: 4360 - DNA (genomic), 816 bp, Helicobacter pylori; double-stranded, circular
  misc_feature (B) LOCATION 1...816
  hypothetical: NO
  anti-sense: NO
ttggaaaggcatgtgaattacactttaatcggcgggctcttctttttatgcttagtgtgcatggtaggctttattttatggctaggccatttgggattagatgatgggaagtattatgaatatgtggtctatacggacaaagacttgggaggcattgcgaccaactcgcccattaattacaaagggattcaagtgggtaatgtcatcaaagtgggttttgcaaaggataaagtgggggtggtccgtttggatttgatgatcaaatccagcgttaagatccgtaaagattccaaagtggcggtttcttctagagggtttatggggttaaaatttttagccttagagcaaagccacaatgaagaattttatggtagcggcgataaaggggagcggattttaatctttaaagaagggcttatggatcgcttgagcggtgatgctaatcaagtggtgcaagaagtgatgaaagcgatcaggaatgtgaataggattttagacgatgaaaacgtggagaaattcaagcacattctcgcttcagtggatgatctcatcgctaacttggattcaagaaagactcaatttgattccttgatcaacaacgctaacaaccttgtttctaatgtcaataatgtggctttggatgtggataaacgcgtcaaacaggggcaatacgactttaaggcgatgttcactcctttaatcatgcaagcgcagttgagcttaagaaacattgataattttgtggaaaaaggctctgctttgatagataaatttgacgctaacccctataaaacgatttttggagaaaggaaataa

SEQ ID NO: 4361 - DNA (genomic), 849 bp, Helicobacter pylori; double-stranded, circular
  misc_feature (B) LOCATION 1...849
  hypothetical: NO
  anti-sense: NO
aggcaatttattcaattcaacacgaggagagaaattttggaaaggcatgtgaattacactttaatcggcgggctcttctttttatgcttagtgtgcatggtaggctttattttatggctaggccatttgggattagatgatgggaagtattatgaatatgtggtctatacggacaaagacttgggaggcattgcgaccaactcgcccattaattacaaagggattcaagtgggtaatgtcatcaaagtgggttttgcaaaggataaagtgggggtggtccgtttggatttgatgatcaaatccagcgttaagatccgtaaagattccaaagtggcggtttcttctagagggtttatggggttaaaatttttagccttagagcaaagccacaatgaagaattttatggtagcggcgataaaggggagcggattttaatctttaaagaagggcttatggatcgcttgagcggtgatgctaatcaagtggtgcaagaagtgatgaaagcgatcaggaatgtgaataggattttagacgatgaaaacgtggagaaattcaagcacattctcgcttcagtggatgatctcatcgctaacttggattcaagaaagactcaatttgattccttgatcaacaacgctaacaaccttgtttctaatgtcaataatgtggctttggatgtggataaacgcgtcaaacaggggcaatacgactttaaggcgatgttcactcctttaatcatgcaagcgcagttgagcttaagaaacattgataattttgtggaaaaaggctctgctttgatagataaatttgacgctaacccctataaaacgatttttggagaaaggaaa

SEQ ID NO: 4362 - DNA (genomic), 306 bp, Helicobacter pylori; double-stranded, circular
  misc_feature (B) LOCATION 1...306
  hypothetical: NO
  anti-sense: NO
atgaaactcgttattgaagaaattgtagaaaatggttgctctttagccaatgaaataaaaatagatggcaacacggcgtttggcttgaacaaacgctaccccaacatacaaaccatcatcaagggcgatgaaacaatcgctcaaatcgctatggcgtctgttttggcgaaagcttctaaggatagggaaatgttagaactgcacgctttgtttaaggaatacggctgggataagaattgcgggtatgggactaaacaacatatagaagcgatcaataagctaggggctacgctttcatcggcatag

SEQ ID NO: 4363 - DNA (genomic), 363 bp, Helicobacter pylori; double-stranded, circular
  misc_feature (B) LOCATION 1...363
  hypothetical: NO
  anti-sense: NO
agaaattgtagaaaatggttgtctttagccaatgaaataaaaatagatggcaacacggtgtttggcttgaacaaacgctaccccaacatacaaaccatcatcaagggcgatgaaacaatcgctcaaatcgctatggcgcctgttttggcgaaagcttctaaggatagggaaatgttagaactgcacgctttgtttaaggaatacggctgggataagaattgcgggtatgggactaaacaacatatagaagcgatcaataagctaggggctacgcctctcatcggcataggcttcacgcttaaaaaccgcaacttaaatcccaaactcttagaggtggaacaacgcccgtgtttaaaatggcgc

SEQ ID NO: 4364 - DNA (genomic), 564 bp, Helicobacter pylori; double-stranded, circular
  misc_feature (B) LOCATION 1...564
  hypothetical: NO
  anti-sense: NO
ttgggttgcgtatcaatgactctaggtattgatgaagcggggagggggtgtttggccggttcgctttttgtggcgggggtggtgtgtaatgaaaaaatagccttagaatttctaaaaatgggtcttaaggatagcaagaagctcagccccaaaaagcgctttttcttagaagataaaatcaaaacgcatggtgaggtggggtttttcgtggttaaaaaaagcgcgaatgaaattgatcatttgggcttaggggcgtgtttgaaactcgctattgaagaaattgtagaaaatggttgctctttagccaatgaaataaaaatagatggcaacacggcgtttggcttgaacaaacgctaccccaacatacaaaccatcatcaagggcgatgaaacaatcgctcaaatcgctatggcgtctgttttggcgaaagcttctaaggatagggaaatgttagaactgcacgctttgtttaaggaatacggctgggataagaattgcgggtatgggactaaacaacatatagaagcgatcaataagctaggggctacgctttcatcggcatag

SEQ ID NO: 4365 - DNA (genomic), 615 bp, Helicobacter pylori; double-stranded, circular
  misc_feature (B) LOCATION 1...615
  hypothetical: NO
  anti-sense: NO
atgactctaggtattgatgaagcggggagggggtgtttggccggttcgctttttgtggcgggggtggtgtgtaatgaaaaaatagccttagaatttctaaaaatgggtcttaaggatagcaagaagctcagccccaaaaagcgctttttcttagaagataaaatcaaaacgcatggtgaggtggggtttttcgtggttaaaaaaagcgcgaatgaaattgatcatttgggcttaggggcgtgtttgaaactcgctattgaagaaattgtagaaaatggttgctctttagccaatgaaataaaaatagatggcaacacggcgtttggcttgaacaaacgctaccccaacatacaaaccatcatcaagggcgatgaaacaatcgctcaaatcgctatggcgtctgttttggcgaaagcttctaaggatagggaaatgttagaactgcacgctttgtttaaggaatacggctgggataagaattgcgggtatgggactaaacaacatatagaagcgatcaataagctaggggctacgccttttcatcggcatagcttcacgcttaaaaaccgcatcttaaatcccaaactcttagaggtggaacaacgccttgtttaa

SEQ ID NO: 4366 - DNA (genomic), 195 bp, Helicobacter pylori; double-stranded, circular
  misc_feature (B) LOCATION 1...195
  hypothetical: NO
  anti-sense: NO
atggctttagggggggcgagttctgaaagcaagattgccgctaaggctaaagagagcgcggctttagggcaagtgaatgaagtggaatcctacttaaaagacgtcaaagccctagcccctattgatggggaagtgagtaacgtgcttttaagcggtggcgagcttagccctaagggcttcctgtggtgctcatga

SEQ ID NO: 4367 - DNA (genomic), 252 bp, Helicobacter pylori; double-stranded, circular
  misc_feature (B) LOCATION 1...252
  hypothetical: NO
  anti-sense: NO
agcctatgcggctatgaaagcaccaaatacaacgagagcgcggcttaccaaaagtataaaatggctttagggggggcgagttctgaaagcaagattgccgctaaggctaaagagagcgcggctttagggcaagtgaatgaagtggaatcctacttaaaagacgtcaaagccctagcccctattgatggggaagtgagtaacgtgcttttaagcggtggcgagcttagccctaagggcttcctgtggtgctca

SEQ ID NO: 4368 - DNA (genomic), 291 bp, Helicobacter pylori; double-stranded, circular
  misc_feature (B) LOCATION 1...291
  hypothetical: NO
  anti-sense: NO
gtggtgctcatgatagatttaaaggatagttggttaaaaatcagcgtgcctgaaaagtatttgaacgagtttaaagtgggtaaggaatttgaaggctatatcccagcgttgaaaagaagcgcgaaattcagggtcaaatatttgagcgtgatgggggattttgcgacctggaaagcgacgaataattccaacacttacgacatgaaaagctatgaagtggaggccatacccttagaagagttggaaaactttagggtggggatgagcgtgttggttaccattaaaccttaa

SEQ ID NO: 4369 - DNA (genomic), 297 bp, Helicobacter pylori; double-stranded, circular
  misc_feature (B) LOCATION 1...297
  hypothetical: NO
  anti-sense: NO
gggcttcctgtggtgctcatgatagatttaaaggatagttggttaaaaatcagcgtgcctgaaaagtatttgaacgagtttaaagtgggtaaggaatttgaaggctatatcccagcgttgaaaagaagcgcgaaattcagggtcaaatatttgagcgtgatgggggattttgcgacctggaaagcgacgaataattccaacacttacgacatgaaaagctatgaagtggaggccatacccttagaagagttggaaaactttagggtggggatgagcgtgttggttaccattaaacct

SEQ ID NO: 4370 - DNA (genomic), 525 bp, Helicobacter pylori; double-stranded, circular
  misc_feature (B) LOCATION 1...525
  hypothetical: NO
  anti-sense: NO
atgtcaaatagcatgttggataaaaataaagcgattcttacagggggtggggctttattgttagggctaatcgtgcttttttatttggcttatcgccctaaggctgaagtgttgcaagggtttttagaggctagggaatacagcgtgagctctaaagtccctggccgcattgaaaaggtgtttgttaaaaaaggcgatcgcattaaaaagggcgatttagtttttagcatttctagccctgaattagaagccaagctcgctcaagctgaagccgggcataaagccgctaaagccgttagcgatgaagtgaaaagaggctcaagagatgaaacgatcaattctgcgagggacgtttggcaagcggcaaaatcccaagcgaatttggctaaagagacttataagcgcgttcaagatttgtatgacaatggcgtggcgagtttgcaaaagcgcgatgaagcctatgcggctatgaaagcaccaaatacaacgagagcgcggcttaccaaaagtataaaatggctttag

SEQ ID NO: 4371 - DNA (genomic), 546 bp, Helicobacter pylori; double-stranded, circular
  misc_feature (B) LOCATION 1...546
  hypothetical: NO
  anti-sense: NO
atttgtttattaaaggaaaaaatcatgtcaaatagcatgttggataaaaataaagcgattcttacagggggtggggctttattgttagggctaatcgtgcttttttatttggcttatcgccctaaggctgaagtgttgcaagggtttttagaggctagggaatacagcgtgagctctaaagtccctggccgcattgaaaaggtgtttgttaaaaaaggcgatcgcattaaaaagggcgatttagtttttagcatttctagccctgaattagaagccaagctcgctcaagctgaagccgggcataaagccgctaaagccgttagcgatgaagtgaaaagaggctcaagagatgaaacgatcaattctgcgagggacgtttggcaagcggcaaaatcccaagcgaatttggctaaagagacttataagcgcgttcaagatttgtatgacaatggcgtggcgagtttgcaaaagcgcgatgaagcctatgcggctatgaaagcaccaaatacaacgagagcgcggcttaccaaaagtataaaatggctt

SEQ ID NO: 4372 - DNA (genomic), 990 bp, Helicobacter pylori; double-stranded, circular
  misc_feature (B) LOCATION 1...990
  hypothetical: NO
  anti-sense: NO
atgtcaaatagcatgttggataaaaataaagcgattcttacagggggtggggctttattgttagggctaatcgtgcttttttatttggcttatcgccctaaggctgaagtgttgcaagggtttttagaggctagggaatacagcgtgagctctaaagtccctggccgcattgaaaaggtgtttgttaaaaaaggcgatcgcattaaaaagggcgatttagtttttagcatttctagccctgaattagaagccaagctcgctcaagctgaagccgggcataaagccgctaaagccgttagcgatgaagtgaaaagaggctcaagagatgaaacgatcaattctgcgagggacgtttggcaagcggcaaaatcccaagcgaatttggctaaagagacttataagcgcgttcaagatttgtatgacaatggcgtggcgagtttgcaaaagcgcgatgaagcctatgcggcttatgaaagcaccaaatacaacgagagcgcggcttaccaaaagtataaaatggctttagggggggcgagttctgaaagcaagattgccgctaaggctaaagagagcgcggctttagggcaagtgaatgaagtggaatcctacttaaaagacgtcaaagccctagcccctattgatggggaagtgagtaacgtgcttttaagcggtggcgagcttagccctaagggctttcctgtggtgctcatgatagatttaaaggatagttggttaaaaatcagcgtgcctgaaaagtatttgaacgagtttaaagtgggtaaggaatttgaaggctatatcccagcgttgaaaagaagcgcgaaattcagggtcaaatatttgagcgtgatgggggattttgcgacctggaaagcgacgaataattccaacacttacgacatgaaaagctatgaagtggaggccatacccttagaagagttggaaaactttagggtggggatgagcgtgttggttaccattaaaccttaa

SEQ ID NO: 4373 - DNA (genomic), 384 bp, Helicobacter pylori; double-stranded, circular
  misc_feature (B) LOCATION 1...384
  hypothetical: NO
  anti-sense: NO
aaagtagggccaatttgcatgagtaagagcgcgatttttgttctttctggctttttagcgttcttgctctatgctttgttattatatggtttgttgttagaaaggcataataaagaagcagagaaaatccttttagatttaaataaaaaggacgaacaagccattgacttgaatttagaagatctgccaagcgagaaaaagaatgaaaaaattgaaaaagtaacggaaaaacagggcgattttttagagcctaaagaagaacccaaagaagagcctgaagaaagccttgaagatattttttcttcactcaatgattttcaagaaagacagacaaaaacgctcaaaaagacgagcaaaaaaatgaacaagaagaacaaaggcgtt

SEQ ID NO: 4374 - DNA (genomic), 492 bp, Helicobacter pylori; double-stranded, circular
  misc_feature (B) LOCATION 1...492
  hypothetical: NO
  anti-sense: NO
ttttcaagaaagacagacaaaaacgctcaaaaagacgagcaaaaaaatgaacaagaagaacaaaggcgtttaagagagcaacaacgcttgaaacaaaaccaagaaaaccaagagatgttgaaaggtttgcaacaaaatttgaatcaattcacgcaaaaattagaaagcgttaaaaacaagactttagatttgcaaatccctaaacaagatggggttgatgaaaaggcttatcaagagtggtacgctcaaatctatcaaattttatataaaggctggaggggcgttttttatcacaaggcttcagtgagcgtgctgattatgatcactaaagatggagagtttgattataccattcttagctactctgattttaaggattataacaagagcgtgatgacccttttagatgatttaaagaaagtggatttccccccatatcctggaggaaacatgatttctattaaagttaattttacgactaaggaagaacaa

SEQ ID NO: 4375 - DNA (genomic), 792 bp, Helicobacter pylori; double-stranded, circular
  misc_feature (B) LOCATION 1...792
  hypothetical: NO
  anti-sense: NO
atgagtaagagcgcgatttttgttctttctggctttttagcgttcttgctctatgctttgttattatatggtttgttgttagaaaggcataataaagaagcagagaaaatccttttagatttaaataaaaaggacgaacaagccattgacttgaatttagaagatctgccaagcgagaaaaagaatgaaaaaattgaaaaagtaacggaaaaacagggcgattttttagagcctaaagaagaacccaaagaagagcctgaagaaagccttgaagatattttttcttcactcaatgattttcaagaaaagacagacaaaaacgctcaaaaagacgagcaaaaaaatgaacaagaagaacaaaggcgtttaagagagcaacaacgcttgaaacaaaaccaagaaaaccaagagatgttgaaaggtttgcaacaaaatttgaatcaattcacgcaaaaattagaaagcgttaaaaacaagactttagatttgcaaatccctaaacaagatggggttgatgaaaaggcttatcaagagtggtacgctcaaatctatcaaattttatataaaggctggaggggcgttttttatcacaaggcttcagtgagcgtgctgattatgatcactaaagatggagagtttgattataccattcttagctactctgattttaaggattataacaagagcgtgatgacccttttagatgatttaaagaaagtggatttccccccatatcctggaggaaacatgatttctattaaagttaattttacgactaaggaagaacaatga

SEQ ID NO: 4376 - DNA (genomic), 207 bp, Helicobacter pylori; double-stranded, circular
  misc_feature (B) LOCATION 1...207
  hypothetical: NO
  anti-sense: NO
atgaatagttctaacctcaaaaattggctattccccactatttgcttttttttattttgttatattttaatttttttgatattttttatgtttaaaaacttgcaatcgcaatcttttggctctgtggcagaaaccggaaaaaaacccatcaccaccaccaagaaatttggtaaggaattgcaaaaacagatttcaaaaatccattaa

SEQ ID NO: 4377 - DNA (genomic), 216 bp, Helicobacter pylori; double-stranded, circular
  misc_feature (B) LOCATION 1...216
  hypothetical: NO
  anti-sense: NO
aaaggcaaggtcatgaatagttctaacctcaaaaattggctattccccactatttgcttttttttattttgttatattttaatttttttgatattttttatgtttaaaaacttgcaatcgcaatcttttggctctgtggcagaaaccggaaaaaaacccatcaccaccaccaagaaatttggtaaggaattgcaaaaacagatttcaaaaatccat

SEQ ID NO: 4378 - DNA (genomic), 501 bp, Helicobacter pylori; double-stranded, circular
  misc_feature (B) LOCATION 1...501
  hypothetical: NO
  anti-sense: NO
caaacagcggacaattactattcttccttacagagcgaacacatcaattccccccttgtcccagaagctatgctagctttagggcaagcgcacatgaaaaagaaagagtatgttttagcgtctttttactttgatgaatacatcaagcgctttgggacgaaggacaatgtgaattatttgacctttttgaaactgcaatcgcattattacgctttcaaaaaccattctaaagaccaggaatttatctctaattctattgtgagtttaggcgaatttatagaaaaataccctaacagccgttaccgccccaaagtagataacaggcaaatcaaattcattttagggcaaaatgagctcaatcgcgcgatcgcgaatgtctataaaaaacgccacaagcccgagggcgtgaaacgctatttagaaaggatagatgagactttagaaaaagagactaaacccaaaccatcgcacatgccttggtatgtgttaatttttgattgg

SEQ ID NO: 4379 - DNA (genomic), 699 bp, Helicobacter pylori; double-stranded, circular
  misc_feature (B) LOCATION 1...699
  hypothetical: NO
  anti-sense: NO
gtggttcaaaaatttaatttttataagacaggtggcatgcgtttaaaacattttaagacattcctttttatcacaatggcggtgattgtgataggcactggttgtgcgaataaaaagaaaaaaaaagatgaatacaacaaaccggcgatcttttggtatcaagggattttgagagaaattctttttgctaatttagaaacagcggacaattactattcttccttacagagcgaacacatcaattccccccttgtcccagaagctatgctagctttagggcaagcgcacatgaaaaagaaagagtatgttttagcgtctttttactttgatgaatacatcaagcgctttgggacgaaggacaatgtggattatttgacctttttgaaactgcaatcgcattattacgctttcaaaaaccattctaaagaccaggaatttatctctaattctattgtgagtttaggcgaatttatagaaaaataccctaacagccgttaccgcccctatgtagaatacatgcaaatcaaattcattttagggcaaaatgagctcaatcgcgcgatcgcgaatgtctataaaaaacgccacaagcccgagggcgtgaaacgctatttagaaaggatagatgagactttagaaaaagagactaaacccaaaccatcgcacatgccttggtatgtgttaatttttgattggtag

SEQ ID NO: 4380 - DNA (genomic), 204 bp, Helicobacter pylori; double-stranded, circular
  misc_feature (B) LOCATION 1...204
  hypothetical: NO
  anti-sense: NO
ttggatctagaccctatcggcaacgccatgccccaaactttagctcaaacagagacccaaaaatctcaaatagaaaaatctctaatagaggaagctcagacgcaaaaatctcaagaaatgaaagaggcagctagcgagcaagccattaagaagccgctagaaaaagaaaaagataaccccatgtatttgcgctcaaatcaatag

SEQ ID NO: 4381 - DNA (genomic), 240 bp, Helicobacter pylori; double-stranded, circular
  misc_feature (B) LOCATION 1...240
  hypothetical: NO
  anti-sense: NO
cgtgatggggagaattgctacattaaagacgatgcgtttgcttctgaagtggccctaaaagaattgctttattggaaaacgcgctaccatgacaacctaaaagacatgatcaagtcttacaataagggcagtcgtagggaagaacacgagaaagctaacgctgatgctgcaatatattatgaagagatacaagatagaatcaggcgtctgcccgcatctaagatcttagaactcgctgta

SEQ ID NO: 4382 - DNA (genomic), 252 bp, Helicobacter pylori; double-stranded, circular
  misc_feature (B) LOCATION 1...252
  hypothetical: NO
  anti-sense: NO
aactcgctgtatagtcatgaccgagaattgcaaaaaagcgctaatagcaatttggatctagaccctatcggcaactccatgccccaaactttagctcaaacagagacccaaaaatctcaaatagaaaaatctcaaatagaggaagctcaaacgcaaaaatctcaagaaatgaaagaggcagctagcgagcaagccattaagaagccgctagaaaaagaaaaagataaccccatgtatttgcgctcaaatcaa

SEQ ID NO: 4383 - DNA (genomic), 654 bp, Helicobacter pylori; double-stranded, circular
  misc_feature (B) LOCATION 1...654
  hypothetical: NO
  anti-sense: NO
ttgaaacatttagccccactcattcatatcccttttaaagccttatggctaggcacagccttaagcatgttcttaagtttgaatttgaacgctgaagaaaaccctactaaaacagagcctaagcccgctaaaggggttaaaaacaagcccaaatcgcctgttactaatgtcatgatgaccaattgcgataaccttaaagactttaacgctaagcaaaaagaagttttaaaagccgcttatcaattcggatctaaagaaaatttaggctatgaaatggcgggcattgcgtggaaagaatcatgcgcagggacttataaaatcaatttttcgaatccgagtgcgggcatttaccatgcgtatatccctagcgttttaaaaagctatgggcataataatagcccctttttgcgtaacgtgatgggggaattgctcattaaagacgatgcgtttgcttctgaagtggccctaaaagaattgctatattggaaaacgcgctaccatgacaacctaaaagacatgatcaagtcttacaataagggcagtcgttgggaaaaaaacgagaaagctaacgctgatgctgaaaaatattatgaagagatacaagatagaatcaggcgtttgaaagaatctaaaatctttgaactcgcagtctag

SEQ ID NO: 4384 - DNA (genomic), 666 bp, Helicobacter pylori; double-stranded, circular
  misc_feature (B) LOCATION 1...666
  hypothetical: NO
  anti-sense: NO
gcatttctttatattcattcaatagcgcttgcgcgggtaattcttcaactaaaacctctactaacaattcatctgaatgcaaaatctcaatcctccctaaaaaacaaaatcactcttaagaataagctaaatcatgctagaattatacttgaatttattcctagtttaatttatttcttaatacaaaaggtgagcgttttgaaacatttagccccactcattcatatcccttttaaagccttatggctaggcacagccttaagcatgttcttaagtttgaatttgaacgctgaagaaaaccctactaaaacagagcctaagcccgctaaaggggttaaaaacaagcccaaatcgcctgttactaatgtcatgatgaccaattgcgataaccttaaagactttaacgctaagcaaaaagaagttttaaaagccgcttatcaattcggatctacagaaaatttaggctatgaaatggcgggcattgcgtggaaagaatcatgcgcagggacttataaaatcaatttttcgaatccgagtgcgggcatttaccatgcgtatatccctagcgttttaaaaagctatgggcataataatagcccctttttgcgtaacgtgatggggagaattgctacattaaagacgatgcgtttgcttctgaagtggccc

SEQ ID NO: 4385 - DNA (genomic), 1215 bp, Helicobacter pylori; double-stranded, circular
  misc_feature (B) LOCATION 1...1215
  hypothetical: NO
  anti-sense: NO
ctgaatgcaaaatctcaatcctccctaaaaaacaaaatcactcttaagaataagctaaatcatgctagaattatacttgaatttattcctagtttaatttatttcttaatacaaaaggtgagcgttttgaaacatttagccccactcattcatatcccttttaaagccttatggctaggcacagccttaagcatgttcttaagtttgaatttgaacgctgaagaaaaccctactaaaacagagcctaagcccgctaaaggggttaaaaacaagcccaaatcgcctgttactaatgtcatgatgaccaattgcgataaccttaaagactttaacgctaagcaaaaagaagttttaaaagccgcttatcaattcggatctaaagaaaatttaggctatgaaatggcgggcattgcgtggaaagaatcatgcgcagggacttataaaatcaatttttcggatccgagtgcgggcatttaccatgcgtatatccctagcgttttaaaaagctatgggcataataatagcccctttttgcgtaacgtgatgggggaattgctcattaaagacgatgcgtttgcttctgaagtggccctaaaagaattgctctattggaaaacgcgctaccatgacaacctaaaagacatgatcaagtcttacaataagggcagtcgttgggaaaaaaacgagaaagctaacgctgatgctgaaaaatattatgaagagatacaagatagaatcaggcgtttgaaagaatctaaaatctttgactcgcagtctagtaatgaccaagaattgcaaaaaagcgctaatagcaatttggatctagaccctatcggcaacgccatgccccaaactttagctcaaacagagacccaaaaatctcaaatagaaaaatctcaaatagaggaagctcaaacgcaaaaatctcaagaaatgaaagaggcagctagcgagcaagccattaagaagccgctagaaaaagaaaaagataaacccatgtatttggctcaaatcaatagtgctgatttcgcgcccgctaaaaaaagcccaaaaaaaccggctaaagcgagtccaaaacgctcctctaaaaataatatcagcgttaaaagcaacaccaaaaccgcttccaaaaataaagaagtgtgcaaaaattgctctccagggcaaaggaatgcgattttagctaaccatatcaccctcatgcaagagctttaa

SEQ ID NO: 4386 - DNA (genomic), 894 bp, Helicobacter pylori; double-stranded, circular
  misc_feature (B) LOCATION 1...894
  hypothetical: NO
  anti-sense: NO
ttggttaaaataaggttatttgattttactataaggttgtttaaacctgaatttcacatttttgattttttaaaagggattagagttcttatgattgaatggatgcaaaatcatagaaagtatttagtggttacgatatggataagcacgatcgcttttattgccgccggaatgataggttgggggcaatacagcttttctttagatagcgatagcgctgccaaagtgggacagattaagatttctcaagaagaattagcccaagaataccgccgccttaaagacgcctatgctgagtctatccctgattttaaagaactcaccgaagatcaaatcaaagccatgcatttagaaaaaagcgcgctagattcgctcatcaatcaagctttattgaggaatttcgctttagatttagggcttggtgctaccaagcaagaagtggccaaagagatcagaaaaacgaacgtttttcaaaaagatggcgtttttgatgaagaattgtataaaaatatcttaaaacaaagccattaccgccccaagcattttgaagaaagcgttgaaaggcttttaatccttcaaaaaatcagcgctctattccccaaaaccaccacccctttggagcaatccagtctatcgctttgggcaaaattgcaagacaaattagacattcttatcctaaatcctaatgatgttaaaatctctctcaatgaagaagagatgaaaaaatattatgaaaaccatagaaaggattttaaaaagcccacaagctttaaaacacgctctttatattttgacgctagtttagaaaaaactgatttgaaagagttggaggaatactaccataaaaacaaggtgtcttatttggacaamagmggggaaattacaggattttaa

SEQ ID NO: 4387 - DNA (genomic), 1464 bp, Helicobacter pylori; double-stranded, circular
  misc_feature (B) LOCATION 1...1464
  hypothetical: NO
  anti-sense: NO
atgattgaatggatgcaaaatcatagaaagtatttagtggttacgatatggataagcacgatcgcttttattgccgccggaatgataggttgggggcaatacagcttttctttagatagcgatagcgctgccaaagtgggacagattaagatttctcaagaagaattagcccaagaataccgccgccttaaagacgcctatgctgagtctatccctgattttaaagaactcaccgaagatcaaatcaaagccatgcatttagaaaaaagcgcgctagattcgctcatcaatcaagctttattgaggaatttcgctttagatttagggcttggtgctaccaagcaagaagtggccaaagagatcagaaaaacgaacgtttttcaaaaagatggcgtttttgatgaagaattgtataaaaatatcttaaaacaaagccattaccgccccaagcattttgaagaaagcgttgaaaggcttttaatccttcaaaaaatcagcgctctattccccaaaaccaccacccctttggagcaatccagtctatcgctttgggcaaaattgcaagacaaattagacattcttatcctaaatcctaatgatgttaaaatctctctcaatgaagaagagatgaaaaaatattatgaaaaccatagaaaggattttaaaaagcccacaagctttaaaacacgctctttatattttgacgctagtttagaaaaaactgatttgaaagagttggaggaatactaccataaaaacaaggtgtcttatttggacaaagaggggaaattacaggattttaaaagcgttcaagagcaagtcaagcatgatttaaacatgcaaaaggcgaatgaaaaagccttaaggagctatatcgctctaaaaaaggggaacgcacaaaactacaccacgcaagattttgaaaaaaacaactccccctatactgctgaaatcacgcaaaaactcaccgctctcaagccccttgaagtcctaaaaccagagccttttaaagatggttttatcgtggtgcagcttgtctctcaaattaaagacgaattgcaaaattttgatgaagccaaaagcgctcttaaaacccgtctgactcaagaaaaaacccttatggcgttgcaaactttagctaaagaaaagcttaaggattttaaagggaaaagcgtgggttatgtaagccctaattttggaggcactatcagtgaacttaaccaagaagagagcgcgaagtttatcaacaccctttttaaccgccaggaaaaaaaagggtttgtaaccataggtaataaagtggtgctttatcaaatcacagagcaaaatttcaatcacccctttagtgcagaagaaaaccaatacatgcagcgtttagtcaataacactaaaacggatttttttgataaagcgttgatagaagaattgaaaaaacgctataagatagtcaaatacattcaataa

SEQ ID NO: 4388 - DNA (genomic), 1554 bp, Helicobacter pylori; double-stranded, circular
  misc_feature (B) LOCATION 1...1554
  hypothetical: NO
  anti-sense: NO
cctttggttaaaataaggttatttgattttactataaggttgtttaaacctgaatttcacatttttgattttttaaaagggattagagttcttatgattgaatggatgcaaaatcatagaaagtatttagtggttacgatatggataagcacgatcgcttttattgccgccggaatgataggttgggggcaatacagcttttctttagatagcgatagcgctgccaaagtgggacagattaagatttctcaagaagaattagcccaagaataccgccgccttaaagacgcctatgctgagtctatccctgattttaaagaactcaccgaagatcaaatcaaagccatgcatttagaaaaaagcgcgctagattcgctcatcaatcaagctttattgaggaatttcgctttagatttagggcttggtgctaccaagcaagaagtggccaaagagatcagaaaaacgaacgtttttcaaaaagatggcgtttttgatgaagaattgtataaaaatatcttaaaacaaagccattaccgccccaagcattttgaagaaagcgttgaaaggcttttaatccttcaaaaaatcagcgctctattccccaaaaccaccacccctttggagcaatccagtctatcgctttgggcaaaattgcaagacaaattagacattcttatcctaaatcctaatgatgttaaaatctctctcaatgaagaagagatgaaaaaatattatgaaaaccatagaaaggattttaaaaagcccacaagctttaaaacacgctctttatattttgacgctagtttagaaaaaactgatttgaaagagttggaggaatactaccataaaaacaaggtgtcttatttggacaaagaggggaaattacaggattttaaaagcgttcaagagcaagtcaagcatgatttaaacatgcaaaaggcgaatgaaaaagccttaaggagctatatcgctctaaaaaaggggaacgcacaaaactacaccacgcaagattttgaaaaaaacaactccccctatactgctgaaatcacgcaaaaactcaccgctctcaagccccttgaagtcctaaaaccagagccttttaaagatggttttatcgtggtgcagcttgtctctcaaattaaagacgaattgcaaaattttgatgaagccaaaagcgctcttaaaacccgtctgactcaagaaaaaacccttatggcgttgcaaactttagctaaagaaaagcttaaggattttaaagggaaaagcgtgggttatgtaagccctaattttggaggcactatcagtgaacttaaccaagaagagagcgcgaagtttatcaacaccctttttaaccgccaggaaaaaaaagggtttgtaaccataggtaataaagtggtgctttatcaaatcacagagcaaaatttcaatcacccctttagtgcagaagaaaaccaatacatgcagcgtttagtcaataacactaaaacggatttttttgataaagcgttgatagaagaattgaaaaaacgctataagatagtcaaatacattcaa

SEQ ID NO: 4389 - DNA (genomic), 2106 bp, Helicobacter pylori; double-stranded, circular
  misc_feature (B) LOCATION 1...2106
  hypothetical: NO
  anti-sense: NO
gtggcgcgtcttgtggttaaaaggcgtaaaattgattataaacaaagcattcaatctgactctcaatacttgcaagcgascttgaatcagtttgaaaataaagaagtgtatgagaatcagtattttttagttttagaaagcactcactctttgcatggcgttttggagcataagaaaaaatctttcatgcacgctaatagagaaaattttaaggatattctctcttataaagcgcattttttgcaagaaactttaaaaagcttagaaatccagctcaaaaactatgcccccaaactcttaaactctaaagaggttttgaatttttatgcagaatatattaatgggtttgaactccctttaaaacccctagtaggggggtatttgagcgatagctatatcgctagttctatcacttttgaaaaagattatttcattcaagaaagctttaatcaaaaaacctataaccgcttgattggcattaaagcttatgagagcgaaaggatcacttctatagcggtgggagcgcttttataccaagagacgcctttggatattatcttttccatagagcctatgagcgtcaataaaacgctgagttttttaaaagagagggccaagtttagcatgtctaatcttgttaaaaacgagctattagaataccaagaattagtcaaaaccaaacgattatccatgcaaaaattcgccctaaacgttcttatcaaagcccccagtttggaggatttagacgctcaaaccagcttaattttagggcttttatttaaagaaaacttagtgggcgttatagaaacttttggcttgaaaggggggtatttttcctttttccctgaacgcatccatttaaaccaccgcttgcgttttttaacctctaaagccctagcgtgtttgatggtgtttgaaaggcaaaatttaggttttaaggctaattcatgggggaatagccctttgagcgtgtttaaaaatttggattattccccttttttattcaatttccacaaccaagaagtgagccataataacgctaaagaaattgccagagtgaatgggcatactttagttataggggcaaccggaagcggtaaaagcacgctgattagctatttaatgatgagcgctttaaaataccaaaacatgcgccttttagcttttgacaggatgcaagggttgtattctttcaccgaattttttaaagggcattaccatgacggccaatcttttagtatcaaccccttttgtttagagcctaatttgcagaatttagaatttttgcaatccttttttttgagcatgttggatcttgccccttcaagggataaagaagccttagaagacatgaatgcgatttctggcgcgattaagagcctttatgagaccttataccccaaagattttagtttgctggattttaaagaaacgcttaaaagaacctcatctaaccaattgggcttgagtttagagccgtatttgaataaccccctttttaacgctttgaatgacgcgttcaactccaacgcttttttaaatgtgataaacctagatgcgatcacccaaaaccctaaagacttagggcttttagcctattacttgttttataagatcttagaagagtctaggaaaaacgacagcggctttttggtttttttagacgaatttaaatcctatgtggaaaacgatttgttaaacactaaaatcaacgctttaatcacgcaagccaggaaagctaatggcgtggtggtgttggccttgcaagacatttaccaacttagcggggttaaaaacgcccatagttttttaagcaacatggggactctcattttgtatccgcaaaaaaacgctagggaattgaaacacaatttcaatgtgcctttgagcgaaactgaaatttcttttttagaaaacacccctctgtatgccaggcaggttttagtcaaaaatctgggtaacgggagttccaacatgattgatgtgagtttggagggcttggggtgttatttgaaaatctttaattcagattccagtcatgtcaataaagtgaaagcgttacaaaaagactaccctacagagtggcgtgagaaacttttgaagagt

SEQ ID NO: 4390 - DNA (genomic), 2364 bp, Helicobacter pylori; double-stranded, circular
  misc_feature (B) LOCATION 1...2364
  hypothetical: NO
  anti-sense: NO
atgttagaaaagcttttaagcgctatcaaacaaaaagtttcaaactattttttaggggttttgcctaaaagctattctatgagcgaagaaaacaacattttaggcttgtatgatgagcattttttgctcactaaaaacgaaaacttagtgggcatcctccgtttagagggggttagctacacccatttaagcacagagcaattgcaagatcttttcactgagcgccaaatggcgttagattctttagaaaaagtcgtggcgcgtcttgtggttaaaaggcgtaaaattgattataaacaaagcattcaatctgactctcaatacttgcaagcgatcttgaatcagtttgaaaataaagaagtgtatgagaatcagtattttttagttttagaaagcactcactctttgcatggcgttttggagcataagaaaaaatctttcatgcacgctaatagagaaaattttaaggatattctctcttataaagcgcattttttgcaagaaactttaaaaagcttagaaatccagctcaaaaactatgcccccaaactcttaaactctaaagaggttttgaatttttatgcagaatatattaatgggtttgaactccctttaaaacccctagtaggggggtatttgagcgatagctatatcgctagttctatcacttttgaaaaagattatttcattcaagaaagctttaatcaaaaaacctataaccgcttgattggcattaaagcttatgagagcgaaaggatcacttctatagcggtgggagcgcttttataccaagagacgcctttggatattatcttttccatagagcctatgagcgtcaataaaacgctgagttttttaaaagagagggccaagtttagcatgtctaatcttgttaaaaacgagctattagaataccaagaattagtcaaaaccaaacgattatccatgcaaaaattcgccctaaacgttcttatcaaagcccccagtttggaggatttagacgctcaaaccagcttaattttagggcttttatttaaagaaaacttagtgggcgttatagaaacttttggcttgaaaggggggtatttttcctttttccctgaacgcatccatttaaaccaccgcttgcgttttttaacctctaaagccctagcgtgtttgatggtgtttgaaaggcaaaatttaggttttaaggctaattcatgggggaatagccctttgagcgtgtttaaaaatttggattattccccttttttattcaatttccacaaccaagaagtgagccataataacgctaaagaaattgccagagtgaatgggcatactttagttataggggcaaccggaagcggtaaaagcacgctgattagctatttaatgatgagcgctttaaaataccaaaacatgcgccttttagcttttgacaggatgcaagggttgtattctttcaccgaattttttaaagggcattaccatgacggccaatcttttagtatcaaccccttttgtttagagcctaatttgcagaatttagaatttttgcaatccttttttttgagcatgttggatcttgccccttcaagggataaagaagccttagaagacatgaatgcgatttctggcgcgattaagagcctttatgagaccttataccccaaagattttagtttgctggattttaaagaaacgcttaaaagaacctcatctaaccaattgggcttgagtttagagccgtatttgaataaccccctttttaacgctttgaatgacgcgttcaactccaacgcttttttaaatgtgataaacctagatgcgatcacccaaaaccctaaagacttagggcttttagcctattacttgttttataagatcttagaagagtctaggaaaaacgacagcggctttttggtttttttagacgaatttaaatcctatgtggaaaacgatttgttaaacactaaaatcaacgctttaatcacgcaagccaggaaagctaatggcgtggtggtgttggccttgcaagacatttaccaacttagcggggttaaaaacgcccatagttttttaagcaacatggggactctcattttgtatccgcaaaaaaacgctagggaattgaaacacaatttcaatgtgcctttgagcgaaactgaaatttcttttttagaaaacacccctctgtatgccaggcaggttttagtcaaaaatctgggtaacgggagttccaacatgattgatgtgagtttggagggcttggggtgttatttgaaaatctttaattcagattccagtcatgtcaataaagtgaaagcgttacaaaaagactaccctacagagtggcgtgagaaacttttgaagagttag

SEQ ID NO: 4391 - DNA (genomic), 2391 bp, Helicobacter pylori; double-stranded, circular
  misc_feature (B) LOCATION 1...2391
  hypothetical: NO
  anti-sense: NO
agactaaaaccaaatgttatagagcgtaggatgttagaaaagcttttaagcgctatcaaacaaaaagtttcaaactattttttaggggttttgcctaaaagctattctatgagcgaagaaaacaacattttaggcttgtatgatgagcattttttgctcactaaaaacgaaaacttagtgggcatcctccgtttagagggggttagctacacccatttaagcacagagcaattgcaagatcttttcactgagcgccaaatggcgttagattctttagaaaaagtcgtggcgcgtcttgtggttaaaaggcgtaaaattgattataaacaaagcattcaatctgactctcaatacttgcaagcgatcttgaatcagtttgaaaataaagaagtgtatgagaatcagtattttttagttttagaaagcactcactctttgcatggcgttttggagcataagaaaaaatctttcatgcacgctaatagagaaaattttaaggatattctctcttataaagcgcattttttgcaagaaactttaaaaagcttagaaatccagctcaaaaactatgcccccaaactcttaaactctaaagaggttttgaatttttatgcagaatatattaatgggtttgaactccctttaaaacccctagtaggggggtatttgagcgatagctatatcgctagttctatcacttttgaaaaagattatttcattcaagaaagctttaatcaaaaaacctataaccgcttgattggcattaaagcttatgagagcgaaaggatcacttctatagcggtgggagcgcttttataccaagagacgcctttggatattatcttttccatagagcctatgagcgtcaataaaacgctgagttttttaaaagagagggccaagtttagcatgtctaatcttgttaaaaacgagctattagaataccaagaattagtcaaaaccaaacgattatccatgcaaaaattcgccctaaacgttcttatcaaagcccccagtttggaggatttagacgctcaaaccagcttaattttagggcttttatttaaagaaaacttagtgggcgttatagaaacttttggcttgaaaggggggtatttttcctttttccctgaacgcatccatttaaaccaccgcttgcgttttttaacctctaaagccctagcgtgtttgatggtgtttgaaaggcaaaatttaggttttaaggctaattcatgggggaatagccctttgagcgtgtttaaaaatttggattattccccttttttattcaatttccacaaccaagaagtgagccataataacgctaaagaaattgccagagtgaatgggcatactttagttataggggcaaccggaagcggtaaaagcacgctgattagctatttaatgatgagcgctttaaaataccaaaacatgcgccttttagcttttgacaggatgcaagggttgtattctttcaccgaattttttaaagggcattaccatgacggccaatcttttagtatcaaccccttttgtttagagcctaatttgcagaatttagaatttttgcaatccttttttttgagcatgttggatcttgccccttcaagggataaagaagccttagaagacatgaatgcgatttctggcgcgattaagagcctttatgagaccttataccccaaagattttagtttgctggattttaaagaaacgcttaaaagaacctcatctaaccaattgggcttgagtttagagccgtatttgaataaccccctttttaacgctttgaatgacgcgttcaactccaacgcttttttaaatgtgataaacctagatgcgatcacccaaaaccctaaagacttagggcttttagcctattacttgttttataagatcttagaagagtctaggaaaaacgacagcggctttttggtttttttagacgaatttaaatcctatgtggaaaacgatttgttaaacactaaaatcaacgctttaatcacgcaagccaggaaagctaatggcgtggtggtgttggccttgcaagacatttaccaacttagcggggttaaaaacgcccatagttttttaagcaacatggggactctcattttgtatccgcaaaaaaacgctagggaattgaaacacaatttcaatgtgcctttgagcgaaactgaaatttcttttttagaaaacacccctctgtatgccaggcaggttttagtcaaaaatctgggtaacgggagttccaacatgattgatgtgagtttggagggcttggggtgttatttgaaaatctttaattcagattccagtcatgtcaataaagtgaaagcgttacaaaaagactaccctacagagtggcgtgagaaacttttgaagagt

SEQ ID NO: 4392 - DNA (genomic), 1050 bp, Helicobacter pylori; double-stranded, circular
  misc_feature (B) LOCATION 1...1050
  hypothetical: NO
  anti-sense: NO
atggaaaattttaaactcatcaacttttttaccggtcaaaacgatgcgggtaaaaccaatcttttagaagctctttataccaacacaggcctttgtgatcctactgccaatcaagtcagtcttcctcctgaacatgccgtgaatattagtgaattcagaaaaatcaaactcgatgccgacaacctaaaaacctttttttatcaaggaaacaccgctaatcccattagtatccgcactgaatttgaacatgctactatccctcttactatccaataccccacacaaaccagttacagcaaagacatcaatttgaatagcgatgatgctcatatgacaaaccttataaacacaacaataacgaagccacagctccaattttcctacaatccatccctttcccccatgacaatgacttatgaatttgaaaggcaaaacctaggtttaatccattctaatttagataaaatcgctcaaacctataaagaaaatgcgatgtttattcctatagaattatctattgttaattctcttaaagcattggaaaatttacaattagcaagcaaagaaaaagaattgattgaaatcctacaatgtttcaaccctaatattttaaatgctaatacaataagaaagtctgtctatatccaaatcaaagatgaaaacacaccgctagaagaaagtcccaaaaggcttttaaatttgtttggttggggttttatcaaattctttattatggtgagcattcttatagacaatcgtgtcaagtatctttttattgatgaaatagaaagcggtttgcaccatacaaaaatgcaagagtttttaaaagctctgtttaagttagctcaaaaattacagattcaaatttttgccaccacgcacaataaggaatttttattaaacgccatcaacacgatatccgataatgaaacgggagtttttaaagacatagccttgtttgagcttgaaaaagaaagcgcttctgrctttatcagacacagctattctatgctagaaaaagcgctttataggggtatggaggttagaggc

SEQ ID NO: 4393 - DNA (genomic), 1104 bp, Helicobacter pylori; double-stranded, circular
  misc_feature (B) LOCATION 1...1104
  hypothetical: NO
  anti-sense: NO
atgattaaaagcgtagagattgaaaattacaaaaattttgagcaccttaaaatggaaaattttaaactcatcaacttttttaccggtcaaaacgatgcgggtaaaaccaatcttttagaagctctttataccaacacaggcctttgtgatcctactgccaatcaagtcagtcttcctcctgaacatgccgtgaatattagtgaattcagaaaaatcaaactcgatgccgacaacctaaaaacctttttttatcaaggaaacaccgctaatcccattagtatccgcactgaatttgaacatgctactatccctcttactatccaataccccacacaaaccagttacagcaaagacatcaatttgaatagcgatgatgctcatatgacaaaccttataaacacaacaataacgaagccacagctccaattttcctacaatccatccctttcccccatgacaatgacttatgaatttgaaaggcaaaacctaggtttaatccattctaatttagataaaatcgctcaaacctataaagaaaatgcgatgtttattcctatagaattatctattgttaattctcttaaagcattggaaaatttacaattagcaagcaaagaaaaagaattgattgaaatcctacaatgtttcaaccctaatattttaaatgctaatacaataagaaagtctgtctatatccaaatcaaagatgaaaacacaccgctagaagaaagtcccaaaaggcttttaaatttgtttggttggggttttatcaaattctttattatggtgagcattcttatagacaatcgtgtcaagtatctttttattgatgaaatagaaagcggtttgcaccatacaaaaatgcaagagtttttaaaagctctgtttaagttagctcaaaaattacagattcaaatttttgccaccacgcacaataaggaatttttattaaacgccatcaacacgatatccgataatgaaacgggagtttttaaagacatagccttgtttgagcttgaaaaagaaagcgcttctggctttatcagacacagctattctatgctagaaaaagcgctttataggggtatggaggttagaggctga

SEQ ID NO: 4394 - DNA (genomic), 1143 bp, Helicobacter pylori; double-stranded, circular
  misc_feature (B) LOCATION 1...1143
  hypothetical: NO
  anti-sense: NO
acttggcggtatcaactaggctcattaaaaggcaaaatccaaatgattaaaagcgtagagattgaaaattacaaaaattttgagcaccttaaaatggaaaattttaaactcatcaacttttttaccggtcaaaacgatgcgggtaaaaccaatcttttagaagctctttataccaacacaggcctttgtgatcctactgccaatcaagtcagtcttcctcctgaacatgccgtgaatattagtgaattcagaaaaatcaaactcgatgccgacaacctaaaaacctttttttatcaaggaaacaccgctaatcccattagtatccgcactgaatttgaacatgctactatccctcttactatccaataccccacacaaaccagttacagcaaagacatcaatttgaatagcgatgatgctcatatgacaaaccttataaacacaacaataacgaagccacagctccaattttcctacaatccatccctttcccccatgacaatgacttatgaatttgaaaggcaaaacctaggtttaatccattctaatttagataaaatcgctcaaacctataaagaaaatgcgatgtttattcctatagaattatctattgttaattctcttaaagcattggaaaatttacaattagcaagcaaagaaaaagaattgattgaaatcctacaatgtttcaaccctaatattttaaatgctaatacaataagaaagtctgtctatatccaaatcaaagatgaaaacacaccgctagaagaaagtcccaaaaggcttttaaatttgtttggttggggttttatcaaattctttattatggtgagcattcttatagacaatcgtgtcaagtatctttttattgatgaaatagaaagcggtttgcaccatacaaaaatgcaagagtttttaaaagctctgtttaagttagctcaaaaattacagattcaaatttttgccaccacgcacaataaggaatttttattaaacgccatcaacacgatatccgataatgaaacgggagtttttaaagacatagccttgtttgagcttgaaaaagaaagcgcttctggctttatcagacacagctattctatgctagaaaaagcgctttataggggtatggaggttagaggc

SEQ ID NO: 4395 - DNA (genomic), 162 bp, Helicobacter pylori; double-stranded, circular
  misc_feature (B) LOCATION 1...162
  hypothetical: NO
  anti-sense: NO
tcttattttagaccgaacgcaagcagcggtgaaaaaccgcaatttttagacgaattgctcttaaggcccatgagcgctaaactcttagagcctacttttatggaaaaaaagggttgggttgatagggaaaagcttttagatgtgagtggtagggggcgtgcc

SEQ ID NO: 4396 - DNA (genomic), 168 bp, Helicobacter pylori; double-stranded, circular
  misc_feature (B) LOCATION 1...168
  hypothetical: NO
  anti-sense: NO
attggatgcggattttgttttgagcggggaagtgctaggcaacgccctaaatcccaaaggaaagaagcgctcaatcaggtgaggaaattagtcagagaagtgggcgaagaggctcgttttgatcttattttagaccgaacgcaagcagcggtgaaaaaccgcaatttt

SEQ ID NO: 4397 - DNA (genomic), 273 bp, Helicobacter pylori; double-stranded, circular
  misc_feature (B) LOCATION 1...273
  hypothetical: NO
  anti-sense: NO
aggaataaagataaaagagagtattttgaaaacgccaccgcgcaaattggggctaaactcttggtgtgcgatattagagagcagttctttaacgatgtgttgttcaagcccaaatacggctatgggaagtatttcaacccttgcattgattgccatgccaacatgtttaggaacgctttttataaaatgcttgaattggatgcggattttgttttgagcggggaagtgctaggcaacgccctaaatcccaaaggaaagaagcgctcaatcagg

SEQ ID NO: 4398 - DNA (genomic), 462 bp, Helicobacter pylori; double-stranded, circular
  misc_feature (B) LOCATION 1...462
  hypothetical: NO
  anti-sense: NO
ggggcgtgcctaggcaattgccaaatgatcaaagattatggcttgaaatattatgaaaagccaggtggggggtgcttgcttacggacattcaagtgagtaataagattaagaatttgaaagaatacagagaaatggtgtttgaagatggcgtgattgtcaaaaacgggcgttattttgtcctaccccataacgctcgtttggtggtggcaaggaatgaagaagaaaaccataaattagacattgaacaccccttaatggataagattgaattgctaggctgtaaaggtcctttgagtttggtggataaaaacgccagccaagaagataaagaattggccggtcgtatcgctttaggctatgctaagactttaaaaaatcaagcttacctcattcaaatagggaatgaaaagcgcgaactttaccctttggataaagagaacgctagggagtatttgttcgct

SEQ ID NO: 4399 - DNA (genomic), 1053 bp, Helicobacter pylori; double-stranded, circular
  misc_feature (B) LOCATION 1...1053
  hypothetical: NO
  anti-sense: NO
atgaaacaaataaaagctttagccttatttagtggggggttggatagtttgttgtccatgaaattactcattgatcaaggcattgaagtaaccgctttacacttcaatatagggtttggagggaataaagataaaagagagtattttgaaaacgccaccgcgcaaattggggctaaactcttggtgtgcgatattagagagcagttctttaacgatgtgttgttcaagcccaaatacggctatgggaagtatttcaacccttgcattgattgccatgccaacatgtttaggaacgctttttataaaatgcttgaattggatgcggattttgttttgagcggggaagtgctagggcaacgccctaaatcccaaaggaaagaagcgctcaatcaggtgaggaaattagtcagagaagtgggcgaagaggctcgttttgatcttattttagaccgaacgcaagcaagcggtgaaaaaccgcaatttttagacgaattgctcttaaggcccatgagcgctaaactcttagagcctacttttatggaaaaaaagggttgggttgatagggaaaagcttttagatgtgagtggtagggggcgtgctaggcaattgcaaatgatcaaagattatggcttgaaatattatgaaaagccaggtggggggtgcttgcttacggacattcaagtgagtaataagattaagaatttgaaagaatacagagaaatggtgtttgaagatggcgtgattgtcaaaaacgggcgttattttgtcctaccccataacgctcgtttggtggtggcaaggaatgaagaagaaaaccataaattagacattgaacaccccttaatggataagattgaattgctaggctgtaaaggtcctttgagtttggtggataaaaacgccagccaagaagataaagaattggccggtcgtatcgctttaggctatgctaagactttaaaaaatcaagcttacctcattcaaatagggaatgaaaagcgcgaactttaccctttggataaagagaacgctagggagtatttgttcgcttga

SEQ ID NO: 4400 - DNA (genomic), 762 bp, Helicobacter pylori; double-stranded, circular
  misc_feature (B) LOCATION 1...762
  hypothetical: NO
  anti-sense: NO
atggcatacaaatatgatagagacttggaatttttaaagcaactggaatctagtgatttattggatttgttcgaggtgcttgtttttggtaaagacggcgaaaaaagacacaatgaaaaactcacaagctccatagaatacaaaaggcatggcgatgattacgctaaatacgcagaaagaatcgctgaagagttgcaatactatgggagcaatagttttgcgagtttcattaaaggtgaaggagtcttatacaaagagattttatgcgatgtgtgcgataaattaaaggtcaattacaacaagaaaactgaaacgactttaattgaacaaaacatgctttctaaaatcttagaaagaagcctagaagaaatggatgatgaagaagtgaaagaaatgtgcgatgaattgtccataaaaaacacggacaatttgaacagacaagccttaagcgcggcgactttaacgctgtttaaaatgggaggctttaaatcttatcaattagctgtcattgttgcgaatgcggttgcaaaaaccattctagggcgtggtttatcgcttgcgggcaatcaagtgcttacaagaactctgagctttttaacaggccctgttggctggatcattacaggcgtatggacagcgattgatattgcagggccggcttatagggtaaccataccggcatgcattgtggtcgccactttacgcctaaaaacgcaacaagccaatgaagataagaagtcgttgcaaatagaatccgtttaa

SEQ ID NO: 4401 - DNA (genomic), 762 bp, Helicobacter pylori; double-stranded, circular; identical to SEQ ID NO: 4400
  misc_feature (B) LOCATION 1...762
  hypothetical: NO
  anti-sense: NO

SEQ ID NO: 4402 - DNA (genomic), 768 bp, Helicobacter pylori; double-stranded, circular
  misc_feature (B) LOCATION 1...768
  hypothetical: NO
  anti-sense: NO
aggaataatatggcatacaaatatgatagagacttggaatttttaaagcaactggaatctagtgatttattggatttgttcgaggtgcttgtttttggtaaagacggcgaaaaaagacacaatgaaaaactcacaagctccatagaatacaaaaggcatggcgatgattacgctaaatacgcagaaagaatcgctgaagagttgcaatactatgggagcaatagttttgcgagtttcattaaaggtgaaggagtcttatacaaagagattttatgcgatgtgtgcgataaattaaaggtcaattacaacaagaaaactgaaacgactttaattgaacaaaacatgctttctaaaatcttagaaagaagcctagaagaaatggatgatgaagaagtgaaagaaatgtgcgatgaattgtccataaaaaacacggacaatttgaacagacaagccttaagcgcggcgactttaacgctgtttaaaatgggaggctttaaatcttatcaattagctgtcattgttgcgaatgcggttgcaaaaaccattctagggcgtggtttatcgcttgcgggcaatcaagtgcttacaagaactctgagctttttaacaggccctgttggctggatcattacaggcgtatggacagcgattgatattgcagggccggcttatagggtaaccataccggcatgcattgtggtcgccactttacgcctaaaaacgcaacaagccaatgaagataagaagtcgttgcaaatagaatccgtt

SEQ ID NO: 4403 - DNA (genomic), 267 bp, Helicobacter pylori; double-stranded, circular
  misc_feature (B) LOCATION 1...267
  hypothetical: NO
  anti-sense: NO
aggattaaaatgatttctcaaatgctcattcaagccacgctagaaacgctttatatggtgtttgtggcgagttttttggcggttgtttttggcttgcctttgggggttttattgttagtgagtaaaaaagggcatctgttaaacaaaccccttttgcataagattttagacacttctatcaacacgactcgctctttcccttttatcattttgattattttgctcctgcctttatcagcgctttttgattggcacaagcattggatc

SEQ ID NO: 4404 - DNA (genomic), 441 bp, Helicobacter pylori; double-stranded, circular
  misc_feature (B) LOCATION 1...441
  hypothetical: NO
  anti-sense: NO
ttattttgctcctgcctttatcagcgctttttgattggcacaagcattggatctagcgcgagcattatcccgttagccatttcggccattccttttgttgtaaagctttttgaaaattctttaatggaagtagagcatggcaagattgaaaccactttaagcttgggggcgtctcatttggaagtcattaaaatgatgcttttagagagcctgccttctttagtgaataatatcaccatcactttaatttctctaataggctattcggctatggctggagcgttaggggctgggggattgggggatttagccattaggattggctatcaaagttataggggcgatgtgcttttttatgcggtggtcgtgatcatcgttttagtgcaaatcattcaaagcgcgggggattatgtggtgaaacgcttgagaaagaataagtat

SEQ ID NO: 4405 - DNA (genomic), 648 bp, Helicobacter pylori; double-stranded, circular
  misc_feature (B) LOCATION 1...648
  hypothetical: NO
  anti-sense: NO
atgatttctcaaatgctcattcaagccacgctagaaacgctttatatggtgtttgtggcgagttttttggcggttgtttttggcttgcctttgggggttttattgttagtgagtaaaaaagggcatctgttaaacaaaccccttttgcataagattttagacacttctatcaacacgactcgctctttcccttttatcattttgattattttgctcctgcctttatcgcgctttttgattggcacaagcattggatctagcgcgagcattatcccgttagccatttcggccattccttttgtcgcaaagctttttgaaaattctttaatggaagtagagcatggcaagattgaaaccactttaagcttgggggcgtctcatttggaagtcattaaaatgatgcttttagagagcctgccttctttagtgaataatatcaccatcactttaatttctctaataggctattcggctatggctggagcgttaggggctgggggattgggggatttagccattaggattggctatcaaagttataggggcgatgtgcttttttatgcggtggtcgtgatcatcgttttagtgcaaatcattcaaagcgcgggggattatgtggtgaaacgcttgagaaagaataagtattag

SEQ ID NO: 4406 - DNA (genomic), 276 bp, Helicobacter pylori; double-stranded, circular
  misc_feature (B) LOCATION 1...276
  hypothetical: NO
  anti-sense: NO
atgtcagatgaaatcacgcaagaaaacgagttagaaattaactccaataatcaaaaccaagagccaaaggaagtagaaaaaatgccattgaataatattcaaaaagctaagaaattaaaaaaccacgccaatttaattgttcgacgcactgatgagttagataaggttatcaataagcgtgaaagcttgcaaagagagtttaaaagacgcattaagcacttggataacaagattgaaacgcttagtaacaatattgaagaattaaaaagaaagtaa

SEQ ID NO: 4407 - DNA (genomic), 315 bp, Helicobacter pylori; double-stranded, circular
  misc_feature (B) LOCATION 1...315
  hypothetical: NO
  anti-sense: NO
cgttcaactacgcttatttattttaattttaaggagccaatgatgtcagatgaaatcacgcaagaaaacgagttagaaattaactccaataatcaaaaccaagagccaaaggaagtagaaaaaatgccattgaataatattcaaaaagctaagaaattaaaaaaccacgccaatttaattgttcgacgcactgatgagttagataaggttatcaataagcgtgaaagcttgcaaagagagtttaaaagacgcattaagcacttggataacaagattgaaacgcttagtaacaatattgaagaattaaaaagaaag

SEQ ID NO: 4408 - DNA (genomic), 1215 bp, Helicobacter pylori; double-stranded, circular
  misc_feature (B) LOCATION 1...1215
  hypothetical: NO
  anti-sense: NO
gctcacgccaaccgcaccatcatccacaggattgatgatagcatcgcgcagcgcgtggataatgccattcgccccatgcgtttggttagagggtttgcccccctttacctcactttacccaaacgctcttttaatgcgcccaaaaagattttagcgcttggagcggagcaaaaagggcattttagcttactagatagcgaaacttctgttcttttactctcgcctttttgtggggatttgagcgttttagaaaatgaaaaacactttaaagaaactttgaattttttcttaaaaacctatgatttcaaacccacgctcttagcttgcgatgagcatcaaaactacaccaccaccaaaatggcttttgattttaatacgcccttgttgcaagtccagcaccaccatgcccactttttagcgagcgtcttagacgcattattacaagatccgcatttaaatcacccctttataggtattgtttgggacgggagtggggcttatgaaaataagatttatggggcggagtgttttgtgggggatttggaacgcattgaagaagtggctagatttgaagaattttggcttttaggggggcaaaaagcgatcaaagagcctagaagattggttttagaaatcgctttaaaacaccagctcaacaagcttttaaaacgcgttcaaaagcatttcaaagaagacgaattaggaatttttaaacaaatgcatgacaaaaaaattcaaagcgtcgccaccaattccatagggcgtttgtttgatatagtggcgtttagtttgggcgtggtgggaacgattagttttgaagccgagagcgggcaggttttagaaaatctagccctacaaagcgatgagatcgctttttacccttttgaaatcaaaaacagcgtggtgcgtttgaaggaattttatcaagcgtttgaaaaggatttgggcgttttagaacccaaacgcatcgctaagaaattttttaacagcttagtagaaatcattaccgctttgattgcgccttttaaagggcatgtcgtggtgtgcagtgggggcgtgttttgcaaccaattgttgtgcgaacaattagccaagcgattgaaaaagcttcaaagggagtattttttccacaagcatttcccccctaatgacagcagtatccctgtcggtcaagccttaatggcgtatttcaaccctacaatcatcaaaaaagga

SEQ ID NO: 4409 - DNA (genomic), 1236 bp, Helicobacter pylori; double-stranded, circular
  misc_feature (B) LOCATION 1...1236
  hypothetical: NO
  anti-sense: NO
tactttaatcaaacagcatgggagtttgcattgtgtaacgatgcaactttattgaacaaaatcacgctttttggcgtggttcaaggcgtgggcatgcgcccttttgtttatatcctggctcaaaaattagggcttgtaggctttgtgcgtaacgcccaagcggctttagaaatcgtcttacccgctcacaaaacagagtcttttttaaacgccctaaaaaaaggattaccccctttagcgttggtggaaaaaatcattattagcccttatgataaggcgcttcatttcaatgattttaggattttagaaagcaagaaccaccccttaaatctgctcagtcaaatccctaaagatttaggcgtgtgtgaggattgcttgtgcgagattagagataaaaactccccctattttcattacgctttcaattcttgcgcgaaatgcggagcgagatacagccttttaaacgccatgccctatgacagagaaaactccgccttaaaacctttcaagctctgcaaattttgcgcatccgtttataaagacgctcataacaaacgattccatattcaaggcataagttgcaaaaagtgcggtatcgcgctcaattataagcgattcaaaaatgatgacgctcttttagaatgcgctaaagacattcaaaagggtaaaatcatcgctcttaaaggtttggggggctttgctctcttgtgcgatgcgaggaattttaaaaccatagagaggttacggcttttaaaaaaccgccccttaaagcctttcgcgctcatgtttaaagatctaaacgcagccaagcagcatgcgtttttgaacgcgttagaatgcgaaagcttaaattcggtaagtgcccccattcttttagcgcgtaaaaaacctgacacccaattagcccccaatatcgctaaaaactcccccttttatggcgttatcttgccctatacccctttgcatgctttattgctagatttattagattcccctattgtattcacgagtgcgaatttcagctccctccctttagcgagcgatgaaaaagagatcgattcgcttcattttatttttgattttaagctcacgccaaccgcaccatcatccacaggattgatgatagcatcgcgcagcgcgtggataatgccattcgccccatgcgtttggttagagggtttgcccccctttacctcactttacccaaacgctcttttaatgcgcccaaaaagattt

SEQ ID NO: 4410 - DNA (genomic), 2274 bp, Helicobacter pylori; double-stranded, circular
  misc_feature (B) LOCATION 1...2274
  hypothetical: NO
  anti-sense: NO
ttgtgtaacgatgcaactttattgaacaaaatcacgctttttggcgtggttcaaggcgtgggcatgcgcccttttgtttatatcctggctcaaaaattagggcttgtaggctttgtgcgtaacgcccaagcggctttagaaatcgtcttacccgctcacaaaacagagtcttttttaaacgccctaaaaaaaggattaccccctttagcgttggtggaaaaaatcattattagcccttatgataaggcgcttcatttcaatgattttaggattttagaaagcaagaaccaccccttaaatctgctcagtcaaatccctaaagatttaggcgtgtgtgaggattgcttgtgcgagattagagataaaaactccccctattttcattacgctttcaattcttgcgcgaaatgcggagcgagatacagccttttaaacgccatgccctatgacagagaaaactccgccttaaaacctttcaagctctgcaaattttgcgcatccgtttataaagacgctcataacaaacgattccatattcaaggcataagttgcaaaaagtgcggtatcgcgctcaattataagcgattcaaaaatgatgacgctcttttagaatgcgctaaagacattcaaaagggtaaaatcatcgctcttaaaggtttggggggctttgctctcttgtgcgatgcgaggaattttaaaaccatagagaggttacggcttttaaaaaaccgccccttaaagcctttcgcgctcatgtttaaagatctaaacgcagccaagcagcatgcgtttttgaacgcgttagaatgcgaaagcttaaattcggtaagtgcccccattcttttagcgcgtaaaaaacctgacacccaattagcccccaatatcgctaaaaactcccccttttatggcgttatcttgccctatacccctttgcatgctttattgctagatttattagattcccctattgtattcacgagtgcgaatttcagctccctccctttagcgagcgatgaaaaagagatcgattcgcttcattttatttttgattttaagctcacgcacaaccgcaccatcatccacaggattgatgatagcatcgcgcagcgcgtggataatgccattcgccccatgcgtttggttagagggtttgcccccctttacctcactttacccaaacgctcttttaatgcgcccaaaaagattttagcgcttggagcggagcaaaaagggcattttagcttactagatagcgaaacttctgttcttttactctcgcctttttgtggggatttgagcgttttagaaaatgaaaaacactttaaagaaactttgaattttttcttaaaaacctatgatttcaaacccacgctcttagcttgcgatgagcatcaaaactacaccaccaccaaaatggcttttgattttaatacgcccttgttgcaagtccagcaccaccatgcccactttttagcgagcgtcttagacgcattattacaagatccgcatttaaatcacccctttataggtattgtttgggacgggagtggggcttatgaaaataagatttatggggcggagtgttttgtgggggatttggaacgcattgaagaagtggctagatttgaagaattttggcttttaggggggcaaaaagcgatcaaagagcctagaagattggttttagaaatcgctttaaaacaccagctcaacaagcttttaaaacgcgttcaaaagcatttcaaagaagacgaattaggaatttttaaacaaatgcatgacaaaaaaattcaaagcgtcgccaccaattccatagggcgtttgtttgatatagtggcgtttagtttgggcgtggtgggaacgattagttttgaagccgagagcgggcaggttttagaaaatctagccctacaaagcgatgagatcgctttttacccttttgaaatcaaaaacagcgtggtgcgtttgaaggaattttatcaagcgtttgaaaaggatttgggcgttttagaacccaaacgcatcgctaagaaattttttaacagcttagtagaaatcattaccgctttgattgcgccttttaaagggcatgtcgtggtgtgcagtgggggcgtgttttgcaaccaattgttgtgcgaacaattagccaagcgattgaaaaagcttcaaagggagtattttttccacaagcatttcccccctaatgacagcagtatccctgtcggtcaagccttaatggcgtatttcaaccctacaatcatcaaaaaaggataa

SEQ ID NO: 4411 - DNA (genomic), 132 bp, Helicobacter pylori; double-stranded, circular
  misc_feature (B) LOCATION 1...132
  hypothetical: NO
  anti-sense: NO
gataatcaatttttaaaaaatgaaaggttattattgcttgtttcttactttttaaacgctattgacccttttaatttaggggtgttgttgagccgtttccaaattaaaaatggtcgtctttatttgataaaa

SEQ ID NO: 4412 - DNA (genomic), 561 bp, Helicobacter pylori; double-stranded, circular
  misc_feature (B) LOCATION 1...561
  hypothetical: NO
  anti-sense: NO
ttgttgcttgtttctcgctttttaaacgccattgatccttttaatttaggggtgttgttgagccgtttccaaattaaaaatggttgtatttatggggtgtgttcttacaaggtttcaaaatttacccctggatatgaagaaagcaaagcgcgagttttaaacgctctcaatattttaagcaagcatcaaatttggcaatccaatcaagaaagcgttacaaaagtcaaaggaacttttgttttcattttagaaaatgacctgcatttagacgaaaactctttttataagaaacttttaaatctgattatagacaatgacttttttaaccgctctcatttagtaactccgagcaatggcaccaactcccaccctgaattgcaccgctctatcacgcccagagaagccgctaggatacaaagttttagcgatgattatatcttttatggcaataaaacgagcgtttgcaagcaaatcggtaacgccgtgcctcctcttctagccctagccttaggcaaagcgatcttaaaaagcgcaagaaatgatacaaatccatcacgctaa

SEQ ID NO: 4413 - DNA (genomic), 582 bp, Helicobacter pylori; double-stranded, circular
  misc_feature (B) LOCATION 1...582
  hypothetical: NO
  anti-sense: NO
tcctttaaaaaaaatgaaaggttattgttgcttgtttctcgctttttaaacgccattgatccttttaatttaggggtgttgttgagccgtttccaaattaaaaatggttgtatttatggggtgtgttcttacaaggtttcaaaatttacccctggatatgaagaaagcaaagcgcgagttttaaacgctctcaatattttaagcaagcatcaaatttggcaatccaatcaagaaagcgttacaaaagtcaaaggaacttttgttttcattttagaaaatgacctgcatttagacgaaaactctttttataagaaacttttaaatctgattatagacaatgacttttttaaccgctctcatttagtaactccgagcaatggcaccaactcccaccctgaattgcaccgctctatcacgcccagagaagccgctaggatacaaagttttagcgatgattatatcttttatggcaataaaacgagcgtttgcaagcaaatcggtaacgccgtgcctcctcttctagccctagccttaggcaaagcgatcttaaaaagcgcaagaaatgatacaaatccatcacgc

SEQ ID NO: 4414 - DNA (genomic), 423 bp, Helicobacter pylori; double-stranded, circular
  misc_feature (B) LOCATION 1...423
  hypothetical: NO
  anti-sense: NO
atggagtcgaatcawtcactccccatggcattaatatcatgctcacctaacgctaaaggggcggacattaaaggctataacggcttagtgggggaattgattgaaaggaatttccaacgctatggcgtgccgttactgctttctacgctcactaacggcctattgattgggatcacttcggctttaaacaacagaggcaataaagaagaggtgactaatttctttggggattatcttttattgcaattgatgaggcaaagcggcatggggatcaatcaagtggtcaatcaaattttaagagacaagagcaagatcgcccccattgtggtgattagagaggggagtagggtcttcatttcgcccaatactgacatcttcttccctatacccagagagaatgaagtcatcgctgagtttttgaag

SEQ ID NO: 4415 - DNA (genomic), 1125 bp, Helicobacter pylori; double-stranded, circular
  misc_feature (B) LOCATION 1...1125
  hypothetical: NO
  anti-sense: NO
aataagtggattaaaggggcggttgtttttgtagggggttttgcaacgattacaaccttttctttaatctaccaccaaaagccaaaagcccccctaaataaccagcctagccttttgaatgacgatgaggtgaaataccccttacaagactacactttcactcaaaacccacagccaactaacacggaaagctccaaagacgctaccatcaaagccttacaagaacagctcaaagccgctttaaaagccctaaactccaaagaaatgaattattccaaagaagagacttttactagccctcccatggatccaaaaacaaccccccctaaaaaagacttttctccaaaacaattagatttactggcctctcgcatcacccctttcaagcaaagccctaaaaattacgaagaaaacctgattttccctgtggataaccctaatggcattgatagtttcactaaccttaaagaaaaagacatcgccactaatgaaaacaagcttttacgcaccattacagctgacaaaatgatacccgcttttttgattacgcccatttctagccagatcgctggtaaagtgattgcgcaagtggagagcgatatttttgcaagcatgggcaaagccgtcttaatccccaaaggctctaaagtcataggctattacagcaacaataacaaaatgggcgaataccgcttggatattgtatggagtcgaatcatcactccccatggcattaatatcatgctcactaacgctaaaggggcggacattaaaggctataacggcttagtgggggaattgattgaaaggaatttccaacgctatggcgtgccgttactgctttctacgctcactaacggcctattgattgggatcacttcggctttaaacaacagaggcaataaagaagaggtgactaatttctttggggattatcttttattgcaattgatgaggcaaagcggcatggggatcaatcaagtggtcaatcaaattttaagagacaagagcaagatcgcccccattgtggtgattagagaggggagtagggtcttcatttcgcccaatactgacatcttcttccctatacccagagagaatgaagtcatcgctgagtttttgaag

SEQ ID NO: 4416 - DNA (genomic), 1131 bp, Helicobacter pylori; double-stranded, circular
  misc_feature (B) LOCATION 1...1131
  hypothetical: NO
  anti-sense: NO
gtgaataagtggattaaaggggcggttgtttttgtagggggttttgcaacgattacaaccttttctttaatctaccaccaaaagccaaaagcccccctaaataaccagcctagccttttgaatgacgatgaggtgaaataccccttacaagactacactttcactcaaaacccacagccaactaacacggaaagctccaaagacgctaccatcaaagccttacaagaacagctcaaagccgctttaaaagccctaaactccaaagaaatgaattattccaaagaagagacttttactagccctcccatggatccaaaaacaaccccccctaaaaaagacttttctccaaaacaattagatttactggcctctcgcatcacccctttcaagcaaagccctaaaaattacgaagaaaacctgattttccctgtggataaccctaatggcattgatagtttcactaaccttaaagaaaaagacatcgccactaatgaaaacaagcttttacgcaccattacagctgacaaaatgatacccgcttttttgattacgcccatttctagccagatcgctggtaaagtgattgcgcaagtggagagcgatatttttgcaagcatgggcaaagccgtcttaatccccaaaggctctaaagtcataggctattacagcaacaataacaaaatgggcgaataccgcttggatattgtatggagtcgaatcatcactccccatggcattaatatcatgctcactaacgctaaaggggcggacattaaaggctataacggcttagtgggggaattgattgaaaggaatttccaacgctatggcgtgccgttactgctttctacgctcactaacggcctattgattgggatcacttcggctttaaacaacagaggcaataaagaagaggtgactaatttctttggggattatcttttattgcaattgatgaggcaaagcggcatggggatcaatcaagtggtcaatcaaattttaagagacaagagcaagatcgcccccattgtggtgattagagaggggagtagggtcttcatttcgcccaatactgacatcttcttccctatacccagagagaatgaagtcatcgctgagtttttgaagtga

SEQ ID NO: 4417 - DNA (genomic), 285 bp, Helicobacter pylori; double-stranded, circular
  misc_feature (B) LOCATION 1...285
  hypothetical: NO
  anti-sense: NO
agatttagccagattcatcgctctcgctatgagaatatcgctcaaatgcctagcgtgatgaatgtcggctctggagtggattacagcattgaagagtattacgaaaaagtcgctcaggttttagactataagggcgtgtttgtgaaagattcatccaaaccagtgggcatgcaacaaaagcttatggatatttccaaacaaaaggctttaaaatgggaattagaaatccctttagagcagggcatcaaagaagcttatgagtattatttgaagcttttagaggtt

SEQ ID NO: 4418 - DNA (genomic), 642 bp, Helicobacter pylori; double-stranded, circular
  misc_feature (B) LOCATION 1...642
  hypothetical: NO
  anti-sense: NO
ggaatttttatgaatgagatcattttaatcaccggcgcttatggcatggtggggcagaacacggcgttgtattttaaaaaaaacaagcctgatgttaccttactcacccctaaaaagagcgaattgtatttgttggataaagacaacgttcaagcctatttgaaagaatacaagcctacaggcattatccattgtgccgggagagtggggggcattgtggcaaacatgaacgatctttcaacttacatggttgagaatttactcatgggtttgtatcttttttctagcgctttagatttgggcgtgaaaaaagccattaatctagcgagctcttgcgcttatcctaaatacgcccctaaccctttaaaagagagcgatttattgaacggctctttagaaccaacgaatgaaggctacgctttagccaaactctctgtgatgaagtattgcgaatacgtgagcgctgaaaaaggcgttttttataaaactctagtgccttgtaacctttatggcgagtttgacaagtttgaagaaaagatagcgcacatgataccagggcttattgctaggatgcacaccgctaaattaaaaaatgaaaaaaattttgcgatgtggggcgatggcacggccgaagagagtatc

SEQ ID NO: 4419 - DNA (genomic), 933 bp, Helicobacter pylori; double-stranded, circular
  misc_feature (B) LOCATION 1...933
  hypothetical: NO
  anti-sense: NO
atgaatgagatcattttaatcaccggcgcttatggcatggtggggcagaacacggcgttgtattttaaaaaaaacaagcctgatgttaccttactcacccctaaaaagagcgaattgtatttgttggataaagacaacgttcaagcctatttgaaagaatacaagcctacaggcattatccattgtgccgggagagtggggggcattgtggcaaacatgaacgatctttcaacttacatggttgagaatttactcatgggtttgtatcttttttctagcgctttagatttgggcgtgaaaaaagccattaatctagcgagctcttgcgcttatcctaaatacgcccctaaccctttaaaagagagcgatttattgaacggctctttagaaccaacgaatgaaggctacgctttagccaaactctctgtgatgaagtattgcgaatacgtgagcgctgaaaaaggcgttttttataaaactctagtgccttgtaacctttatggcgagtttgacaagtttgaagaaaagatagcgcacatgataccagggcttattgctaggatgcacaccgctaaattaaaaaatgaaaaaaattttgcgatgtggggcgatggcacggccagaagagagtatctaaacgctaaagatttagccagattcatcgctctcgcttatgagaatatcgctcaaatgcctagcgtgatgaatgtcggctctggagtggattacagcattgaagagtattacgaaaaagtcgctcaggttttagactataagggcgtgtttgtgaaagattcatccaaaccagtgggcatgcaacaaaagcttatggatatttccaaacaaaaggctttaaaatgggaattagaaatccctttagagcagggcatcaaagaagcttatgagtattatttgaagcttttagaggtttga

SEQ ID NO: 4420 - DNA (genomic), 243 bp, Helicobacter pylori; double-stranded, circular
  misc_feature (B) LOCATION 1...243
  hypothetical: NO
  anti-sense: NO
atgatgtttgaattaaccaaaaaaaccaaatttgatggcgaaatgattggctacacagaagaacttttaacctttttagttagagatttttttaatgggatttttaaatccaaagtaatacctaaaatgcctattttttgcggtgatgttaaatgcgaagattttaatgccctaagaagtttagtttatctttctgtgcttgagttggaagaaacgataaatcctaataaaatcccattttaa

SEQ ID NO: 4421 - DNA (genomic), 258 bp, Helicobacter pylori; double-stranded, circular
  misc_feature (B) LOCATION 1...258
  hypothetical: NO
  anti-sense: NO
ctaagtttaaataaaaaaatgatgtttgaattaaccaaaaaaaccaaatttgatggcgaaatgattggctacacagaagaacttttaacctttttagttagagatttttttaatgggatttttaaatccaaagtaatacctaaaatgcctattttttgcggtgatgttaaatgcgaagattttaatgccctaagaagtttagtttatctttctgtgcttgagttggaagaaacgataaatcctaataaaatcccattt

SEQ ID NO: 4422 - DNA (genomic), 447 bp, Helicobacter pylori; double-stranded, circular
  misc_feature (B) LOCATION 1...447
  hypothetical: NO
  anti-sense: NO
aaaaagagaaaatacatgcgttttagaagagttaaaaagcacaaaaataaacacaataaggagcatacaagtatggatttacaacaaattgatgagctagaaaagaagtttgaagaacaagaagaacaagcccaagatacccccctaaaacaagagcctagcacaaaggaagtaaaaatccctaaaaaaagggggcgtaaaaaaagcttgttagatgaagataagaaaaagagctttaacattgcctttagtccttgtgtgataaaagaacttaatgaatttttgctagaatttggctcatttaaagagacacgaagcacttttattgaagaagcgcttattaggcatttaaaacacagaaaaaacacccaagagcaaaagcttttaaagcaactagaaagattacaaaacaaagaaaagggcaataatgaaaacaatgaacttgaa

SEQ ID NO: 4423 - DNA (genomic), 534 bp, Helicobacter pylori; double-stranded, circular
  misc_feature (B) LOCATION 1...534
  hypothetical: NO
  anti-sense: NO
aaatctagctccaagtcccttgaatacgaagttttaaccatatgtgtacgcacacatagtgttatcctacacctttttagtttaatttcaattctttgtgctatgctacaaagaattgaaaataagtttagtcctattgattatgaaagcactattcctagtgattttaagcctatagatgaagaagaatatgaagatgatttagaatggctaaatgaagaaaaagaagataggctctttaattactatctatttttaaatggtattaaagaaagtgatgtagaagaagtgtttaatgaaagtgtagaaatctatgatgagtgcttaatagaaatcgctcaaaatgtccttaaagataaattttcttatgacattgacttattgcaagttttagtaaaaggttatgctaaagagattagagaatttttgagttataaacctataaaagaaatcaaagactttaaagacaaagacaccgcactttatatcagcttaggaaaagactatgacgacgagatagagactgtgtctaaa

SEQ ID NO: 4424 - DNA (genomic), 693 bp, Helicobacter pylori; double-stranded, circular
  misc_feature (B) LOCATION 1...693
  hypothetical: NO
  anti-sense: NO
aaagattacaaaacaaagaaaagggcaataatgaaaacaatgaacttgaatgaattttttacgcataagataatctataaagacacccctttaaagtttaaggatacactagaacaagaaatcagccaagctagtttagtagagaagttaatcttagctaatatcttagccaatatggtgtttgctaagataagcaatgagaatgcccctaaaattcttatttcacgcttgatgtgtaagtttagtcctattgattatgaaagcactattcctagtgattttaagcctatagatgaagaagaatatgaagatgatttagaatggctaaatgaagaaaaagaagataggctctttaattactatctatttttaaatggtattaaagaaagtgatgtagaagaagtgtttaatgaaagtgtagaaatctatgatgagtgcttaatagaaatcgctcaaaatgtccttaaagataaattttcttatgacattgacttattgcaagttttagtaaaaggttatgctaaagagattagagaatttttgagttataaacctataaaagaaatcaaagactttaaagacaaagacaccgcactttatatcagcttaggaaaagactatgacaaagaaaaagagccattttctaaaaaattgcaacaatgttttaaagagattttagagagcaagggtatt

SEQ ID NO: 4425 - DNA (genomic), 1020 bp, Helicobacter pylori; double-stranded, circular
  misc_feature (B) LOCATION 1...1020
  hypothetical: NO
  anti-sense: NO
atggatttacaacaaattgatgagctagaaaataagtttgaagaacaagaagaacaagcccaagatacccccctaaaacaagagcctagcacaaaggaagtaaaaatccctaaaaaaagggggcgtaaaaaaagcttgttagatgaagataagaaaaagagctttaacattgcctttagtccttgtgtgataaaagaacttaatgaatttttgctagaatttggctcatttaaagagacacgaagcacttttattgaagaagcgcttattaggcatttaaaacacagaaaaaacacccaagagcaaaagcttttaaagcaactagaaagattacaaaacaaagaaaagggaataatgaaaacaatgaacttgaatgaattttttacgcataagataatctataaagacacccctttaaagtttaaggatacactagaacaagaaatcagccaagctagtttagtagagaagttaatcttagctaatatcttagccaatatggtgtttgctaagataagcaatgagaatgcccctaaaattcttatttcacgcttgatgtgtaagtttagtcctattgattatgaaagcactattcctagtgattttaagcctatagatgaagaagaatatgaagatgatttagaatggctaaatgaagaaaaagaagataggctctttaattactatctatttttaaatggtattaaagaaagtgatgtagaagaagtgtttaatgaaagtgtagaaatctatgatgagtgcttaatagaaatcgctcaaaatgtccttaaagataaattttcttatgacattgacttattgcaagttttagtaaaaggttatgctaaagagattagagaatttttgagttataaacctataaaagaaatcaaagactttaaagacaaagacaccgcactttatatcagcttaggaaaagactatgacaaagaaaaagagccattttctaaaaaattgcaacaatgttttaaagagattttagagagcaagggtatttaa

SEQ ID NO: 4426 - DNA (genomic), 252 bp, Helicobacter pylori; double-stranded, circular
  misc_feature (B) LOCATION 1...252
  hypothetical: NO
  anti-sense: NO
aaaacaatcaataaattaaggattataatgaaaccaacgaacgaacctaaaaaacctttttttcaaagtcccattgttcttgcggttcttggagggattttactcatttttttcctacgctctttcaattctgatggcagtttttcggacaatttcttagcttctagcactaaaaatgtgagctaccatgaaatcaaacaactcatcagcaataatgaagtggaaaatgtaagtatcggtcaaactttaatc

SEQ ID NO: 4427 - DNA (genomic), 336 bp, Helicobacter pylori; double-stranded, circular
  misc_feature (B) LOCATION 1...336
  hypothetical: NO
  anti-sense: NO
atgaaaccaacgaacgaacctaaaaaacctttttttcaaagtcccattgttcttgcggttcttggagggattttactcatttttttcctacgctctttcaattctgatggcagtttttcggacaatttcttagcttctagcactaaaaatgtgagctaccatgaaatcatacagctcatcagcaatcatgaagtgggaaatgtgagtatcggtcaaactttgatcaaagccagccataaagagggcaataatcgtgtgatttatatcgctaaacgagtgctgatctaccttagtgcctttgttagacgagaaaaaaatcaattattctggttttga

SEQ ID NO: 4428 - DNA (genomic), 405 bp, Helicobacter pylori; double-stranded, circular
  misc_feature (B) LOCATION 1...405
  hypothetical: NO
  anti-sense: NO
cgagtgcctgatctaaccttagtcgctttgttagacgagaaaaaaatcaattattctggttttgacgaatctaacttttttaccgacatgttagggtggctcatgcctattttagtgattttagggctatggatgtttatggcaaaccgcatgcaaaaaaatatgggtgggggtatttttggcatggggagcgcgaaaaaactcattaacgctgaaaaacccaatgtgcgttttaatgacatggcgggcaatgaagaagccaaagaagaagtagtagaaatcgtggatttcttaaaataccccgaacgatacgccaatttaggggctaaaatccctaaaggtgtgctgttagtagggcctccaggaaccggtaaaacccttttagcaaaggcggtggctggcgaa

SEQ ID NO: 4429 - DNA (genomic), 408 bp, Helicobacter pylori; double-stranded, circular
  misc_feature (B) LOCATION 1...408
  hypothetical: NO
  anti-sense: NO
cgagtgcctgatctaaccttagtcgctttgttagacgagaaaaaaatcaattattctggttttgacgaatctaacttttttaccgacatgttagggtggctcatgcctattttagtgattttagggctatggatgtttatggcaaaccgcatgcaaaaaaatatgggtgggggtatttttggcatggggagcgcgaaaaaactcattaacgctgaaaaacccaatgtgcgttttaatgacatggcgggcaatgaagaagccaaagaagaagtagtagaaatcgtggatttcttaaaataccccgaacgatacgccaatttaggggctaaaatccctaaaggtgtgctgttagtagggcctccaggaaccggtaaaacccttttagcaaaggcggtggctggcgaagcg

SEQ ID NO: 4430 - DNA (genomic), 735 bp, Helicobacter pylori; double-stranded, circular
  misc_feature (B) LOCATION 1...735
  hypothetical: NO
  anti-sense: NO
agccgcgcttttagcggacgaaacaaccaaaaagaagtcaaacaacagcatttaaaagaagcggttgaaagagggattgctgggctagaaaagaaaagcaggcgtatcagtcctaaagaaaagaaaatcgtcgcctaccatgaaagcgggcatgccgtgatttctgaaatgactaaagggagcactagggtgaataaagtctctatcattccaaggggcatggcggctttaggctacacccttaacacgcctgaagaaaacaaatacttgatgcaaaaacacgaactcatcgctgaaattgatgtgcttttaggcgggagggcggctgaagaagtctttttagaagaaatttctaccggtgcgagcaacgatttagaaagagcgactgatattattaaaggcatggtgagttactacggcatgagcagtgtcagcgggcttatggtgttagaaaagcaacggaacgcctttttaggaggcggttatgggagcagtagggaatttagcgaaaaaaccgcagaagaaatggagccttgcattaaaaacctactagaagagcgctatcagcatgtcaaacaaaccttaagcgactatagagaggcgattgaaatcatggtcaaagaattgtttgacaaagaagtcattacaggcgaaagggtgcgtgaaatcatcagcgaatacgaagccgccaacaatttagaaagccgtttgatccctttagaagagcaagcgagt

SEQ ID NO: 4431 - DNA (genomic), 774 bp, Helicobacter pylori; double-stranded, circular
  misc_feature (B) LOCATION 1...774
  hypothetical: NO
  anti-sense: NO
gtgcctttgttagacgagaaaaaaatcaattattctggttttgacgaatctaacttttttaccgacatgttagggtggctcatgcctattttagtgattttagggctatggatgtttatggcaaaccgcatgcaaaaaaatatgggtgggggtatttttggcatggggagcgcgaaaaaactcattaacgctgaaaaacccaatgtgcgttttaatgacatggcgggcaatgaagaagccaaagaagaagtagtagaaatcgtggatttcttaaaataccccgaacgatacgccaatttaggggctaaaatccctaaaggtgtgctgttagtagggcctccaggaaccggtaaaacccttttagcaaaggcggtggctggcgaagcgcatgtgccgtttttctctatgggagggagcagtttcattgaaatgtttgtgggcttaggggcaagcagggttagggatttgtttgaaaccgctaaaaaacaagcccctagcatcatttttattgatgaaattgatgccataggcaagagcagagcggctggaggcatgataagtgggaatgatgagagagagcaaaccctaaaccagctcttagccgaaatggatggttttgggagcgaaaacgcacctgtcattgttttagccgcaacgaaccgccctgaaatcttggatccggctttaatgcgtccagggcgctttgacaggcaggttttagtggataagcctgattttaatggcagggtggaaatcttaaaagtgccatattaa

SEQ ID NO: 4432 - DNA (genomic), 828 bp, Helicobacter pylori; double-stranded, circular
  misc_feature (B) LOCATION 1...828
  hypothetical: NO
  anti-sense: NO
gtgaaactcgctaatgatgtgaatttgcaagaagtcgccaaactcaccgcagggcttgcaggggcggatttggcgaatatcatcaatgaagccgcgcttttagcgggacgaaacaaccaaaaagaagtcaaacaacagcatttaaaagaagcggttgaaagagggattgctgggctagaaaagaaaagcaggcgtatcagtcctaaagaaaagaaaatcgtcgcctaccatgaaagcgggcatgccgtgatttctgaaatgactaaagggagcactagggtgaataaagtctctatcattccaaggggcatggcggctttaggctacacccttaacacgcctgaagaaaacaaatacttgatgcaaaaacacgaactcatcgctgaaattgatgtgcttttaggcgggagggcggctgaagaagtctttttagaagaaatttctaccggtgcgagcaacgatttagaaagagcgactgatattattaaaggcatggtgagttactacggcatgagcagtgtcagcgggcttatggtgttagaaaagcaacggaacgcctttttaggaggcggttatgggagcagtagggaatttagcgaaaaaaccgcagaagaaatggatcttttcattaaaaacctactagaagagcgctatcagcatgtcaaacaaaccttaagcgactatagagaggcgattgaaatcatggtcaaagaattgtttgacaaagaagtcattacaggcgaaagggtgcgtgaaatcatcagcgaatacgaagccgccaacaatttagaaagccgtttgatccctttagaagagcaagcgagttaa

SEQ ID NO: 4433 - DNA (genomic), 1899 bp, Helicobacter pylori; double-stranded, circular
  misc_feature (B) LOCATION 1...1899
  hypothetical: NO
  anti-sense: NO
atgaaaccaacgaacgaacctaaaaaacctttttttcaaagtcccattgttcttgcggttcttggagggattttactcatttttttcctacgctctttcaattctgatggcagtttttcggacaatttcttagcttctagcactaaaaatgtgagctaccatgaaatcaaacagctcatcagcaataatgaagtggaaaatgtgagtatcggtcaaactttgatcaaagccagccataaagagggcaataatcgtgtgatttatatcgctaaacgagtgcctgatctaaccttagtgcctttgttagacgagaaaaaaatcaattattctggttttagcgaatctaacttttttaccgacatgttagggtggctcatgcctattttagtgattttagggctatggatgtttatggcaaaccgcatgcaaaaaaatatgggtgggggtatttttggcatggggagcgcgaaaaaactcattaacgctgaaaaacccaatgtgcgttttaatgacatggcgggcaatgaagaagccaaagaagaagtagtagaaatcgtggatttcttaaaataccccgaacgatacgccaatttaggggctaaaatccctaaaggtgtgctgttagtagggcctccaggaaccggtaaaacccttttagcaaaggcggtggctggcgaagcgcatgtgccgtttttctctatgggagggagcagtttcattgaaatgtttgtgggcttaggggcaagcagggttagggatttgtttgaaaccgctaaaaaacaagcccctagcatcatttttattgatgaaattgatgccataggcaagagcagagcggctggaggcatgataagtgggaatgatgagagagagcaaaccctaaaccagctcttagccgaaatggatggttttgggagcgaaaacgcacctgtcattgttttagccgcaacgaaccgccctgaaatcttggatccggctttaatgcgtccagggcgctttgacaggcaggttttagtggataagcctgattttaatggcagggtggaaatcttaaaagtgcatattaaaggcgtgaaactcgctaatgatgtgaatttgcaagaagtcgccaaactcaccgcagggcttgcaggggcggatttggcgaatatcatcaatgaagccgcgcttttagcgggacgaaacaaccaaaaagaagtcaaacaacagcatttaaaagaagcggttgaaagagggattgctgggctagaaaagaaaagcaggcgtatcagtcctaaagaaaagaaaatcgtcgcctaccatgaaagcgggcatgccgtgatttctgaaatgactaaagggagcactagggtgaataaagtctctatcattccaaggggcatggcggctttaggctacacccttaacacgcctgaagaaaacaaatacttgatgcaaaaacacgaactcatcgctgaaattgatgtgcttttaggcgggagggcggctgaagaagtctttttagaagaaatttctaccggtgcgagcaacgatttagaaagagcgactgatattattaaaggcatggtgagttactacggcatgagcagtgtcagcgggcttatggtgttagaaaagcaacggaacgcctttttaggaggcggttatgggagcagtagggaatttagcgaaaaaaccgcagaagaaatggatcttttcattaaaaacctactagaagagcgctatcagcatgtcaaacaaaccttaagcgactatagagaggcgattgaaatcatggtcaaagaattgtttgacaaagaagtcattacaggcgaaagggtgcgtgaaatcatcagcgaatacgaagccgccaacaatttagaaagccgtttgatccctttagaagagcaagcgagttaa

SEQ ID NO: 4434 - DNA (genomic), 924 bp, Helicobacter pylori; double-stranded, circular
  misc_feature (B) LOCATION 1...924
  hypothetical: NO
  anti-sense: NO
atgccaaaaaaatgccgacacttgctccaaactagcgatttaagcttagatgaaatcaagcttttattaaacaaagcgagcgtttatgcgaacgattttaacgccgtgtctttagagacaagagaaaaaatgcaagataaaatcatcgtggctttattttttgaaaattccaccagaacggtgtctagttttgaaatcgcaagcctgaggttgggggcaaaaatagtgaaattaaacatgcaaacgagctccacttcaaagggtgaaactctaatagacacttttaaaaatatccatgccatgcagcctgacgctatcatcacacggcatgctttttcaagtgcgccttttaaattggctgaattttcacaatgccccttgattaacgcaggaagcggcacaagcgctcaccctacccaagcgttattagacttgctcaccctttatcggcattttggcagtttagaaaatctaaaggggaagaaaatcgcttttataggcgatgtgaaaaattcaagagtggctaatagcaacattaaattactccaaaggctagggcttgagatcatgctgtgcgctccaagctccatgctccctatcactcctttaaaaacgacgcacaacattgaagaagcgataggatttgctgacattttaatgagcttgaggacccaaaccgaacggcacaacgcgcccatttttgcgagcttgaaagattacggcaacgcttattgtatcacccaaaaacgcctagagactcatgctaaaaataaagaggtcattattttacacccaggcccggtgcatagggatattgatatagaaagcgcggtgttagaagacaagcgatctaaagtcttagagcaagtcaaaaatggcgtggcaatgcgcatggcggtgttggaatttttgctattagattga

SEQ ID NO: 4435 - DNA (genomic), 936 bp, Helicobacter pylori; double-stranded, circular
  misc_feature (B) LOCATION 1...936
  hypothetical: NO
  anti-sense: NO
ctaaaagggggttttatgccaaaaaaatgccgacacttgctccaaactagcgatttaagcttagatgaaatcaagcttttattaaacaaagcgagcgtttatgcgaacgattttaacgccgtgtctttagagacaagagaaaaaatgcaagataaaatcatcgtggctttattttttgaaaattccaccagaacggtgtctagttttgaaatcgcaagcctgaggttgggggcaaaaatagtgaaattaaacatgcaaacgagctccacttcaaagggtgaaactctaatagacacttttaaaaatatccatgccatgcagcctgacgctatcatcacacggcatgctttttcaagtgcgccttttaaattggctgaattttcacaatgccccttgattaacgcaggaagcggcacaagcgctcaccctacccaagcgttattagacttgctcaccctttatcggcattttggcagtttagaaaatctaaaggggaagaaaatcgcttttataggcgatgtgaaaaattcaagagtggctaatagcaacattaaattactccaaaggctagggcttgagatcatgctgtgcgctccaagctccatgctccctatcactcctttaaaaacgacgcacaacattgaagaagcgataggatttgctgacattttaatgagcttgaggacccaaaccgaacggcacaacgcgcccatttttgcgagcttgaaagattacggcaacgcttattgtatcacccaaaaacgcctagagactcatgctaaaaataaagaggtcattattttacacccaggcccggtgcatagggatattgatatagaaagcgcggtgttagaagacaagcgatctaaagtcttagagcaagtcaaaaatggcgtggcaatgcgcatggcggtgttggaatttttgctattagat

SEQ ID NO: 4436 - DNA (genomic), 234 bp, Helicobacter pylori; double-stranded, circular
  misc_feature (B) LOCATION 1...234
  hypothetical: NO
  anti-sense: NO
gggaatgagtgcgtgcatttaggggggatcaatttgtgcggcgtgtatgattatatcgcacgaaagcgtcaagattttgcccctgatattgacacagcgttaaaaaagcgtgatagtagtaagcccacgatccttttagcccaccagcccaaccaaattagaagcctcaaagaaagcccactctatagatctggtcctttcagggcatacccatgcagggcaaatcttcccctt

SEQ ID NO: 4437 - DNA (genomic), 261 bp, Helicobacter pylori; double-stranded, circular
  misc_feature (B) LOCATION 1...261
  hypothetical: NO
  anti-sense: NO
cccaccagcccaaccaaattagaagcctcaaagaaagcccactctatagatctggtcctttcagggcatacccatgcagggcaaatcttcccctttagccttttagtcaagttagcgcaaacctatttacatggtttatacaaacacagcggcaccactcaaatttacgtgagcagtggggcagggtattgggggattcctttaaggtttttagcccctagcgagatcgcataccttaggcttttacctaaaaatcaagct

SEQ ID NO: 4438 - DNA (genomic), 585 bp, Helicobacter pylori; double-stranded, circular
  misc_feature (B) LOCATION 1...585
  hypothetical: NO
  anti-sense: NO
ggttttttatcctctttgagcgcgggcgaagcgacttttgtcttttataggaatgtcatgcctagccatttgtttgttttgacttcggcgtgttcgtatgtgtcctttattgcgtttgttttttctttgagtttttacgggttttcttactctgtaaaaaaaatagatttcttaccttcaaggcgtaaaggtttaaaaaactttttaagaatagggttttatctggcgttgttagggtatttttggcgcgggttttatgaagggttggcccgccctaaaatcaaagaaacccctatttatttggacaagctagacaaggaattaaagattattttactcacagacatgcatgtggggagtttgttgcaaaaagattttgtcaattacattgtagaagaagtcaatcaaaaagaagtggatatggtgctgattgggggggatttagtggatgaaaacattgaaaaagtcaaatcttttttactgcctttaaacaaccttaaaagcacgcatggcactttttatgtgccaggaaatcatgagtattatcatggcatagagccgattttatcgtttcttaacacgact

SEQ ID NO: 4439 - DNA (genomic), 1113 bp, Helicobacter pylori; double-stranded, circular
  misc_feature (B) LOCATION 1...1113
  hypothetical: NO
  anti-sense: NO
atgctgatttccatagcgtttttattggttttatgtcttttgaattatagttcttttaggatgttaaaatcgtttttaaccttaaagaaaatctctcgatacgcttatttagggttttttatccttttgagcgcgggcgaggcgacttttgtcttttataggaatgtcatgcctagccatttgtttgttttgacttcggcgtgttcgtttgtgtcctttattgcgtttgttttttctttgagtttttacgggttttcttactctgtagaaaaaatagatttcttaccttcaaggcgtaaaggtttaaaaaactttttaagaatagggttttatctggcgttgttagggtatttttggcgcgggttttatgaagggttggcccgccctaaaatcaaagaaacccctatttatttggacaagctagacaaggaattaaagattattttactcacagacatgcatgtggggagtttgttgcaaaaagattttgtcaattacattgtagaagaagtcaatcaaaaagaagtggatatggtgctgattgggggggatttagtggatgaaaacattgaaaaagtcaaatcttttttactgcctttaaacaaccttaaaagcacgcatggcactttttatgtgccaggaaatcatgagtattatcatggcatagagccgattttatcgtttcttaacacgcttgatatgacgattttagggaatgagtgcgtgcatttaggggggatcaatttgtgcggcgtgtatgattatttcgcacgaaagcgtcaagattttgcccctgatattgacaaagcgttaaaaaagcgtgatagtagtaagcccacgatccttttagcccaccagcccaaacaaattagaagcctcaaagaaagccactctatagatctggtcctttcagggcatacccatgcagggcaaatcttcccctttagccttttagtcaagttagcgcaaacctatttacatggtttatacaaacacagcggcaccactcaaatttacgtgagcagtggggcagggtattgggggattcctttaaggtttttagcccctagcgagatcgcataccttaggcttttacctaaaaatcaagcttag

SEQ ID NO: 4440 - DNA (genomic), 408 bp, Helicobacter pylori; double-stranded, circular
  misc_feature (B) LOCATION 1...408
  hypothetical: NO
  anti-sense: NO
atgcttattttaggacaccctttaatccctagcgctcgttttgttttcattaaaaacaccgatgctattcattccagcgccaataacgatatagtgtgttttgaagcaaacccaaaaaatttggaattagcccaatattgctgtgaaaatggcgtccattttagcgtgatctttttatcgcacaagatagagacggacaccttttttttattcaacgctttcaaaccgctctattgtatttttaaggatattaagcaagccatactcgcccaacaacacgccactaattacttgttagatagcaaaatcttgttttctatggattttaacgatacagagtcatgggagatttgcgctaaaaatcaaatagatggtgtcatttctaaagattcactccttttgaaataa

SEQ ID NO: 4441 - DNA (genomic), 405 bp, Helicobacter pylori; double-stranded, circular
  misc_feature (B) LOCATION 1...405
  hypothetical: NO
  anti-sense: NO
atgcttattttaggacaccctttaatccctagcgctcgttttgttttcattaaaaacaccgatgctattcattccagcgccaataacgatatagtgtgttttgaagcaaacccaaaaaatttggaattagcccaatattgctgtgaaaatggcgtccattttagcgtgatctttttatcgcacaagatagagacggacaccttttttttattcaacgctttcaaaccgctctattgtatttttaaggatattaagcaagccatactcgcccaacaacacgccactaattacttgttagatagcaaaatcttgttttctatggattttaacgatacagagtcatgggagatttgcgctaaaaatcaaatagatggtgtcatttctaaagattcactccttttgaaa

SEQ ID NO: 4442 - DNA (genomic), 414 bp, Helicobacter pylori; double-stranded, circular
  misc_feature (B) LOCATION 1...414
  hypothetical: NO
  anti-sense: NO
ggggtaaacatgcttattttaggacaccctttaatccctagcgctcgttttgttttcattaaaaacaccgatgctattcattccagcgccaataacgatatagtgtgttttgaagcaaacccaaaaaatttggaattagcccaatattgctgtgaaaatggcgtccattttagcgtgatctttttatcgcacaagatagagacggacaccttttttttattcaacgctttcaaaccgctctattgtatttttaaggatattaagcaagccatactcgcccaacaacacgccactaattacttgttagatagcaaaatcttgttttctatggattttaacgatacagagtcatgggagatttgcgctaaaaatcaaatagatggtgtcatttctaaagattcactccttttgaaa

SEQ ID NO: 4443 - DNA (genomic), 702 bp, Helicobacter pylori; double-stranded, circular
  misc_feature (B) LOCATION 1...702
  hypothetical: NO
  anti-sense: NO
atgctttcagcccaccaaccttttaaaaattaccctgatctgattaaaaaagagttgcaagagcataacgcctatgcgagcgtcgctagtggggtgccagcgatgtgtgatggtatcacgcaaggttatgagggaatggaattgagcttgtttagtagagatgtgatcgcattaagcaccsccgtagggttaagccataatgtttttgacggggcgttttttttgggcgtgtgcgataaaattgtgccaggcttgctcataggagcgttaagctttgggaatttagcgagcgtgtttgtgccaagcgggcctatggtgagcgggatagaaaattataaaaaagccaaagcgcgccaagattttgcaatgggaaagatcaacagagaagagcttttaaaagtggaaatgcaaagctatcatgatgtgggcacttgcactttttatggcacggctaattctaatcaaatgatgatggagtttatggggttgcatgtggccaattctagctttatcaaccctaacaaccccttacgaaaggttttagtagaagagagcgctaaaagattagcgagcgggaaagtcctgcctttagccaaactcattgatgaaaaaagcattcttaacgctcttataggcttaatggcaacagggggttctactaaccacactttgcatttgatcgctatcgcagatcttgtgggg

SEQ ID NO: 4444 - DNA (genomic), 1827 bp, Helicobacter pylori; double-stranded, circular
  misc_feature (B) LOCATION 1...1827
  hypothetical: NO
  anti-sense: NO
atgcctaagcattctttagaacaaatcaaagaaaaaattacagagcgtagcaaaaaaaccagagagctttatttagaaaataccttcaaccctaaaaaccagcccaagattgagagcttgggttgcgcgaatattgcgcatgttacggcgagcatgccagagcatttaaaaatgcctttaggttcgcataaaagaaagcattttgcgattatcaccgcttataatgacatgctttcagcccaccaaccttttaaaaattaccctgatctgattaaaaaagagttgcaagagcataacgcctatgcgagcgtcgctagtggggtgccagcgatgtgtgatggtatcacgcaaggttatgagggaatggaattgagcttgtttagtagagatgtgatcgcattaagcaccgccgtagggttaagccataatgtttttgacggggcgttttttttgggcgtgtgcgataaaattgtgccaggcttgctcataggagcgttaagctttgggaatttagcgagcgtgtttgtgccaagcgggcctatggtgagcgggatagaaaattataaaaaagccaaagcgcgccaagattttgcaatgggaaagatcaacagagaagagcttttaaaagtggaaatgcaaagctatcatgatgtgggcacttgcactttttatggcacggctaattctaatcaaatgatgatggagtttatggggttgcatgtggccaattctagctttatcaaccctaacaaccccttacgaaaggttttagtagaagagagcgctaaaagattagcgagcgggaaagtcctgcctttagccaaactcattgatgaaaaaagcattcttaacgctcttataggcttaatggcaacagggggttctactaaccacactttgcatttgatcgctatcgctagatcttgtggggtgatcctcaattgggacgattttgacgcaatctctaatctcataccccttttagctaaagtctatcctaacggatcagcggatgtgaacgcttttgaagcgtgtgggggcttagcgtttgtgatcaaagaattgctaaaagaggggcttttatttgaagacactcataccattatggatacagaaacgcaaaaaggcatgcaaaattacaccaaaaccccctttttagaaaacgaccaattggtgtataaagacgctgttagtcatagcctgaatacggatattttacgccctgttagtgagccttttgccgctaatggagggcttaaaatcttaaaaggtaatttggggcgggccgtgattaaaatctcagccattaaagatgagcataggaaagttaaagctagagcgattgtttttaaaacccaaagcgaatttttagaacgctttaaaaataaagaattagaaagggactttgtggcggtcttgcctttccaagggcctaagtctaacggcatgccagaattgcacaaactcaccacgaatttaggggctttgcaggatatgggctacaaggtcgcgctcgttacggatgggcgcatgagtggggcgagcgggaaagtgcctagcgcgatccatttaagccctgagggggcgttaaacggggcgatcattaagattaaagatggcgatttgatagaattagacgctcctaataacgccttgaatgtgcttgaaaaggattttgaaaagagaggcatcaaccccttgtttttagaaaccttagaaaatttagaaaagcctacttttgggttgggtagggaattatttacaagcttgagattgaatgccaataccgctgaagagggtggcatgagttttggcataaaggtataa

SEQ ID NO: 4445 - DNA (genomic), 1845 bp, Helicobacter pylori; double-stranded, circular
  misc_feature (B) LOCATION 1...1845
  hypothetical: NO
  anti-sense: NO
atcttaattgaaggggtgttcatgcctaagcattctttagaacaaatcaaagaaaaaattacagagcgtagcaaaaaaaccagagagctttatttagaaaataccttcaaccctaaaaaccagcccaagattgagagcttgggttgcgcgaatattgcgcatgttacggcgagcatgccagagcatttaaaaatgcctttaggttcgcataaaagaaagcattttgcgattatcaccgcttataatgacatgctttcagcccaccaaccttttaaaaattaccctgatctgattaaaaaagagttgcaagagcataacgcctatgcgagcgtcgctagtggggtgccagcgatgtgtgatggtatcacgcaaggttatgagggaatggaattgagcttgtttagtagagatgtgatcgcattaagcaccgccgtagggttaagccataatgtttttgacggggcgttttttttgggcgtgtgcgataaaattgtgccaggcttgctcataggagcgttaagctttgggaatttagcgagcgtgtttgtgccaagcgggcctatggtgagcgggatagaaaattataaaaaagccaaagcgcgccaagattttgcaatgggaaagatcaacagagaagagcttttaaaagtggaaatgcaaagctatcatgatgtgggcacttgcactttttatggcacggctaattctaatcaaatgatgatggagtttatggggttgcatgtggccaattctagctttatcaaccctaacaaccccttacgaaaggttttagtagaagagagcgctaaaagattagcgagcgggaaagtcctgcctttagccaaactcattgatgaaaaaagcattcttaacgctcttataggcttaatggcaacagggggttctactaaccacactttgcatttgatcgctatcgctagatcttgtggggtgatcctcaattgggacgattttgacgcaatctctaatctcataccccttttagctaaagtctatcctaacggatcagcggatgtgaacgcttttgaagcgtgtgggggcttagcgtttgtgatcaaagaattgctaaaagaggggcttttatttgaagacactcataccattatggatacagaaacgcaaaaaggcatgcaaaattacaccaaaaccccctttttagaaaacgaccaattggtgtataaagacgctgttagtcatagcctgaatacggatattttacgccctgttagtgagccttttgccgctaatggagggcttaaaatcttaaaaggtaatttggggcgggccgtgattaaaatctcagccattaaagatgagcataggaaagttaaagctagagcgattgtttttaaaacccaaagcgaatttttagaacgctttaaaaataaagaattagaaagggactttgtggcggtcttgcctttccaagggcctaagtctaacggcatgccagaattgcacaaactcaccacgaatttaggggctttgcaggatatgggctacaaggtcgcgctcgttacggatgggcgcatgagtggggcgagcgggaaagtgcctagcgcgatccatttaagccctgagggggcgttaaacggggcgatcattaagattaaagatggcgatttgatagaattagacgctcctaataacgccttgaatgtgcttgaaaaggattttgaaaagagaggcatcaaccccttgtttttagaaaccttagaaaatttagaaaagcctacttttgggttgggtagggaattatttacaagcttgagattgaatgccaataccgctgaagagggtggcatgagttttggcataaaggta

SEQ ID NO: 4446 - DNA (genomic), 537 bp, Helicobacter pylori; double-stranded, circular
  misc_feature (B) LOCATION 1...537
  hypothetical: NO
  anti-sense: NO
atgaactaccctaatctacctaacagcgctttagrgataagcgaacagccagaagtgaaagaaatcactaacgagcttttaaagcaattacaaaacgctttaaggagcaacgcgcattttagcgagcaagtggaattaagccttaaatgcatcgttaggattttagaagtgcttttgagtttggatttttttaagaatgcgaatgagattgatagcagtttaagaaattccattgagtggctgactaacgccggcgagagcttgaaattaaaaatgaaagaatacgagcgcttttttagcgagtttaatacgagcatgcatgccaacgagcaggaagtaaccaataccttaaacgctaacgccgagaacattaaaagcgraattaaaargctagaaaatcaattgatagaaaccacgacaagacttttaacgagctatcaaatctttttaaaccaagccagagataacgctaacaaccaaatcacaaaaaacaaaacccraagccttgaagcgattacacaagctaaaaacaacagc

SEQ ID NO: 4447 - DNA (genomic), 804 bp, Helicobacter pylori; double-stranded, circular
  misc_feature (B) LOCATION 1...804
  hypothetical: NO
  anti-sense: NO
atgaactaccctaatctacctaacagcgctttagagataagcgaacagccagaagtgaaagaaatcactaacgagcttttaaagcaattacaaaacgctttaaggagcaacgcgcattttagcgagcaagtggaattaagccttaaatgcatcgttaggattttagaagtgcttttgagtttggatttttttaagaatgcgaatgagattgatagcagtttaagaaattccattgagtggctgactaacgccggcgagagcttgaaattaaaaatgaaagaatacgagcgcttttttagcgagtttaatacgagcatgcatgccaacgagcaggaagtaaccaataccttaaacgctaacgccgagaacattaaaagcgaaattaaaaagctagaaaatcaattgatagaaaccacgacaagacttttaacgagctatcaaatctttttaaaccaagccagagataacgctaacaaccaaatcacaaaaaacaaaacccaaagccttgaagcgattacacaagctaaaaacaacgctaataatgaaataagcaacaatcaaacgcaagcgataactaatatcaccgaagcgaaaacgaacgctaataatgaaataagcaacaatcaaacgcaagcgataactaacattaacgaagccaaagaaagcgctacaacgcaaataaacgccaataagcaagaagcaataaataacatcacgcaagaaaaaacccaagccacaagcgagatcaccgaagcgaaaaagaccgatcattatcaaaacattgatttttttgagtttgaataa

SEQ ID NO: 4448 - DNA (genomic), 816 bp, Helicobacter pylori; double-stranded, circular
  misc_feature (B) LOCATION 1...816
  hypothetical: NO
  anti-sense: NO
tcacggagtgttgaaatgaactaccctaatctacctaacagcgctttagagataagcgaacagccagaagtgaaagaaatcactaacgagcttttaaagcaattacaaaacgctttaaggagcaacgcgcattttagcgagcaagtggaattaagccttaaatgcatcgttaggattttagaagtgcttttgagtttggatttttttaagaatgcgaatgagattgatagcagtttaagaaattccattgagtggctgactaacgccggcgagagcttgaaattaaaaatgaaagaatacgagcgcttttttagcgagtttaatacgagcatgcatgccaacgagcaggaagtaaccaataccttaaacgctaacgccgagaacattaaaagcgaaattaaaaagctagaaaatcaattgatagaaaccacgacaagacttttaacgagctatcaaatctttttaaaccaagccagagataacgctaacaaccaaatcacaaaaaacaaaacccaaagccttgaagcgattacacaagctaaaaacaacgctaataatgaaataagcaacactcaaacgcaagcgataactaatatcaccgaagcgaaaacgaacgctaataatgaaataagcaacaatcaaacgcaagcgataactaacattaacgaagccaaagaaagcgctacaacgcaaataaacgccaataagcaagaagcaataaataacatcacgcaagaaaaaacccaagccacaagcgagatcaccgaagcgaaaaagaccgatcattatcaaaacattgatttttttgagtttgaa

SEQ ID NO: 4449 - DNA (genomic), 297 bp, Helicobacter pylori; double-stranded, circular
  misc_feature (B) LOCATION 1...297
  hypothetical: NO
  anti-sense: NO
aaccttataccctttttgaaaaaacgcatctatcaaaaacccgtccgcctttgggaattagagccaaaagaattaaaagcctttattgaaaagcgcctaaaagcctatcaaaactatattaaagatcttaacattgacagcattgacggcattatagaggggcattttcacctcaaaagcggcacaaaaatccattcaagcgtgccgatttactgcccactgccttctttttattacgaacaaagcctttttaaggtatcatcaagccttttagaaccatctcaaaataaggacgcc

SEQ ID NO: 4450 - DNA (genomic), 462 bp, Helicobacter pylori; double-stranded, circular
  misc_feature (B) LOCATION 1...462
  hypothetical: NO
  anti-sense: NO
atgcaccttaaaagtggggctgtttttatctctgatgcgcattttttgcccaaaagccctcatttaatccatacgcttaaagaacttttaagcgccaaacccccgcaagtctttttcatgggcgatattttccatgttcttgtgggctatttacccctagataaagagcagcaaaaaatcattgatttaatccatgcgttgagcgaaatttcacaagtcttttactttgaaggcaaccatgatttttccatgcgttttgtattcaattccaaagtaatggtttttgagcgccaaaaccaacccgcattattccagtatgataacaaacgctttttgctagcccatggggatttattcatcactaaagcgtatgaattttacatcacgcagctcacttccacttgggctagattttttttaacttttttaaatttattaagttttaaaaccttataccctttt

SEQ ID NO: 4451 - DNA (genomic), 504 bp, Helicobacter pylori; double-stranded, circular
  misc_feature (B) LOCATION 1...504
  hypothetical: NO
  anti-sense: NO
agaatggctctttttggttcaaagagtaagatgttagaaacttatgcacttaaaagtggggctgtttttatctctgatgcgcattttttgcccaaaagccctcatttaatccatacgcttaaagaacttttaagcgccaaacccccgcaagtctttttcatgggcgatattttccatgttcttgtgggctatttacccctagataaagagcagcaaaaaatcattgatttaatccatgcgttgagcgaaatttcacaagtcttttactttgaaggcaaccatgatttttccatgcgttttgtattcaattccaaagtaatggtttttgagcgccaaaaccaacccgcattattccagtatgataacaaacgctttttgctagcccatggggatttattcatcactaaagcgtatgaattttacatcacgcagctcacttccacttgggctagattttttttaacttttttaaatttattaagttttaaaaccttataccctttt

SEQ ID NO: 4452 - DNA (genomic), 759 bp, Helicobacter pylori; double-stranded, circular
  misc_feature (B) LOCATION 1...759
  hypothetical: NO
  anti-sense: NO
atgttagaaacttatgcacttaaaagtggggctgtttttatctctgatgcgcattttttgcccaaaagccctcatttaatccatacgcttaaagaacttttaagcgccaaacccccgcaagtctttttcatgggcgatattttccatgttcttgtgggctatttacccctagataaagagcagcaaaaaatcattgatttaatccatgcgttgagcgaaatttcacaagtcttttactttgaaggcaaccatgatttttccatgcgttttgtattcaattccaaagtaatggtttttgagcgccaaaaccaacccgcattattccagtatgataacaaacgctttttgctagcccatggggatttattcatcactaaagcgtatgaattttacatcacgcagctcacttccacttgggctagattttttttaacttttttaaatttattaagttttaaaaccttatacccttttttgaaaaaacgcatctatcaaaaacccgtccgcctttgggaattagagccaaaagaattaaaagcctttattgaaaagcgcctaaaagcctatcaaaactatattaaagatcttaacattgacagcattgacggcattatagaggggcattttcacctcaaaagcggcacaaaaatccattcaagcgtgccgatttactgcccactgccttctttttattacgaacaaagcctttttaaggtatcatcaagccttttagaaccatctcaaaataaggacgcctaa

SEQ ID NO: 4453 - DNA (genomic), 780 bp, Helicobacter pylori; double-stranded, circular
  misc_feature (B) LOCATION 1...780
  hypothetical: NO
  anti-sense: NO
ggagcgaaaaaggacaacgaagccacctacgctttcaatagcgacaagttcttaaagtggttcaataaagttccattgaccgagcatatgagacttcacgctgaaaatgaaaaaagcggagaggatttgctaaaagacgttaaagtggtaactagcggaccgagtgttaaggacaggacttcaactcctaaagagcctaaagaaaaagaggacaggtttaagttgatgtttgatttcggtgatgttaagactaactttatggcaattgcggagggctctgtattgtcagagcgtaaaggtaggttaggacaacttatgtcgcctttagtgtatcgtggtaatggttttcacgcttctttagtgattatgtgggcgttatcgtttgcttctcaattaaagcaccataacgaccatgagtgggctaaaatgcttgaaaatcgcaatgttgatgagtgttggtttgaaacttttgaccatatggacaataccgatttaaggttattctgtgatattctaggggcttacgctcaaggacaagaggaaactttaaatcttactaaactatgggcggtaatgttacctaaaaatcaaaaagaggcgtattttgtagcacaactcttatgcgatggcggtatcaataggtataatctctcttgtgcgggtcttaccgaaaatttgctaaaagacattgaggtaaatctcggtttagcgactcacgaggaggttgatgagtatattgataacctggataaagaggaggaagctgaaaaattagaaaac

SEQ ID NO: 4454 - DNA (genomic), 303 bp, Helicobacter pylori; double-stranded, circular
  misc_feature (B) LOCATION 1...303
  hypothetical: NO
  anti-sense: NO
atggaattattgactttagacggcgtggttgaaaaatgcgtgtttgaaatccctagctatcaaagggggtatgcatggcaagtaaggcaatggaaggatctttggaacgatttagagcatgtctctaaactgggaaataaattccattacatgcacagcctaaccttaacaaggcttgataatgaacttgaagatagcgcttttgatatcatagaccgccaccaacgattggctacaactctgattttactacgccttttagctaataccactacacataaagaccatagtataattcaatga

SEQ ID NO: 4455 - DNA (genomic), 654 bp, Helicobacter pylori; double-stranded, circular; identical to SEQ ID NO: 3139
  misc_feature (B) LOCATION 1...654
  hypothetical: NO
  anti-sense: NO

SEQ ID NO: 4456 - DNA (genomic), 348 bp, Helicobacter pylori; double-stranded, circular
  misc_feature (B) LOCATION 1...348
  hypothetical: NO
  anti-sense: NO
ttgcaccctctatgcgcacacggccaatgtggaagcgaagcgattgcgtgtttagaagccattagcgtggggattgtgcctgttatcgctaatagccctttaagcgcgaccaggcaattcgcgctagatgaacgatcgttatttgagcctaataacgctaaagatttgagcgctaaaatagactggtggttagaaaacaaacttgaaagagaaagaatgcaaaacgaatacgctaaaagcgctttaaactacactttagaaaattcagtcattcaaattgaaaaagtttatgaagaagcgatcaaagattttaaaaacaaccccaacctctttaaaaccttatcgtaa

SEQ ID NO: 4457 - DNA (genomic), 366 bp, Helicobacter pylori; double-stranded, circular
  misc_feature (B) LOCATION 1...366
  hypothetical: NO
  anti-sense: NO
attgttagagattttaaaaacttgcaccctctatgcgcacacggccaatgtggaagcgaagcgattgcgtgtttagaagccattagcgtggggattgtgcctgttatcgctaatagccctttaagcgcgaccaggcaattcgcgctagatgaacgatcgttatttgagcctaataacgctaaagatttgagcgctaaaatagactggtggttagaaaacaaacttgaaagagaaagaatgcaaaacgaatacgctaaaagcgctttaaactacactttagaaaattcagtcattcaaattgaaaaagtttatgaagaagcgatcaaagattttaaaaacaaccccaacctctttaaaaccttatcg

SEQ ID NO: 4458 - DNA (genomic), 876 bp, Helicobacter pylori; double-stranded, circular
  misc_feature (B) LOCATION 1...876
  hypothetical: NO
  anti-sense: NO
atggttattgttttagtcgtggatagctttaaagacaccagtaatggcacttctatgacagcgtttcgtttttttgaagcgctgaaaaaaagagggcatgcgatgagagtggtcgcccctcatgtggataatttagggagtgaagaagaggggtattacaaccttaaagagcgctatatccccctagttacagaaatttcacacaagcaacacattctttttgccaaaccggatgaaaaaattctacgaaaggcttttaagggagcggatatgatccatacttacttgccttttttgctagaaaaaacagccgtaaaaatcgcgcgagaaatgcgagtgccttatattggctctttccatttacagccagagcatatttcttataacatgaaattggggcaattttcttggctaaataccatgcttttttcatggtttaaatcttcgcattaccgctatatccaccatatccattgcccatcaaaattcattgtagaagaattggaaaaatacaactatggaggaaaaaaatacgctatctctaacggctttgatcccatgtttaagtttgagcacccgcaaaaaagcctttttgacaccacgccctttaaaatcgctatggtagggcgctattctaatgaaaaaaatcaaagcgttctcattaaagcggttgctttaagccgatacaaacaagacattgtattattactcaaaggcaaggggcctgatgagaaaaaaatcaaacttctagcccaaaaactaggcgtaaaaacggagtttgggtttgtcaattcccatgaattgttagagattttaaaaacttgcaccctctatgcgcacacggccaatgtggaagcgaagcgattgcgtgtttag

SEQ ID NO: 4459 - DNA (genomic), 873 bp, Helicobacter pylori; double-stranded, circular
  misc_feature (B) LOCATION 1...873
  hypothetical: NO
  anti-sense: NO
atggttattgttttagtcgtggatagctttaaagacaccagtaatggcacttctatgacagcgtttcgtttttttgaagcgctgaaaaaaagagggcatgcgatgagagtggtcgcccctcatgtggataatttagggagtgaagaagaggggtattacaaccttaaagagcgctatatccccctagttacagaaatttcacacaagcaacacattctttttgccaacccggatgaaaaaattctacgaaaggcttttaagggagcggatatgatccatacttacttgccttttttgctagaaaaaacagccgtaaaaatcgcgcgagaaatgcgagtgccttatattggctctttccatttacagccagagcatatttcttttaacatgatattgggccaattttttttgatcgggaccatgaatttttcatggtttaaatattcgcattaccgttatatccaccatatccattgcccatcaaaattcattgtagaagaattggaaaaatacaactatggaggaaaaaaatacgctatctctaacggctttgatcccaagtttaagtttgagcaccgacacaaaatcctttttgacaccacgccctttaaaatcgctatggtagggcgctattctaatgaaaaaaatcaaagcgttctcattaaagcggttgctttaagccgatacaaacaagacattgtattattactcaaaggcaaggggcctgatgagaaaaaaatcaaacttctagcccaaaaactaggcgtaaaaacggagtttgggtttgtcaattcccatgaattgttagagattttaaaaacttgcaccctctatgcgcacacggccaatgtggaagcgaagcgattgcgtgtt

SEQ ID NO: 4460 - DNA (genomic), 1170 bp, Helicobacter pylori; double-stranded, circular
  misc_feature (B) LOCATION 1...1170
  hypothetical: NO
  anti-sense: NO
atggttattgttttagtcgtggatagctttaaagacaccagtaatggcacttctatgacagcgtttcgtttttttgaagcgctgaaaaaaagagggcatgcgatgagagtggtcgcccctcatgtggataatttagggagtgaagaagaggggtattacaaccttaaagagcgctatatccccctagttacagaaatttcacacaagcaacacattctttttgccaaaccggatgaaaaaattctacgaaaggcttttaagggagcggatatgatccatacttacttgccttttttgctagaaaaaacagccgtaaaaatcgcgcgagaaatgcgagtgccttatattggctctttccatttacagccagagcatatttcttataacatgaaattggggcaattttcttggctaaataccatgcttttttcatggtttaaatcttcgcattaccgctatatccaccatatccattgcccatcaaaattcattgtagaagaattggaaaaatacaactatggaggaaaaaaatacgctatctctaacggctttgatcccatgtttaagtttgagcacccgcaaaaaagcctttttgacaccacgccctttaaaatcgctatggtagggcgctattctaatgaaaaaaatcaaagcgttctcattaaagcggttgctttaagccgatacaaacaagacattgtattattactcaaaggcaaggggcctgatgagaaaaaaatcaaacttctagcccaaaaactaggcgtaaaaacggagtttgggtttgtcaattcccatgaattgttagagattttaaaaacttgcaccctctatgcgcacacggccaatgtggaaagcgaagcgattgcgtgtttagaagccattagcgtggggattgtgcctgttatcgctaatagccctttaagcgcgaccaggcaattcgcgctagatgaacgatcgttatttgagcctaataacgctaaagatttgagcgctaaaatagactggtggttagaaaacaaacttgaaagagaaagaatgcaaaacgaatacgctaaaagcgctttaaactacactttagaaaattcagtcattcaaattgaaaaagtttatgaagaagcgatcaaagattttaaaaacaaccccaacctctttaaaaccttatcgtaa

SEQ ID NO: 4461 - DNA (genomic), 831 bp, Helicobacter pylori; double-stranded, circular
  misc_feature (B) LOCATION 1...831
  hypothetical: NO
  anti-sense: NO
atgaccctttcacaagccctaaataaagccaaaaaagaattatcgccaaaaggctttaggggggggttagagtctgaaattttattaggctttgtcttgcaaaaagaaagggtttttttgcacacgcatgagcatttggaattaagccacgaagaagaaacacgcttttttgaattggtaggaaagcgtttgaatgactgccccatagagtatttattaggaagctgtgatttttatgggcgctcttttttcgtgaatgagcatgttttaatcccacggcctgaaaccgagattttagtccaaaaagcccttaatattatttctcaataccatttaaaagaaataggcgaaatcggcatagggagcggatgcgtgtccgtgagtttggctttagaaaaccctaatctctctatttatgcgagcgatatttcaccaaaagctttagaagtggcgttaaaaaatattgaacgcttttgtctaaaagagcgtgtttttttaaaacaaacgcgcctttgggatcatatgccaacgatagaaatgcttgtctctaacccgccctatatcgctagaaattatcctttggaaaaatccgttctcaaagaaccgcacgaagccctttttgggggggttaaaggcgatgaaatcttaaaagaaatcgtttttttagccgctaaattaaaaatcccttttttggtttgtgaaatggggtatgaccagttaaagagcttgaaagaatgcttggagttttgcggttatgatgcagagttttacaaggatttgagcggctttgatagagggtttgtgggcgttttaaaaagttttttaagataa

SEQ ID NO: 4462 - DNA (genomic), 828 bp, Helicobacter pylori; double-stranded, circular
  misc_feature (B) LOCATION 1...828
  hypothetical: NO
  anti-sense: NO
atgaccctttcacaagccctaaataaagccaaaaaagaattatcgccaaaaggctttaggggggggttagagtctgaaattttattaggctttgtcttgcaaaaagaaagggtttttttgcacacgcatgagcatttggaattaagccacgaagaagaaacacgcttttttgaattggtaggaaagcgtttgaatgactgccccatagagtatttattaggaagctgtgatttttatgggcgctcttttttcgtgaatgagcatgttttaatcccacggcctgaaaccgagattttagtccaaaaagcccttaatattatttctcaataccatttaaaagaaataggcgaaatcggcatagggagcggatgcgtgtccgtgagtttggctttagaaaaccctaatctctctatttatgcgagcgatatttcaccaaaagctttagaagtggcgttaaaaaatattgaacgcttttgtctaaaagagcgtgtttttttaaaacaaacgcgcctttgggatcatatgccaacgatagaaatgcttgtctctaacccgccctatatcgctagaaattatcctttggaaaaatccgttctcaaagaaccgcacgaagccctttttgggggggttaaaggcgatgaaatcttaaaagaaatcgtttttttagccgctaaattaaaaatcccttttttggtttgtgaaatggggtatgaccagttaaagagcttgaaagaatgcttggagttttgcggttatgatgcagagttttacaaggatttgagcggctttgatagagggtttgtgggcgttttaaaaagttttttaaga

SEQ ID NO: 4463 - DNA (genomic), 837 bp, Helicobacter pylori; double-stranded, circular
  misc_feature (B) LOCATION 1...837
  hypothetical: NO
  anti-sense: NO
atgaaattgaatgaccctttcacaagccctaataaagccaaaaaagaattatcgccaaaaggctttaggggggggttagagtctgaaattttattaggctttgtcttgcaaaaagaaagggtttttttgcacacgcatgagcatttggaattaagccacgaagaagaaacacgcttttttgaattggtaggaaagcgtttgaatgactgccccatagagtatttattaggaagctgtgatttttatgggcgctcttttttcgtgaatgagcatgttttaatcccacggcctgaaaccgagattttagtccaaaaagcccttaatattatttctcaataccatttaaaagaaataggcgaaatcggcatagggagcggatgcgtgtccgtgagtttggctttagaaaaccctaatctctctatttatgcgagcgatatttcaccaaaagctttagaagtggcgttaaaaaatattgaacgcttttgtctaaaagagcgtgtttttttaaaacaaacgcgcctttgggatcatatgccaacgatagaaatgcttgtctctaacccgccctatatcgctagaaattatcctttggaaaaatccgttctcaaagaaccgcacgaagccctttttgggggggttaaaggcgatgaaatcttaaaagaaatcgtttttttagccgctaaattaaaaatcccttttttggtttgtgaaatggggtatgaccagttaaagagcttgaaagaatgcttggagttttgcggttatgatgcagagttttacaaggatttgagcggctttgatagagggtttgtgggcgttttaaaaagttttttaaga

SEQ ID NO: 4464 - DNA (genomic), 1506 bp, Helicobacter pylori; double-stranded, circular
  misc_feature (B) LOCATION 1...1506
  hypothetical: NO
  anti-sense: NO
atgaccttgaagccatatccaaccaaagagactggtcttgctagccaattatctgggcactggttttttcagctttcgttatttaataaaacaaactttaatcctaataaaatttggattcctttagagttcaataaaagatcaaaaataaagtttgataaagatttagaaatctattttgatagtcatgaatcgttcaatatctctaaaaaatacttgcaagaaatagatcaagaatcactaaaaaagatcaaacaatcaaaagattttttttcaattcaaaaaatagagagtaagcatgataataacgatatactgcaacttgaattttttgagaatgatacaagttttctttttgctaaaggaagttttgcagaaattttagaatacaacatgcaattaaaaatagattctttaattacaaaagaatttaataagcttttagcgatcgttcaagatagtccccaagatagttaccaattaaaaattcgtgtccgacataacaataagcttcctagagagaaatatacggaacatgaaataaaacttgaagtttatgattgcagaaaatcccacgatcacaatgagccaatcatcttaagccagcaaagcaccggcttccaatgggcgtttaatttcatgtttggctttctttataatgtgggatcacattttagttttaaccataatattatctatgtcatggacgagccagccactcatttgagcgtgccagccagaaaggagtttaggaaatttttaaaagaatacgctcataaaaatcatgttacttttgttttagccacccatgacccctttttagtggatacggatcatttagatgaaataaggattgtggaaaaggaaacagaaggctctgtaattaagaatcactttaactatcccctaaataatgcaagcaaagactccgacgctttggacaaaatcaaacgctctttaggagtgggccagcatgtttttcataacccccaaaaacaccgaatcatttttgtagaaggcatcacggattattgttatttgagcgcttttaaattgtatttgcgttacaaagaatacaaggacaaccccattcctttcactttcttacccatttcagggcttaaaaacgattcaaacgatatgaaagaaaccattgaaaaactttgcgagttagacaatcaccctattgttttgacagacgatgacagaaaatgcgtttttaaccaacaagcaacgagcgaacgatttaaaagagctaatgaagaaatgcatgatcccatcaccatcctacaactctcagactgcgataggcatttcaaacaaattgaagattgtttcagcgcaaacgatagaaacaaatacgctaaaaataagcaaatggaattgagcatggcttttaaaacaaggcttttgtatggcggagaagatgcgatagaaaaacaaacaaaaagaaattttttaaaattattcaaatggattgcatgggctacaaacttgatcaaaaac

SEQ ID NO: 4465 - DNA (genomic), 2751 bp, Helicobacter pylori; double-stranded, circular
  misc_feature (B) LOCATION 1...2751
  hypothetical: NO
  anti-sense: NO
gtggatttgaggatccaatctaaagaagtcagtcataatttaaaggaattatcaaaaacgctaatcagctatccttttgaaaaacatgtagaagctttaggggaacaatgcagtaacttcgtttctattcccattaacaatgacgactattcaaatatttgcacttttgtgagtgattttataaatcttatagcttcttacaatttattagaatcatttttagatttttataaagataaattaaaattgagcgagcttgtaactgaatatgccaacgtaaccaataatctgcttttcaaaaaattaatcaaacatttaagcggcaacaatcaattggttaaaaatttttatcagtgtataagagaaattataaaatacaacgcccctaataaagaatacaaacccaatcaattttttataatagggaaaggcaaacaaaaacaattagcaaaaatttattctcatttaaaagaacttagtgcaagtgaaattaaaccacaagatatggaagacatcttaaaaaagctagaggaattagataaaatttttaaaactaccgactttacaaaattcacaccaaaaactgaaattaaggatattattaaagaaatagacgaaaaataccctatcaatgaaaattttaaacggcaatttaatgagtttgaatcaaatattgaaaaacatgatgaaataaaaaaggattttgagcgaaacaaagagtcgctgatccgagaaattgaaaatcactgcaaaaatgaatgcaatagcgaagaagagccggagtataagattaatgatctgctcaaaaatatccaacaaatatgcaaaaattatatagaaagtcatgccgttaatgatgtgtctaaagatattaaatccatgatgtgtcagttttatttgaaacagatagatttattagtcaattcagaaattgtgcgatacagatacagcaatctttttgaaccaatacaaagatctttatgggagagtataaaaattttagataatgaaagtggcatttatttgttccctaaaaatattggtgaaatcaaggataaatttgaagcaaacaaggaaaaattcaaacaaagcaaaaatgtttctgagttcgcagaatattgccgagagtgtaacccctatacagcgtttaactttcatctaaatataaataatggtttatctcatcaatttgaaaaattcgtgccaatcatgaaagaatacaaagagccaaaaatcacagataatgaccttgaagccatatcaaccaaagagactggtcttgctagccaattatctgggcactggttttttcagctttcgttatttaataaaacaaactttaatcctaataaaatttggattcctttagagttcaataaaagatcaaaaataaagtttgataaagatttagaaatctattttgatagtcatgaatcgttcaatatctctaaaaaatacttgcaagaaatagatcaagaatcactaaaaaagatcaaacaatcaaaagattttttttcaattcaaaaaatagagagtaagcatgataataacgatatactgcaacttgaattttttgagaatgatacaagttttctttttgctaaaggaagttttgcagaaattttagaatacaacatgcaattaaaaatagattctttaattacaaaagaatttaataagcttttagcgatcgttcaagatagtccccaagatagttaccaattaaaaattcgtgtccgacataacaataagcttcctagagagaaatatacggaacatgaaataaaacttgaagtttatgattgcagaaaatcccacgatcacaatgagccaatcatcttaagccagcaaagcaccggcttccaatgggcgtttaatttcatgtttggctttctttataatgtgggatcacattttagttttaaccataatattatctatgtcatggacgagccagccactcatttgagcgtgccagccagaaaggagtttaggaaatttttaaaagaatacgctcataaaaatcatgttacttttgttttagccacccatgacccctttttagtggatacggatcatttagatgaaataaggattgtggaaaaggaaacagaaggctctgtaattaagaatcactttaactatcccctaaataatgcaagcaaagactccgacgctttggacaaaatcaaacgctctttaggagtgggccagcatgtttttcataacccccaaaaacaccgaatcatttttgtagaaggcatcacggattattgttatttgagcgcttttaaattgtatttgcgttacaaagaatacaaggacaaccccattcctttcactttcttacccatttcagggcttaaaaacgattcaaacgatatgaaagaaaccattgaaaaactttgcgagttagacaatcaccctattgttttgacagacgatgacagaaaatgcgtttttaaccaacaagcaacgagcgaacgatttaaaagagctaatgaagaaatgcatgatcccatcaccatcctacaactctcagactgcgataggcatttcaaacaaattgaagattgtttcagcgcaaacgatagaaacaaatacgctaaaaataagcaaatggaattgagcatggcttttaaaacaaggcttttgtatggcggagaagatgcgatagaaaaacaaacaaaaagaaattttttaaaattattcaaatggattgcatgggctacaaacttgatcaaaaactaa

SEQ ID NO: 4466 - DNA (genomic), 2784 bp, Helicobacter pylori; double-stranded, circular
  misc_feature (B) LOCATION 1...2784
  hypothetical: NO
  anti-sense: NO
acaagccttgatcacaaaatcacagatttttcttgcgtggatttgaggatccaatctaaagaagtcagtcataatttaaaggaattatcaaaaacgctaatcagctatccttttgaaaaacatgtagaagctttaggggaacaatgcagtaacttcgtttctattcccattaacaatgacgactattcaaatatttgcacttttgtgagtgattttataaatcttatagcttcttacaatttattagaatcatttttagatttttataaagataaattaaaattgagcgagcttgtaactgaatatgccaacgtaaccaataatctgcttttcaaaaaattaatcaaacatttaagcggcaacaatcaattggttaaaaatttttatcagtgtataagagaaattataaaatacaacgcccctaataaagaatacaaacccaatcaattttttataatagggaaaggcaaacaaaaacaattagcaaaaatttattctcatttaaaagaacttagtgcaagtgaaattaaaccacaagatatggaagacatcttaaaaaagctagaggaattagataaaatttttaaaactaccgactttacaaaattcacaccaaaaactgaaattaaggatattattaaagaaatagacgaaaaataccctatcaatgaaaattttaaacggcaatttaatgagtttgaatcaaatattgaaaaacatgatgaaataaaaaaggattttgagcgaaacaaagagtcgctgatccgagaaattgaaaatcactgcaaaaatgaatgcaatagcgaagaagagccggagtataagattaatgatctgctcaaaaatatccaacaaatatgcaaaaattatatagaaagtcatgccgttaatgatgtgtctaaagatattaaatccatgatgtgtcagttttatttgaaacagatagatttattagtcaattcagaaattgtgcgatacagatacagcaatctttttgaaccaatacaaagatctttatgggagagtataaaaattttagataatgaaagtggcatttatttgttccctaaaaatattggtgaaatcaaggataaatttgaagcaaacaaggaaaaattcaaacaaagcaaaaatgtttctgagttcgcagaatattgccgagagtgtaacccctatacagcgtttaactttcatctaaatataaataatggtttatctcatcaatttgaaaaattcgtgccaatcatgaaagaatacaaagagccaaaaatcacagataatgaccttgaagccatatcaaccaaagagactggtcttgctagccaattatctgggcactggttttttcagctttcgttatttaataaaacaaactttaatcctaataaaatttggattcctttagagttcaataaaagatcaaaaataaagtttgataaagatttagaaatctattttgatagtcatgaatcgttcaatatctctaaaaaatacttgcaagaaatagatcaagaatcactaaaaaagatcaaacaatcaaaagattttttttcaattcaaaaaatagagagtaagcatgataataacgatatactgcaacttgaattttttgagaatgatacaagttttctttttgctaaaggaagttttgcagaaattttagaatacaacatgcaattaaaaatagattctttaattacaaaagaatttaataagcttttagcgatcgttcaagatagtccccaagatagttaccaattaaaaattcgtgtccgacataacaataagcttcctagagagaaatatacggaacatgaaataaaacttgaagtttatgattgcagaaaatcccacgatcacaatgagccaatcatcttaagccagcaaagcaccggcttccaatgggcgtttaatttcatgtttggctttctttataatgtgggatcacattttagttttaaccataatattatctatgtcatggacgagccagccactcatttgagcgtgccagccagaaaggagtttaggaaatttttaaaagaatacgctcataaaaatcatgttacttttgttttagccacccatgacccctttttagtggatacggatcatttagatgaaataaggattgtggaaaaggaaacagaaggctctgtaattaagaatcactttaactatcccctaaataatgcaagcaaagactccgacgctttggacaaaatcaaacgctctttaggagtgggccagcatgtttttcataacccccaaaaacaccgaatcatttttgtagaaggcatcacggattattgttatttgagcgcttttaaattgtatttgcgttacaaagaatacaaggacaaccccattcctttcactttcttacccatttcagggcttaaaaacgattcaaacgatatgaaagaaaccattgaaaaactttgcgagttagacaatcaccctattgttttgacagacgatgacagaaaatgcgtttttaaccaacaagcaacgagcgaacgatttaaaagagctaatgaagaaatgcatgatcccatcaccatcctacaactctcagactgcgataggcatttcaaacaaattgaagattgtttcagcgcaaacgatagaaacaaatacgctaaaaataagcaaatggaattgagcatggcttttaaaacaaggcttttgtatggcggagaagatgcgatagaaaaacaaacaaaaagaaattttttaaaattattcaaatggattgcatgggctacaaacttgatcaaaaac

SEQ ID NO: 4467 - DNA (genomic), 603 bp, Helicobacter pylori; double-stranded, circular
  misc_feature (B) LOCATION 1...603
  hypothetical: NO
  anti-sense: NO
gtgcaattactcaaagacaataaagaagtggttgttttagatacagatagccaaaagtctatggaaacttttgctacaattcgtgctgaaaaagaacgccccacttttagcttatttaatcgtagtagtggctttagcgatactttaaagcaaatggtatctaagtatgaaaatatccttattgatactaagggggaatacagcaaagaaacccaaaaagctatgcttttaagtaatattgtgctagtgccaacaactcctagccaattagacactgaagtcttagctaatatgctagaaagaattgagcaactccaagagcttaatgaaaatctaagagccttaattgtcatcaatagaatgcctactattcctacccttaaagaaagacaagccttaatagagtttattaaagaaaataaccctagcgataggattacacttttagaaagctctttgagtgagcgcattgtttataagcgcagtgtaagcgaaggcttaggggtcatagaatacagcgataaaaaggctatcaatgagtgggttaatttttataacgaattaaaaagccatttagaaaaagagaaaatacatacgttttag

SEQ ID NO: 4468 - DNA (genomic), 681 bp, Helicobacter pylori; double-stranded, circular
  misc_feature (B) LOCATION 1...681
  hypothetical: NO
  anti-sense: NO
aataaggaaaataacataaccatttgcgttgctaatgaaaagggtggcagtggtaaaagcacgctttgtttaaacttagccgtgcaattactcaaagacaataaagaagtggttgttttagatacagatagccaaaagtctatggaaacttttgctacaattcgtgctgaaaaagaacgccccacttttagcttatttaatcgtagtagtggctttagcgatactttaaagcaaatggtatctaagtatgaaaatatccttattgatactaagggggaatacagcaaagaaacccaaaaagctatgcttttaagtaatattgtgctagtgccaacaactcctagccaattagacactgaagtcttagctaatatgctagaaagaattgagcaactccaagagcttaatgaaaatctaagagccttaattgtcatcaatagaatgcctactattcctacccttaaagaaagacaagccttaatagagtttattaaagaaaataaccctagcgataggattacacttttagaaagctctttgagtgagcgcattgtttataagcgcagtgtaagcgaaggcttaggggtcatagaatacagcgataaaaaggctatcaatgagtgggttaatttttataacgaattaaaaagccatttagaaaaagagaaaatacatgcgttt

SEQ ID NO: 4469 - DNA (genomic), 264 bp, Helicobacter pylori; double-stranded, circular
  misc_feature (B) LOCATION 1...264
  hypothetical: NO
  anti-sense: NO
gaaggcttttattacctttcgcctcaaatctttaacgctccaggcgttaagattggttgggactctaaccctaattttagcggcacaggctttcgctctgatacggctatcatagggtttttccccatttactacccttggatgatcgttaaatccaatggaagcccggtctatagatacgacacgcctgccactcaaaacgggcaaaactcattatccgccaacgcttggacatcaacaattacaatgtttcaatcgctttta

SEQ ID NO: 4470 - DNA (genomic), 276 bp, Helicobacter pylori; double-stranded, circular
  misc_feature (B) LOCATION 1...276
  hypothetical: NO
  anti-sense: NO
atgcatgttgcttgtcttttggctttaggggataacctcatcacgcttagccttttaaaagaaatcgcttccaaacagcaacagtcccttaaaatcctaggcactcatttgactttaaaaatcgccaagcttttagaatgcgaaaaacattttgaaatcattcctgtttttgaaaatatccctgctttttatgaccttaaaaaacaaggcgttttttgggcgatgaaggattttttatggttattaaagcaattaaaaaacatcaaatcaaacgtt

SEQ ID NO: 4471 - DNA (genomic), 849 bp, Helicobacter pylori; double-stranded, circular
  misc_feature (B) LOCATION 1...849
  hypothetical: NO
  anti-sense: NO
atgcatgttgcttgtcttttggctttaggggataacctcatcacgcttagccttttaaaagaaatcgcttccaaacagcaacagtcccttaaaatcctaggcactcatttgactttaaaaatcgccaagcttttagaatgcgaaaaacattttgaaatcattcctgtttttgaaaatatccctgctttttatgaccttaaaaaacaaggcgttttttgggcgatgaaggattttttatggttattaaaagcaattaaaaaacatcaaatcaaacgtttgattttagaaaaacaagattttagaagttttcttttatcccaatttgtttccataaccactccaaataaagaaattaaaaacgtttatcaaaaccgccaggagttgttttctcaaatttatgggcatgtttttgataaccctccatatcccatgagtttaaaaaaccccaaaaagattttgatcaaccctttcacaagagaaaatgataggaatatttctttagagcatttaaaaatcgttttaaaactcttaaaacccttttgtgttacgcttttagattttgaagaacgatacgcttttttaaaagacagagtcgctcattatcgcgctaaaaccagtttagaagaagttaaaaacctgattttagaaagcgatttgtatatagggggggattcgtttttgatccatttggcttactatttaaagaaaaattattttatctttttttatagggataatgacgatttcatgccgcctaatagtgggaatgagaatttcctaaaagcccataaaagccatttcatagaacaggatttagccaaaaaattccgccatttggggctattataa

SEQ ID NO: 4472 - DNA (genomic), 885 bp, Helicobacter pylori; double-stranded, circular
  misc_feature (B) LOCATION 1...885
  hypothetical: NO
  anti-sense: NO
aaaaaaaagaccctaaacatttcacaattaggaaaaaccatgcatgttgcttgtcttttggctttaggggataacctcatcacgcttagccttttaaaagaaatcgcttccaaacagcaacagtcccttaaaatcctaggcactcatttgactttaaaaatcgccaagcttttagaatgcgaaaaacattttgaaatcattcctgtttttgaaaatatccctgctttttatgaccttaaaaaacaaggcgttttttgggcgatgaaggattttttatggttattaaaagcaattaaaaaacatcaaatcaaacgtttgattttagaaaaacaagattttagaagttttcttttatcccaatttgtttccataaccactccaaataaagaaattaaaaacgtttatcaaaaccgccaggagttgttttctcaaatttatgggcatgtttttgataaccctccatatcccatgagtttaaaaaaccccaaaaagattttgatcaaccctttcacaagagaaaatgataggaatatttctttagagcatttaaaaatcgttttaaaactcttaaaacccttttgtgttacgcttttagattttgaagaacgatacgcttttttaaaagacagagtcgctcattatcgcgctaaaaccagtttagaagaagttaaaaacctgattttagaaagcgatttgtatatagggggggattcgtttttgatccatttggcttactatttaaagaaaaattattttatctttttttatagggataatgacgatttcatgccgcctaatagtgggaatgagaatttcctaaaagcccataaaagccatttcatagaacaggatttagccaaaaaattccgccatttggggctatta

SEQ ID NO: 4473 - DNA (genomic), 756 bp, Helicobacter pylori; double-stranded, circular
  misc_feature (B) LOCATION 1...756
  hypothetical: NO
  anti-sense: NO
gtgagtttgattaaagttagtggtgataaaaaagtgattgaggtttctattcctttaacttccatttcaggcaaagcgcgtgtgaaaatcagacatgcctttagcgattatggtatttcaacagcgactagaaaaatcccttttagtttaaagcattatgtagagtggcagatcggttatgatgtccccattaaagataaagaaaaatttgaactcactactttaaaagatgaaaaatatcattttttaggggctaataataaagtaaaaactctttatgaattgagcgaaatgatttattacgctaagcgattgggtttaatcagtttagaaaatttagaaaatactttaaaatttttagaaaaacaaaaacaatttatagaagataattttatgattacaagagaaagatttagatcgcatcaatttggtggcatggattttgaactctcacgcatttcttatcctttgctcattcattcttttgatgataatgagttgagcgaaatagttattaaggaacaacaatatggctctaaaacccaagccatgctgtatttttgcttttctattttggagttaaaaaccgctacccccttattaaacagaaccgctatgcccaaagaacatgcccttttgattatccatgaaaccaacgctcttgtgtttttagaaatgcttaaaatttttggacttttaagccaagtgcaccataacgatgtgttaaagattttagaaaaaatacttcaaaattaa

SEQ ID NO: 4474 - DNA (genomic), 753 bp, Helicobacter pylori; double-stranded, circular
  misc_feature (B) LOCATION 1...753
  hypothetical: NO
  anti-sense: NO
gtgagtttgattaaagttagtggtgataaaaaagtgattgaggtttctattcctttaacttccatttcaggcaaagcgcgtgtgaaaatcagacatgcctttagcgattatggtatttcaacagcgactagaaaaatcccttttagtttaaagcattatgtagagtggcagatcggttatgatgtccccattaaagataaagaaaaatttgaactcactactttaaaagatgaaaaatatcattttttaggggctaataataaagtaaaaactctttatgaattgagcgaaatgatttattacgctaagcgattgggtttaatcagtttagaaaatttagaaaatactttaaaatttttagaaaaacaaaaacaatttatagaagataattttatgattacaagagaaagatttagatcgcatcaatttggtggcatggattttgaactctcacgcatttcttatcctttgctcattcattcttttgatgataatgagttgagcgaaatagttattaaggaacaacaatatggctctaaaacccaagccatgctgtatttttgcttttctattttggagttaaaaaccgctacccccttattaaacagaaccgctatgcccaaagaacatgcccttttgattatccatgaaaccaacgctcttgtgtttttagaaatgcttaaaatttttggacttttaagccaagtgcaccataacgatgtgttwaagattttwgaaaaaatacttcaaaat

SEQ ID NO: 4475 - DNA (genomic), 786 bp, Helicobacter pylori; double-stranded, circular
  misc_feature (B) LOCATION 1...786
  hypothetical: NO
  anti-sense: NO
aatattttaaaaaattgtttcaaggacacccttgtgagtttgattaaagttagtggtgataaaaaagtgattgaggtttctattcctttaacttccatttcaggcaaagcgcgtgtgaaaatcagacatgcctttagcgattatggtatttcaacagcgactagaaaaatcccttttagtttaaagcattatgtagagtggcagatcggttatgatgtccccattaaagataaagaaaaatttgaactcactactttaaaagatgaaaaatatcattttttaggggctaataataaagtaaaaactctttatgaattgagcgaaatgatttattacgctaagcgattgggtttaatcagtttagaaaatttagaaaatactttaaaatttttagaaaaacaaaaacaatttatagaagataattttatgattacaagagaaagatttagatcgcatcaatttggtggcatggattttgaactcttacgcatttcttatcctttgctcattcattcttttgatgataatgagttgagcgaaatagttattaaggaacaacaatatggctctaaaacccaagccatgctgtatttttgcttttctattttggagttaaaaaccgctacccccttattaaacagaaccgctatgcccaaagaacatgcccttttgattatccatgaaaccaacgctcttgtgtttttagaaatgcttaaaatttttggacttttaagccaagtgcaccataacgatgtgttaaagattttagaaaaaatacttcaaaat

SEQ ID NO: 4476 - DNA (genomic), 204 bp, Helicobacter pylori; double-stranded, circular
  misc_feature (B) LOCATION 1...204
  hypothetical: NO
  anti-sense: NO
atcacaagcgaactttcaaagcaatttgaatggatagcagttgaagacttgcaagtaaataacatgactaaaagagctaaactcaaaactaaacttaaaaatgtcaaacaaaagagtgggcttaatcaatctattttaaacgcttcattctatcaaatcatctcttttttagattgcaaacaacaacataatagcgacaagcaa

SEQ ID NO: 4477 - DNA (genomic), 759 bp, Helicobacter pylori; double-stranded, circular
  misc_feature (B) LOCATION 1...759
  hypothetical: NO
  anti-sense: NO
atgttagggaaaaaaaacgaagaagtcttgattgatgaaaatttggttgggggtgtgatagcccttgatagattggcaaaactcaataaggccaataggactttcaaaagggctttttatctctctatggtgctcaatgtcgccgctgtaacgagtattgtgatgatgatgcctttgaagaaaacagatatatttgtttatggcattgatcgatacacaggagaatttaaaatcgtcaaacgctccgatgctaggcaaatcgtcaattctgaagccgttgtggatagtgcaacttcaaaatttgtctcattgctgtttggttatagcaaaaattctttgagggatcgcaaggatcaactaatgcagtattgcgatgtgagtttccaaacccaagcaatgagaatgttcaatgaaaatatcagacaattcgtagataaagtccgagcagaagctatcattagctccaacatacaaagagaaaaagtcaaaaatagtcccttaacgagattaacatttttcattaccatcaaaatcacgcctgatacaatggaaaattatgaatatatcactaaaaaacaagtaactatttattatgattttgctagaggtaactcttctcaagaaaatcttatcatcaacccttttggcttcaaagtgtttgacattcaaatcacggatttacaaaacgaacagacagtaagcgaaattttgagaaagattaaagaagtggaatcaaaaaataaggcattaaataaataa

SEQ ID NO: 4478 - DNA (genomic), 756 bp, Helicobacter pylori; double-stranded, circular
  misc_feature (B) LOCATION 1...756
  hypothetical: NO
  anti-sense: NO
atgttagggaaaaaaaacgaagaagtcttgattgatgaaaatttggttgggggtgtgatagcccttgatagattggcaaaactcaataaggccaataggactttcaaaagggctttttatctctctatggtgctcaatgtcgccgctgtaacgagtattgtgatgatgatgcctttgaagaaaacagatatatttgtttatggcattgatcgatacacaggagaatttaaaatcgtcaaacgctccgatgctaggcaaatcgtcaattctgaagccgttgtggatagtgcaacttcaaaatttgtctcattgctgtttggttatagcaaaaattctttgagggatcgcaaggatcaactaatgcagtattgcgatgtgagtttccaaacccaagcaatgagaatgttcaatgaaaatatcagacaattcgtagataaagtccgagcagaagctatcattagctccaacatacaaagagaaaaagtcaaaaatagtcccttaacgagattaacatttttcattaccatcaaaatcacgcctgatacaatggaaaattatgaatatatcactaaaaaacaagtaactatttattatgattttgctagaggtaactcttctcaagaaaatcttatcatcaacccttttggcttcaaagtgtttgacattcaaatcacggatttacaaaacgaacagacagtaagcgaaattttgagaaagattaaagaagtggaatcaaaaaataaggcattaaataaa

SEQ ID NO: 4479 - DNA (genomic), 765 bp, Helicobacter pylori; double-stranded, circular
  misc_feature (B) LOCATION 1...765
  hypothetical: NO
  anti-sense: NO
agctgtcgcatgttagggaaaaaaaacgaagaagtcttgattgatgaaaatttggttgggggtgtgatagcccttgatagattggcaaaactcaataaggccaataggactttcaaaagggctttttatctctctatggtgctcaatgtcgccgctgtaacgagtattgtgatgatgatgcctttgaagaaaacagatatatttgtttatggcattgatcgatacacaggagaatttaaaatcgtcaaacgctccgatgctaggcaaatcgtcaattctgaagccgttgtggatagtgcaacttcaaaatttgtctcattgctgtttggttatagcaaaaattctttgagggatcgcaaggatcaactaatgcagtattgcgatgtgagtttccaaacccaagcaatgagaatgttcaatgaaaatatcagacaattcgtagataaagtccgagcagaagctatcattagctccaacatacaaagagaaaaagtcaaaaatagtcccttaacgagattaacatttttcattaccatcaaaatcacgcctgatacaatggaaaattatgaatatatcactaaaaaacaagtaactatttattatgattttgctagaggtaactcttctcaagaaaatcttatcatcaacccttttggcttcaaagtgtttgacattcaaatcacggatttacaaaacgaacagacagtaagcgaaattttgagaaagattaaagaagtggaatcaaaaaataaggcattaaataaa

SEQ ID NO: 4480 - DNA (genomic), 468 bp, Helicobacter pylori; double-stranded, circular
  misc_feature (B) LOCATION 1...468
  hypothetical: NO
  anti-sense: NO
gtgaatttaggggcttactacacgcccccttatttagtggattgcgcttacaagcttttaaaaaagcatgttggtattgaaaactacacgcttttagacaccgcatgtggtaataaagagtttttaaagctccaccaccctaaaaaaataggagcggatattgaccctaagtgtgatgctttaataataaacgctctagccaatcctaaaagagaaaattatggcattagccaagatgaacctttaatcatcgtgggcaatcccccctataacgatagaacttcctttatcaaacaagatattaaaaataaagatttcatttttgagatagacaacgatttgaaatcccgagatttagggataagttttttaaaatcttttgcaattttaaagccggcgtttatttgcgtgctacaccctttatcttatctcatcaaagaagctaattttaagcaatttaaagctatt

SEQ ID NO: 4481 - DNA (genomic), 1032 bp, Helicobacter pylori; double-stranded, circular
  misc_feature (B) LOCATION 1...1032
  hypothetical: NO
  anti-sense: NO
ttgattagaacccccaagcatttaaccaagcaagagagcgtgaatttaggggcttactacacgcccccttatttagtggattgcgcttacaagcttttaaaaaagcatgttggtattgaaaactacacgcttttagacaccgcatgtggtaataaagagtttttaaagctccaccaccctaaaaaaataggagcggatattgaccctaagtgtgatgctttaataataaacgctctagccaatcctaaaagagaaaattatggcattagccaagatgaacctttaatcatcgtgggcaatcccccctataacgatagaacttcctttatcaaacaagatattaaaaataaagatttcatttttgagatagacaacgatttgaaatcccgagatttagggataagttttttaaaatcttttgcaattttaaagccggcgtttatttgcgtgctacaccctttatcttatctcatcaaagaagctaattttaagcaattaaagctatttaaggatcattacaggcttttagacgcttttgttgtttcttctaaatctttcactaaaagtaacgaatttcctattgtgatagctttatatgagcgagggcgaatggactatgcaggtattaggcgttttgtttttccaactgattgcgatacgacgctatgcttaaacgattttgactacatagccaattatgtggataaataccctaacgctaaaaaggttggggcatgcgtgggctatttttttcctatgcgagacattaacgctctcaaacgcaacaaaacttttttaaacgcgccaagcgaaaatgcggtgcgaatcagtcaagataaattgatttattaccaatatatccattattttaaggaaattgctcctaaaatcccttattattttggtaatttggatattatcattgatcattttgcttttttagaaattaaagacgcttttttaaaagataaaagagcgcgtttagaatattttaaaaaattgtttcaaggacacccttgtgagtttgattaa

SEQ ID NO: 4482 - DNA (genomic), 1035 bp, Helicobacter pylori; double-stranded, circular
  misc_feature (B) LOCATION 1...1035
  hypothetical: NO
  anti-sense: NO
ggggttttgattagaacccccaagcatttaaccaagcaagagagcgtgaatttaggggcttactacacgcccccttatttagtggattgcgcttacaagcttttaaaaaagcatgttggtattgaaaactacacgcttttagacaccgcatgtggtaataaagagtttttaaagctccaccaccctaaaaaaataggagcggatattgaccctaagtgtgatgctttaataataaacgctctagccaatcctaaaagagaaaattatggcattagccaagatgaacctttaatcatcgtgggcaatcccccctataacgatagaacttcctttatcaaacaagatattaaaaataaagatttcatttttgagatagacaacgatttgaaatcccgagatttagggataagttttttaaaatcttttgcaattttaaagccggcgtttatttgcgtgctacaccctttatcttatctcatcaaagaagctaattttaagcaattaaagctatttaaggatcattacaggcttttagacgcttttgttgtttcttctaaatctttcactaaaagtaacgaatttcctattgtgatagctttatatgagcgagggcgaatggactatgcaggtattaggcgttttgtttttccaactgattgcgatacgacgctatgcttaaacgattttgactacatagccaattatgtggataaataccctaacgctaaaaaggttggggcatgcgtgggctatttttttcctatgcgagacattaacgctctcaaacgcaacaaaacttttttaaacgcgccaagcgaaaatgcggtgcgaatcagtcaagataaattgatttattaccaatatatccattattttaaggaaattgctcctaaaatcccttattattttggtaatttggatattatcattgatcattttgcttttttagaaattaaagacgcttttttaaaagataaaagagcgcgtttagaatattttaaaaaattgtttcaaggacacccttgtgagtttgat

SEQ ID NO: 4483 - DNA (genomic), 510 bp, Helicobacter pylori; double-stranded, circular
  misc_feature (B) LOCATION 1...510
  hypothetical: NO
  anti-sense: NO
ttgtttgagaaatggattggtctgaccttactccttagttccttaggctatccatgccaaaaggtaagtattagtttcaagcaatacgaaaatcttatccatatccatcaaaaaggttgcaacaatgaagtggtgtgcagaacgctcatctctatcgctttactagaaagctctctagggttgaacaacaagcgagaaaaatcccttaaagacacttcttactccatgttccatatcaccttaaacaccgctaaaaagttctaccctacctattctaaaacgctcctcaaaaccaaattgttaaatgatgtgggttttgcgatccaattagccaaacaaattttaaaagaaaattttgattattaccaccaaaaacaccccaacaaaagcgtgtatcaattagtagaaatggccataggcgcttacaatgggggaatgaaacacaaccctaatggcgcttacatgaagaagtttcgttgcatttattctcaagtgcgatacaacgaataa

SEQ ID NO: 4484 - DNA (genomic), 510 bp, Helicobacter pylori; double-stranded, circular
  misc_feature (B) LOCATION 1...510
  hypothetical: NO
  anti-sense: NO
ttgtttgagaaatggattggtctgaccttactccttagttccttaggctatccatgccaaaaggtaagtattagtttcaagcaatacgaaaatcttatccatatccatcaaaaaggttgcaacaatgaagtggtgtgcagaacgctcatctctatcgctttactagaaagctctctagggttgaacaacaagcgagaaaaatcccttaaagacacttcttactccatgttccatatcaccttaaacaccgctaaaaagttctaccctacctattctaaaacgctcctcaaaaccaaattgttaaatgatgtgggttttgcgatccaattagccaaacaaattttaaaagaaaattttgattattaccaccaaaaacaccccaacaaaagcgtgtatcaattagtacaaatggccataggcgcttacaatgggggaatgaaacacaaccctaatggcgcttacatgaagaagtttcgttgcatttattctcaagtgcgatacaacgaataa

SEQ ID NO: 4485 - DNA (genomic), 516 bp, Helicobacter pylori; double-stranded, circular
  misc_feature (B) LOCATION 1...516
  hypothetical: NO
  anti-sense: NO
gttaaagttttgtttgagaaatggattggtctgaccttactccttagttccttaggctatccatgccaaaaggtaagtattagtttcaagcaatacgaaaatcttatccatatccatcaaaaaggttgcaacaatgaagtggtgtgcagaacgctcatctctatcgctttactagaaagctctctagggttgaacaacaagcgagaaaaatcccttaaagacacttcttactccatgttccatatcaccttaaacaccgctaaaaagttctaccctacctattctaaaacgctcctcaaaaccaaattgttaaatgatgtgggttttgcgatccaattagccaaacaaattttaaaaggaaattttgattattaccaccaaaaacaccccaacaaaagcgtgtatcaattagtagaaatggccataggcgcttacaatgggggaatgaaacacaaccctaatggcgcttacatgaagaagtttcgttgcatttattctcaagtgcgatacaacgaa

SEQ ID NO: 4486 - DNA (genomic), 162 bp, Helicobacter pylori; double-stranded, circular
  misc_feature (B) LOCATION 1...162
  hypothetical: NO
  anti-sense: NO
tttcctttaaaacctttagacaataagactttagaagaaatcggcctagattggcacactaatgacgacatgtcatcttatatcgctgatgaaatggtggttgtttctcaaaaagaagcggacgctattatgacgcttgtaatgagctttatgacatgtttg

SEQ ID NO: 4487 - DNA (genomic), 270 bp, Helicobacter pylori; double-stranded, circular
  misc_feature (B) LOCATION 1...270
  hypothetical: NO
  anti-sense: NO
ctaataaaaagcaaatcaaaaaagtggcttttggtaggggaaggggcgaatagtgaaatctttgaagcttccatgcaatcgcttttaaaaacggatggcgtttattctaaccacaaacctatttatcaagagttttacgaactcaattcgcataacgggttgtattatcagcctaatgtgttttttgcttatgaatcttgcgcgttagggtttagaaaaggggggttaattttggataatttttctaaattcgtgagccacaggttgcaa

SEQ ID NO: 4488 - DNA (genomic), 429 bp, Helicobacter pylori; double-stranded, circular
  misc_feature (B) LOCATION 1...429
  hypothetical: NO
  anti-sense: NO
gggtggaaaatccttttttcaagcgttagggggaatattgaagaagagcgcaccatgcgttttttgcaagatgtcgctcaaagcgtggggtttgaaacggatttttcttacattgatgaagtagagtttaatgtagaagagggcgtgtttaaaaacggcttgaatcatgagtttttattcaaattaatcccatgggaaaatatcgctattgatgagccagaattagcccttttgatgcaaggcatgatggaaaataaaaacacgatttttttaaacccggcttatacgatccttttccaatccaagcgttttttaaagcttttatgggacagataccccaaacaccccttattgttagaaacgagctatgaacctttagctaataaaaagcaaatcaaaaaagtggcttttggtaggggaaggggcgaa

SEQ ID NO: 4489 - DNA (genomic), 1095 bp, Helicobacter pylori; double-stranded, circular
  misc_feature (B) LOCATION 1...1095
  hypothetical: NO
  anti-sense: NO
atgtcatcttatatcgctgatgaaatggtggttgtttctcaaaaagaagcggacgcttattatgacgcttgtaatgagctttatgacatgtttgtagagacggctgaagaggccattaaaaacgatcgcttttttgaattggatattcctaatgcgctcattcctatgatcaaacagagttttgaagaagaagtgcattggcatatttacgggcgttttgatttagccggggggcttgatggtaagcctattaaattattggaatttaacgctgatacccccaccatgctctatgaaaccgcagtgattcaatgggcgttactcaaagcgaatggctatgatgaaaacaagcaattcaataacctttatgaagcgcttggcgagaattttaaacgcatggtaactttgggtgaagacacgagccgttttgaggaaatgtatgaggggtggaaaatccttttttcaagcgttagggggaatattgaagaagagcgcaccatgcgttttttgcaagatgtcgctcaaagcgtggggtttgaaacggatttttcttacattgatgaagtagagtttaatgtagaagagggcgtgtttaaaaacggcttgaatcatgagtttttattcaaattaatcccatgggaaaatatcgctattgatgagccagaattagcccttttgatgcaaggcatgatggaaaataaaaacacgatttttttaaacccggcttatacgatccttttccaatccaagcgttttttaaagcttttatgggacagataccccaaacaccccttattgttagaaacgagctatgaacctttagctaataaaaagcaaatcaaaaaagtggcttttggtagggaaggggcgaatagtgaaatctttgaagcttccatgcaatcgcttttaaaaacggatggcgtttattctaaccacaaacctatttatcaagagttttacgaactcaattcgcataacgggttgtattatcagcctaatgtgttttttgcttatgaatcttgcgcgttagggtttagaaaaggggggttaattttggataatttttctaaattcgtgagccacaggttgcaataa

SEQ ID NO: 4490 - DNA (genomic), 489 bp, Helicobacter pylori; double-stranded, circular
  misc_feature (B) LOCATION 1...489
  hypothetical: NO
  anti-sense: NO
gtggttgtcattattttagtggtcgttatcattcaaaacagctcttctttaaaagaagagagagagcaagaacgcgctattaagcccgacaccaaaaataattctttcaatgaaactaatcctacagaagaaaaaaagttagagccaacgcctaaattagaagaaaaacacaaagaacaagacaagcaaggcaaagaagcgatcaaagaaaatcctaataccatttacattatccctaaacgagatatttgggtagaagtgattgatttagatgagaaaaaaaactcttttcaaaaggtttttaaaaaaagttatcctttagaggctaaaaaccaccgcttgttgttacgctttgggcatgggcatcttattcttaaaaacaaccatcaagaacaagattataacgacagcaaaactaggcggtttttatacgagccaaataaaggtttaacgctcatcaatgaggcccaatacaaagcgctccagcaa

SEQ ID NO: 4491 - DNA (genomic), 966 bp, Helicobacter pylori; double-stranded, circular
  misc_feature (B) LOCATION 1...966
  hypothetical: NO
  anti-sense: NO
atggaacagaataaaaaaagtttagaaaatttagatctttctgatgttcaaaacatttctaaagatatttctggaacggctttagaagaattatcgcttaaaaatttagataaaaatttgcagattctaaaagaagttggagcggcagaaatttgcaaggcgactaaaatcgcttctaaaaatatccattctatcttggaaaagcgctatgagtctttatcaagggtgcatgctaggggttttatacagattttagagcacgagtataaaattgatttgagcgcatgggtgaaagaatttgacaaagtgtgtgtttttaaagagggcgtgggagaagagcaaaaacaagaaacaagccctgaagaaacagcaaaaaaaccccttaaggttgaattggattacagcatcaatcaagccaatacttcattatccaaaaaatcttccaaatggaaaccctttgttatcgttttaggggtggttgtcattattttagtggtcgttatcattcaaaacagctcttctttaaaagaagagagagagcaagaacgcgctattaagcccgacaccaaaaataattctttcaatgaaactaatcctacagaagaaaaaaagttagagccaacgcctaaattagaagaaaaacacaaagaacaagacaagcaaggcaaagaagcgatcaaagaaaatcctaataccatttacattatccctaaacgagatatttgggtagaagtgattgatttagatgagaaaaaaaactcttttcaaaaggtttttaaaaaaagttatcctttagaggctaaaaaccaccgcttgttgttacgctttgggcatgggcatcttattcttaaaaacaaccatcaagaacaagattataacgacagcaaaactaggcggtttttatacgagccaaataaaggtttaacgctcatcaatgaggcccaatacaaagcgctccagcaatga

SEQ ID NO: 4492 - DNA (genomic), 963 bp, Helicobacter pylori; double-stranded, circular
  misc_feature (B) LOCATION 1...963
  hypothetical: NO
  anti-sense: NO
atggaacagaataaaaaaagtttagaaaatttagatctttctgatgttcaaaacatttctaaagatatttctggaacggctttagaagaattatcgcttaaaaatttagataaaaatttgcagattctaaaagaagttggagcggcagaaatttgcaaggcgactaaaatcgcttctaaaaatatccattctatcttggaaaagcgctatgagtctttatcaagggtgcatgctaggggttttatacagattttagagcacgagtataaaattgatttgagcgcatgggtgaaagaatttgacaaagtgtgtgtttttaaagagggcgtgggagaagagcaaaaacaagaaacaagccctgaagaaacagcaaaaaaaccccttaaggttgaattggattacagcatcaatcaagccaatacttcattatccaaaaaatcttccaaatggaaaccctttgttatcgttttaggggtggttgtcattattttagtggtcgttatcattcaaaacagctcttctttaaaagaagagagagagcaagaacgcgctattaagcccgacaccaaaaataattctttcaatgaaactaatcctacagaagaaaaaaagttagagccaacgcctaaattagaagaaaaacacaaagaacaagacaagcaaggcaaagaagcgatcaaagaaaatcctaataccatttacattatccctaaacgagatatttgggtagaagtgattgatttagatgagaaaaaaaactcttttcaaaaggtttttaaaaaaagttatcctttagaggctaaaaaccaccgcttgttgttacgctttgggcatgggcatcttattcttaaaaacaaccatcaagaacaagattataacgacagcaaaactaggcggtttttatacgagccaaataaaggtttaacgctcatcaatgaggcccaatacaaagcgctccagcaa

SEQ ID NO: 4493 - DNA (genomic), 579 bp, Helicobacter pylori; double-stranded, circular
  misc_feature (B) LOCATION 1...579
  hypothetical: NO
  anti-sense: NO
ggcgtttatcataataaggaaatcattgtcgcttataggaagattggcaaggtgcattccactttaaccacaacaagcatgattttagcgtttggcgttcagaaggtgctttttagcggggtggctggaagcttagttaaagatttaaaaatcaatgatttgttagtggctactcaattagtccagcacgatgtggatttgagcgcgtttgatcaccctttagggtttatccccgaaagcgcgatttttattgaaacgagtggaagtttaaacgctttagctaaaaagatcgctaatgagcaacatatcgcgctcaaagaaggcgtcatcgcatcaggcgatcagtttgtgcatagcaaagaaaggaaagaatttttagttagcgagtttaaagcgagcgcggtggaaatggagggggcgagcgtggcgtttgtgtgccaaaaatttggcgtgccatgctgcgtgctaaggagcattagcgataacgccgatgaaaaagccggtatgagttttgatgaatttttagaaaaaagcgctcacacttcagcgaaattcttaaaaagcatggtggatgagctt

SEQ ID NO: 4494 - DNA (genomic), 696 bp, Helicobacter pylori; double-stranded, circular
  misc_feature (B) LOCATION 1...696
  hypothetical: NO
  anti-sense: NO
atggtgcaaaaaattggcattttaggggcgatgagagaagaaataacccctatactagaattgtttggcgtggattttgaagagatccctttaggggggaatgttttccataaaggcgtttatcataataaggaaatcattgtcgcttatagcaagattggcaaggtgcattccactttaaccacaacaagcatgattttagcgtttggcgttcagaaggtgctttttagcggggtggctggaagcttagttaaagatttaaaaatcaatgatttgttagtggctactcaattagtccagcacgatgtggatttgagcgcgtttgatcaccctttagggtttatccccgaaagcgcgatttttattgaaacgagtggaagtttaaacgctttagctaaaaagatcgctaatgagcaacatatcgcgctcaaagaaggcgtcatcgcatcaggcgatcagtttgtgcatagcaaagaaaggaaagaatttttagttagcgagtttaaagcgagcgcggtggaaatggagggggcgagcgtggcgtttgtgtgccaaaaatttggcgtgccatgctgcgtgctaaggagcattagcgataacgccgatgaaaaagccggtatgagttttgatgaatttttagaaaaaagcgctcacacttcagcgaaattcttaaaaagcatggtggatgagctttag

SEQ ID NO: 4495 - DNA (genomic), 777 bp, Helicobacter pylori; double-stranded, circular
  misc_feature (B) LOCATION 1...777
  hypothetical: NO
  anti-sense: NO
gtggggggagcgcttgcgcatataagccctttgagtatagaatacgcagcgccttttgtgggcaatgccggggtggctttagcgggtttgatgagcgatgaaatttatttgtgcgctttagattgcgcttatatcaaagggtttaaaaagcacgctcaaaattcctattatggagatgaaaaagagattgacacctcatctttaatcagcgtagagggtaatgttgaaggttatgaaacttttagcgactcgctttttttgctctctaaagaaaggattgaagaagcccttcattattaccagcctaaaaaagtctataatttaagctatggggcgaaaatcaagcacgccgttagcctcaatcactctcaagtgaaattgaaacaaatcaacaaacaagacgctatcgttcgcattaaaagcatgtttagccctagaagtaatcatgctaaggatttaaaaaatttacaaaaaaatctgattcgttttaaagaggattttttcacgcatttaaacacgccttgtaaaaccaagcaagaagcatttgaatgggtggatagcttgagtggattttgccaaacagccagcgctaaaacccccactataggcattttatttgaagggagtgtcgcccatatcttacaaagcgttctaatcgtttcattgcatcttaaagaaaatgagctgacgcgttttatcaaattctctcaaaacgccttaaaacaattccttaaaaaagcttgtttgttattgcaaatgcaactcaaacaaccatga

SEQ ID NO: 4496 - DNA (genomic), 1218 bp, Helicobacter pylori; double-stranded, circular
  misc_feature (B) LOCATION 1...1218
  hypothetical: NO
  anti-sense: NO
atgccctttttaaaagccctagcatcttttgatgcgccctttttagaaaaagaaatttcaaagcgttttagggataatttagtttttttcaaatcttatcaccctaatctgtttaacgccctcaatacgccttttaaaaattaccaattgctttttgaaacaaaccatcttaatctcttacacacgcccacgaacgctttaagctaccctaaacatcaaatgatagaaaccgcttttaacatggctaaaaaccccttgaataatcccagatggtcattagacaataaccacctctctttacattatttaaaatctcaaaacaaccacaaactccccctaacccttaaagccacgcatgcgatctcaaactttttagataatcatcaaacgccttgctctttaaagaaattcctaccccctaccatgatttatggcgttttagacggcttgtttttggctattttacaggctcaaaattaccgcttccattcgctttatttgtttgaagaaaatttagacttgtttaaaatcagttgctattttgcgcgttatgaagatttgattaaaaaaggggctaaactttttattcaagggttttttaaccctaatgaattgaaaatggattttttgaaacgccctatcacgcattcttttttaaagctagaaatcatgccctataaaagcgcttttaatttgcgcatgcgagaaaacattcaaagctattacaaacaagccttaaggggttgggggagttttgaagacgaattgctagggttaaagaacacgcttaaaaacttacccctataccaaaccctaaaaaccaaacccaaaaaaattaacgcccccatttgcgtggtgggtaatgggccaagcctggatttattgttagattttttaaaagaaaatgaagaaaaattcatcattttttcatgcggaaccgctttaaagcctttaaaagcgcatggcgttaaagtggattttcaaatagaagtggagcgcatagactatcttaaggaggttttagaaagagcccccctagaagacacccccttaatgggcgctaacatgctcaatcctaacgcttttgatttagccaaagaagcgttgatgtttatgcgtggggggagcgcttgcgcatataagccctttgagtatagaatacgcagcgccttttgtgggcaatgccggggtggctttagcgggtttgatgagcgatga

SEQ ID NO: 4497 - DNA (genomic), 420 bp, Helicobacter pylori; double-stranded, circular
  misc_feature (B) LOCATION 1...420
  hypothetical: NO
  anti-sense: NO
atgcatcctataatgtttgcctatatcgctaacgcgctcgctcaagctagaaagatcaacggaacactttgcatggcgtttcaaaaaatatctcaagtcaaagaattaggcattgataaagcaaagagtttgataggcaacctttctcaagtgattatctaccccacaaaagatactgatgaattaatagaatgtggcgtcccattaagcgatagtgaaatcaatttcttacacaacacggacatgagagccagacaagtgctagtaaaaaatatcgttacaaacgcttcagcttttattgaaattgatttaaaaaagatttgcaagaactactttatattcttgatagcaatgctggtaatagaaaaatcctcaatgatcttaaaaaagcaaaccaagaaacttataaggaagagtatt

SEQ ID NO: 4498 - DNA (genomic), 423 bp, Helicobacter pylori; double-stranded, circular
  misc_feature (B) LOCATION 1...423
  hypothetical: NO
  anti-sense: NO
atgcatcctataatgtttgcctatatcgctaacgcgctcgctcaagctagaaagatcaacggaacactttgcatggcgtttcaaaaaatatctcaagtcaaagaattaggcattgataaagcaaagagtttgataggcaacctttctcaagtgattatctaccccacaaaagatactgatgaattaatagaatgtggcgtcccattaagcgatagtgaaatcaatttcttacacaacacggacatgagagccagacaagtgctagtaaaaaatatcgttacaaacgcttcagcttttattgaaattgatttaaaaaagatttgcaagaactactttatattcttgatagcaatgctggtaatagaaaaatcctcaatgatcttaaaaaagcaaaccaagaaacttataaggaagagtatttaa

SEQ ID NO: 4499 - DNA (genomic), 477 bp, Helicobacter pylori; double-stranded, circular
  misc_feature (B) LOCATION 1...477
  hypothetical: NO
  anti-sense: NO
agcaaaagaacacaacaaaccttttttctattcattgatgaaactaaagactacattatgcatcctataatgtttgcctatatcgctaacgcgctcgctcaagctagaaagatcaacggaacactttgcatggcgtttcaaaaaatatctcaagtcaaagaattaggcattgataaagcaaagagtttgataggcaacctttctcaagtgattatctaccccacaaaagatactgatgaattaatagaatgtggcgtcccattaagcgatagtgaaatcaatttcttacacaacacggacatgagagccagacaagtgctagtaaaaaatatcgttacaaacgcttcagcttttattgaaattgatttaaaaaagatttgcaagaactactttatattcttgatagcaatgctggtaatagaaaaatcctcaatgatcttaaaaaagcaaaccaagaaacttataaggaagagtatt

SEQ ID NO: 4500 - DNA (genomic), 987 bp, Helicobacter pylori; double-stranded, circular
  misc_feature (B) LOCATION 1...987
  hypothetical: NO
  anti-sense: NO
atggaaaaagtttgcgtgagcgcatgggggttgcctaagattttagaagaaagattaaaagaaaaatatggcgatgattgggaaaaacatgttaaggctaaagcaataaacgaagaagagcttgaagaacaagtcaaagctaaagccaaagagcaacaaaagacacaaagagaaaaaacactcaatggatttttaaaaaaagttggtttaaaaaagcgtgatatgttacaaagcactatgttatttgatgaagtcaaagaagctgatgtgctttttcaagcagagcgtaaaattggcgattggatttttagcagtgcggtgttcttttttgctctagcccttatagaagccattattattgtatgcttattgccgttaaaagaaaaagtgccttatttagtaaccttttcaaacgctacacaaaattttgccatagtccaaagagcagacaagagcatccgtgctaatcaagcgcttgtgagacaattggtagcgtcttatgttaataatagagaaaatatttcaagtataaaagagcaaaacgaaatagcccacgaaaccattaggttgcaaagcgcatttgaagtgtgggatttttttgaaaaactggtttcttatgagcatagcatttacactaatataaatctaacacgaaaaattagcattatcaatatcgctttaatcagtaaaacccaagccaatattgaaatatccgcacaactttttcataaagaaaagttagaaagcgaaaagcgttatagaataattatgacctttgaatttgaacctattgaaattgatacaaaatctgttcccctaaaccctacaggctttattgttacaggttatgatgtaactgaaattgcgattttaaaagatttagatgagaaaaataaagtcaaagatgatggtgtgaaatctaggattatccatgtcgagaaaaaagaccctcatatgagccagtataaagatgttaaggagcaataa

SEQ ID NO: 4501 - DNA (genomic), 984 bp, Helicobacter pylori; double-stranded, circular
  misc_feature (B) LOCATION 1...984
  hypothetical: NO
  anti-sense: NO
atggaaaaagtttgcgtgagcgcatgggggttgcctaagattttagaagaaagattaaaagaaaaatatggcgatgattgggaaaaacatgttaaggctaaagcaataaacgaagaagagcttgaagaacaagtcaaagctaaagccaaagagcaacaaaagacacaaagagaaaaaacactcaatggatttttaaaaaaagttggtttaaaaaagcgtgatatgttacaaagcactatgttatttgatgaagtcaaagaagctgatgtgctttttcaagcagagcgtaaaattggcgattggatttttagcagtgcggtgttcttttttgctctagcccttatagaagccattattattgtatgcttattgccgttaaaagaaaaagtgccttatttagtaaccttttcaaacgctacacaaaattttgccatagtccaaagagcagacaagagcatccgtgctaatcaagcgcttgtgagacaattggtagcgtcttatgttaataatagagaaaatatttcaagtataaaagagcaaaacgaaatagcccacgaaaccattaggttgcaaagcgcatttgaagtgtgggatttttttgaaaaactggtttcttatgagcatagcatttacactaatataaatctaacacgaaaaattagcattatcaatatcgctttaatcagtaaaacccaagccaatattgaaatatccgcacaactttttcataaagaaaagttagaaagcgaaaagcgttatagaataattatgacctttgaatttgaacctattgaaattgatacaaaatctgttcccctaaaccctacaggctttattgttacaggttatgatgtaactgaaattgcgattttaaaagatttagatgagaaaaataaagtcaaagatgatggtgtgaaatctaggattatccatgtcgagaaaaaagaccctcatatgagccagtataaagatgttaaggagcaa

SEQ ID NO: 4502 - DNA (genomic), 1014 bp, Helicobacter pylori; double-stranded, circular
  misc_feature (B) LOCATION 1...1014
  hypothetical: NO
  anti-sense: NO
aaaatcttcaaaaaggctttaaggcataaaatggaaaaagtttgcgtgagcgcatgggggttgcctaagattttagaagaaagattaaaagaaaaatatggcgatgattgggaaaaacatgttaaggctaaagcaataaacgaagaagagcttgaagaacaagtcaaagctaaagccaaagagcaacaaaagacacaaagagaaaaaacactcaatggatttttaaaaaaagttggtttaaaaaagcgtgatatgttacaaagcactatgttatttgatgaagtcaaagaagctgatgtgctttttcaagcagagcgtaaaattggcgattggatttttagcagtgcggtgttcttttttgctctagcccttatagaagccattattattgtatgcttattgccgttaaaagaaaaagtgccttatttagtaaccttttcaaacgctacacaaaattttgccatagtccaaagagcagacaagagcatccgtgctaatcaagcgcttgtgagacaattggtagcgtcttatgttaataatagagaaaatatttcaagtataaaagagcaaaacgaaatagcccacgaaaccattaggttgcaaagcgcatttgaagtgtgggatttttttgaaaaactggtttcttatgagcatagcatttacactaatataaatctaacacgaaaaattagcattatcaatatcgctttaatcagtaaaacccaagccaatattgaaatatccgcacaactttttcataaagaaaagttagaaagcgaaaagcgttatagaataattatgacctttgaatttgaacctattgaaattgatacaaaatctgttcccctaaaccctacaggctttattgttacaggttatgatgtaactgaaattgcgattttaaaagatttagatgagaaaaataaagtcaaagatgatggtgtgaaatctaggattatccatgtcgagaaaaaagaccctcatatgagccagtataaagatgttaaggagcaa

SEQ ID NO: 4503 - DNA (genomic), 699 bp, Helicobacter pylori; double-stranded, circular
  misc_feature (B) LOCATION 1...699
  hypothetical: NO
  anti-sense: NO
atggatattttaaaagcagagcatttaaacaaacagattaaaaaaaccaaaatcgtttcagatgtttctttagaagtgaaaagcggcgaagtggtggggcttttagggcctaatggggcgggtaaaaccaccaccttttacatgatatgcgggcttttagagcctagtggggggagcgtttatttaaacgatgtggatttagctaaataccccttacacaagcgttctaacttgggcataggctacttgccccaagaatccagtatttttaaagaattgagcgtggaagagaatttggccctagcaggggagagcacttttaaaaactctaaagagagcgaagaaaaaatggaaagcttgcttgatgcttttaatatccaagccataagagagcgcaagggcatgagcttgagtgggggagaaagaaggcgcgtagaaatcgctagggctttaatgaaaaaccctaaattcgtgctgttagatgagccttttgcgggcgtggatccgattgcggtgattgacattcaaagaatcattgaaagcttgattggattaaacattggcgtgttgattactgatcacaatgtgcgagagaccttgagcgtgtgccatagggcgtatgtgatcaaaagcggcacgcttttagcggcgggaacgctaatgaaatttatgaaaacgctttggtgcgtaagtattatt

SEQ ID NO: 4504 - DNA (genomic), 723 bp, Helicobacter pylori; double-stranded, circular
  misc_feature (B) LOCATION 1...723
  hypothetical: NO
  anti-sense: NO
atggatattttaaaagcagagcatttaaacaaacagattaaaaaaaccaaaatcgtttcagatgtttctttagaagtgaaaagcggcgaagtggtggggcttttagggcctaatggggcgggtaaaaccaccaccttttacatgatatgcgggcttttagagcctagtggggggagcgtttatttaaacgatgtggatttagctaaataccccttacacaagcgttctaacttgggcataggctacttgccccaagaatccagtatttttaaagaattgagcgtggaagagaatttggccctagcaggggagagcacttttaaaaactctaaagagagcgaagaaaaaatggaaagcttgcttgatgcttttaatatccaagccataagagagcgcaagggcatgagcttgagtgggggagaaagaaggcgcgtagaaatcgctagggctttaatgaaaaaccctaaattcgtgctgttagatgagccttttgcgggcgtggatccgattgcggtgattgacattcaaagaatcattgaaagcttgattggattaaacattggcgtgttgattactgatcacaatgtgcgagagaccttgagcgtgtgccatagggcgtatgtgatcaaaagcggcacgcttttagcgagcgggaacgctaatgaaatttatgaaaacgctttggtgcgtaagtattatttaggggaaaattttaaggtatag

SEQ ID NO: 4505 - DNA (genomic), 720 bp, Helicobacter pylori; double-stranded, circular
  misc_feature (B) LOCATION 1...720
  hypothetical: NO
  anti-sense: NO
atggatattttaaaagcagagcatttaaacaaacagattaaaaaaaccaaaatcgtttcagatgtttctttagaagtgaaaagcggcgaagtggtggggcttttagggcctaatggggcgggtaaaaccaccaccttttacatgatatgcgggcttttagagcctagtggggggagcgtttatttaaacgatgtggatttagctaaataccccttacacaagcgttctaacttgggcataggctacttgccccaagaatccagtatttttaaagaattgagcgtggaagagaatttggccctagcaggggagagcacttttaaaaactctaaagagagcgaagaaaaaatggaaagcttgcttgatgcttttaatatccaagccataagagagcgcaagggcatgagcttgagtgggggagaaagaaggcgcgtagaaatcgctagggctttaatgaaaaaccctaaattcgtgctgttagatgagccttttgcgggcgtggatccgattgcggtgattgacattcaaagaatcattgaaagcttgattggattaaacattggcgtgttgattactgatcacaatgtgcgagagaccttgagcgtgtgccatagggcgtatgtgatcaaaagcggcacgcttttagcgagcgggaacgctaatgaaatttatgaaaacgctttggtgcgtaagtattatttaggggaaaattttaaggta

SEQ ID NO: 4506 - DNA (genomic), 282 bp, Helicobacter pylori; double-stranded, circular
  misc_feature (B) LOCATION 1...282
  hypothetical: NO
  anti-sense: NO
atgtatggcgtgaaagagattaaagataaaattgacaagcaactccacaataacgatcatttgtttgaagggctttttggggaaaaagaagatttgaaaaaattggtgagcatgtttgggcagttgcgtttccaaaagcgctggagccaaaccccaagagtgccacaaaccagtgttctagggcatactttatgcgtggcgattatggggtatttattgagttttgacttgaaagcttgtaaaagcatgcggatcaatcattttttgggcgggctttttcca

SEQ ID NO: 4507 - DNA (genomic), 1221 bp, Helicobacter pylori; double-stranded, circular
  misc_feature (B) LOCATION 1...1221
  hypothetical: NO
  anti-sense: NO
atgtatgcggctcatcctattaaacccataaaagcccctaaactcaaatctcaatttttaaggcgtgtgtttgtgggcgcgtccattaggcgctggaatgaccaagcatgccctttggaatttgtggaattagacaagcaagcccataaagcgatgattgcgtatctgctcgctaaagatttaaaagataggggtaaagatttagatttagatcttttaatcaaatatttttgctttgagtttttggagcgcttggttttaaccgatattaaaccccctattttttacgccctccaacaaacgcatagtaaagagttagcttcctatgttgcgcaaagtttgcaagatgaaatcagtgcgtatttttctttagaggaactcaaagagtatttaagccacaggcctcaaattttagaaactcaaattttagagagcgcgcatttttatgcgtctaagtgggagtttgatattatctatcattttaaccccaacatgtatggcgtgaaagagattaaagataaaattgacaagcaactccacaataacgatcatttgtttgaagggctttttggggaaaaagaagatttgaaaaaattggtgagcatgtttgggcagttgcgtttccaaaagcgctggagccaaaccccaagagtgccacaaaccagtgttctagggcatactttatgcgtggcgattatggggtatttattgagttttgacttgaaagcttgtaaaagcatgcggatcaatcattttttgggcgggcttttccatgatttacccgaaattttaacccgagacattatcacgcccatcaaacaaagcgttgcagggcttgatcattgcattaaagagattgaaaaaaaggaaatgcaaaacaaagtctattcctttgtgtctttgggcgttcaagaagatttgaaatatttcaccgaaaacgagtttaaaaaccgctacaaagacaagtctcatcaaatcgttttcactaaagacgctgaagaattattcacgctttataatagcgatgaatatcttggggtttgcggggagcttttgaaggtgtgcgatcatttgagcgcgtttttagaagcccaaatctctctttctcatggcatttctagctacgatttaatccaaggagctaaaaaccttttagaattgcgatcccaaacggaactgcttgatttggatttagggaaattgtttagagattttaagtaa

SEQ ID NO: 4508 - DNA (genomic), 1260 bp, Helicobacter pylori; double-stranded, circular
  misc_feature (B) LOCATION 1...1260
  hypothetical: NO
  anti-sense: NO
gatcatagctttaatattcaaaatagtataaaaaggaaagtcatgtatgcggctcatcctattaaacccataaaagcccctaaactcaaatctcaatttttaaggcgtgtgtttgtgggcgcgtccattaggcgctggaatgaccaagcatgccctttggaatttgtggaattagacaagcaagcccataaagcgatgattgcgtatctgctcgctaaagatttaaaagataggggtaaagatttagatttagatcttttaatcaaatatttttgctttgagtttttggagcgcttggttttaaccgatattaaaccccctattttttacgccctccaacaaacgcatagtaaagagttagcttcctatgttgcgcaaagtttgcaagatgaaatcagtgcgtatttttctttagaggaactcaaagagtatttaagccacaggcctcaaattttagaaactcaaattttagagagcgcgcatttttatgcgtctaagtgggagtttgatattatctatcattttaaccccaacatgtatggcgtgaaagagattaaagataaaattgacaagcaactccacaataacgatcatttgtttgaagggctttttggggaaaaagaagatttgaaaaaattggtgagcatgtttgggcagttgcgtttccaaaagcgctggagccaaaccccaagagtgccacaaaccagtgttctagggcatactttatgcgtggcgattatggggtatttattgagttttgacttgaaagcttgtaaaagcatgcggatcaatcattttttgggcgggcttttccatgatttacccgaaattttaacccgagacattatcacgcccatcaaacaaagcgttgcagggcttgatcattgcattaaagagattgaaaaaaaggaaatgcaaaacaaagtctattcctttgtgtctttgggcgttcaagaagatttgaaatatttcaccgaaaacgagtttaaaaaccgctacaaagacaagtctcatcaaatcgttttcactaaagacgctgaagaattattcacgctttataatagcgatgaatatcttggggtttgcggggagcttttgaaggtgtgcgatcatttgagcgcgtttttagaagcccaaatctctctttctcatggcatttctagctacgatttaatccaaggagctaaaaaccttttagaattgcgatcccaaacggaactgcttgatttggatttagggaaattgtttagagattttaag

SEQ ID NO: 4509 - DNA (genomic), 327 bp, Helicobacter pylori; double-stranded, circular
  misc_feature (B) LOCATION 1...327
  hypothetical: NO
  anti-sense: NO
caaaaagaagtatctaactatgaggaatccattttagtcaacactccttatgcaagggttaatattctcgcgattgaaaaaaatgaaagtcctattgaattactggctccggtagatttagttaccgctttgagcgatttgatgctaggaggtgagggggcgagcaaggaagaaatggataatgacgatttagacgcttttaaagaaatggcttctaatatttttggtgcgatcgctacaagcttgaagtctcaagaattgctccctaaactcaatttcaccaccacgaacgctgaaatcgctaaagagcttcctaaaaaagaagat

SEQ ID NO: 4510 - DNA (genomic), 330 bp, Helicobacter pylori; double-stranded, circular
  misc_feature (B) LOCATION 1...330
  hypothetical: NO
  anti-sense: NO
caaaaagaagtatctaactatgaggaatccattttagtcaacactccttatgcaagggttaatattctcgcgattgaaaaaaatgaaagtcctattgaattactggctccggtagatttagttaccgctttgagcgatttgatgctaggaggtgagggggcgagcaaggaagaaatggataatgacgatttagacgcttttaaagaaatggcttctaatatttttggtgcgatcgctacaagcttgaagtctcaagaattgctccctaaactcaatttcaccaccacgaacgctgaaatcgctaaagagcttcctaaaaaagaagattcg

SEQ ID NO: 4511 - DNA (genomic), 465 bp, Helicobacter pylori; double-stranded, circular
  misc_feature (B) LOCATION 1...465
  hypothetical: NO
  anti-sense: NO
agacttcctaaaaaagaagattacgctaaggcgatggtgttttcttttaaaatggaagccatcaaagaaagccaaatcgttttattgatcacttcagcgtttgagggccaatttgaaaaaacgcataaagaagaaaaagaagaaacgacaaaaagcgctactgaagagactaaaacccacgacgcgtctttagaaaatatagaaatccgcaatatcagcatgcttttagacgtgaaattgaacgttaaggtgcgtatcggtcaaaaaaagatgattttaaaagatgtggtctctatggatatagggagcgtggtggagttggatcaattggtgaatgaccctttagaaatcctcgtagatgacaaggtgatcgctaagggcgaagtggtgatcgtggatgggaattttggcattcaaatcacggatattggcactaaaaaggaacgattagagcaactgaaaaat

SEQ ID NO: 4512 - DNA (genomic), 858 bp, Helicobacter pylori; double-stranded, circular
  misc_feature (B) LOCATION 1...858
  hypothetical: NO
  anti-sense: NO
atgcaagattttattaagatttttattcaagaggttgtctctactttagaagggttagtgggtaaggctccaagcgtaggattagaaaaagaagtttctaacaatgaagaagcgagtttaatcagcactccttatgcaagggttaagattagcgcgattgaaaaaaatgaaagtcctattgaattactggctccggtagatttagttaccgctttgagcgatttgatgctaggaggtgagggggcgagcaaggaagaaatggataatgacgatttagacgcttttaaagaaatggcttctaatatttttggtgcgatcgctacaagcttgaagtctcaagaattgctccctaaactcaatttcaccaccacgaacgctgaaatcgctaaagagcttcctaaaaaagaagattacgctaaggcgatggtgttttcttttaaaatggaagccatcaaagaaagccaaatcgttttattgatcacttcagcgtttgagggccaatttgaaaaaacgcataaagaagaaaaagaagaaacgacaaaaagcgctactgaagagactaaaacccacgacgcgtctttagaaaatatagaaatccgcaatatcagcatgcttttagacgtgaaattgaacgttaaggtgcgtatcggtcaaaaaaagatgattttaaaagatgtggtctctatggatatagggagcgtggtggagttggatcaattggtgaatgaccctttagaaatcctcgtagatgacaaggtgatcgctaagggcgaagtggtgatcgtggatgggaattttggcattcaaatcacggatattggcactaaaaaggaacgattagagcaactgaaaaattaa

SEQ ID NO: 4513 - DNA (genomic), 513 bp, Helicobacter pylori; double-stranded, circular
  misc_feature (B) LOCATION 1...513
  hypothetical: NO
  anti-sense: NO
atgagtaatcaagcgagccatttggataattttatgaacgctaaaaatcccaaaagtttttttgataataaggggaataccaaattcatcgctatcacaagcggtaaggggggcgtggggaaatccaacattagcgctaatttagcttactctttatacaagaaaggttataaggtaggggtatttgatgcgratattggtttagcgaatttagatgtcatttttggggtgaaaacccayaaaaatatcttgcatgycttaaaaggcgaagycaaattgyaagaaatcatttgcgagattgaacccgggctttgcttaatccctggggatagcggcgaagaaattttaaaatacatcagcgssgcggaagytttcgattcattcttagatgaagagggggttctaagcgctttaatttatattttaattaatacattttctaaaaatttgggtccactatctcaaacttttcttaattttcagtcatttctttttatttttattcaatctccc

SEQ ID NO: 4514 - DNA (genomic), 885 bp, Helicobacter pylori; double-stranded, circular
  misc_feature (B) LOCATION 1...885
  hypothetical: NO
  anti-sense: NO
atgagtaatcaagcgagccatttggataattttatgaacgctaaaaatcccaaaagtttttttgataataaggggaataccaaattcatcgctatcacaagcggtaaggggggcgtggggaaatccaacattagcgctaatttagcttactctttatacaagaaaggttataaggtaggggtatttgatgcggatattggtttagcgaatttagatgtcatttttggggtgaaaacccataaaaatatcttgcatgccttaaaaggcgaagccaaattgcaagaaatcatttgcgagattgaacccgggctttgcttaatccctggggatagcggcgaagaaattttaaaatacatcagcggcgcggaagctttggatcgattcgtagatgaagagggggttttaagctctttagattatattgtgattgatacgggtgctgggattggggccactacgcaagcgtttttgaatgcgagcgattgcgtggtgattgttaccacacccgatccttcagcgattaccgatgcgtatgcatgcattaaaatcaactccaagaataaagatgaattgttccttatcgctaacatggtagcccaacctaaagaaggcagggcgacttatgaaaggctattcaaggtggctaaaaacaatatcgcttcattagaattgcactatttaggggcgattgaaaacagctccttattgaaacgctatgtgagggagcgaaagattttgaggaaaatagcccctaacgatttgttttcgcaatccattgaccagatagcgagccttttagtttctaaactagaaaccggcactttagaaataccaaaagaaggtttaaaaagcttttttaaaaggcttttgaagtatttggggtag

SEQ ID NO: 4515 - DNA (genomic), 891 bp, Helicobacter pylori; double-stranded, circular
  misc_feature (B) LOCATION 1...891
  hypothetical: NO
  anti-sense: NO
ggaacaagcatgagtaatcaagcgagccatttggataattttatgaacgctaaaaatcccaaaagtttttttgataataaggggaataccaaattcatcgctatcacaagcggtaaggggggcgtggggaaatccaacattagcgctaatttagcttactctttatacaagaaaggttataaggtaggggtatttgatgcggatattggtttagcgaatttagatgtcatttttggggtgaaaacccataaaaatatcttgcatgccttaaaaggcgaagccaaattgcaagaaatcatttgcgagattgaacccgggctttgcttaatccctggggatagcggcgaagaaattttaaaatacatcagcggcgcggaagctttggatcgattcgtagatgaagagggggttttaagctctttagattatattgtgattgatacgggtgctgggattggggccactacgcaagcgtttttgaatgcgagcgattgcgtggtgattgttaccacacccgatccttcagcgattaccgatgcgtatgcatgcattaaaatcaactccaagaataaagatgaattgttccttatcgctaacatggtagcccaacctaaagaaggcagggcgacttatgaaaggctattcaaggtggctaaaaacaatatcgcttcattagaattgcactatttaggggcgattgaaaacagctccttattgaaacgctatgtgagggagcgaaagattttgaggaaaatagcccctaacgatttgttttcgcaatccattgaccagatagcgagccttttagtttctaaactagaaaccggcactttagaaataccaaaagaaggtttaaaaagcttttttaaaaggcttttgaagtatttgggg

SEQ ID NO: 4516 - DNA (genomic), 198 bp, Helicobacter pylori; double-stranded, circular
  misc_feature (B) LOCATION 1...198
  hypothetical: NO
  anti-sense: NO
ccgcgaatcatagcattcttttggatatggggatcaaatacgaacgctattgctctgataggactcgcacggctttttttgaaccctaaagactttgtgttcaaaagggagcagagtttcaaggataaagagcgtcaaaagatttatgacattgtgaaagaagcgcaagaaaaggctattcaggcattagagcgggga

SEQ ID NO: 4517 - DNA (genomic), 210 bp, Helicobacter pylori; double-stranded, circular
  misc_feature (B) LOCATION 1...210
  hypothetical: NO
  anti-sense: NO
cgattatggctatgggcagtattcactcacagcaccgggcatggcattgacttagacattcatgagcttccctatatttcatcgcgcagtgaaaccattttagaagagggcatggtgttttctgtagagcctgggatttatatccctgggttttttggggtgcgcattgaggatttagtggtgattaaaaattctagggccgagctttta

SEQ ID NO: 4518 - DNA (genomic), 711 bp, Helicobacter pylori; double-stranded, circular
  misc_feature (B) LOCATION 1...711
  hypothetical: NO
  anti-sense: NO
ttgatgagaggattagaaagagaatcgcatttcacgctcaatgaaaacgcgatgttttttgagtgcgcttatagttgcgataacgctttgtttttgcaattagacgatcgctcgttctttatcactgattctcgttacacccaagaagctaaagaaagccttcagcctaaaaagggcgttttagtggaagtgatagagtctagcgatttagtccaaagcgcgattgatttaattacaaagagttcggttaaaaagctcttttttgaccccaatcaagtgaatttgcaaacctacaagcgtttggattcagcggttgggaataaggttgttttagagggcgtgcccagttaccaccgccaaaaacgcatcattaaaaacgagcatgagatccaactcctcaaaaaatctcaagcgttgaatgttgaagcttttgaaaattttgccgagtatgtgaaaaagatttttgatgaaaaagagtcattgagcgagcggtatttgcagcataaggttaaagactttttgactaaagagggggtttatgatctgagttttgagcctattttagccttgaatgcgaacgcgagcaaaccccatgccttgcctagtgcgaaggattttttaaccgcgaatcatagcattcttttggatatggggatcaaatacgaacgctattgctctgataggactcgcacggctttttttgaaccctaa

SEQ ID NO: 4519 - DNA (genomic), 738 bp, Helicobacter pylori; double-stranded, circular
  misc_feature (B) LOCATION 1...738
  hypothetical: NO
  anti-sense: NO
cccgatcaacaatcaaaaataaaggggttattgatgagaggattagaaagagaatcgcatttcacgctcaatgaaaacgcgatgttttttgagtgcgcttatagttgcgataccgctttgtttttgcaattagacgatcgctcgttctttatccctgattctcgttacacccaagaagctaaagaaagccttcagcctaaaaagggcgttttagtggaagtgatagagtctagcgatttagtccaaagcgcgattgatttaattacaaagagttcggttaaaaagctcttttttgaccccaatcaagtgaatttgcaaacctacaagcgtttggattcagcggttgggaataaggttgttttagagggcgtgcccagttaccaccgccaaaaacgcatcattaaaaacgagcatgagatccaactcctcaaaaaatctcaagcgttgaatgttgaagcttttgaaaattttgccgagtatgtgaaaaagatttttgatgaaaaagagtcattgagcgagcggtatttgcagcataaggttaaagactttttgactaaagagggggtttatgatctgagttttgagcctattttagccttgaatgcgaacgcgagcaaaccccatgccttgcctagtgcgaaggattttttaaccgcgaatcatagcattcttttggatatggggatcaaatacgaacgctattgctctgataggactcgcacggctttttttgaaccc

SEQ ID NO: 4520 - DNA (genomic), 1074 bp, Helicobacter pylori; double-stranded, circular
  misc_feature (B) LOCATION 1...1074
  hypothetical: NO
  anti-sense: NO
atgagaggattagaaagagaatcgcatttcacgctcaatgaaaacgcgatgttttttgagtgcgcttatagttgcgataacgctttgtttttgcaattagacgatcgctcgttctttatcactgattctcgttacacccaagaagctaaagaaagccttcagcctaaaaagggcgttttagtggaagtgatagagtctagcgatttagtccaaagcgcgattgatttaattacaaagagttcggttaaaaagctcttttttgaccccaatcaagtgaatttgcaaacctacaagcgtttggattcagcggttgggaataaggttgttttagagggcgtgcccagttaccaccgccaaaaacgcatcattaaaaacgagcatgagatccaactcctcaaaaaatctcaagcgttgaatgttgaagcttttgaaaattttgccgagtatgtgaaaaagatttttgatgaaaaagagtcattgagcgagcggtatttgcagcataaggttaaagactttttgactaaagagggggtttatgatctgagttttgagcctattttagccttgaatgcgaacgcgagcaaaccccatgccttgcctagtgcgaaggattttttaaaagcggatcatagcattcttttggatatggggatcaaatacgaacgctattgctctgataggactcgcacggctttttttgaccctaaagactttgtgttcaaaagggagcagagtttcaaggataaagagcgtcaaaagatttatgacattgtgaaagaagcgcaagaaaaggctatttcaggcattagagcgggcatgaccggtaaagaagcggacagcttggctaggggagtgattagcgattatggttatgggcagtatttcactcacagcaccgggcatggcattgacttagacattcatgagcttccctatatttcatcgcgcagtgaaaccattttagaagagggcatggtgttttctgtagagcctgggatttatatccctgggttttttggggtgcgcattgaggatttagtggtgattaaaaattctagggccgagcttttatga

SEQ ID NO: 4521 - DNA (genomic), 462 bp, Helicobacter pylori; double-stranded, circular
  misc_feature (B) LOCATION 1...462
  hypothetical: NO
  anti-sense: NO
atgcattattcttatgaagcctttttaaaagacagcctggagttagctaaacaagtggagcgcctttgcggtatcccagaagcccttgtgtgcgtgatgcgagggggcatgactttagtgcattttttgagtttgcactggaatttaagggaagtttatggcatcaatgcgatttcttatgacaccaccaagcgacaaaacgccctaaaaattgaaaatacccccacgatcaaagatcatttaaaaaccattttagtggtagatgaaatcgtagatagcggtaattctttggaagcggtacttaaagtgttgcaagacaaacaccctgataaaaagttttatagcgcgagtttgttccaaaaaacaagcgcgaaatacaaagccgatgcgtttttaaaagacgctcctgaatggattgatttcttttgggaagtggatttgaaaaacttgaaaagccactga

SEQ ID NO: 4522 - DNA (genomic), 474 bp, Helicobacter pylori; double-stranded, circular
  misc_feature (B) LOCATION 1...474
  hypothetical: NO
  anti-sense: NO
aatttaaggactataatgcattattcttatgaagcctttttaaaagacagcctggagttagctaaacaagtggagcgcctttgcggtatcccagaagcccttgtgtgcgtgatgcgagggggcatgactttagtgcattttttgagtttgcactggaatttaagggaagtttatggcatcaatgcgatttcttatgacaccaccaagcgacaaaacgccctaaaaattgaaaatacccccacgatcaaagatcatttaaaaaccattttagtggtagatgaaatcgtagatagcggtaattctttggaagcggtacttaaagtgttgcaagacaaacaccctgataaaaagttttatagcgcgagtttgttccaaaaaacaagcgcgaaatacaaagccgatgcgtttttaaaagacgctcctgaatggattgatttcttttgggaagtggatttgaaaaacttgaaaagccac

SEQ ID NO: 4523 - DNA (genomic), 141 bp, Helicobacter pylori; double-stranded, circular
  misc_feature (B) LOCATION 1...141
  hypothetical: NO
  anti-sense: NO
gccttggagcgagtggggtgcaaatggcgatctcgttttttaggcacgaaagaatgcgacgctaaagcgtatgccgatcttttgcccacgctcaaaaaagaagatattttactcatcaaatcgcctgtaggctatccggct

SEQ ID NO: 4524 - DNA (genomic), 249 bp, Helicobacter pylori; double-stranded, circular
  misc_feature (B) LOCATION 1...249
  hypothetical: NO
  anti-sense: NO
atattaactaatattaaggaaagagctatggtatcaacactcaaaccgctaaaaatcggtaaacacaccataaaattccctatttttcaagggggcatgggtgtggggattagctgggatgaactagctggaaatgttgccaaagaaggggctttaggagtgatttcagccgtagggactggttattataaaaacatgcgttttgtagaaaggattgtggctaaaaaaccctttgaagccttgaatttt

SEQ ID NO: 4525 - DNA (genomic), 264 bp, Helicobacter pylori; double-stranded, circular
  misc_feature (B) LOCATION 1...264
  hypothetical: NO
  anti-sense: NO
gctatccggcttaggctatcaatacgggggttgatcaaacgcattgaagaaggtaacgcgcctaaaatcgcatgcgtgagcaattgtgtaacgccttgtaacaggggtgaagaaactaaaaaggtgggctattgtatcgctgatggtttggggcgcagttatttaggaaacagagaagaggggctttattttaccggggctaatggctatagagtggataagattatcagcgtgcatgaattgattaaagagcttacagagggt

SEQ ID NO: 4526 - DNA (genomic), 558 bp, Helicobacter pylori; double-stranded, circular
  misc_feature (B) LOCATION 1...558
  hypothetical: NO
  anti-sense: NO
ccctttgaagccttgaatttttactccaaaaaagcgttgaatgagatttttgcaaacgctaggaaaatttgcgggaacaagcctttgggggcgaatattttatacgctatcaatgactatggccgtgttttaagggactcttgtgaggcgggggcgaatattatcattacaggggctggtttgcccactaacatgcctgaattcgctaaggattttagcgatgtggcgctcatccctatcatttcctcagcgaaggctttaaaaatcctttgtaaaagatggagcgatcgctataaaagaatcccggacgcattcattgtggaagggcctttgagtggggggcatcagggctttaaatacgaagattgtttcaaagaagaattccaattagaaaacttagtgcctaaagtcgtggaagcttctaaagaatgggggaatatccctatcatcgccgcggggggaatttgggataggaaagatatagacaccatgttaagccttggagcgagtggggtgcaaatggcgatctcgttttttaggcacgaaagaatgcgacgc

SEQ ID NO: 4527 - DNA (genomic), 555 bp, Helicobacter pylori; double-stranded, circular
  misc_feature (B) LOCATION 1...555
  hypothetical: NO
  anti-sense: NO
tttgaagccttgaatttttactccaaaaaagcgttgaatgagatttttgcaaacgctaggaaaatttgcgggaacaagcctttgggggcgaatattttatacgctatcaatgactatggccgtgttttaagggactcttgtgaggcgggggcgaatattatcattacaggggctggtttgcccactaacatgcctgaattcgctaaggattttagcgatgtggcgctcatccctatcatttcctcagcgaaggctttaaaaatcctttgtaaaagatggagcgatcgctataaaagaatcccggacgcattcattgtggaagggcctttgagtggggggcatcagggctttaaatacgaagattgtttcaaagaagaattccaattagaaaacttagtgcctaaagtcgtggaagcttctaaagaatgggggaatatccctatcatcgccgcggggggaatttgggataggaaagatatagacaccatgttaagccttggagcgagtggggtgcaaatggcgatctcgttttttaggcacgaaagaatgcgacgc

SEQ ID NO: 4528 - DNA (genomic), 1092 bp, Helicobacter pylori; double-stranded, circular
  misc_feature (B) LOCATION 1...1092
  hypothetical: NO
  anti-sense: NO
atggtatcaacactcaaaccgctaaaaatcggtaaacacaccataaaattccctatttttcaagggggcatgggtgtggggattagctgggatgaactagctggaaatgttgccaaagaaggggctttaggagtgatttcagccgtagggactggttattataaaaacatgcgttttgtagaaaggattgtggctaaaaaaccctttgaagccttgaatttttactccaaaaaagcgttgaatgagatttttgcaaacgctaggaaaatttgcgggaacaagcctttgggggcgaatattttatacgctatcaatgactatggccgtgttttaagggactcttgtgaggcgggggcgaatattatcattacaggggctggtttgcccactaacatgcctgaattcgctaaggattttagcgatgtggcgctcatccctatcatttcctcagcgaaggctttaaaaatcctttgtaaaagatggagcgatcgctataaaagaatcccggacgcattcattgtggaagggcctttgagtggggggcatcagggctttaaatacgaagattgtttcaaagaagaattccaattagaaaacttagtgcctaaagtcgtggaagcttctaaagaatgggggaatatccctatcatcgccgcgggggggatttgggataagaaagatatagacaccatgttaagccttggagcgagtggggtgcaaatggcgactcgttttttaggcacgaaagaatgcgacgctaaagcgtatgccgatcttttgcccacgctcaaaaaagaagatattttactcatcaaatcgcctgtaggctatccggctagggctatcaatacgggggtgatcaaacgcattgaagagggtaacgcgcctaaaatcgcatgcgtgagcaattgtgtagcgccttgtaacaggggtgaagaagctaaaaaggtgggctattgtatcgctgatggtttggggcgcagttatttaggaaacagagaagaggggctttattttaccggggctaatggctatagagtggataagattatcagcgtgcatgaattgattaaagagcttacagagggttaa

SEQ ID NO: 4529 - DNA (genomic), 1092 bp, Helicobacter pylori; double-stranded, circular; identical to SEQ ID NO: 4528
  misc_feature (B) LOCATION 1...1092
  hypothetical: NO
  anti-sense: NO

SEQ ID NO: 4530 - DNA (genomic), 225 bp, Helicobacter pylori; double-stranded, circular
  misc_feature (B) LOCATION 1...225
  hypothetical: NO
  anti-sense: NO
cagtttgattcgcaaacagaggtatggacgattttcaacaaaccgattaatagcccaagagccttaaaagatgaacttgttaatgaaagcgaaaaagaaagtttaaaaattttaaataaagagatgaaaaacattttaggcgaacactacatgggctataaaacagtgagcgctcaagcggctttttatggcctttcacaggctttgatcccagggactgatttt

SEQ ID NO: 4531 - DNA (genomic), 252 bp, Helicobacter pylori; double-stranded, circular
  misc_feature (B) LOCATION 1...252
  hypothetical: NO
  anti-sense: NO
ggatgttttttaaagaacaaagcaaagtggatcaacaagaacgatttcaagcggctttattcaacttaccaatacaaccatcaaaactttattttgctggatgtgccagggatagaaggcagcgaaaaaaaggttattgatcagatttctggcgcgaacgcaaaaagcccatgctatttttatgttaccgagacgcctggtcctccgcaaaaaggagaagaagggaaaaggggaacgattgtttatatccaa

SEQ ID NO: 4532 - DNA (genomic), 474 bp, Helicobacter pylori; double-stranded, circular
  misc_feature (B) LOCATION 1...474
  hypothetical: NO
  anti-sense: NO
atgcatgaacgcattgaaagaggtattrgaaataatgaatgtaaagaaatttttggcaatgaactcaaacaaagaaagacaaaattgattgaagacatagaacggcggttcaaagaatgcgaggaacaattccgtggaagtgtaggaaaaaatattgaacaacttgaagaaagagttaaagattctctagcgattataaaacgcatcaataaccttggtcttaatcctaattctaattttaatatggatagcggcattgatacaataggcttatttagttcaataggaggtttggtgttgcttctattgacgcctgtagtaggtgagtttgcgttaattgcaggagtgggtttagcattagtgggggtaggtaaatcaatatggagtttttttgattcagattataaaaaatcccaacaaagaaaagaagtggataagaatttacatcaaatttgcgaaaaattgtgcaggatg

SEQ ID NO: 4533 - DNA (genomic), 1020 bp, Helicobacter pylori; double-stranded, circular
  misc_feature (B) LOCATION 1...1020
  hypothetical: NO
  anti-sense: NO
tcccagggactgatttttgataaaaagaaacaaaaatttctaaaagattttaaagcaggagaattattgtatcaatcccatttcaaaccattagtagaatttatagccgaagagcttcttaaaaactcgcgcgccaaaatcattcaatcaaactgcaataaagccttaaaagtggtagaagaattacaaaatacgataaaaaccacgattgaaaaacagatcaatccagggatgaaagaaacacaagacccccaacaagaagctcgctttaatttggatcgttctacagataaatttatatcagatttggaaaaatcagcgttcagcaaaatcaatcaattcgaatttaattttagaaaagaaatgcatgaacgcattgaaagaggtattggaaataatgaatgtaaagaaatttttggcaatgaactcaaacaaagaaagacaaaattgattgaagacatagaacggcggttcaaagaatgcgaggaacaattccgtggaagtgtaggaaaaaatattgaacaacttgaagaaagagttaaagattctctagcgattataaaacgcatcaataaccttggtcttaatcctaattctaattttaatatggatagcggcattgatacaataggcttatttagttcaataggaggtttggtgttgcttctattgacgcctgtagtaggtgagtttgcgttaattgcaggagtgggtttagcattagtgggggtaggtaaatcaatatggagtttttttgattcagattataaaaaatcccaacaaagaaaagaagtggataagaatttacatcaaatttgcgaaaaaattgtgcaggatgtgaaaagccgcattgaaagttataaaaatggtgcattgggaatgattgaagaactcaacgccggttttaacaaacttgttgatcattacgaacgcatgaaaagacaattggaagaagcccatgaaaaactaggatacatctataatagtatccatcttacaatatctaaccgccgcatacaa

SEQ ID NO: 4534 - DNA (genomic), 1116 bp, Helicobacter pylori; double-stranded, circular
  misc_feature (B) LOCATION 1...1116
  hypothetical: NO
  anti-sense: NO
atgaaaaacattttaggcgaacactacatgggctataaaacagtgagcgctcaagcggctttttatggcctttcacaggctttgatcccagggactgattttgataaaaagaaacaaaaatttctaaaagattttaaagcaggagaattattgtatcaatcccatttcaaaccattagtagaatttatagccgaagagcttcttaaaaactcgcgcgccaaaatcattcaatcaaactgcaataaagccttaaaagtggtagaagaattacaaaatacgataaaaaccacgattgaaaaacagatcgatccagggatcaaagaaacacaagaacaccaacaagaagctcgctttaatttggatcgttctacagataaatttatatcagatttggaaaaatcagcgttcagcaaaatcaatcaattcgaatttaattttagaaaagaaatgcatgaacgcattgaaagaggtattggaaataatgaatgtaaagaaatttttggcaatgaactcaaacaaagaaagacaaaattgattgaagacatagaacggcggttcaaagaatgcgaggaacaattccgtggaagtgtaggaaaaaatattgaacaacttgaagaaagagttaaagattctctagcgattataaaacgcatcaataaccttggtcttaatcctaattctaattttaatatggatagcggcattgatacaataggcttatttagttcaataggaggtttggtgttgcttctattgacgcctgtagtaggtgagtttgcgttaattgcaggagtgggtttagcattagtgggggtaggtaaatcaatatggagtttttttgattcagattataaaaaatcccaacaaagaaaagaagtggataagaatttacatcaaatttgcgaaaaaattgtgcaggatgtgaaaagccgcattgaaagttataaaaatggtgcattgggaatgattgaagaactcaacgccggttttaacaaacttgttgatcattacgaacgcatgaaaagacaattggaagaagcccatgaaaaattaggatacatctctaatagtatccatctaacaatatcaaagcaaggagcatgcaatgaagaatga

SEQ ID NO: 4535 - DNA (genomic), 513 bp, Helicobacter pylori; double-stranded, circular
  misc_feature (B) LOCATION 1...513
  hypothetical: NO
  anti-sense: NO
atgaatgtcaaaaaaaaggaaaagccacaaagtggaaagattgatagggtggattgtttggagaaacttgggaaagaaaacactacttttttaagcagtatagctatggggagcattggtcaattagcgatccccattcctggagttggagtgctcattgggggctttgtgggtggggtgatgagtaaaactttttatgatgtctcgctaacgattttcaaagaggctaaattagcgcgtcaaaggcgtattgagattgaaaaagaatgccgtgagagtatcagacagttagagatgtatcaaaatcaatttaatgaagtgtttgagcggtattttcatgggactataaaattctttaatgaaagttttgatgagctggrgagggcgctttgtgcgggcgatgcggatttggctatagcagtcaataacaagatccaagaggggatgggtcaagagttgctgtttgacaataagcaagagtgctgggaatttatcactagccgtaaagagggt

SEQ ID NO: 4536 - DNA (genomic), 549 bp, Helicobacter pylori; double-stranded, circular
  misc_feature (B) LOCATION 1...549
  hypothetical: NO
  anti-sense: NO
atgtcaaaaaaaaggaaaagaccacaaagtggaaagattgatagggtggattgtttggagaaacttgggaaagaaaacactacttttttaagcagtatagctatggggagcattggtcaattagcgatccccattcctggagttggagtgctcattgggggctttgtgggtggggtgatgagtaaaactttttatgatgtctcgctaacgattttcaaagaggctaaattagcgcgtcaaaggcgtattgagattgaaaaagaatgccgtgagagtatcagacagttagagatgtatcaaaatcaatttaatgaagtgtttgagcggtattttcatgggactataaaattctttaatgaaagttttgatgagctggagagggcgctttgtgcgggcgatgcggatttggctatagcagtcaataacaagatccaagaggggatgggtcaagagttgctgtttgacaataagcaagagtgctgggaatttatcactagccgtaaagagggttggaatttcatcactagccgtggaaaaacagaaatttaa

SEQ ID NO: 4537 - DNA (genomic), 558 bp, Helicobacter pylori; double-stranded, circular
  misc_feature (B) LOCATION 1...558
  hypothetical: NO
  anti-sense: NO
agagtatctatgaatgtcaaaaaaaagggaaagccacaaagtggaaagattgatagggtggattgtttggagaaacttgggaaagaaaacactacttttttaagcagtatagctatggggagcattggtcaattagcgatccccattcctggagttggagtgctcattgggggctttgtgggtggggtgatgagtaaaactttttatgatgtctcgctaacgattttcaaagaggctaaattagcgcgtcaaaggcgtattgagattgaaaaagaatgccgtgagagtatcagacagttagagatgtatcaaaatcaatttaatgaagtgtttgagcggtattttcatgggactataaaattctttaatgaaagttttgatgagctggagagggcgctttgtgcgggcgatgcggatttggctatagcagtcaataacaagatccaagaggggatgggtcaagagttgctgtttgacaataagcaagagtgctgggaatttatcactagccgtaaagagggttggaatttcgtcactagccgtggaaaaacagaaatt

SEQ ID NO: 4538 - DNA (genomic), 270 bp, Helicobacter pylori; double-stranded, circular
  misc_feature (B) LOCATION 1...270
  hypothetical: NO
  anti-sense: NO
atgataggagtttaccccaattattccaaaaagcaactaaaacgccccttagtcatatttgtaagtagggagttagcgctggctaatggtattcttacagacgcctatgacattgaagcaaatctttacatgaatgctcgtatcgttatgaaraataataaaaggaaacattatgagcagcgggttaatttacatttcrttagaagtcttggtarcgtgtttgatcaccgctctaatcatgtattatgtgatgaaaaagatctattacgc

SEQ ID NO: 4539 - DNA (genomic), 642 bp, Helicobacter pylori; double-stranded, circular
  misc_feature (B) LOCATION 1...642
  hypothetical: NO
  anti-sense: NO
ttgaaaagggctaaatcaaaaaataaagtcagggataaattggcttgcaagcttttgttttggaaactcaaagattatcaaaatattttattgtatagcccattagggcatgagcttgacattaggcctttgattttgaagttaagacaaaaaaataagcgcgtgtggttgcctaaaagcatcaaaaaaggcgctcatttttctaaagagggttttactatcgcgccctttaggttgccattaaggcgtttggggtggtttgatgagccgagtttgtcgcgctattataagcgggaattggattgtattgtcgtgccgattttaggaatggatacaagctttaggcgcgtgggttttgggctaggcatgtatgataggagtttaccccaattattcaaaaagcaactaaaacgccccttagtcatatttgtaagtagggagttagcgctggctaatggtattcttacagacgcctatgacattgaagcaaatctttacatgaatgctcgtatcgttatgaagaataataaaaggaaacattatgagcagcgggttaatttacatttcattagaagtcttggtagcgtgtttgatcaccgctctaatcatgtattatgtgatgaaaaagatctattacgctag

SEQ ID NO: 4540 - DNA (genomic), 693 bp, Helicobacter pylori; double-stranded, circular
  misc_feature (B) LOCATION 1...693
  hypothetical: NO
  anti-sense: NO
aatttaaggattataaccattaaaacgatttttagagatttttgtaaagaacgcttgaaaagggctaaatcaaaaaataaagtcagggataaattggcttgcaagcttttgttttggaaactcaaagattatcaaaatattttattgtatagcccattagggcatgagcttgacattaggcctttgattttgaagttaagacaaaaaaataagcgcgtgtggttgcctaaaagcatcaaaaaaggcgctcatttttctaaagagggttttactatcgcgccctttaggttgccattaaggcgtttggggtggtttgatgagccgagtttgtcgcgctattataagcgggaattggattgtattgtcgtgccgattttaggaatggatacaagctttaggcgcgtgggttttgggctaggcatgtatgataggagtttaccccaattattcaaaaagcaactaaaacgccccttagtcatatttgtaagtagggagttagcgctggctaatggtattcttacagacgcctatgacattgaagcaaatctttacatgaatgctcgtatcgttatgaagaataataaaaggaaacattatgagcagcgggttaatttacatttcattagaagtcttggtagcgtgtttgatcaccgctctaatcatgtattatgtgatgaaaaagatctattacgc

SEQ ID NO: 4541 - DNA (genomic), 210 bp, Helicobacter pylori; double-stranded, circular
  misc_feature (B) LOCATION 1...210
  hypothetical: NO
  anti-sense: NO
tcaacgcttcaccgggtaaaggactttaacaagacacaagacagcttctcagacatcaaattctcaacgcccaatcaattagaacaatctctcaacgctcttaaaaataagctagccgcattcttttcaaaacaccctgataaacataacggcatagagtttaatgaaatcgttaagactcaaatagaagcgcttttatatgccacaatc

SEQ ID NO: 4542 - DNA (genomic), 942 bp, Helicobacter pylori; double-stranded, circular
  misc_feature (B) LOCATION 1...942
  hypothetical: NO
  anti-sense: NO
aaaaaaggacttgacatgttgttggattatgattttttattgttattgaatgatgagagcgggaagccaaccagatactactatttgttacaagattttgaaaaggattttgtggctagtgaagtggctcaaaatagagcgaggcaattcgttaaggaaatcattgggagcaagaaagcctctaaaactaaaaacagcgccattaaagtttctcatacaaaggcttctgctattgggagcgaaacgattggaagttgtgatcttaaaaaggcatgtgagaaaatcaaaagcggactaccctttgggattatctcagcctttaaaccctttaaagacgctttttatagagatttcaatcataatgagcaaaaattactgataggggcagctaaaagcggttgcattcaatctagtgctgataaactggctcagttaaaaacgcgcttaatctattggcaggacaaatctgttaaagtggattgggataaacccattttaatcaaggacttctttaaaggcaataattacctttataggaggttgtgttttttattggggaagcattttatggacagatttttaaagaataacgctaaggcgagcgtgaaagactttatgtctagtaaggaatttgtcaataaataccgatacacccccaagcaaaatacagaaagagcgaaaaagctgcaatcgtatttagagagtaagcgtgattttatagggtttgttcaaacgcttaactctttgaaagacagcccgcaagatccttttttacccaatgaagaaataagctttttggtgttcgcaaatgagcctactattatatttaatttaagggactatttattggtgttagcgcaaatatttaaccaacaagcgatctgttattgtgagagcaaatgccctatagaattgatcaacgcttcaccgggtaaaggactt

SEQ ID NO: 4543 - DNA (genomic), 276 bp, Helicobacter pylori; double-stranded, circular
  misc_feature (B) LOCATION 1...276
  hypothetical: NO
  anti-sense: NO
atatatttcgaagagaaccagctatcactaagtttgtttggcctttcacccctatccacagctcatcccaacccgtttcaatgggtacgagttcagtcctccacgcgctattacacgcgtttcaacttggccatggatagatcacttagcttcgggtctgcagcatctgactcaagcgccctattaagactcgctttcgctacggcttcgcattcgcttaaccttgccagataccacaactcgcaggatcattatgcaaaaggcagtccatcaccc

SEQ ID NO: 4544 - DNA (genomic), 141 bp, Helicobacter pylori; double-stranded, circular
  misc_feature (B) LOCATION 1...141
  hypothetical: NO
  anti-sense: NO
atgttgagtgcgttggtgatgctgccttttatggaggttttttattatttcaattttccgttgtggctcaatcttttcttagggcaaaccattggagcggtgatttttttcaagttggataagttgattttttctaaaaaa

SEQ ID NO: 4545 - DNA (genomic), 216 bp, Helicobacter pylori; double-stranded, circular
  misc_feature (B) LOCATION 1...216
  hypothetical: NO
  anti-sense: NO
atgcgagaattttttaagaaacttggcacagaatacgcttccaagctgtttttggtttattggcttagatggatgttgagtgcgttggtgatgctgccttttatggaggttttttattatttcaattttccgttgtggctcaatcttttcttagggcaaaccattggagcggtgatttttttcaagttggataagttgattttttctaaaaaataa

SEQ ID NO: 4546 - DNA (genomic), 225 bp, Helicobacter pylori; double-stranded, circular
  misc_feature (B) LOCATION 1...225
  hypothetical: NO
  anti-sense: NO
aagggttgttttatgcgagaattttttaagaaacttggcacagaatacgcttccaagctgtttttggtttattggcttagatggatgttgagtgcgttggtgatgctgccttttatggaggttttttattatttcaattttccgttgtggctcaatcttttcttagggcaaaccattggagcggtgatttttttcaagttggataagttgattttttctaaaaaa

SEQ ID NO: 4547 - DNA (genomic), 654 bp, Helicobacter pylori; double-stranded, circular
  misc_feature (B) LOCATION 1...654
  hypothetical: NO
  anti-sense: NO
atgagcattaaggaaaatttagagcaagttagaaacgaatttaaaagcgatgaaaagcttttagaaggagcgtttagattagaaaagtttttcaaacgctacaagtgggtgttgttgtttatcgtggtggcttttatcgcttatttaggggatacaaaattacaagattataagcatgagcaaacgagagagcggatcactcaaatttataatgaagtgctagagagtcctaataatatagccttgcaaaaaagattgaaagaagtcgccccagagttgtatgacttgtatcagttcgccagagcgagtgagaggaacgatgcaaacgagtttaaaaggctttcgcaatcttctaatgaaatcgttaaagcgttcgccaaatattcttacgcatcgctctctagagataaaaacctgcttgaaaaaagccccattcttaaagaaatgagcgctttacaagaagtgaacttgttgtatgaagaaaattctaaagacgcaatcaaaaaagcgcatcaaagtttatcaactatccctctaagttcttcactctatgctataatctctgttttaaaacattatggaatgttagaagatattcagcaaaacccttccaaaccaaccaatctaaagaaagaaaccattcaaggaacgcat

SEQ ID NO: 4548 - DNA (genomic), 657 bp, Helicobacter pylori; double-stranded, circular
  misc_feature (B) LOCATION 1...657
  hypothetical: NO
  anti-sense: NO
atgagcattaaggaaaatttagagcaagttagaaacgaatttaaaagcgatgaaaagcttttagaaggagcgtttagattagaaaagtttttcaaacgctacaagtgggtgttgttgtttatcgtggtggcttttatcgcttatttaggggatacaaaattacaagattataagcatgagcaaacgagagagcggatcactcaaatttataatgaagtgctagagagtcctaataatatagccttgcaaaaaagattgaaagaagtcgccccagagttgtatgacttgtatcagttcgccagagcgagtgagaggaacgatgcaaacgagtttaaaaggctttcgcaatcttctaatgaaatcgttaaagcgttcgccaaatattcttacgcatcgctctctagagataaaaacctgcttgaaaaaagccccattcttaaagaaatgagcgctttacaagaagtgaacttgttgtatgaagaaaattctaaagacgcaatcaaaaaagcgcatcaaagtttatcaactatccctctaagttcttcactctatgctataatctctgttttaaaacattatggaatgttagaagatattcagcaaaacccttccaaaccaaccaatctaaagaaagaaaccattcaaggaacgcattga

SEQ ID NO: 4549 - DNA (genomic), 657 bp, Helicobacter pylori; double-stranded, circular
  misc_feature (B) LOCATION 1...657
  hypothetical: NO
  anti-sense: NO
ggcatgagcattaaggaaaatttagagcaagttagaaacgaatttaaaagcgatgaaaagcttttagaaggagcgtttagattagaaaagtttttcaaacgctacaagtgggtgttgttgtttatcgtggtggcttttatcgcttatttaggggatacaaaattacaagattataagcatgagcaaacgagagagcggatcactcaaatttataatgaagtgctagagagtcctaataatatagccttgcaaaaaagattgaaagaagtcgccccagagttgtatgacttgtatcagttcgccagagcgagtgagaggaacgatgcaaacgagtttaaaaggctttcgcaatcttctaatgaaatcgttaaagcgttcgccaaatattcttacgcatcgctctctagagataaaaacctgcttgaaaaaagccccattcttaaagaaatgagcgctttacaagaagtgaacttgttgtatgaagaaaattctaaagacgcaatcaaaaaagcgcatcaaagtttatcaactatccctctaagttcttcactctatgctataatctctgttttaaaacattatggaatgttagaagatattcagcaaaacccttccaaaccaaccaatctaaagaaagaaaccattcaaggaacgcat

SEQ ID NO: 4550 - DNA (genomic), 873 bp, Helicobacter pylori; double-stranded, circular
  misc_feature (B) LOCATION 1...873
  hypothetical: NO
  anti-sense: NO
atgtttgaagaaattaccctagcgcataaggacttgttttcaaggtttttacaaactcaaaaaatcgttttatcggatgtgagttttaccaattgctttttatggcagcacgcaaggctcattcaagtggctgtgattagggattgtttggtgattcaaaccacttatgaaaaccaaaaacccttttatttctatcctatcggtaagaggccgcatgaatgcgtgaaagagcttttggaattagaaaaaaatttaagattccactccctgactttagagcaaaaagacgatttgaaagacaattttgtaggggtgtttgatttcacttacaaccgagacaggagcgattatgtttattctattgaagaactaatcgcgctcaaagggaaaaaataccataagaaaaaaaaccacttaaaccagtttttaaccaatcatgcgaattttgtttatgaaaaaatttctcctcaaaacagaaaggaagttttagaagcctctaaagcgtggtttttagaaagccagaccgatgatatagggttaatcaacgaaaataagggcattcaaagcgttttagaaaattatgaaagcttggatttaaagggggggcttattagggttaatggggaaatagtctcgtttagttttggggaagttttaaacgaagagagcgcgctcatccacattgaaaaagcccgcacagatattgcaggcgcgtatcaaatcatcaaccaacaattgcttttgaatgaatttagccatttaacttacgctaacagagaagaagatctaggattagagggcttaagaaggtctaaaatgagctataacccggtgtttttgatagacaaatacgaagcggttgctagaaattaa

SEQ ID NO: 4551 - DNA (genomic), 882 bp, Helicobacter pylori; double-stranded, circular
  misc_feature (B) LOCATION 1...882
  hypothetical: NO
  anti-sense: NO
aagagagttgccatgtttgaagaaattaccctagcgcataaggacttgttttcaaggtttttacaaactcaaaaaatcgttttatcggatgtgagttttaccaattgctttttatggcagcacgcaaggctcattcaagtggctgtgattagggattgtttggtgattcaaaccacttatgaaaaccaaaaacccttttatttctatcctatcggtaagaggccgcatgaatgcgtgaaagagcttttggaattagaaaaaaatttaagattccactccctgactttagagcaaaaagacgatttgaaagacaattttgtaggggtgtttgatttcacttacaaccgagacaggagcgattatgtttattctattgaagaactaatcgcgctcaaagggaaaaaataccataagaaaaaaaaccacttaaaccagtttttaaccaatcatgcgaattttgtttatgaaaaaatttctcctcaaaacagaaaggaagttttagaagcctctaaagcgtggtttttagaaagccagaccgatgatatagcgttaatcaacgaaaataagggcattcaaagcgttttagaaaattatgaaagcttggatttaaagggggggcttattagggttaatggggaaatagtctcgtttagttttggggaagttttaaacgaagagagcgcgctcatccacattgaaaaagcccgcacagatattgcaggcgcgtatcaaatcatcaaccaacaattgcttttgaatgaatttagccatttaacttacgctaacagagaagaagatctaggattagagggcttaagaaggtctaaaatgagctataacccggtgtttttgatagacaaatacgaagcggttgctagaaat

SEQ ID NO: 4552 - DNA (genomic), 339 bp, Helicobacter pylori; double-stranded, circular
  misc_feature (B) LOCATION 1...339
  hypothetical: NO
  anti-sense: NO
atttattctcatctcgctcccattatgcactatcaattaacaagtttcaatataatacaagatctttttataacttgtcatgtgttaaggatcaaaatgcgcgtgtttgtttgctttttaggggtttttgtatctaacggcttggctcgttttggctatgtggttttaatccccctactcattttatcagggagtttaaccccacaccaaagcttccaactgggtattgcggtgctaatgggctatgtttttgggagctttttaatccaatttttaagcccgttaatgtcattagaaagcatcgctaaaatcagttttaaattaatcactttgagtttt

SEQ ID NO: 4553 - DNA (genomic), 666 bp, Helicobacter pylori; double-stranded, circular
  misc_feature (B) LOCATION 1...666
  hypothetical: NO
  anti-sense: NO
atttttttagggggcagttgtttgatgaccttcatcctttccttagtggggttaaaaacccgttctttaaggaataaatccgttaaaaaagaagaaagcgcgtttaaaatcccctttcatttgtggttattgctcatttcttgtgcgctcaatgcgattggttttttaccgcacacgcttttttgggtggattatttgatccgtcatttaaatatctcccccactatcgctgggacttcatgggcgttttttggttttggagccacgcttggttctttaatcagtggcccgatggctcaaaagctaggggctaaagaagccaatatctttatcctcattttaaaatctatcgcatgttttttgcccatttttttccaccaaatctctttactcaatttaagcatctttataatgggagcagccacaaccgccaatatcaatttattcagcatgatggctttaaaaattgcaggcgcaaagcatttcgctaaagcgtcttcgtgggtggtgttttcttttggcattttccaagcgcttttttcgtatctttttacgatctttttaggggatttgggctatgttttgatttttgttatttgtggggtgtgtttggttttaagcttcatcgttcttttccctatcaaaatgcaaacagctatccataaa

SEQ ID NO: 4554 - DNA (genomic), 1146 bp, Helicobacter pylori; double-stranded, circular
  misc_feature (B) LOCATION 1...1146
  hypothetical: NO
  anti-sense: NO
atgcgcgtgtttgtttgctttttaggggtttttgtatctaacggcttggctcgttttggctatgtggttttaatccccctactcattttatcagggagtttaaccccacaccaaagcttccaactgggtattgcggtgctaatgggctatgtttttgggagctttttaatccaatttttaagcccgttaatgtcattagaaagcatcgctaaaatcagttttggcttgatcgctttgagttttttagtctgttattttgatagtatccctttcttttggctttggatctggcgttttatcgccggtgtggctagcagtgctttaatgattttagtcgcccctctctctttgccctatgtcaaagaacataaaaaagccttagtgggagggcttattttcagcgccgtaggcattggatctgtctttagcgggttcgttctgccttggatcagctcttataacatcaaatgggcatggatttttttagggggcagttgtttgatagccttcatcctttccttagtggggttaaaaacccgttctttaaggaaaaaatccgttaaaaaagaagaaagcgcgtttaaaatcccctttcatttgtggttattgctcatttcttgtgcgctcaatgcgattggttttttaccgcacacgcttttttgggtggattatttgatccgtcatttaaatatctcccccactatcgctgggacttcatgggcgttttttggttttggagccacgcttggttctttaatcagtggcccgatggctcaaaagctaggggctaaagaagccaatatctttatcctcattttaaaatctatcgcatgttttttgcccatttttttccaccaaatctctttactcaatttaagcatctttataatgggagcagccacaaccgccaatatcaatttattcagcatgatggctttaaaaattgcaggcgcaaagcatttcgctaaagcgtcttcgtgggtggtgttttcttttggcattttccaagcgcttttttcgtatctttttacgatctttttaggggatttgggctatgttttgatttttgttatttgtggggtgtgtttggttttaagcttcatcgttcttttccctatcaaaatgcaaacagctatccataaatag

SEQ ID NO: 4555 - DNA (genomic), 267 bp, Helicobacter pylori; double-stranded, circular
  misc_feature (B) LOCATION 1...267
  hypothetical: NO
  anti-sense: NO
tggcgtaatcattttttaggaagtttggaattgaagaaaatcgcccttattttagatggcattgtagcaaaaaattttttagacttggtgctaaggcattattctaatcataatttttatatagtggttgtcaaagatgagagccttatccctaaaaattacccgagcactttcgcttttcattgttttgatgcgacttccagttttaggcttttgcaggtgttaaatgatgaggtgaagcgatgcgtttttaatcatacaagattt

SEQ ID NO: 4556 - DNA (genomic), 1227 bp, Helicobacter pylori; double-stranded, circular
  misc_feature (B) LOCATION 1...1227
  hypothetical: NO
  anti-sense: NO
agcgatgcgtttttaatcatacaagattttaaagagcagcgcatcatccataaaatcattcaaacccatttcaaacgcatgcgtgtggttttgagcgtgaaaagagatagcgaaaaaactttagaaaacaatgaagaaaataaagatgaaaagctcattttgattgatgaatttgaagttttagccaataaattcatttctcgtttgcctaatatccctagcacccctagagagtttgggttaggcaagggcgagatcatggagattgatgtgccttttgggagcatttttgcttataggcatattggctctatcaggcaaaaagaatacaggattgtagggctttatcgcaacgatgttttgttgctctccactaaatctttagtcatccaaccacgagacattcttttagtggcaggcaatccggaaattttaaacgcggtgtaccatcaagtcaaaagcaatgtggggcagttcccagccccctttggtaagagcatttatttatacattgatatgcgattgcagagccgaaaagcgatgatgcgcgatgtgtatcaagccttgtttttgcacaagcgtttaaagagctacaagctctacattcaggttttacaccccactagccctaagttttatcataaatttttatcgctagaaaccgaaagcattgaagtgaattttgatttttatgggaagagttttatccaaaaactccatgaagaccaccaaaaaaaaatgggtttgattgtggtaggcagagagctttttttcttgaaaaaacaccgaagagccttgcacaaaacagccacaccggtttataaaaccaacacctctggcctgtctaaaaccactcaaagcattgtggttttgaatgaaagtttaagcattaatgaagacatgtcttcagtgatttttgatgtgtctatgcaaatggatttgggcttgttgctttatgattttgaccctaacaagcactataaaaacgagattgtcaatcattacgaaaatttagccaacacctttaaccgcaagattgagatttttcaaaccgatattaaaaaccctatcatgtatctcaattctttaagaaatcccattttgcatttcatgccttttgaagagtgcatcacgcaaacgcgctatttgtggtttttatccactaaagtggaaaaattagcgtttttgaacgatgatcaccctcaaatttttatccctgtagcggag

SEQ ID NO: 4557 - DNA (genomic), 1437 bp, Helicobacter pylori; double-stranded, circular
  misc_feature (B) LOCATION 1...1437
  hypothetical: NO
  anti-sense: NO
ttgaagaaaatcgcccttattttagatggcattgtagcaaaaaattttttagacttggtgctaaggcattattctaatcataatttttatatagtggttgtcaaagatgagagccttatccctaaaaattacccgagcactttcgcttttcattgttttgatgcgacttccagttttaggcttttgcaggtgttaaatgatgaggtgagcgatgcgtttttaatcatacaagattttaaagagcagcgcatcatccataaaatcattcaaacccatttcaaacgcatgcgtgtggttttgagcgtgaaaagagatagcgaaaaaactttagaaaacaatgaagaaaataaagatgaaaagctcattttgattgatgaatttgaagttttagccaataaattcatttctcgtttgcctaatatccctagcacccctagagagtttgggttaggcaagggcgagatcatggagattgatgtgccttttgggagcatttttgcttataggcatattggctctatcaggcaaaaagaatacaggattgtagggctttatcgcaacgatgttttgttgctctccactaaatctttagtcatccaaccacgagacattcttttagtggcaggcaatccggaaattttaaacgcggtgtaccatcaagtcaaaagcaatgtggggcagttcccagccccctttggtaagagcatttatttatacattgatatgcgattgcagagccgaaaagcgatgatgcgcgatgtgtatcaagccttgtttttgcacaagcgtttaaagagctacaagctctacattcaggttttacaccccactagccctaagttttatcataaatttttatcgctagaaaccgaaagcattgaagtgaattttgatttttatgggaagagttttatccaaaaactccatgaagaccaccaaaaaaaaatgggtttgattgtggtaggcagagagctttttttcttgaaaaaacaccgaagagccttgcacaaaacagccacaccggtttataaaaccaacacctctggcctgtctaaaaccactcaaagcattgtggttttgaatgaaagtttaagcattaatgaagacatgtcttcagtgatttttgatgtgtctatgcaaatggatttgggcttgttgctttatgattttgaccctaacaagcactataaaaacgagattgtcaatcattacgaaaatttagccaacacctttaaccgcaagattgagatttttcaaaccgatattaaaaaccctatcatgtatctcaattctttaagaaatcccattttgcatttcatgccttttgaagagtgcatcacgcaaacgcgctatttgtggtttttatccactaaagtggaaaaattagcgtttttgaacgatgatcaccctcaaatttttatccctgtagcggagtga

SEQ ID NO: 4558 - DNA (genomic), 564 bp, Helicobacter pylori; double-stranded, circular
  misc_feature (B) LOCATION 1...564
  hypothetical: NO
  anti-sense: NO
atttttagagcttttagaagaggattttttagaaaaacatttgcatatcgctttacagcacaccatgatttcatgctagagagaatgaatcgaagaaaccgcactaaaagcgatagggaattattagagataatcgcttctaagaattttgctatcggcacggattttattgtggggcatccgggcgagagtgaaagcgtttttgaaaaggcgtttaaaaatttagaaagcttgcctttaacgcatatccacccttttatttacagcaagcgaaaagacaccccctctagtttgatgcgtgatagcgtgagtttggaagattctaaaaagcgtttgaatgcgattaaagatttgatttttcataaaaataaggcgttcaggcaattgcaactcaaactcaacacgcccctaaaagccctagtggaagcgcaaaaagacggcgaatttaaagccttagatcaatttttcaaccccattaaaatcaaaagcgataagcctttaagggctagttttttagaaatcaaagagtatgaaattaaggagagggaaaatcatgccgttttc

SEQ ID NO: 4559 - DNA (genomic), 705 bp, Helicobacter pylori; double-stranded, circular
  misc_feature (B) LOCATION 1...705
  hypothetical: NO
  anti-sense: NO
aagggaacaaaaatgaaaaaagtctattttaaaacttttgggtgtaggacgaatctttttgacacgcaagtgatgggcgaaaatttaaaggattttagcgcgactttagaagaacaagaagccgatattattattatcaattcttgcaccgtaaccaatgggaccgatagcgcggtaaggagttacgctagaaaaatggcacgattggataaagaagtgctatttactggttgcggggtgaaaacccaaggcaaagagctttttgaaaaagggcttttaaagggcgtttttgggcatgacaataaagaaaagattaacgcgcttttacaagaaaaaaagcgttttttcatagatgacaatttagaaaacaaacatttagacaccacgatggtgagcgagtttgtgggaaaaaccagggcgtttatcaagatccaagagggctgtgattttgattgcaattattgcattatcccaagcgtgagagggagggctaggagttttgaaaagaggaaaattttagagcaggtgggccttttatgctctcaaggggttcaagaagtggttttaaccggcactaacgtggggagctatgggaaagatagaggaagcaatatcgcgcgattgattaaaaaattaagccagattactggattgaaacgcattaggattgggagtttagacctaatcaaatcaacgatgaatttt

SEQ ID NO: 4560 - DNA (genomic), 1257 bp, Helicobacter pylori; double-stranded, circular
  misc_feature (B) LOCATION 1...1257
  hypothetical: NO
  anti-sense: NO
atgaaaaaagtctattttaaaacttttgggtgtaggacgaatctttttgacacgcaagtgatgggcgaaaatttaaaggattttagcgcgactttagaagaacaagaagccgatattattattatcaattcttgcaccgtaaccaatgggaccgatagcgcggtaaggagttacgctagaaaaatggcacgattggataaagaagtgctatttactggttgcggggtgaaaacccaaggcaaagagctttttgaaaaagggcttttaaagggcgtttttgggcatgacaataaagaaaagattaacgcgcttttacaagaaaaaaagcgttttttcatagatgacaatttagaaaacaaacatttagacaccacgatggtgagcgagtttgtgggaaaaaccagggcgtttatcaagatccaagagggctgtgattttgattgcaattattgcattatcccaagcgtgagagggagggctaggagttttgaagagaggaaaattttagagcaagtgggccttttatgctctaaaggggttcaagaagtggttttaaccggcactaacgtggggagctatgggaaagatagaggaagcaatatcgcgcgattgattaaaaaattaagccagattactggattgaaacgcattaggattgggagtttagagcctaatcaaatcaacgatgaatttttagagcttttagaagaggattttttagaaaaacatttgcatatcgctttacagcacagccatgatttcatgctagagagaatgaatcgaagaaaccgcactaaaagcgatagggaattattagagataatcgcttctaagaattttgctatcggcacggattttattgtggggcatccgggcgagagtgaaagcgtttttgaaaaggcgtttaaaaatttagaaagcttgcctttaacgcatatccacccttttatttacagcaagcgaaaagacaccccctctagtttgatgcgtgatagcgtgagtttggaagattctaaaaagcgtttgaatgcgattaaagatttgatttttcataaaaataaggcgttcaggcaattgcaactcaaactcaacacgcccctaaaagccctagtggaagcgcaaaaagacggcgaatttaaagccttagatcaatttttcaaccccattaaaatcaaaagcgataagcctttaagggctagttttttagaaatcaaagagtatgaaattaaggagagggaaaatcatgccgttttctaa

SEQ ID NO: 4561 - DNA (genomic), 303 bp, Helicobacter pylori; double-stranded, circular
  misc_feature (B) LOCATION 1...303
  hypothetical: NO
  anti-sense: NO
atgcaaaagaatttggatagtcttttagaaaatttaagggctgaaattgatgcgttggataatgaattgagcgatcttttagacaaacgcttaggaatcgctttaaaaatcgctctcatcaaacaagaaagcccccaagaaaaccccatttattgccctaaaagagagcaagagattttaaaacgactcagccaaaggggtttcaagcatttgaatggagaaatccttgcaagtttttatgcagaggtttttaagatttctagaaattttcaagaaaacgccctaaaagagttaaaaaaataa

SEQ ID NO: 4562 - DNA (genomic), 300 bp, Helicobacter pylori; double-stranded, circular
  misc_feature (B) LOCATION 1...300
  hypothetical: NO
  anti-sense: NO
atgcaaaagaatttggatagtcttttagaaaatttaagggctgaaattgatgcgttggataatgaattgagcgatcttttagacaaacgcttaggaatcgctttaaaaatcgctctcatcaaacaagaaagcccccaagaaaaccccatttattgccctaaaagagagcaagagattttaaaacgactcagccaaaggggtttcaagcatttgaatggagaaatccttgcaagtttttatgcagaggtttttaagatttctagaaattttcaagaaaacgccctaaaagagttaaaaaaa

SEQ ID NO: 4563 - DNA (genomic), 183 bp, Helicobacter pylori; double-stranded, circular
  misc_feature (B) LOCATION 1...183
  hypothetical: NO
  anti-sense: NO
aatttgccggtgattcaaggaatcatcgcacccaatgggaaaatcatcgcccaagccaccaagcttaatgaagtcattatcgccgaaatggatttaaacgaagtggcactgcaacgccaaaaaatcccttatttacaagattttgacaccaaactcaccaaaaaggggtttggaaaactcact

SEQ ID NO: 4564 - DNA (genomic), 237 bp, Helicobacter pylori; double-stranded, circular
  misc_feature (B) LOCATION 1...237
  hypothetical: NO
  anti-sense: NO
cttgtgttacaaggggctgaggttttaatctatcctagtgcgtttggcaaagctagggcttataattgggatttgttgagcaaagctagagcgttagaaaatggctgttttgtgtgcgcttgcaatcatagtggggaagaaactaacgctaaattaaaacaaacgctagaatttgccggtgattcaaggaatcatcgcacccaatgggaaaatcatcgcccaagccaccaagcttaa

SEQ ID NO: 4565 - DNA (genomic), 231 bp, Helicobacter pylori; double-stranded, circular
  misc_feature (B) LOCATION 1...231
  hypothetical: NO
  anti-sense: NO
gtgttacaaggggctgaggttttaatctatcctagtgcgtttggcaaagctagggcttataattgggatttgttgagcaaagctagagcgttagaaaatggctgttttgtgtgcgcttgcaatcatagtggggaagaaactaacgctaaattaaaacaaacgctagaatttgccggtgattcaaggaatcatcgcacccaatgggaaaatcatcgcccaagccaccaagct

SEQ ID NO: 4566 - DNA (genomic), 684 bp, Helicobacter pylori; double-stranded, circular
  misc_feature (B) LOCATION 1...684
  hypothetical: NO
  anti-sense: NO
ttggattttaaagcgatagagcatggagaggaaaccctaaaaaacgagactttaagagcgttaagcgattttgcgaagtctagcgatacgcatatcgtggcatgcagtattgaaaaaaataataaaaaactttacgatagcgcttatatcattccaccaaaaggaaaaatcgttggcaaacaccgcaagatctatttgtggggcgatgaaaaatcgcgcttcaaaaggggtaaaaaatacgaggtttttacgctggattttggggattttagcgcgaaagtgggtttgcaaatttgctatgaaactggctttggcgtgggtgcgaacctgcttgtgttacaaggggctgaggttttaatctatcctagtgcgtttggcaaagctagggcttataattgggatttgttgagcaaagctagagcgttagaaaatggctgttttgtgtgcgcttgcaatcatagtggggaagaaactaacgctaaattaaaacaaacgctagaatttgccggtgattcaagaatcatcgcacccaatgggaaaatcatcgcccaagccaccaagcttaatgaagtcattatcgccgaaatggatttaaacgaagtggcactgcaacgccaaaaaatcccttatttacaagattttgacaccaaactcaccaaaaaggggtttggaaaactcacttaa

SEQ ID NO: 4567 - DNA (genomic), 378 bp, Helicobacter pylori; double-stranded, circular
  misc_feature (B) LOCATION 1...378
  hypothetical: NO
  anti-sense: NO
tttgttgaacgggtgaaaatgcgtttttttagtggttttgggtttgttaatgaaagcgttttgtttgaagagtggcttttaaaaggggcttatgatgtgtcaggcttttctatgggggcgattaaggcgatagaatacgcctataatgaagtcttgcaacaacggcgcatccattccttattgttgttttcgccttgcatgctagcgcataagagtttggcgttcaaacgcttgcaacttttcttgtttcaaaaagatccgcaaagctacatggataacttttataaggaagtgggattggacgctcaattggagcgttttaaaaaagagggttctttagaagaattggaatttttattggattacaatgatatgagt

SEQ ID NO: 4568 - DNA (genomic), 525 bp, Helicobacter pylori; double-stranded, circular
  misc_feature (B) LOCATION 1...525
  hypothetical: NO
  anti-sense: NO
gtgaaaatgcgtttttttagtggttttgggtttgttaatgaaagcgttttgtttgaagagtggcttttaaaaggggcttatgatgtgtcaggcttttctatgggggcgattaaggcgatagaatacgcctataatgaagtcttgcaacaacggcgcatccattccttattgttgttttcgccttgcatgctagcgcataagagtttggcgttcaaacgcttgcaacttttcttgtttcaaaaagatccgcaaagctacatggataacttttataaggaagtgggattggacgctcaattggagcgttttaaaaaagagggttctttagaagaattggaatttttattggattacaagtatagtgattctataattagatttttattggaaaagggcgtgaagattgaagtgtttatcggtttaaaagatagaatcactgacattcaagcccttttagaattttttatgcccttagttcaagtgtggcagtttaaggattgtaaccatttgttgcaaaaatcttaa

SEQ ID NO: 4569 - DNA (genomic), 219 bp, Helicobacter pylori; double-stranded, circular
  misc_feature (B) LOCATION 1...219
  hypothetical: NO
  anti-sense: NO
ttacgaatgggtaggaatggtaacattaatcaatacgaagattcttttaactctatcattaatcgcttcaagactaatcgttgtgatcgcttttatctttattgttctctctttttatgcgctttagtatcatcactattcttcattttaaagcacttattttggggtttgttagtgttttttcaagcgcattgttttgtttttgcttggcaatttttg

SEQ ID NO: 4570 - DNA (genomic), 267 bp, Helicobacter pylori; double-stranded, circular
  misc_feature (B) LOCATION 1...267
  hypothetical: NO
  anti-sense: NO
atggatgaaccagaaaccagtttagagcaaaacgctcttataagactatcaaatctcataagcttgcgcaacacccaacaacttacaagtatcatcgccactcatgatcctattgtcttagatagttgcgaatgggtattgctccttaagaatggcaacattgctcaatacaaacctttaaattctatattaaaatctgtagctaaaacttttaactttaaagaaaaaccaaccacaaaagacttattagcgttactaaaggatatt

SEQ ID NO: 4571 - DNA (genomic), 669 bp, Helicobacter pylori; double-stranded, circular
  misc_feature (B) LOCATION 1...669
  hypothetical: NO
  anti-sense: NO
atgtttaaaaacgctttaaatatacaagatttttcatttaaaaatcatactagtacagccattattggcacaaatggtgctggaaaatcaacgcttatcaacactattctaggcattagatcagactataattttaaagcacaaaacaataatattccataccacgacaatgttataccacaacgcaagcaattgggagttgtctctaacctattcaactacccacctggattaaacgcaaacgacctttttaaattctatcaattttttcacaaaaactgcactctagatttgtttgaaaaaaatcttttaaataaaacctacgaacacctaagcgacggacaaaaacagcgcttaaaaattgacttagctcttagccatcacccacaattagttattatggatgaaccagaaaccagtttagagcaaaacgctcttataagactatcaaatctcataagcttgcgcaacacccaacaacttacaagtatcatcgccactcatgatcctattgtcttagatagttgcgaatgggtattgctccttaagaatggcaacattgctcaatacaaacctttaaattctatattaaaatctgtagctaaaacttttaactttaaagaaaaaccaaccacaaaagacttattagcgttactaaaggatatttaa

SEQ ID NO: 4572 - DNA (genomic), 708 bp, Helicobacter pylori; double-stranded, circular
  misc_feature (B) LOCATION 1...708
  hypothetical: NO
  anti-sense: NO
ggggattttataatttctaacatcagcatacacccaaaaaccatgtttaaaaacgctttaaatatacaagatttttcatttaaaaatcatactagtacagccattattggcacaaatggtgctggaaaatcaacgcttatcaacactattctaggcattagatcagactataattttaaagcacaaaacaataatattccataccacgacaatgttataccacaacgcaagcaattgggagttgtctctaacctattcaactacccacctggattaaacgcaaacgacctttttaaattctatcaattttttcacaaaaactgcactctagatttgtttgaaaaaaatcttttaaataaaacctacgaacacctaagcgacggacaaaaacagcgcttaaaaattgacttagctcttagccatcacccacaattagttattatggatgaaccagaaaccagtttagagcaaaacgctcttataagactatcaaatctcataagcttgcgcaacacccaacaacttacaagtatcatcgccactcatgatcctattgtcttagatagttgcgaatgggtattgctccttaagaatggcaacattgctcaatacaaacctttaaattctatattaaaatctgtagctaaaacttttaactttaaagaaaaaccaaccacaaaagacttattagcgttactaaaggatatt

SEQ ID NO: 4573 - DNA (genomic), 180 bp, Helicobacter pylori; double-stranded, circular
  misc_feature (B) LOCATION 1...180
  hypothetical: NO
  anti-sense: NO
tatcgtgagatggattatgcggtgtttagcatgacaatccaccctgatgtgagcgcccgtccgcaagtgttgctcatgcatgaaaaaatcattgagcatatcaaccagcacgagggcgtggcttgggtaacgttcaatgaaatcgctgatgatttcttaaaacgaaaccctaggaaaaaa

SEQ ID NO: 4574 - DNA (genomic), 177 bp, Helicobacter pylori; double-stranded, circular
  misc_feature (B) LOCATION 1...177
  hypothetical: NO
  anti-sense: NO
cgtgagatggattatgcggtgtttagcatgacaatccaccctgatgtgagcgcccgtccgcaagtgttgctcatgcatgaaaaaatcattgagcatatcaaccagcacgagggcgtggcttgggtaacgttcaatgaaatcgctgatgatttcttaaaacgaaaccctaggaaaaaa

SEQ ID NO: 4575 - DNA (genomic), 882 bp, Helicobacter pylori; double-stranded, circular
  misc_feature (B) LOCATION 1...882
  hypothetical: NO
  anti-sense: NO
atggcaaaagaaattttagtggcttatggcgtggatattgatgcggtggctggttggctggggagctatggtggggaggattcgcctgatgatatttcgcgtgggctttttgcgggggaagtggggatcccacggcttttgaaattgtttaaaaaataccatctccctgcgacttggtttgcgccggggcattctattgaaacttttcctgaaccaatgaaaatgatcgtggatgcagggcatgaagtgggtgcgcatgggtattcacacgaaaaccctatcgctatgacggccaagcaagaagaagacgttttgttaaaaagcgttgaattgattaaagatctcaccggcaaagcccccacaggctatgtggcgccgtggtgggagttttctaatatcactaatgaattgcttttaaaacacggcttcaaatacgaccattcgctcatgcacaatgatttcacgccctatttcgtgcgcgtgggggatagttggagcaagattgattatagtttggaggccaaggattggatgaagcctttaatccgtggggtggaaacaaatttagtggaaatccctgcgaactggtatttggacgatttaccgccgatgatgtttatcaaaaaatcccccaatagctttggttttgtaagcccgcgcgatatagggcaaatgtggatcgatcaatttgattgggtttatcgtgagatggattatgcggtgtttagcatgacaatccaccctgatgtgagcgcccgtccgcaagtgttgctcatgcatgaaaaaatcattgagcatatcaaccagcacgagggcgtgcgttgggtaacgttcaatgaaatcgctgatgatttcttaaaacgaaaccctaggaaaaaatag

SEQ ID NO: 4576 - DNA (genomic), 303 bp, Helicobacter pylori; double-stranded, circular
  misc_feature (B) LOCATION 1...303
  hypothetical: NO
  anti-sense: NO
atgctagaaattgaattaaaaaagaaattcactaaggatttaaaaaagcatattttaaatcaaaaaattgagttagaagtttttgacttagtggttgaaaatttaagaaatcaaattccattggacaaaagatttaaagaccatgctttaagtggaacatacaaaggctgtagagagcgccacattaagcctgatgttttgcttgtgtatagagtgaaaggcaatgttttaactttggttaggcttggcagtcatagcgagctgttttgtaaaccgcccacaccactcataacgcttaaatga

SEQ ID NO: 4577 - DNA (genomic), 300 bp, Helicobacter pylori; double-stranded, circular
  misc_feature (B) LOCATION 1...300
  hypothetical: NO
  anti-sense: NO
atgctagaaattgaattaaaaaagaaattcactaaggatttaaaaaagcatattttaaatcaaaaaattgagttagaagtttttgacttagtggttgaaaatttaagaaatcaaattccattggacaaaagatttaaagaccatgctttaagtggaacatacaaaggctgtagagagcgccacattaagcctgatgttttgcttgtgtatagagtgaaaggcaatgttttaactttggttaggcttggcagtcatagcgagctgttttgtaaaccgcccacaccactcataacgcttaaa

SEQ ID NO: 4578 - DNA (genomic), 525 bp, Helicobacter pylori; double-stranded, circular
  misc_feature (B) LOCATION 1...525
  hypothetical: NO
  anti-sense: NO
ttgaatacaatgaatagcgtgttagaatgtaaagaattagcgctctatggagggagttttgatcctttgcacaaggctcatttagccattattgagcaaactttagaattattgccattcgttcagctgattgtcttgcccgcttatcaaaaccctttcaaaaagccatgttttttggacgcaaaaacccgttttaaggaattagaaagagctttaaagggaatgcctagggtgctgttgagcgattttgaaatcaagcaagaaagggctgtgcctacgatagaaagcgttcttcatttccaaaaactctaccgccctaaaacgctttatttagtcataggagcggattgtttgaggcatctttcttcttggactaacgctaaagagcttttaaaaagggtggaattagtggtttttgaaaggattggctatgaagaaattcaatttaaggggcgttatcaccctttaaaaggcattgacgcgccgatttcttctagcgcgattagggctagtttaggggtttaa

SEQ ID NO: 4579 - DNA (genomic), 537 bp, Helicobacter pylori; double-stranded, circular
  misc_feature (B) LOCATION 1...537
  hypothetical: NO
  anti-sense: NO
ctaaggcgtctagctttgaatacaatgaatagcgtgttagaatgtaaagaattagcgctctatggagggagttttgatcctttgcacaaggctcatttagccattattgagcaaactttagaattattgccattcgttcagctgattgtcttgcccgcttatcaaaaccctttcaaaaagccatgttttttggacgcaaaaacccgttttaaggaattagaaagagctttaaagggaatgcctagggtgctgttgagcgattttgaaatcaagcaagaaagggctgtgcctacgatagaaagcgttcttcatttccaaaaactctaccgccctaaaacgctttatttagtcataggagcggattgtttgaggcatctttcttcttggactaacgctaaagagcttttaaaaagggtggaattagtggtttttgaaaggattggctatgaaaaaattcaatttaaggggcgttatcaccctttaaaaggcattgacgcgccgatttcttctagcgcgattagggctagtttaggggtt

SEQ ID NO: 4580 - DNA (genomic), 1131 bp, Helicobacter pylori; double-stranded, circular
  misc_feature (B) LOCATION 1...1131
  hypothetical: NO
  anti-sense: NO
atgagatttttttgcttctttttattttttctaaccttttcaaacgcgcagataatgatgacttttgattcccaaactaacgccaaactttcgcgctccaacgaacagctttctgacatgctttacaaactcaatgaaagtttaagaatctatcaaaacgtgctttctaacaaccaggatcaacttaaagaaatcaaaaaggctaacagcaccctaactagccaaaggcgtttttttaacgctagccagatccgccttatggacactgatgcactattgaaacaaagcgctttggaattagaaaaattacaagctttagaaaaacacttaaaagagagcatggagcatgaacgcttaatcaaagaatcccaagcgctttttttgcaagagcattgcccttatttgagcggcgttaagaatttagaagaggcatcaaacgctttagaagtccaagaaaaaaataacgcccttttcttactcaaagagcctaaactctttcatttgctctcacgattggatttgatgagcgctttaaacgccttatgcgatcaggttttagaaaatgaaatacaggatcaacaatcccataacaaaaccctagaatacaacgcccttatgaaccatgattttcaagcctataaagccatgcgtttgaaaaaaattaaaaacaagcttcaaagccaaatccaagctaaagaagacgccctaaaaacctttttacccctagaaaaacgcctagaaactttaaaatcgcgctttttatgcgacaaagaaaatctcaaatcatgcgctaaccaattacagcaacgctaccaaaacgccctaatagagcgagataaggaattaaaaaacgctaaaaacaacaaagaaaagcatgctctaatcttagccaattacgaacacactttaaaaaccttgaatatagaatttttaagcgaattgagtgagcaaatggcgtttttgaatgagaccatggcgttaaacgcccaagttttagcccttttagcccaacaacagactaaaaagcccttcaatgtgagcgatggtttgagcggtgggaaagcccttattaaaaatatccgcttagatccgcatggattccctagctttaaaaattttaagcaagagtga

SEQ ID NO: 4581 - DNA (genomic), 1152 bp, Helicobacter pylori; double-stranded, circular
  misc_feature (B) LOCATION 1...1152
  hypothetical: NO
  anti-sense: NO
aactatagtaataaagataaccccatgagatttttttgcttctttttattttttctaaccttttcaaacgcgcagataatgatgacttttgattcccaaactaacgccaaactttcgcgctccaacgaacagctttctgacatgctttacaaactcaatgaaagtttaagaatctatcaaaacgtgctttctaacaaccaggatcaacttaaagaaatcaaaaaggctaacagcaccctaactagccaaaggcgtttttttaacgctagccagatccgccttatggacactgatgcactattgaaacaaagcgctttggaattagaaaaattacaagctttagaaaaacacttaaaagagagcatggagcatgaacgcttaatcaaagaatcccaagcgctttttttgcaagagcattgcccttatttgagcggcgttaagaatttagaagaggcatcaaacgctttagaagtccaagaaaaaaataacgcccttttcttactcaaagagcctaaactctttcatttgctctcacgattggatttgatgagcgctttaaacgccttatgcgatcaggttttagaaaatgaaatacaggatcaacaatcccataacaaaaccctagaatacaacgcccttatgaaccatgattttcaagcctataaagccatgcgtttgaaaaaaattaaaaacaagcttcaaagccaaatccaagctaaagaagacgccctaaaaacctttttacccctagaaaaacgcccagagactctaggctcgagcgattgttgcgacaaagaaaatctcaaatcatgcgctaaccaattacagcaacgctaccaaaacgccctaatagagcgagataaggaattaaaaaacgctaaaaacaacaaagaaaagcatgctctaatcttagccaattacgaacacactttaaaaaccttgaatatagaatttttaagcgaattgagtgagcaaatggcgtttttgaatgagaccatggcgttaaacgcccaagttttagcccttttagcccaacaacagactaaaaagcccttcaatgtgagcgatggtttgagcggtgggaaagcccttattaaaaatatccgcttagatccgcatggattccctagctttaaaaattttaagcaagag

SEQ ID NO: 4582 - DNA (genomic), 1083 bp, Helicobacter pylori; double-stranded, circular
  misc_feature (B) LOCATION 1...1083
  hypothetical: NO
  anti-sense: NO
atgaatggtttttgcgctagactacgagccataacatttaatgaaagactaaaaatgaaaatagcggtattactcagtgggggggtggatagctcttatagcgcttatagcttaaaagagcaagggcatgaattagtggggatttatttaaaactccatgcgagtgaaaaaaagcatgatttatacattaaaaacgctcaaaaagcgtgcgagtttttaggcattcctttagaggtgttggattttcaaaaggattttaaaagcgcggtttatgatgaatttatcaacgcctatgaagaagggcaaacccctaacccatgcgcgttgtgcaaccctttaatgaagtttgggctagctttagatcacgctttaaaattagggtgtgaaaagatcgctaccgggcattatgcgagggtcaaagaaattgacaaggtaagttatattcaagaggctttggataaaactaaagatcagagctattttttatacgctttagagcatgaagttatcgctaaattggtgttccctttaggggatttgctaaaaaaggatattaagcctttagccttgaatgcgatgccctttttaggcactttagaaacttataaggaatctcaagaaatctgctttgtggaaaaaagctacattgacactttaaaaaagcatgttgaagtggaaaaagagggcgtggtgaaaaacctacaaggcgaagtcattggcacgcataaaggctatatgcaatacacgattggcaaacgcaaaggctttagtgttaaaggcgcgttagagccgcattttgtggtggggattgacgctaaaaagaacgagttgattgtgggcaaaaaagaagatctcgccacgcattcgcttaaggctaaaaacaaatctttaacgaaagattttaaagatggcgaatacttcatcaaggcccgttacaggagcgtgcctactaaagcgtttgtgagcttaaaagatggaatgattgaagtggaatttaaagagcctttttacggcgtggctaaagggcaagccttggtcgtttataaagatgatattttgcttggcgggggcgtgattgtttaa

SEQ ID NO: 4583 - DNA (genomic), 1092 bp, Helicobacter pylori; double-stranded, circular
  misc_feature (B) LOCATION 1...1092
  hypothetical: NO
  anti-sense: NO
aaaaaggtggttatgaatggtttttgcgctagactacgagccataacatttaatgaaagactaaaaatgaaaatagcggtattactcagtgggggggtggatagctcttatagcgcttatagcttaaaagagcaagggcatgaattagtggggatttatttaaaactccatgcgagtgaaaaaaagcatgatttatacattaaaaacgctcaaaaagcgtgcgagtttttaggcattcctttagaggtgttggattttcaaaaggattttaaaagcgcggtttatgatgaatttatcaacgcctatgaagaagggcaaacccctaacccatgcgcgttgtgcaaccctttaatgaagtttgggctagctttagatcacgctttaaaattagggtgtgaaaagatcgctaccgggcattatgcgagggtcaaagaaattgacaaggtaagttatattcaagaggctttggataaaactaaagatcagagctattttttatacgctttagagcatgaagttatcgctaaattggtgttccctttaggggatttgctaaaaaaggatattaagcctttagccttgaatgcgatgccctttttaggcactttagaaacttataaggaatctcaagaaatctgctttgtggaaaaaagctacattgacactttaaaaaagcatgttgaagtggaaaaagagggcgtggtgaaaaacctacaaggcgaagtcattggcacgcataaaggctatatgcaatacacgattggcaaacgcaaaggctttagtgttaaaggcgcgttagagccgcattttgtggtggggattgacgctaaaaagaacgagttgattgtgggcaaaaaagaagatctcgccacgcattcgcttaaggctaaaaacaaatctttaacgaaagattttaaagatggcgaatacttcatcaaggcccgttacaggagcgtgcctactaaagcgtttgtgagcttaaaagatggaatgattgaagtggaatttaaagagcctttttacggcgtggctaaagggcaagccttggtcgtttataaagatgatattttgcttggcgggggcgtgattgtt

SEQ ID NO: 4584 - DNA (genomic), 189 bp, Helicobacter pylori; double-stranded, circular
  misc_feature (B) LOCATION 1...189
  hypothetical: NO
  anti-sense: NO
aggaagcgagggtcaaggagcgaatatttagcggaccaattttgtcaagtgggattgtttaaagattttcctaaagaataccgcgcaagagagcttcacaaaacccttgatgataacttaactaaccataatcttcaagcgtcaagctccccaatgatcaaaggcgcatggcaggaaacgctaaggaat

SEQ ID NO: 4585 - DNA (genomic), 315 bp, Helicobacter pylori; double-stranded, circular
  misc_feature (B) LOCATION 1...315
  hypothetical: NO
  anti-sense: NO
tcttcaagcgtcaagctccccaatgatcaaaggcgcatggcaggaaacgctaaggaattagctagcgttgtcatagactacttgctagaaaatgccagagaagcctttgaaagctacacagacgatgagtctcaaaaatacatttattggagtaaagcaaaagctgaagcaagggatagagatggcactttggttgtgccttttgaaaaatacggattttactttgtaagcaatgcgagttatcaaactacgggcagtaatcttaaagatcttatcttaggctgcaatctcaatcccagagactttgttgtggaa

SEQ ID NO: 4586 - DNA (genomic), 444 bp, Helicobacter pylori; double-stranded, circular
  misc_feature (B) LOCATION 1...444
  hypothetical: NO
  anti-sense: NO
atgcaaaatcgatcgcatgaaatacaaggcgtatcacacattaagaataattataaatttttcaccaaagagcttgacaattatatcagcaaagggtatcgcattgaagagatttatggcgcgtttttgtggctcaaaatcgtagccataggtttagagttgggcgaagacgatccgcaagtggtgtttgagagcatcaacgctacaggcgtgcaattaaaagggctggatctcatccgcaactatttgatgatgggggaaaatyctgacaaccagaatcgtctttataatacttattgggtgcctttagaaaattggcttggtgaaaaggatttgaatgatttcatcaaaacctatttgagaatctattttgaggatagagttacaagagggagagcgcgaagtgtattacgcgctaaaagcccaccacagagacaatttccc

SEQ ID NO: 4587 - DNA (genomic), 1005 bp, Helicobacter pylori; double-stranded, circular
  misc_feature (B) LOCATION 1...1005
  hypothetical: NO
  anti-sense: NO
gagcccattaaaagcgacaaagaagcctttgatctggtcatgcaaaatcgatcgcatgaaatacaaggcgtatcacacattaagaataattataaatttttcaccaaagagcttgacaattatatcagcaaagggtatcgcattgaagagatttatggcgcgtttttgtggctcaaaatcgtagccataggtttagagttgggcgaagacgatccgcaagtggtgtttgagagcatcaacgctacaggcgtgcaattaaaagggctggatctcatccgcaactatttgatgatgggggaaaattctgacaaccagaatcgtctttataatacttattgggtgcctttagaaaattggcttggtgaaaaggatttgaatgatttcatcaaaacctatttgagaatctattttgaggatagagttaaagagggagagcgcgaagtgtattacgcgctaaaagcccaccacagagacaatttccctaacaatatacaaggtcttatgagcgatatgcgagaatatggcagaatctttcaaatctttttagacagagatcattattttttacatcgtggagacccgcaacagttagcgaatttacgcttgcgcgttaaagatctcgtaaaaatcaaatttggcgtggcaaagccctttgttttgcgttgcgccagagattttgaagaaggcaaattggattatgaaaacttccatgaaatcttgcaaatccttatcagctacttcgtgcgccgaagcgtgtgcggggattctacccctacgcttaccagagttctttattctttatacagacagctaggggaagatgtttcagccgatgcattgaagcggtatttgggcaagagcgttggtcaaatggcgttccctaatgacgataaaattaaagcggcgtttcttgtgcgtaacgcttatgcagcaaatcaagtgtgcaaattcatcctgcttgagattgaaaaattagcaacgctgaaccgccaaaagaagagaatt

SEQ ID NO: 4588 - DNA (genomic), 2052 bp, Helicobacter pylori; double-stranded, circular
  misc_feature (B) LOCATION 1...2052
  hypothetical: NO
  anti-sense: NO
atgaaagcgacacaaagcaccattaacgacttttttgccttaacaggcacgatattttctatccctgtatatcagaggaactacacttgggaagaagagaattgtgaaaaattactgcaagatatagttaatatctctcaaaacaagaaaacgcattttatgggttctatcacttatattttgcatttgattgatgatgaaaagagcttgagacaactgcaagaatttgtcatcattgacgggcagcaaaggattaccactatcatgcttttgctcaaagccatagagacaaagatacaaaatgaagggataaaaaaagagattgacggactactcaatctttcgggacaaaggttgcgcctaaagcccattaaaagcgacaaagaagcctttgatctggtcatgcaaaatcgatcgcatgaaatacaaggcgtatcacacattaagaataattataaatttttcaccaaagagcttgacaattatatcagcaaagggtatcgcattgaagagatttatggcgcgtttttgtggctcaaaatcgtagccataggtttagagttgggcgaagacgatccgcaagtggtgtttgagagcatcaacgctacaggcgtgcaattaaaagggctggatctcatccgcaactatttgatgatgggggaaaattctgacaaccagaatcgtctttataatacttattgggtgcctttagaaaattggcttggtgaaaaggatttgaatgatttcatcaaaacctatttgagaatctattttgaggatagagttaaagagggagagcgcgaagtgtattacgcgctaaaagcccaccacagagacaatttccctaacaatatacaaggtcttatgagcgatatgcgagaatatggcagaatctttcaaatctttttagacagagatcattattttttacatcgtggagacccgcaacagttagcgaatttacgcttgcgcgttaaagatctcgtaaaaatcaaatttggcgtggcaaagccctttgttttgcgttgcgccagagattttgaagaaggcaaattggattatgaaaacttccatgaaatcttgcaaatccttatcagctacttcgtgcgccgaagcgtgtgcggggattctacccctacgcttaccagagttctttattctttatacagacagctaggggaagatgtttcagccgatgcattgaagcggtatttgggcaagagcgttggtcaaatggcgttccctaatgacgataaaattaaagcggcgtttcttgtgcgtaacgcttatgcagcaaatcaagtgtgcaaattcatcctgcttgagattgaaaaattaagcaacgctgaaccgccaaaagaagagaatttagaagtggagcatttctaccccaaaacccccacccaagaatggcgcgatagggtgggggactatttcacttttgagcaagactacctcaataattttgggaatctaaccttatcagggcaaaatcaaaggcttggcaacaaatcttacgaggcaaaaatagcgcttatggaagaatacagctccttgcatttaaacgactatttcaccaataacaccgattcttgggggatagaggaagtgagggctaggagcgaatatttagcggatcaattctgtcaagtgggattgtttaaagatttgcctaaagaataccgcgcaagagagcttcacaaaacccttgatgataacttaactaaccataatcttcaaagcgtcaagctccccaatgatcaaaggcgcatggcaggaaacgctaaggaattagctagcgttgtcatagactacttgctagaaaatgccagagaagcctttgaaagctacacagacgatgagtctcaaaaatacatttattggagtaaagcaaaagctgaagcaagggatagagatggcactttggttgtgccttttgaaaaatacggattttactttgtaagcaatgcgagttatcaaactacgggcagtaatcttaaagatcttatcttaggctgcaatctcaatcccagagactttgttgtggaataa

SEQ ID NO: 4589 - DNA (genomic), 240 bp, Helicobacter pylori; double-stranded, circular
  misc_feature (B) LOCATION 1...240
  hypothetical: NO
  anti-sense: NO
atgtttgaaaaaatacgcaagattttagcggatattgaagattcgcaaaatgaaattgaaatgcttttaaaattagcgaatttgagtttgggggattttattgagattaaaagagggagcatggacatgccaaagggcgtgaatgaagcgttttttacgcaattaagcgaagaagtggagcgcctaaaggagcttatcaacgctttgaataaaatcaaaaaagggttattggtgttttaa

SEQ ID NO: 4590 - DNA (genomic), 720 bp, Helicobacter pylori; double-stranded, circular
  misc_feature (B) LOCATION 1...720
  hypothetical: NO
  anti-sense: NO
atgattgatasccttgatggggcaaaagatgcacaattgataaaaaaagcttacgcgtttttgtgtttaggaggcgatggcacgattttaggggctttaagaatgacgcatgctcacaataagccatgctttggggtgaggattgggaatttagggtttttgagcgcggttgaattgaacgggttgaaagatttcttacaagatctcaagcaaaacaggatcaaattagaagagcatttggctttggagggccgtattggaaacacttctttttatgcgatcaatgaaatcgtgatcgctaaaaaaaaagctttaggggttttagacatcaaagcgtgcgcgggccatacgccctttaacacttataaaggcgatgggcttatcattgccacgcccctaggctcaaccgcttataatttgagcgctcatgggcccattgtgcatgctttaagccaaagctatattttaacgcccttgtgcgatttttctttaacgcaacgccctttagtgttaggggcggaattttgcttgagtttttgcgctcatgaagacgctcttgtggttattgatgggcaagccacctacgatttaaaagccaaccaacccctatacattcaaaaaagccccacgaccaccaagctcttacaaaaaaattcaagggattattttaaagtgcttaaagaaaagctgttatggggggaaagccctaacaaaaaaaga

SEQ ID NO: 4591 - DNA (genomic), 924 bp, Helicobacter pylori; double-stranded, circular
  misc_feature (B) LOCATION 1...924
  hypothetical: NO
  anti-sense: NO
atgattaaaaaagcggctaaaacccctttttttaaaattttgtttcaagctttaagctacaatatacgcatgaaagatttaaacaagactatcggcgtgtttgtgcggcccactcatcatcaaaacgctctttttaaagagctagagcaggctaaagaatgggttttaacgcttttagaagatgaggggtttgaaagctttatgattgatagccttgatggggcaaaagatgcacaattgataaaaaaagcttacgcgtttttgtgtttaggaggcgatggcacgattttaggggctttaagaatgacgcatgctcacaataagccatgctttggggtgaggattgggaatttagggtttttgagcgcggttgaattgaacgggttgaaagatttcttacaagatctcaagcaaaacaggatcaaattagaagagcatttggctttggagggccgtattggaaacacttctttttatgcgatcaatgaaatcgtgatcgctaaaaaaaaagctttaggggttttagacatcaaagcgtgcgcgggccatacgccctttaacacttataaaggcgatgggcttatcattgccacgcccctaggctcaaccgcttataatttgagcgctcatgggcccattgtgcatgctttaagccaaagctatattttaacgcccttgtgcgatttttctttaacgcaacgccctttagtgttaggggcggaattttgcttgagtttttgcgctcatgaagacgctcttgtggttattgatgggcaagccacctacgatttaaaagccaaccaacccctatacattcaaaaaagccccacgaccaccaagctcttacaaaaaaattcaagggattattttaaagtgcttaaagaaaagctgttatggggggaaagccctaacaaaaaaagataa

SEQ ID NO: 4592 - DNA (genomic), 945 bp, Helicobacter pylori; double-stranded, circular
  misc_feature (B) LOCATION 1...945
  hypothetical: NO
  anti-sense: NO
aaacttttaagagttttacataagatgattaaaaaagcggctaaaacccctttttttaaaattttgtttcaagctttaagctacaatatacgcatgaaagatttaaacaagactatcggcgtgtttgtgcggcccactcatcatcaaaacgctctttttaaagagctagagcaggctaaagaatgggttttaacgcttttagaagatgaggggtttgaaagctttatgattgatagccttgatggggcaaaagatgcacaattgataaaaaaagcttacgcgtttttgtgtttaggaggcgatggcacgattttaggggctttaagaatgacgcatgctcacaataagccatgctttggggtgaggattgggaatttagggtttttgagcgcggttgaattgaacgggttgaaagatttcttacaagatctcaagcaaaacaggatcaaattagaagagcatttggctttggagggccgtattggaaacacttctttttatgcgatcaatgaaatcgtgatcgctaaaaaaaaagctttaggggttttagacatcaaagcgtgcgcgggccatacgccctttaacacttataaaggcgatgggcttatcattgccacgcccctaggctcaaccgcttataatttgagcgctcatgggcccattgtgcatgctttaagccaaagctatattttaacgcccttgtgcgatttttctttaacgcaacgccctttagtgttaggggcggaattttgcttgagtttttgcgctcatgaagacgctcttgtggttattgatgggcaagccacctacgatttaaaagccaaccaacccctatacattcaaaaaagccccacgaccaccaagctcttacaaaaaaattcaagggattattttaaagtgcttaaagaaaagctgttatggggggaaagccctaacaaaaaaaga

SEQ ID NO: 4593 - DNA (genomic), 204 bp, Helicobacter pylori; double-stranded, circular
  misc_feature (B) LOCATION 1...204
  hypothetical: NO
  anti-sense: NO
aaatcgcacgtatcattgggaaaatttactcaaaatccaaccgaacaaccgcccacaataaccacaccattcaatggaaaaacagaaaacattctaatggacagaattttagtgattggtattgaacctaacaaaatcactctatttttagatgatttaattaagagcgttgggaataaagattttgcagatttaagtagtttg

SEQ ID NO: 4594 - DNA (genomic), 315 bp, Helicobacter pylori; double-stranded, circular
  misc_feature (B) LOCATION 1...315
  hypothetical: NO
  anti-sense: NO
atgtctttaggggcagtggtcagctcactcctttgccataagttagagggggcaatattagatctgagagcgtatcgttsraragcttattatcacgaaaataaagatacyttgcttattaaaggcaaaaaacgccttctttacaattatattaaagcccatattgytttaaacttgctatggacaattagaaatcgcacgtratcattgggaaaatttactcaaaatccaaccgaacaaccgcccacgaataaccacaccattcaatggaaaaacrgaaaacattctaatggacagaattttagtgattggtat

SEQ ID NO: 4595 - DNA (genomic), 684 bp, Helicobacter pylori; double-stranded, circular
  misc_feature (B) LOCATION 1...684
  hypothetical: NO
  anti-sense: NO
atgcaagatttacaacatttcaaaaatgatattacgctcattctgtctaaagacagattagatacttatgacagcctagagcaatacaaagaaaatttaaaactcatttctttcatcacgcctaaaatctctaacttagagatttatttacgcaacgctttagactattgcttaacccaaattaaggggagcgaatgggtgtttaatgaaaattctttaacagatttaattaacgaacaaaaagaaaagaaaaaagaaatcacgcattctttaatcttatctaaaatgtctttaggggcagtggttaggcttattttttgttataagttagagggggtaatattagatttgagagcgtatcgtttgagagcttattatcacgaaaataaagataccttgcttattaaaggcaaaaaacgccttctttacaattatattaaagcccatattgctttaaacttgctatggacaattagaaatcgcacgtatcattgggaaaatttactcaaaatccaaccgaacaaccgcccacgaataaccacaccattcaatggaaaaacagaaaacattctaatggacagaattttagtgattggtattgaacctaacaaaatcactctatttttagatgatttaattaagagcgttgggaataaagattttgcagatttaagtagtttgtaa

SEQ ID NO: 4596 - DNA (genomic), 1467 bp, Helicobacter pylori; double-stranded, circular
  misc_feature (B) LOCATION 1...1467
  hypothetical: NO
  anti-sense: NO
gtgcgttttgaaaatttcatcaaccgcctagccttttacatggccacagggagcggtaaaacgatcgtcattatcaaactggtagagcttttaagcgtggctatgggaatgggtttgatccctaagaaaaatatcatgttttttagcgcgaacgagcatttaatcaagcaatttgaaaaagaaattgaaaaatacaaccgcaataaggactattccaaacaaattgatttcaaaaaccttaaaagcgttaagaataaggatttttatcgtgctccaaaagattctttaatgaaagaaatcgctcttttttattaccgcgcagatttaatgagcgatgaagaaagcaaggaaaaccttttaaattataaggattgttgggataatggggaaaattatgtgattttagatgaagcgcataaggggaataagactgaaagcaaaagacaggcgatttttagcctgctgtctttaaaagggtttttattcaatttcagcgccactttcactgaagaaagcgatctcatcactgcggtgtataatttgagcgtgggcgagtgggtgaaacttggctatggtaaagagtctgttttattgaagaaaaacaacttaaacgcttttaaggaattgaaagatttaaacgacagggaaaaagaaatcgctcttttaaaggcgttattgcttttaggcatgcaaaaacgctataaagtagaaggctattttcatgaccctttaatgctcgtgttcacgcattctgtgaacatggaaaacagcgatgcgraaatcttttttaaaactttagcgcgcgtgattgaaaatgatgatgagagcgatttttcaaaagctaaagacgatttattagaggaattaaagaatccggaattcctttttagcgatggcaaagataaagaaaaagactataaaattgaggtctttaaagagagtttaaagggcatggattttaaaggcttaaaagaagcagttttttatgccagtaatgggcatattgaagtcatcattaaccctaaaaacaaccaagaaatcgctttcaagctcaacacgagcgataaagtcttttgcctgattagaataggcgatattacagaatggatccgtgaaaaattaaagagcgtgaaggtggtgagtaagaatttgagcttcaaagaagagagctatttcagccagattgataagagcagtatcaatatcttagtggggtctcgtgcttttgacactgggtgggatagcacaaggcctagcgtgattttatttttaaatatagggcttgatgatgacgctaaaaagctggtgaaacaatcttttggcaggggcgtaaggattgaaagcgtcaaaaaccaacgccaaaggttagcgtatttagagatagatgaagccattaaagaacaagctgaaaccaaacgctgcaatgctggaaatgctttttgtgatacctaccaaccatgcaagcct

SEQ ID NO: 4597 - DNA (genomic), 2871 bp, Helicobacter pylori; double-stranded, circular
  misc_feature (B) LOCATION 1...2871
  hypothetical: NO
  anti-sense: NO
ggaaaaataatggcaaagaaaaaacaagaagtaaggaataatgaaatttttgtcgctcaaaaactcgctgaagaggaattgaacgctaacgagattaacgatccgttagaaatgctggactttaaaagctttgatgataataaggagcttttagattaccaacagcaagctttgattaacgcttttagagtgcttgttgcttattttagagacttcaaagaaagtaaaaaagaattttacgctttttatcaaaagcattattcattcgctaattgcgatttcgctaaaaagaaactcaatcatttgttaaagagccattttaaggtagaaaatcattgcgtgcgttttgaaaatttcatcaaccgcctagccttttacatggccacagggagcggtaaaacgatcgtcattatcaaactggtagagcttttaagcgtggctatgggaatgggtttgatccctaagaaaaatatcatgttttttagcgcgaacgagcatttaatcaagcaatttgaaaaagaaattgaaaaatacaaccgcaataaggactattccaaacaaattgatttcaaaaaccttaaaagcgttaagaataaggatttttatcgtgctccaaaagattctttaatgaaagaaatcgctcttttttattaccgcgcagatttaatgagcgatgaagaaagcaaggaaaaccttttaaattataaggattgttgggataatggggaaaattatgtgattttagatgaagcgcataaggggaataagactgaaagcaaaagacaggcgatttttagcctgctgtctttaaaagggtttttattcaatttcagcgccactttcactgaagaaagcgatctcatcactgcggtgtataatttgagcgtgggcgagtgggtgaaacttggctatggtaaagagtctgttttattgaagaaaaacaacttaaacgcttttaaggaattgaaagatttaaacgacagggaaaaagaaatcgctcttttaaaggcgttattgcttttaggcatgcaaaaacgctataaagtagaaggctattttcatgaccctttaatgctcgtgttcacgcattctgtgaacatggaaaacagcgatgcggaaatcttttttaaaactttagcgcgcgtgattgaaaatgatgatgagagcgatttttcaaaagctaaagacgatttattagaggaattaaagaatccggaattcctttttagcgatggcaaagataaagaaaaagactataaaattgaggtctttaaagagagtttaaagggcatggattttaaaggcttaaaagaagcagttttttatgccagtaatgggcatattgaagtcatcattaaccctaaaaacaaccaagaaatcgctttcaagctcaacacgagcgataaagtcttttgcctgattagaataggcgatattacagaatggatccgtgaaaaattaaagagcgtgaaggtggtgagtaagaatttgagcttcaaagaagagagctatttcagccagattgataagagcagtatcaatatcttagtggggtctcgtgcttttgacactgggtgggatagcacaaggcctagcgtgattttatttttaaatatagggcttgatgatgacgctaaaaagctggtgaaacaatcttttggcaggggcgtaaggattgaaagcgtcaaaaaccaacgccaaaggttagcgtatttagagatagatgaagccattaaagacaagctgaaaccaaacgctgcaatgctggaaatgctttttgtgatacctaccaaccatgcaagccttgaagcgattttaaagttccaaaaagagagcgaaaatgggggtgagaatagaggtccttggcgtgaaatcaaattagaaaaaacgcgcatagagcatgccttattcgtgccttgctaccgaaaagaacaaaccaacgctcttaaaatttctcaaagcgcttcgtttaaaatgagcgaaaaaaattttaaggatttaaaagagcattttcatttaatgagtgaaaagcattttattttaaagcatgaaatttatgaccctaaagattacgcgctgttaaaagaaatgatacaaacagcgcattttaaaaaggtatcaacctggcattataaagatttagattacatgatttctgaaattaaaggcaagctataccctaatcaaaaagtgcctaaagacgagtttaacgccctagataatgagaaaatcgtgcattttaaaagggttaaagttaaggcggataaaaaagaaaaattgattcaaaccatccaagaagtgaaagagcatgcgcctttggataaagaaactttaagaaaaaaaatcgcgcaaggcgagatcgatccttatgatacagaaaaacacaaacaagacagaacgttcaaagttggtgatgcagagctgttaaaactcaaagagcattactacaccccgctcattaaagccaaaaactgcgattggcttaagcatgtggttaaggtaaagagcgagagcgattttttagaagagttgttaaagattaccgaaacgctgcaagaaaactatgatttttgggcgttcagcaagattgatgagcatttagacaatttgtttattccctatatagacaacgctacagaaaggcgctttttccctgattttatcttttggctgcaaaaaggcggcacgcagatcatttgcttcattgatcctaaagggagcaaacacactgattacgagcataaggcagatgcgtatcaactttttgaagataaggtttttaaccctaaagacgatcccaatctcaaaatcaaagtggttttaaaattttatggggataaggatgatgtgggggagcgttatagggatctt

SEQ ID NO: 4598 - DNA (genomic), 2919 bp, Helicobacter pylori; double-stranded, circular
  misc_feature (B) LOCATION 1...2919
  hypothetical: NO
  anti-sense: NO
atggcaaagaaaaaacaagaagtaaggaataatgaaatttttgtcgctcaaaaactcgctgaagaggaattgaacgctaacgagattaacgatccgttagaaatgctggactttaaaagctttgatgataataaggagcttttagattaccaacagcaagctttgattaacgcttttagagtgcttgttgcttattttagagacttcaaagaaagtaaaaaagaattttacgctttttatcaaaagcattattcattcgctaattgcgatttcgctaaaaagaaactcaatcatttgttaaagagccattttaaggtagaaaatcattgcgtgcgttttgaaaatttcatcaaccgcctagccttttacatggccacagggagcggtaaaacgatcgtcattatcaaactggtagagcttttaagcgtggctatgggaatgggtttgatccctaagaaaaatatcatgttttttagcgcgaacgagcatttaatcaagcaatttgaaaaagaaattgaaaaatacaaccgcaataaggactattccaaacaaattgatttcaaaaaccttaaaagcgttaagaataaggatttttatcgtgctccaaaagattctttaatgaaagaaatcgctcttttttattaccgcgcagatttaatgagcgatgaagaaagcaaggaaaaccttttaaattataaggattgttgggataatggggaaaattatgtgattttagatgaagcgcataaggggaataagactgaaagcaaaagacaggcgatttttagcctgctgtctttaaaagggtttttattcaatttcagcgccactttcactgaagaaagcgatctcatcactgcggtgtataatttgagcgtgggcgagtgggtgaaacttggctatggtaaagagtctgttttattgaagaaaaacaacttaaacgcttttaaggaattgaaagatttaaacgacagggaaaaagaaatcgctcttttaaaggcgttattgcttttaggcatgcaaaaacgctataaagtagaaggctattttcatgaccctttaatgctcgtgttcacgcattctgtgaacatggaaaacagcgatgcggaaatcttttttaaaactttagcgcgcgtgattgaaaatgatgatgagagcgatttttcaaaagctaaagacgatttattagaggaattaaagaatccggaattcctttttagcgatggcaaagataaagaaaaagactataaaattgaggtctttaaagagagtttaaagggcatggattttaaaggcttaaaagaagcagttttttatgccagtaatgggcatattgaagtcatcattaaccctaaaaacaaccaagaaatcgctttcaagctcaacacgagcgataaagtcttttgcctgattagaataggcgatattacagaatggatccgtgaaaaattaaagagcgtgaaggtggtgagtaagaatttgagcttcaaagaagagagctatttcagccagattgataagagcagtatcaatatcttagtggggtctcgtgcttttgacactgggtgggatagcacaaggcctagcgtgattttatttttaaatatagggcttgatgatgacgctaaaaagctggtgaaacaatcttttggcaggggcgtaaggattgaaagcgtcaaaaaccaacgccaaaggttagcgtatttagagatagatgaagccattaaagacaagctgaaaccaaacgctgcaatgctggaaatgctttttgtgatacctaccaaccatgcaagccttgaagcgattttaaagttccaaaaagagagcgaaaatgggggtgagaatagaggtccttggcgtgaaatcaaattagaaaaaacgcgcatagagcatgccttattcgtgccttgctaccgaaaagaacaaaccaacgctcttaaaatttctcaaagcgcttcgtttaaaatgagcgaaaaaaattttaaggatttaaaagagcattttcatttaatgagtgaaaagcattttattttaaagcatgaaatttatgaccctaaagattacgcgctgttaaaagaaatgatacaaacagcgcattttaaaaaggtatcaacctggcattataaagatttagattacatgatttctgaaattaaaggcaagctataccctaatcaaaaagtgcctaaagacgagtttaacgccctagataatgagaaaatcgtgcattttaaaagggttaaagttaaggcggataaaaaagaaaaattgattcaaaccatccaagaagtgaaagagcatgcgcctttggataaagaaactttaagaaaaaaaatcgcgcaaggcgagatcgatccttatgatacagaaaaacacaaacaagacagaacgttcaaagttggtgatgcagagctgttaaaactcaaagagcattactacaccccgctcattaaagccaaaaactgcgattggcttaagcatgtggttaaggtaaagagcgagagcgattttttagaagagttgttaaagattaccgaaacgctgcaagaaaactatgatttttgggcgttcagcaagattgatgagcatttagacaatttgtttattccctatatagacaacgctacagaaaggcgctttttccctgattttatcttttggctgcaaaaaggcggcacgcagatcatttgcttcattgatcctaaagggagcaaacacactgattacgagcataaggcagatgcgtatcaactttttgaagataaggtttttaaccctaaagacgatcccaatctcaaaatcaaagtggttttaaaattttatggggataaggatgatgtgggggagcgttatagggatctttggattgaaaaagggaaactagaatattttttttctggatttaaaggattagcctga

SEQ ID NO: 4599 - DNA (genomic), 315 bp, Helicobacter pylori; double-stranded, circular
  misc_feature (B) LOCATION 1...315
  hypothetical: NO
  anti-sense: NO
ttgcttttgcaccccttgcatgctcatgcacaagtgcttggcttcacaaaccacgatcacgccccttggctctatgatttcatcaaaagtttctgcaatttgagtggtcagcctttcttggatttgcaggcgtttgctataaatttcaatgagtttagcgatcgcgctaatgcctacaatcttttccttagggatatatcccacgctaatattcccaaaaaaagggagcaaatggtgctcgcaagtggagtaaaattcaatgttttgagccactatcatttcatcgcaaacgccttgaaaatacgcgctttttaa

SEQ ID NO: 4600 - DNA (genomic), 498 bp, Helicobacter pylori; double-stranded, circular
  misc_feature (B) LOCATION 1...498
  hypothetical: NO
  anti-sense: NO
atgattgaactaatcttacacaataagtccatacaaattgatgaaacattgctgaatgtaaaagagcatttagaaaagttttattcaaacaaagaacaagagacaatcgcaaaaaccttagagagccaaacagagcttacttgcagttatttattggataaagatttttcattgctagaaaagcatttagaaaatagcttagggcattttacttttgagagtgagtttgccctactaaaagacaaagagcctttgaatttagctcaaatcaaacaaatcggtgttttaaaggttattacctatgaaatgacacaagccttaaaaaatcaaatcattcatttaacgcaaattgtcaatgaagaaaatttagagtttgatgaagaacttgttatttatcacttaaattttaagctcaatcaaaatacttacaaagtgttagcgaaattttgcgtattaaaaaagaaaggaacattgcatgaaaaatttaaggcattttag

SEQ ID NO: 4601 - DNA (genomic), 504 bp, Helicobacter pylori; double-stranded, circular
  misc_feature (B) LOCATION 1...504
  hypothetical: NO
  anti-sense: NO
agaaaaacaatgattgaactaatcttacacaataagtccatacaaattgatgaaacattgctgaatgtaaaagagcatttagaaaagttttattcaaacaaagaacaagagacaatcgcaaaaaccttagagagccaaacagagcttacttgcagttatttattggataaagatttttcattgctagaaaagcatttagaaaatagcttagggcattttacttttgagagtgagtttgccctactaaaagacaaagagcctttgaatttagctcaaatcaaacaaatcggtgttttaaaggttattacctatgaaatgacacaagccttaaaaaatcaaatcattcatttaacgcaaattgtcaatgaagaaaatttagagtttgatgaagaacttgttatttatcacttaaattttaagctcaatcaaaatacttacaaagtgttagcgaaattttgcgtattaaaaaagaaaggaacattgcatgaaaaatttaaggcattt

SEQ ID NO: 4602 - DNA (genomic), 642 bp, Helicobacter pylori; double-stranded, circular
  misc_feature (B) LOCATION 1...642
  hypothetical: NO
  anti-sense: NO
atggataccgaaacacaagaaaagtttttagcgtatttgtttgaaaaagctttacaaaaaaatctacaagcttattggataacaacaactgaaactaagaatgaattaacaagagaagagttttcaaatttaataagaaaaacaatgattgaactaatcttacacaataagtccatacaaattgatgaaacattgctgaatgtaaaagagcatttagaaaagttttattcaaacaaagaacaagagacaatcgcaaaaaccttagagagccaaacagagcttacttgcagttatttattggataaagatttttcattgctagaaaagcatttagaaaatagcttagggcattttacttttgagagtgagtttgccctactaaaagacaaagagcctttgaatttagctcaaatcaaacaaatcggtgttttaaaggttattacctatgaaatgacacaagccttaaaaaatcaaatcattcatttaacgcaaattgtcaatgaagaaaatttagagtttgatgaagaacttgttatttatcacttaaattttaagctcaatcaaaatacttacaaagtgttagcgaaattttgcgtattaaaaaagaaaggaacattgcatgaaaaatttaaggcattttag

SEQ ID NO: 4603 - DNA (genomic), 945 bp, Helicobacter pylori; double-stranded, circular
  misc_feature (B) LOCATION 1...945
  hypothetical: NO
  anti-sense: NO
atggacttagacaaactcaaagattatagggctttaagaaacgctattttaaggctattgccttatttagatagcggtattacagagctaattatgaataaagaaaaagaaatttggctctataagcttaatggagtaagagaaaaagtctttgatgaaaatttagacaaagcctttattctggggtttggggaacaattagcgagttttagagatttgttttttaatgctaattaccccacccttaatacttccattcctacttctagatacagagtgagcatgaaccactttgctattagtgcggataatgaattgagtttgaatattagagtgccaagtgataaaaagtttgatttaaaagctttcaagctttctagtatctgtcaatacgattatgagtatttaaaaaacttaatgattgatggcaaaaacttactcattagtggaggcacaggcagtggaaaaacgagttttttaaacgctctaattgagtttatccccaaacacacacgaatagtaagcgttgaagatagcgaagaattagatttaagagcgtttgaaaatcataaatccttgttagtggataaaactgaaagctctaaatttacatatgaaaacgccttgaatatggcaatgagaatgtctcctgataggcttatggtaggcgagattgacacacgaaattccatgctctttttaagatttggaaacactgggcataaaggcatggtttctactttacatgcagatagtgtgcatggggttatagaggcgattgctttaaatttacaaatgaataaaagtggtttagatgtcaatgtagcaaaaaaattctttaaaagcagtgtggatgttgtcgttcaaattgtattagataaagccactaacaccagatacattcaagaaatcttaccagcaaaagatttaagagatagtctatga

SEQ ID NO: 4604 - DNA (genomic), 957 bp, Helicobacter pylori; double-stranded, circular
  misc_feature (B) LOCATION 1...957
  hypothetical: NO
  anti-sense: NO
aaagaaagtaattctatggacttagacaaactcaaagattatagggctttaagaaacgctattttaaggctattgccttatttagatagcggtattacagagctaattatgaataaagaaaaagaaatttggctctataagcttaatggagtaagagaaaaagtctttgatgaaaatttagacaaagcctttattctggggtttggggaacaattagcgagttttagagatttgttttttaatgctaattaccccacccttaatacttccattcctacttctagatacagagtgagcatgaaccactttgctattagtgcggataatgaattgagtttgaatattagagtgccaagtgataaaaagtttgatttaaaagctttcaagctttctagtatctgtcaatacgattatgagtatttaaaaaacttaatgattgatggcaaaaacttactcattagtggaggcacaggcagtggaaaaacgagttttttaaacgctctaattgagtttatccccaaacacacacgaatagtaagcgttgaagatagcgaagaattagatttaagagcgtttgaaaatcataaatccttgttagtggataaaactgaaagctctaaatttacatatgaaaacgccttgaatatggcaatgagaatgtctcctgataggcttatggtaggcgagattgacacacgaaattccatgctctttttaagatttggaaacactgggcataaaggcatggtttctactttacatgcagatagtgtgcatggggttatagaggcgattgctttaaatttacaaatgaataaaagtggtttagatgtcaatgtagcaaaaaaattctttaaaagcagtgtggatgttgtcgttcaaattgtattagataaagccactaacaccagatacattcaagaaatcttaccagcaaaagatttaagagatagtcta

SEQ ID NO: 4605 - DNA (genomic), 519 bp, Helicobacter pylori; double-stranded, circular
  misc_feature (B) LOCATION 1...519
  hypothetical: NO
  anti-sense: NO
atgaaaaaatatcaaaacaaacgaaagctgggtaagcgtatcaattgctttatttcaaatgaatgtaaggacattttagaaaattatttaaaagtcaaaaaaattagcgttactgagtgtatagaaagccttttattagccctagaccctagcaaagaaacactaagagcaagggatttttatgaaagtttgtttaaagtcatcagtcttaaccaacatgtctataaagaactcatggctaatggtaataacattaaccaaatagccaagaacaccaacattgccattaagtataacaagcccttttatttgcagaatttagcattcttagaagagatttttaaggttatggatacacttaataaaaatgtagaagaatgtaaaaaaatctctttggaattattacttcaaatttacaaagaacaaaaaagccaaacagaatttaacgccatttcaaaaattctcaacgctcttaatgaaaaacaatctactactgagccaaaaaaggacaacgcatga

SEQ ID NO: 4606 - DNA (genomic), 519 bp, Helicobacter pylori; double-stranded, circular
  misc_feature (B) LOCATION 1...519
  hypothetical: NO
  anti-sense: NO
tctatgaaaaaatatcaaaacaaacgaaagctgggtaagcgtatcaattgctttatttcaaatgaatgtaaggacattttagaaaattatttaaaagtcaaaaaaattagcgttactgagtgtatagaaagccttttattagccctagaccctagcaaagaaacactaagagcaagggatttttatgaaagtttgtttaaagtcatcagtcttaaccaacatgtctataaagaactcatggctaatggtaataacattaaccaaatagccaagaacaccaacattgccattaagtataacaagcccttttatttgcagaatttagcattcttagaagagatttttaaggttatggatacacttaataaaaatgtagaagaatgtaaaaaaatctctttggaattattacttcaaatttacaaagaacaaaaaagccaaacagaatttaacgccatttcaaaaattctcaacgctcttaatgaaaaacaatctactactgagccaaaaaaggacaacgca

SEQ ID NO: 4607 - DNA (genomic), 963 bp, Helicobacter pylori; double-stranded, circular
  misc_feature (B) LOCATION 1...963
  hypothetical: NO
  anti-sense: NO
atgaacactaatttaaagaaagccttgtttttaactactcttggttatttgcaagctaatgagggctttttagccattatgcctgatgaaaataaacaagaagacatttctcaagaacagaaattagaacacaaaatggagcaaaaaattgctccacaaaatacccttaaaaagcaacaatcagctcctttacaaagtgctgagttgttacaaagtcaagttaaaagagaagttaaagagcaaaaaaagtctcaaaaacacctagtagctatgcaaactaaaaatggctttttcttaggctcagaaattgctattacaggcacaagtttaaaacaaagtttaagccttatttctaatgctacagatgatttactcacttatagcaagacttctaaaaacgctaattttaatatgggactattaataggttatcagcattattttggagctagtaaaaggcatgggattaaaatctcaagccatttgtatggaggcacacctagtgatgtaagcacagacataaaaatttacaaatctaaagttagcaccaattacacgcctttaaattttggcatagatgtgaagtatttgtttgattttttaaatgtcattaaaaagaaccgccatacactaggattaagtgtgggctttggctggcgtatgcaatattattttgcaaaaatagaccccataaaaaccagccatagtgagtttatcactaataaacctaaagatatttttaatcatggtttttatcccactattggactacattattacttaaaccatcatcaatttgaagtgaattatcgctttggaggagcaattaactatcagtcagttgtgcctagcaaaattgtcgttcaaaacgggaattttaagggcgaggtcttgttttctaattttcttaccaaagcgactaattctagctacatagcgttcaactacgcttatttattttaa

SEQ ID NO: 4608 - DNA (genomic), 972 bp, Helicobacter pylori; double-stranded, circular
  misc_feature (B) LOCATION 1...972
  hypothetical: NO
  anti-sense: NO
gaaaggaaaaaaatgaacactaatttaaagaaagccttgtttttaactactcttggttatttgcaagctaatgagggctttttagccattatgcctgatgaaaataaacaagaagacatttctcaagaacagaaattagaacacaaaatggagcaaaaaattgctccacaaaatacccttaaaaagcaacaatcagctcctttacaaagtgctgagttgttacaaagtcaagttaaaagagaagttaaagagcaaaaaaagtctcaaaaacacctagtagctatgcaaactaaaaatggctttttcttaggctcagaaattgctattacaggcacaagtttaaaacaaagtttaagccttatttctaatgctacagatgatttactcacttatagcaagacttctaaaaacgctaattttaatatgggactattaataggttatcagcattattttggagctagtaaaaggcatgggattaaaatctcaagccatttgtatggaggcacacctagtgatgtaagcacagacataaaaatttacaaatctaaagttagcaccaattacacgcctttaaattttggcatagatgtgaagtatttgtttgattttttaaatgtcattaaaaagaaccgccatacactaggattaagtgtgggctttggctggcgtatgcaatattattttgcaaaaatagaccccataaaaaccagccatagtgagtttatcactaataaacctaaagatatttttaatcatggtttttatcccactattggactacattattacttaaaccatcatcaatttgaagtgaattatcgctttggaggagcaattaactatcagtcagttgtgcctagcaaaattgtcgttcaaaacgggaattttaagggcgaggtcttgttttctaattttcttaccaaagcgactaattctagctacatagcgttcaactacgcttatttattt

SEQ ID NO: 4609 - DNA (genomic), 501 bp, Helicobacter pylori; double-stranded, circular
  misc_feature (B) LOCATION 1...501
  hypothetical: NO
  anti-sense: NO
ttgtatagctatttatttttggtggttaccattgaacgcatggaaagtagaataaatcgtttgagcgccaaaatagacgcactattggaacagcaaaaaaaagtgatttcgttgttagaaacttatttgagcgtttattccacaccacaagaggcttcaaataagctttttaagggcattagtcaaggcatggagttggccccagaaatcgcgcaagaagatgaagaaaaacgcctttatgtgttgcaatatttaagccatgtggatattactaagaacaagcaagactcccaactcaaaaaagattgtttggaatttatccaaaggtttaatatcccaaaacccattatcgttaccgctctttataaccttaagggcattaagcccactaaaaaagaagtggcgaaacaattgcaaaaactctatgtgtgggagaggcgttaccaacaaggggggatagacgctttgaaagacaggcgtgggagaccccttaaaaaacct

SEQ ID NO: 4610 - DNA (genomic), 522 bp, Helicobacter pylori; double-stranded, circular
  misc_feature (B) LOCATION 1...522
  hypothetical: NO
  anti-sense: NO
atggggttaaagaataaaatcaagggttttgttaaagagagaatgccttttgtaatgagatgcgttcgtggtttaaaaggggccaaagacacccatgaaaacgcccatgatagggacgcttattgtggaatcaatcgtgaaattaaggaaatgctagaggctaaaaaacttcattttcttcaagaaaaagctttattcaaccacgaccatcaagaaagcgtgtttttagctatcgcctctttaaataatgaaagtttcattgaatacaacaagagtatttataaaaatagttctcttaattataattatggggggcatttagaagatagggtcatccatcccactttaactttacccaatcccacgcattcgggttattttgactatgataaaaaaagtcaaaaccctaaaagccctctaaacccatgggcttttattagagtcaaaaacgaaatcgttactttagaagagagtttgttttctatgcttcctgccgttcaaagggggggtcattggttttaa

SEQ ID NO: 4611 - DNA (genomic), 561 bp, Helicobacter pylori; double-stranded, circular
  misc_feature (B) LOCATION 1...561
  hypothetical: NO
  anti-sense: NO
ggttttgtttgcggtagcgttttatttcaattaggagtttttatggggttaaagaataaaatcaagggttttgttaaagagagaatgccttttgtaatgagatgcgttcgtggtttaaaaggggccaaagacacccatgaaaacgcccatgatagggacgcttattgtggaatcaatcgtgaaattaaggaaatgctagaggctaaaaaacttcattttcttcaagaaaaagctttattcaaccacgaccatcaagaaagcgtgtttttagctatcgcctctttaaataatgaaagtttcattgaatacaacaagagtatttataaaaatagttctcttaattataattatggggggcatttagaagatagggtcatccatcccactttaactttacccaatcccacgcattcgggttattttgactatgataaaaaaagtcaaaaccctaaaagccctctaaacccatgggcttttattagagtcaaaaacgaaatcgttactttagaagagagtttgttttctatgcttcctgccgttcaaagggggggtcattggttt

SEQ ID NO: 4612 - DNA (genomic), 528 bp, Helicobacter pylori; double-stranded, circular
  misc_feature (B) LOCATION 1...528
  hypothetical: NO
  anti-sense: NO
ttgtggcaccaactctatcattactgtaattatacgctttcttttatccctaaaaatgagtgggtagtaaaaattgattgcgatcatatctatgacgctaaaaagctttataaaagtttttatattcctaagaatattaaagaggttgtgatgtattcgcgcattaattttgtggtgcgagattttgaagtgtttgttcgtaacgatggggattttgggtttttagacgcatggggggatcattggttattgtataacgattgcgagccttttgaaatttggcgctacaatgatgaaagttatgaagtcctaaagcttaaagataaacaccatattaaagataaggaaatggtgcaatggcacttccctttggctaaaaagaggcgaaacgctattgtttatgacgatttgatccctttagaagaattcaaaaaacgccatgccgatttgataggcacaaggattgaagaaagcatgctagatgaaaagaggattttagaggtatatcaaaaattccgcttgccttaa

SEQ ID NO: 4613 - DNA (genomic), 690 bp, Helicobacter pylori; double-stranded, circular
  misc_feature (B) LOCATION 1...690
  hypothetical: NO
  anti-sense: NO
aagagagtttgttttctatgcttcctgccgttcaaagggggggtcattggttttaatgattgcgatgatggctctaaagaagtggttttagagttttgcaaaaagttcccctcatttatccctatcagctatccttatgaagtcatactaaaggattgtccgagtttgtggcaccaactctatcattactgtaattatacgctttcttttatccctaaaaatgagtgggtagtaaaaattgattgcgatcatatctatgacgctaaaaagctttataaaagtttttatattcctaagaatattaaagaggttgtgatgtattcgcgcattaattttgtggtgcgagattttgaagtgtttgttcgtaacgatggggattttgggtttttagacgcatggggggatcattggttattgtataacgattgcgagccttttgaaatttggcgctacaatgatgaaagttatgaagtcctaaagcttaaagataaacaccatattaaagataaggaaatggtgcaatggcacttccctttggctaaaaagaggcgaaacgctattgtttatgacgatttgatccctttagaagaattcaaaaaacgccatgccgatttgataggcacaaggattgaagaaagcatgctagatgaaaagaggattttagaggtatatcaaaaattccgcttgcct

SEQ ID NO: 4614 - DNA (genomic), 261 bp, Helicobacter pylori; double-stranded, circular
  misc_feature (B) LOCATION 1...261
  hypothetical: NO
  anti-sense: NO
atgaaaacgacagaaaacacagatgaaactcacttaagggaaactaaaaataaactaggacgcaaaccaaaagcagacgctaataaaaaaactcgcgcggtaagcttgtatttttctgatgagcaataccaaaaactagagaaaatggctaacgaagaagaagaaagcgtgggatcttatatcaaacgctatattttgaaggctttaagaaaaatagaacaaggtggtggctttatagcttttaacttgtttttaatttaa

SEQ ID NO: 4615 - DNA (genomic), 267 bp, Helicobacter pylori; double-stranded, circular
  misc_feature (B) LOCATION 1...267
  hypothetical: NO
  anti-sense: NO
aggaacttgatgaaaacgacagaaaacacagatgaaactcacttaagggaaactaaaaataaactaggacgcaaaccaaaagcagacgctaataaaaaaactcgcgcggtaagcttgtatttttctgatgagcaataccaaaaactagagaaaatggctaacgaagaagaagaaagcgtgggatcttatatcaaacgctatattttgaaggctttaagaaaaatagaacaaggtggtggctttatagcttttaacttgtttttaatt

SEQ ID NO: 4616 - DNA (genomic), 1023 bp, Helicobacter pylori; double-stranded, circular
  misc_feature (B) LOCATION 1...1023
  hypothetical: NO
  anti-sense: NO
atgtatcgtaaagatttggataattacttaaaacagcgcctccctaaagcggtgtttttgtatggggagtttgattttttcatccattattatattcaaacgattagcgcgctttttaaaggcaataaccctgacacagaaacttcgcttttttatgcgagcgattatgaaaaaagccagattgcgacccttttagagcaggattctttatttggagggagcagtttagttattttaaaactggattttgcattgcataagaaatttaaggaaaatgatatcaatccttttttaaaagctttagagcggcctagccataataggcttatcatagggctttataatgctaaaagcgacaccacaaaatacaaatacactagcgaaattatcgttaaatttttccaaaaaagccccttgaaagatgaagccatttgcgtgcgcttttttacccctaaagcgtgggagagtttgaaattcttgcaagaaagggctaattttttgcatttagacatcagcggccatcttttaaacgctctttttgaaattaataacgaagatttaagcgtttcgtttaacgatttagacaagctagcggttttaaacgcgcccatcactttagaagacattcaagaattaagctccaatgcgggggatatggatttgcaaaagctcattttagggctttttttgaaaaaaagcgtccttgatatttatgattatttgttaaaagagggcaaaaaggatgcggatattttaagggggttagagcgctatttttaccagctttttttatttttcgcccacattaaaacgaccggtttaatggacgctaaagaggtcttaggctacgctcctcctaaagagattgtagaaaattacgctaaaaacgccctgcgtttgaaagaagccggctataagagggtttttgaaatttttaggttatggcaccttcaaagcatgcaagggcaaaaggaattgggctttttgtatttgacccccattcaaaaaatcattaacccttga

SEQ ID NO: 4617 - DNA (genomic), 1059 bp, Helicobacter pylori; double-stranded, circular
  misc_feature (B) LOCATION 1...1059
  hypothetical: NO
  anti-sense: NO
ggcaagttagaggcgaaatcacagaaaggattaaagagcatgtatcgtaaagatttggataattacttaaaacagcgcctccctaaagcggtgtttttgtatggggagtttgattttttcatccattattatattcaaacgattagcgcgctttttaaaggcaataaccctgacacagaaacttcgcttttttatgcgagcgattatgaaaaaagccagattgcgacccttttagagcaggattctttatttggagggagcagtttagttattttaaaactggattttgcattgcataagaaatttaaggaaaatgatatcaatccttttttaaaagctttagagcggcctagccataataggcttatcatagggctttataatgctaaaagcgacaccacaaaatacaaatacactagcgaaattatcgttaaatttttccaaaaaagccccttgaaagatgaagccatttgcgtgcgcttttttacccctaaagcgtgggagagtttgaaattcttgcaagaaagggctaattttttgcatttagacatcagcggccatcttttaaacgctctttttgaaattaataacgaagatttaagcgtttcgtttaacgatttagacaagctagcggttttaaacgcgcccatcactttagaagacattcaagaattaagctccaatgcgggggatatggatttgcaaaagctcattttagggctttttttgaaaaaaagcgtccttgatatttatgattatttgttaaaagagggcaaaaaggatgcggatattttaagggggttagagcgctatttttaccagctttttttatttttcgcccacattaaaacgaccggtttaatggacgctaaagaggtcttaggctacgctcctcctaaagagattgtagaaaattacgctaaaaacgccctgcgtttgaaagaagccggctataagagggtttttgaaatttttaggttatggcaccttcaaagcatgcaagggcaaaaggaattgggctttttgtatttgacccccattcaaaaaatcattaaccct

SEQ ID NO: 4618 - DNA (genomic), 150 bp, Helicobacter pylori; double-stranded, circular
  misc_feature (B) LOCATION 1...150
  hypothetical: NO
  anti-sense: NO
cttaccgctctttacagcgtaagtaaaaaaggaatagatttgaatacggactttagccatatcaccgatattgagggcatgcgttttgttaatgaagaagacgctttaaacaaattgattaatgaaatccacacgcggccacattggatt

SEQ ID NO: 4619 - DNA (genomic), 351 bp, Helicobacter pylori; double-stranded, circular
  misc_feature (B) LOCATION 1...351
  hypothetical: NO
  anti-sense: NO
agaagtctactgtctcacatctatcagtatcgcaaaggcaatgcgatcaaaagcctaaaagataaaaatatttttatcgtagatagggggattgagaccgggtttagagcagggttaggcgtgcaaacttgtttgaaaaaagaatgccaagacatttatattttaacccccattctcgcgcaaaatgtcgctcaaggcttagaaagcttgtgcgatggggtgattagcgtgtatcgccctgaatgttttgtctctgtggaacaccattataaagaactcaagcgattaagcaatgaagaaattgaaaaatacttgggcgctaacaacgcgcccaatctcaaaaaggaacat

SEQ ID NO: 4620 - DNA (genomic), 705 bp, Helicobacter pylori; double-stranded, circular
  misc_feature (B) LOCATION 1...705
  hypothetical: NO
  anti-sense: NO
ttgaatacggactttagccatatcaccgatattgagggcatgcgttttgttaatgaagaagacgctttaaacaaattgattaatgaaatccacacgcgccacattgatttaaaagattccatcatgctcgctttgagttttaacgccttgtatttagctaacgctttagcgcaaaaatttggggcgacttatgatatactttttttagaacctatcttagcccctttaaactcaaagtgtgaaatcgctttagtgagtgaaagcatggatatagtgatgaatgaaagtttaatcaattcctttgacatcgctttagactatgtttatggggaagccaagcgggcttatgaagaagacattctgtctcacatctatcagtatcgcaaaggcaatgcgatcaaaagcctaaaagataaaaatatttttatcgtagatagggggattgagaccgggtttagagcagggttaggcgtgcaaacttgtttgaaaaaagaatgccaagacatttatattttaacccccattctcgcgcaaaatgtcgctcaaggcttagaaagcttgtgcgatggggtgattagcgtgtatcgccctgaatgttttgtctctgtggaacaccattataaagaactcaagcgattaagcaatgaagaaattgaaaaatacttgggcgctaacaacgcgcccaatctcaaaaaggaacattaa

SEQ ID NO: 4621 - DNA (genomic), 309 bp, Helicobacter pylori; double-stranded, circular
  misc_feature (B) LOCATION 1...309
  hypothetical: NO
  anti-sense: NO
atattctcatcaaggtgtgccaaacatgccttgaatctccattttatgaaaggatttgttatgagtggattaagaacatttagttgtgtagtggttttatgcggtgcaatggctaatgtggctatagctggtcctaaaatagaggcaaggggtgaatttggcaaattttgggggggagctgttggtggtgcaattgggggtggtgttggtggtgcaatggggggagccgttggtggtcctgccgggtggttgggctggcaaattagttggtggttctgtggggagagagtttggtcgggaaataggcga

SEQ ID NO: 4622 - DNA (genomic), 1389 bp, Helicobacter pylori; double-stranded, circular
  misc_feature (B) LOCATION 1...1389
  hypothetical: NO
  anti-sense: NO
atgaacacaagccataaaactttaaaaaccattgcgattttaggccagcctaatgtggggaaaagctcgttatttaaccgcctggctagagaaaggatcgctatcacttcagattttgcaggcactacacgagacattaacaaacgaaaaatcgcattgaatggccatgaagtggaattgctagacacaggaggcatggctaaagacgctcttttgtctaaagaaatcaaagcccttaatttaaaagccgctcaaatgagcgatttgattttgtatgttgtggatggcaagtctatccctagcgatgaagatcttaagctttttagagaggtttttaaaaccaaccctaactgctttctagtgatcaataaaattgataacgacaaagaaaaagagcgatcttatgcgttttcttcttttggcacgccaaaaagttttaatatttccgtttcgcacaataggggcattagcgctttaattgatgcggtattgaacgcgctgaatttaaaccaaatcatagagcaagatttggatgcggatattttagaaagcctagaaacccctaataacgctttagaagaaactaaagaagaagaaatcattcaagtaggcatcattgggagggtaaatgtgggcaaaagttcgcttttaaacgcgctcacaaaaaaagaaaggagtcttgtctctagcgtggctggcacgaccattgaccccatagatgaaaccattctaataggcgatcaaaaaatctgcttcgtggataccgctggcatcaggcataggggtaaaatcttaggcattgaaaaatacgcactggatcgcacgcaaaaagccttagaaaaatcccacatcgcgcttttagtgttagacgtgagcgctccttttgtggaattggacgaaaagatcagctccttagcggataaacattctttaggcatcattcttattttaaacaaatgggacatccgctacgccccctatgaagagatcatggcaaccttaaaaaggaaattccgctttttagaatacgcccctgtaatcacaaccagctgcttaaaagcgcgccatatagatgaaatcaagcataaaatcatagaagtctatgagtgtttttccaaacgcattcccacaagctcactcaatagcgtgatttttcaagccacccaaaaacaccccttaccaagcgatggtgggaaattagtgaaagtgtattacgccacgcaatttgccaccaaaccccctcaaatctctcttatcatgaatcgccctaaagccttgcatttcagttacaaacgctatttgatcaacactttaaggaaagaatttaattttttaggcacgcctttaatccttaacgctaaagataaaaagagcgtccaacaaaactaa

SEQ ID NO: 4623 - DNA (genomic), 1404 bp, Helicobacter pylori; double-stranded, circular
  misc_feature (B) LOCATION 1...1404
  hypothetical: NO
  anti-sense: NO
attgaagcgataaaaaagatgaacacaagccataaaactttaaaaaccattgcgattttaggccagcctaatgtggggaaaagctcgttatttaaccgcctggctagagaaaggatcgctatcacttcagattttgcaggcactacacgagacattaacaaacgaaaaatcgcattgaatggccatgaagtggaattgctagacacaggaggcatggctaaagacgctcttttgtctaaagaaatcaaagcccttaatttaaaagccgctcaaatgagcgatttgattttgtatgttgtggatggcaagtctatccctagcgatgaagatcttaagctttttagagaggtttttaaaaccaaccctaactgctttctagtgatcaataaaattgataacgacaaagaaaaagagcgatcttatgcgttttcttcttttggcacgccaaaaagttttaatatttccgtttcgcacaataggggcattagcgctttaattgatgcggtattgaacgcgctgaatttaaaccaaatcatagagcaagatttggatgcggatattttagaaagcctagaaacccctaataacgctttagaagaaactaaagaagaagaaatcattcaagtaggcatcattgggagggtaaatgtgggcaaaagttcgcttttaaacgcgctcacaaaaaaagaaaggagtcttgtctctagcgtggctggcacgaccattgaccccatagatgaaaccattctaataggcgatcaaaaaatctgcttcgtggataccgctggcatcaggcataggggtaaaatcttaggcattgaaaaatacgcactggatcgcacgcaaaaagccttagaaaaatcccacatcgcgcttttagtgttagacgtgagcgctccttttgtggaattggacgaaaagatcagctccttagcggataaacattctttaggcatcattcttattttaaacaaatgggacatccgctacgccccctatgaagagatcatggcaaccttaaaaaggaaattccgctttttagaatacgcccctgtaatcacaaccagctgcttaaaagcgcgccatatagatgaaatcaagcataaaatcatagaagtctatgagtgtttttccaaacgcattcccacaagctcactcaatagcgtgatttttcaagccacccaaaaacaccccttaccaagcgatggtgggaaattagtgaaagtgtattacgccacgcaatttgccaccaaaccccctcaaatctctcttatcatgaatcgccctaaagccttgcatttcagttacaaacgctatttgatcaacactttaaggaaagaatttaattttttaggcacgcctttaatccttaacgctaaagataaaaagagcgtccaacaaaac

SEQ ID NO: 4624 - DNA (genomic), 213 bp, Helicobacter pylori; double-stranded, circular
  misc_feature (B) LOCATION 1...213
  hypothetical: NO
  anti-sense: NO
atttactttagcgccaagcgattcaacaccaaaaacacgcatggcacgggttgtactttgtctagcttgattgtgggcttactcgctcaagggctggatttaaaaaacgctatcacaaaggctaaagagcttttaactatcatcattcaaaaccccttaaacattgggcatgggcatgggcctttgaatttgtggagcatcaaaaagcatgtt

SEQ ID NO: 4625 - DNA (genomic), 462 bp, Helicobacter pylori; double-stranded, circular
  misc_feature (B) LOCATION 1...462
  hypothetical: NO
  anti-sense: NO
ctattagagatgatttttcgatcaaggcgttcaaaatggggggcgttatgcaacgctcaaatcattgaatgcgtagcgaacgctttagaaacttgtgattttgggttgtgcgttttagatccggtgatggtggcaaagaatggggctttgcttttagaagaggaggcgattttaagcttaaaaaaacgccttttacctaaaaccaatttactaacccctaacctccctgaagtctatgcgctcacaggcgttcaagcgcgagacgataaaagcgcttcaaaagcgatgggtgttttaagggatttaggcgttaaaaacgctgtgattaaaggggggcatacagaacattttcaaggggaatttagcaacgattgggtgtttttagaagacgctgaatttactttagcgccaagcgattcaacaccaaaaacacgcatggcacgggttgtactttgtctagct

SEQ ID NO: 4626 - DNA (genomic), 738 bp, Helicobacter pylori; double-stranded, circular
  misc_feature (B) LOCATION 1...738
  hypothetical: NO
  anti-sense: NO
ttgaaagcgtttcaaacttttggcgtgtttgggacaagcgtgatcacttgcatcaccgctcaaaacacacagggcgtgcatggggtgtatccattgagtgtagagagcgtgaaagcgcaaatcctagctattagagatgatttttcgatcaaggcgttcaaaatgggggcgttatgcaacgctcaaatcattgaatgcgtagcgaacgctttagaaacttgtgattttgggttgtgcgttttagatccggtgatggtggcaaagaatggggctttgcttttagaagaggaggcgattttaagcttaaaaaaacgccttttacctaaaaccaatttactaacccctaacctccctgaagtctatgcgctcacaggcgttcaagcgcgagacgataaaagcgcttcaaaagcgatgggtgttttaagggatttaggcgttaaaaacgctgtgattaaaggggggcatacagaacattttcaaggggaatttagcaacgattgggtgtttttagaagacgctgaatttactttaagcgccaagcgattcaacaccaaaaacacgcatggcacgggttgtactttgtctagcttgattgtgggcttactcgctcaagggctggatttaaaaaacgctatcacaaaggctaaagagcttttaactatcatcattcaaaaccccttaaacattgggcatgggcatgggcctttgaatttgtggagcatcaaaaagcatgtttga

SEQ ID NO: 4627 - DNA (genomic), 810 bp, Helicobacter pylori; double-stranded, circular
  misc_feature (B) LOCATION 1...810
  hypothetical: NO
  anti-sense: NO
gtgaaagtttatccgcaagttttaagcattgctggtagcgatagcggtgggggcgctgggatacaggccgatttgaaagcgtttcaaacttttggcgtgtttgggacaagcgtgatcacttgcatcaccgctcaaaacacacagggcgtgcatggggtgtatccattgagtgtagagagcgtgaaagcgcaaatcctagctattagagatgatttttcgatcaaggcgttcaaaatgggggcgttatgcaacgctcaaatcattgaatgcgtagcgaacgctttagaaacttgtgattttgggttgtgcgttttagatccggtgatggtggcaaagaatggggctttgcttttagaagaggaggcgattttaagcttaaaaaaacgccttttacctaaaaccaatttactaacccctaacctccctgaagtctatgcgctcacaggcgttcaagcgcgagacgataaaagcgcttcaaaagcgatgggtgttttaagggatttaggcgttaaaaacgctgtgattaaaggggggcatacagaacattttcaaggggaatttagcaacgattgggtgtttttagaagacgctgaatttatcttaagcgccaagcgattcaacaccaaaaacacgcatggcacgggttgtactttgtctagcttgattgtgggcttactcgctcaagggctggatttaaaaaacgctatcacaaaggctaaagagcttttaactatcatcattcaaaaccccttaaacattgggcatgggcatgggcctttgaatttgtggagcatcaaaaagcatgtttga

SEQ ID NO: 4628 - DNA (genomic), 642 bp, Helicobacter pylori; double-stranded, circular
  misc_feature (B) LOCATION 1...642
  hypothetical: NO
  anti-sense: NO
gtgctagaaaaacaagataaagacctttttcttttgcaagtgggtaacaggattatccccaccaaaagcgaacaggaattaaaaatcaatcagccttattttgcgactatgcaaagaaatcagctgggcgacattgtgcttaaaaatttagtgcctgccccaaaaatcttagacgcattggacgatttgcccgttattgaaatgaagaaattaaaagaaatattgagcgccaaagacaacacccccctaaaagaatacaaagaacttttgagcgaaaaattaatccatgctaaaagctcgcaagagtttttgaatacagccaacatgcttttaagcttgcaatcgcaggttttaagctttgtggttgaaaacgaacgcaaaaaagcttttttacagatgaaagccaaaaaacaaagcgttgatttttacgctctgtaccctaacttgggcgaaattggcggcgttatttatttaaaagaaaaagagaaacagctttttttaaaaaccaccctccaaaggaccaaagaggttttaaaagaggctcaaaacacccttttaggcttttcttttgtggaaattgtgtgcgaaaaaacccccatgctttttgcctttgaagatcgcttattggacacgctagggtaa

SEQ ID NO: 4629 - DNA (genomic), 699 bp, Helicobacter pylori; double-stranded, circular
  misc_feature (B) LOCATION 1...699
  hypothetical: NO
  anti-sense: NO
cgcccttcattccaaaaacgctgcgcccattttaacgctactttacccattcttttaaaagtgctagaaaaacaagataaagacctttttcttttgcaagtgggtaacaggattatccccaccaaaagcgaacaggaattaaaaatcaatcagccttattttgcgactatgcaaagaaatcagctgggcgacattgtgcttaaaaatttagtgcctgccccaaaaatcttagacgcattggacgatttgcccgttattgaaatgaagaaattaaaagaaatattgagcgccaaagacaacacccccctaaaagaatacaaagaacttttgagcgaaaaattaatccatgctaaaagctcgcaagagtttttgaatacagccaacatgcttttaagcttgcaatcgcaggttttaagctttgtggttgaaaacgaacgcaaaaaagcttttttacagatgaaagccaaaaaacaaagcgttgatttttacgctctgtaccctaacttgggcgaaattggcggcgttatttatttaaaagaaaaagagaaacagctttttttaaaaaccaccctccaaaggaccaaagaggttttaaaagaggctcaaaacacccttttaggcttttcttttgtggaaattgtgtgcgaaaaaacccccatgctttttgcctttgaagatcgcttattggacacgctaggg

SEQ ID NO: 4630 - DNA (genomic), 249 bp, Helicobacter pylori; double-stranded, circular
  misc_feature (B) LOCATION 1...249
  hypothetical: NO
  anti-sense: NO
tcgcttttatctttattgttctctctttttatgcgctttagtatcatcactattcttcattttaaagcacttattttggggtttgttagtgttttttcaagcgcattgttttgtttttgcttggcaatttttgtagctagaatttttcaaaacgaacaaagcatcttaggattttgtaataccatcaatctctatgcgctaatgtcttgtttggcttctcatcaatcgtttaatggctcaaaaaagggg

SEQ ID NO: 4631 - DNA (genomic), 522 bp, Helicobacter pylori; double-stranded, circular
  misc_feature (B) LOCATION 1...522
  hypothetical: NO
  anti-sense: NO
tgctcaaattttacaaaggattcttgtatgcgcaaatttttggatggggcaaaaagtgaggttttaaaatacgatgtgatttcttttgatatttttgataccctccttctaagacctttcattaaacccacagatttatttttgtatattgagactaaatacaatattaaaggttttcatcaagcaaggatcctggcagaaatgcaatccagaaaattaagtaaaagacaagacattactctagatgaaatttatcatcaaatcccaaaagagtttcattcatataagggagtagaaatcgctactgaaaaagaggtgcttgttccaaacttggagatgttagaactctatcgtttcgctaaagagaacaataagagagtgattattgtatcagatatgtatttacctttagaggttcttgaagatattttaatttctaagggttttgatggttatacaaatttctatcttagtaaccatataatgctcactaaacattcaaaggatttgtttaagcatgtt

SEQ ID NO: 4632 - DNA (genomic), 1284 bp, Helicobacter pylori; double-stranded, circular
  misc_feature (B) LOCATION 1...1284
  hypothetical: NO
  anti-sense: NO
gcatgtttaaaacaagaaaatattactaatacgcagatattgcatatcggtgataattcttgggcagatgacgctatgcctaaaagtttaggcatagcaacgctatttagaaaaagcgtgttgaaacaattagaagaagtttttcctaaatacaaaacatttaatccaaccagtgttgcgcaaagttttattttaggatctttatgcgttttttataaaaattatattcaaaaacatgaaaaatttgattattggtttcttttaggagcgatgcaggcaggaattgcagccgttgcttattgccagtttatctataaggagattcacaaaagaaatattgatactttagtgtttgttgcgcgagatggttatttattgcaaaaaatttttaatattttatatccaaattcatataaaactacttatgtctatgctcccagaattttaaaaaaagcggtatttttagaagtcgtagagggcgagagtttggaaattttgcgtattttagaaggcgaagaagaagttaaaaagaagcaaatcaccaccaaccaacaggcgtatgtatatctctatagcaattttgaacattgccgccatttagcgttaaaatgtttagataattacagaaaatacttgttttcatcaaatttagaaggaaatatcgctattgtagatacgattactttaggctattcttcgcaagggttaatccaaaaagctttaaataaagaagtttttgggtgctatgtggatctcctaagaattttaaattatgattgcgtgagtttcttacctttttcacaccctaaacccgtttattttcataattgggattttatggagtttttgctaacaagccctgaataccctattttaaatgtagaaaatggcgttccaatctatcaaaaagacgtttcatcttgtgaaaaacaccgctctaaagcttatgaaaaaatagtagaaggggctgttggatatgcttcatattttaaagaaagtcaaatttctttagacattcatgatgtgatagaatgggtgaatttcttcattgacaatcctagtattcaagatcaagagcaattcagacaaatttattttcttccagacgcgacgcataaaaacgctctgcccttgttttgcaacgatgtttctttgttgtcttgtattttaaagccttcacaaagttatagcgtattaaaaaggagtcttaggacaaacaagcaagagaggttgtttaaaatattgtctctaattaaaaaaatctatgggaagttaaaaaagaaa

SEQ ID NO: 4633 - DNA (genomic), 1776 bp, Helicobacter pylori; double-stranded, circular
  misc_feature (B) LOCATION 1...1776
  hypothetical: NO
  anti-sense: NO
atgcgcaaatttttggatggggcaaaaagtgaggttttaaaatacgatgtgatttcttttgatatttttgataccctccttctaagacctttcattaaacccacagatttatttttgtatattgagactaaatacaatattaaaggttttcatcaagcaaggatcctggcagaaatgcaatccagaaaattaagtaaaagacaagacattactctagatgaaatttatcatcaaatcccaaaagagtttcattcatataagggagtagaaatcgctactgaaaaagaggtgcttgttccaaacttggagatgttagaactctatcgtttcgctaaagagaacaataagagagtgattattgtatcagatatgtatttacctttagaggttcttgaagatattttaatttctaagggttttgatggttatacaaatttctatcttagtaaccatataatgctcactaaacattcaaaggatttgtttaagcatgttttaaaacaagaaaatattactaatacgcagatattgcatatcggtgataattcttgggcagatgacgctatgcctaaaagtttaggcatagcaacgctatttagaaaaagcgtgttgaaacaattagaagaagtttttcctaaatacaaaacatttaatccaaccagtgttgcgcaaagttttattttaggatctttatgcgttttttataaaaattatattcaaaaacatgaaaaatttgattattggtttcttttaggagcgatgcaggcaggaattgcagccgttgcttattgccagtttatctataaggagattcacaaaagaaatattgatactttagtgtttgttgcgcgagatggttatttattgcaaaaaatttttaatattttatatccaaattcatataaaactacttatgtctatgctcccagaattttaaaaaaagcggtatttttagaagtcgtagagggcgagagtttggaaattttgcgtattttagaaggcgaagaagaagttaaaaagaagcaaatcaccaccaaccaacaggcgtatgtatatctctatagcaattttgaacattgccgccatttagcgttaaaatgtttagataattacagaaaatacttgttttcatcaaatttagaaggaaatatcgctattgtagatacgattactttaggctattcttcgcaagggttaatccaaaaagctttaaataaagaagtttttgggtgctatgtggatctcctaagaattttaaattatgattgcgtgagtttcttacctttttcacaccctaaacccgtttattttcataattgggattttatggagtttttgctaacaagccctgaataccctattttaaatgtagaaaatggcgttccaatctatcaaaaagacgtttcatcttgtgaaaaacaccgctctaaagcttatgaaaaaatagtagaaggggctgttggatatgcttcatattttaaagaaagtcaaatttctttagacattcatgatgtgatagaatgggtgaatttcttcattgacaatcctagtattcaagatcaagagcaattcaaacaaatttattttcttccagacgcgacgcataaaaacgctctgcccttgttttgcaacgatgtttctttgttgtcttgtattttaaagccttcacaaagttatagcgtattaaaaaggagtcttaggacaaacaagcaagagaggttgtttaaaatattgtctctaattaaaaaaatctatgggaagttaaaaaagaaatga

SEQ ID NO: 4634 - DNA (genomic), 762 bp, Helicobacter pylori; double-stranded, circular
  misc_feature (B) LOCATION 1...762
  hypothetical: NO
  anti-sense: NO
ttgtggcatgctgcctttagcgttggcgagtggggatggaacggcgatgaaatcccctatagggattgcgatgagtgggggcttgatgatttctatggtgttaagcctactgattgtgccggtgttttatcgtttgctcgctcccatagacgacaaaatcaagcggttttatcaaaaccaaaaagctttagaatgaaaaaaattgctttcattttggctttatgggtgggcttgttaggggcgtttgagcctaaaaaaagtcatatttattttggggctatggtgggtttagcccctgttaaaataaccccaaaaccggctagtgattcttcttatacggcttttttatggggggctaaaggggggtatcaattcgctttttttaaagctctagcgttaaggggtgaattttcctaccttatggcgatcaaacccaccgcactgcacacgattaacacttctttattgagtttaaatatggatgtgttgagcgatttttacacttataaaaaatacagctttggggtgtatggggggcttgggatagggtatttttatcaaagcaaccatttaggcatgaaaaatagttcgtttatgggttataacggcttgtttaatgtggggcttggcagcacgatcgatcgccaccaccgcgtagagcttggggctaagatccctttttcaaagactagaaattcttttaaaaattcttattttttagagagcgtttttatccatgcggcttatagttatatgttttaa

SEQ ID NO: 4635 - DNA (genomic), 387 bp, Helicobacter pylori; double-stranded, circular
  misc_feature (B) LOCATION 1...387
  hypothetical: NO
  anti-sense: NO
atgaatactattataagatatgcgagtttatggggcttgtgtattactctaactctagcgcaaaccccctctaaaacccctgatgaaatcaagcaaatccttaacaattatagccataagaatttaaagctcattgatycgccgacaagttctttarragcgacaccgggtttttwwccctcgcctaaagaaacagcgaccacgatcaatcaagagatcgctaaataccatgaaaaaagcgataaagccgctttggggctttatgaattgctaaagggggctaccaccaatctcagtttgcaagcgcaagaactcagtgtcaagcaagcgatggaagaaccacaccatcgccaaagcgatgtttttgcctactttgaacgcgagtta

SEQ ID NO: 4636 - DNA (genomic), 411 bp, Helicobacter pylori; double-stranded, circular
  misc_feature (B) LOCATION 1...411
  hypothetical: NO
  anti-sense: NO
tcggctttgcaaaagaaattagagcaaatccaaacggacattaaaagggttactaagctctatgacaaagggctgaccacgattgatgatttacaaagcttaaaagcgcaagggaatttgagcgaatacgatattttggacatgcaatttgctttggagcaaaaccgcttgactttagaatacctcactaacctcagtgtgaaaaatttgaaaaagaccacgattgatgcgcctaatttgcaattaagagaaaggcaggatttggtttctttaagggagcagatttctgcactcagataccaaaacaagcaactcaattattaccccaagatagatgtgtttgactcatggcttttttggatccaaaaacccgcttatgccacagggcgttttgggaatttctacccaggt

SEQ ID NO: 4637 - DNA (genomic), 549 bp, Helicobacter pylori; double-stranded, circular
  misc_feature (B) LOCATION 1...549
  hypothetical: NO
  anti-sense: NO
gggggacttatgaatactattataagatatgcgagtttatggggcttgtgtattactctaactctagcgcaaaccccctctaaaacccctgatgaaatcaagcaaatccttaacaattatagccataagaatttaaagctcattgatccgccgacaagttctttagaagcgacaccgggttttttaccctcgcctaaagaaacagcgaccacgatcaatcaagagatcgctaaataccatgaaaaaagcgataaagccgctttggggctttatgaattgctaaagggggctaccaccaatctcagtttgcaagcgcaagaactcagtgtcaagcaagcgatgaagaaccacaccatcgccaaagcgatgtttttgcctactttgaacgcgagttataattttaaaaatgaagctagggatactccagaatataagcattataacacccaacaactccaagctcaagtcacattgaatgtgtttaatggctttagcaatgtgaataatgtcaaagaaaagtctgcgactaccgatccactgtggctaatt

SEQ ID NO: 4638 - DNA (genomic), 1434 bp, Helicobacter pylori; double-stranded, circular
  misc_feature (B) LOCATION 1...1434
  hypothetical: NO
  anti-sense: NO
atgaatactattataagatatgcgagtttatggggcttgtgtattactctaactctagcgcaaaccccctctaaaacccctgatgaaatcaagcaaatccttaacaattatagccataagaatttaaagctcattgatccgccgacaagttctttagaagcgacaccgggttttttaccctcgcctaaagaaacagcgaccacgatcaatcaagagatcgctaaataccatgaaaaaagcgataaagccgctttggggctttatgaattgctaaagggggctaccaccaatctcagtttgcaagcgcaagaactcagtgtcaagcaagcgatgaagaaccacaccatcgccaaagcgatgtttttgcctactttgaacgcgagttataattttaaaaatgaagctagggatactccagaatataagcattataacacccaacaactccaagctcaagtcacattgaatgtgtttaatggctttagcaatgtgaataatgtcaaagaaaagtctgcgacttaccgatccactgtggctaatttagaatatagccgccaaagcgtgtatttgcaagtggtgcaacaatactacgagtattttaacaatctcgctcgcatgatcgctttgcaaaagaaattagagcaaatccaaacggacattaaaagggttactaagctctatgacaaagggctgaccacgattgatgatttacaaagcttaaaagcgcaagggaatttgagcgaatacgatattttggacatgcaatttgctttggagcaaaaccgcttgactttagaatacctcactaacctcagtgtgaaaaatttgaaaaagaccacgattgatgcgcctaatttgcaattaagagaaaggcaggatttggtttctttaagggagcagatttctgcactcagataccaaaacaagcaactcaattattaccccaagatagatgtgtttgactcatggcttttttggatccaaaaacccgcttatgccacagggcgttttgggaatttctacccaggtcagcaaaatacggctggggttactgcgactttgaatatttttgatgatatagggttgagcttgcaaaaacaatccatcatgctaggccaattagcgaatgaaaagaatttagcgtataaaaaattggagcaagaaaaagacgaacagctttacagaaagtcgcttgatattgccagagctaagattgaatcttcaaaggctagtttggatgcggccaatctttcttttgccaatattaaaaggaaatacgacgctaatttagtggatttcactacctatttaaggggcttaaccacgcgctttgatgcagaagtggcttacaatttagcgctcaacaattacgaagtgcaaaaagccaattacatttttaacagcgggcataaaatagacgactatgtgcattaa

SEQ ID NO: 4639 - DNA (genomic), 342 bp, Helicobacter pylori; double-stranded, circular
  misc_feature (B) LOCATION 1...342
  hypothetical: NO
  anti-sense: NO
atggctaaaatgaacgctccagatggggttgccgtttgggtgaatgaagacaggtgtaagggttgtgatatttgcgtgtcggtatgcccggctggagttcttggcatggggattgaaaaagaaagggtgcttggaaaagtggccaaagtagcctatccagagagctgtattggttgcgtgcaatgcgagttgcactgcccggattttgcgatttacgtggctgacaggaaggatttcaaattcgctaaagtttctaaagaagcccaagaaagaagcgaaaaggttaaggccaataaatacatgctcttagaagagactattttagaagggagaggcaaataa

SEQ ID NO: 4640 - DNA (genomic), 339 bp, Helicobacter pylori; double-stranded, circular
  misc_feature (B) LOCATION 1...339
  hypothetical: NO
  anti-sense: NO
atggctaaaatgaacgctccagatggggttgccgtttgggtgaatgaagacaggtgtaagggttgtgatatttgcgtgtcggtatgcccggctggagttcttggcatggggattgaaaaagaaagggtgcttggaaaagtggccaaagtagcctatccagagagctgtattggttgcgtgcaatgcgagttgcactgcccggattttgcgatttacgtggctgacaggaaggatttcaaattcgctaaagtttctaaagaagcccaagaaagaagcgaaaaggttaaggccaataaatacatgctcttagaagagactattttagaagggagaggcaaa

SEQ ID NO: 4641 - DNA (genomic), 615 bp, Helicobacter pylori; double-stranded, circular
  misc_feature (B) LOCATION 1...615
  hypothetical: NO
  anti-sense: NO
atgcaagcagtgattttagcgaatggggagtttcctaaatctaaaaaatgcttagacattttacaaaacgctccctttttaatcgcatgcgatggggctgttatatcattgcatgcgcttcaattcaaacccagcgttgttataggcgatttggatagcattgattcgcatttgaaagccttgtataaccctatacgcgtgagcgaacaagacagcaacgatttgtccaaagcctttttttatgctttgaataggggttgtgatgattttatttttttagggttgaatggcaagcgagaagaccacgctttagcgaacacttttttattgttggagtattttaaattttgcaaaaaaatccaatccgtaagcgattatggcctttttagggtgttagaaaccccttttactttgcccagttttaagggggagcaaatctcgctttttagcttggatcttaaagcccgattcacttctaaaaacctcaaataccccttaaaagacttgcgtctaaaaacgctcttttccggctcgctcaatgaagccactaatcattgttttagccttagctctgaacctaaatcggtggtgctagtgtatcaaaaattctcatga

SEQ ID NO: 4642 - DNA (genomic), 627 bp, Helicobacter pylori; double-stranded, circular
  misc_feature (B) LOCATION 1...627
  hypothetical: NO
  anti-sense: NO
ccgctggaaccaatcatgcaagcagtgattttagcgaatggggagtttcctaaatctaaaaaatgcttagacattttacaaaacgctccctttttaatcgcatgcgatggggctgttatatcattgcatgcgcttcaattcaaacccagcgttgttataggcgatttggatagcattgattcgcatttgaaagccttgtataaccctatacgcgtgagcgaacaagacagcaacgatttgtccaaagcctttttttatgctttgaataggggttgtgatgattttatttttttagggttgaatggcaagcgagaagaccacgctttagcgaacacttttttattgttggagtattttaaattttgcaaaaaaatccaatccgtaagcgattatggcctttttagggtgttagaaaccccttttactttgcccagttttaagggggagcaaatctcgctttttagcttggatcttaaagcccgattcacttctaaaaacctcaaataccccttaaaagacttgcgtctaaaaacgctcttttccggctcgctcaatgaagccactaatcattgttttagccttagctctgaacctaaatcggtggtgctagtgtatcaaaaattctca

SEQ ID NO: 4643 - DNA (genomic), 177 bp, Helicobacter pylori; double-stranded, circular
  misc_feature (B) LOCATION 1...177
  hypothetical: NO
  anti-sense: NO
atgacgatcaccaccctatcttttttattcacaacgccagaagtgtttgtcaatcaggatttcccatggctttctggggctggaaggctagtggttaaagacttggcgttatttgctggaggcttgtttgtggccggatttgatcgaaacgctatttggagggtaaagggttttgct

SEQ ID NO: 4644 - DNA (genomic), 195 bp, Helicobacter pylori; double-stranded, circular
  misc_feature (B) LOCATION 1...195
  hypothetical: NO
  anti-sense: NO
gtgtttgtcaatcagcatttcccatggctttctggggctggaaggctagtggttaaagacttggcgttatttgctggaggcttgtttgtggccggatttgatgcgaaacgctatttggagggtaaagggttttgcttgatggaccgctcatcggtagggattaaaactaaatgctctagcgggtgttgctcttaa

SEQ ID NO: 4645 - DNA (genomic), 231 bp, Helicobacter pylori; double-stranded, circular
  misc_feature (B) LOCATION 1...231
  hypothetical: NO
  anti-sense: NO
cgatcaccaccctattcttttttattcacaacgccagaagtgtttgtcaatcagcatttcccatggctttctggggctggaaggctagtggttaaagacttggcgttatttgctggaggcttgtttgtggccggatttgatgcgaaacgctatttggagggtaaagggttttgcttgatggaccgctcatcggtagggattaaaactaaatgctctagcgggtgttgctct

SEQ ID NO: 4646 - DNA (genomic), 315 bp, Helicobacter pylori; double-stranded, circular
  misc_feature (B) LOCATION 1...315
  hypothetical: NO
  anti-sense: NO
atgcaagcgttaaaatcattgcttgaagtgattacaaaactccagaatctaggcggctatttgatgcatatagctattttcatcatttttatttggattggaggrcttaagtttgtgccttacgaagctgaagggatcgccccttttgtgrccaactcccctttcttttctttcatgtataaatttgaaaaacctgcatacaaacaacacaaaatgtctgaatcccaatccatgcaagaagaaatgcaagataaccctaaaatcgttgaaaacaaakaatggcataaagaaaaccgcacttcatttagtggctga

SEQ ID NO: 4647 - DNA (genomic), 423 bp, Helicobacter pylori; double-stranded, circular
  misc_feature (B) LOCATION 1...423
  hypothetical: NO
  anti-sense: NO
aggaataaaaccatgcaagcgttaaaatcattgcttgaagtgattacaaaactccagaatctaggcggctatttgatgcatatagctattttcatcatttttatttggattggagggcttaagtttgtgccttacgaagctgaagggatcgccccttttgtggccaactcccctttcttttctttcatgtataaatttgaaaaacctgcatacaaacaacacaaaatgtctgaatcccaatccatgcaagaagaaatgcaagataaccctaaaatcgttgaaaacaaagaatggcataaagaaaaccgcacttatttagtggctgaaggtttagggattacgatcatgatcctaggcattttggtgcttttggggctttggatgcctttaatgggcgtagttgggggcttcttgtcgctggaa

SEQ ID NO: 4648 - DNA (genomic), 510 bp, Helicobacter pylori; double-stranded, circular
  misc_feature (B) LOCATION 1...510
  hypothetical: NO
  anti-sense: NO
atgcaagcgttaaaatcattgcttgaagtgattacaaaactccagaatctaggcggctatttgatgcatatagctattttcatcatttttatttggattggagggcttaagtttgtgccttacgaagctgaagggatcgccccttttgtggccaactcccctttcttttctttcatgtataaatttgaaaaacctgcatacaaacaacacaaaatgtctgaatcccaatccatgcaagaagaaatgcaagataaccctaaaatcgttgaaaacaaagaatggcataaagaaaaccgcacttatttagtggctgaaggtttagggattacgatcatgatcctaggcattttggtgcttttggggctttggatgcctttaatgggcgtagttgggggcttgcttgtcgctggaatgacgatcaccaccctattcttttttattcacaacgccagaagtgtttgtcaatcagcatttcccatggctttctggggctggaaggctagtggttaa

SEQ ID NO: 4649 - DNA (genomic), 648 bp, Helicobacter pylori; double-stranded, circular
  misc_feature (B) LOCATION 1...648
  hypothetical: NO
  anti-sense: NO
atgcaagcgttaaaatcattgcttgaagtgattacaaaactccagaatctaggcggctatttgatgcatatagctattttcatcatttttatttggattggagggcttaagtttgtgccttacgaagctgaagggatcgccccttttgtggccaactcccctttcttttctttcatgtataaatttgaaaaacctgcatacaaacaacacaaaatgtctgaatcccaatccatgcaagaagaaatgcaagataaccctaaaatcgttgaaaacaaagaatggcataaagaaaaccgcacttatttagtggctgaaggtttagggattacgatcatgatcctaggcattttggtgcttttggggctttggatgcctttaatgggcgtagttgggggcttgcttgtcgctggaatgacgatcaccaccctatcttttttattcacaacgccagaagtgtttgtcaatcagcatttcccatggctttctggggctggaaggctagtggttaaagacttggcgttatttgctggaggcttgtttgtggccggatttgatgcgaaacgctatttggagggtaaagggttttgcttgatggaccgctcatcggtagggattaaaactaaatgctctagcgggtgttgctcttaa

SEQ ID NO: 4650 - DNA (genomic), 174 bp, Helicobacter pylori; double-stranded, circular
  misc_feature (B) LOCATION 1...174
  hypothetical: NO
  anti-sense: NO
gctctccaaagcaagctgtatttgcaaacgcgcattggtaggggcgaagtggaaagcgtgatttttgataaaggcaaacccatgttaagaatgggcgaaatgattttacccatagactgcgcgatagaggtcacaaaccggatcagtgccgaatgtagcatatatcctctatcc

SEQ ID NO: 4651 - DNA (genomic), 729 bp, Helicobacter pylori; double-stranded, circular
  misc_feature (B) LOCATION 1...729
  hypothetical: NO
  anti-sense: NO
gacatctttaataaggaagagatcatggccattgatttagcagaagttacaggagctaaagccgcgcaagaaaggaaaaaagaacagcccaccatcgctaacgggttggataaaaacgctttcatgaaactctttttagagcaattgaaaaatcaagaccccaccgctcctatggaaacggataaaatcatcacccaaaccgcgcaactcacgcaagtggaaatgcaagaagaaaacaaaaagaccatgcaagaagtcgccagtgcgatgaaatccaataaagaaactaacgaatctttaaaagactttcaaggcgctttaaaagacaccatggaaaacctgaacaaaggcatggacgatagcttaaaggctaacaacgctttaagggaagtaagcgcccttaattctgtgagcatgataggcaaaatcgctgaaaccgatgtgagtggggcgaattttgacggcaacaacaagctttctttttcgctcttttttgatgaaaaaattgacgcttctaaaggagtgccagcgattcaaatcttaaacgaaaacaatgaattggtcaaaacgattcctttaaaagattataacgggcaaaaggggtatatcaattttgaatgggacggcacaaacgaaaagggcgaaaaagttcctaaaggcaattacaaaatcaaggctgaatacaatttaggctctccaaagcaagctgtatttgcaaacgcgcattgg

SEQ ID NO: 4652 - DNA (genomic), 1092 bp, Helicobacter pylori; double-stranded, circular
  misc_feature (B) LOCATION 1...1092
  hypothetical: NO
  anti-sense: NO
atggccattgatttagcagaagttacaggagctaaagccgcgcaagaaaggaaaaaagaacagcccaccatcgctaacgggttggataaaaacgctttcatgaaactctttttagagcaattgaaaaatcaagaccccaccgctcctatggaaacggataaaatcatcacccaaaccgcgcaactcacgcaagtggaaatgcaagaagaaaacaaaaagaccatgcaagaagtcgccagtgcgatgaaatccaataaagaaactaacgaatctttaaaagactttcaaggcgctttaaaagacaccatggaaaacctgaacaaaggcatggacgatagcttaaaggctaacaacgctttaagggaagtaagcgcccttaattctgtgagcatgataggcaaaatcgctgaaaccgatgtgagtggggcgaattttgacggcaacaacaagctttctttttcgctcttttttgatgaaaaaattgacgcttctaaaggagtgccagcgattcaaatcttaaacgaaaacaatgaattggtcaaaacgattcctttaaaagattataacgggcaaaaggggtatatcaattttgaatgggacggcacaaacgaaaagggcgaaaaagtccctaaaggcaattacaaaatcaaggctgaatacaatttagactctcaaagcaagcagtatttgcaaacgcgcattggtaggggcgaagtggaaagcgtgatttttgataaaggcaaacccatgttaagaatgggcgaaatgattttacccatagacagcgcgatagagttttacaaaccggatcaaaaaccgcttgatcaaaaactctcggatcaaaaacctcaaaaactctctgaacaaaaagcccttgaacagaaaatctctgaacaaaaaccgcaagaaccccttgatcaaaaactctcggatcaaaaaccacagaaaccgcttgaacagaaaatctctgaacagaaaccgctagatcaaaaactctcggatcaaaaaccacagaaaccgcttgaacagaaaatctctgaacagaaaccgctagatcaaaaaccccaaaccccccctaaagagacagcatga

SEQ ID NO: 4653 - DNA (genomic), 402 bp, Helicobacter pylori; double-stranded, circular
  misc_feature (B) LOCATION 1...402
  hypothetical: NO
  anti-sense: NO
ataccactagatacaataccccaagtcatctttttttcaaaaaaggggtatgaatggcaaccattcaaccattcaaccattcaaccattcaaccattcaaccattcaaccattcaatcattcaatcattcaatcattcaatcattcaatcattcaatcattcaatcattcaaccattcaagcaacgctaccttatttttataactatttatctttttacaaaaacctatttaaaaatcccctattttttattattcccccttttattaacccttttattaacccttttattaacccttttattaacccttttattaacccttttattaacccttttattaacccttttattaacccttttattaacccttttattaacccttttattaaccctttcatataa

SEQ ID NO: 4654 - DNA (genomic), 486 bp, Helicobacter pylori; double-stranded, circular
  misc_feature (B) LOCATION 1...486
  hypothetical: NO
  anti-sense: NO
atgttttttaaaacttatcaaaaattactgggcgcgagctgtttggcgctgtatttagtgggctgtgggaatggtggtggcggtgaatcgccggttgagatgattrcaaatagcgagggtacgtttcaaatcgactccaaagcagatagcattactattcaaggcgtgaagcttaatagaggtaattgtgctgtcaattttgttccagtaagtgagacgtttcaaatgggtgttttaagtcaagttactccaatctctatacaggattttaaagatatggcaagcacttataagatatttgatcaaaagaaagggttggcaaacatagcaaataaaatttctcaattagagcaaaagggtgtgatgatgaaacctcmaacccttaattttggagaaagtttaaaaggcatttctcaagggtgcaatattatagaggcagaaatacaaaccgacaaaggcgcttggacttttaactttgataaataa

SEQ ID NO: 4655 - DNA (genomic), 486 bp, Helicobacter pylori; double-stranded, circular
  misc_feature (B) LOCATION 1...486
  hypothetical: NO
  anti-sense: NO
atgttttttaaaacttatcaaaaattactgggcgcgagctgtttggcgctgtatttagtgggctgtgggaatggtggtggcggtgaatcgccggttgagatgattgcaaatagcgagggtacgtttcaaatcgactccaaagcagatagcattactattcaaggcgtgaagcttaatagaggtaattgtgctgtcaattttgttccagtaagtgagacgtttcaaatgggtgttttaagtcaagttactccaatctctatacaggattttaaagatatggcaagcacttataagatatttgatcaaaagaaagggttggcaaacatagcaaataaaatttctcaattagagcaaaagggtgtgatgatggaacctcaaacccttaattttggagaaagtttaaaaggcatttctcaagggtgcaatattatagaggcagaaatacaaaccgacaaaggcgcttggacttttaactttgataaataa

SEQ ID NO: 4656 - DNA (genomic), 519 bp, Helicobacter pylori; double-stranded, circular
  misc_feature (B) LOCATION 1...519
  hypothetical: NO
  anti-sense: NO
cgagctatcacaacaaatcaattcgtaggaacaaacatgttttttaaaacttatcaaaaattactgggcgcgagctgtttggcgctgtatttagtgggctgtgggaatggtggtggcggtgaatcgccggttgagatgattgcaaatagcgagggtacgtttcaaatcgactccaaagcagatagcattactattcaaggcgtgaagcttaatagaggtaattgtgctgtcaattttgttccagtaagtgagacgtttcaaatgggtgttttaagtcaagttactccaatctctatacaggattttaaagatatggcaagcacttataagatatttgatcaaaagaaagggttggcaaacatagcaaataaaatttctcaattagagcaaaagggtgtgatgatggaacctcaaacccttaattttggagaaagtttaaaaggcatttctcaagggtgcaatattatagaggcagaaatacaaaccgacaaaggcgcttggacttttaactttgataaa

SEQ ID NO: 4657 - DNA (genomic), 255 bp, Helicobacter pylori; double-stranded, circular
  misc_feature (B) LOCATION 1...255
  hypothetical: NO
  anti-sense: NO
ttcactttagatgaattgagccaacttttaaaaccaagttttagggctaaacagcttaatttgtggctcaatgcgaagaataaaccaagctttagagacatccaaaataatttctcacaagactttatcgcttatttggagcaagaatttactttgcgcgcgatagaaatcgcgcatgtgagggagagtgttgatggctctaaaaaatacctttttaaatctttaagggacaaccacacttttgaagcggtgttg

SEQ ID NO: 4658 - DNA (genomic), 804 bp, Helicobacter pylori; double-stranded, circular
  misc_feature (B) LOCATION 1...804
  hypothetical: NO
  anti-sense: NO
agcggtgttgtgaaaatgaaagacaaaaagattgatgaagaaacgaacgccgttttagagggggaaaaatacaccgtgtgcgtgtcttgtcaaatcggctgtcaagtgggttgctcgttttgtttcactcaaaaaggcggttttgtaagggatctcaaagcgagcgagattatccagcaagccctactcattaaagaggccaataacctccccattgaaaaagcgctcaacattgtttttatgggaatgggcgagcctttgaacaatttagatgaggtgtgtaaagcggttgagatttttaataccggcatgcaaatttcacctaaaagagtcaccatttccacgagcggcgtggccgataaaatccccattttagcgggcaaaaacttaggcgtgcaattagccatatccttacacgccgtagatgataaaacgcgctcgtctttaatgcccttgaataaaaaatacaacattgaatgcgttttgaatgaagtgaggaaatggcctttagagcagcgaaaaagagtgatgtttgaataccttttaatcaaagatttaaacgatagcctggattgcgctaaaaaacttttaaaacttttaaacggcattaaatccaaagtgaatttgatcttattcaacccgcatgaaggctctaagtttgagcgccctagcttagagagcgccagaatgtttgcgaattttttaaacgccaaaggcttattatgcaccattagagaatccaaagccttggatattgaagcggcttgcgggcaattgagggagaaaaagctccagcagaaaatt

SEQ ID NO: 4659 - DNA (genomic), 1074 bp, Helicobacter pylori; double-stranded, circular
  misc_feature (B) LOCATION 1...1074
  hypothetical: NO
  anti-sense: NO
atgaaagctagcatttatgatttcactttagatgaattgagccaacttttaaaaccaagttttagggctaaacagctttatttgtggctctatgcgaagtataaaacaagctttaaagacatgcaaaataatttttcaaaagactttatcgcttatttggagcaagaatttactttgcgcacgatagaaatcgcgcatgtgagggagagtgttgatggctctaaaaaatacctttttaaatctttaagggacaaccacacttttgaagcggtgttgttgaaaatgaaagacaaaaagattgatgaagaaacgaacgccgttttagagggggaaaaatacaccgtgtgcgtgtcttgtcaaatcggctgtcaagtgggttgctcgttttgtttcactcaaaaaggcggttttgtaagggatctcaaagcgagcgagattatccagcaagccctactcattaaagaggccaataacctccccattgaaaaagcgctcaacattgtttttatgggaatgggcgagcctttgaacaatttagatgaggtgtgtaaagcggttgagatttttaataccggcatgcaaatttcacctaaaaggatcaccatttccacgagcggcgtggccgataaaatccccattttagcgggcaaaaacttaggcgtgcaattagccatatccttacacgccgtagatgataaaacgcgctcgtctttaatgcccttgaataaaaaatacaacattgaatgcgttttgaatgaagtgaggaaatggcctttagagcagcgaaaaagagtgatgtttgaataccttttaatcaaagatttaaacgatagcctggattgcgctaaaaaacttttaaaacttttaaacggcattaaatccaaagtgaatttgatcttattcaacccgcatgaaggctctaagtttgagcgccctagcttagagagcgccagaatgtttgcggattttttaaacgccaaaggcttattatgcaccattagagaatccaaagccttggatattgaagcggcttgcgggcaattgagggagaaaaagctccagcagaaaatttaa

SEQ ID NO: 4660 - DNA (genomic), 843 bp, Helicobacter pylori; double-stranded, circular
  misc_feature (B) LOCATION 1...843
  hypothetical: NO
  anti-sense: NO
gtgtttgactcattgggcggatttttggggtataaaacttttaagccgatagtggataaggttaaaaatataaacgcttggataaaaaattacgataataaaaaagctcaagagattatgggttttatagaaaatcctacgcctgatttccaaaataataagtttttgtgtgttttaaaccgacaaggaacaaggcacaacaattatcttggtttaacctctacaaaccttctaatcggcgcgatctatttctccatccgccattgcatcaaagccacatggcaaaacgatagggatcaattctacgccccttatgatgacgctttccaagacgacagcgagtttaaaaacaattgtttggcgttcatgctttttcacacccaaaaccgcatcactgccactcaagggactaaccattttatcccctttagcgaagatgaagttgattctaaagaaaggtatttgagccatgctttattagactttttaaaaggcgaaatcaaagaacctaaaaagagcgatagcctctttttaaacgccaaaaaagaaaacaagcccctaaaattcagctcgagcgcttcaaaggtgtttgacgctggcagagagatttatcgctattaccacacacaagatttcatccacaccccctataacgctaacgcaagcctttatgacatcaaagaattttttcaaggccgtaacaagcaaggcagattaaactcacccaccaaagccaaagatgaatattacaaacagctttacgctaacttgcaatacgccctaaaagatctcgccaaagaaatacagcctaaagtctatgaatacggatttttaagggagtag

SEQ ID NO: 4661 - DNA (genomic), 897 bp, Helicobacter pylori; double-stranded, circular
  misc_feature (B) LOCATION 1...897
  hypothetical: NO
  anti-sense: NO
tctgggataccgctaccccccccccccttaaaaccaaccaacgcgttcaatttagaagtgtttgactcattgggcggatttttggggtataaaacttttaagccgatagtggataaggttaaaaatataaacgcttggataaaaaattacgataataaaaaagctcaagagattatgggttttatagaaaatcctacgcctgatttccaaaataataagtttttgtgtgttttaaaccgacaaggaacaaggcacaacaattatcttggtttaacctctacaaaccttctaatcggcgcgatctatttctccatccgccattgcatcaaagccacatggcaaaacgatagggatcaattctacgccccttatgatgacgctttccaagacgacagcgagtttaaaaacaattgtttggcgttcatgctttttcacacccaaaaccgcatcactgccactcaagggactaaccattttatcccctttagcgaagatgaagttgattctaaagaaaggtatttgagccatgctttattagactttttaaaaggcgaaatcaaagaacctaaaaagagcgatagcctctttttaaacgccaaaaaagaaaacaagcccctaaaattcagctcgagcgcttcaaaggtgtttgacgctggcagagagatttatcgctattaccacacacaagatttcatccacaccccctataacgctaacgcaagcctttatgacatcaaagaattttttcaaggccgtaacaagcaaggcagattaaactcacccaccaaagccaaagatgaatattacaaacagctttacgctaacttgcaatacgccctaaaagatctcgccaaagaaatacagcctaaagtctatgaatacggatttttaagggag

SEQ ID NO: 4662 - DNA (genomic), 930 bp, Helicobacter pylori; double-stranded, circular
  misc_feature (B) LOCATION 1...930
  hypothetical: NO
  anti-sense: NO
tgtgacagggcaattccccattggctttttagtctgggataccgctaccccccccccttaaaaccaaccaacgcgttcaatttagaagtgtttgactcattgggcggatttttggggtataaaacttttaagccgatagtggataaggttaaaaatataaacgcttggataaaaaattacgataataaaaaagctcaagagattatgggttttatagaaaatcctacgcctgatttccaaaataataagtttttgtgtgttttaaaccgacaaggaacaaggcacaacaattatcttggtttaacctctacaaaccttctaatcggcgcgatctatttctccatccgccattgcatcaaagccacatggcaaaacgatagggatcaattctacgccccttatgatgacgctttccaagacgacagcgagtttaaaaacaattgtttggcgttcatgctttttcacacccaaaaccgcatcactgccactcaagggactaaccattttatcccctttagcgaagatgaagttgattctaaagaaaggtatttgagccatgctttattagactttttaaaaggcgaaatcaaagaacctaaaaagagcgatagcctctttttaaacgccaaaaaagaaaacaagcccctaaaattcagctcgagcgcttcaaaggtgtttgacgctggcagagagatttatcgctattaccacacacaagatttcatccacaccccctataacgctaacgcaagcctttatgacatcaaagaattttttcaaggccgtaacaagcaaggcagattaaactcacccaccaaagccaaagatgaatattacaaacagctttacgctaacttgcaatacgccctaaaagatctcgccaaagaaatacagcctaaagtctatgaatacggatttttaagggagtag

SEQ ID NO: 4663 - DNA (genomic), 564 bp, Helicobacter pylori; double-stranded, circular
  misc_feature (B) LOCATION 1...564
  hypothetical: NO
  anti-sense: NO
ttggaaacttatatcattgatgcagataatatagatggggatttatttttctataatcttactagaaacagcaatgatttttccatgttgcccgtttttgaactcgatcgcattgcccaaaaaattagaaatattcttaaaaaacatggcagtagaaaagacattattttaaaacacaatgaaattaaagaagccttttttagcccgttcaaaccgcagctaaaaaccgttcaagtgttcctctcgcactcgcatgcggataaaaataaggctttaggggttaaggactatttggaaagcaaaacaaaacgcaaagtgtttatcgattcgcttttttgggattataaagacgatgttttaaacaaattggcaaaacacgatgatataagcaagattgaagacgctttcacgctcattctcagaaaatctttacaagatatgattgaaaaatgcccttattttgtgtttttacaaagcaagaacagcgtttctaatcaagggctatcacgcatcacttattccgcatggatttatgaagaattaaaaatcgcttcattctattag

SEQ ID NO: 4664 - DNA (genomic), 597 bp, Helicobacter pylori; double-stranded, circular
  misc_feature (B) LOCATION 1...597
  hypothetical: NO
  anti-sense: NO
ttggaaacttatatcattgatgcagataatatagatggggatttatttttctataatcttactagaaacagcaatgatttttccatgttgcccgtttttgaactcgatcgcattgcccaaaaaattagaaatattcttaaaaaacatggcagtagaaaagacattattttaaaacacaatgaaattaaagaagccttttttagcccgttcaaaccgcagctaaaaaccgttcaagtgttcctctcgcactcgcatgcggataaaaataaggctttaggggttaaggactatttggaaagcaaaacaaaacgcaaagtgtttatcgattcgcttttttgggattataaagacgatgttttaaacaaattggcaaaacacgatgatataagcaagattgaagacgctttcacgctcattctcagaaaatctttacaagatatgattgaaaaatgcccttattttgtgtttttacaaagcaagaacagcgtttctaatcaagggctatcacgcatcacttattccgcatggatttatgaagaattaaaaatcgcttcatttctattagcgctattaacgagagtcgcccaattccaatga

SEQ ID NO: 4665 - DNA (genomic), 636 bp, Helicobacter pylori; double-stranded, circular
  misc_feature (B) LOCATION 1...636
  hypothetical: NO
  anti-sense: NO
tcaaaggattttaaagggaacttaaataaaaggcaaaaatatttggaaacttatatcattgatgcagataatatagatggggatttatttttctataatcttactagaaacagcaatgatttttccatgttgcccgtttttgaactcgatcgcattgcccaaaaaattagaaatattcttaaaaaacatggcagtagaaaagacattattttaaaacacaatgaaattaaagaagccttttttagcccgttcaaaccgcagctaaaaaccgttcaagtgttcctctcgcactcgcatgcggataaaaataaggctttaggggttaaggactatttggaaagcaaaacaaaacgcaaagtgtttatcgattcgcttttttgggattataaagacgatgttttaaacaaattggcaaaacacgatgatataagcaagattgaagacgctttcacgctcattctcagaaaatctttacaagatatgattgaaaaatgcccttattttgtgtttttacaaagcaagaacagcgtttctaatcaagggctatcacgcatcacttattccgcatggatttatgaagaattaaaaatcgcttcatttctattagcgctattaacgagagtcgcccaattccaa

SEQ ID NO: 4666 - DNA (genomic), 261 bp, Helicobacter pylori; double-stranded, circular
  misc_feature (B) LOCATION 1...261
  hypothetical: NO
  anti-sense: NO
atggcgtgtaaattttgccctaagatcagaaaaacagattggatttttattttaatcgccgctttaggcttttattcagttaataagctagggtatgcgcccaaattcaatacccccactccaaaatcttcacgccctctttcacgccctattgaaaagcctaacaatatgactgaagaagaaaggaaaaagcgttttatagagttgcaaaaagcatgcttacttcataaagacaaaaaggcatgcgaagaggttttttag

SEQ ID NO: 4667 - DNA (genomic), 258 bp, Helicobacter pylori; double-stranded, circular
  misc_feature (B) LOCATION 1...258
  hypothetical: NO
  anti-sense: NO
atggcgtgtaaattttgccctaagatcagaaaaacagattggatttttattttaatcgccgctttaggcttttattcagttaataagctagggtatgcgcccaaattcaatacccccactccaaaatcttcacgccctctttcacgccctattgaaaagcctaacaatatgactgaagaagaaaggaaaaagcgttttatagagttgcaaaaagcatgcttacttcataaagacaaaaaggcatgcgaagaggttttt

SEQ ID NO: 4668 - DNA (genomic), 261 bp, Helicobacter pylori; double-stranded, circular
  misc_feature (B) LOCATION 1...261
  hypothetical: NO
  anti-sense: NO
atcatggcgtgtaaattttgccctaagatcagaaaaacagattggatttttattttaatcgccgctttaggcttttattcagttaataagctagggtatgcgcccaaattcaatacccccactccaaaatcttcacgccctctttcacgccctattgaaaagcctaacaatatgactgaagaagaaaggaaaaagcgttttatagagttgcaaaaagcatgcttacttcataaagacaaaaaggcatgcgaagaggttttt

SEQ ID NO: 4669 - DNA (genomic), 570 bp, Helicobacter pylori; double-stranded, circular
  misc_feature (B) LOCATION 1...570
  hypothetical: NO
  anti-sense: NO
atgatgactaagaacgcttatgcgtttgtcgtgattgaaaaaagtattatggtgtttaaatgcgccaaagacaaggggctaatccctatcactgaaggctttgtgccgttaaaagagggctttttgagaagttttaaagagcgttgcaatctggattttttagaaaatttagaccttttgtttttgtatgactaccaatttccaagcgaggttttttcattgtgtaaggatttgaaaaattccatttgggacagaaagcttgtggtagtgctagtggaggctttggagggttttaagggtttgaatttgtctcttaagatagaagataggcattctaatagcttgggtaatggcgttcaaaaattgctcaccaacgctgatttggggagcaaccacaaaccaatcgtaatagacagcatgaaaacataccaccaaagccagcaagaaaaatacaaaagagaaagaggcgaaacgctagaggttcgccccacaacaccccctagctatgggggtgggagcattagaatcagcggcgataaaaagcctgattccaatgaagaaaatttttaa

SEQ ID NO: 4670 - DNA (genomic), 234 bp, Helicobacter pylori; double-stranded, circular
  misc_feature (B) LOCATION 1...234
  hypothetical: NO
  anti-sense: NO
atgcgctcatcatgccctaaaggctttacaagctacgctaaagacaacgatttgggctttgatgcgacagagttggaacagatcgcaaaaggattcatccctagggggtatttgtggcattttgacgcgaatgttttagggaatttagcgctggtgagagaagagttattattaggcgtgaaacacacgaaaggatattcactatggacagaatttctacagaaacagaattga

SEQ ID NO: 4671 - DNA (genomic), 237 bp, Helicobacter pylori; double-stranded, circular
  misc_feature (B) LOCATION 1...237
  hypothetical: NO
  anti-sense: NO
aaccgcatgcgctcatcatgccctaaaggctttacaagctacgctaaagacaacgatttgggctttgatgcgacagagttggaacagatcgcaaaaggattcatccctagggggtatttgtggcattttgacgcgaatgttttagggaatttagcgctggtgagagaagagttattattgggcgttaaacacacgaaaggatattcactatggacagaatttctacagaaacagaat

SEQ ID NO: 4672 - DNA (genomic), 246 bp, Helicobacter pylori; double-stranded, circular
  misc_feature (B) LOCATION 1...246
  hypothetical: NO
  anti-sense: NO
atgaaaaaaacccgtatccggaagaagtcagctttaatgaatggctgttgggcggaatttgatagcgtttttagcgccattgtgcctttagaagatttaaataaaaccgcatgcgctcatcatgccctaaaggctttacaagctacgctaaagacaacgatttgggctttgatgcgacagagttggaacagatcgcaaaaggattcatccctagggggtatttgtggcattttgacgcgaatgttt

SEQ ID NO: 4673 - DNA (genomic), 315 bp, Helicobacter pylori; double-stranded, circular
  misc_feature (B) LOCATION 1...315
  hypothetical: NO
  anti-sense: NO
tggactctagccaaaattcgttgcgttaaaaactttaaggaagctatagaaggttttacagaaaaaatcaaagaatcccctaacgattcaaacgctatcaatgaagcctttgataatttagaaacagagttagagcgcgctacagaaaatttgagtcaaaaaatcgatcccgttttagaacggaatgaaaattatacgcaaaaagcgttggagtatagggagtttttagaaagccgtaaagagagctttattgtagatgaaaaaaacccgtatccggaagaagtcagctttaatgaatggctgttgggcggaatt

SEQ ID NO: 4674 - DNA (genomic), 312 bp, Helicobacter pylori; double-stranded, circular
  misc_feature (B) LOCATION 1...312
  hypothetical: NO
  anti-sense: NO
actctagccaaaattcgttgcgttaaaaactttaaggaagctatagaaggttttacagaaaaaatcaaagaatcccctaacgattcaaacgctatcaatgaagcctttgataatttagaaacagagttagagcgcgctacagaaaatttgagtcaaaaaatcgatcccgttttagaacggaatgaaaattatacgcaaaaagcgttggagtatagggagtttttagaaagccgtaaagagagctttattgtagatgaaaaaaacccgtatccggaagaagtcagctttaatgaatggctgttgggcggaatt

SEQ ID NO: 4675 - DNA (genomic), 324 bp, Helicobacter pylori; double-stranded, circular
  misc_feature (B) LOCATION 1...324
  hypothetical: NO
  anti-sense: NO
ataacgaatacaactttccaactccaaggcgttttattggaatacgattttgaacggcctgctatctcttatacccctaaaaaaagcgtttttaatgagcgcttgaaggatttgagggaaaattttagcgcttctttatacgctgatttgaaagacaagatccatcataacgccttgtctaacgatgatttagaacgcatgatagcttttagagagcaagaatttgaaaagagtttagaggattggatgggtgcatattcttatgatgcaaccctgaggtgttttagtagcgagcgtatctatctagaccggttggggtgggaa

SEQ ID NO: 4676 - DNA (genomic), 1407 bp, Helicobacter pylori; double-stranded, circular
  misc_feature (B) LOCATION 1...1407
  hypothetical: NO
  anti-sense: NO
atggctgaatggaaaacggacacagaagaagtcaaaaaggttgttggaagatgcagggaatttaaaagatccctgcaagaagaaaaatgcagtccatttatcaaagaccttgatagttacgcgctaaaaatcatagtggagcgcagaaaaactgaaatgcaattggaaaaagccataggagaattaaaaaaagccaaaagcaatgaagatgacgctaaagttgctttaagagtcttgcaaggtgcttctgtcgtctcgtggatttggcctcctgctagaatagctgctacggcagccattgtagccgctgaagctgttttgaaatttatgaaagaagacacagaaaaatgcaaaaggaatgtggagctattagaacgaatgcttgaaatctactcgaatcaagccaaagcgagcgcgaatcttatgaatcaagcttgggagggcattaaaaagaggttgcatttttatactgataagcaccaggaatttatcaggcgtttgaaacaagcgagcgatgcgatagataacgaatacaactttccaactccaggcgttttattggaatacgattttgaacggcctgctatctcttatacccctaaaaaaagcgtttttaatgagcgcttgaaggatttgagggaaaattttagcgcttctttatacgctgatttgaaagacaagatccatcataacgccttgtctaacgatgatttagaacgcatgatagcttttagagagcaagaatttgaaaagagtttagaggattggatgggtgcatattcttatgatgaaaaccctaacgatgaattagatcgcatggcaatatctaaagagcaggagttggaaaagagtttagaggatttgatgccaagcgttttaggcgtgccttcttataacgaaagcttgactttagccaaaaatcgttgcgttaaaaactttaaggaagctttagaaggttttacagaaaaaatcaaagaatcccctaacgattcaaacgctatcaatgaagcctttgataatttagaaacagagttagagcgcgctacagaaaatttgagtcaaaaaatcgatcccgttttagaacggaatgaaaattatacgcaaaaagcgttggagtatagggagtttttagaaagccgtaaagagagctttattgtagatgaaaaaaacccctatccggaagaagtcagctttaatgaatggcgttgggcggaatttgatagcgtttttagcgccattgtgcctttagaagatttaaataaaaccgcatgcgctcatcatgccctaaaggctttacaagctacgctaaagacaacgatttgggctttgatgcgacagagttggaacagatcgcaaaaggattcatccctagggggtatttgtggcattttgacgcgaatgttttag

SEQ ID NO: 4677 - DNA (genomic), 1503 bp, Helicobacter pylori; double-stranded, circular
  misc_feature (B) LOCATION 1...1503
  hypothetical: NO
  anti-sense: NO
atggctgaatggaaaacggacacagaagaagtcaaaaaggttgttggaagatgcagggaatttaaaagatccctgcaagaagaaaaatgcagtccatttatcaaagaccttgatagttacgcgctaaaaatcatagtggagcgcagaaaaactgaaatgcaattggaaaaagccataggagaattaaaaaaagccaaaagcaatgaagatgacgctaaagttgctttaagagtcttgcaaggtgcttctgtcgtctcgtggatttggcctcctgctagaatagctgctacggcagccattgtagccgctgaagctgttttgaaatttatgaaagaagacacagaaaaatgcaaaaggaatgtggagctattagaacgaatgcttgaaatctactcgaatcaagccaaagcgagcgcgaatcttatgaatcaagcttgggagggcattaaaaagaggttgcatttttatactgataagcaccaggaatttatcaggcgtttgaaacaagcgagcgatgcgatagataacgaatacaactttccaactccaggcgttttattggaatacgattttgaacggcctgctatctcttatacccctaaaaaaagcgtttttaatgagcgcttgaaggatttgagggaaaattttagcgcttctttatacgctgatttgaaagacaagatccatcataacgccttgtctaacgatgatttagaacgcatgatagcttttagagagcaagaatttgaaaagagtttagaggattggatgggtgcatattcttatgatgaaaaccctaacgatgaattagatcgcatggcaatatctaaagagcaggagttggaaaagagtttagaggatttgatgccaagcgttttaggcgtgccttcttataacgaaagcttgactttagccaaaaatcgttgcgttaaaaactttaaggaagctttagaaggttttacagaaaaaatcaaagaatcccctaacgattcaaacgctatcaatgaagcctttgataatttagaaacagagttagagcgcgctacagaaaatttgagtcaaaaaatcgatcccgttttagaacggaatgaaaattatacgcaaaaagcgttggagtatagggagtttttagaaagccgtaaagagagctttattgtagatgaaaaaaacccctatccggaagaagtcagctttaatgaatggcgttgggcggaatttgatagcgtttttagcgccattgtgcctttagaagatttaaataaaaccgcatgcgctcatcatgccctaaaggctttacaagctacgcttaaagacaacgatttgggctttgatgcgacagagttggaacagatcgcaaaaggattcatccctagggggtatttgtggcattttgacgcgaatgttttagggaatttagcgctggtgagagaagagttattattaggcgtgaaacacacgaaaggatattcactatggacagaatttctacagaaacagaattga

SEQ ID NO: 4678 - DNA (genomic), 807 bp, Helicobacter pylori; double-stranded, circular
  misc_feature (B) LOCATION 1...807
  hypothetical: NO
  anti-sense: NO
atgaaacaaagtttgcgcgaacaaaaattattgaaaattttggaaaatgatgtcttgacgattttggatagtttttctaattacctttttgaactgagagaagaattggacttcatagaagaagaaatggaaggtgaaatcactgaacaaaaccttaccgctctttatgatttttctaatttcttagaagaccatgtcaatgtgttttatgagaatgttttgaatatagatgatgtcaaaacagaacacctttattcaggtctcatagatagtcttaacgctaatcttcactttgtcaagtcatttctcagtaatcaggatttagacttccgcttttttaaagaaataaacgatgggcaagatccccaaaaaacattatcaagattgattcctcttcaaagtgggaagaatgatgcaagctcgtttaaagccaataattcttttgtttcattagtttatgtttatgcttacttcatgctagaaactatcaggcagtcgtataggattctcagattactagaaaaacctatcaataacaacataagcgaggacatgcagagcgatatagagaatttttttgttcaagcaaattttttagaatactatgttcagaacaaaatatacccaaccaatcatgcctatgacttcacgcatttgatcatggactccattattcctaattggattcagattgatatgagcgttgaagctaaaaagaaagagctttttgaaaaatattttcaaaacattgatgaagtaacaaacaaaatgctcgatcaagaaaatcaaaacaaaaacagcgattga

SEQ ID NO: 4679 - DNA (genomic), 816 bp, Helicobacter pylori; double-stranded, circular
  misc_feature (B) LOCATION 1...816
  hypothetical: NO
  anti-sense: NO
aggagtattaaaatgaaacaaagtttgcgcgaacaaaaattattgaaaattttggaaaatgatgtcttgacgattttggatagtttttctaattacctttttgaactgagagaagaattggacttcatagaagaagaaatggaaggtgaaatcactgaacaaaaccttaccgctctttatgatttttctaatttcttagaagaccatgtcaatgtgttttatgagaatgttttgaatatagatgatgtcaaaacagaacacctttattcaggtctcatagatagtcttaacgctaatcttcactttgtcaagtcatttctcagtaatcaggatttagacttccgcttttttaaagaaataaacgatgggcaagatccccaaaaaacattatcaagattgattcctcttcaaagtgggaagaatgatgcaagctcgtttaaagccaataattcttttgtttcattagtttatgtttatgcttacttcatgctagaaactatcaggcagtcgtataggattctcagattactagaaaaacctatcaataacaacataagcgaggacatgcagagcgatatagagaatttttttgttcaagcaaattttttagaatactatgttcagaacaaaatatacccaaccaatcatgcctatgacttcacgcatttgatcatggactccattattcctaattggattcagattgatatgagcgttgaagctaaaaagaaagagctttttgaaaaatattttcaaaacattgatgaagtaacaaacaaaatgctcgctcaagaaaatcaaaacaaaaacagcgat

SEQ ID NO: 4680 - DNA (genomic), 339 bp, Helicobacter pylori; double-stranded, circular
  misc_feature (B) LOCATION 1...339
  hypothetical: NO
  anti-sense: NO
aagcgtttaaacgctctagccaggcagctcaagggcgagttaaaaatttttattgaagaggccaggaataatcttttaaagcttttggcgagctcagaagttttgattgattatagcgaagaagacatccctagcgattttttaaaggaagtgtcttttaatttagaaaaacaaatcgcctcttttaaagatttattggatttttctaacgcgcaaaaacaaaggaataaggggcatgccttaagcattgttggcaaacccaatgccggcaaaagctccctattacgccatttttcagaagaaagggttggtgagcgagttagggcacgaagagaacca

SEQ ID NO: 4681 - DNA (genomic), 447 bp, Helicobacter pylori; double-stranded, circular
  misc_feature (B) LOCATION 1...447
  hypothetical: NO
  anti-sense: NO
acgatgaaaaatacatcgtcatcaacgactttaacaatgaatgacaccattgccgctatcgctacccctttaggcaagggagcgattagcatcattaaaatcagcggccataacgccctaaacatcctcaaacaactcacccaaaaacaagacttcacccccagatacgcttacgtgtgcgacattttttctgatggcgttttattggacaaagcgttagtgatttatttcaaagccccctatagtttcaccggtgaagatgtgtgcgaaatccaatgccatggaagcccccttttagcgcaaaatatccttcaagcttgcttgaatttaggggctaggctcgctaaagcgggggaatttagcaaaaaagcctttttaaaccataaaatggatttgagcgagattgaagcgagcgttcagctcatcctttgtgaagatgaaagcgtt

SEQ ID NO: 4682 - DNA (genomic), 459 bp, Helicobacter pylori; double-stranded, circular
  misc_feature (B) LOCATION 1...459
  hypothetical: NO
  anti-sense: NO
ttagggattgaaaaaagccttaaaagtttagaaaattgcgacatcattttaggcgtgtttgatctttctaaacccctagaaaaagaagattttaaccttatggacacccttaatcgcactaaaaagccttgtattgtcgttttgaataaaaacgatttagcccccaaactagagcttgaaattttaaaatcttatcttaaaatcccttattctatcctagaaactaacaccttaaattccaaggcttgcttgaaagatttgagccaaaaaatcagtgaatttttccccaaactagacactcaaaacaagctcttgctcacttccctagcccaaacaaccgccctagaaaacgccattactgaattgcaaaacgctaaaagccatttagacactttagaagcttttttcttatcatattttaagtgcgatagaaaacttgaacttgctcacccgccctta

SEQ ID NO: 4683 - DNA (genomic), 456 bp, Helicobacter pylori; double-stranded, circular
  misc_feature (B) LOCATION 1...456
  hypothetical: NO
  anti-sense: NO
gggattgaaaaaagccttaaaagtttagaaaattgcgacatcattttaggcgtgtttgatctttctaaacccctagaaaaagaagattttaaccttatggacacccttaatcgcactaaaaagccttgtattgtcgttttgaataaaaacgatttagcccccaaactagagcttgaaattttaaaatcttatcttaaaatcccttattctatcctagaaactaacaccttaaattccaaggcttgcttgaaagatttgagccaaaaaatcagtgaatttttccccaaactagacactcaaaacaagctcttgctcacttccctagcccaaacaaccgccctagaaaacgccattactgaattgcaaaacgctaaaagccatttagacactttagaagcttttttcttatcatattttaagtgcgatagaaaacttgaacttgctcacccgccctta

SEQ ID NO: 4684 - DNA (genomic), 1353 bp, Helicobacter pylori; double-stranded, circular
  misc_feature (B) LOCATION 1...1353
  hypothetical: NO
  anti-sense: NO
atgaatgacaccattgccgctatcgctacccctttaggcaagggagcgattagcatcattaaaatcagcggccataacgccctaaacatcctcaaacaactcacccaaaaacaagacttcacccccagatacgcttacgtgtgcgacattttttctgatggcgttttattggacaaagcgttagtgatttatttcaaagccccctatagtttcaccggtgaagatgtgtgcgaaatccaatgccatggaagcccccttttagcgcaaaatatccttcaagcttgcttgaatttaggggctaggctcgctaaagcgggggaatttagcaaaaaagcctttttaaaccataaaatggatttgagcgagattgaagcgagcgttcagctcatcctttgtgaagatgaaagcgttttaaacgctctagccaggcagctcaagggcgagttaaaaatttttattgaagaggccaggaataatcttttaaagcttttggcgagctcagaagttttgattgattatagcgaagaagacatccctagcgattttttaaaggaagtgtcttttaatttagaaaaacaaatcgcctcttttaaagatttattggatttttctaacgcgcaaaaacaaaggaataaggggcatgccttaagcattgttggcaaacccaatgccggcaaaagctccctattaaacgccatgcttttagaagaaagggctttagtgagcgatattaaaggcacgacaagagacaccatagaagaagtcattgaactaaaagggcataaggtgcgcttgattgatacggctggcattagagagagcgcggatgaaatagagcgtttagggattgaaaaaagccttaaaagtttagaaaattgcgacatcattttaggcgtgtttgatctttctaaacccctagaaaaagaagattttaaccttatggacacccttaatcgcactaaaaagccttgtattgtcgttttgaataaaaacgatttagcccccaaactagagcttgaaattttaaaatcttatcttaaaatcccttattctatcctagaaactaacaccttaaattccaaggcttgcttgaaagatttgagccaaaaaatcagtgaatttttccccaaactagacactcaaaacaagctcttgctcacttccctagcccaaacaaccgccctagaaaacgccattactgaattgcaaaacgctaaaagccatttagacactttagagcttttttcttatcatattttaagtgcgatagaaaacttgaacttgctcacccgcccttatgaaaccagccagatgcttgatagcatgttcagcgaattttgcttaggcaaatga

SEQ ID NO: 4685 - DNA (genomic), 939 bp, Helicobacter pylori; double-stranded, circular
  misc_feature (B) LOCATION 1...939
  hypothetical: NO
  anti-sense: NO
atgaaaagcgataaaccctttttagaacgctatttttatgaccccactcttttgcaaaaggggttgattttcgcgctctatcctttttctttaatctatcaatgtattgccacaattaaacgaaaaaccgctaaaaagcatgattttaaaatccccattatcagcataggcaacttgatcgctgggggaagcggtaaaacgcccttcattttagaaatcgctccaagataccaagaagtggcggttgtttctagagggtatcaacgggattctaaaggtttagtggtggtgagcgttaaaggaaacattttagttcctcaaaaaacagcgggcgatgaagcctatcttttagccttaaatctaaaacaagcgagcgtgattgtgagcgaaaaaagggagctaggcgttttaaaagcccttgaattaggatcaaagatcgtgtttttagacgatggttttaggtttaatttcaaccaattcaatgcgcttttaaaacccaaagtccccccctactaccctttttgtttgcctagcgggttgtatagagaaaatattaaaagctataaagaagcccatttagtcattacagaagataaggattatcaaagaatcacctctatcactaaccccaccaaacgcatgcttttagtaacggctatcgctaaccctagcaggcttgatgcgtttttacccaaagaagtggttaaaaaattgtattttagagaccatgccccttttgatttgaagcttttagaaaaagagttttatcaaaataacgccacctccttattggttacttcaaaagatctcgtcaaattacaagattgcaaattgcctttaagcgtattggatttaaaactagaaatttgccctaaagttttagaggagattgatcgttatatcctttcttatccttgtaatataaaagaacatctataa

SEQ ID NO: 4686 - DNA (genomic), 939 bp, Helicobacter pylori; double-stranded, circular; identical to SEQ ID NO: 4685
  misc_feature (B) LOCATION 1...939
  hypothetical: NO
  anti-sense: NO

SEQ ID NO: 4687 - DNA (genomic), 936 bp, Helicobacter pylori; double-stranded, circular
  misc_feature (B) LOCATION 1...936
  hypothetical: NO
  anti-sense: NO
atgaaaagcgataaaccctttttagaacgctatttttatgaccccactcttttgcaaaaggggttgattttcgcgctctatcctttttctttaatctatcaatgtattgccacaattaaacgaaaaaccgctaaaaagcatgattttaaaatccccattatcagcataggcaacttgatcgctgggggaagcggtaaaacgcccttcattttagaaatcgctccaagataccaagaagtggcggttgtttctagagggtatcaacgggattctaaaggtttagtggtggtgagcgttaaaggaaacattttagttcctcaaaaaacagcgggcgatgaagcctatcttttagccttaaatctaaaacaagcgagcgtgattgtgagcgaaaaaagggagctaggcgttttaaaagcccttgaattaggatcaaagatcgtgtttttagacgatggttttaggtttaatttcaaccaattcaatgcgcttttaaaacccaaagtccccccctactaccctttttgtttgcctagcgggttgtatagagaaaatattaaaagctataaagaagcccatttagtcattacagaagataaggattatcaaagaatcacctctatcactaaccccaccaaacgcatgcttttagtaacggctatcgctaaccctagcaggcttgatgcgtttttacccaaagaagtggttaaaaaattgtattttagagaccatgccccttttgatttgaagcttttagaaaaagagttttatcaaaataacgccacctccttattggttacttcaaaagatctcgtcaaattacaagattgcaaattgcctttaagcgtattggatttaaaactagaaatttgccctaaagttttagaggagattgatcgttatatcctttcttatccttgtaatataaaagaacatcta

SEQ ID NO: 4688 - DNA (genomic), 936 bp, Helicobacter pylori; double-stranded, circular; identical to SEQ ID NO: 4687
  misc_feature (B) LOCATION 1...936
  hypothetical: NO
  anti-sense: NO

SEQ ID NO: 4689 - DNA (genomic), 1617 bp, Helicobacter pylori; double-stranded, circular
  misc_feature (B) LOCATION 1...1617
  hypothetical: NO
  anti-sense: NO
cttatggatagagccaaatttatattcgttacagggggcgtgttaagctctctagggaaagggatttcatcttcttcaatcgctacgcttttgcagcattgcaattaccaggtttctattttgaagattgatccttatatcaatattgatccaggcaccatgagccctttagagcatggggaagtgtttgttactagcgatggcgctgaaacggatttagacatcgggcattatgaacgctttttgaacaggaatttaacgaggttgaataatttcactaccgggcagattttttcaagcgtgatagaaaatgaaaggaaaggggaatatttaggcaaaaccattcaaatcgtcccccatgtaaccgatgaaatcaaaaggcgcattaaaagtgcggctaaggggttggattttttaatcgtggaagtgggtggaaccgtgggcgatatggagggcatgttttatgtggaaccgatccgccagctgaaactggaattacggaataaagcactcatcaatatgcatgtaaccttgatgccctatatccgtgccactagcgaactaagaagcagacccacgcaacactccgtccaggaattacggcgtcttggcgtaacccctcaaatcattttggcgcgatcgcctaagcctttggataaagaattgaaaaagaaaatcgctttgagttgcgatgtggaacaagacagcgtgattgtagccacagacactaaaagcatttacgcatgccctattcttttcttgcaagaaggcattttaacccccattgccagacgctttaatttgaataagttgcaccctaaaatggcggcttggaacactttagtagaaaaaatcatcgctcctaaacacaaggtcaaaattggttttgtgggcaagtatttaagcttaaaagaatcttataaatccttgattgaagccctaatccatgcgggggcgcatctggatacgcaagtcaatattgaatggctggatagcgagaattttaatgaaaagactgatttagagggcgttgatgcgattttagtgccggggggctttggagaaagggggattgagggcaaaatttgcgccattcaaagggctaggttagaaaaactcccctttttagggatttgtttgggcatgcaattagcgatcgttgaattttgtcgcaatgttttaggcttgaaaggggctaactctacggaatttaaccaacgctgcgaataccctgtggtgtatttgattgaagattttatggatcaaaaccaccaaaaacaggtgcgcacctataattcgcctttaggaggcaccatgcgattaggcgaatacgaatgcgaaatcatgcctaatagcttgctagaaaaagcctataaaaagcctaacatcaaagaaagacaccgccatcgttatgaaatcaaccccaaataccgccaagagtgggaaaataaaggcttgaaagtggtgggctttggggcgaatcatttgattgaagcgattgaattagaagatcacccgttctttgtgggggtgcaattccacccggaattcacctccaggttgcaaagccctaaccctattattttggatttcattaagagcgctcttcataaatcc

SEQ ID NO: 4690 - DNA (genomic), 711 bp, Helicobacter pylori; double-stranded, circular
  misc_feature (B) LOCATION 1...711
  hypothetical: NO
  anti-sense: NO
gtgctgaatgaagagcaaaattcattagaagaaaaagggggcgaaaacaaaaacgaaaaagaaacccccctaaagggcattcattctaaaatcccctctttgaagcaggctttggagcagacgattagtaaaatcaaaagctctaaagagtttttcaaacagcttctacacaataaaaaaaagctttatatcgcgcttggaatattgctttcactcatcgcgctcattgtggctttgagtttgttactagggcataaaaaagaaaataaacaaacttctttacaaactaataccgccaccaccaataacgaaacgcctaacgacaccaataacgcagaagccgaagggcaaatagaaaatttagacttgcctgatttaatcggcaaagactctttgaaaagaaacgatgaaagccaagtggatgcgatgatgcaaaaagcgagccttttgtatgagcaagggcaaaaagatgaagccttgcatttgtttgataagatcgcttctttctcgcaagggattgcgagccataatctaggggtgattaaattcaaagaaaaggattttaatggggcgttggatttgtttgattccagtatcgcttctaaagaaaacgcgagcgtgrgcgcgattgatgcgttagttacggcttatcatttgcaagatgcggatttgtattatcattatctaaaaattgtraagagacactttgta

SEQ ID NO: 4691 - DNA (genomic), 2526 bp, Helicobacter pylori; double-stranded, circular
  misc_feature (B) LOCATION 1...2526
  hypothetical: NO
  anti-sense: NO
gtgctgaatgaagagcaaaattcattagaagaaaaagggggcgaaaacaaaaacgaaaaagaaacccccctaaagggcattcattctaaaatcccctctttgaagcaggctttggagcagacgattagtaaaatcaaaagctctaaagagtttttcaaacagcttctacacaataaaaaaaagctttatatcgcgcttggaatattgctttcactcatcgcgctcattgtggctttgagtttgttactagggcataaaaaagaaaataaacaaacttctttacaaactaataccgccaccaccaataacgaaacgcctaacgacaccaataacgcagaagccgaagggcaaatagaaaatttagacttgcctgatttaatcggcaaagactctttgaaaagaaacgatgaaagccaagtggatgcgatgatgcaaaaagcgagccttttgtatgagcaagggcaaaaagatgaagccttgcatttgtttgataagatcgcttctttctcgcaagggattgcgagccataatctaggggtgattaaattcaaagaaaaggattttaatggggcgttggatttgtttgattccagtatcgcttctaaagaaaacgcgagcgtgagcgcgattgatgcgttagttacggcttatcatttgcaagatgcggatttgtattatcattatctaaaaattgtaagagacactttgtataaagattacaaaaagtctttttattcctacgcttacgcactcaaatcctactacgctggagagtattttgaagccctttcgcctttaatgcaccctaattccaacgcctttttaaagcctaatgcgcgcttagcgtctaaattgtttttgatgtttaaagatgaaacgaacgcttacaagcaattgcaaaaaagtgcgaacgcccaagatgagcttgctttagggcttttgcaggcccgtttgggccattacaagcaggctttggagcatttgcagcattatttgcacaactaccctaaagatttaaacgctttaatggctttggaattggtgagtttgaaaatgggcgatacccttaaagcgagcgaagccttaaaattagccagccatacgcaagaagacacgctattagccaactctttttaccccatcaagcccactataaaccctatgtttttagacaaagaaagggccaaagagcgtttttggaacacgcaatattttgaaggtaaaagggattttatctaccgcttgctgttttattacgctccttttaaggttttagactctaaagaaaccttaggcgtgattgaagaggggctgtttcttttagattctgacacgcaaaaggatttagagggggcaagccttgcttttaaaagggggcgtttgatggcgatagcggataaaaacgcgctcaaggggttgaaagaattagaaaagaagcgtctaaaaaaagccctttctttttttgatttgtctttaaaaaatagccccaataacgcgcttttgcattataatgtgggcttgatttatgcgcaattggaaaattaccacaaagcttatttccattttttaagggctttccatttgaattctgcggattatttgagcgcggtttttgcggttttagcctcgcatttcacccatgaagacaccacggagtttttaagagaaatcaccgagaatttttatagtcatgatttttctagccccacgcaaaaagctttactctcttcgctcatcgcttatttgaattaccgcaccaattgggatatggactggctcaaaaacgcccctaaaaagctccctttttattacgcgctagaagcggtgttcgctaaagagagcaaggataaaaaattgatggtgcaatcttttgggaatttaaaaaaaatgctccctaaagatctcatctctaatattttttatgaaatcgtctcgtattacgatgcgagcatccgccacactttaagcatttacacccttttagattcgcataaaatcagttgggatcaaaccatgcaagggcccattttagggcgtcatttctacacttacatgggatttatggtcaatgatttggatcatcaagaaagattgttagagcaaaaaatcgccagtttagaagagggcgaagcccctaacgattggttggaaaatttagcgctagtgagtttgtttcaaggccagtatgaaaaagcgagcgcgttgtatcaaaacttaattgatgggcttaaggataacgaggcgcgtttaaaaatcctagcgggtttaacctatatcgcgcaaaataattacaataacgccgctttatggctagagcttgggaaattagacgatccgaataatgaaaatatccgttacgctttagggttgttgtatcaaagaaagggagacttgaaatcagcgctaaaccattttttagccattaaaacctctgatttttcgtcgccttattttgattttgaaattgacaccaatcttttaaaagagcgtttgaaccaagaagaaaagggcgagtttttagaataa

SEQ ID NO: 4692 - DNA (genomic), 2526 bp, Helicobacter pylori; double-stranded, circular
  misc_feature (B) LOCATION 1...2526
  hypothetical: NO
  anti-sense: NO
tttgtgctgaatgaagagcaaaattcattagaagaaaaagggggcgaaaacaaaaacgaaaaagaaacccccctaaagggcattcattctaaaatcccctctttgaagcaggctttggagcagacgattagtaaaatcaaaagctctaaagagtttttcaaacagcttctacacaataaaaaaaagctttatatcgcgcttggaatattgctttcactcatcgcgctcattgtggctttgagtttgttactagggcataaaaaagaaaataaacaaacttctttacaaactaataccgccaccaccaataacgaaacgcctaacgacaccaataacgcagaagccgaagggcaaatagaaaatttagacttgcctgatttaatcggcaaagactctttgaaaagaaacgatgaaagccaagtggatgcgatgatgcaaaaagcgagccttttgtatgagcaagggcaaaaagatgaagccttgcatttgtttgataagatcgcttctttctcgcaagggattgcgagccataatctaggggtgattaaattcaaagaaaaggattttaatggggcgttggatttgtttgattccagtatcgcttctaaagaaaacgcgagcgtgagcgcgattgatgcgttagttacggcttatcatttgcaagatgcggatttgtattatcattatctaaaaattgtaagagacactttgtataaagattacaaaaagtctttttattcctacgcttacgcactcaaatcctactacgctggagagtattttgaagccctttcgcctttaatgcaccctaattccaacgcctttttaaagcctaatgcgcgcttagcgtctaaattgtttttgatgtttaaagatgaaacgaacgcttacaagcaattgcaaaaaagtgcgaacgcccaagatgagcttgctttagggcttttgcaggcccgtttgggtacttacaagcaggctttggagcatttgcagcattatttgcacaactaccctaaagatttaaacgctttaatggctttggaattggtgagtttgaaaatgggcgatacccttaaagcgagcgaagccttaaaattagccagccatacgcaagaagacacgctattagccaactctttttaccccatcaagcccactataaaccctatgtttttagacaaagaaagggccaaagagcgtttttggaacacgcaatattttgaaggtaaaagggattttatctaccgcttgctgttttattacgctccttttaaggttttagactctaaagaaaccttaggcgtgattgaagaggggctgtttcttttagattctgacacgcaaaaggatttagagggggcaagccttgcttttaaaagggggcgtttgatggcgatagcggataaaaacgcgctcaaggggttgaaagaattagaaaagaagcgtctaaaaaaagccctttctttttttgatttgtctttaaaaaatagccccaataacgcgcttttgcattataatgtgggcttgatttatgcgcaattggaaaattaccacaaagcttatttccattttttaagggctttccatttgaattctgcggattatttgagcgcggtttttgcggttttagcctcgcatttcacccatgaagacaccacggagtttttaagagaaatcaccgagaatttttatagtcatgatttttctagccccacgcaaaaagctttactctcttcgctcatcgcttatttgaattaccgcaccaattgggatatggactggctcaaaaacgcccctaaaaagctccctttttattacgcgctagaagcggtgttcgctaaagagagcaaggataaaaaattgatggtgcaatcttttgggaatttaaaaaaaatgctccctaaagatctcatctctaatattttttatgaaatcgtctcgtattacgatgcgagcatccgccacactttaagcatttacacccttttagattcgcataaaatcagttgggatcaaaccatgcaagggcccattttagggcgtcatttctacacttacatgggatttatggtcaatgatctggatcatcaagaaagattgttagagcaaaaaatcgccagtttagaaaggggcgaagcccctaacgattggttggaaaatttagcgctagtgagtttgtttcaaggccagtatgaaaaagcgagcgcgttgtatcaaaacttaattgatgggcttaaggataacgaggcgcgtttaaaaatcctagcgggtttaacctatatcgcgcaaaataattacaataacgccgctttatggctagagcttgggaaattagacgatccgaataatgaaaatatccgttacgctttagggttgttgtatcaaagaaagggagacttgaaatcagcgctaaaccattttttagccattaaaacctctgatttttcgtcgccttattttgattttgaaattgacaccaatcttttaaaagagcgtttgaaccaagaagaaaagggcgagtttttagaa

SEQ ID NO: 4693 - DNA (genomic), 777 bp, Helicobacter pylori; double-stranded, circular
  misc_feature (B) LOCATION 1...777
  hypothetical: NO
  anti-sense: NO
ttgctctctaataaaacgctccctaaaagattcgccacttatagcttgcaagaagtgggcgttattttcctgaccactcagattttatctatcatgcgcaagacccgttgctctaaaacgcttttttttatcactaggggcagggagagtttccgctaccagctgtgcgatcattacaaacaaaaacgccaccaatttgatgaagattttagatcccttttaaaagctctcaaaatcgctttagtggaaaaataccccctaaaaaaaggggctaaaatccagggcgaacattgttttgaatatgaagccgatgatattatctctttttacaaaaagaaagaccccaacaattatgtgatagcgagcatggataaggatattttgtattccaatagaggctctcatttcaatctcaaaacgaacgctttttttaatgtgagccaaaaagaagcccatttttttgcttattaccaatgcgttgtgggggataaaggggataatattaagggggttaaagggattggcggcttcaactataaagattttttaaacgaagacgctaaagagcatgaactatgggagcagatcattcaagcgttcaaaattaaagaagatttgagcgatagcgaagccaaagaaaaggctctattaaacatgcgtttagtcaatatgcaccagatgacccaccatggcgtgatcaaactatgggagcctgagtttaaaaaagcttttttccctaaaaaaccccaaagacctgattttaaaagaatttcttaa

SEQ ID NO: 4694 - DNA (genomic), 873 bp, Helicobacter pylori; double-stranded, circular
  misc_feature (B) LOCATION 1...873
  hypothetical: NO
  anti-sense: NO
ggattaaccattagacaggcgtttaacaaaacaagatccacgcattcaagaacccttttactagacattgattgcgttatccctaatattgttaggcgtttgctctctaataaaacgctccctaaaagattcgccacttatagcttgcaagaagtgggcgttattttcctgaccactcagattttatctatcatgcgcaagacccgttgctctaaaacgcttttttttatcactaggggcagggagagtttccgctaccagctgtgcgatcattacaaacaaaaacgccaccaatttgatgaagattttagatcccttttaaaagctctcaaaatcgctttagtggaaaaataccccctaaaaaaaggggctaaaatccagggcgaacattgttttgaatatgaagccgatgatattatctctttttacaaaaagaaagaccccaacaattatgtgatagcgagcatggataaggatattttgtattccaatagaggctctcatttcaatctcaaaacgaacgctttttttaatgtgagccaaaaagaagcccatttttttgcttattaccaatgcgttgtgggggataaaggggataatattaagggggttaaagggattggcggcttcaactataaagattttttaaacgaagacgctaaagagcatgaactatgggagcagatcattcaagcgttcaaaattaaagaagatttgagcgatagcgaagccaaagaaaaggctctattaaacatgcgtttagtcaatatgcaccagatgacccaccatggcgtgatcaaactatgggagcctgagtttaaaaaagcttttttccctaaaaaaccccaaagacctgattttaaaagaatttct

SEQ ID NO: 4695 - DNA (genomic), 375 bp, Helicobacter pylori; double-stranded, circular
  misc_feature (B) LOCATION 1...375
  hypothetical: NO
  anti-sense: NO
atggcgatgctytattgcatgcggttattgatgccgattttaggagcgattaaagggggggatattggcgaatggttccctgataatgaccccaaatacaaaaacgcctcttctaaagagcttttaaaaatcgtgttggatttttctcaaagcattgggtttgaattgcttgaaatgggagcgaccatctttagcgaaatccctaaaatcactccttacaaaccggcgattttagagaatttgagccaacttttgggtttagaaaaatctcaaatcagcttgaaagccactacaatggaaaaaatggggttcattggcaaacaagaagggctgttagtccaagcgcatgtgagcatgcgttataaacaaaaactt

SEQ ID NO: 4696 - DNA (genomic), 1056 bp, Helicobacter pylori; double-stranded, circular
  misc_feature (B) LOCATION 1...1056
  hypothetical: NO
  anti-sense: NO
aaagcagtggctacgcctcaccacacccccttatggctcagcgtgtatgaaagctttaaagaagccctagactttaaggaagtcattctagttgttagcgaattggattatgtttatattcaacgccattaccccaaaatcaagcttgtaaaaggcggggcatcaaggcaagaatccgtgcgtaacgctttgaaagtaattgatagcacttacacgatcaccagcgatgtggctaggggtttagcgaatatggaagcgcttaaaagcttgtttttaaccctccaacaaacgagccattattgcatcgccccttacttgccttgctatgacacagcgatctattataacgaggctttagatagagaagcgatcaaactcattcaaaccccgcaattaagccacaccaaaacgctccaatcagccctaaaccaagggggttttaaagatgaaagcagcgcgattttacaagctttccctaactctgtgagctatattgaaggcagtaaggatttgcacaaactcaccacaagcggcgatttaaagttttttacgcctttttttaacccagcaaaggacacttttataggcatgggttttgatacgcatgcgttcattaaagataagcctatggttttagggggggttgttttggattgcgagtttgggttaaaggctcatagcgatggcgatgctttattgcatgcggttattgatgcgattttaggagcgattaaagggggggatattggcgaatggttccctgataatgaccccaaatacaaaaacgcctcttctaaagagcttttaaaaatcgtgttggatttttctcaaagcattgggtttgaattgcttgaaatgggagcgaccatctttagcgaaatccctaaaatcactccttacaaaccggcgattttagagaatttgagccaacttttgggtttagaaaaatctcaaatcagcttgaaagtcactacaatggaaaaaatggggttcattggcaaacaagaagggctgttagtccaagcgcatgtgagcatgcgttataaacaaaaactt

SEQ ID NO: 4697 - DNA (genomic), 1230 bp, Helicobacter pylori; double-stranded, circular
  misc_feature (B) LOCATION 1...1230
  hypothetical: NO
  anti-sense: NO
atgtccttgattagagtgaatggggaagcttttaaactctctttggaaagtttagaagaagatccttttgaaactaaagaaacgctagaaacgctagaaacgcttatcaaacaaacgagcgttgttttattggccgctggggagtctaagcgtttttctcgtgcgattaaaaagcagtggctacgctctcaccacacccccttatggctcagcgtgtatgaaagctttaaagaagccctagactttaaggaagtcattctagttgtaagcgaattggattatgtttatatccaacgccattaccccaaaatcaagcttgtaaaaggcggggcatcaaggcaagaatccgtgcgtaacgctttgaaagtaattgatagcacttacacgatcaccagcgatgtggctaggggtttagcgaatatggaagcgcttaaaagcttgtttttaaccctccaacaaacgagccattattgcatcgccccttacttgccttgctatgacacagcgatctattataacgaggctttagatagagaagcgatcaaactcattcaaaccccgcaattaagccacaccaaaacgctccaatcagccctaaaccaagggggttttaaagatgaaagcagcgcgattttacaagctttccctaactctgtgagctatattgaaggcagtaaggatttgcacaaactcaccacaagcggcgatttaaagttttttacgcctttttttaacccagcaaaggacacttttataggcatgggttttgatacgcatgcgttcattaaagataagcctatggttttagggggggttgttttggattgcgagtttgggttaaaggctcatagcgatggcgatgctttattgcatgcggttattgatgcgattttaggagcgattaaagggggggatattggcgaatggttccctgataatgaccccaaatacaaaaacgcctcttctaaagagcttttaaaaatcgtgttggatttttctcaaagcattgggtttgaattgcttgaaatgggagcgaccatctttagcgaaatccctaaaatcactccttacaaaccggcgattttagagaatttgagccaacttttgggtttagaaaaatctcaaatcagcttgaaagccactacaatggaaaaaatggggttcattggcaaacaagaagggctgttagtccaagcgcatgtgagcatgcgttataaacaaaaactttaa

SEQ ID NO: 4698 - DNA (genomic), 729 bp, Helicobacter pylori; double-stranded, circular
  misc_feature (B) LOCATION 1...729
  hypothetical: NO
  anti-sense: NO
ttgaaagtcaatttctttgccacttgtctaggagcagctatttatagcaacgcatcgcttaacgctatcaaattactccgcaaggaaaatttggaagtggtttttaaaaaagaccagacatgttgtggccagccaagctacaactcaggatactatgaagagactaaaaaagtcgttttatacaatatcaaactttattccaataacgactaccctattattttgcctagcggttcatgcacagggatgatgcggcatgattatttggaattgtttgaagggcatgcggaatttaacatggttaaagatttttgctctagggtgtatgaattgagcgagtttttggataaaaaattgcaagtcaaatacgaagataagggcgaacctctcaaaatcacatggcattctaattgccatgccttaagggtggctaaagtgattgactcggcgaaaaatctcatcagacagcttaaaaatgtggaactcattgaattggaaaaagaagaagaatgctgcgggtttggggggactttttcagttaaagagcctgaaatttcagcggttatggtcaaagaaaagattaaagacatagagagccgtcatgtggatgtgatcgtttcagcggatgctgggtgcttgatgaatatcagcaccgctatgcaaaaaatgggctctttgacaaaacccatgcatttttatgactttttagcctcaaggcttggactttaa

SEQ ID NO: 4699 - DNA (genomic), 768 bp, Helicobacter pylori; double-stranded, circular
  misc_feature (B) LOCATION 1...768
  hypothetical: NO
  anti-sense: NO
ttgtgtttgaaactcttaatttggaattttaaggagcattctttgaaagtcaatttctttgccacttgtctaggagcagctatttatagcaacgcatcgcttaacgctatcaaattactccgcaaggaaaatttggaagtggtttttaaaaaagaccagacatgttgtggccagccaagctacaactcaggatactatgaagagactaaaaaagtcgttttatacaatatcaaactttattccaataacgactaccctattattttgcctagcggttcatgcacagggatgatgcggcatgattatttggaattgtttgaagggcatgcggaatttaacatggttaaagatttttgctctagggtgtatgaattgagcgagtttttggataaaaaattgcaagtcaaatacgaagataagggcgaacctctcaaaatcacatggcattctaattgccatgccttaagggtggctaaagtgattgactcggcgaaaaatctcatcagacagcttaaaaatgtggaactcattgaattggaaaaagaagaagaatgctgcgggtttggggggactttttcagttaaagagcctgaaatttcagcggttatggtcaaagaaaagattaaagacatagagagccgtcatgtggatgtgatcgtttcagcggatgctgggtgcttgatgaatatcagcaccgctatgcaaaaaatgggctctttgacaaaacccatgcatttttatgactttttagcctcaaggcttggactt

SEQ ID NO: 4700 - DNA (genomic), 771 bp, Helicobacter pylori; double-stranded, circular
  misc_feature (B) LOCATION 1...771
  hypothetical: NO
  anti-sense: NO
ttgtgtttgaaactcttaatttggaattttaaggagcattctttgaaagtcaatttctttgccacttgtctaggagcagctatttatagcaacgcatcgcttaacgctatcaaattactccgcaaggaaaatttggaagtggtttttaaaaaagaccagacatgttgtggccagccaagctacaactcaggatactatgaagagactaaaaaagtcgttttatacaatatcaaactttattccaataacgactaccctattattttgcctagcggttcatgcacagggatgatgcggcatgattatttggaattgtttgaagggcatgcggaatttaacatggttaaagatttttgctctagggtgtatgaattgagcgagtttttggataaaaaattgcaagtcaaatacgaagataagggcgaacctctcaaaatcacatggcattctaattgccatgccttaagggtggctaaagtgattgactcggcgaaaaatctcatcagacagcttaaaaatgtggaactcattgaattggaaaaagaagaagaatgctgcgggtttggggggactttttcagttaaagagcctgaaatttcagcggttatggtcaaagaaaagattaaagacatagagagccgtcatgtggatgtgatcgtttcagcggatgctgggtgcttgatgaatatcagcaccgctatgcaaaaaatgggctctttgacaaaacccatgcatttttatgactttttagcctcaaggcttggactttaa

SEQ ID NO: 4701 - DNA (genomic), 843 bp, Helicobacter pylori; double-stranded, circular
  misc_feature (B) LOCATION 1...843
  hypothetical: NO
  anti-sense: NO
cgcgagcatcaaggcggtagcttacgcaaaaacaataaatcattagtctttattgcatgccaaaaagacaaattgaacgacaatgaagccccttattatgatgtgggggtgataggctctgtcatgcgtgaagccaacatgcctaatgggcgcgtgaaattgctctttaatggcatcgctaaggggcgtattttagagcctgctaaagaaaacgagcaaggctttttggaagctcaaataagccctattgaatatttagaatacgataaagaaaacattcaggctatcgtggaagtgttaaaagaaaaggtgatcactctagccaatgtcagctcgctcttccccccggatttgatcaaggctttagaagacaatgacgatcctaaccgcatcgctgatttaatcgcagcggccttgcatttgaaaaaagatcaagcgtattttctttttgcgaacaacaacaccgagcagcgcttgttggatttgattgatattgtgatagaagagactaaaacccaaaaactccaaaaagaaatcaagtccaaagtccatcaaaaaatggagcaaaccaataaggaatatttcctaaaagagcagctcaaacaaatccaaaaagagcttggcacagacaaacagcgagacgaagatttaaaccaatactaccaaaaactagaaagcatcaagccttttttaaaagaagaagcgtttaaagagattaaaaagcaaattgaccggctgagccgaacccatgcggacagctcagatagcgcgactttgcaaaattatgttgaaaccatgttagatgtgccttttgggcaaattgaaaaaaaagcgcatgacatt

SEQ ID NO: 4702 - DNA (genomic), 846 bp, Helicobacter pylori; double-stranded, circular
  misc_feature (B) LOCATION 1...846
  hypothetical: NO
  anti-sense: NO
cgcgagcatcaaggcggtagcttacgcaaaaacaataaatcattagtctttattgcatgccaaaaagacaaattgaacgacaatgaagccccttattatgatgtgggggtgataggctctgtcatgcgtgaagccaacatgcctaatgggcgcgtgaaattgctctttaatggcatcgctaaggggcgtattttagagcctgctaaagaaaacgagcaaggctttttggaagctcaaataagccctattgaatatttagaatacgataaagaaaacattcaggctatcgtggaagtgttaaaagaaaaggtgatcactctagccaatgtcagctcgctcttccccccggatttgatcaaggctttagaagacaatgacgatcctaaccgcatcgctgatttaatcgcagcggccttgcatttgaaaaaagatcaagcgtattttctttttgcgaacaacaacaccgagcagcgcttgttggatttgattgatattgtgatagaagagactaaaacccaaaaactccaaaaagaaatcaagtccaaagtccatcaaaaaatggagcaaaccaataaggaatatttcctaaaagagcagctcaaacaaatccaaaaagagcttggcacagacaaacagcgagacgaagatttaaaccaatactaccaaaaactagaaagcatcaagccttttttaaaagaagaagcgtttaaagagattaaaaagcaaattgaccggctgagccgaacccatgcggacagctcagatagcgcgactttgcaaaattatgttgaaaccatgttagatgtgccttttgggcaaattgaaaaaaaagcgcatgacattaag

SEQ ID NO: 4703 - DNA (genomic), 1290 bp, Helicobacter pylori; double-stranded, circular
  misc_feature (B) LOCATION 1...1290
  hypothetical: NO
  anti-sense: NO
ctaagagggcacaggcgtacttatataggctccatgcccgggcgtattgtccaagggcttattgaagctaaaaagatgaatccggtcatggttttagatgaaattgataaggtggatcgaagcgttaggggcgatccagcgagtgctttattagagatcttagaccctgagcaaaatatcgcctttagggatcattacgcgaatttcagcattgatttgtcgcaagtgatttttatcgctaccgctaataatattgacaggatcccagctcctttaagagacagaatggaatttatcagcgtgtccagctacacgcctagcgaaaaagaagagatcgctaaaaactacctcatcccccaagaattagaaaagcacgccttaaagcctagcgaagtggatattagccatgaatgtttgaaactcattattgaaaaatacaccagagaagcgggcgttagggatttacgaagacagatcgcaacgattatgcgtaaagcggctttaaaatacctagaagataacccgcacaaaaaagggcggaccaaaaaaagcgaagacaaagataaaaaaggcggaaatgaagaaaacgaaaaaagaggtgagagtaaagatttttgcgtctctatcacgcctgataaccttaaagagtatttagaacgcatggtgtttgaaattgaccccatagatgaagaaaataaaatcggtatcgtcaatggcttggcatggactccagtgggcggtgatgtgcttaaaattgaagcggttaagattagaggcaagggggaattgaaactcaccgggagtttgggcgacgtgatgaaagaatccgccattattgccttttctgttgtcaaagtcttgttggataacgaaaccttaaaagtgcctaaaatccctagcgagaccgatgcagagaataagaaaaagaaaaaagtgctgaaagtttataacgcttacgatttgcacttgcatgtccctgagggggctacgcctaaagacggcccgagcgctgggatcgctatggcgagcgtgatggcgagcattttgtgcgatagggctataagaagcgaagtggcgatgacgggcgaattgactttgagcggggaagttttacccataggggggttgaaagaaaaattgatcgctgcttttaaagccggcatcaaaaccgctctcattcctgtcaaaaattacgaaagggatttagacgagatccctactgaagtgcgagagaatttaaacatcgttgcggtgaaaaacatcgctgaagtgttagaaaaaaccttgctt

SEQ ID NO: 4704 - DNA (genomic), 2496 bp, Helicobacter pylori; double-stranded, circular
  misc_feature (B) LOCATION 1...2496
  hypothetical: NO
  anti-sense: NO
atgactgaagattttcctaaaattctgcctttattggtagaagaagacacctttttatacccctttatgatagcccctattttcttacaaaataacgcgagcatcaaggcggtagcttacgctaaaaacaataaatcattagtctttattgcatgccaaaaagacaaattgaacgacaatgaagccccttattatgatgtgggggtgataggctctgtcatgcgtgaagccaacatgcctaatgggcgcgtgaaattgctctttaatggcatcgctaaggggcgtattttagagcctgctaaagaaaacgagcaaggctttttggaagctcaaataagccctattgaatatttagaatacgataaagaaaacattcaggctatcgtggaagtgttaaaagaaaaggtgatcactctagccaatgtcagctcgctcttccccccggatttgatcaaggctttagaagacaatgacgatcctaaccgcatcgctgatttaatcgcagcggccttgcatttgaaaaaagatcaagcgtattttctttttgcgaacaacaacaccgagcagcgcttgttggatttgattgatattgtgatagaagagactaaaacccaaaaactccaaaaagaaatcaagtccaaagtccatcaaaaaatggagcaaaccaataaggaatatttcctaaaagagcagctcaaacaaatccaaaaagagcttggcacagacaaacagcgagacgaagatttaaaccaatactaccaaaaactagaaagcatcaagccttttttaaaagaagaagcgtttaaagagattaaaaagcaaattgaccggctgagccgaacccatgcggacagctcagatagcgcgactttgcaaaattatgttgaaaccatgttagatgtgccttttgggcaatatgaaaaaaaagcgctagacattaagcatgtcaaagagcaattagacaacgatcattattccttaaaaaggcctaaagagcgcatcgtggaatactttgccaccatgcagcttttagaaatgcgccacaagaaaaagccagaaaaaaaagacaaaactaaaggcacgattttatgcttttatgggcctcctggcgtgggtaaaacgagtttggctaattccatcgccaaagcgatagagcgccctttagttcggatcgctttaggaggcttagaagacgtgaatgaactaagagggcacaggcgtacttatataggctccatgcccgggcgtattgtccaagggcttattgaagctaaaaagatgaatccggtcatggttttagatgaaattgataaggtggatcgaagcgttaggggcgatccagcgagtgctttattagagatcttagaccctgagcaaaatatcgcctttagggatcattacgcgaatttcagcattgatttgtcgcaagtgatttttatcgctaccgctaataatattgacaggatcccagctcctttaagagacagaatggaatttatcagcgtgtccagctacacgcctagcgaaaaagaagagatcgctaaaaactacctcatcccccaagaattagaaaagcacgccttaaagcctagcgaagtggatattagccatgaatgtttgaaactcattattgaaaaatacaccagagaagcgggcgttagggatttacgaagacagatcgcaacgattatgcgtaaagcggctttaaaatacctagaagataacccgcacaaaaaagggcggaccaaaaaaagcgaagacaaagataaaaaaggcggaaatgaagaaaacgaaaaaagaggtgagagtaaagatttttgcgtctctatcacgcctgataaccttaaagagtatttagaacgcatggtgtttgaaattgaccccatagatgaagaaaataaaatcggtatcgtcaatggcttggcatggactccagtgggcggtgatgtgcttaaaattgaagcggttaagattagaggcaagggggaattgaaactcaccgggagtttgggcgacgtgatgaaagaatccgccattattgccttttctgttgtcaaagtcttgttggataacgaaaccttaaaagtgcctaaaatccctagcgagaccgatgcagagaataagaaaaagaaaaaagtgctgaaagtttataacgcttacgatttgcacttgcatgtccctgagggggctacgcctaaagacggcccgagcgctgggatcgctatggcgagcgtgatggcgagcattttgtgcgatagggctataagaagcgaagtggcgatgacgggcgaattgactttgagcggggaagttttacccataggggggttgaaagaaaaattgatcgctgcttttaaagccggcatcaaaaccgctctcattcctgtcaaaaattacgaaagggatttagacgagatccctactgaagtgcgagagaatttaaacatcgttgcggtgaaaaacatcgctgaagtgttagaaaaaaccttgctttga

SEQ ID NO: 4705 - DNA (genomic), 1272 bp, Helicobacter pylori; double-stranded, circular
  misc_feature (B) LOCATION 1...1272
  hypothetical: NO
  anti-sense: NO
aggaaaaacatgaaaaaaagattgaatatagggcttgtgggtttagggtgcgtggggagcacggtcgctaaaatcttacaagaaaatcaagaaatcattaaagacagagccggcgtggaaattaaaattaaaaaagcggtggtgcgagacgtgaaaaaacacaagggctatgcttttgaaatcagtgatgatttagaaagcgtgatagaagataaagggattgatattgtcgtggagcttatgggtggggtggaagcgccttatcttttagctaaaaaaactttagccaaacaaaaagccttcgttacagccaataaagccatgttagcgtaccaccgctatgaattagaacaaatcgctaaaaacacccccataggctttgaagcgagcgtgtgtgggggtatccccattatcaaggctttaaaagacggcttgagcgctaatcacatcctttcttttaaagggattttaaacggcacgagcaattacattttaagccagatgtttaaaaatcaagcgagctttaaggacgctttgaaagacgcgcagcatttaggctatgcggaattgaaccctgaatttgacattaagggcattgatgcggcgcacaaattattgattttagcgtctttagcgtatggcattgatgcgaaattagaagaaatcttgattgaaggcattgaaaagatagagccagatgacatggaatttgcaaaagagtttggttatagcatcaaacttttaggcatcgctaaaaaacaccaggattgcattgaattaagggtgcatccaagcatgattaaaaatgaatgcatgctctctaaagtggatggggtgatgaacgctatcagcgtcataggggataaggtgggcgagactttgtattatggggctggggctggaggagagcctaccgcaagcgcggtcattagcgatattatagaaatcgcaaggaaaaaaagctctctaatgctgggctttgaaacccctcaaaaactccccctaaaacccaaagaagaaatccaatgcgcttactatgcgcgcttgttagtgagcgatgaaaaaggggttttttctcaaatcagcgcgattttagcccaaaatgatatttcgctcaacaatgtcttgcaaaaagaaatcccgcaatccaacaaggctaaaatcttattttccacgcacaccaccaacgaaaaatctatgctgaacgcccttaaagagcttgaaaatttacaaagcgtgttggatacccctaaaatgatccgtttggaaaat

SEQ ID NO: 4706 - DNA (genomic), 129 bp, Helicobacter pylori; double-stranded, circular
  misc_feature (B) LOCATION 1...129
  hypothetical: NO
  anti-sense: NO
ttgggtattatagcaaaagatagcttgatgataaaatcttataggtgtaagaggcgggttttatgttacaattccaaaaatcattattataaaataaaggatagccatgcgttttggattgaatattga

SEQ ID NO: 4707 - DNA (genomic), 360 bp, Helicobacter pylori; double-stranded, circular
  misc_feature (B) LOCATION 1...360
  hypothetical: NO
  anti-sense: NO
atgccttttttaccccctatgcttgggtttttatttttgttttatgcgaaaaaatacgaccattttctgccaagtttgagcgtgtttggttgtttgttttggtttgaaagcatgcatttaaagactttaggcgttttagctttattgtttttaatctaccatcaaatcgtctataaaaactctttaaagttttttaacgacggctttttattcaaaactttgcatgcgtttttggtttattacctttatttatcgtgctttttttcggtgtctttgggcttgaaaacgctaggtcttttcgctctttttgcgctcatagagggcgctttgtggggtttgtatgaaaaatcttcgctataa

SEQ ID NO: 4708 - DNA (genomic), 444 bp, Helicobacter pylori; double-stranded, circular
  misc_feature (B) LOCATION 1...444
  hypothetical: NO
  anti-sense: NO
atgctctctttaaaacaagattccttttttttcttatgtttagggatctttggtttttatttttatagccttttaagggatttgatgccttttttaccccctatgcttgggtttttatttttgttttatgcgaaaaaatacgaccattttctgccaagtttgagcgtgtttggttgtttgttttggtttgaaagcatgcatttaaagactttaggcgttttagctttattgtttttaatctaccatcaaatcgtctataaaaactctttaaagttttttaacgacggctttttattcaaaactttgcatgcgtttttggtttattacctttatttatcgtgctttttttcggtgtctttgggcttgaaaacgctaggtcttttcgctctttttgcgctcatagagggcgctttgtggggtttgtatgaaaaatcttcgctataa

SEQ ID NO: 4709 - DNA (genomic), 267 bp, Helicobacter pylori; double-stranded, circular
  misc_feature (B) LOCATION 1...267
  hypothetical: NO
  anti-sense: NO
ttgggggggttttgttttgaagccttgtttttaaattctttgtttttaaattctttgtttttaaattctttgtttttaaattctttgtttttaaattctttgtttttaaattctttgtttttaaattctttgtttttaaattctttgtttttttggggggggtttgatggaaaatcctttttagcgtttttgacgatttggttagtgaaaaacttgatactaattcaagcgatagcttttaaaaaagcgcttctttttggggtttag

SEQ ID NO: 4710 - DNA (genomic), 234 bp, Helicobacter pylori; double-stranded, circular
  misc_feature (B) LOCATION 1...234
  hypothetical: NO
  anti-sense: NO
atggtctctaattcccttaatgtttttatcgccccgttaaaatcaagcttttttattatcaattttcttgctcatggatgtaattttatattcttactccaacgccaagtcaatcaaaatttgccaattctctttatagtattggagttgcgacaagctctttgtgttgccccattcttgtgtgtcttcaatagggataatatagcattcgatcgtgcgagtgtctatccctaa

SEQ ID NO: 4711 - DNA (genomic), 1197 bp, Helicobacter pylori; double-stranded, circular
  misc_feature (B) LOCATION 1...1197
  hypothetical: NO
  anti-sense: NO
atgacttcagcttcaagccattcttttaaagaacaagattttcatattcctatcgctttcgcttttgataagaattatctcattcctgcgggcgcatgcatttattccttgctagaaagcatcgctaaagccaataaaaaaatccgttacaccttacacgctttagtggtaggcttgaatgaagaagatagagcaaaacttaaccaaatcacagagccttttaaagaatttgctgttttagaagtaaaagatattgaaccttttttagacactatccctaacccttttgatgaggatttcaccaagcgtttttctaaaatggtgttagtgaagtattttctagcggatttattccccaaatattctaaaatggtgtggagcgatgtggatgttatcttttgcaatgaatttagcgctgatttcttaaacattaaagaaaatgatgagaattatttttatggggttttggaagttgaaaagcaccacatgatggaagggtttttgttttgcaatttagattaccaacgcaagaaaaatttcaccttaagaatgcatgagcttttaaaggggaatgaggctaaaggggagttggatttcacgaaatggtgttggcctaacatgaaagctttagggattgaatattgcgttttcccttattattacaccattaaagatttttctaacgcgtatttaaacgagaattacaagaaaaccattttagaggcgcgagaaaaccctaccattatccactatgacgcttggtggggggcggtgaagccttgggattacccttttggtttgaaagcggatttgtggctgaacgctttggctaaaaccccctttatgagcgattacactaaaaaaatgcacaccaatgagagcttttataccacaaaaatggctgagcagcattatttttcttcagtaaagtcttcaaaagaaattgtttttaaggctccgtatttgtttttcaaatcgtatctgtttgttgtgtttaaagaaaggaaaatccattcaagagtttttgaattaacttgtaatttagtgaaaaaatttttcaataagcttatttattttgtgtttttgatgcctaaagcgttagttaaaagggcggttagtaagatccttagagttttagggcttcatgggattgttaaaaaaatcttaatcaaactcaagctcttgaaaaagggctag

SEQ ID NO: 4712 - DNA (genomic), 1221 bp, Helicobacter pylori; double-stranded, circular
  misc_feature (B) LOCATION 1...1221
  hypothetical: NO
  anti-sense: NO
ccattaaaaaagggtgtttcattttttatgacttcagcttcaaaccattcttttaaagaacaagattttcatattcctatcgctttcgcttttgacaagaattaccttattcctgcgggcgcatgcatttattccttgctagaaagcatcgctaaagccaataaaaaaatccgttacaccttacacgctttagtggtaggcttgaatgaagaagatagagcaaaacttaaccaaatcacagagccttttaaagaatttgctgttttagaagtaaaagatattgaaccttttttagacactatccctaacccttttgatgaggatttcaccaagcgtttttctaaaatggtgttagtgaagtattttctagcggatttattccccaaatattctaaaatggtgtggagcgatgtggatgttatcttttgcaatgaatttagcgctgatttcttaaacattaaagaaaatgatgagaattatttttatggggttttggaagttgaaaagcaccacatgatggaagggtttttgttttgcaatttagattaccaacgcaagaaaaatttcaccttaagaatgcatgagcttttaaaggggaatgaggctaaaggggagttggatttcacgaaatggtgttggcctaacatgaaagctttagggattgaatattgcgttttcccttattattacaccattaaagatttttctaacgcgtatttaaacgagaattacaagaaaaccattttagaggcgcgagaaaaccctaccattatccactatgacgcttggtggggggcggtgaagccttgggattacccttttggtttgaaagcggatttgtggctgaacgctttggctaaaaccccctttatgagcgattacactaaaaaaatgcacaccaatgagagcttttataccacaaaaatggctgagcagcattatttttcttcagtaaagtcttcaaaagaaattgtttttaaggctccgtatttgtttttcaaatcgtatctgtttgttgtgtttaaagaaaggaaaatccattcaagagtttttgaattaacttgtaatttagtgaaaaaatttttcaataagcttatttattttgtgtttttgatgcctaaagcgttagttaaaagggcggttagtaagatccttagagttttagggcttcatgggattgttaaaaaaatcttaatcaaactcaagctcttgaaaaagggc

SEQ ID NO: 4713 - DNA (genomic), 270 bp, Helicobacter pylori; double-stranded, circular
  misc_feature (B) LOCATION 1...270
  hypothetical: NO
  anti-sense: NO
gtgaaaatgctaggcacactcgctaatccgtctaacccgtcggttaaattcaccgcattgctcgtggataaaaaaaccaacacccaaaaaccaaccgctaacatcgtgggcatttcaaacaaggggtttttcaaaaacggcgcgtataaaaaagtgtccaaccccttaaggctcaataaaacagacactataagcgaaaggataaacagcatgccaaatttcattttcgcactcatcccggcgttattttgctggttgattttagtgtaa

SEQ ID NO: 4714 - DNA (genomic), 330 bp, Helicobacter pylori; double-stranded, circular
  misc_feature (B) LOCATION 1...330
  hypothetical: NO
  anti-sense: NO
agcaagtatttagaaaattccgcattccctgccacatacacaaagatagaaaggcttaagagggtgaaaatgctaggcacactcgctaatccgtctaacccgtcggttaaattcaccgcattgctcgtggataaaaaaaccaacacccaaaaaccaaccgctaacatcgtgggcatttcaaacaaggggtttttcaaaaacggcgcgtataaaaaagtgtccaaccccttaaggctcaataaaacagacactataagcgaaaggataaacagcatgccaaatttcattttcgcactcatcccggcgttattttgctggttgattttagtg

SEQ ID NO: 4715 - DNA (genomic), 273 bp, Helicobacter pylori; double-stranded, circular
  misc_feature (B) LOCATION 1...273
  hypothetical: NO
  anti-sense: NO
ctaaatgaaagaatacgagcgctttttagcgggtttaatacgagcatgcatgccaacgagcaagaagtaaccgctactttaaacgccaacaccgagaacatcaaaagcgaaattaaaaagctagaaaatcaattgatagaagagacgagaatgcttttagaacaagaaactcaaaaaagcgttaaggcttacaatgcaatgatgggacaccagccacagaatagcttaaaacatggtttgaaaaatttcaataatcctttgagtaaagagggc

SEQ ID NO: 4716 - DNA (genomic), 546 bp, Helicobacter pylori; double-stranded, circular
  misc_feature (B) LOCATION 1...546
  hypothetical: NO
  anti-sense: NO
atgaattaccctaatttgcctaatagcactttagaaatcacacaacagcccgaagtgaaagaaatcactaacgagcttttaaagcaattacaaaacgccttacatagtaacgcgctttttaccgagcaagtggaactgagccttaaaggcatcgttaggattttagaagtgcttttgagtttggattttttcaagaatgcgaatgagattgatagcagtttgagaaattctattgagtggcttagtaacgccggcgagagcttgaaaactaaaatgaaagaatacgagcgcttttttagcgagtttaatacgagcatgcatgccaacgagcaagaagtaaccgctactttaaacgccaacaccgagaacatcaaaagcgaaattaaaaagctagaaaatcaattgatagaggagacgagaatgcttttagaacaagaaactcaaaaaagcgttaaggcttacaatgcaatgatgggacaccagccacagaatagcttaaaacatggtttgaaaaatttcaataatcctttgagtaaagagggctaa

SEQ ID NO: 4717 - DNA (genomic), 1872 bp, Helicobacter pylori; double-stranded, circular
  misc_feature (B) LOCATION 1...1872
  hypothetical: NO
  anti-sense: NO
atgaaagcagaagccaccacactattaggattttttgaagaaaatcaaaacaatcaatttgtcatccctatctatcagagggtgtatagttgggaaaaggaacaatgcgaacaattatgggatgatattataaaaattggtgggaatgataaaataaatgggcattttatcggttctattttgtatgtgctagatggtaatacgccctctagcccattactcatcattgacggccaacaaaggctcaccactatcacgcttttatgcatcgctttaaggagtcatctaagcgatgaagttaagcgtgaagaaatagagagctatcttattaacagcgataaggacggcgataagaaattcagactcatcttatcagagtctgataaagacaccttgctgtctttgattgataaaaacaaaagaaagccgagtgagccttcggtaaaaataatggaaaattttaaattgtttgaaaaatggatcagtaaaaataccgacaaactagaaacgatttttaaagggttagaaaaactcatgatagtttatattgctttagataaagagaaagatgatcctcaacttatttttgagagcatgaactcaaaaggtatcgaactcacgcaaacggatttgatcagaaactatatcataatggaaacagagactgaagaaaaacaaaaagacttttataatggatattggagggctatggaggaggattttaaacagaatgaaacattgtttaatcggtttgtccggcattatctcacgatcaaaacaggaaagattccaaatattaaaaaagtttatggagctttcaaggattaccagcaaaaagaggggatagaaatagaggatttattgaaagatttgcaaaaatattgtgggtatttttgccagattgcatttaaaaaagaagccaataaagatttaaacaaggctttaagttttcttgtagatttggaaatggatgtggtgtatccgctattattggagctttatagcgattatagcgatggcgttttatccgatcaggattttaccactattagcactttaacagagagttatctttgcagaagggcggtgtgtgggcttggcacaaatagtctcaataaaatctttcccttttttacaaaaaagattgataagaagcaataccttaaaagcgtagagaagcattttgggtcgctaaaagggaagcaaagatttccaaataatgacgagtttaaagattcttttattacgatagatttttataagtttaaaaaaaataaatactttcttgaaaggttagaaaaatttgacacaaacgagccggtcgatactcaaaaatgcgaaatagaacatataatgcctcaaacccttaacccaaaatgggaaggggatttgggtgaaaattttgaagcgatacacgagaaatacctccacacaatagggaatctcactctaaccggttataacgctaaatacagcaataagtccttccaagaaaaaagagatatggagaagggcttcaaacaaagctcattaaaactcaataaaaatttaaaagatttggaaccttttggcgaaaaagagattgaaaaaagggctagtgatttggtggattgggctttaaagatttggacttacccaattttagaggcagaaacattagaggaatataaacccaaaaaagaaaagaaagaaaagaaagaaaagaaagaaaaagaggagtataaactcaagaaagaaaaaaaggtttatgatttaagttcttataagtttagcccccattcaagggaattatttgatattttaagaaaagagattaaaactcttgatgaaagggtaactgaaaattttaattcaaaatatataggcttataa

SEQ ID NO: 4718 - DNA (genomic), 1896 bp, Helicobacter pylori; double-stranded, circular
  misc_feature (B) LOCATION 1...1896
  hypothetical: NO
  anti-sense: NO
aatccgctaaatcaaggagtgttatttatgaaagcagaagccaccacactattaggattttttgaagaaaatcaaaacaatcaatttgtcatccctatctatcagagggtgtatagttgggaaaaggaacaatgcgaacaattatgggatgatattataaaaattggtgggaatgataaaataaatgggcattttatcggttctattttgtatgtgctagatggtaatacgccctctagcccattactcatcattgacggccaacaaaggctcaccactatcacgcttttatgcatcgctttaaggagtcatctaagcgatgaagttaagcgtgaagaaatagagagctatcttattaacagcgataaggacggcgataagaaattcagactcatcttatcagagtctgataaagacaccttgctgtctttgattgataaaaacaaaggaaagccgagtgagccttcggtaaaaataatggaaaattttaaattgtttgaaaaatggatcagtaaaaataccgacaaactagaaacgatttttaaagggttagaaaaactcatgatagtttatattgctttagataaagagaaagatgatcctcaacttatttttgagagcatgaactcaaaaggtatcgaactcacgcaaacggatttgatcagaaactatatcataatggaaacagagactgaagaaaaacaaaaagacttttataatggatattggagggctatggaggaggattttaaacagaatgaaacattgtttaatcggtttgtccggcattatctcacgatcaaaacaggaaagattccaaatattaaaaaagtttatggagctttcaaggattaccagcaaaaagaggggatagaaatagaggatttattgaaagatttgcaaaaatattgtgggtatttttgccagattgcatttaaaaaagaagccaataaagatttaaacaaggctttaagttttcttgtagatttggaaatggatgtggtgtatccgctattattggagctttatagcgattatagcgatggcgttttatccgatcaggattttaccactattagcactttaacagagagttatctttgcagaagggcggtgtgtgggcttggcacaaatagtctcaataaaatctttcccttttttacaaaaaagattgataagaagcaataccttaaaagcgtagagaagcattttgggtcgctaaaagggaagcaaagatttccaaataatgacgagtttaaagattcttttattacgatagatttttataagtttaaaaaaaataaatactttcttgaaaggttagaaaaatttgacacaaacgagccggtcgatactcaaaaatgcgaaatagaacatataatgcctcaaacccttaacccaaaatgggaaggggatttgggtgaaaattttgaagcgatacacgagaaatacctccacacaatagggaatctcactctaaccggttataacgctaaatacagcaataagtccttccaagaaaaaagagatatggagaagggcttcaaacaaagctcattaaaactcaataaaaatttaaaagatttggaaccttttggcgaaaaagagattgaaaaaagggctagtgatttggtggattgggctttaaagatttggacttacccaattttagaggcagaaacattagaggaatataaacccaaaaaagaaaagaaagaaaagaaagaaaagaaagaaaaagaggagtataaactcaagaaagaaaaaaaggtttatgatttaagttcttataagtttagcccccattcaagggaattatttgatattttaagaaaagagattaaaactcttgatgaaagggtaactgaaaattttaattcaaaatatataggctta

SEQ ID NO: 4719 - DNA (genomic), 921 bp, Helicobacter pylori; double-stranded, circular
  misc_feature (B) LOCATION 1...921
  hypothetical: NO
  anti-sense: NO
ttgaaaagtatcttcaaaaaactaggttctgtcgctctttattctttggttgtttatgggggcttaaacgctatcaatacagcattattaccgagtgaatacaaagaattggtggctttaggctttaaaaaaatcaaaacactctatcaaagacatgacgacaaagaaattacaaaagaggaaaaagaattcgccactaacgctttgagagaaaaattacggaatgatagggcgagagtagagcaaattcaaaagaatattgaagcgtttgaaaaaaagaacaactcttctgttcaaaaaaaagcggctaagcacagaggattgcaagaattaaacgaaattaacgctaaccctttgaatgacaaccctaatggcaattcttccactgaaaccaaatctaataaagatgataattttgatgagatgatcaataaggtgaatgaatcttttgtgaaacctgctgctccgcttgtacctgatgagtggagaacgcctgaaattgaaatcattatcaatgagtgtattatttcaagcaacgattacgatgggttaagaaagtgtttgatcaaaggcatcaaggatcaaaaaattcttgcccccttattagaaaaaattcaagaaatagagacagaaaataacaagttttctagacaacacctgagtggtttaaaactcgctctcaataacagcgacaatagaacctttcttatagcttcgtgcgctatttgtgagaagagaaaaaaagaaatggagcaagaaaataactaccaagatactacaaatgcaagtgagtttggcactactgatacaaaagaaaatgaagcaaaagatgcaacattctcaaacaatcgctctaaatctgaactgcccaatagcgtcattaatcaaatagaacaaagcatcgctcatggaaaaaaatag

SEQ ID NO: 4720 - DNA (genomic), 936 bp, Helicobacter pylori; double-stranded, circular
  misc_feature (B) LOCATION 1...936
  hypothetical: NO
  anti-sense: NO
ataggaaaggagacgctcttgaaaagtatcttcaaaaaactaggttctgtcgctctttattctttggttgtttatgggggcttaaacgctatcaatacagcattattaccgagtgaatacaaagaattggtggctttaggctttaaaaaaatcaaaacactctatcaaagacatgacgacaaagaaattacaaaagaggaaaaagaattcgccactaacgctttgagagaaaaattacggaatgatagggcgagagtagagcaaattcaaaagaatattgaagcgtttgaaaaaaagaacaactcttctgttcaaaaaaaagcggctaagcacagaggattgcaagaattaaacgaaattaacgctaaccctttgaatgacaaccctaatggcaattcttccactgaaaccaaatctaataaagatgataattttgatgagatgatcaataaggtgaatgaatcttttgtgaaacctgctgctccgcttgtacctgatgagtggagaacgcctgaaattgaaatcattatcaatgagtgtattatttcaagcaacgattacgatgggttaagaaagtgtttgatcaaaggcatcaaggatcaaaaaattcttgcccccttattagaaaaaattcaagaaatagagacagaaaataacaagttttctagacaacacctgagtggtttaaaactcgctctcaataacagcgacaatagaacctttcttatagcttcgtgcgctatttgtgagaagagaaaaaaagaaatggagcaagaaaataactaccaagatactacaaatgcaagtgagtttggcactactgatacaaaagaaaatgaagcaaaagatgcaacattctcaaacaatcgctctaaatctgaactgcccaatagcgtcattaatcaaatagaacaaagcatcgctcatggaaaaaaa

SEQ ID NO: 4721 - DNA (genomic), 384 bp, Helicobacter pylori; double-stranded, circular
  misc_feature (B) LOCATION 1...384
  hypothetical: NO
  anti-sense: NO
atgggaatggctgcaatatcttggaaaatcaaaatccccaccgcgctctttcccataggcgtgctaagctgtttggaatcttcaaagaatttcaacacaatggcggttgaagagagtgaaagccccatgcctaaaacaagggaaaaaatgggcgaaagacccagaacaaaataccccaataaaaaagcgattaaagcgcataaaacaacctgtaaaagcccaaaaacgagcacttcttgtttgatggacttgagcttgtcaaaattaaactcaatgcctatcataaacattaaaaagacgataccaaattcaccaatatcagacaacaaattaaaatcattaattttaaaaaaagccgctaagaccgttcctgtgcaaatgtag

SEQ ID NO: 4722 - DNA (genomic), 417 bp, Helicobacter pylori; double-stranded, circular
  misc_feature (B) LOCATION 1...417
  hypothetical: NO
  anti-sense: NO
gaatccttactgcctagaatcgtcaaaattaaaagcatgggaatggctgcaatatcttggaaaatcaaaatccccaccgcgctctttcccataggcgtgctaagctgtttggaatcttcaaagaatttcaacacaatggcggttgaagagagtgaaagccccatgcctaaaacaagggaaaaaatgggcgaaagacccagaacaaaataccccaataaaaaagcgattaaagcgcataaaacaacctgtaaaagcccaaaaacgagcacttcttgtttgatggacttgagcttgtcaaaattaaactcaatgcctatcataaacattaaaaagacgataccaaattcaccaatatcagacaacaaattaaaatcattaattttaaaaaaagccgctaagaccgttcctgtgcaaatg

SEQ ID NO: 4723 - DNA (genomic), 279 bp, Helicobacter pylori; double-stranded, circular
  misc_feature (B) LOCATION 1...279
  hypothetical: NO
  anti-sense: NO
cgcgcaaagcggcaatttgaagccgggtttggccctaacaatattggcagcgtggttcaagtagggctttctggcatcattcaaatccttatcaaagaaaaaaatgaaaatatcgttttattcaatcgttgcgattcgcttgaattgtttcaaaaagaagagccaatcgcgcaagagccaaaaaaagacgagcgggagtctaaagaatggctggattctaaagaggcccttttttccaattccaaaaaccgcgcgattttagaaaatctgcacaaaagc

SEQ ID NO: 4724 - DNA (genomic), 279 bp, Helicobacter pylori; double-stranded, circular
  misc_feature (B) LOCATION 1...279
  hypothetical: NO
  anti-sense: NO
aaggttactcgcatgcaaagagaattaaggcttttaaacaacaagcattgcattgaatacttgcaatttctgtccaaaaaccatttgagtttcaacctttcgtgcgaaagggatgcgattgatttttcccccaagctccctaaagaaatccatgaaaaattcggctcgttggtgttgtttattttagccggatacaccttagagagtttgatgattgacgcgcaaagcggcaatttgaagccgggtttggccctaacaatattggcagcgtggttcaag

SEQ ID NO: 4725 - DNA (genomic), 489 bp, Helicobacter pylori; double-stranded, circular
  misc_feature (B) LOCATION 1...489
  hypothetical: NO
  anti-sense: NO
atgcaaagagaattaaggcttttaaacaacaagcattgcattgaatacttgcaatttctgtccaaaaaccatttgagtttcaaccttttgtgcgaaagggatgcgattgatttttcccccaagctccctaaagaaatccatgaaaaattcggctcgttggtgttgtttattttagccggatacaccttagagagtttgatgattgacgcgcaaagcgtgcaatttgaagccgggtttggccctaacaatattggcagcgtggttcaagtagggctttctggcatcattcaaatccttatcaaagaaaaaaatgaaaatatcgttttattcaatcgttgcgattcgcttgaattgtttcaaaaagaagagccaatcgcgcaagagccaaaaaaagacgagcgggagtctaaagaatggctggattctaaagaggcccttttttccaattccaaaaaccgcgcgattttagaaaatctgcacaaaagctaa

SEQ ID NO: 4726 - DNA (genomic), 630 bp, Helicobacter pylori; double-stranded, circular
  misc_feature (B) LOCATION 1...630
  hypothetical: NO
  anti-sense: NO
tttcctcacggcttgcgctataatctggctttggctaaagccaatggcgtttcgctcattttttgcgaagaagattcgtatttgaacatcttgcatgctaaagaagttttagacaacaaccctgaaatcatcgactctgtcaatgaaaaattaaaaaaataccagcttgtttatgaaaaaggcgttgaggtcgtctatctcaatgagtgggttaatgagtttttggcatgggaattgaaaagcccttttgatgcgtttttaggggctgaattttctcgcatcaaaccaagcgatcatttttttaataaaatccatttaaaagccccccattttttagagtcctttcaaaattacgccccccttttagaagtcaatgaagtaagcggcttactccagtgcgcgcatttacgctatttagggattgatttaggggcggattttttaatcgtgcattctttggggctttttcacgcttttgaaaatttaagcttaaaagcttcaaagatttataaaagagataatgacaacacccccactttatttttacctcaaatcgcgctaatggctatgggggaaaaaaataagcaaactctagggcttgatgcgcattatcataaggttactttcatt

SEQ ID NO: 4727 - DNA (genomic), 633 bp, Helicobacter pylori; double-stranded, circular
  misc_feature (B) LOCATION 1...633
  hypothetical: NO
  anti-sense: NO
aaattagaagactttttcaaacaagtcccctatactaccaaaggcgaaaaagaagaattagaaaagtttattcaaatcaattttatcaacccccaaaccaaccctaaatatctgggcgatggctttttcttgtatgttaaatggctgatgaaacgctaccctacagagcggaatcggttattagagatgatttccaagcctgaaagcggtgtgatgaatttcttaagcgtggcgcattacctctataaaaacgatgataatattgaccatgaaatctatgaattgcaagaaatgctcactaattctaaaatcaagccatggaaagatttttctaaaaaccttttaagcctttttcaatacaactctaacccccccaaaacgccaaacccccctaaaacttgcgcgctctttaacgcttatgcgaagcatttaaacgcccaagcgcttctcaaaagcgctaagctctatttagaaagaatggggcaaaaagtcattgatctgcctttttgttatgatgggggctattatgggaagatcatcagcacgcatgatttcctcacggcttgcgctataatctggctttggctaaagccaatggcgtttcgctcattttttgcgaagaagattcgtatt

SEQ ID NO: 4728 - DNA (genomic), 1491 bp, Helicobacter pylori; double-stranded, circular
  misc_feature (B) LOCATION 1...1491
  hypothetical: NO
  anti-sense: NO
ttgatgagcgttttgaaattgcatgtaaaggcctttcgttttgaaaccaacaaagattacaaccctgcttatgagtcttattttttagaataccaagaagatcaataccttttggatcttttaaaacaactcaaaggcgtgagctataatgaaaacatcgcgcttaaaatcaaccagattgcggtgtttgaagacgctaaagtgagcgatttggtggcgtttttttctaaagaatgggtgctagatcccctatccaaacgatacgctttaaaagatttaatgattgatgaaaaggaagttttaaaaaattatgaagactttttcaaacaagtcccctatatcaccaaaggcgaaaaagaagaattagaaaagtttattcaaatcaattttatcaacccccaaaccaaccctaaatatctgggcgatggctttttcttgtatgttaaatggctgatgaaacgctaccctacagagcggaatcggttattagagatgatttccaagcctgaaagcggtgtgatgaatttcttaagcgtggcgcattacctctataaaaacgatgataatattgaccatgaaatctatgaattgcaagaaatgctcactaattctaaaatcaagccatggaaagatttttctaaaaaccttttaagcctttttcaatacaactctaacccccccaaaacgccaaacccccctaaaacttgcgcgctctttaacgcttatgcgaagcatttaaacgcccaagcgcttctcaaaagcgctaagctctatttagaaagaatggggcaaaaagtcattgatctgcctttttgttatgatgggggctattatgggaagatcatcagcacgcatgatttcctcacggcttgcgcgtataatctggctttggctaaagccaatggcgtttcgctcattttttgcgaagaagattcgtatttgaacatcttgcatgctaaagaagttttagacaacaaccctgaaatcatcgactctgtcaatgaaaaattaaaaaaataccagcttgtttatgaaaaaggcgttgaggtcgtctatctcaatgagtgggttaatgagtttttggcatgggaattgaaaagcccttttgatgcgtttttaggggctgaattttctcgcatcaaaccaagcgatcatttttttaataaaatccatttaaaagccccccattttttagagtcctttcaaaattacgccccccttttagaagtcaatgaagtaagcggcttactccagtgcgcgcatttacgctatttagggattgatttaggggcggattttttaatcgtgcattctttggggctttttcacgcttttgaaaatttaagcttaaaagcttcaaagatttataaaagagataatgacaacacccccactttatttttacctcaaatcgcgctaatggctatgggggaaaaaaataagcaaactctagggcttgatgcgcattatcataaggttactttcatttaa

SEQ ID NO: 4729 - DNA (genomic), 411 bp, Helicobacter pylori; double-stranded, circular
  misc_feature (B) LOCATION 1...411
  hypothetical: NO
  anti-sense: NO
agtgcgggatactcatggcattgctttttcagcgcctgtacaattacctcaatttctcacacgattaaagacaaggtttatacctttttcaaaaaacaacccaatagcggttatggcacagattttgatggaatcgctaaaacgcaaatcaaagcagctatcttacctattgataggcttagcgaaccttttgagagctatattgtaggctctatcaaagggagacagagcatggctcgtgcgtatggataccctaaagtttttaccattgatgagataagtggatgggaaaaagaaaccattaaaagccgagactatgagaggcggaatttgagtaagacttatagattgagcgcgaaacaaaaccttgaaatcattaaaatttctaacgctttggcacaaggtaaggcg

SEQ ID NO: 4730 - DNA (genomic), 879 bp, Helicobacter pylori; double-stranded, circular
  misc_feature (B) LOCATION 1...879
  hypothetical: NO
  anti-sense: NO
gaaaagtcagcgttaaagaacggcgcaagtaatagagtggtatcattaaacaataacaaaaaggagcgagttatgctattgaactatgattttttggaaagaatggaaggctctaaagtcagagccattgatgagaaaatgaaatttctgcattgttcgaacagcattgacaggttgattttaagttataagatgaaccttattaaaggctctactattgagagcgccaatctttctagggtggtgaataagattaaaaacgggctaccctttgggactatttcggcgtttagaccttttaaacctgaatttattactgattttactgaagaggaacgagaaaaactgattgaagcgtatatgagcggttataaacattctaaagcagaccgagtaaccaaaaattggaatggcaactctaatttcatagacgcctattatgatgctgacgcctttttgaggggtaatggaactatctacgccaaactctgtaaggggttaggaaaactttttgttaataaattcttaaatcctaaaagtgaagccccaatgaaagattttatgtccagtaaggaatttgtcaaaagataccgctacacaagcaaggacaatatggaaaggacacgacagccgaaatcatttttaaactttaagcgggattttctgggttatattgaagtggtagggtattggagcctaaaagatggccttttaactgataaagaaacgagctttttcgtatttcaaaacgaacctagtgatacctttaatttaaaaaagaccttattggtgttagctagagcgtttagtcaagcggctatttgctattgtcaaaacgcaagcgctaatgaagtggatttaatcagcactgagcctgag

SEQ ID NO: 4731 - DNA (genomic), 1236 bp, Helicobacter pylori; double-stranded, circular
  misc_feature (B) LOCATION 1...1236
  hypothetical: NO
  anti-sense: NO
atgctattgaactatgattttttggaaagaatggaaggctctaaagtcagagccattgatgagaaaatgaaatttctgcattgttcgaacagcattgacaggttgattttaagttataagatgaaccttattaaaggctctactattgagagcgccaatctttctagggtggtgaataagattaaaaacgggctaccctttgggactatttcggcgtttagaccttttaaacctgaatttattactgattttactgaagaggaacgagaaaaactgattgaagcgtatatgagcggttataaacattctaaagcagaccgagtaaccaaaaattggaatggcaactctaatttcatagacgcctattatgatgctgacgcctttttgaggggtaatggaactatctacgccaaactctgtaaggggttaggaaaactttttgttaataaattcttaaatcctaaaagtgaagccccaatgaaagattttatgtccagtaaggaatttgtcaaaagataccgctacacaagcaaggacaatatggaaaggacacgacagccgaaatcatttttaaactttaagcgggattttctgggttatattgaagtggtagggtattggagcctaaaagatggccttttaactgataaagaaacgagctttttcgtatttcaaaacgaacctagtgatacctttaatttaaaaaagaccttattggtgttagctagagcgtttagtcaagcggctatttgctattgtcaaaacgcaagcgctaatgaagtggatttaatcagcactgagcctggtagttatggtgaagtgtgggatacattcaatggcattgctttttcagcgcctgtacaattacctcaatttctcacacgattaaaagacaaggtttatacctttttcaaaaaacaacccaatagcggttatggcacagattttgatggaatcgctaaaacgcaaatcaaagcagctatcttacctattgataggcttagcgaaccttttgagagctatattgtaggctctatcaaagggagacagagcatggctcgtgcgtatggataccctaaagtttttaccattgatgagataagtggatgggaaaaagaaaccattaaaagccgagactatgagaggcggaatttgagtaagacttatagattgagcgcgaaacaaaaccttgaaatcattaaaatttctaacgctttggcacaaggtaaggcgtga

SEQ ID NO: 4732 - DNA (genomic), 387 bp, Helicobacter pylori; double-stranded, circular
  misc_feature (B) LOCATION 1...387
  hypothetical: NO
  anti-sense: NO
atgagtgatttcaaagtcccccccaaagctaaagggtttaaacgcctttttaaagcccttttttattctaaagacgggcttaaatgcgcatgggctgaagagagcgcgttcaggcaaattgtcatcttggctcttttttgcatcgttctagcgagctatctaactaaagattttttagaatgggggctattgatcttgccttgctttttatcggtggtgattgaactcatcaatagctccattgaaaaggctgtggattttactggcaccgagttccaccctttagctaaaaaggctaaagacatggccagctcggcccaactgatagggcttattttttgggcttttatttgggggcgttaccttttaacgctttattttaattaa

SEQ ID NO: 4733 - DNA (genomic), 861 bp, Helicobacter pylori; double-stranded, circular
  misc_feature (B) LOCATION 1...861
  hypothetical: NO
  anti-sense: NO
atggataaaaatagagatgttcatgcgattatgactaatgtgataaagtcgttggaaaggggtggttcttttagctcaagcgatcgagcaaaattcgtgcaagccgctagaacgcatgggattgaagatagcgttattgaagaaattattgatattggtcaaacgctcagccttatctaccgccatgaagatcttattgatgcaagcgatttgccaagagaacaaaagaaagccgtgcacgctgagcttcaaaaaagcattgatgaaaatctagaagttttaaaaaaaaatcataaacatttaaaggagaaaaacatgccattaccattcattttaggagggttagccctagtggcagcaggatacggagtcaaaaaagggattgatgcgctcgatgccgattgtgaagctgatgaatttatcaaaaaggcagagagtttaaaagaggaagcaactaaaaaggctgagtctgcggagtctgactgcaggcgtgcttttatgagacttggtgagaaaaaactccatgttttaagccatacggtttcaaactttttggatcatttccaccgattgaatcgccttaggattactatcggtatcaaagatattgacatgcaagatcttcgcaagcaaatctcaaatgcacgaaatctccttaaccaacttaataccaacggtattgatggagactctgctctgggagtgattgcaggctgtggtggtttaggcgcttctggttttactgctggtgctactggtgctgtgttgggtggagggcttgctgcgagtggtcttgcaggtatgacagtgcttggagggcttgtttgtagctcctgtactcgctattttgggggctattag

SEQ ID NO: 4734 - DNA (genomic), 891 bp, Helicobacter pylori; double-stranded, circular
  misc_feature (B) LOCATION 1...891
  hypothetical: NO
  anti-sense: NO
ccgtggaaaaacagaaatttaaaggagaagtcaatggataaaaatagagatgttcatgcgattatgactaatgtgataaagtcgttggaaaggggtggttcttttagctcaagcgatcgagcaaaattcgtgcaagccgctagaacgcatgggattgaagatagcgttattgaagaaattattgatattggtcaaacgctcagccttatctaccgccatgaagatcttattgatgcaagcgatttgccaagagaacaaaagaaagccgtgcacgctgagcttcaaaaaagcattgatgaaaatctagaagttttaaaaaaaaatcataaacatttaaaggagaaaaacatgccattaccattcattttaggagggttagccctagtggcagcaggatacggagtcaaaaaagggattgatgcgctcgatgccgattgtgaagctgatgaatttatcaaaaaggcagagagtttaaaagaggaagcaactaaaaaggctgagtctgcggagtctgactgcaggcgtgcttttatgagacttggtgagaaaaaactccatgttttaagccatacggtttcaaactttttggatcatttccaccgattgaatcgccttaggattactatcggtatcaaagatattgacatgcaagatcttcgcaagcaaatctcaaatgcacgaaatctccttaaccaacttaataccaacggtattgatggagactctgctctgggagtgattgcaggctgtggtggtttaggcgcttctggttttactgctggtgctactggtgctgtgttgggtggagggcttgctgcgagtggtcttgcaggtatgacagtgcttggagggcttgtttgtagctcctgtactcgctattctgggggctat

SEQ ID NO: 4735 - DNA (genomic), 723 bp, Helicobacter pylori; double-stranded, circular
  misc_feature (B) LOCATION 1...723
  hypothetical: NO
  anti-sense: NO
atggctaaacgcagtatcgcttatttggatagcgtttttgacatttcctacacttttatagaccaccatagccctttaaacgccttgtttttgcatggttgggggagttctaaagaaatcatgcaacaagcgtttcaaggctgttttttaaattataaccatttgtatgtggatttgcccggcttcaatcaaagccctaacgatgaaaaagtcttagaaactaaagattatgctaatatcattaatttattcttaaaaagcgtgggtaaaaaagcgcatgtcgtttttgggcatagctttggagggaaagtggcgatcttatgtgaaaacgaacggatggttttattgagcagcgctgggatcttagagccaaaacccttaaaagtgcgttgtaaaatccttttagctaaaatctttaaaaaattaggcttgaatttagggtttttgaggagtaaggacgctatggggcttaatcaagtgatgtatgaaacctttaaaaaagtgattagcgaagactttagcgatcatttcaaacgatgcgagaaggaagttttattattttggggtaaagatgataaagcaacccccttaagctccgctcaaacaatgcgaaccttgttgaaaaagagcgaattattcgttttagaaggggattatttcttttttttaaaccaactaaaagagattgaaaaactagtggagaattatcatcatgcaaagtct

SEQ ID NO: 4736 - DNA (genomic), 726 bp, Helicobacter pylori; double-stranded, circular
  misc_feature (B) LOCATION 1...726
  hypothetical: NO
  anti-sense: NO
atggctaaacgcagtatcgcttatttggatagcgtttttgacatttcctacacttttatagaccaccatagccctttaaacgccttgtttttgcatggttgggggagttctaaagaaatcatgcaacaagcgtttcaaggctgttttttaaattataaccatttgtatgtggatttgcccggcttcaatcaaagccctaacgatgaaaaagtcttagaaactaaagattatgctaatatcattaatttattcttaaaaagcgtgggtaaaaaagcgcatgtcgtttttgggcatagctttggagggaaagtggcgatcttatgtgaaaacgaacggatggttttattgagcagcgctgggatcttagagccaaaacccttaaaagtgcgttgtaaaatccttttagctaaaatctttaaaaaattaggcttgaatttagggtttttgaggagtaaggacgctatggggcttaatcaagtgatgtatgaaacctttaaaaaagtgattagcgaagactttagcgatcatttcaaacgatgcgagaaggaagttttattattttggggtaaagatgataaagcaacccccttaagctccgctcaaacaatgcgaaccttgttgaaaaagagcgaattattcgttttagaaggggatcatttcttttttttaaaccaagcaaaagagattgaaaaactagtggagaattatcatcatgcaaagtcttag

SEQ ID NO: 4737 - DNA (genomic), 1491 bp, Helicobacter pylori; double-stranded, circular
  misc_feature (B) LOCATION 1...1491
  hypothetical: NO
  anti-sense: NO
cagcggcttggaatcgatcggctagacaagagcatgaagatagaccatcaagaatccagcgatgaagttaaaatttatcacatagacgatgaaattgagctggttgacaccccgggactattcgggtttaaagtgaaaacacacgatagtggcaaaacagaacgctataaagatattacgaaaaaatatatcagcgaagcccacctcattttatacgcgctcaacccgtcaaaccccatcaaagaaagccataaggacgatttgaactggttgttcaggacgctcaatcttttatccaggacgatatttgtcatcagccgttttgatgaagaagcggatattgaagatgaagaagattacaacaaaagatttaagattaaaaaagaaaacatccaaaaccgactggatgagctgatttctttaagcgaagaagaaaaagaaagtttgatgattgtcgctgttgcggcaaacccttttgatttgggggtggaacactggctaaagcatcaagaagaattccaaaaactctcacacatcaaagccttgcaagacgcgactcaaaaaaagattaaagaaaatggcgggaaattaaccatcatagaagaagccaaaaaaagcgtcattcaagatgtggtctataggcaaatgccgcccgcaaaacaagcgttgcaagatattaatagagaaatggaatatttgaataaaacgcttgaaaaaaggcgaaaggaaattcaagatttaaataaagaaatttctcaagcccgcattcatttaagagaatttataataaggtattttagcgatctcatccgtcaagtttctggcgctagcctagaaacctttaatgattttgttattagagaaataggcgatgaatatatcaatatggaaacaagagtcaaaaatgaatttgaaaaacaaacgcaagggatttcaaatgaaatcgctaaaatcggaacgacttttaattccgatatgagttcttttgaaaaacatgccagaacatttggaaggattggaatcaaacttttagaacaaagcaagtttatcaatgcaactaatatcaaactaactagagatgggatagtagctgtggcaaaatttacaggcatagatttggctttgaaattcaaaccttggggcactgtcaaattggcaggcaacataaacaaagctttaccgcttatcggtcttgcttttgaagcatgggattcttataacaaataccaaaaacaacaagaatttgaaaaaactaaaagagaaatggaatcccattttaacaatcaaaaacaagaaatcttagccctcatcaacgatgaaaccagattcaaacaaacatgtttcccaatggcgttggaactggaagaaacaattcaagcatgcgaagaaagcgttaaaaaaacgcaagagtgcgctcaaggactggaaaaatggattcaaactggcgaagattttatcaagggcgaagatattatagatgttgagcctgaa

SEQ ID NO: 4738 - DNA (genomic), 1710 bp, Helicobacter pylori; double-stranded, circular
  misc_feature (B) LOCATION 1...1710
  hypothetical: NO
  anti-sense: NO
atgaagaatgaaacgctagaacaatttaaaagaaatcaaaagaggaatcaagaaattcttaaaaaattacttgattttgtccataccggggaagaatacggcatcaaggttgaagagtctctcaaagacaagatccgtaatgcgatggaaaatgttgccggtcaaaaacttaaagtggctttagtgggaggtttttctgaagggaaaacatccatagcagcggcttggatcgatcggctagacaagagcatgaagatagaccatcaagaatccagcgatgaagttaaaatttatcacatagacgatgaaattgagctggttgacaccccgggactattcgggtttaaagtgaaaacacacgatagtggcaaaacagaacgctataaagatattacgaaaaaatatatcagcgaagcccacctcattttatacgcgctcaacccgtcaaaccccatcaaagaaagccataaggacgatttgaactggttgttcaggacgctcaatcttttatccaggacgatatttgtcatcagccgttttgatgaagaagcggatattgaagatgaagaagattacaacaaaagatttaagattaaaaaagaaaacatccaaaaccgactggatgagctgatttctttaagcgaagaagaaaaagaaagtttgatgattgtcgctgttgcggcaaacccttttgatttgggggtggaacactggctaaagcatcaagaagaattccaaaaactctcacacatcaaagccttgcaagacgcgactcaaaaaaagattaaagaaaatggcgggaaattaaccatcatagaagaagccaaaaaaagcgtcattcaagatgtggtctataggcaaatgccgcccgcaaaacaagcgttgcaagatattaatagagaaatggaatatttgaataaaacgcttgaaaaaaggcgaaaggaaattcaagatttaaataaagaaatttctcaagcccgcattcatttaagagaatttataataaggtattttagcgatctcatccgtcaagtttctggcgctagcctagaaacctttaatgattttgttattagagaaataggcgatgaatatatcaatatggaaacaagagtcaaaaatgaatttgaaaaacaaacgcaagggatttcaaatgaaatcgctaaaatcggaacgacttttaattccgatatgagttcttttgaaaaacatgccagaacatttggaaggattggaatcaaacttttagaacaaagcaagtttatcaatgcaactaatatcaaactaactagagatgggatagtagctgtggcaaaatttacaggcatagatttggctttgaaattcaaaccttggggcactgtcaaattggcaggcaacataaacaaagctttaccgcttatcggtcttgcttttgaagcatgggattcttataacaaataccaaaaacaacaagaatttgaaaaaactaaaagagaaatggaatcccattttaacaatcaaaaacaagaaatcttagccctcatcaacgatgaaaccagattcaaacaaacatgtttcccaatggcgttggaactggaagaaacaattcaagcatgcgaagaaagcgttaaaaaaacgcaagagtgcgctcaaggactggaaaaatggattcaaactggcgaagattttatcaagggcgaagatattatagatgttgagcctgaatag

SEQ ID NO: 4739 - DNA (genomic), 552 bp, Helicobacter pylori; double-stranded, circular
  misc_feature (B) LOCATION 1...552
  hypothetical: NO
  anti-sense: NO
gtggagtttaaaacgcttgaagaggtttttgaaattagaaatggttacaccccatcaaaaaacaatcctgaattttggaaaaatgggactatcccttggtttagaatggaagaccttagagaaaacgggaggattttaaaagactcaatccaacacattaccccaaaggctttgaaaggtaagaaattattccctaaaaactctattattatttctacaacagcaacgataggagagcatgctcttttaatcgttgattcgctagcgaatcaacaattcacttttttaagcaaaaaagcgaattgtgatattgctttagacatgaaattctttttttaccaatgctttcttttgggggaatggtgtaaaaacaataccaatgtttcaggttttgcttctgtggatatgaccgcttttaaaaaatataagttccccatcccgcccctagagatccaacaagagatcgttacgattttggacgctttcacagaattaaacacagaattaaacgcgcgaaaaaagcaatacgagtattaccaaaacatgctttaa

SEQ ID NO: 4740 - DNA (genomic), 255 bp, Helicobacter pylori; double-stranded, circular
  misc_feature (B) LOCATION 1...255
  hypothetical: NO
  anti-sense: NO
atggtagctcccatcataaagggtaactttaaaatccaccaccggatagcctgccaaaacgccattttgcatcgcttcttggatacccttatccaccgcagggatatattctttagggatcacgcccccagaaatttcattcacaaattcatacccactgccaggctctttaggctcaagcttgataaacacatgcccgtattgcccacggccaccactttgcttagcgtatttatgctctttgctcacgcttga

SEQ ID NO: 4741 - DNA (genomic), 264 bp, Helicobacter pylori; double-stranded, circular
  misc_feature (B) LOCATION 1...264
  hypothetical: NO
  anti-sense: NO
agaatccacatcatggtagctcccatcataaagggtaactttaaaatccaccaccggatagcctgccaaaacgccattttgcatcgcttcttggatacccttatccaccgcagggatatattctttagggatcacgcccccagaaatttcattcacaaattcatacccactgccaggctctttaggctcaagcttgataaacacatgcccgtattgcccacggccaccactttgcttagcgtatttatgctctttgctcacgct

SEQ ID NO: 4742 - DNA (genomic), 1233 bp, Helicobacter pylori; double-stranded, circular
  misc_feature (B) LOCATION 1...1233
  hypothetical: NO
  anti-sense: NO
atgcctaaaaaagagctattaaagatgtcaaagaaaaggatttttaaagacttcttagaagaagtcaagcgccatcgccccattattttctatacagataacgattgtgatggcatgttagctggcagcgttttaatgtctatgtgttacagattgggtattaaagatttctttttctttagccctttaagaaatgcacatggctatggtttcactgatttggccctaaacgatttattgtctcaactctgtatctttaaccctaaaaccaatcaattagtccgcctagattacattaaaaaccaatttcaaaaaacccccctattgtttagcgctgacttgggagcggatttagtttctaacatagaattacaaaaaatcttattagagcgttttgaacaatgcatcatcacagaccaccataagagttttgaagttgattggattgataaaaataaaatcgcctacattaacctgaatgatgaaaaagacgctaactattatagcggggctttcacaagcgctttagtgtttagtcaaatctttcaaatacaaaccactcctttagaagaagaattgatcgctatcacgcttttaagcgatcgcattgatttggataatggggataatttagatatggttttgaatttagcgcaacctaaacatgaccgcattgaatgctttttcaaagataaagacctttctttagcccaagacgatttagatgaaatttctaacttatacggctttaattgcatcaattacatcaacgctttaagccgtttgagtggggctagagagtttaagggttgttataatagctatttgcactatctggttttaaagcatttcaaccccataagcgatccgcgcttaagcgtctttaacgttaaggaattcaaaagatacaacgacattaaaaagaaaatggtgaaagaaagcgaagaaaacgctcaaattttttcttgtaacaaaatattagtggctattttagatgaaagctgttctattaaagtgggtgtcagcggtttagtggctaataactttttaaaaaaataccctttcaatcattccctttgtatctataaagatagtaaagatgggtatagcggtagcgctagaggtgatgggacttttttaagccagattaaaaccattcctttaatacaagctggcgggcatgaggaagcttttgggttgagctttgcaaaaaagaggattttaaaaaagtga

SEQ ID NO: 4743 - DNA (genomic), 1233 bp, Helicobacter pylori; double-stranded, circular
  misc_feature (B) LOCATION 1...1233
  hypothetical: NO
  anti-sense: NO
tcaatgcctaaaaaagagctattaaagatgtcaaagaaaaggatttttaaagacttcttagaagaagtcaagcgccatcgccccattattttctatacagataacgattgtgatggcatgttagctggcagcgttttaatgtctatgtgttacagattgggtattaaagatttctttttctttagccctttaagaaatgcacatggctatggtttcactgatttggccctaaacgatttattgtctcaactctgtatctttaaccctaaaaccaatcaattagtccgcctagattacattaaaaaccaatttcaaaaaacccccctattgtttagcgctgacttgggagcggatttagtttctaacatagaattacaaaaaatcttattagagcgttttgaacaatgcatcatcacagaccaccataagagttttgaagttgattggattgataaaaataaaatcgcctacattaacctgaatgatgaaaaagacgctaactattatagcggggctttcacaagcgctttagtgtttagtcaaatctttcaaatacaaaccactcctttagaagaagaattgatcgctatcacgcttttaagcgatcgcattgatttggataatggggataatttagatatggttttgaatttagcgcaacctaaacatgaccgcattgaatgctttttcaaagataaagacctttctttagcccaagacgatttagatgaaatttctaacttatacggctttaattgcatcaattacatcaacgctttaagccgtttgagtggggctagagagtttaagggttgttataatagctatttgcactatctggttttaaagcatttcaaccccataagcgatccgcgcttaagcgtctttaacgttaaggaattcaaaagatacaacgacattaaaaagaaaatggtgaaagaaagcgaagaaaacgctcaaattttttcttgtaacaaaatattagtggctattttagatgaaagctgttctattaaagtgggtgtcagcggtttagtggctaataactttttaaaaaaataccctttcaatcattccctttgtatctataaagatagtaaagatgggtatagcggtagcgctagaggtgatgggacttttttaagccagattaaaaccattcctttaatacaagctggcgggcatgaggaagcttttgggttgagctttgcaaaaaagaggattttaaaaaag

SEQ ID NO: 4744 - DNA (genomic), 141 bp, Helicobacter pylori; double-stranded, circular
  misc_feature (B) LOCATION 1...141
  hypothetical: NO
  anti-sense: NO
ttgagtgtaatggcacaagccagcctgactgtaagacatacaagtcaagcagagacgaaagtcggtcatagtgatccggtggttctgtgtggaagggccatcgctcaaaggataaaaggtaccccggggataacaggctga

SEQ ID NO: 4745 - DNA (genomic), 189 bp, Helicobacter pylori; double-stranded, circular
  misc_feature (B) LOCATION 1...189
  hypothetical: NO
  anti-sense: NO
aaagtaacggaggcttgcaaaggttggctcattgcggttggaaatcgcaagttgagtgtaatggcacaagccagcccgacgattagaactacaccttcagcagagacaatcttcggtcatagtgatccggtggttctgtgtggaagggccatcgctcaaaggataaaaggtaccccggggataacaggc

SEQ ID NO: 4746 - DNA (genomic), 84 bp, Helicobacter pylori; double-stranded, circular
  misc_feature (B) LOCATION 1...84
  hypothetical: NO
  anti-sense: NO
atgcaagcactcggtttgcccttttccccgttcgctcgccactacttagggaatctcgttgatttcttttcctctagttactga

SEQ ID NO: 4747 - DNA (genomic), 249 bp, Helicobacter pylori; double-stranded, circular
  misc_feature (B) LOCATION 1...249
  hypothetical: NO
  anti-sense: NO
atggacaaagatcaaaaacgccagcatcaaaaccgctacaatgaacatcatacccctgttggctcttttacattaggatcttttagggttggctctttaggaggcgtgggtggtgtggggggcgtgggatctgtggttttttggctttctttattttctttattttcttttgggggtttttgccacaactctgtcaaagccgccgcttttttaggatccattttggctagaattttgcctaattcttga

SEQ ID NO: 4748 - DNA (genomic), 654 bp, Helicobacter pylori; double-stranded, circular
  misc_feature (B) LOCATION 1...654
  hypothetical: NO
  anti-sense: NO
ttgagcttaaaatttttcaggaaaaatatcgttttaaaggttgttcctcgtttggcgtttggagtcctttggttgttgcataaaacttgcaaaaaccgctattttttagctcaagatttaaaagaaaaaccctttattgtaagctgttggcatggggagcttggcatgatcggatttgcgtatttaaggcttcaaaaaccttctgtttatgtgatcgcaagccagcattttgacggctctattgcggcgggtttgtttgaaagctttggttttaaaaacattagaggttctagcaaaaaagggggggttaaggttttgatagaagggcttaaacgcttgaaagaaggttgcgatgtcgctatcactcctgatggccctaaaggcccacggcacagcatagcggatggggtgatcgctttagctcaaaaatcaggcgtggggattagcgcttgtcgggtggtttgtaaaaacgcatggcggttgaacacttgggatcaatttgaaatccctaagccttttagcgaagtgcgctattacatgctagaatctgtgatcatccctaaagaatgggagctttcaaaggctaaagaatatttaaagacgcgcatggattctgttgggtttgaagaatctcaaaggggtttgggtgcttaa

SEQ ID NO: 4749 - DNA (genomic), 660 bp, Helicobacter pylori; double-stranded, circular
  misc_feature (B) LOCATION 1...660
  hypothetical: NO
  anti-sense: NO
aggcaagaattgagcttaaaatttttcaggaaaaatatcgttttaaaggttgttcctcgtttggcgtttggagtcctttggttgttgcataaaacttgcaaaaaccgctattttttagctcaagatttaaaagaaaaaccctttattgtaagctgttggcatggggagcttggcatgatcggatttgcgtatttaaggcttcaaaaaccttctgtttatgtgatcgcaagccagcattttgacggctctattgcggcgggtttgtttgaaagctttggttttaaaaacattagaggttctagcaaaaaagggggggttaaggttttgatagaagggcttaaacgcttgaaagaaggttgcgatgtcgctatcactcctgatggccctaaaggcccacggcacagcatagcggatggggtgatcgctttagctcaaaaatcaggcgtggggattagcgcttgtcgggtggtttgtaaaaacgcatggcggttgaacacttgggatcaatttgaaatccctaagccttttagcgaagtgcgctattacatgctagaatctgtgatcatccctaaagaatgggagctttcaaaggctaaagaatatttaaagacgcgcatggattctgttgggtttgaagaatctcaaaggggtttgggtgct

SEQ ID NO: 4750 - DNA (genomic), 1539 bp, Helicobacter pylori; double-stranded, circular
  misc_feature (B) LOCATION 1...1539
  hypothetical: NO
  anti-sense: NO
ttggtttttgtctttctttttagatgcgttaatgaaaaaacaagcctaaattttacgccccttttagagcaaatggcactccatttgcaagtgcgtttttatagcgtttataaagataacatgacttctttctacctccaagcgagtgctgagatcactttagagtttgcgcaaaaactcagcgagatcttgcccttttctttagattttagctttttgtctttaaaggaaatcacagagcctttagatgaaaatcttttccaaacaacaagcctttcaaagcccctttttatgaacgctaaagagcatcaagattttttagacaacaattcatctttgtatgccaatactctgggcttgattgaaaacaccgcttttaaaggaaaaatgattcatagccctaaagagcttatagattgtttaacccaattaaaaggcatgctcaaaacacaagattttatccctatttccacttctaggggagcgttatctttttctttaaaaaatccctctccaagcgttatttttagcgatctttctagcgttttgacctgcactaaattgcctttagagaacgctaaatatttggccagtttggaaaaaccctctatcaaagccccattaaaaagcgtgtttaaggacactttcaaaaacgatgaaatcatagcccaactgccctatgaccccatattgaatttattgtgccatattttacaagatgaggggatagaatttgtttttatgcatgaaagccattcttgtgaagcgcttttgcattatgaagcgctttttaaaacccctaagcgcttgatcacacccactaaaaatttcgttctagaaaaccatctttcaacccttccctttaaagatgaattagagtttttaagagaaacccccaattctatcgttctatattttagtttcaaacgccctacaaggttgttattgcatgctaatggttctttaaaaacgcttttaagcgttggttttgatttcaatcaaatatttaacctcctcaaacaagatgaaaaagcctccagaatgctaaagaactatgctactaaattccctgatttttacgcgcgcattgtagagctttctcaatacaatctagtgggcgcgaatttattggatttttttcgcattttggggtttgttttgggttatagcgaggattttcattcgcatagcgttatttctttggctaaagaatgcttacgccctaaaggccctaggattgattataaaatccttaaagacgattctttgaaaatggctttaaacttttcaaagatcatgcacagcgcgatgagtttcaggctcgcaggcgtggaaaatgaaattttgagtttggggattttggattctttagcggagtttttagggaatttcatttgggataacgtgcaaaattttagcgtccaagaagtaacgatcgctggggatttctttggcgaaaaagtgtttttggatttgtttgtgcggtatttccctaaaaccctcgctcttaaaacgcatgcgttcttggattatgaataa

SEQ ID NO: 4751 - DNA (genomic), 1572 bp, Helicobacter pylori; double-stranded, circular
  misc_feature (B) LOCATION 1...1572
  hypothetical: NO
  anti-sense: NO
attgtatcgctgaactctcttataagggtttttgaattggtttttgtctttctttttagatgcgttaatgaaaaaacaagcctaaattttacgccccttttagagcaaatggcactccatttgcaagtgcgtttttatagcgtttataaagataacatgacttctttctacctccaagcgagtgctgagatcactttagagtttgcgcaaaaactcagcgagatcttgcccttttctttagattttagctttttgtctttaaaggaaatcacagagcctttagatgaaaatcttttccaaacaacaagcctttcaaagcccctttttatgaacgctaaagagcatcaagattttttagacaacaattcatctttgtatgccaatactctgggcttgattgaaaacaccgcttttaaaggaaaaatgattcatagccctaaagagcttatagattgtttaacccaattaaaaggcatgctcaaaacacaagattttatccctatttccacttctaggggagcgttatctttttctttaaaaaatccctctccaagcgttatttttagcgatctttctagcgttttgacctgcactaaattgcctttagagaacgctaaatatttggccagtttggaaaaaccctctatcaaagccccattaaaaagcgtgtttaaggacactttcaaaaacgatgaaatcatagcccaactgccctatgaccccatattgaatttattgtgccatattttacaagatgaggggatagaatttgtttttatgcatgaaagccattctaaagaagcgcttttgcattatgaagcgctttttaaaacccctaagcgcttgatcacacccactaaaaatttcgttctagaaaaccatctttcaacccttccctttaaagatgaattagagtttttaagagaaacccccaattctatcgttctatattttagtttcaaacgccctacaaggttgttattgcatgctaatggttctttaaaaacgcttttaagcgttggttttgatttcaatcaaatatttaacctcctcaaacaagatgaaaaagcctccagaatgctaaagaactatgctactaaattccctgatttttacgcgcgcattgtagagctttctcaatacaatctagtgggcgcgaatttattggatttttttcgcattttggggtttgttttgggttatagcgaggattttcattcgcatagcgttatttctttggctaaagaatgcttacgccctaaaggccctaggattgattataaaatccttaaagacgattctttgaaaatggctttaaacttttcaaagatcatgcacagcgcgatgagtttcaggctcgcaggcgtggaaaatgaaattttgagtttggggattttggattctttagcggagtttttagggaatttcatttgggataacgtgcaaaattttagcgtccaagaagtaacgatcgctggggatttctttggcgaaaaagtgtttttggatttgtttgtgcggtatttccctaaaaccctcgctcttaaaacgcatgcgttcttggattatgaa

SEQ ID NO: 4752 - DNA (genomic), 300 bp, Helicobacter pylori; double-stranded, circular
  misc_feature (B) LOCATION 1...300
  hypothetical: NO
  anti-sense: NO
atgagaaaaaatcatagcaaatactcaaacattatacctaagaatcagttttttggggttttgtttggaattaaaaatcaaacgatagtttttcaagagtcccccttttttaagggggtgtttcttagacaaagaacaagcgctttttatttgttctgttgccaatatacagattcaaaagcaattctatggtattttttacaccgaatttttaaggcgtttgttttaagcatcacgatccctactatttatggttttagtccaaaaccatgcggtagaaaaagcttttttaatctttaa

SEQ ID NO: 4753 - DNA (genomic), 360 bp, Helicobacter pylori; double-stranded, circular
  misc_feature (B) LOCATION 1...360
  hypothetical: NO
  anti-sense: NO
atgacgacttggaacatggggctacccaaaaacaagttaatgagcgaacacaccaccaccacaatcaaagcgataaagagcattttacccatattcgctagatcgtttttagtcttaagggcatacacgctcatcaaaccaaaaacaatagttgtcatgcccaaagcttgccaaaccgctcctaaaccagcttttgcaatcaccatacccaacaaaggcactaaagtaacccctgataatgaagtgaaagcaaacagcatgaacaaattcaaaccgggtttggatttagaaaacatcaaaccaaaaaacgccacaatttcagcgataaaaaatacccatttatactgcactacggcttga

SEQ ID NO: 4754 - DNA (genomic), 387 bp, Helicobacter pylori; double-stranded, circular
  misc_feature (B) LOCATION 1...387
  hypothetical: NO
  anti-sense: NO
agactgaataaaatcgcactcgctcccgcaatgacgacttggaacatggggctacccaaaaacaagttaatgagcgaacacaccaccaccacaatcaaagcgataaagagcattttacccatattcgctagatcgtttttagtcttaagggcatacacgctcatcaaaccaaaaacaatagttgtcatgcccaaagcttgccaaaccgctcctaaaccagcttttgcaatcaccatacccaacaaaggcactaaagtaacccctgataatgaagtgaaagcaaacagcatgaacaaattcaaaccgggtttggatttagaaaacatcaaaccaaaaaacgccacaatttcagcgataaaaaatacccatttatactgcactacggct

SEQ ID NO: 4755 - DNA (genomic), 1035 bp, Helicobacter pylori; double-stranded, circular
  misc_feature (B) LOCATION 1...1035
  hypothetical: NO
  anti-sense: NO
atggcgtttaaaaaggccagattgatttccaggtttatttcaaaaggatctttcaaattgaataagatctcaaagaaatttttcacattgaatcaaatcttaaagcgtgaaaagcccttaaaacgccataaaaaaacaaaatctattgaaaagccctttaataaaaacaaatcttttttaaaagcttcggttttattgataggagcgctaggggggttatcccacctaagggctaacgaatgccgttattggtcatggtcgtcttggagttatcaagacaatattgaaagcggtcctaattcacccacgcacaactcttattgtctttttagtagcgctcaaggctctgggacttattatttaaacactcttaccacttatagcgctggtggggctagtttcacgcaaaaattcaatggtggcacgcttgatataggggggaatatccgctttggaggcacaggtattaatggaggtgatgtagggtatatcactggaacttataatgctcaaacgatgaattttaattctagccatatcacaaccggaaactcatacgctgatggcggtgggaccacgctcaattttaacgcgactaacaatatcactatcaatcaagcgagctttgataacagcgatgcagggacacaaaaatcttacatgaattttaaaggctctaatatcaagatcagtggctctagctttacagacgacaccaatggaggttttaatttcagcggtaataacaataatagcaccatctctttcaatcaaaccagcttcaatcaagggacttataattttagtaacagcgccactttaagcttcaataacagcaatttcaatcaagggacttatcactttaacagcgcccaatccacttttgaaaacagcaatttcaatcaaggcacttataattttaatgacaatactagctttaataacgacaccttcaatcaaggcacttataattttaatagcagcaaggtgagtttttcaggcgctaacactttaaattccaagttcgccttttgc

SEQ ID NO: 4756 - DNA (genomic), 1974 bp, Helicobacter pylori; double-stranded, circular
  misc_feature (B) LOCATION 1...1974
  hypothetical: NO
  anti-sense: NO
attccaagttcgccttttgctagccttaaaggcagtgtgtcttttaattctggtgcgatttttaacctcaatcaaacccttaataataatcaaacctatgacattctcactacaaacggagcgatccagtatggggtttatcaaagctatttgtgggatctaatcaactataagggcgataaagccattagccatgttgaagtgagtaataacacttatgatgtaacctttgacattaacgggcaagatgaaaccttacaagaaacctttagcaaccaatctattattacccaatttttaggagacgatttacaacaacaagcccaacaaacctatcaagaggatgtagctaattcccagaacgctttgaataaggttgctagcgacaacacgatcgcaaataacgatacaagctacactcaaagcagtaaccccactatccttaaagacgctcaaggtttagaaaacaccaaccaacaaatccaacaagacgaaaaagccttagaaaaagatttagcccaaatcaagcaattagccaactccaccacaggctttaacgaacaagctttcactcaagctcaaaaacaagaacaacaagatgaacaagccttacagaacgatgaaaacgcttttaatacggaacaagagggattagaacaagcgatagctaacgctaaacatgccaaccccacaccaaatccgacaccaagccccacacccactcctataaaacacacagcgccaaacactccccctagtcaagtcccgcccacaccccctagtcaaaatttacctaaaacaaatgtgtggaatggggtttattggcttcaaaacaaaacttactcaaacaaaggcatttattatattgatcccaatctttcaggacagagcggtcaaagcggcaacacgctcagcacctatacagctaatttgttagggagaagttttggcgtcaatgctaacaatggcactttgatcatagggaataatacagagagtgtgaatgataacgggttgatttggatagggcatggaggctttggctatattacgggaacttttagtgcggctaacatttacttgaccaataattttaaaaccggtgaaggcgtttcaaattcagatggtgggggagcgaacattacctttaaagcaagcgataatatcactatggatggcttgaattacaataacgctgaaaccgttactaaaatgattcaaacaggggccagtcagcattcctataccacttttgacgctaccaataatatcagtgtaactgattctgattttagcgatatgacttgggggaaattcagttttagcgctaagaatatttcgttttctaacgcttcgttcagcggctttacaaaccctggaggatcaagcactatcagcacgaatgcttctaattctttaagctttacagattctcgcttgaatggtggagcaatctataatttacaggctaatagccttattttcaataacacgcaagcggtttttaatgtcttgtattctagggggacaagcaattttaacgccaccacacagcttttaggcaacacgagttttacgcttagctctcaaagtttgctaaactttaatggcgatacaaccttgcaaaacaacgctaatatcacgcttggcaataaaagtcaagccgcttttaaaaattctttaacgcttgataacaattctaatttaagcttagacaatcaaagcgttttgaacgcgaatggcacgagtgcttttaacaatcaagcgagtctcaacatttataatgggagtcaagcggcctttagcagtctcttttttaatggcggaacactcagtcttaacgcgaatagcaagctcaacgcttctagcgctagtttttcaaacaacaccactattaatttagacgatagcgttttgaatgcgaataacacaagctctttaaacgctaatatcaattttcagcgcaagccaggc

SEQ ID NO: 4757 - DNA (genomic), 2991 bp, Helicobacter pylori; double-stranded, circular
  misc_feature (B) LOCATION 1...2991
  hypothetical: NO
  anti-sense: NO
atggcgtttaaaaaggccagattgatttccaggtttatttcaaaaggatctttcaaattgaataagatctcaaagaaatttttcacattgaatcaaatcttaaagcgtgaaaagcccttaaaacgccataaaaaaacaaaatctattgaaaagccctttaataaaaacaaatcttttttaaaagcttcggttttattgataggagcgctaggggggttatcccacctaagggctaacgaatgccgttattggtcatggtcgtcttggagttatcaagacaatattgaaagcggtcctaattcacccacgcacaactcttattgtctttttagtagcgctcaaggctctgggacttattatttaaacactcttaccacttatagcgctggtggggctagtttcacgcaaaaattcaatggtggcacgcttgatataggggggaatatccgctttggaggcacaggtattaatggaggtgatgtagggtatatcactggaacttataatgctcaaacgatgaattttaattctagccatatcacaaccggaaactcatacgctgatggcggtgggaccacgctcaattttaacgcgactaacaatatcactatcaatcaagcgagctttgataacagcgatgcagggacacaaaaatcttacatgaattttaaaggctctaatatcaagatcagtggctctagctttacagacgacaccaatggaggttttaatttcagcggtaataacaataatagcaccatctctttcaatcaaaccagcttcaatcaagggacttataattttagtaacagcgccactttaagcttcaataacagcaatttcaatcaagggacttatcactttaacagcgcccaatccacttttgaaaacagcaatttcaatcaaggcacttataattttaatgacaatactagctttaataacgacaccttcaatcaaggcacttataattttaatagcagcaaggtgagtttttcaggcgctaacactttaaattcaagttcgccttttgctagccttaaaggcagtgtgtcttttaattctggtgcgatttttaacctcaatcaaacccttaataataatcaaacctatgacattctcactacaaacggagcgatccagtatggggtttatcaaagctatttgtgggatctaatcaactataagggcgataaagccattagccatgttgaagtgagtaataacacttatgatgtaacctttgacattaacgggcaagatgaaaccttacaagaaacctttagcaaccaatctattattacccaatttttaggagacgatttacaacaacaagcccaacaaacctatcaagaggatgtagctaattcccagaacgctttgaataaggttgctagcgacaacacgatcgcaaataacgatacaagctacactcaaagcagtaaccccactatccttaaagacgctcaaggtttagaaaacaccaaccaacaaatccaacaagacgaaaaagccttagaaaaagatttagcccaaatcaagcaattagccaactccaccacaggctttaacgaacaagctttcactcaagctcaaaaacaagaacaacaagatgaacaagccttacagaacgatgaaaacgcttttaatacggaacaagagggattagaacaagcgatagctaacgctaaacatgccaaccccacaccaaatccgacaccaagccccacacccactcctataaaacacacagcgccaaacactccccctagtcaagtcccgcccacaccccctagtcaaaatttacctaaaacaaatgtgtggaatggggtttattggcttcaaaacaaaacttactcaaacaaaggcatttattatattgatcccaatctttcaggacagagcggtcaaagcggcaacacgctcagcacctatacagctaatttgttagggagaagttttggcgtcaatgctaacaatggcactttgatcatagggaataatacagagagtgtgaatgataacgggttgatttggatagggcatggaggctttggctatattacgggaacttttagtgcggctaacatttacttgaccaataattttaaaaccggtgaaggcgtttcaaattcagatggtgggggagcgaacattacctttaaagcaagcgataatatcactatggatggcttgaattacaataacgctgaaaccgttactaaaatgattcaaacaggggccagtcagcattcctataccacttttgacgctaccaataatatcagtgtaactgattctgattttagcgatatgacttgggggaaattcagttttagcgctaagaatatttcgttttctaacgcttcgttcagcggctttacaaaccctggaggatcaagcactatcagcacgaatgcttctaattctttaagctttacagattctcgcttgaatggtggagcaatctataatttacaggctaatagccttattttcaataacacgcaagcggtttttaatgtcttgtattctagggggacaagcaattttaacgccaccacacagcttttaggcaacacgagttttacgcttagctctcaaagtttgctaaactttaatggcgatacaaccttgcaaaacaacgctaatatcacgcttggcaataaaagtcaagccgcttttaaaaattctttaacgcttgataacaattctaatttaagcttagacaatcaaagcgttttgaacgcgaatggcacgagtgcttttaacaatcaagcgagtctcaacatttataatgggagtcaagcggcctttagcagtctcttttttaatggcggaacactcagtcttaacgcgaatagcaagctcaacgcttctagcgctagtttttcaaacaacaccactattaatttagacgatagcgttttgaatgcgaataacacaagctctttaaacgctaatatcaattttcagcgcaagccaggctga

SEQ ID NO: 4758 - DNA (genomic), 480 bp, Helicobacter pylori; double-stranded, circular
  misc_feature (B) LOCATION 1...480
  hypothetical: NO
  anti-sense: NO
atgaaaacttttgaagtgatgattcaaaccgattcgcaagggtatttggacgctaaatttggcggtaacgctcctagagggtttcttaacccaaacggcttacccacttattcgcctaaaatctcatggcaaaaagtggaaggcgctaaaagctacgctttagaattaatagatcatgacgcgcaaaaagtgtgtggcatgccgtttgtccattgggtcgtgggcaatatttcttacaatgttttagaagaaaacgcttccatgatggataaaaggattgttcaaggggtcaattcgctcactcaaggctttatccgttcctctcttaatgaaagcgaaaaacaacgctccaacctcaataacagcgtctatatcggccccatgcctcctaatggtgatcaccattacttgattcaagtgtatgccctagacattcctaaactggaattaaaacccctttttcttaggcgatttgcatga

SEQ ID NO: 4759 - DNA (genomic), 591 bp, Helicobacter pylori; double-stranded, circular
  misc_feature (B) LOCATION 1...591
  hypothetical: NO
  anti-sense: NO
ccaccaaaaataaatagctatacaatcattaaaaataattattctaatatcatgttccaaagtaagatgtgtttttatgatcatgctacaataaaggaaaatgatttcaaagaaaaagggcttaaaatgaaaacttttgaagtgatgattcaaaccgattcgcaagggtatttggacgctaaatttggcggtaacgctcctagagggtttcttaacccaaacggcttacccacttattcgcctaaaatctcatggcaaaaagtggaaggcgctaaaagctacgctttagaattaatagatcatgacgcgcaaaaagtgtgtggcatgccgtttgtccattgggtcgtgggcaatatttcttacaatgttttagaagaaaacgcttccatgatggataaaaggattgttcaaggggtcaattcgctcactcaaggctttatccgttcctctcttaatgaaagcgaaaaacaacgctccaacctcaataacagcgtctatatcggccccatgcctcctaatggtgatcaccattacttgattcaagtgtatgccctagacattcctaaactggaattaaaaccccttttttct

SEQ ID NO: 4760 - DNA (genomic), 627 bp, Helicobacter pylori; double-stranded, circular
  misc_feature (B) LOCATION 1...627
  hypothetical: NO
  anti-sense: NO
atgttccaaagtaagatgtgtttttatgatcatgctacaataaaggaaaatgatttcaaagaaaaagggcttaaaatgaaaacttttgaagtgatgattcaaaccgattcgcaagggtatttggacgctaaatttggcggtaacgctcctagagggtttcttaacccaaacggcttacccacttattcgcctaaaatctcatggcaaaaagtggaaggcgctaaaagctacgctttagaattaatagatcatgacgcgcaaaaagtgtgtggcatgccgtttgtccattgggtcgtgggcaatatttcttacaatgttttagaagaaaacgcttccatgatggataaaaggattgttcaaggggtcaattcgctcactcaaggctttatccgttcctctcttaatgaaagcgaaaaacaacgctccaacctcaataacagcgtctatatcggccccatgcctcctaatggtgatcaccattacttgattcaagtgtatgccctagacattcctaaactggaattaaaagccccttttttcttaggcgatttgcatgacaaaatgcgcaaccatatcatcgccatagggagaaaggaatttttatacaaacagtttgtaaggaaataa

SEQ ID NO: 4761 - DNA (genomic), 618 bp, Helicobacter pylori; double-stranded, circular
  misc_feature (B) LOCATION 1...618
  hypothetical: NO
  anti-sense: NO
ttggaaattttaaggcgagagtgcggggcggtggaagaaaacgcttatattgtgaagctttctagtggggtggattttattattgatcccggattttctagcagcgaatgggtgttagaaaacgccaagaatcctaaggcgattttaatcacgcatgggcattatgatcatgtatgggatagtgctcaattgtcaaaagcccttaaaggcacccccatttacgcccccaaagacgatgtgttcatgctagaaaatgatattttccatttgggcatgcccgtttttagccccacatttagcgtgccttgcaataagggttgcacgactttagagatagcaaacaccaccattaaatattggcatttccccgggcacacgcccggttgttctatcatagaaatagaaggggtgatttttagcggggattttattttttatcgcagcattggccgttatgatttcccttattctaatgaaaaagacatgaaagagtccctgttaaggtttcaaaatttagatttccctaaagacatagaaatttatccagggcatggggataaaacaagtttttttgccgaaagagagcattctaaaatttgggtttcaaggatggcttaa

SEQ ID NO: 4762 - DNA (genomic), 618 bp, Helicobacter pylori; double-stranded, circular
  misc_feature (B) LOCATION 1...618
  hypothetical: NO
  anti-sense: NO
agtttggaaattttaaggcgagagtgcggggcggtggaagaaaacgcttatattgtgaagctttctagtggggtggattttattattgatcccggattttctagcagcgaatgggtgttagaaaacgccaagaatcctaaggcgattttaatcacgcatgggcattatgatcatgtatgggatagtgctcaattgtcaaaagcccttaaaggcacccccatttacgcccccaaagacgatgtgttcatgctagaaaatgatattttccatttgggcatgcccgtttttagccccacatttagcgtgccttgcaataagggttgcacgactttagagatagcaaacaccaccattaaatattggcatttccccgggcacacgcccggttgttctatcatagaaatagaaggggtgatttttagcggggattttattttttatcgcagcattggccgttatgatttcccttattctaatgaaaaagacatgaaagagtccctgttaaggtttcaaaatttagatttccctaaagacatagaaatttatccagggcatggggataaaacaagtttttttgccgaaagagagcattctaaaatttgggtttcaaggatggct

SEQ ID NO: 4763 - protein, 262 aa, Helicobacter pylori
  misc_feature (B) LOCATION 1...262
  hypothetical: YES
MLRSLYSATSGMLAQQTHIDTTSNNIANVNTTGFKKSRADFNDLFYQAMQYAGTNTSNTTLSPDGMEVGLGVRPSAITKMFSQGSPKETENNLDIAITGKGFFQVQLPDGTTAYTRSGNFKLDEQGNLVTSEGYLLIPQITLPEDTTQVNIGVDGTVSVTQGLQTTSNVIGQITLANFVNPAGLHSMGDNLFSITNASGDAIVGNPDSQGLGKLRQGFLELSNVRLVEEMTDLITAQRAYEANSKSIQTADAMLQTVNSLKR

SEQ ID NO: 4764 - protein, 271 aa, Helicobacter pylori
  misc_feature (B) LOCATION 1...271
  hypothetical: YES
LLSLVKGKTMLRSLYSATSGMLAQQTHIDTTSNNIANVNTTGFKKSRADFNDLFYQAMQYAGTNTSNTTLSPDGMEVGLGVRPSAITKMFSQGSPKETENNLDIAITGKGFFQVQLPDGTTAYTRSGNFKLDEQGNLVTSEGYLLIPQITLPEDTTQVNIGVDGTVSVTQGLQTTSNVIGQITLANFVNPAGLHSMGDNLFSITNASGDAIVGNPDSQGLGKLRQGFLELSNVRLVEEMTDLITAQRAYEANSKSIQTADAMLQTVNSLKR

SEQ ID NO: 4765 - protein, 279 aa, Helicobacter pylori
  misc_feature (B) LOCATION 1...279
  hypothetical: YES
SYFCYNLRLLSLVKGKTMLRSLYSATSGMLAQQTHIDTTSNNIANVNTTGFKKSRADFNDLFYQAMQYAGTNTSNTTLSPDGMEVGLGVRPSAITKMFSQGSPKETENNLDIAITGKGFFQVQLPDGTTAYTRSGNFKLDEQGNLVTSEGYLLIPQITLPEDTTQVNIGVDGTVSVTQGLQTTSNVIGQITLANFVNPAGLHSMGDNLFSITNASGDAIVGNPDSQGLGKLRQGFLELSNVRLVEEMTDLITAQRAYEANSKSIQTADAMLQTVNSLKR

SEQ ID NO: 4766 - protein, 105 aa, Helicobacter pylori
  misc_feature (B) LOCATION 1...105
  hypothetical: YES
LRESMFLSSFDISGYGLSAQRLRANLISSNIANANTTRTSEGGPYRRQEAVFRAFDFNEILNQKIAQNNQIIPYEDPLDEGDDNPLIPITSVVVDKIARDDSDPL

SEQ ID NO: 4767 - protein, 161 aa, Helicobacter pylori
  misc_feature (B) LOCATION 1...161
  hypothetical: YES
MFLSSFDISGYGLSAQRLRANLISSNIANANTTRTSEGGPYRRQEAVFRAFDFNEILNQKIAQNNQIIPYEDPLDEGDDNPLIPITSVVVDKIARDDSEPLMKYDPSHPDANAQGYVAYPNVNAVVEMADLVEATRAYQANVAAFQSAKNMAQNAIGMLQT

SEQ ID NO: 4768 - protein, 109 aa, Helicobacter pylori
  misc_feature (B) LOCATION 1...109
  hypothetical: YES
MQAIHNDKSLLSPFSELNTDNRTKRGESGSTFKEQKGGEFSKLLKQSINELNNTQEQSDKALADMATGQIKDLHQAAIAIGKAETSMKLMLEVRNKAISAYKELLRTQI

SEQ ID NO: 4769 - protein, 112 aa, Helicobacter pylori
  misc_feature (B) LOCATION 1...112
  hypothetical: YES
GGSMHAIHNDKSLLSPFSELNTDNRTKREESGSTFKEQKGGEFSKLLKQSINELNNTQEQSDKALADMATGQIKDLHQAAIAIGKAETSMKLMLEVRNKAISAYKELLRTQI

SEQ ID NO: 4770 - protein, 65 aa, Helicobacter pylori
  misc_feature (B) LOCATION 1...65
  hypothetical: YES
LMDFSKAFGLVYKALDYRALRQDMIASNIAKVDTPFYRPKDLDFESVLRRKKQKFLKTNPVKFCL

SEQ ID NO: 4771 - protein, 96 aa, Helicobacter pylori
  misc_feature (B) LOCATION 1...96
  hypothetical: YES
KRFTEKKAEIFENQSGKVLPLAHTNPRHLDFENSTKNGASLFFRDGHLAKNDGNSVDLDIETSEMGKNSTMYLALSSALKKYRGMINYAIDSSKNL

SEQ ID NO: 4772 - protein, 140 aa, Helicobacter pylori
  misc_feature (B) LOCATION 1...140
  hypothetical: YES
MDFSKAFGLVYKALDYRALRQDMIASNIANVDTPFYRPKDLDFESVLAEKKAEIFENQSGKVLPLAHTNPRHLDFENSTKNGASLFFRDGHLAKNDGNSVDLDIETSEMGKNSTMYLALSSALKKYRGMINYAIDSSKNL

SEQ ID NO: 4773 - protein, 116 aa, Helicobacter pylori
  misc_feature (B) LOCATION 1...116
  hypothetical: YES
VKKYAEDFITKDEVKSLLERLAKDYPTIVEESKKIPTGAIRSVLQALLHEKIPIKDMLTILETITDIAPLVQNDVNILTEQVRARLSRVITNAFKSEDGRLKFLTFSTDXEQFXAQ

SEQ ID NO: 4774 - protein, 234 aa, Helicobacter pylori
  misc_feature (B) LOCATION 1...234
  hypothetical: YES
WIDAKNKEEAIIQGYTIIDPSTVIATHTSELVKKYAEDFITKDEVKSLLERLAKDYPTIVEESKKIPTGAIRSVLQALLHEKIPIKDMLTILETITDIAPLVQNDVNILTEQVRARLSRVITNAFKSEDGRLKFLTFSTDSEQFLLNKLRENGTSKSLLLNVGELQKLIEGVSEEAMKVLQKGIAPVILIVEPNLRKALSNQMEQARIDVVVLSHAELDPNSNFEALGTIHINF

SEQ ID NO: 4775 - protein, 233 aa, Helicobacter pylori
  misc_feature (B) LOCATION 1...233
  hypothetical: YES
IDAKNKEEAIIQGYTIIDPSTVIATHTSELVKKYAEDFITKDEVKSLLERLAKDYPTIVEESKKIPTGAIRSVLQALLHEKIPIKDMLTILETITDIAPLVQNDVNILTEQVRARLSRVITNAFKSEDGRLKFLTFSTDSEQFLLNKLRENGTSKSLLLNVGELQKLIEGVSEEAMKVLQKGIAPVILIVEPNLRKALSNQMEQARIDVVVLSHAELDPNSNFEALGTIHINF

SEQ ID NO: 4776 - protein, 259 aa, Helicobacter pylori
  misc_feature (B) LOCATION 1...259
  hypothetical: YES
MNTGFVNREIEGIPTKEPAFGMDALWIDAKNKEEAIIQGYTIIDPSTVIATHTSELVKKYAEDFITKDEVKSLLERLAKDYPTIVEESKKIPTGAIRSVLQALLHEKIPIKDMLTILETITDIAPLVQNDVNILTEQVRARLSRVITNAFKSEDGRLKFLTFSTDSEQFLLNKLRENGTSKSLLLNVGELQKLIEGVSEEAMKVLQKGIAPVILIVEPNLRKALSNQMEQARIDVVVLSHAELDPNSNFEALGTIHINF

SEQ ID NO: 4777 - protein, 342 aa, Helicobacter pylori
  misc_feature (B) LOCATION 1...342
  hypothetical: YES
VLKIEFLELALGYQLISLADMKQGGDLLERIRGIRKKIASDYGFLMPQIRIRDNLQLPPTHYEIKLKGIVIGEGMVMPDKFLAMNTGFVNREIEGIPTKEPAFGMDALWIDAKNKEEAIIQGYTIIDPSTVIATHTSELVKKYAEDFITKDEVKSLLERLAKDYPTIVEESKKIPTGAIRSVLQALLHEKIPIKDMLTILETITDIAPLVQNDVNILTEQVRARLSRVITNAFKSEDGRLKFLTFSTDSEQFLLNKLRENGTSKSLLLNVGELQKLIEGVSEEAMKVLQKGIAPVILIVEPNLRKALSNQMEQARIDVVVLSHAELDPNSNFEALGTIHINF

SEQ ID NO: 4778 - protein, 90 aa, Helicobacter pylori
  misc_feature (B) LOCATION 1...90
  hypothetical: YES
MQNGYYAATGAMATQFNRLDLTSNNLANLNTNGFKRDDAITGDFLRLYQEYREQLPLEDQTKASAKYLNRXLNRVPILSXIYTXRXLGXV

SEQ ID NO: 4779 - protein, 269 aa, Helicobacter pylori
  misc_feature (B) LOCATION 1...269
  hypothetical: YES
MQNGYYAATGAMATQFNRLDLTSNNLANLNTNGFKRDDAITGDFLRLYQEYREQLPLEDQTKASAKYLNRNLNRVPILSEIYTDRSLGAFEGTNNPLDFALTSPNLYFAIQTNEGVAYTRDGHFSVDKDGFLVTLNGFKVLSRSGLNEKGGIMLMPNAEIEVDQNGGITFRDNEAQIQAGALALVSFSEPKNLKKIGQNLYTYQGEGVHQVSDSGALRQSMLEKSNVNAVREMSTLIEINRFLDMYSKVLKTHQDDMNAEAINKLATKA

SEQ ID NO: 4780 - protein, 273 aa, Helicobacter pylori
  misc_feature (B) LOCATION 1...273
  hypothetical: YES
KDYCMQNGYYAATGAMATQFNRLDLTSNNLANLNTNGFKRDDAITGDFLRLYQEYREQLPLEDQTKASAKYLNRNLNRVPILSEIYTDRSLGAFEGTNNPLDFALTSPNLYFAIQTNEGVAYTKDGHFSVDKDGFLVTLNGFKVLSRSGLNEKGGIMLMPNAEIEVDQNGGITFRDNEAQIQAGALALVSFSEPKNLKKIGQNLYTYQGEGVHQVSDSGALRQSMLEKSNVNAVREMSTLIEINRFLDMYSKVLKTHQDDMNAEAINKLATKA

SEQ ID NO: 4781 - protein, 163 aa, Helicobacter pylori
  misc_feature (B) LOCATION 1...163
  hypothetical: YES
MRSLYHYHAYQYHWRVFSGRVSRDMSLSFSASTFTILTIGDGFVGQIPALIIATATGIVATRTTQNEEEDFASKLITQLTNKSKTLVIVGANLLLFATIPGLPTFSLAFVGTLFLFIAWLISREGKDGLLTKLENYLSPKFGLDLSEKPHSSKIKPHAPTTKT

SEQ ID NO: 4782 - protein, 174 aa, Helicobacter pylori
  misc_feature (B) LOCATION 1...174
  hypothetical: YES
MDGASKFVKGDAIASIIITLINIIGGFLVGVFQRDMSLSFSASTFTILTIGDGLVGQIPALIIATATGIVATRTTQNEEEDFASKLITQLTNKSKTLVIVGANLLLFATIPGLPTFSLAFVGTLFLFIAWLISREGKDGLLTKLENYLSPKFGLDLSEKPHSSKIKPHAPTTKT

SEQ ID NO: 4783 - protein, 231 aa, Helicobacter pylori
  misc_feature (B) LOCATION 1...231
  hypothetical: YES
MSADSALPSVNLSLNAPSDPKQLVTTLNVIALLTLLVLAPSLILVMTSFTRLIVVFSFLRTALGTQQTPPTQILVSLSLILTFFIMEPSLKKAYDTGIKPYMDKKISYTEAFEKSTLPFKEFMLKNTREKDLALFFRIRNLPNPKTPDDVSLSVLIPAFMISELKTAFQIGFLLYLPFLVIDMVISSILMAMGMMMLPPVMISLPFKILVFILVDGFNLLTENLVASFKMV

SEQ ID NO: 4784 - protein, 248 aa, Helicobacter pylori
  misc_feature (B) LOCATION 1...248
  hypothetical: YES
VRFFIFLILICPLICPLMSADSALPSVNLSLNAPSDPKQLVTTLNVIALLTLLVLAPSLILVMTSFTRLIVVFSFLRTALGTQQTPPTQILVSLSLILTFFIMEPSLKKAYDTGIKPYMDKKISYTEAFEKSTLPFKEFMLKNTREKDLALFFRIRNLPNPKTPDDVSLSVLIPAFMISELKTAFQIGFLLYLPFLVIDMVISSILMAMGMMMLPPVMISLPFKILVFILVDGFNLLTENLVASFKMV

SEQ ID NO: 4785 - protein, 254 aa, Helicobacter pylori
  misc_feature (B) LOCATION 1...254
  hypothetical: YES
RFKARIVRFFIFLILICPLICPLMSADSALPSVNLSLNAPSDPKQLVTTLNVIALLTLLVLAPSLILVMTSFTRLIVVFSFLRTALGTQQTPPTQILVSLSLILTFFIMEPSLKKAYDTGIKPYMDKKISYTEAFEKSTLPFKEFMLKNTREKDLALFFRIRNLPNPKTPDDVSLSVLIPAFMISELKTAFQIGFLLYLPFLVIDMVISSILMAMGMMMLPPVMISLPFKILVFILVDGFNLLTENLVASFKMV

SEQ ID NO: 4786 - protein, 67 aa, Helicobacter pylori
  misc_feature (B) LOCATION 1...67
  hypothetical: YES
MQDLDNNMSLDTAHNTLSSNGKNITIAGVVKALQKIGVSAKGMVSILQALKKSGAISAKWRYYDKQQ

SEQ ID NO: 4787 - protein, 69 aa, Helicobacter pylori
  misc_feature (B) LOCATION 1...69
  hypothetical: YES
LKRVFLWLIFVLAFHKLLAGKIGDIASVVGVRDNQLIGYGLVIGLNGTGDKSCSKFHMQSISNMLESLN

SEQ ID NO: 4788 - protein, 283 aa, Helicobacter pylori
  misc_feature (B) LOCATION 1...283
  hypothetical: YES
MLESVNVKISADDIKSKNVAAVMITASLPPFARQGDKIDIHISSIGDAKSIQGGTLVMTPLNAVDGNIYALAQGAIISGNSSNLLSANIINGATIEREVSYDLFHKNAMTLSLKNPNFKNAIQVQNTLNKVFGNKVAIALDPKTIQITRPERLSMVEFLALVQEIPIYYRAKNKIIVDEKSGTIVSGVDIIVHPIVVTSQDITLKITKEPLNDSKNMQDLDNNMSLDTAHNTLSSNGKNITIAGVVKALQKIGVSAKGMVSILQALKKSGAISAKWRYYDKQQ

SEQ ID NO: 4789 - protein, 282 aa, Helicobacter pylori
  misc_feature (B) LOCATION 1...282
  hypothetical: YES
LESVNVKISADDIKSKNVAAVMITASLPPFARQGDKIDIHISSIGDAKSIQGGTLVMTPLNAVDGNIYALAQGAIISGNSSNLLSANIINGATIEREVSYDLFHKNAMTLSLKNPNFKNAIQVQNTLNKVFGNKVAIALDPKTIQITRPERLSMVEFLALVQEIPIYYRAKNKIIVDEKSGTIVSGVDIIVHPIVVTSQDITLKITKEPLNDSKNMQDLDNNMSLDTAHNTLSSNGKNITIAGVVKALQKIGVSAKGMVSILQALKKSGAISAKWRYYDKQQ

SEQ ID NO: 4790 - protein, 342 aa, Helicobacter pylori
  misc_feature (B) LOCATION 1...342
  hypothetical: YES
LKRVFLWLIFVLAFHKLLAEKIGDIASVVGVRDNQLIGYGLVIGLNGTGNKSGSKFTMQSISNMLESVNVKISADDIKSKNVAAVMITASLPPFARQGDKIDIHISSIGDAKSIQGGTLVMTPLNAVDGNIYALAQGAIISGNSSNLLSANIINGATIEREVSYDLFHKNAMTLSLKNPNFKNAIQVQNTLNKVFGNKVAIALDPKTIQITRPERLSMVEFLALVQEIPINYSAKNKIIVDEKSGTIVSGVDIIVHPIVVTSQDITLKITKEPLNDSKNMQDLDNNMSLDTAHNTLSSNGKNITIAGVVKALQKIGVSAKGMVSILQALKKSGAISAEMEIL

SEQ ID NO: 4791 - protein, 155 aa, Helicobacter pylori
  misc_feature (B) LOCATION 1...155
  hypothetical: YES
IDGRAISVHAASESGQVFGGGNFAGISGTQHAVIGRLTLTRTDARDIIVSGVNFSHVGFHSAQGVAEYTVNLRAVRGIFDANVASAAGANANGAQAETNSQGIGAGVTSLKGAMIVMDMADSARTQLDKIRSDMGSVQMELVTTINNISVTQVNV

SEQ ID NO: 4792 - protein, 154 aa, Helicobacter pylori
  misc_feature (B) LOCATION 1...154
  hypothetical: YES
DGRAISVHAASESGQVFGGGNFAGISGTQHAVIGRLTLTRTDARDIIVSGVNFSHVGFHSAQGVAEYTVNLRAVRGIFDANVASAAGANANGAQAETNSQGIGAGVTSLKGAMIVMDMADSARTQLDKIRSDMGSVQMELVTTINNISVTQVNV

SEQ ID NO: 4793 - protein, 343 aa, Helicobacter pylori
  misc_feature (B) LOCATION 1...343
  hypothetical: YES
VRMETSTFSGEGMLASAAAQNLTEVGLNFKQVNGVNDYKIETVRISTSAGTGIGALSEIINRFSNTLGVRASYNVMATGGTPVQSGTVRELTINGVEIGTVNDVHKNDADGRLTNAINSVKDRTGVEASLDIQGRINLHSIDGRAISVHAASASGQVFGGGNFAGISGTQHAVIGRLTLTRTDARDIIVSGVNFSHVGFHSAQGVAEYTVNLRAVRGIFDANVASAAGANANGAQAETNSQGIGAGVTSLKGAMIVMDMADSARTQLDKIRSDMGSVQMELVTTINNISVTQVNVKAAESQIRDVDFAEESANFSKYNILAQSGSFAMAQANAVQQNVLRLLQ

SEQ ID NO: 4794 - protein, 384 aa, Helicobacter pylori
  misc_feature (B) LOCATION 1...384
  hypothetical: YES
LQYTVHPCELSGVFTRFQIGAYSNTTVKASIGSTSSDKIGHVRMETSSFSGEGMLASAAAQNLTEVGLNFKQVNGVNDYKIETVRISTSAGTGIGALSEIINRFSNTLGVRASYNVMATGGTPVQSGTVRELTINGVEIGTVNDVHKNDADGRLTNAINSVKDRTGVEASLDIQGRINLHSIDGRAISVHAASASGQVFGGGNFAGISGTQHAVIGRLTLTRTDARDIIVSGVNFSHVGFHSAQGVAEYTVNLRAVRGIFDANVASAAGANANGAQAETNSQGIGAGVTSLKGAMIVMDMADSARTQLDKIRSDMGSVQMELVTTINNISVTQVNVKAAESQIRDVDFAEESANFSKYNILAQSGSFAMAQANAVQQNVLRLLQ

SEQ ID NO: 4795 - protein, 351 aa, Helicobacter pylori
  misc_feature (B) LOCATION 1...351
  hypothetical: YES
MADILSQEEIDALLEVVDENVDIQNVQKKDIIPQRSVTLYDFKRPNRVSKEQLRSFRSIHDKMARNLSSQVSSIMRSIVEIQLHSVDQMTYGEFLMSLPSPTSFNVFSMKPMGGTGVLEINPSIAFPMIDRLLGGKGSAYDQNREFSDIELNLLDTILRQVMQILKEVWSPVVEMYPTIDAKESSANVVQIVAQNEISIMVVLEIIIGHSRGMMNICYPVISIESILSKMGSRDFMLSETNSKKSRNKELQALLSGVSVDMMVFLGAVELSLKEMLDLDVGDTIRLNKVANDEVSVYVHKKKRYLASVGFQGYRKTIQIKEVVYSEKERTKEILEMLEEQRRRQSWAMLWS

SEQ ID NO: 4796 - protein, 354 aa, Helicobacter pylori
  misc_feature (B) LOCATION 1...354
  hypothetical: YES
MADILSQEEIDALLEVVDENVDIQNVQKKDIIPQRSVTLYDFKRPNRVSKEQLRSFRSIHDKMARNLSSQVSSIMRSIVEIQLHSVDQMTYGEFLMSLPSPTSFNVFSMKPMGGTGVLEINPSIAFPMIDRLLGGKGSAYDQNREFSDIELNLLDTILRQVMQILKEVWSPVVEMYPTIDAKESSANVVQIVAQNEISIMVVLEIIIGHSRGMMNICYPVISIESILSKMGSRDFMLSETNSKKSRNKELQALLSGVSVDMMVFLGAVELSLKEMLDLDVGDTIRLNKVANDEVSVYVHKKKRYLASVGFQGYRKTIQIKEVVYSEKERTKEILEMLEEQRRGKVGDIMKIEEE

SEQ ID NO: 4797 - protein, 355 aa, Helicobacter pylori
  misc_feature (B) LOCATION 1...355
  hypothetical: YES
IMADILSQEEIDALLEVVDENVDIQNVQKKDIIPQRSVTLYDFKRPNRVSKEQLRSFRSIHDKMARNLSSQVSSIMRSIVEIQLHSVDQMTYGEFLMSLPSPTSFNVFSMKPMGGTGVLEINPSIAFPMIDRLLGGKGSAYDQNREFSDIELNLLDTILRQVMQILKEVWSPVVEMYPTIDAKESSANVVQIVAQNEISIMVVLEIIIGHSRGMMNICYPVISIESILSKMGSRDFMLSETNSKKSRNKELQALLSGVSVDMMVFLGAVELSLKEMLDLDVGDTIRLNKVANDEVSVYVHKKKRYLASVGFQGYRKTIQIKEVVYSEKERTKEILEMLEEQRRGKVGDIMKIEEE

SEQ ID NO: 4798 - protein, 200 aa, Helicobacter pylori
  misc_feature (B) LOCATION 1...200
  hypothetical: YES
MLVGPTGVGKTTTLAKLAARYSRMLAKKYKVGIITLDNYRIGALEQLSWYANKMKMSIEAVIDAKDFAKEIEALEYCDFILVDTTGHSQYDKEKIAGLKEFIDGGYNIDVSLVLSVTTKYEDMKDIYDSFGVLGIDTLIFTKLDESRGLGNLFSLVHESQKPISYLSVGQEVPMDLKVATNEYLVDCMLDGFSNPNKEQA

SEQ ID NO: 4799 - protein, 455 aa, Helicobacter pylori
  misc_feature (B) LOCATION 1...455
  hypothetical: YES
VKFYTYSGETAAEALKIAQSHHGVDTLVFKTQEIRKKTLTSSGLYEIVVAVEEEENKKAPLIPESLYDEELNEEDVVMQLSSTVEEMRKLAGVSSNQRNYTFSKNKTLLEKDAPLEDTPLEANKQDALLQALKDEANHKKEREKREVKQEEEIKDINAQLSKIRDSLKLIQNMFWDEKNPNSVNIPQEFAEIYKLAKQSGMKSSHLDEIMQLSLELMPLRMRENSVTIKRYFREVLRKIILCRPEDLNLRQKRILMLVGPTGVGKTTTLAKLAARYSRMLAKKYKVGIITLDNYRIGALEQLSWYANKMKMSIEAVIDAKDFAKEIEALEYCDFILVDTTGHSQYDKEKIAGLKEFIDGGYNIDVSLVLSVTTKYEDMKDIYDSFGVLGIDTLIFTKLDESRGLGNLFSLVHESQKPISYLSVGQEVPMDLKVATNEYLVDCMLDGFSNPNKEQA

SEQ ID NO: 4800 - protein, 459 aa, Helicobacter pylori
  misc_feature (B) LOCATION 1...459
  hypothetical: YES
KRRVVKFYTYSGETAAEALKIAQSHHGVDTLVFKTQEIRKKTLTSSGLYEIVVAVEEEENKKAPLIPESLYDEELNEEDVVMQLSSTVEEMRKLAGVSSNQRNYTFSKNKTLLEKDAPLEDTPLEANKQDALLQALKDEANHKKEREKREVKQEEEIKDINAQLSKIRDSLKLIQNMFWDEKNPNSVNIPQEFAEIYKLAKQSGMKSSHLDEIMQLSLELMPLRMRENSVTIKRYFREVLRKIILCRPEDLNLRQKRILMLVGPTGVGKTTTLAKLAARYSRMLAKKYKVGIITLDNYRIGALEQLSWYANKMKMSIEAVIDAKDFAKEIEALEYCDFILVDTTGHSQYDKEKIAGLKEFIDGGYNIDVSLVLSVTTKYEDMKDIYDSFGVLGIDTLIFTKLDESRGLGNLFSLVHESQKPISYLSVGQEVPMDLKVATNEYLVDCMLDGFSNPNKEQA

SEQ ID NO: 4801 - protein, 278 aa, Helicobacter pylori
  misc_feature (B) LOCATION 1...278
  hypothetical: YES
MYRHVLKDFSLDFSKESVQELFNQLAKDTFLLLLPVLIILMVVAFLSNVLQFGWLFAPKVIEPKFSKINPINGVKNLFSLKKILDGSLITLKVFLAFFLGFFIFSLFLGELNHAALLNLQGQLLWFKSKALWLISSLLFLFFVLAFVDLIIKRRQYTNSLKMTKQEVKDEYKQQEGNPEIKAKIRQMMVKNATNKMMQEIPKSNVVVTNPTHYAVALKFDEEHPVPVVVAKGTDYLAIRIKGIAREHDIEIIENKTLARELYRDVKLNATIPEELFER

SEQ ID NO: 4802 - protein, 358 aa, Helicobacter pylori
  misc_feature (B) LOCATION 1...358
  hypothetical: YES
MAEEEKTELPSAKKIQKAREEGNVPKSMEVVGFLGLLAGLMSIFVFFIWWVDGFSEMYRHVLKDFSLDFSKESVQELFNQLAKDTFLLLLPVLIILMVVAFLSNVLQFGWLFAPKVIEPKFSKINPINGVKNLFSLKKILDGSLITLKVFLAFFLGFFIFSLFLGELNHAALLNLQGQLLWFKSKALWLISSLLFLFFVLAFVDLIIKRRQYTNSLKMTKQEVKDEYKQQEGNPEIKAKIRQMMVKNATNKMMQEIPKSNVVVTNPTHYAVALKFDEEHPVPVVVAKGTDYLAIRIKGIAREHDIEIIENKTLARELYRDVKLNATIPEELFEAVAIVFAQVAKLEQERQKQKIIKPL

SEQ ID NO: 4803 - protein, 362 aa, Helicobacter pylori
  misc_feature (B) LOCATION 1...362
  hypothetical: YES
KRDQMAEEEKTELPSAKKIQKAREEGNVPKSMEVVGFLGLLAGLMSIFVFFIWWVDGFSEMYRHVLKDFSLDFSKESVQELFNQLAKDTFLLLLPVLIILMVVAFLSNVLQFGWLFAPKVIEPKFSKINPINGVKNLFSLKKILDGSLITLKVFLAFFLGFFIFSLFLGELNHAALLNLQGQLLWFKSKALWLISSLLFLFFVLAFVDLIIKRRQYTNSLKMTKQEVKDEYKQQEGNPEIKAKIRQMMVKNATNKMMQEIPKSNVVVTNPTHYAVALKFDEEHPVPVVVAKGTDYLAIRIKGIAREHDIEIIENKTLARELYRDVKLNATIPEELFEAVAIVFAQVAKLEQERQKQKIIKPL

SEQ ID NO: 4804 - protein, 56 aa, Helicobacter pylori
  misc_feature (B) LOCATION 1...56
  hypothetical: YES
AWKNLEVFMVNEVQGIGIPTSHASVQTTPTKEISRTNTINTVDESKTTRKPESKLP

SEQ ID NO: 4805 - protein, 119 aa, Helicobacter pylori
  misc_feature (B) LOCATION 1...119
  hypothetical: YES
MVNEVQGIGIPTSHASVQTTPTKEISRTNTINTVDESKTTIDPDQYKPKLELLSERLNEEMKRIGTDINFSYNDTIKGLVVSVKDANGDKVIREIPSKEAVELMQRMRDVIGIIFDKRG

SEQ ID NO: 4806 - protein, 97 aa, Helicobacter pylori
  misc_feature (B) LOCATION 1...97
  hypothetical: YES
MQYANAYQAYQHNRVSVESPAKLIEMLYEGILRFSSQAKRCIENEDIEKKIYYINRVTDIFTELLNILDYEKGGXVAVYLTGLYTHQIKVLTQANVE

SEQ ID NO: 4807 - protein, 126 aa, Helicobacter pylori
  misc_feature (B) LOCATION 1...126
  hypothetical: YES
MQYANAYQAYQHNRVSVESPAKLIEMLYEGILRFSSQAKRCIENEDIEKKIYYINRVTDIFTELLNILDYEKGGKVAVYLTGLYTHQIKVLTQANVENDASKIDLVLNVARGLLEAWREIHSDELA

SEQ ID NO: 4808 - protein, 129 aa, Helicobacter pylori
  misc_feature (B) LOCATION 1...129
  hypothetical: YES
RNIMQYANAYQAYQHNRVSVESPAKLIEMLYEGILRFSSQAKRCIENEDIEKKIYYINRVTDIFTELLNILDYEKGGKVAVYLTGLYTHQIKVLTQANVENDASKIDLVLNVARGLLEAWREIHSDELA

SEQ ID NO: 4809 - protein, 86 aa, Helicobacter pylori
  misc_feature (B) LOCATION 1...86
  hypothetical: YES
NMAIGSLSSLGLGSKVLNYDVIDKLKDADEKALIAPLDKEMEQDVETQKALLEIKTLLSSLKGPVKTLSDYSHLYQPEKAMLQAMR

SEQ ID NO: 4810 - protein, 147 aa, Helicobacter pylori
  misc_feature (B) LOCATION 1...147
  hypothetical: YES
NALRLFPLISARKSNVTGDALSASVGAGVPIKDIKVDVQNLAQGDINELGAKFSSRDDIFSQVDTTLKFYTQNKDYAVDIKAGMTLGDVAQSITDATNGEVMGIVMKTGGNDPYQLMVNTKNTGEDNRVYFGSHLQSTLTNKNALSL

SEQ ID NO: 4811 - protein, 146 aa, Helicobacter pylori
  misc_feature (B) LOCATION 1...146
  hypothetical: YES
NALRLFPLISARKSNVTGDALSASVGAGVPIKDIKVDVQNLAQGDINELGAKFSSRDDIFSQVDTTLKFYTQNKDYAVDIKAGMTLGDVAQSITDATNGEVMGIVMKTGGNDPYQLMVNTKNTGEDNRVYFGSHLQSTLTNKNALS

SEQ ID NO: 4812 - protein, 304 aa, Helicobacter pylori
  misc_feature (B) LOCATION 1...304
  hypothetical: YES
LVINSKTGLLTIKGEDALGKASLKDLGLSAGMVQSYEASQDTLFMSKNLQKASDSQFTYNGVSITRPTNEVNDVISGVNITLEQTTEPNKPAIISVSRDNQAIIDSLKEFVKAYNELIPKLDEDTRYDADTKIAGIFNGVGDIRAIRSSLNNVFSYSVHTDNGVESLMKYGLSLDDKGVMSLDEAKLSSALNSNPKATQDFFYGSDSKDMGGREIHQEGIFSKFNQVIANLIDGGNAKLKIYEDSLDRDAKSLTKDKENAQELLKTRYNIMAERFAAYDSQISKANQKFNSVQMMIDQAAAKKN

SEQ ID NO: 4813 - protein, 685 aa, Helicobacter pylori
  misc_feature (B) LOCATION 1...685
  hypothetical: YES
MAIGSLSSLGLGSKVLNYDVIDKLKDADEKALIAPLDKKMEQNVEKQKALVEIKTLLSSLKGPVKTLSDYSTYISRKSNVTGDALSASVGAGVPIQDIKVDVQNLAQGDINELGAKFSSRDDIFSQVDTTLKFYTQNKDYAVDIKAGMTLGDVAQSITDATNGEVMGIVMKTGGNDPYQLMVNTKNTGEDNRVYFGSHLQSTLTNKNALSLGLDGAGKSELSLNLKGADGSMHEVPIMLELPESASIKQKNAAIQKAMEQALENDPNFKDLIANGDISIDTLHGGESLIINDRRGGNIEVKGSKAKELGFSQTTTQESDLLKSARTIKEGKLEGVVSLNGQKLDLSALTKESNTSEENTDAIIQAINAKEGLNAFKNAEGKLVINSKTGMLTIKGEDALGKASLKDLGLSAGMVQSYEASQDTLFMSKNLQKASDSQFTYNGVSITRPTNEVNDVISGVNITLEQTTEPNKPAIISVSRDNQAIIDSLKEFVKAYNELIPKLDEDTRYDADTKIAGIFNGVGDIRAIRSSLNNVFSYSVHTDNGVESLMKYGLSLDDKGVMSLDEAKLSSALNSNPKATQDFFYGSDSKDMGGREIHQEGIFSKFNQVIANLIDGGNAKLKIYEDSLDRDAKSLTKDKENAQELLKTRYNIMAERFAAYDSQISKANQKFNSVQMMIDQAAAKKN

SEQ ID NO: 4814 - protein, 88 aa, Helicobacter pylori
  misc_feature (B) LOCATION 1...88
  hypothetical: YES
MESQLMKLAIETYKITLMISLPVLLAGLVVGLLVSIFQATTQINEMTLSFVPKILAVIGVLILTMPWMTNMLLDYTKTLIKLIPKIIG

SEQ ID NO: 4815 - protein, 88 aa, Helicobacter pylori; identical to SEQ ID NO: 4814
  misc_feature (B) LOCATION 1...88
  hypothetical: YES

SEQ ID NO: 4816 - protein, 93 aa, Helicobacter pylori
  misc_feature (B) LOCATION 1...93
  hypothetical: YES
DKRNIMESQLMKLAIETYKITLMISLPVLLAGLVVGLLVSIFQATTQINEMTLSFVPKILAVIGVLILTMPWMTNMLLDYTKTLIKLIPKIIG

SEQ ID NO: 4817 - protein, 91 aa, Helicobacter pylori
  misc_feature (B) LOCATION 1...91
  hypothetical: YES
WGALGAFSNGRTLALAQVALANFANDAGLQALGDNVFSQTGNSGQALIGAANTGRRGSISGSKLESSNVDLSRSLTNLIVVQRGFKRTLKR

SEQ ID NO: 4818 - protein, 221 aa, Helicobacter pylori
  misc_feature (B) LOCATION 1...221
  hypothetical: YES
MRIESYRSEGAEWNFRVIVPEPGELVGGSAARPNVFEGGRLHFNNDGSLAGMNPPLLQFDPKNGADAPQRINLAFGSSGSFDGLTSVDKISETYAIEQNGYQAGDLMDVRFDSDGVLLGAFSNGRTLALAQVALANFANDAGLQALGGNVFSQTGNSGQALIGAANTGRRGSISGSKLESSNVDLSRSLTNLIVVQRGFQANSKAVTTSDQILNTLLNLKQ

SEQ ID NO: 4819 - protein, 343 aa, Helicobacter pylori
  misc_feature (B) LOCATION 1...343
  hypothetical: YES
IPLGFKYSRASFVDMLSQVKLIATDPYKNGLAGQNDFSVGLGVGVDATTKIFSQGNIQNTDVKTDLAIQGDGFFIISPDRGITRNFTRAWGVSFGLAREFGYHRWACGARSVRNRSDTGNKGSDTDALKVDNTGPLENIRIDPGMVMPAKTSNRISMRANINAGKHADQTAAVFALDSSAKTPSDGINPVYDSGTNLAHVPENMGSLYNEDGDALLLIENHGIWVSYKSAKMVKDILPSAENSTLELNGVKISFTNDSAVSRTSSLVAAKNAINAVKSQTGIEAYLDGKQLRLENTNELDGDEKLKNIVVTQAGTGAFANFLDGDKDVTAFKYSYTHSISPNA

SEQ ID NO: 4820 - protein, 718 aa, Helicobacter pylori
  misc_feature (B) LOCATION 1...718
  hypothetical: YES
MLRSLWSGVNGMQAHQIALDIESNNIANVNTTGFKYSRASFVDMLSQVKLIATAPYKNGLAGQNDFSVGLGVGVDATTKIFSQGNIQNTDVKTDLAIQGDGFFIISPDRGITRNFTRDGEFLFDSQGSLVTTGGLVVQGWVRNGSDTGNKGSDTDALKVDNTGPLENIRIDPGMVMPARASNRISMRANLNAGRHADQTAAVFALDSSAKTPSDGINPVYDSGTNLAQVAEDMGSLYNEDGDALLLNENQGIWVSYKSAKMVKDILPSAENSTLELNGVKISFTNDSAVSRTSSLVAAKNAINAVKSQTGIEAYLDGKQLRLENTNELDGDEKLKNIVVTQAGTGAFANFLDGDKDVTAFKYSYTHSISPNADIGQFRTTEDLRALIQHDANIVKDPSLADNYQDSAASIGVTINQYGMFEINNKDNKNVIKENLNIFVSGYSSDSVTNNVLFKNAMKGLNTASLIEGGASASSSKFTHATHATSIDVIDSLGTKHAMRIEFYRSGGAEWNFRVIVPEPGELVGGSAARPNVFEGGRLHFNNDGSLAGMNPPLLQFDPKNGADAPQRINLAFGSSGSFDGLTSVDKISETYAIEQNGYQAGDLMDVRFDSDGVLLGAFSNGRTLALAQVALANFANDAGLQALGGNVFSQTGNSGQALIGAANTGRRGSISGSKLESSNVDLSRSLTNLIVVQRGFQANSKAVTTSDQILNTLLNLKQ

SEQ ID NO: 4821 - protein, 394 aa, Helicobacter pylori
  misc_feature (B) LOCATION 1...394
  hypothetical: YES
LMWLKTLTLQTLNTDKALQEFSKTMEAFKTKLIQSANDVHSETSRAAIANDLERLKEHMINVANTSIGGEFLFGGSKVDRPPIDSNGKYHGNGEDLNALISSDNLVPYNISGQDLFLGTDKDKHKLITTNIKLLNQNKLXPDVMDALEHSSLPEEVFIKPSDTLRELIGDNDKNPTNDPKEFFYLQGIRPDGSSFKEKFALDKAYQNQESATKVSDLLDKIGHAYGNTSQNKVVDVSLNNWGQIEIKNLTPGSENLDFHLISSDGDFDDLDALRSSGKRVTEYVKSAFVTDRSLSQVKAVPNMYNPKVLEIPSVFVTKDNVLANKNTKLSEIFGDKVETLKINASRLGDESAIKIPNLPINLDIPILLDVKNSTIKDLKDAIKERFNNEGGCGN

SEQ ID NO: 4822 - protein, 828 aa, Helicobacter pylori
  misc_feature (B) LOCATION 1...828
  hypothetical: YES
MRVTFGSKYNQMNHYQNALQNKINDANTQIASGLKIRYGYQNSDINNQNLKFQYEENTLDQGIDVAQNAYTSTLNTDKALQEFSKTMEAFKTKLIQSANDVHSETSRAAIANDLERLKEHMINVANTSIGGEFLFGGSKVDRPPIDSNGKYHGNGEDLNALISSDNLVPYNISGQDLFLGTDKDKHKLITTNIKLLNQNKLHPDVMDALEHSSLPEEVFIKPSDTLRELIGDNDKNPTNDPKEFFYLQGIRPDGSSFKEKFALDKAYQNQESATKVSDLLDKIGHAYGNTSQNKVVDVSLNNWGQIEIKNLTPGSENLDFHLISSDGDFDDLDALRSSGKRVTEYVKSAFVTDRSLSQVKAVPNMYNPKVLEIPSVFVTKDNVLANKNTKLSEIFGDKVETLKINASRLGDESAIKIPNLPINLDIPILLDVKNSTIKDLKDAIKERFNNEVDVEIETNGRLRIIDNSSKESPISFALSTLDQKGLEVAGIPTNNASEYQKTYFNKEGAKLESNVAQTAQNDAANGSTKLSEVSKGSLENSVFNMKLNDVNGSFLEAQINLDNNGAFLSLPNGVKIPLYDPTTADIQASKPNEVTYRQLMDAMSIALNYSNTDPAIYQQISDNPTSKESKERFIELLKQAKDNLSINLNEEGKVIIQDNMHSNTKMQFMLFDKDANDFSQNALHSDKPSLKLNANNALIIDKPSVNFFDQLENIITSVRKGIYRPDALGDTYSSDMRNLGIQNGITLIDHLSDHIEKMIAKNGAHGKAFENIIRRNEVLKTQVQSIRGETTGTDMAETYNKFSNLTNNYNAVLASTNKINNLSLTKYL

SEQ ID NO: 4823 - protein, 879 aa, Helicobacter pylori
  misc_feature (B) LOCATION 1...879
  hypothetical: YES
IHIKRIFLLKNTPFNPPLFLHIAPLKPFMIIINLFWNTFSLFVKKTNKDLIMRVTFGSKYNQMNHYQNALQNKINDANTQIASGLKIRYGYQNSDINNQNLKFQYEENTLDQGIDVAQNAYTSTLNTDKALQEFSKTMEAFKTKLIQSANDVHSETSRAAIANDLERLKEHMINVANTSIGGEFLFGGSKVDRPPIDSNGKYHGNGEDLNALISSDNLVPYNISGQDLFLGTDKDKHKLITTNIKLLNQNKLHPDVMDALEHSSLPEEVFIKPSDTLRELIGDNDKNPTNDPKEFFYLQGIRPDGSSFKEKFALDKAYQNQESATKVSDLLDKIGHAYGNTSQNKVVDVSLNNWGQIEIKNLTPGSENLDFHLISSDGDFDDLDALRSSGKRVTEYVKSAFVTDRSLSQVKAVPNMYNPKVLEIPSVFVTKDNVLANKNTKLSEIFGDKVETLKINASRLGDESAIKIPNLPINLDIPILLDVKNSTIKDLKDAIKERFNNEVDVEIETNGRLRIIDNSSKESPISFALSTLDQKGLEVAGIPTNNASEYQKTYFNKEGAKLESNVAQTAQNDAANGSTKLSEVSKGSLENSVFNMKLNDVNGSFLEAQINLDNNGAFLSLPNGVKIPLYDPTTADIQASKPNEVTYRQLMDAMSIALNYSNTDPAIYQQISDNPTSKESKERFIELLKQAKDNLSINLNEEGKVIIQDNMHSNTKMQFMLFDKDANDFSQNALHSDKPSLKLNANNALIIDKPSVNFFDQLENIITSVRKGIYRPDALGDTYSSDMRNLGIQNGITLIDHLSDHIEKMIAKNGAHGKAFENIIRRNEVLKTQVQSIRGETTGTDMAETYNKFSNLTNNYNAVLASTNKINNLSLTKYL

SEQ ID NO: 4824 - protein, 803 aa, Helicobacter pylori
  misc_feature (B) LOCATION 1...803
  hypothetical: YES
LWLKSKFFLLMGVGLLSHSLNALSLTLTQGKEEGEDFSVLTLRNDKAFSCSYANEKPPSGIEASLSIIHAKRPIECVIDSIPKEGFTPLENAFFNITYSMRQQQFILHIKPKVMRRLTLFSFDRDYKKAIPLFVENDAKAKMWQIIGYDQKIPFLSEKDNAQKGLNFPIIIKDAQTPIIQELDVNNKPLLTTKGYDLNAYLEAKKQMDSQAYFDALRTISRAFKNYPQTIFKKDLYLLEIIALGKLGIKKSLLIDIGTQWIKNYPTDPNIPEALYYVAKALDENNNYKQAVRYYKRILLEYKNSRYAPLAQMRLAIEAAEGSDLSNANMLFKEAFSNAKDKESASEIALNWAEAEINYQNFNNAKYLIDKVVQSNPDYLSMHSELALELLKLLKKNQMNESAIEIAHLLLNQDDDLKAKEQALYDLGALYARIKDFKNAHLYNLQYLQDHAELERASVVRARDEKALFSMEGNTQEKIAHYDKIIQNFPNSNEAQKALELKAQLLFDNKHYAEVLGMQKNLPKDSPLIQKTLNILAKTPLEDHRCKEALKYLSQITAFAFNPQEEIQAFDCLYFASLKEKAQIIALNALKAAKTPSEKLTWLYRLGRNYYRLGDFKNSTLASKDALILAQSLNKKEFYDIAFVLFSDYMQNNEKGLALNLYAFLEKHFKDDKRMALVYFKLLENEKDPKSVKIYATSLLKLQDAYKDYSYTPFGEFALIDAYRTTKDYSKALETLDKLLNRRLSLEDHQKALYLQSSLLDLTNQKAKSKASLEKCVQLKQKDQTNAWQNLCEQGLNLFKNKES

SEQ ID NO: 4825 - protein, 804 aa, Helicobacter pylori
  misc_feature (B) LOCATION 1...804
  hypothetical: YES
SLWLKSKFFLLMGVGLLSHSLNALSLTLTQGKEEGEDFSVLTLRNDKAFSCSYANEKPPSGIEASLSIIHAKRPIECVIDSIPKEGFTPLENAFFNITYSMRQQQFILHIKPKVMRRLTLFSFDRDYKKAIPLFVENDAKAKMWQIIGYDQKIPFLSEKDNAQKGLNFPIIIKDAQTPIIQELDVNNKPLLTTKGYDLNAYLEAKKQMDSQAYFDALRTISRAFKNYPQTIFKKDLYLLEIIALGKLGIKKSLLIDIGTQWIKNYPTDPNIPEALYYVAKALDENNNYKQAVRYYKRILLEYKNSRYAPLAQMRLAIEAAEGSDLSNANMLFKEAFSNAKDKESASEIALNWAEAEINYQNFNNAKYLIDKVVQSNPDYLSMHSELALELLKLLKKNQMNESAIEIAHLLLNQDDDLKAKEQALYDLGALYARIKDFKNAHLYNLQYLQDHAELERASVVRARDEKALFSMEGNTQEKIAHYDKIIQNFPNSNEAQKALELKAQLLFDNKHYAEVLGMQKNLPKDSPLIQKTLNILAKTPLEDHRCKEALKYLSQITAFAFNPQEEIQAFDCLYFASLKEKAQIIALNALKAAKTPSEKLTWLYRLGRNYYRLGDFKNSTLASKDALILAQSLNKKEFYDIAFVLFSDYMQNNEKGLALNLYAFLEKHFKDDKRMALVYFKLLENEKDPKSVKIYATSLLKLQDAYKDYSYTPFGEFALIDAYRTTKDYSKALETLDKLLNRRLSLEDHQKALYLQSSLLDLTNQKAKSKASLEKCVQLKQKDQTNAWQNLCEQGLNLFKNKES

SEQ ID NO: 4826 - protein, 47 aa, Helicobacter pylori
  misc_feature (B) LOCATION 1...47
  hypothetical: YES
SFQTPKDYTLTKLHEKGQKVAPDFEYSSHTNNQWVETDYLFKLLLIF

SEQ ID NO: 4827 - protein, 56 aa, Helicobacter pylori
  misc_feature (B) LOCATION 1...56
  hypothetical: YES
ARTTLRPFSTQFGVVRYGNVVGSRGSVVPFFKKLVQNKASEIPLPIFAYTILDHLR

SEQ ID NO: 4828 - protein, 57 aa, Helicobacter pylori
  misc_feature (B) LOCATION 1...57
  hypothetical: YES
INACLKNEISQVIALSTDKAANPINLYGATKLCSDKLFVSANNFKALLNAIWRGALW

SEQ ID NO: 4829 - protein, 75 aa, Helicobacter pylori
  misc_feature (B) LOCATION 1...75
  hypothetical: YES
SKTKRVKFPYRYSHTRFWITLDEGVSFVLKSLKRMHGGEIFVPKIPSMKMIDLAKALAPNIPTKIIGIRPGRKTP

SEQ ID NO: 4830 - protein, 287 aa, Helicobacter pylori
  misc_feature (B) LOCATION 1...287
  hypothetical: YES
LKQSEMAMEFNDPRMRFFIGDVRDLERLNYALEGVDICIHAAALKHVPIAEYNPLECIKTNIMGASNVINACLKNEISQVIALSTDKAANPINLYGATKLCSDKLFVSANNFKGPSQTQFGVVRYGNVVGSRGSVVPFFKKLVQNKASEIPITDIRMTRFWITLDEGVSFVLKSLKRMHGGEIFVPKIPSMKMIDLAKALAPNIPTKIIGIRPGEKLHEVMIPKDESHLALEFEDFFIIQPTISFQTPKDYTLTKLHEKGQKVAPDFEYSSHTNNQWLEPDDLLKLL

SEQ ID NO: 4831 - protein, 115 aa, Helicobacter pylori
  misc_feature (B) LOCATION 1...115
  hypothetical: YES
AFTAIGFGESQLSETTVFFFFFFGNPNANVRSTLGANYNAVFASGNQSLGSGVTTLRGAMVVIDIAESAMKMLDKVRSDLGSVQNQMISTVDNISITQVNVKAAESQKSGMWEFR

SEQ ID NO: 4832 - protein, 148 aa, Helicobacter pylori
  misc_feature (B) LOCATION 1...148
  hypothetical: YES
QGVTTMAFQVNTNINAMNAHVQSALTQNALKTSLERLSSGLRINKAADDASGMTVADSLRSQASSLGQAIPNTNDGMGIIQVADKAMDEQLKILDTVKVKATQAAQDGQTTESRKAIQSDIVRLIQGLDNIGNTTTYNGPSVIVWSIH

SEQ ID NO: 4833 - protein, 248 aa, Helicobacter pylori
  misc_feature (B) LOCATION 1...248
  hypothetical: YES
FKVWIISVTQRLITGQALLSGQFTNKEFQVGAYSNQSIKASIGSTTSDKIGQVRIATGALITASGDISLTFKQVDGVNDVTLESVKVSSSAGTGIGVLAEVINKNSNRTGVKAYASVITTSDVAVQSGSLSNLTLNGIHLGNIADIKKNDSDGRLVTAINAVTSETGVEAYTDQKGRLNLRSIDGRGIEIKIDSVSNGPSALTKRWSKSGQDETKGSTNYGRYSRTRLDVRASMSIRYLNHACLLQSY

SEQ ID NO: 4834 - protein, 303 aa, Helicobacter pylori
  misc_feature (B) LOCATION 1...303
  hypothetical: YES
MAFQVNTNINAMNAHVQSALTQNALKTSLERLSSGLRINKAADDASGMTVADSLRSQASSLGQAIANTNDGMGIIQVADKAMDEQLKILDTVKVKATQAAQDGQTTESRKAIQSDIVRLIQGLDNIGNTTTYNGQALLSGQFTNKEFQVGAYSNQSIKASIGSTTSDKIGQVRIATGALITASGDISLTFKQVDGVNDVTLESVKVSSSAGTGIGVLAEVINKNSNRTGVKAYASVITTSDVAVQSGSLSNLTLNGIHLGNIADIKXNDSDGRLVTAINAVTSETGVXAYTDQKGRLNLRSIG

SEQ ID NO: 4835 - protein, 510 aa, Helicobacter pylori
  misc_feature (B) LOCATION 1...510
  hypothetical: YES
MAFQVNTNINAMNAHVQSALTQNALKTSLERLSSGLRINKAADDASGMTVADSLRSQASSLGQAIANTNDGMGIIQVADKAMDEQLKILDTVKVKATQAAQDGQTTESRKAIQSDIVRLIQGLDNIGNTTTYNGQALLSGQFTNKEFQVGAYSNQSIKASIGSTTSDKIGQVRIATGALITASGDISLTFKQVDGVNDVTLESVKVSSSAGTGIGVLAEVINKNSNRTGVKAYASVITTSDVAVQSGSLSNLTLNGIHLGNIADIKKNDSDGRLVAAINAVTSETGVEAYTDQKGRLNLRSIDGRGIEIKTDSVSNGPSALTMVNGGQDLTKGSTNYGRLSLTRLDAKSINVVSASDSQHLGFTAIGFGESQVAETTVNLRDVTGNFNANVKSASGANYNAVIASGNQSLGSGVTTLRGAMVVIDIAESAMKMLDKVRSDLGSVQNQMISTVNNISITQVNVKAAESQIRDVDFAEESANFNKNNILAQSGSYAMSQANTVQQNILRLLT

SEQ ID NO: 4836 - protein, 196 aa, Helicobacter pylori
  misc_feature (B) LOCATION 1...196
  hypothetical: YES
VIKRYLHARGIISGCLDELFVGTCASVSSQIKITRGVIVNVSSSFSMGLTMASAYDPISGSQKPIVGQALLLLAILILLDLSFHHQIILFVDHSLKAVPLGRFVFEPELAKNIVKAFSHLFVIGFSMAFPILCLVLLSDIIFGMIMKTHPQFNLLAIGFPVKIAIGFVGIILIASAIMGRFKEEISLAFSVISKIF

SEQ ID NO: 4837 - protein, 255 aa, Helicobacter pylori
  misc_feature (B) LOCATION 1...255
  hypothetical: YES
MLDFIQELSTPHVRDFFLLFLRVSGVLSFFPFFENHLVPLSVRGALSLYVSAIFYPTLEFSNAIYTPEGFIIACLCELFLGVCASVFLQIVFASLVFATDSISFSMGLTMASAYDPISGSQKPIVGQALLLLAILILLDLSFHHQIILFVDHSLKAVPLGRFVFEPELAKNIVKAFSHLFVIGFSMAFPILCLVLLSDIIFGMIMKTHPQFNLLAIGFPVKIAIGFVGIILIASAIMGRFKEEISLAFSVISKIF

SEQ ID NO: 4838 - protein, 67 aa, Helicobacter pylori
  misc_feature (B) LOCATION 1...67
  hypothetical: YES
AVTAILGWDEEGKLKFGKIRHKYLETSNVNAGNALTNLILMQRGYSMNARAFGAGDDMIKEAISLKK

SEQ ID NO: 4839 - protein, 124 aa, Helicobacter pylori
  misc_feature (B) LOCATION 1...124
  hypothetical: YES
MRIEENGVISLAFSNGVVEPVARIGIXAFTNDQGLRKIGGNLYEMQEGTINGENRPLXGNPILGWDEEGKLKFGKIRHKYLETSNVNAGNALTNLILMQRGYSMNARAFGAGDDMIKEAISLKK

SEQ ID NO: 4840 - protein, 152 aa, Helicobacter pylori
  misc_feature (B) LOCATION 1...152
  hypothetical: YES
MILAICSYQDSKLLEASQDGKPRGIFRDMRIEENGVISLAFSNGVVEPVARIGILAFTNDQGLRKIGGNLYEMQEGTINGENRPLSGNPILGWDEEGKLKFGKIRHKYLETSNVNAGNALTNLILMQRGYSMNARAFGAGDDMIKEAISLKK

SEQ ID NO: 4841 - protein, 186 aa, Helicobacter pylori
  misc_feature (B) LOCATION 1...186
  hypothetical: YES
KLHRGSQKQNPINDPTWEIVGFDSATHKMKSAPMTLDFKGNKLTYSLDKSENMILTKLFYQDSKLLKTSQERKPRGIFRDMRIEENGVISLAFSNGVVEPVARIGILAFTNDQGLRKIGGNLYEMQEGTINGENRPLSGNRHFRVGRRGQAQVWENQAQIFRNEQRECRERPNQSHFNAKRLFYER

SEQ ID NO: 4842 - protein, 288 aa, Helicobacter pylori
  misc_feature (B) LOCATION 1...288
  hypothetical: YES
IRQMSYLGYRSNDPEFKTLFSSHLDALNAKSVVANDRNYGVTGSGNVLSNKDGEYMPSEGEFHMAYQGKGWFVIGPNKNGEMTINKDGFSKKQDNFLTRAGNFARDADGYLVTPEGYYVYGIDLKKIKDGTLNSTARDEDIEKLHGNTLSPLQIPQDLTYQPVLSTKVNISVNLNPKDHLKGVQDFFLNDKGEIIKERFLNQDINALANDDNEPIDAITNRKLNVSIQKENGKKEDFVFTYGDAEKGENQFKTLGDLQKLLKEKTGLDLNLIKSEKDGQKPPPFIRDR

SEQ ID NO: 4843 - protein, 287 aa, Helicobacter pylori
  misc_feature (B) LOCATION 1...287
  hypothetical: YES
RQMSYLGYRSNDPEFKTLFSSHLDALNAKSVVANDRNYGVTGSGNVLSNKDGEYMPSEGEFHMAYQGKGWFVIGPNKNGEMTINKDGFSKKQDNFLTRAGNFARDADGYLVTPEGYYVYGIDLKKIKDGTLNSTARDEDIEKLHGNTLSPLQIPQDLTYQPVLSTKVNISVNLNPKDHLKGVQDFFLNDKGEIIKERFLNQDINALANDDNEPIDAITNRKLNVSIQKENGKKEDFVFTYGDAEKGENQFKTLGDLQKLLKEKTGLDLNLIKSEKDGQKPPPFIRDR

SEQ ID NO: 4844 - protein, 464 aa, Helicobacter pylori
  misc_feature (B) LOCATION 1...464
  hypothetical: YES
MNDTLLNAYSGIKTHQFGIDSLSNNIANVNTLGYRSNDPEFKTLFSSHLDALNAKSVVANDRNYGVTGSGNVLSNKDGEYMPSEGEFHMAYQGKGWFVIGPNKNGEMTINKDGFSKKQDNFLTRAGNFARDADGYLVTPEGYYVYGIDLKKIKDGTLNSTARDEDIEKLHGNTLSPLQIPQDLTYQPVLSTKVNISVNLNPKDHLKGVQDFFLNDKGEIIKERFLNQDINALANDDNEPIDAITNRKLNVSIQKENGKKEDFVFTYGDAEKGENQFKTLGDLQKLLKEKTGLDLNLIKSEKDAKSPPLLLEIANPSETPIAFSLSGGIADKLGLNANQMELKKGISRDSVAIKIPYYSTEVDIYDKAGDKYLLQSEYYMTNSNDPTSSPTSKRKNQTWEVKSYIVDPKNKTPINDPTWEIVGFDSATHKMKSAPMTLDFKGNKLTYSLDKSENHDSSDLFLPRL

SEQ ID NO: 4845 - protein, 237 aa, Helicobacter pylori
  misc_feature (B) LOCATION 1...237
  hypothetical: YES
MKKALYLGAVAFGVVFSMASANEPNIDFNPPNYVEETPSKEFIPELNKLGSLFGQGERPLFADRRAMKPNDLITIVVSEKASANYSSSKDYKSASGGNSTPPRLTYNGLDERKKKEAEYLDDKNNYNFTKSSNNTNFKGGGSQKKSEDLEIVLSARIIKVLENGNYFIYGNKEVLVDGEKQILKVSGVIRPYDIERNNTIQSKFLADAKIEYTNLGHLSDSNKKKFAADAMETQMPY

SEQ ID NO: 4846 - protein, 238 aa, Helicobacter pylori
  misc_feature (B) LOCATION 1...238
  hypothetical: YES
WMKKALYLGAVAFGVVFSMASANEPNIDFNPPNYVEETPSKEFIPELNKLGSLFGQGERPLFADRRAMKPNDLITIVVSEKASANYSSSKDYKSASGGNSTPPRLTYNGLDERKKKEAEYLDDKNNYNFTKSSNNTNFKGGGSQKKSEDLEIVLSARIIKVLENGNYFIYGNKEVLVDGEKQILKVSGVIRPYDIERNNTIQSKFLADAKIEYTNLGHLSDSNKKKFAADAMETQMPY

SEQ ID NO: 4847 - protein, 213 aa, Helicobacter pylori
  misc_feature (B) LOCATION 1...213
  hypothetical: YES
VYEERITLASQGIPKTSKVGFEIFDTKDFGATDFDQNIKLIRAIEGELSRTIESLNPILKANVHIAIPKDSVFVAKEVPPSASVMLKLKPDMKLSPTQILGIKNLIAAAVPKLTIENVKIVNENGESIGEGDILENSKELALEQLRYKQNFENILENKIVNILAPIVGXKNXVVXXVNXEFXFXQKKSTKETFDPNNVGKERAKFRRKKRRRS

SEQ ID NO: 4848 - protein, 567 aa, Helicobacter pylori
  misc_feature (B) LOCATION 1...567
  hypothetical: YES
LDLKVLLQRIVDFFIKLNKKQKIALIAAGVLITALLVFLLLYPFKEKDYAQGGYGVLFERLDSSDNALILQHLQQNQIPYKVLKDDTILVPKDKVYEERITLASQGIPKTSKVGFEIFDTKDFGATDFDQNIKLIRAIEGELSRTIESLNPILKANVHIAIPKDSVFVAKEVPPSASVMLKLKPDMKLSPTQILGIKNLIAAAVPKLTIENVKIVNENGESIGEGDILENSKELALEQLRYKQNFENILENKIVNILAPIVGGKNKVVARVNAEFDFSQKKSTKETFDPNNVVRSEQNLEEKKEGAPKKQVGGVPGVVSNIGPVQGLKDNKEPEKYEKSQNTTNYEVGKTISEIKGEFGTLVRLNAAVVVDGKYKIALEDGANALEYEPLSDESLKKINALVKQAIGYNQNRGDDVAVSNFEFNPMAPMIDNATLSEKIMHKTQKILGSFTPLIKYILVFIVLFIFYKKVIVPFSERMLEVVPDEDKEVKSMFEEMDEEEDELNKLGDLRKKVEDQLGLNASFSEEEVRYEIILEKIRGTLKERPDEIATLFKLLIKDEISSDSAKG

SEQ ID NO: 4849 - protein, 577 aa, Helicobacter pylori
  misc_feature (B) LOCATION 1...577
  hypothetical: YES
KNENFIKVLILDLKVLLQRIVDFFIKLNKKQKIALIAAGVLITALLVFLLLYPFKEKDYAQGGYGVLFERLDSSDNALILQHLQQNQIPYKVLKDDTILVPKDKVYEERITLASQGIPKTSKVGFEIFDTKDFGATDFDQNIKLIRAIEGELSRTIESLNPILKANVHIAIPKDSVFVAKEVPPSASVMLKLKPDMKLSPTQILGIKNLIAAAVPKLTIENVKIVNENGESIGEGDILENSKELALEQLRYKQNFENILENKIVNILAPIVGGKNKVVARVNAEFDFSQKKSTKETFDPNNVVRSEQNLEEKKEGAPKKQVGGVPGVVSNIGPVQGLKDNKEPEKYEKSQNTTNYEVGKTIIEIKGEFGTLMRLNAAVVVDGKYKIALEDGANALEYEPLSDESLKKINALVKQAIGDNQNRGDDVAVSNFEFNPMAPMIDNATLSEKIMHKTQKILGSFTPLIKYILVFIVLFIFYKKVIVPFSERMLEVVPDEDKEVKSMFEEMDEEEDELNKLGDLRKKVEDQLGLNASFSEEEVRYEIILEKIRGTLKERPDEIATLFKLLIKDEISSDSAKG

SEQ ID NO: 4850 - protein, 71 aa, Helicobacter pylori
  misc_feature (B) LOCATION 1...71
  hypothetical: YES
KWGIKKDWSLALPSTQDLTDKFLNNMSSRAAEQFVEEMQYLGAVKIKDVDVAQRKIIESCRASRKRRDPNR

SEQ ID NO: 4851 - protein, 80 aa, Helicobacter pylori
  misc_feature (B) LOCATION 1...80
  hypothetical: YES
VMDKLTKSLQTQKNFAYLGKIKPQQLADFIINEHPQTIALILAHMEXPNAAETLSYFPDEMKAEISIRMANFRRNIAPSG

SEQ ID NO: 4852 - protein, 276 aa, Helicobacter pylori
  misc_feature (B) LOCATION 1...276
  hypothetical: YES
RLKMATKLTPKQKAQLDELSMSEKIAILLIQVGEDTTGEILRHLDIDSITEISKQIVQLNGTDKQIGAAVLEEFFAIFQSNQYINTGGLEYARELLTRTLGSEEARKVMDKLTKSLQTQKNFAYLGKIKPQQLADFIINEHPQTIALILAHMEAPNAAETLSYFPDEMKAEISIRMANLGEISPQVVKRVSTVLENKLESLTSYKIEVGGLRAVAEIFNRLGQKSAKTTLARIESVDNKLAGAIKEMMFTFEDIAKLDNFAIMRDFKSGGLKKTGL

SEQ ID NO: 4853 - protein, 343 aa, Helicobacter pylori
  misc_feature (B) LOCATION 1...343
  hypothetical: YES
MATKLTPKQKAQLDELSMSEKIAILLIQVGEDTTGEILRHLDIDSITEISKQIVQLNGTDKQIGAAVLEEFFAIFQSNQYINTGGLEYARELLTRTLGSEEARKVMDKLTKSLQTQKNFAYLGKIKPQQLADFIINEHPQTIALILAHMEAPNAAETLSYFPDEMKAEISIRMANLGEISPQVVKRVSTVLENKLESLTSYKIEVGGLRAVAEIFNRLGQKSAKTTLARIESVDNKLAGAIKEMMFTFEDIAKLDNFAIREILKVADKKDLSLALKTSTQDLTDKFLNNMSSRAAEQFVEEMQYLGAVKIKDVDVAQRKIIEIVQSLQEKGVIQTGEEEDVIE

SEQ ID NO: 4854 - protein, 79 aa, Helicobacter pylori
  misc_feature (B) LOCATION 1...79
  hypothetical: YES
TTLSKSLTLTPMTIKTTTPKTILMNYFTASFNNETKKFVIQPKNASQGLFVSMKDNGTNFMGALKLNPFFQGDDASNIS

SEQ ID NO: 4855 - protein, 83 aa, Helicobacter pylori
  misc_feature (B) LOCATION 1...83
  hypothetical: YES
SRSEYLYPNNPPDFERVQHVGSFSESAARGILSSLNTSYTGLQAHQSMVDVTGNNISNASDEFYSRQRVIASPKQPICMALKT

SEQ ID NO: 4856 - protein, 82 aa, Helicobacter pylori
  misc_feature (B) LOCATION 1...82
  hypothetical: YES
RSEYLYPNNPPDFERVQHVGSFSESAARGILSSLNTSYTGLQAHQSMVDVTGNNISNASDEFYSRQRVIASPKQPICMALKT

SEQ ID NO: 4857 - protein, 136 aa, Helicobacter pylori
  misc_feature (B) LOCATION 1...136
  hypothetical: YES
RFQYQLNKEYKKEPTAIRPWLAPINGNFDVANMMQQLQYDSVDFYNDKFDIKPMKISEFYQFLTGKINTDAEKSGRILDTKQSMLETIKKEQLSISQVSVDEEMVNLIKFQSGYAANAKVITAIDRMIDTLLGIKQ

SEQ ID NO: 4858 - protein, 369 aa, Helicobacter pylori
  misc_feature (B) LOCATION 1...369
  hypothetical: YES
IWRGCGSHDRVHDEFVFARYTKANYENTYYDTEFSHLKEASAYFPDIDEASLFTDLQDYFNSWKELSKNAKDSAQKQALAQKTEALTHNIKDTRERLTTLQHKASEELKSVIKEVNSLGSQIAEINKRIKEVENNKSLKHANELRDKRDELEFHLRELLGGNVFKSSIKTHSLTDKDSADFDESYNLNIGHGFNIIDGSIFHPLVVKESENKGGLNQVYFQSDDFKLTNITDKLNQGKVGALLNVYNDGSNGTLKGKLQDYIDLLDSFARGLIESTNAIYAQSASHHIEGEPVEFNSDEAFKDTNYNIKNGSFDLIAYNTDGKEIARKTIAITPITTMNDIIQVINANTDDNQDNNTENDFDELFHSEL

SEQ ID NO: 4859 - protein, 606 aa, Helicobacter pylori
  misc_feature (B) LOCATION 1...606
  hypothetical: YES
MGGILSSLNTSYTGLQAHQSMVDVTGNNISNASDEFYSRQRVIAKPQAAYMYGTKNVNMGVDVEAIERVHDEFVFARYTKANYENTYYDTEFSHLKEASAYFPDIDEASLFTDLQDYFNSWKELSKNAKDSAQKQALAQKTEALTHNIKDTRERLTTLQHKASEELKSVIKEVNSLGSQIAEINKRIKEVENNKSLKHANELRDKRDELEFHLRELLGGNVFKSSIKTHSLTDKDSADFDESYNLNIGHGFNIIDGSIFHPLVVKESENKGGLNQVYFQSDDFKLTNITDKLNQGKVGALLNVYNDGSNGTLKGKLQDYIDLLDSFARGLIESTNAIYAQSASHHIEGEPVEFNSDEAFKDTNYNIKNGSFDLIAYNTDGKEIARKTIAITPITTMNDIIQAINANTDDNQDNNTENDFDDYFTASFNNETKKFVIQPKNASQGLFVSMKDNGTNFMGALKLNPFFQGDDASNISLNKEYKKEPTAIRPWLAPINGNFDVANMMQQLQYDSVDFYNDKFDIKPMKISEFYQFLTGKINTDAEKSGRILDTKQSMLETIKKEQLSISQVSVDEEMVNLIKFQSGYAANAKVITAIDRMIDTLLGIKQ

SEQ ID NO: 4860 - protein, 104 aa, Helicobacter pylori
  misc_feature (B) LOCATION 1...104
  hypothetical: YES
VLDLSTILGLVLAVASISLGDILEDGNPLHIIHLSSVIIIVPTSLFAAMTGTHARYVKAAYKEIKIVFLNPIINLNQTIKNLVELATLTKKTSGVYYTRATGPN

SEQ ID NO: 4861 - protein, 257 aa, Helicobacter pylori
  misc_feature (B) LOCATION 1...257
  hypothetical: YES
LDLSTILGLVLAVASISLGDILEDGNPLHIIHLSSVIIIVPTSLFAAMTGTHARYVKAAYKEIKIVFLNPKINLNETIKNLVELATLARKDGVLSLEGRVAQIEDDFTRNGLSMIIDGKNLKSVKESLEISIEEMEEYYHGAAHYWETAGETAPTMGLVGAVMGLMLALQKLDNPAEMAAGIAGAFTATVTGIMCSYAIFGPFGHKLKAKSKDIIKEKTVLLEGILGIANGENPRDLENKLLNYIAPGEPKKSQFEG

SEQ ID NO: 4862 - protein, 231 aa, Helicobacter pylori
  misc_feature (B) LOCATION 1...231
  hypothetical: YES
VARAFIALYAISAVNKSKVEALKTEFIKIFNYAPKPEAMQPVVVIPPDSGKEEEQMASESSKPASQNTETKATIARKGEGSVLEQIDQGSVLKLPSSLLFENATSDAINQDMMLYIERIAKIIQKLPKRVHINVRGFTDNTPLNKTRFKSHYELAANRAYRVMKVLIQYGVDPNQLSFSSYGSTNPIAPNDSLENRMKNNRVEIFFSTDANDLSKIHSILDEEFNPHKQQE

SEQ ID NO: 4863 - protein, 230 aa, Helicobacter pylori
  misc_feature (B) LOCATION 1...230
  hypothetical: YES
ARAFIALYAISAVNKSKVEALKTEFIKIFNYAPKPEAMQPVVVIPPDSGKEEEQMASESSKPASQNTETKATIARKGEGSVLEQIDQGSVLKLPSSLLFENATSDAINQDMMLYIERIAKIIQKLPKRVHINVRGFTDNTPLNKTRFKSHYELAANRAYRVMKVLIQYGVDPNQLSFSSYGSTNPIAPNDSLENRMKNNRVEIFFSTDANDLSKIHSILDEEFNPHKQQE

SEQ ID NO: 4864 - protein, 257 aa, Helicobacter pylori
  misc_feature (B) LOCATION 1...257
  hypothetical: YES
MAKKNKPTECPAGEKWAVPYADFLSLLLALFIALYAISAVNKSKVEALKTEFIKIFNYAPKPEAMQPVVVIPPDSGKEEEQMASESSKPASQNTETKATIARKGEGSVLEQIDQGSVLKLPSSLLFENATSDAINQDMMLYIERIAKIIQKLPKRVHINVRGFTDNTPLNKTRFKSHYELAANRAYRVMKVLIQYGVDPNQLSFSSYGSTNPIAPNDSLENRMKNNRVEIFFSTDANDLSKIHSILDEEFNPHKQQE

SEQ ID NO: 4865 - protein, 78 aa, Helicobacter pylori
  misc_feature (B) LOCATION 1...78
  hypothetical: YES
LPLAHTNPRHLDFENSTKNGASLFFRDGHLAKNDGNSVDLDIETSEMGKNSTMYLALSSALKKYRGMINYAIDSSKNL

SEQ ID NO: 4866 - protein, 53 aa, Helicobacter pylori
  misc_feature (B) LOCATION 1...53
  hypothetical: YES
VVLPKETLSSIAKRYQVSISSIQLANNLKDSNIFIHQRLIIPTNKKLLATREF

SEQ ID NO: 4867 - protein, 60 aa, Helicobacter pylori
  misc_feature (B) LOCATION 1...60
  hypothetical: YES
RNTRVYPLHSKPGVEIQQPRQSQDKEYLLNRGARVSLVGVPFKRHTSLVQVAKNLNLSLE

SEQ ID NO: 4868 - protein, 80 aa, Helicobacter pylori
  misc_feature (B) LOCATION 1...80
  hypothetical: YES
KLALFKQRQLKQNKNAQANPKSPFITHVVLPKETLSSIAKRYQVSISSIQLANNLKDSNIFIHQRLIIPTNKKLLATREF

SEQ ID NO: 4869 - protein, 198 aa, Helicobacter pylori
  misc_feature (B) LOCATION 1...198
  hypothetical: YES
DMMPKRMKCFSQKWLVFFVTHWLLLASLSHAKMAFESNIDTKALEAFGVNASFLSQMPGALKKVNKEEEWKKLVKRFDVNYQFIPIIKNMLIGASVPQEFLFLAMAESKFSSRAYSRKKAVGIWQFMPSTAKELGLKVNHYIDERRDPIKSTQAAIAYLKRLYKQTGEWYLVAMAYNYGLRKVQNAIKPPALQTLKSC

SEQ ID NO: 4870 - protein, 293 aa, Helicobacter pylori
  misc_feature (B) LOCATION 1...293
  hypothetical: YES
MPKRMKCFSQKWLVFFVTHWLLLASLSHAKMAFESNIDTKALEAFGVNASFLSQMPGALKKVNKEEEWKKLVKRFDVNYQFIPIIKNMLIGASVPQEFLFLAMAESKFSSRAYSRKKAVGIWQFMPSTAKELGLKVNHYIDERRDPIKSTQAAIAYLKRLYKQTGEWYLVAMAYNYGLRKVQNAIKAAGTSDIKVLLDEDKKYLPKETREYIRSILSLALKFNSLDNLKDKEYLLNRGARVSLVGVPFKRHTSLVQVAKNLNLSLETLKSYNHQFRYNILPSKDPTYTTLYPL

SEQ ID NO: 4871 - protein, 374 aa, Helicobacter pylori
  misc_feature (B) LOCATION 1...374
  hypothetical: YES
MPKRMKCFSQKWLVFFVTHWLLLASLSHAKMAFESNIDTKALEAFGVNASFLSQMPGALKKVNKEEEWKKLVKRFDVNYQFIPIIKNMLIGASVPQEFLFLAMAESKFSSRAYSRKKAVGIWQFMPSTAKELGLKVNHYIDERRDPIKSTQAAIAYLKRLYKQTGEWYLVAMAYNYGLRKVQNAIKAAGTSDIKVLLDEDKKYLPKETREYIRSILSLALKFNSLDNLKDKEYLLNRGARVSLVGVPFKRHTSLVQVAKNLNLSLETLKSYNHQFRYNILPSKDPTYTIYIPYEKLALFKQRQLKQNKNAQANPKSPFITHVVLPKETLSSIAKRYQVSISSIQLANNLKDSNIFIHQRLIIPTNKKLLATREF

SEQ ID NO: 4872 - protein, 84 aa, Helicobacter pylori
  misc_feature (B) LOCATION 1...84
  hypothetical: YES
LIKEAMIPVFGSETGIYNHKEQNFKGKGRFILTSKDSKVEGLDISYSHALAIIEAQSIQANLFLDEIKQSQKEKKKFPTFKGGF

SEQ ID NO: 4873 - protein, 116 aa, Helicobacter pylori
  misc_feature (B) LOCATION 1...116
  hypothetical: YES
KACKMKCSSFTSNSVLNFFVVLSFITIGLVFFFLRSQPTSVVSKENIPKIELENFKAFQINDKILDLSIEGKKALQYDDHEIFFDSKIKRYDEDTIESVESPEAKRQQDLYFFPNG

SEQ ID NO: 4874 - protein, 197 aa, Helicobacter pylori
  misc_feature (B) LOCATION 1...197
  hypothetical: YES
MKCSSFTSNSVLNFFVVLSFITIGLVFFFLRSQPTSVVSKENIPKIELENFKAFQINDKILDLSIEGKKALQYDDHEIFFDSKIKRYDEDTIESVESPEAKRQQDLYFFPNGVTYKRSDDSSFWSETGIYNHKEQNFKGKGRFILTSKDSKVEGLDISYSHALAIIEAQSIQANLFLDEIKQSQKEKKKFPTFKGGF

SEQ ID NO: 4875 - protein, 52 aa, Helicobacter pylori
  misc_feature (B) LOCATION 1...52
  hypothetical: YES
LGLVXGISLLHLSLEQKISVFLGXNLMLYPVXEVLFSILRRKIKRQKATHAG

SEQ ID NO: 4876 - protein, 142 aa, Helicobacter pylori
  misc_feature (B) LOCATION 1...142
  hypothetical: YES
VLWVLYFLTSLFICSLIVLWSKKSMLFVDNANKIQGFHHARTPRAGGLGIFLSFALACYLEPFEMPFKGPFVFLGLSLVFLSGFLEDINLSLSPKIRLILQAVGVVCIISSTPLVVSDFSPLFSLPYFIAFLFAIFYAGGYQ

SEQ ID NO: 4877 - protein, 163 aa, Helicobacter pylori
  misc_feature (B) LOCATION 1...163
  hypothetical: YES
QFVLFARLHGAWVYGVKFPFRKDFLGDGGAYFLGLVCGISLLHLSLEQKISVFFGLNLMLYPVIEVLFSILRRKIKRQKATMPDNLHLHTLLFKFLQQRSFNYPNPLCAFILILCNLPFILISVLFRLDAYALIVISLVFIACYLIGYAYLNRQVCALEKRAF

SEQ ID NO: 4878 - protein, 197 aa, Helicobacter pylori
  misc_feature (B) LOCATION 1...197
  hypothetical: YES
KVLWVLYFLTSLFICSLIVLWSKKSMLFVDNANKIQGFHHARTPRAGGLGIFLSFALACYLEPFEMPFKGPFVFLGLSLVFLSGFLEDINLSLSPKIRLILQAVGVVCIISSTPLVVSDFSPLFSLPYFIAFLFAIFMLVGISNAINIIDGFNGLASGICAIALLVIHYIDPSSLSCLLAYMVLGFMVLNFPSGKIF

SEQ ID NO: 4879 - protein, 332 aa, Helicobacter pylori
  misc_feature (B) LOCATION 1...332
  hypothetical: YES
VLYFLTSLFICSLIVLWSKKSMLFVDNANKIQGFHHARTPRAGGLGIFLSFALACYLEPFEMPFKGPFVFLGLSLVFLSGFLEDINLSLSPKIRLILQAVGVVCIISSTPLVVSDFSPLFSLPYFIAFLFAIFMLVGISNAINIIDGFNGLASGICAIALLVIHYIDPSSLSCLLAYMVLGFMVLNFPSGKIFLGDGGAYFLGLVCGISLLHLSLEQKISVFFGLNLMLYPVIEVLFSILRRKIKRQKATMPDNLHLHTLLFKFLQQRSFNYPNPLCAFILILCNLPFILISVLFRLDAYALIVISLVFIACYLIGYAYLNRQVCALEKRAF

SEQ ID NO: 4880 - protein, 335 aa, Helicobacter pylori
  misc_feature (B) LOCATION 1...335
  hypothetical: YES
VLWVLYFLTSLFICSLIVLWSKKSMLFVDNANKIQGFHHARTPRAGGLGIFLSFALACYLEPFEMPFKGPFVFLGLSLVFLSGFLEDINLSLSPKIRLILQAVGVVCIISSTPLVVSDFSPLFSLPYFIAFLFAIFMLVGISNAINIIDGFNGLASGICAIALLVIHYIDPSSLSCLLAYMVLGFMVLNFPSGKIFLGDGGAYFLGLVCGISLLHLSLEQKISVFFGLNLMLYPVIEVLFSILRRKIKRQKATMPDNLHLHTLLFKFLQQRSFNYPNPLCAFILILCNLPFILISVLFRLDAYALIVISLVFIACYLIGYAYLNRQVCALEKRAF

SEQ ID NO: 4881 - protein, 73 aa, Helicobacter pylori
  misc_feature (B) LOCATION 1...73
  hypothetical: YES
VDGAIITGNYALQAKLTGALFSEDKDSPYANLVASREDNAQDEAIKALIEALQSEKTRKFILDTYKGAIIPAF

SEQ ID NO: 4882 - protein, 271 aa, Helicobacter pylori
  misc_feature (B) LOCATION 1...271
  hypothetical: YES
MNIFKRIICVTAIVLGFFNLLDAKHHKEKKEDHKITRELKVGANPVPHAQILQSVVDDLKEKGIKLVIVSFTDYVLPNLALNDGSLDANYFQHRPYLDRFNLDRKMHLVGLANIHVEPLRFYSQKITDIKNLKKGSVIAVPNDPANQGRALILLHKQGLIALKDPSNLYATEFDIVKNPYNIKIKPLEAALLPKVLGDVDGAIITGNYALQAKLTGALFSEDKDSPYANLVASREDNAQDEAIKALIEALQSEKTRKFILDTYKGAIIPAF

SEQ ID NO: 4883 - protein, 271 aa, Helicobacter pylori; identical to SEQ ID NO: 4882
  misc_feature (B) LOCATION 1...271
  hypothetical: YES

SEQ ID NO: 4884 - protein, 280 aa, Helicobacter pylori
  misc_feature (B) LOCATION 1...280
  hypothetical: YES
INFVNKGVFMNIFKRIICVTAIVLGFFNLLDAKHHKEKKEDHKITRELKVGANPVPHAQILQSVVDDLKEKGIKLVIVSFTDYVLPNLALNDGSLDANYFQHRPYLDRFNLDRKMHLVGLANIHVEPLRFYSQKITDIKNLKKGSVIAVPNDPANQGRALILLHKQGLIALKDPSNLYATEFDIVKNPYNIKIKPLEAALLPKVLGDVDGAIITGNYALQAKLTGALFSEDKDSPYANLVASREDNAQDEAIKALIEALQSEKTRKFILDTYKGAIIPAF

SEQ ID NO: 4885 - protein, 64 aa, Helicobacter pylori
  misc_feature (B) LOCATION 1...64
  hypothetical: YES
PNEASAAVNVGYKISKSLTASVKLEYLGVMTHSGFTVGSYRPTPGSKALYSDRSHLMTTLSAKV

SEQ ID NO: 4886 - protein, 146 aa, Helicobacter pylori
  misc_feature (B) LOCATION 1...146
  hypothetical: YES
VQAFDYKIEVLAESFSKVGFNKKKIDIARGIYPTETFVTAVGQGNIYADFLSKSLKDQGHVLEGKVGGTIGGIAYDSTKFNQGGSVIYNYIGYWDGYLGGKRALLDGTSIHECALGSDGKVIDSIACGNARANKIRRNYLMNTPFS

SEQ ID NO: 4887 - protein, 145 aa, Helicobacter pylori
  misc_feature (B) LOCATION 1...145
  hypothetical: YES
QAFDYKIEVLAESFSKVGFNKKKIDIARGIYPTETFVTAVGQGNIYADFLSKSLKDQGHVLEGKVGGTIGGIAYDSTKFNQGGSVIYNYIGYWDGYLGGKRALLDGTSIHECALGSDGKVIDSIACGNARANKIRRNYLMNTPFS

SEQ ID NO: 4888 - protein, 247 aa, Helicobacter pylori
  misc_feature (B) LOCATION 1...247
  hypothetical: YES
FRYKDIFAAKGGRYQSNAPYMSSYTQGFEISAKIKDKNEGSHKLWWFSSWGRAFAYGEWIYDFYSPRTVIKNGRTLNYGIHLVDYTYERKGVSVSPFFQFSPGTYYSPGVAVGYDSNPNFNGVGFRSETKAYILLPVHAPLKRDTYRYAVKAGTAGQSLLIRQRFDYNEFNFGGAFYKVWKNANAYIGTTGNPLGIDFWTNSVYDIGQALSHVVTADAVSGWVFGGGVHKKWLWGTLWRWTSGALAK

SEQ ID NO: 4889 - protein, 269 aa, Helicobacter pylori
  misc_feature (B) LOCATION 1...269
  hypothetical: YES
VLNTTQKSLLVFMGVFFLIFGVDQAIKHAILEGFHYESLVIDIVLVFNKGVAFSLLSFLEGGLKYLQILLILGLFIFLMRQKELFKSHAIEFGMVFGAGVSNVLNRLVSLGQLYILYDVLAIRREKMKNSAPLKNKVFCGLYVLSLSASVQAFDYKIEVLAESFSKVGFNKKKIDIARGIYPTETFVTAVGQGNIYADFLSKSLKDQGHVLEGKVGGTIGGIAYDSTKFNQGGSVIYNYIGYWDGYLGGTKACLMAQVSMTARLALMAR

SEQ ID NO: 4890 - protein, 479 aa, Helicobacter pylori
  misc_feature (B) LOCATION 1...479
  hypothetical: YES
MKNSAPLKNKVFCGLYVLSLSASVQAFDYKIEVLAESFSKVGFNKKKIDIARGIYPTETFVTAVGQGNIYADFLSKSLKDQGHVLEGKVGGTIGGIAYDSTKFNQGGSVIYNYIGYWDGYLGGKRALLDGTSIHECALGSDGKVIDSIACGNARANKIRRNYLMNNAFLEYRYKDIFAAKGGRYQSNAPYMSSYTQGFEISAKIKDKNEGSHKLWWFSSWGRAFAYGEWIYDFYSPRTVIKNGRTLNYGIHLVDYTYERKGVSVSPFFQFSPGTYYSPGVAVGYDSNPNFNGVGFRSETKAYILLPVHAPLKRDTYRYAVKAGTAGQSLLIRQRFDYNEFNFGGAFYKVWKNANAYIGTTGNPLGIDFWTNSVYDIGQALSHVVTADAVSGWVFGGGVHKKWLWGTLWRWTSGALANEASAAVNVGYKISKSLTASVKLEYLGVMTHSGFTVGSYRPTPGSKALYSDRSHLMTTLSAKF

SEQ ID NO: 4891 - protein, 486 aa, Helicobacter pylori
  misc_feature (B) LOCATION 1...486
  hypothetical: YES
LAIKREKMKNSAPLKNKVFCGLYVLSLSASVQAFDYKIEVLAESFSKVGFNKKKIDIARGIYPTETFVTAVGQGNIYADFLSKSLKDQGHVLEGKVGGTIGGIAYDSTKFNQGGSVIYNYIGYWDGYLGGKRALLDGTSIHECALGSDGKVIDSIACGNARANKIRRNYLMNNAFLEYRYKDIFAAKGGRYQSNAPYMSSYTQGFEISAKIKDKNEGSHKLWWFSSWGRAFAYGEWIYDFYSPRTVIKNGRTLNYGIHLVDYTYERKGVSVSPFFQFSPGTYYSPGVAVGYDSNPNFNGVGFRSETKAYILLPVHAPLKRDTYRYAVKAGTAGQSLLIRQRFDYNEFNFGGAFYKVWKNANAYIGTTGNPLGIDFWTNSVYDIGQALSHVVTADAVSGWVFGGGVHKKWLWGTLWRWTSGALANEASAAVNVGYKISKSLTASVKLEYLGVMTHSGFTVGSYRPTPGSKALYSDRSHLMTTLSAKF

SEQ ID NO: 4892 - protein, 85 aa, Helicobacter pylori
  misc_feature (B) LOCATION 1...85
  hypothetical: YES
SIVYGKNKLFSDEFYEKIEDILTNNNPRYKQVCIIFDADIKKENQESDAGFDNKLKHIREKFKEKGTDFPKEQIFYSLTIKMMAI

SEQ ID NO: 4893 - protein, 130 aa, Helicobacter pylori
  misc_feature (B) LOCATION 1...130
  hypothetical: YES
FSQRTNLLFPNNQDDGDLETLLLEIAKHDEFLKCFEGYLECIKSKEHYKPIKNIRKNMLYAYLEALGLENLTKTNIDVFDSKGKIKSRYEENYKKLTEEVIDFSSNSLIPLKNFLGQFAENKQKTNPKIF

SEQ ID NO: 4894 - protein, 167 aa, Helicobacter pylori
  misc_feature (B) LOCATION 1...167
  hypothetical: YES
VCIIFDADIKKENQESDAGFDNKLKHIREKFKEKGTDFPKEQIFLFPNNQDDGDLETLLLEIAKHDEFLKCFEGYLECIKSKEHYKPIKNIRKNMLYAYLEALGLENLTKTNIDVFDSKGKIKSRYEENYKKLTEEVIDFSSNSLIPLKNFLGQFAENKQKTNPKIF

SEQ ID NO: 4895 - protein, 158 aa, Helicobacter pylori
  misc_feature (B) LOCATION 1...158
  hypothetical: YES
LQYHREYFKLFVRLWLRFGYQTFRPSFFARLVKPNIIGRRIYIQYYGGAPKKAGFGSVGFQSVMLNGDFLLDFPLPFVGKYLYMGGYMGLGLGVVAHGVNYTAEWGMSFNAGLALTVLEKNRIEFEFKILNNFPFLQSNSSKETWWGAIASIGYQYVF

SEQ ID NO: 4896 - protein, 240 aa, Helicobacter pylori
  misc_feature (B) LOCATION 1...240
  hypothetical: YES
LGLKKRAILWSLMGFCAGLSALDYDTLDPKYYKYIKYYKAYEDKEVEELIRDLKRANAKSGLILGINTGFFYNHEIMVKTNSSSITGNILNYLFAYGLRFGYQTFRPSFFARLVKPNIIGRRIYIQYYGGAPKKAGFGSVGFQSVMLNGDFLLDFPLPFVGKYLYMGGYMGLGLGVVAHGVNYTAEWGMSFNAGLALTVLEKNRIEFEFKILNNFPFLQSNSSKETWWGAIASIGYQYVF

SEQ ID NO: 4897 - protein, 214 aa, Helicobacter pylori
  misc_feature (B) LOCATION 1...214
  hypothetical: YES
LDGLKKERQGFYKQVHYLRILILSMSFLNILNAENLSYMSSSYQIGTVFMRPLNTNKLLQGASILQGYEVNPKNDWAYSRYYFFIDYGNVLFNNDSTLQANMFTYGVGGDFMVAYAKNPINRWAFFFGLQLAANTWILNNKVKDLVVNTWDSLKDFNFHNTYFRAIGKFGVQFRTIVLYHKVDVEIGMKIFLTPERRSLFERSFLFFVSHSWHF

SEQ ID NO: 4898 - protein, 230 aa, Helicobacter pylori
  misc_feature (B) LOCATION 1...230
  hypothetical: YES
FKNNKTPLTFERDKGSLDGLKKERQGFYKQVHYLRILILSMSFLNILNAENLSYMSSSYQIGTVFMRPLNTNKLLQGASILQGYEVNPKNDWAYSRYYFFIDYGNVLFNNDSTLQANMFTYGVGGDFMVAYAKNPINRWAFFFGLQLAANTWILNNKVKDLVVNTWDSLKDFNFHNTYFRAIGKFGVQFRTIVLYHKVDVEIGMKIFLTPERRSLFERSFLFFVSHSWHF

SEQ ID NO: 4899 - protein, 169 aa, Helicobacter pylori
  misc_feature (B) LOCATION 1...169
  hypothetical: YES
LKNLSTLLVFLFFCLGCVSNFNEDTYTLDLVLEKKIQASRKGEITQDNVPIITAIATHLNDVDSGTYYDHEYFLVEIFTQNNDWIDDGYISYELFGTKPTGSEPLWVREITRDEFDGILETTNRWSRAFLIAFDKLDYLAVQEAKLELDAYSLGKIVFNFAYQVPLPQF

SEQ ID NO: 4900 - protein, 171 aa, Helicobacter pylori
  misc_feature (B) LOCATION 1...171
  hypothetical: YES
MGLKNLSTLLVFLFFCLGCVSNFNEDTYTLDLVLEKKIQASRKGEITQDNVPIITAIATHLNDVDSGTYYDHEYFLVEIFTQNNDWIDDGYISYELFGTKPTGSEPLWVREITRDEFDGILETTNRWSRAFLIAFDKLDYLAVQEAKLELDAYSLGKIVFNFAYQVPLPQF

SEQ ID NO: 4901 - protein, 173 aa, Helicobacter pylori
  misc_feature (B) LOCATION 1...173
  hypothetical: YES
QGMGLKNLSTLLVFLFFCLGCVSNFNEDTYTLDLVLEKKIQASRKGEITQDNVPIITAIATHLNDVDSGTYYDHEYFLVEIFTQNNDWIDDGYISYELFGTKPTGSEPLWVREITRDEFDGILETTNRWSRAFLIAFDKLDYLAVQEAKLELDAYSLGKIVFNFAYQVPLPQF

SEQ ID NO: 4902 - protein, 313 aa, Helicobacter pylori
  misc_feature (B) LOCATION 1...313
  hypothetical: YES
LKLKYWLVYLAFIIGLQATDYDNLEEENQQLDEKINNLKRQLTEKGVSPKEMDKDKFEEEYLERTYPKISSKKRKKLLKSFSIADDKSGVFLGGGYAYGELNLSYQGEMLDRYGANAPSAFKNNININAPVSMISVKFGYQKYFVPYFGTRFYGDLLLGGGALKENALKQPVGSFFYVLGAMNTDLLFDMPLDFKTKKHFLGVYAGFGIGLMLYQDKPNQNGRNLIVGGYSSPNFLWKSLIEVDYTFNVGVSLTLYRKHRLEIGTKLPISYLRMGVEEGAIYHNKENDERLLISANNQFKRSSFLLVNYAFIF

SEQ ID NO: 4903 - protein, 323 aa, Helicobacter pylori
  misc_feature (B) LOCATION 1...323
  hypothetical: YES
LQLFIVKAQGLKLKYWLVYLAFIIGLQATDYDNLEEENQQLDEKINNLKRQLTEKGVSPKEMDKDKFEEEYLERTYPKISSKKRKKLLKSFSIADDKSGVFLGGGYAYGELNLSYQGEMLDRYGANAPSAFKNNININAPVSMISVKFGYQKYFVPYFGTRFYGDLLLGGGALKENALKQPVGSFFYVLGAMNTDLLFDMPLDFKTKKHFLGVYAGFGIGLMLYQDKPNQNGRNLIVGGYSSPNFLWKSLIEVDYTFNVGVSLTLYRKHRLEIGTKLPISYLRMGVEEGAIYHNKENDERLLISANNQFKRSSFLLVNYAFIF

SEQ ID NO: 4904 - protein, 393 aa, Helicobacter pylori
  misc_feature (B) LOCATION 1...393
  hypothetical: YES
MTSASSHSFKEQDFHIPIAFAFDKNYLIPAGACIYSLLESIAKANKKIRYTLHALVVGLNEEDKTKLNQITEPFKEFAVLEVKDIEPFLDTIPNPFDEDFTKRFSKMVLVKYFLADLFPKYSKMVWSDVDVIFCNEFSADFLNIKEDDENYFYGVYDKIYPYEGFFYCNLTYQRKNQFCKKILEIIRAQKIDKEPQLTEFCRSKIAPLKIEYCIFPHYYSLSEEHLKGVANAIYHNTIKQALREPIVIQYDSHPYFQIKPWTYPFGLKADLWLNALAKTPFMSDWSYLITGGGGIGGEKWHYYHGIAAYHYYFPLWKAEEQIAHDALKTFLKHYFLHIHEIPQNARRRLFKYCISIPLKSFISKTLKFLKLHALVKKILIQLKLLKKNQSQNF

SEQ ID NO: 4905 - protein, 395 aa, Helicobacter pylori
  misc_feature (B) LOCATION 1...395
  hypothetical: YES
FFMTSASSHSFKEQDFHIPIAFAFDKNYLIPAGACIYSLLESIAKANKKIRYTLHALVVGLNEEDKTKLNQITEPFKEFAVLEVKDIEPFLDTIPNPFDEDFTKRFSKMVLVKYFLADLFPKYSKMVWSDVDVIFCNEFSADFLNIKEDDENYFYGVYDKIYPYEGFFYCNLTYQRKNQFCKKILEIIRAQKIDKEPQLTEFCRSKIAPLKIEYCIFPHYYSLSEEHLKGVANAIYHNTIKQALREPIVIQYDSHPYFQIKPWTYPFGLKADLWLNALAKTPFMSDWSYLITGGGGIGGEKWHYYHGIAAYHYYFPLWKAEEQIAHDALKTFLKHYFLHIHEIPQNARRRLFKYCISIPLKSFISKTLKFLKLHALVKKILIQLKLLKKNQSQNF

SEQ ID NO: 4906 - protein, 511 aa, Helicobacter pylori
  misc_feature (B) LOCATION 1...511
  hypothetical: YES
MKKLLYTMLALLLIGLLTAYLILFTEWGNKIIASYIEKKINPNERYLSVKTFKLRFNSLDFKAQANDDSTLILKGDFSLLTQSVNLDYHIDIKNLRSFKDLIPYPLRGAIVTSGNIKGHRKALVVQGVSNVAQSHTAYNALLDDFKLSHLSLNAKDANLEDLLYLINRPAYANAKVSLQADFNSLKPLEGHLILTANNALINNALINQIFHLNLKDTLVFNLSHSSDFKGNKAISDTTLTSPLVNFTALKSEYSFPALKLNAPYTLEIPHLAKLQNITNHPLKGSLTLKGDIEQSPKLLKVSGHSNLLDGALDFTLLNKDLKARFSNISTSKALDLFHYPKFFQSIADANLDYDLISKQGVLKANLKNARFLKNAFSDFLYSISRFDITKEIYHDANLVSQINQQRLLSDLSLKSPKTQLKIHNGLLDLNTKQMDILMDAEILKFIFKMKLQGSMHQPKFSLILNEKAIQQNLQQGLKEILKNDTLKKGLDHLLKDDKLKEKLEKGLKGLF

SEQ ID NO: 4907 - protein, 523 aa, Helicobacter pylori
  misc_feature (B) LOCATION 1...523
  hypothetical: YES
YIPFNLFQGQTNMKKLLYTMLALLLIGLLTAYLILFTEWGNKIIASYIEKKINPNERYLSVKTFKLRFNSLDFKAQANDDSTLILKGDFSLLTQSVNLDYHIDIKNLRSFKDLIPYPLRGAIVTSGNIKGHRKALVVQGVSNVAQSHTAYNALLDDFKLSHLSLNAKDANLEDLLYLINRPAYANAKVSLQADFNSLKPLEGHLILTANNALINNALINQIFHLNLKDTLVFNLSHSSDFKGNKAISDTTLTSPLVNFTALKSEYSFPALKLNAPYTLEIPHLAKLQNITNHPLKGSLTLKGDIEQSPKLLKVSGHSNLLDGALDFTLLNKDLKARFSNISTSKALDLFHYPKFFQSIADANLDYDLISKQGVLKANLKNARFLKNAFSDFLYSISRFDITKEIYHDANLVSQINQQRLLSDLSLKSPKTQLKIHNGLLDLNTKQMDILMDAEILKFIFKMKLQGSMHQPKFSLILNEKAIQQNLQQGLKEILKNDTLKKGLDHLLKDDKLKEKLEKGLKGLF

SEQ ID NO: 4908 - protein, 97 aa, Helicobacter pylori
  misc_feature (B) LOCATION 1...97
  hypothetical: YES
TKLDTISLKRIQMEKLPKKRVSKTKSQKLIHSLTTQKNRAFLKKISANEMLLELEKGAFKKNEAYFISDEEDKNYVLVPDNVISLLAENARKAFEAR

SEQ ID NO: 4909 - protein, 98 aa, Helicobacter pylori
  misc_feature (B) LOCATION 1...98
  hypothetical: YES
TKLDTISLKRIQMEKLPKKRVSKTKSQKLIHSLTTQKNRAFLKKISANEMLLELEKGAFKKNEAYFISDEEDKNYVLVPDNVISLLAENARKAFEARL

SEQ ID NO: 4910 - protein, 171 aa, Helicobacter pylori
  misc_feature (B) LOCATION 1...171
  hypothetical: YES
MEKLPKKRVSKTKSQKLIHSLTTQKNRAFLQKTSANEMLLELEKGAFKKNEAYFISDEEDKNYVLVPDNVISLLAENARKAFEARLRAELERDIITQAPIDFEDVREVSLQLLENLRQKDGNLPNINTLNFVKQIKKEHPNLFFNFDNMFKQPPFNENNFENFDNSDEENF

SEQ ID NO: 4911 - protein, 99 aa, Helicobacter pylori
  misc_feature (B) LOCATION 1...99
  hypothetical: YES
YQYIQQGGGFGVNVGRTLGNRTHVSLGYNLNVTKLLGFSSPLYNRYYSSVNEVASPRQCSTPASVIINRLSGGRTPLVPESCSSPGAITIFTRNKRYLG

SEQ ID NO: 4912 - protein, 98 aa, Helicobacter pylori
  misc_feature (B) LOCATION 1...98
  hypothetical: YES
QYIQQGGGFGVNVGRTLGNRTHVSLGYNLNVTKLLGFSSPLYNRYYSSVNEVASPRQCSTPASVIINRLSGGRTPLVPESCSSPGAITIFTRNKRYLG

SEQ ID NO: 4913 - protein, 116 aa, Helicobacter pylori
  misc_feature (B) LOCATION 1...116
  hypothetical: YES
AFKADAQILKTEIADKGYAFAVVKPDLDKDEKNGLVKVIYRIEVGDMVHINDVIISGNQRTSDRIIRRELLLGPKDKYNLTKLRNSENSLRRLGFFSKVKIEEKRVNSSLMDLLVY

SEQ ID NO: 4914 - protein, 187 aa, Helicobacter pylori
  misc_feature (B) LOCATION 1...187
  hypothetical: YES
MTTPMIIISLEMGLSLVPMRQCLVCQALARSISWNGLGGNVRNTKVYGKFAAYHHLQKYLLIDLIARFKTQGGYIFRYNTDDYLPLNSTFYMGGVTTVRGFRNGSITPKDEFGLWLGGDGIFTXSTELSYGVLKAAKMRLAWFFDFGFLTFXTPTRGSFFYNAXTTTANFKDYXVVGXXFEXATWRA

SEQ ID NO: 4915 - protein, 248 aa, Helicobacter pylori
  misc_feature (B) LOCATION 1...248
  hypothetical: YES
VSYDNTDDYYFPRNGVIFSSYATMSGLPSSGTLNSWNGLGGNVRNTKVYGKFAAYHHLQKYLLIDLIARFKTQGGYIFRYNTDDYLPLNSTFYMGGVTTVRGFRNGSITPKDEFGLWLGGDGIFTASTELSYGVLKAAKMRLAWFFDFGFLTFKTPTRGSFFYNAPTTTANFKDYGVVGAGFERATWRASTGLQIEWISPMGPLVLIFPIAFFNQWGDGNGKKCKGLCFNPNMNDYTQHFEFSMGTRF

SEQ ID NO: 4916 - protein, 253 aa, Helicobacter pylori
  misc_feature (B) LOCATION 1...253
  hypothetical: YES
LSTAYQAVELHWFLKAVLVLERSPSSPEIKGIWDRDYHTPITSSFTLDVSYDNTDDYYFPRNGVIFSSYATMSGLPSSGTLNSWNGLGGNVRNTKVYGKFAAYHHLQKYLLIDLIARFKTQGGYIFRYNTDDYLPLNSTFYMGGVTTVRGFRNGSITPKDEFGLWLGGDGIFTASTELSYGVLKAAKMRLAWFFDFGFLTFKTPTRGSFFYNAPTTTANFKDYGVVGAGFERATWRASTGLQIEWISPMGPWC

SEQ ID NO: 4917 - protein, 299 aa, Helicobacter pylori
  misc_feature (B) LOCATION 1...299
  hypothetical: YES
LVIISLLTTLKLKSIKEISIKKFILSSLVFACINTGVEALENDGSKPNDLASPKETPKEAQKNEAQNETSQSNQTPKEMKVKSISYVGLSYMSDMLANEIAKIRVGDMVDSKKIDTAVLALFNQGYFKDVYATFENGILEFHFDEKARIAGVEIKGYGTEKEKDGLKSQMGIKKGDTFDEQKLEHAKTALKTALEGQGYYGSVVEVRTEKVSEGALLIVFDVNRGDSIYIKQSIYEGSDKLKRRVIESLSANKQRDFMGWMWGLNDGKLRLDQLEYDSLRIQDVYMRRGYLDAHISSPF

SEQ ID NO: 4918 - protein, 614 aa, Helicobacter pylori
  misc_feature (B) LOCATION 1...614
  hypothetical: YES
LASPKETPKEAQKNEAQNETSQSNQTPKEMKVKSISYVGLSYMSDMLANEIAKIRVGDMVDSKKIDTAVLALFNQGYFKDVYATFENGILEFHFDEKARIAGVEIKGYGTEKEKDGLKSQMGIKKGDTFDEQKLEHAKTALKTALEGQGYYGSVVEVRTEKVSEGALLIVFDVNRGDSIYIKQSIYEGSDKLKRRVIESLSANKQRDFMGWMWGLNDGKLRLDQLEYDSLRIQDVYMRRGYLDAHISSPFLKTDFSTHDAKLHYKVKEGIQYRISDILIEIDNPVVPLKTLEKALKVKRKDVFNIEHLRADAQILKTEIADKGYAFAVVKPDLDKDEKNGLVKVIYRIEVGDMVHINDVIISGNQRTSDRIIRRELLLGPKDKYNLTKLRNSENSLRRLGFFSKVKIEEKRVNSSLMDLLVSVEEGRTGQLQFGLGYGSYGGLMLNGSVSERNLFGTGQSMSLYANIATGGGRSYPGMPKGAGRMFAGNLSLTNPRIFDSWYSSTINLYADYRISYQYIQQGGGFGVNVGRMLGNRTHVSLGYNLNVTKLLGFSSPLYNRYYSSVNEVASPRQCSTPASVIINRLSGGRTPLVPESCSSPGAITIFTRNKRYLG

SEQ ID NO: 4919 - protein, 925 aa, Helicobacter pylori
  misc_feature (B) LOCATION 1...925
  hypothetical: YES
LVIISLLTTLKLKSIKEISIKKFILSSLVFACINTGVEALENDGSKPNDLASPKETPKEAQKNEAQNETSQSNQTPKEMKVKSISYVGLSYMSDMLANEIAKIRVGDMVDSKKIDTAVLALFNQGYFKDVYATFENGILEFHFDEKARIAGVEIKGYGTEKEKDGLKSQMGIKKGDTFDEQKLEHAKTALKTALEGQGYYGSVVEVRTEKVSEGALLIVFDVNRGDSIYIKQSIYEGSDKLKRRVIESLSANKQRDFMGWMWGLNDGKLRLDQLEYDSLRIQDVYMRRGYLDAHISSPFLKTDFSTHDAKLHYKVKEGIQYRISDILIEIDNPVVPLKTLEKALKVKRKDVFNIEHLRADAQILKTEIADKGYAFAVVKPDLDKDEKNGLVKVIYRIEVGDMVHINDVIISGNQRTSDRIIRRELLLGPKDKYNLTKLRNSENSLRRLGFFSKVKIEEKRVNSSLMDLLVSVEEGRTGQLQFGLGYGSYGGLMLNGSVSERNLFGTGQSMSLYANIATGGGRSYPGMPKGAGRMFAGNLSLTNPRIFDSWYSSTINLYADYRISYQYIQQGGGFGVNVGRMLGNRTHVSLGYNLNVTKLLGFSSPLYNRYYSSVNEVASPRQCSTPASVIINRLSGGRTPLVPESCSSPGAITTSPEIKGIWDRDYHTPITSSFTLDVSYDNTDDYYFPRNGVIFSSYATMSGLPSSGTLNSWNGLGGNVRNTKVYGKFAAYHHLQKYLLIDLIARFKTQGGYIFRYNTDDYLPLNSTFYMGGVTTVRGFRNGSITPKDEFGLWLGGDGIFTASTELSYGVLKAAKMRLAWFFDFGFLTFKTPTRGSFFYNAPTTTANFKDYGVVGAGFERATWRASTGLQIEWISPMGPLVLIFPIAFFNQWGDGNGKKCKGLCFNPNMNDYTQHFEFSMGTRF

SEQ ID NO: 4920 - protein, 325 aa, Helicobacter pylori
  misc_feature (B) LOCATION 1...325
  hypothetical: YES
MKRILVSLAVLSHSAHAVKTHNLERVEASGVANDKEAPLSWRSKEVRNYMGSRTVISNKQLTKSANQSIEEALQNVPGVHIRNSTGIGAVPSISIRGFGAGGPGHSNTGMILVNGIPIYVAPYVEIGTVIFPVTFQSVDRISVTKGGESVRYGPNAFGGVINIITKGIPTNWESQVSERTTFWGKSENGGFFNQNSKNIDKSLVNNMLFNTYLRTGGMMNKHFGIQAQVNWLKGQGFRYNSPTDIQNYMLDSLYQINDSNKITAFFQYYSYFLTDPGSLGIAAYNQNRFQNNRPNNDKSGRAKRWGAVYQNFFGDTDRVGGGFHF

SEQ ID NO: 4921 - protein, 325 aa, Helicobacter pylori; identical to SEQ ID NO: 4920
  misc_feature (B) LOCATION 1...325
  hypothetical: YES

SEQ ID NO: 4922 - protein, 325 aa, Helicobacter pylori; identical to SEQ ID NO: 4920
  misc_feature (B) LOCATION 1...325
  hypothetical: YES

SEQ ID NO: 4923 - protein, 436 aa, Helicobacter pylori
  misc_feature (B) LOCATION 1...436
  hypothetical: YES
MSRDFKFDSNYLNVNTNPKLGPVYTNQNYPGFFIFDHLRRYVMNAFEPNLNLVVNTNKVKQTFNVGMRFMTMDMFIRSDQSTCEKTDIINGVCHMPPYVLSKTPNNNQEMFNNYTAVWLSDKIEFFDSKLVITPGLRYTFLNYNNKEPEKHDFSVWTSKKQRQNEWSPALNIGYKPMENWIWYANYRRSFIPPQHTMVGITRTNYNQIFNEIEVGQRYSYKNLLSFNTNYFVIFAKRYYAGGYSPQPVDARSQGVELELYYAPIRGLQFHVAYTYIDARITSNADDIAYYFTGIVNKPFDIKGKRLPYVSPNQFIFDMMYTYKHTTFGISSYFYSRAYSSMLNQAKDQTVCLPLNPEYTGGLKYGCNSVGLLPLYFVLNVQVSSILWQSGRHKITGSLQINNLFNMKYYFRGIGTSPTGREPAPGRSITAYLNYEF

SEQ ID NO: 4924 - protein, 448 aa, Helicobacter pylori
  misc_feature (B) LOCATION 1...448
  hypothetical: YES
GGDFTFSYYGHDMSRDFKFDSNYLNVNTNPKLGPVYTNQNYPGFFIFDHLRRYVMNAFEPNLNLVVNTNKVKQTFNVGMRFMTMDMFIRSDQSTCEKTDIINGVCHMPPYVLSKTPNNNQEMFNNYTAVWLSDKIEFFDSKLVITPGLRYTFLNYNNKGPEKHDFSVWTSKNSVKTNGVLPLILAINLWKIGYGYANYRRSFIPPQHTMVGITRTNYNQIFNEIEVGQRYSYKNLLSFNTNYFVIFAKRYYAGGYSPQPVDARSQGVELELYYAPIRGLQFHVAYTYIDARITSNADDIAYYFTGIVNKPFDIKGKRLPYVSPNQFIFDMMYTYKHTTFGISSYFYSRAYSSMLNQAKDQTVCLPLNPEYTGGLKYGCNSVGLLPLYFVLNVQVSSILWQSGRHKITGSLQINNLFNMKYYFRGIGTSPTGREPAPGRSITAYLNYEF

SEQ ID NO: 4925 - protein, 767 aa, Helicobacter pylori
  misc_feature (B) LOCATION 1...767
  hypothetical: YES
MKRILVSLAVLSHSAHAVKTHNLERVEASGVANDKEAPLSWRSKEVRNYMGSRTVISNKQLTKSANQSIEEALQNVPGVHIRNSTGIGAVPSISIRGFGAGGPGHSNTGMILVNGIPIYVAPYVEIGTVIFPVTFQSVDRISVTKGGESVRYGPNAFGGVINIITKGIPTNWESQVSERTTFWGKSENGGFFNQNSKNIDKSLVNNMLFNTYLRTGGMMNKHFGIQAQVNWLKGQGFRYNSPTDIQNYMLDSLYQINDSNKITAFFQYYSYFLTDPGSLGIAAYNQNRFQNNRPNNDKSGRAKRWGAVYQNFFGDTDRVGGDFTFSYYGHDMSRDFKFDSNYLNVNTNPKLGPVYTNQNYPGFFIFDHLRRYVMNAFEPNLNLVVNTNKVKQTFNVGMRFMTMDMFIRSDQSTCEKTDIINGVCHMPPYVLSKTPNNNQEMFNNYTAVWLSDKIEFFDSKLVITPGLRYTFLNYNNKEPEKHDFSVWTSKKQRQNEWSPALNIGYKPMENWIWYANYRRSFIPPQHTMVGITRTNYNQIFNEIEVGQRYSYKNLLSFNTNYFVIFAKRYYAGGYSPQPVDARSQGVELELYYAPIRGLQFHVAYTYIDARITSNADDIAYYFTGIVNKPFDIKGKRLPYVSPNQFIFDMMYTYKHTTFGISSYFYSRAYSSMLNQAKDQTVCLPLNPEYTGGLKYGCNSVGLLPLYFVLNVQVSSILWQSGRHKITGSLQINNLFNMKYYFRGIGTSPTGREPAPGRSITAYLNYEF

SEQ ID NO: 4926 - protein, 49 aa, Helicobacter pylori
  misc_feature (B) LOCATION 1...49
  hypothetical: YES
MLMVNGYQITMHKGYKVGFFTSGYNPDFAQTIQNRSYLMSSYELSFLRN

SEQ ID NO: 4927 - protein, 440 aa, Helicobacter pylori
  misc_feature (B) LOCATION 1...440
  hypothetical: YES
LALHGFFLSAFEYQVSARVGSFSRIAFNQSIINSKKGIYPTGSYVTTTGALQVDSSLLPKGIENHKLGFGVGGEIGALAYDSTKFLIDEANPKAGFQPANWYYMGRWEGYLMQHSQNWTREQKAQNARPYVLYNLYLDYQYKDIFGIKLGRYPSKALFLSGFNQGFEIFYRWKKFKIVWFSTFGRALANEQYIRDFYAPVNYKQKINYGMHNFNLVYENKYIRIAPFIWFYPKNFNAPGFEITHDTKSYWKSLWRIQTTFYAWFPLYSDYLSKDYYRAALVGKKSAALFVFQRVNFRSYRFGWSVYKNFGNASVQLGWNGSPIDPFYDTKDDTPYEDAYSNFYNANSITINAFIGKSIKNLLVQLYGKLTYSPRADAQSLGVTFKYNLKKHIYFMLMVNGYQITMHKGYKVGFFTSGYNPDFAQTIQNRSYLMSSMSYRF

SEQ ID NO: 4928 - protein, 443 aa, Helicobacter pylori
  misc_feature (B) LOCATION 1...443
  hypothetical: YES
LGFLALHGFFLSAFEYQVSARVGSFSRIAFNQSIINSKKGIYPTGSYVTTTGALQVDSSLLPKGIENHKLGFGVGGEIGALAYDSTKFLIDEANPKAGFQPANWYYMGRWEGYLMQHSQNWTREQKAQNARPYVLYNLYLDYQYKDIFGIKLGRYPSKALFLSGFNQGFEIFYRWKKFKIVWFSTFGRALANEQYIRDFYAPVNYKQKINYGMHNFNLVYENKYIRIAPFIWFYPKNFNAPGFEITHDTKSYWKSLWRIQTTFYAWFPLYSDYLSKDYYRAALVGKKSAALFVFQRVNFRSYRFGWSVYKNFGNASVQLGWNGSPIDPFYDTKDDTPYEDAYSNFYNANSITINAFIGKSIKNLLVQLYGKLTYSPRADAQSLGVTFKYNLKKHIYFMLMVNGYQITMHKGYKVGFFTSGYNPDFAQTIQNRSYLMSSMSYRF

SEQ ID NO: 4929 - protein, 77 aa, Helicobacter pylori
  misc_feature (B) LOCATION 1...77
  hypothetical: YES
TIRNKTTFYVLYDYRWNNAEYGRYAPARYNTWDPFLDNGKWRGLQGPGGATLYLHHHIYINNYFVVGGAYLKSVTLT

SEQ ID NO: 4930 - protein, 91 aa, Helicobacter pylori
  misc_feature (B) LOCATION 1...91
  hypothetical: YES
GRGMKLKKRKVAATLLKRLTLPLLFTTGSLGAVTYEVHGDFINFSKVGFNRSPINPVKGIYPTETFVNLTGKLEGSVHLGRGWTVNVGGVL

SEQ ID NO: 4931 - protein, 90 aa, Helicobacter pylori
  misc_feature (B) LOCATION 1...90
  hypothetical: YES
GRGMKLKKRKVAATLLKRLTLPLLFTTGSLGAVTYEVHGDFINFSKVGFNRSPINPVKGIYPTETFVNLTGKLEGSVHLGRGWTVNVGGV

SEQ ID NO: 4932 - protein, 499 aa, Helicobacter pylori
  misc_feature (B) LOCATION 1...499
  hypothetical: YES
MKLKKRKVAATLLKRLTLPLLFTTGSLGAVTYEVHGDFINFSKVGFNRSPINPVKGIYPTETFVNLTGKLEGSVHLGRGWTVNVGGVLGGQVYDNTRYDRWAKDFTPPSYWDKTSCGTDSLSLCMNATKMWQQQGPGGIIDPRGIGYMYMGEWNGLFPNYYPANAYLPGHSRRYEVYKANLTYDSDRVHMVMGRFDVTEQEQMDWIYQLFQGFYGTFKLTKNMKFLLFSSWGRGIADGQWLFPIYREKPWGIHKAGIIYRPTKNLMIHPYVYLIPMVGTLPGAKIEYDTNPEFSGRGIRNKTTFYVLYDYRWNNAEYGRYAPARYNTWDPFLDNGKWRGLQGPGGATLYLHHHIDINNYFVVGGAYLNIGNPNMNLGTWGNPVALDGIEQWVGGIYSLGFAGIDNITDADAFTEYVKGGGKHGKFSWSVYQRFTTAPRALEYGIGMYLDYQFSKHVKAGLKLVWLEFQIRAGYNPGTGFLGPNGQPLNLNNGLFESSAF

SEQ ID NO: 4933 - protein, 528 aa, Helicobacter pylori
  misc_feature (B) LOCATION 1...528
  hypothetical: YES
MKLKKRKVAATLLKRLTLPLLFTTGSLGAVTYEVHGDFINFSKVGFNRSPINPVKGIYPTETFVNLTGKLEGSVHLGRGWTVNVGGVLGGQVYDNTRYDRWAKDFTPPSYWDKTSCGTDSLSLCMNATKMWQQQGPGGIIDPRGIGYMYMGEWNGLFPNYYPANAYLPGHSRRYEVYKANLTYDSDRVHMVMGRFDVTEQEQMDWIYQLFQGFYGTFKLTKNMKFLLFSSWGRGIADGQWLFPIYREKPWGIHKAGIIYRPTKNLMIHPYVYLIPMVGTLPGAKIEYDTNPEFSGRGIRNKTTFYVLYDYRWNNAEYGRYAPARYNTWDPFLDNGKWRGLQGPGGATLYLHHHIDINNYFVVGGAYLNIGNPNMNLGTWGNPVALDGIEQWVGGIYSLGFAGIDNITDADAFTEYVKGGGKHGKFSWSVYQRFTTAPRALEYGIGMYLDYQFSKHVKAGLKLVWLEFQIRAGYNPGTGFLGPNGQPLNLNNGLFESSAFAQGPQNMGGIAKSITQDRSHLMTHISYSF

SEQ ID NO: 4934 - protein, 102 aa, Helicobacter pylori
  misc_feature (B) LOCATION 1...102
  hypothetical: YES
LKALNDCMVFFHKKIILNFIYSLMVAFLFHLSYGVLLKADGMAKKQTLLVGERLVWDKLTLLGFLEKNHIPQKLYYNLSSQDKELSAEIQSNVTYYXFKRCK

SEQ ID NO: 4935 - protein, 406 aa, Helicobacter pylori
  misc_feature (B) LOCATION 1...406
  hypothetical: YES
MVFFHKKIILNFIYSLMVAFLFHLSYGVLLKADGMAKKQTLLVGERLVWDKLTLLGFLEKNHIPQKLYYNLSSQDKELSAEIQSNVTYYTLRDANNTLIQALIPISQDLQIHIYKKGEDYFLDFIPIVFTRKERTLLLSLQTSPYQDIVKATNDPLLANQLMNAYKKSVPFKRLVKNDKIAIVYTRDYRVGQAFGQPTIKMAMVSSRLHQYYLFSHSNGRYYDSKAQEVAGFLLETPVKYTRISSPFSYGRFHPVLKVKRPHYGVDYAAKHGSLIHSASDGRVGFIGVKAGYGKVVEIHLNELRLVYAHMSAFANGLKKGSFVKKGQIIGRVGSTGLSTGPHLHFGVYKNSRPINPLGYIRTAKSKLHGKQREVFLEKAQYSKQKLEELFKTHSFEKNSFYLLEGF

SEQ ID NO: 4936 - protein, 413 aa, Helicobacter pylori
  misc_feature (B) LOCATION 1...413
  hypothetical: YES
LKALNDCMVFFHKKIILNFIYSLMVAFLFHLSYGVLLKADGMAKKQTLLVGERLVWDKLTLLGFLEKNHIPQKLYYNLSSQDKELSAEIQSNVTYYTLRDANNTLIQALIPISQDLQIHIYKKGEDYFLDFIPIVFTRKERTLLLSLQTSPYQDIVKATNDPLLANQLMNAYKKSVPFKRLVKNDKIAIVYTRDYRVGQAFGQPTIKMAMVSSRLHQYYLFSHSNGRYYDSKAQEVAGFLLETPVKYTRISSPFSYGRFHPVLKVKRPHYGVDYAAKHGSLIHSASDGRVGFIGVKAGYGKVVEIHLNELRLVYAHMSAFANGLKKGSFVKKGQIIGRVGSTGLSTGPHLHFGVYKNSRPINPLGYIRTAKSKLHGKQREVFLEKAQYSKQKLEELFKTHSFEKNSFYLLEGF

SEQ ID NO: 4937 - protein, 413 aa, Helicobacter pylori; identical to SEQ ID NO: 4936
  misc_feature (B) LOCATION 1...413
  hypothetical: YES

SEQ ID NO: 4938 - protein, 34 aa, Helicobacter pylori
  misc_feature (B) LOCATION 1...34
  hypothetical: YES
LSHLFLVKRPYSRLYLHNQSNHKMRHHSILFVSF

SEQ ID NO: 4939 - protein, 69 aa, Helicobacter pylori
  misc_feature (B) LOCATION 1...69
  hypothetical: YES
SKTSYCNSYKRKLLPYHFLLFPLWACFHNVSRPFSLSHLFLVKRPYSRLYLHNQSNHKMRHHSILFVSF

SEQ ID NO: 4940 - protein, 253 aa, Helicobacter pylori
  misc_feature (B) LOCATION 1...253
  hypothetical: YES
LKTLFSVYLFLSLNPLFLEAKEITWSQFLENFKNKNEDDKPKPLTIDKNNEKQQILDKNQQILKRALEKSLKFFFIFGYNYSQAAYSTTNQNLTLTANSIGFNTATGLEHFLRNHPKVGFRIFSVYNYFHSVSLSQPQILMVQNYGGALDFSWIFVDKKTYRFRSYLGIALEQGVLLVDTIKTGSFTTIIPRTKKTFFQAPLRFGFIVDFIGYLSLQLGIEMPLVRNVFYTYNNHQERFKPRFNANLSLIVSF

SEQ ID NO: 4941 - protein, 265 aa, Helicobacter pylori
  misc_feature (B) LOCATION 1...265
  hypothetical: YES
LGTIAVKSLRLYLKTLFSVYLFLSLNPLFLEAKEITWSQFLENFKNKNEDDKPKPLTIDKNNEKQQILDKNQQILKRALEKSLKFFFIFGYNYSQAAYSTTNQNLTLTANSIGFNTATGLEHFLRNHPKVGFRIFSVYNYFHSVSLSQPQILMVQNYGGALDFSWIFVDKKTYRFRSYLGIALEQGVLLVDTIKTGSFTTIIPRTKKTFFQAPLRFGFIVDFIGYLSLQLGIEMPLVRNVFYTYNNHQERFKPRFNANLSLIVSF

SEQ ID NO: 4942 - protein, 293 aa, Helicobacter pylori
  misc_feature (B) LOCATION 1...293
  hypothetical: YES
MQEDWQAVQDTIKVVSDVKAGNFAVRITAEPASPDLKELRDALNGIMXYLQESVGTHMPSIFKIFESYSGLDFRGRIQNASGRVELVTNALGQEIQKMLETSSNFAKDLANDSANLKECVQNLEKASNSQHKSLMETSKTIENITTSIQGVSSQSEAMIEQGKDIKSIVEIIRDIADQTNLLALNAAIEAARAGEHGRGFAVVADEVRKLAERTQKSLSEIEANINILVQSISDTSESIKNQVKEVEEINASIEALRSVTEGNLKIASDSLEISQEIDKVSNDILEDVNKKQF

SEQ ID NO: 4943 - protein, 664 aa, Helicobacter pylori
  misc_feature (B) LOCATION 1...664
  hypothetical: YES
NHIVRGVDCDRGVSILGVSLNSRVKEILKESALHSMQDSLHFKVKEVQSVLENTYTSMGIVKEMLPEDTKREIKIQLLKNFILANSHVAGVSMFFKDREDLRLTLLRDNDTIKLMENPSLGSNPLVQKAMKNKEISKSLPYYRKMPNGAEVYGVDILLPLFKENTQEVVGVLMIFFSIDSFSNEITKNRSDLFLIGVKGKVLLSANKSLQDKSITEIYKSVPKATNEVMAILENGSKATLEYLDPFSHKENFLAVETFKMLGKTESKDNLNWMIALIIEKDKVYEQVGSVRFVVVAASAIMVLALIIAITLLMRAIVSNRLEVVSSTLSHFFKLLNNQAHSSDIKLVEARSNDELGRMQTAINKNILQTQKTMQEDWQAVQDTIKVVSDVKAGNFAVRITAEPASPDLKELRDALMDHALFARKRGTHMPSIFKIFESYSGLDFRGRIQNASGRVELVTNALGQEIQKMLETSSNFAKDLANDSANLKECVQNLEKASNSQHKSLMETSKTIENITTSIQGVSSQSEAMIEQGKDIKSIVEIIRDIADQTNLLALNAAIEAARAGEHGRGFAVVADEVRKLAERTQKSLSEIEANINILVQSISDTSESIKNQVKEVEEINASIEALRSVTEGNLKIASDSLEISQEIDKVSNDILEDVNKKQF

SEQ ID NO: 4944 - protein, 675 aa, Helicobacter pylori
  misc_feature (B) LOCATION 1...675
  hypothetical: YES
LSKGLSIGNKIILCVALIVIVCVSILGVSLNSRVKEILKESALHSMQDSLHFKVKEVQSVLENTYTSMGIVKEMLPEDTKREIKIQLLKNFILANSHVAGVSMFFKDREDLRLTLLRDNDTIKLMENPSLGSNPLAQKAMKNKEISKSLPYYRKMPNGAEVYGVDILLPLFKENTQEVVGVLMIFFSIDSFSNEITKNRSDLFLIGVKGKVLLSANKSLQDKSITEIYKSVPKATNEVMAILENGSKATLEYLDPFSHKENFLAVETFKMLGKTESKDNLNWMIALIIEKDKVYEQVGSVRFVVVAASAIMVLALIIAITLLMRAIVSNRLEVVSSTLSHFFKLLNNQAHSSDIKLVEARSNDELGRMQTAINKNILQTQKTMQEDRQAVQDTIKVVSDVKAGNFAVRITAEPASPDLKELRDALNGIMDYLQESVGTHMPSIFKIFESYSGLDFRGRIQNASGRVELVTNALGQEIQKMLETSSNFAKDLANDSANLKECVQNLEKASNSQHKSLMETSKTIENITTSIQGVSSQSEAMIEQGKDIKSIVEIIRDIADQTNLLALNAAIEAARAGEHGRGFAVVADEVRKLAERTQKSLSEIEANINILVQSISDTSESIKNQVKEVEEINASIEALRSVTEGNLKIASDSLEISQEIDKVSNDILEDVNKKQF

SEQ ID NO: 4945 - protein, 66 aa, Helicobacter pylori
  misc_feature (B) LOCATION 1...66
  hypothetical: YES
KMHTSFFQIPLNFGVRVNVDRHNGFEMGLKIPLAVNSFYETHGKGLNASLFFKRLVMFNVSYVYSF

SEQ ID NO: 4946 - protein, 65 aa, Helicobacter pylori
  misc_feature (B) LOCATION 1...65
  hypothetical: YES
MHTSFFQIPLNFGVRVNVDRHNGFEMGLKIPLAVNSFYETHGKGLNASLFFKRLVMFNVSYVYSF

SEQ ID NO: 4947 - protein, 119 aa, Helicobacter pylori
  misc_feature (B) LOCATION 1...119
  hypothetical: YES
MQNTFNYTNNALKNNAKLTPTEMQAEQYYLQSTLQNIEKIVMLSGGVASNPKLVQALEKMQEPITNPLELVENLKNLELQFSQSQNSMLSSLSSQIAQISNSLNALDPSSYSKNVSSMY

SEQ ID NO: 4948 - protein, 195 aa, Helicobacter pylori
  misc_feature (B) LOCATION 1...195
  hypothetical: YES
LGSPMQFQKTLSSLSLFLSLSLFLSFSIAEENGAYASVGFEYSISHAVEHNNPFLNQERIQTISNAQNQIYKLNQIENEITNMQNTFNYTNNALKNNAKLTPTEMQAEQYYLQSTLQNIEKIVMLSGGVASNPKLVQALEKMQEPITNPLELVENLKNLELQFSQSQNSMLSSLSSQIAQISNSLNALDPSSYSK

SEQ ID NO: 4949 - protein, 196 aa, Helicobacter pylori
  misc_feature (B) LOCATION 1...196
  hypothetical: YES
LGSPMQFQKTLSSLSLFLSLSLFLSFSIAEENGAYASVGFEYSISHAVEHNNPFLNQERIQTISNAQNQIYKLNQIENEITNMQNTFNYTNNALKNNAKLTPTEMQAEQYYLQSTLQNIEKIVMLSGGVASNPKLVQALEKMQEPITNPLELVENLKNLELQFSQSQNSMLSSLSSQIAQISNSLNALDPSSYSKN

SEQ ID NO: 4950 - protein, 245 aa, Helicobacter pylori
  misc_feature (B) LOCATION 1...245
  hypothetical: YES
MQFQKTLSSLSLFLSLSLFLSFSIAEENGAYASVGFEYSISHAVEHNNPFLNQERIQTISNAQNQIYKLNQIENEITNMQNTFNYTNNALKNNAKLTPTEMQAEQYYLQSTLQNIEKIVMLSGGVASNPKLVQALEKMQEPITNPLELVENLKNLELQFSQSQNSMLSSLSSQIAQISNSLNALDPSSYSKNVSSMYGVGLSVGYKHFFTKKKNQGFRYYLFYDYGYTNFGFVGNGFDGLGKMNN

SEQ ID NO: 4951 - protein, 338 aa, Helicobacter pylori
  misc_feature (B) LOCATION 1...338
  hypothetical: YES
VGFEYSISHAVEHNNPFLDQERIQAISNARGEVCGLDRVKNEITDMPNTFNYINNALKNNAKLTPTEKQAETYYLQSTLQNIEKIVMLSGGVASNPKLAQALEKMQEPITNPLELVENLKNLELQFSQSQNSMLSSLSSQIAQISNSLNALDPSSYSKNVSSMYGVGLSVGYKHFFTKKKNQGFRYYLFYDYGYTNFGFVGNGFDGLGKMNNHLYGLGIDYLFNFIDNAQKHSSVGFYVGFALAGSSWVGSGLGMWVSQMDFINNYLTDYRAKMHTSFFQIPLNFGVRVNVDRHNGFEMGLKIPLAVNSFYETHGKGLNASLFFKRLVMFNVSYVYSF

SEQ ID NO: 4952 - protein, 366 aa, Helicobacter pylori
  misc_feature (B) LOCATION 1...366
  hypothetical: YES
MQFQKTLLSLSLLFLSYCIAEENGAYASVGFEYSISHAVEHNNPFLNQERIQTISNAQNKIYKLNQVKNEITNMPNTFNYINNALKNNAKLTPTEKQAETYYLQSTLQNIEKIVMLSGGVASNPKLAQALEKMQEPITNPLELVENLKNLELQFSQSQNSMLSSLSSQIAQISNSLNALDPSSYSKNVSSMYGVGLSVGYKHFFTKKKNQGFRYYLFYDYGYTNFGFVGNGFDGLGKMNNHLYGLGIDYLFNFIDNAQKHSSVGFYVGFALAGSSWVGSGLGMWVSQMDFINNYLTDYRAKMHTSFFQIPLNFGVRVNVDRHNGFEMGLKIPLAVNSFYETHGKGLNASLFFKRLVMFNVSYVYSF

SEQ ID NO: 4953 - protein, 370 aa, Helicobacter pylori
  misc_feature (B) LOCATION 1...370
  hypothetical: YES
QDQPMQFQKTLLSLSLLFLSYCIAEENGAYASVGFEYSISHAVEHNNPFLNQERIQTISNAQNKIYKLNQVKNEITNMPNTFNYINNALKNNAKLTPTEKQAETYYLQSTLQNIEKIVMLSGGVASNPKLAQALEKMQEPITNPLELVENLKNLELQFSQSQNSMLSSLSSQIAQISNSLNALDPSSYSKNVSSMYGVGLSVGYKHFFTKKKNQGFRYYLFYDYGYTNFGFVGNGFDGLGKMNNHLYGLGIDYLFNFIDNAQKHSSVGFYVGFALAGSSWVGSGLGMWVSQMDFINNYLTDYRAKMHTSFFQIPLNFGVRVNVDRHNGFEMGLKIPLAVNSFYETHGKGLNASLFFKRLVMFNVSYVYSF

SEQ ID NO: 4954 - protein, 371 aa, Helicobacter pylori
  misc_feature (B) LOCATION 1...371
  hypothetical: YES
MQFQKTLSSLSLFLSLSLFLSFSIAEENGAYASVGFEYSISHAVEHNNPFLNQERIQTISNAQNKIYKLNQVKNEITNMPNTFNYINNALKNNAKLTPTEKQAETYYLQSTLQNIEKIVMLSGGVASNPKLAQALEKMQEPITNPLELVENLKNLELQFSQSQNSMLSSLSSQIAQISNSLNALDPSSYSKNVSSMYGVGLSVGYKHFFTKKKNQGFRYYLFYDYGYTNFGFVGNGFDGLGKMNNHLYGLGIDYLFNFIDNAQKHSSVGFYVGFALAGSSWVGSGLGMWVSQMDFINNYLTDYRAKMHTSFFQIPLNFGVRVNVDRHNGFEMGLKIPLAVNSFYETHGKGLNASLFFKRLVMFNVSYVYSF

SEQ ID NO: 4955 - protein, 117 aa, Helicobacter pylori
  misc_feature (B) LOCATION 1...117
  hypothetical: YES
MELIKKLEKESEVLKKDLQQHSNELFKMLIIDNEDLFKEQFEIMFKAWVEIVKMMFELTKKTKFDGEMIGYTEELLTFLVRDFFNGIFKSKVIPKMPIFCGDVKCEDFNALRSLVYL

SEQ ID NO: 4956 - protein, 133 aa, Helicobacter pylori
  misc_feature (B) LOCATION 1...133
  hypothetical: YES
MELIKKLEKESEVLKKDLQQHSNELFKMLIIDNEDLFKEQFEIMFKAWVEIVKMMFELTKKTKFDGEMIGYTEELLTFLVRDFFNGIFKSKVIPKMPIFCGDVKCEDFNALRSLVYLSVLELEETINPNKIPF

SEQ ID NO: 4957 - protein, 133 aa, Helicobacter pylori; identical to SEQ ID NO: 4956
  misc_feature (B) LOCATION 1...133
  hypothetical: YES

SEQ ID NO: 4958 - protein, 137 aa, Helicobacter pylori
  misc_feature (B) LOCATION 1...137
  hypothetical: YES
ANEKMELIKKLEKESEVLKKDLQQHSNELFKMLIIDNEDLFKEQFEIMFKAWVEIVKMMFELTKKTKFDGEMIGYTEELLTFLVRDFFNGIFKSKVIPKMPIFCGDVKCEDFNALRSLVYLSVLELEETINPNKIPF

SEQ ID NO: 4959 - protein, 144 aa, Helicobacter pylori
  misc_feature (B) LOCATION 1...144
  hypothetical: YES
MKIQTISTLVLTIIMVIQKMIVGKISPHKTAEEFTNLMLNMIAVLDSQSWGDAILNAPFEFTNSPTDCDNDPSKCVNPGTNGLVNSKVDQKYVLNKQDIVNKFKNKADLDVIVLKDSGVVGXXNGYGNDGEYGTLGVXAYALGS

SEQ ID NO: 4960 - protein, 377 aa, Helicobacter pylori
  misc_feature (B) LOCATION 1...377
  hypothetical: YES
KEITMRKLFIPLLLFSALEANEKNGFFIEAGFETGLLEGTQTQEKRHTTTKNTYATYNYLPTDTILKRAANLFTNAEAISKLKFSSLSPVRVLYMYNGQLTIENFLPYNLNNVKLSFTDAQGNVIDLGVIETIPKHSKIVLPGEAFDSLKIDPYTLFLPKIEATSTSISDANTQRVFETLNKIKTNLVVNYRNENKFKDHENHWEAFTPQTAEEFTNLMLNMIAVLDSQSWGDAILNAPFEFTNSPTDCDNDPSKCVNPGTNGLVNSKVDQKYVLNKQDIVNKFKNKADLDVIVLKDSGVVGLGSDITPSNNDDGKHYGQLGVVASALDPKKLFGNDLKTINLEDLRTILHEFSHTKGYGHNGNMTYQRVPVTKDVK

SEQ ID NO: 4961 - protein, 393 aa, Helicobacter pylori
  misc_feature (B) LOCATION 1...393
  hypothetical: YES
MRKLFIPLLLFSALEANEKNGFFIEAGFETGLLEGTQTQEKRHTTTKNTYATYNYLPTDTILKRAANLFTNAEAISKLKFSSLSPVRVLYMYNGQLTIENFLPYNLNNVKLSFTDAQGNVIDLGVIETIPKHSKIVLPGEAFDSLKIDPYTLFLPKIEATSTSISDANTQRVFETLNKIKTNLVVNYRNENKFKDHENHWEAFTPQTAEEFTNLMLNMIAVLDSQSWGDAILNAPFEFTNSPTDCDNDPSKCVNPGTNGLVNSKVDQKYVLNKQDIVNKFKNKADLDVIVLKDSGVVGLGSDITPSNNDDGKHYGQLGVVASALDPKKLFGDNLKTINLEDLRTILHEFSHTKGYGHNGNMTYQRVPVTKDGQVEKDSNGKPKDSDGLPYNVC

SEQ ID NO: 4962 - protein, 657 aa, Helicobacter pylori
  misc_feature (B) LOCATION 1...657
  hypothetical: YES
MRKLFIPLLLFSALEANEKNGFFIEAGFETGLLEGTQTQEKRHTTTKNTYATYNYLPTDTILKRAANLFTNAEAISKLKFSSLSPVRVLYMYNGQLTIENFLPYNLNNVKLSFTDAQGNVIDLGVIETIPKHSKIVLPGEAFDSLKIDPYTLFLPKIEATSTSISDANTQRVFETLNKIKTNLVVNYRNENKFKDHENHWEAFTPQTAEEFTNLMLNMIAVLDSQSWGDAILNAPFEFTNSPTDCDNDPSKCVNPGTNGLVNSKVDQKYVLNKQDIVNKFKNKADLDVIVLKDSGVVGLGSDITPSNNDDGKHYGQLGVVASALDPKKLFGDNLKTINLEDLRTILHEFSHTKGYGHNGNMTYQRVPVTKDGQVEKDSNGKPKDSDGLPYNVCSLYGGSNQPAFPSNYPNSIYHNCADVPAGFLGVTAAVWQQLINQNALPINYANLGSQTNYNLNASLNTQDLANSMLSTIQKTFVTSSVTNHHFSNASQSFRSPILGVNAKIGYQNYFNDFIGLAYYGIIKYNYAKAVNQKVQQLSYGGGIDLLLDFITTYSNKNSPTGIQTKRNFSSSFGIFGGLRGLYNSYYVLNKVKGSGNLDVATGLNYRYKHSKYSVGISIPLIQRKASVVSSGGDYTNSFVFNEGASHFKVFFNYGWVF

SEQ ID NO: 4963 - protein, 114 aa, Helicobacter pylori
  misc_feature (B) LOCATION 1...114
  hypothetical: YES
MNIKTHSSNEKERFVRIEEDEKKELFAEATNENPHGLSLMALIGVLVFGGAFLALLVPKIYLSNNIYYISRKINTLEDQKRLLLEEQQILKNELEKERFKYYIENSENIGDIAF

SEQ ID NO: 4964 - protein, 115 aa, Helicobacter pylori
  misc_feature (B) LOCATION 1...115
  hypothetical: YES
AMNIKTHSSNEKERFVRIEEDEKKELFAEATNENPHGLSLMALIGVLVFGGAFLALLVPKIYLSNNIYYISRKINTLEDQKRLLLEEQQILKNELEKERFKYYIENSENIGDIAF

SEQ ID NO: 4965 - protein, 63 aa, Helicobacter pylori
  misc_feature (B) LOCATION 1...63
  hypothetical: YES
EYLPGAKEVIPTPSTPLTPSKRYSINLMTENDGYINPYIDEYYTAGNQIGFSTKEFDFLKIKR

SEQ ID NO: 4966 - protein, 151 aa, Helicobacter pylori
  misc_feature (B) LOCATION 1...151
  hypothetical: YES
GYSLGHFSRPRHVYPLTCKQKTGAFDDNHPYGGYLRVNLNVYNRHQTFMELFTISLGTTGQDSLAAQTQRLIHKWGHDPQFYGWNTQLKNEFIFELHYQLLKKVPLLKTRFFSMELMPGFNVELGNARDYFQLGSLFRAGYNLDADYGVNK

SEQ ID NO: 4967 - protein, 336 aa, Helicobacter pylori
  misc_feature (B) LOCATION 1...336
  hypothetical: YES
LFFKFILCLSLGIFAWAKEVIPTPSTPLTPSKRYSINLMTENDGYINPYIDEYYTAGNQIGFSTKEFDFSKNKAMKWSSYLGFFNKSPRVTRFGISLAQDMYTPSLANRKLVHLHDNHPYGGYLRVNLNVYNRHQTFMELFTISLGTTGQDSLAAQTQRLIHKWGHDPQFYGWNTQLKNEFIFELHYQLLKKVPLLKTRFFSMELMPGFNVELGNARDYFQLGSLFRAGYNLDADYGVNKVNTAFDGGMPYSDKFSIYFFAGAFGRFQPLNIFIQGNSPETRGIANLEYFVYASEIGAAMMWRSLRVAFTITDISKTFQSQPKHHQIGTLELNFAF

SEQ ID NO: 4968 - protein, 72 aa, Helicobacter pylori
  misc_feature (B) LOCATION 1...72
  hypothetical: YES
VLKFQKLPLLFVSILYNQSPLLAFDYKFSGVAESVSKVGFNHSKLNSKEGIFPTATFVTATIKLQVNYKSAP

SEQ ID NO: 4969 - protein, 455 aa, Helicobacter pylori
  misc_feature (B) LOCATION 1...455
  hypothetical: YES
VLKFQKLPLLFVSILYNQSPLLAFDYKFSGVAESVSKVGFNHSKLNSKEGIFPTATFVTATIKLQVDSNLLPKNIEKHSLKIGVGGILGALAYDSTKTLIDQATHQIYGSELFYLIGRWWGFLGNAPWKDSLIESDAHTRNYVLYNSYLFYSYGDKFHLKLGRYLSNMDFMSSYTQGFELDYKINSKIALKWFSSFGRALAFGQWIRDWYAPIVTEDGRKEVYDGIHAAQLYFSSKHVQVMPFAYFSPKIYGAPGVKIHIDSNPKFKGLGLRAQTTINVIFPVYAKDLYDVYWRNSKIGEWGASLLIHQRFDYNEFNFGFGYYQNFGNANARIGWYGNPIPFNYRNNSVYGGVFSNAITADAVSGYVFGGGVYRGFLWGILGRYTYATRASERSINLNLGYKWGSFARVDVNLEYYVVSMHNGYRLDYLTGPFNKAFKADAQDRSNLMVSMKFFF

SEQ ID NO: 4970 - protein, 486 aa, Helicobacter pylori
  misc_feature (B) LOCATION 1...486
  hypothetical: YES
YLDNYLNTFIFNGFLRKIDYYASGKLKRIGAVLKFQKLPLLFVSILYNQSPLLAFDYKFSGVAESVSKVGFNHSKLNSKEGIFPTATFVTATIKLQVDSNLLPKNIEKHSLKIGVGGILGALAYDSTKTLIDQATHQIYGSELFYLIGRWWGFLGNAPWKDSLIESDAHTRNYVLYNSYLFYSYGDKFHLKLGRYLSNMDFMSSYTQGFELDYKINSKIALKWFSSFGRALAFGQWIRDWYAPIVTEDGRKEVYDGIHAAQLYFSSKHVQVMPFAYFSPKIYGAPGVKIHIDSNPKFKGLGLRAQTTINVIFPVYAKDLYDVYWRNSKIGEWGASLLIHQRFDYNEFNFGFGYYQNFGNANARIGWYGNPIPFNYRNNSVYGGVFSNAITADAVSGYVFGGGVYRGFLWGILGRYTYATRASERSINLNLGYKWGSFARVDVNLEYYVVSMHNGYRLDYLTGPFNKAFKADAQDRSNLMVSMKFFF

SEQ ID NO: 4971 - protein, 227 aa, Helicobacter pylori
  misc_feature (B) LOCATION 1...227
  hypothetical: YES
VRFGKIDYLNMLPFDVFIKSYPTPCYFKQFLRLKKTYPSKLNESFLFRRIDAGFISSIAGYPFALCSYSLGIVAYKEVLSVLVVNRENAFDKESASSNALSKVLGLKGEVLIGNKALQFYYSNPKKDFIDLAALWYEKKRLPFVFGRLCYYQNKDFYKRLSLAFKHQKTKIPHYILKEAALKTNLKRQDILNYLQKIYYTLGKKEQSGLKAFYRELLFKRIQKPKRF

SEQ ID NO: 4972 - protein, 227 aa, Helicobacter pylori; identical to SEQ ID NO: 4971
  misc_feature (B) LOCATION 1...227
  hypothetical: YES

SEQ ID NO: 4973 - protein, 145 aa, Helicobacter pylori
  misc_feature (B) LOCATION 1...145
  hypothetical: YES
NSFDKYHILGLRVWGDVEYAKAQLGQKVGGNTLLSQANYNPSAIKTYDPTSNAQGSLVLQKTPSPQDFLFNNGHFMAFGLNVNMFVNLPIDTLLKLALKTEKMLFFKIGVFGGGGVEYAILWSPQYKNQNTHQDDKFFAQVGGFL

SEQ ID NO: 4974 - protein, 305 aa, Helicobacter pylori
  misc_feature (B) LOCATION 1...305
  hypothetical: YES
MGRIESKKRLKALIFLASLGVLWGNAAEKTPFFKTKNHIYLGFRLGTGATTRTSMWQQAYKDNPTCPSSVCYGEKLEAHYKGGKNLSYTGQIGDEIAFDKYHILGLRVWGDVEYAKAQLGQKVGGNTLLSQANYNPSAIKTYDPTSNAQGSLVLQKTPSPQDFLFNNGHFMAFGLNVNMFVNLPIDTLLKLALKTEKMLFFKIGVFGGGGVEYAILWSPQYKNQNTHQDDKFFAAGGGFFVNFGGSLYIGKRNRFNVGLKIPYYSLSAQSWKNFGSSNVWQQQTIRQNFSVFRNKEVFVSYAFLF

SEQ ID NO: 4975 - protein, 113 aa, Helicobacter pylori
  misc_feature (B) LOCATION 1...113
  hypothetical: YES
HFVFRGDFCWAYRYYSIDKERETQRHDSSYIVIDELVGMCLAMAINGLSLVGVILSFIFLGCYDITKPSLIGKIDKEVKGGLGVVADDALAGVLAGLSTLLAINILGFFNIKF

SEQ ID NO: 4976 - protein, 158 aa, Helicobacter pylori
  misc_feature (B) LOCATION 1...158
  hypothetical: YES
LNKFGWRACFLTLFFSGYSKKAPGTIGSLVALLLGLPILIFSANTLFLGAIFVGLIAITQIDKEEEETKRHDSSYIVIDELVGMWLAMAISGLSLVGVILSFIFFRIYDITKPSLIGKIDKEVKGGLGVVADDALAGVLAGLSTLLAINILGFFNIKF

SEQ ID NO: 4977 - protein, 668 aa, Helicobacter pylori
  misc_feature (B) LOCATION 1...668
  hypothetical: YES
MKNQHKNPLTKALMKTYPYNHFLFFCFILGAFLLGLLSPAYALSIITTKEIDANLLNGAIESRVVLGKRVFKVEAHGFYFRNNATNSIDIEITSLLRDNQSFPLTSSAKTSLKIPPNAKIKKSTILVLKGENAEEVAKILGVSKEEYQKLENIAQTKAANDPMYANTPFSNGSDSSFYDNNPNSPSNNAINGKDGANGSNGYGANGNDGVNGISGSNGANGSHSNNNAIGSGIDTDGVLGVDGVNGSSSSSGGSVGGYENNFTNHGSTNNNTGGYDNFNNGSSSGGSLGNGGLFPIPFGNGDTNNSNNSTNTTSPTNGSSSNNATNPSSQENNYSSQYCKVPELSPNNTMKLDVIAKDGSCISMNALRDDTKCAYRYDFEAGKAIKQTQYYYVDRENKTQNIGGCVDLQGAQYAMQLYKDDSKCALQTTSDKGYGMGKTQTFQTEIVFRGMDNLIHVAVPCSDYARVQDRIVRYEKNDKTQTLTPIVDQYYNDPNNPNKQEILNRGIATQLSSQYQEFACGQWEYNDAKLEAKRPTMLKSYNKLNGEWVEVTPCNFEAGIKSGAVVSPYVMGVPSSKVLSDITTSHYFRIERKNYGEREQCQKLYGVNRCQPQYSILILVSPIGAPLTKPLPPKPLNLIYAQPKIMKNTPQPIILSPLKPPSTGLKAF

SEQ ID NO: 4978 - protein, 677 aa, Helicobacter pylori
  misc_feature (B) LOCATION 1...677
  hypothetical: YES
IQRYWNGALMKNQHKNPLTKALMKTYPYNHFLFFCFILGAFLLGLLSPAYALSIITTKEIDANLLNGAIESRVVLGKRVFKVEAHGFYFRNNATNSIDIEITSLLRDNQSFPLTSSAKTSLKIPPNAKIKKSTILVLKGENAEEVAKILGVSKEEYQKLENIAQTKAANDPMYANTPFSNGSDSSFYDNNPNSPSNNAINGKDGANGSNGYGANGNDGVNGISGSNGANGSHSNNNAIGSGIDTDGVLGVDGVNGSSSSSGGSVGGYENNFTNHGSTNNNTGGYDNFNNGSSSGGSLGNGGLFPIPFGNGDTNNSNNSTNTTSPTNGSSSNNATNPSSQENNYSSQYCKVPELSPNNTMKLDVIAKDGSCISMNALRDDTKCAYRYDFEAGKAIKQTQYYYVDRENKTQNIGGCVDLQGAQYAMQLYKDDSKCALQTTSDKGYGMGKTQTFQTEIVFRGMDNLIHVAVPCSDYARVQDRIVRYEKNDKTQTLTPIVDQYYNDPNNPNKQEILNRGIATQLSSQYQEFACGQWEYNDAKLEAKRPTMLKSYNKLNGEWVEVTPCNFEAGIKSGAVVSPYVMGVPSSKVLSDITTSHYFRIERKNYGEREQCQKLYGVNRCQPQYSILILVSPIGAPLTKPLPPKPLNLIYAQPKIMKNTPQPIILSPLKPPSTGLKAF

SEQ ID NO: 4979 - protein, 95 aa, Helicobacter pylori
  misc_feature (B) LOCATION 1...95
  hypothetical: YES
RNVEARYYYGDTSYFYLHAGVLQEFAHFGSNDVASLNTFKINAARSPLSTYARAMMGGELQLAKEVFLNLGVVYLHNLISNASHFASNLGMRYSF

SEQ ID NO: 4980 - protein, 133 aa, Helicobacter pylori
  misc_feature (B) LOCATION 1...133
  hypothetical: YES
LFKTNGISVGEYTHFSEDIGSQSRINTVRLETGTRSIFSGGVKFKSGEKLVINDFYYSPWNYFDARNVKNVEITRKFASSTPENPWGTSKLMFNNLTLGQNAVMDYSQFSNLTIQGILSTIKRYHLTKGFFTP

SEQ ID NO: 4981 - protein, 176 aa, Helicobacter pylori
  misc_feature (B) LOCATION 1...176
  hypothetical: YES
AAMMFNNDIDSATGFYKPLIKINSAQDLIKNTEHVLLKAKIIGYGNVSTGTNGISNVNLEEQFKERLALYNNNNRMDTCVVRNTDDIKACGMAIGNQSMVNNPDNYKYLIGKAWRNIGISKTANGSKISVYYLGNSTPTENGGNTTNLPTNTTNNAHSANYALVKNAPFAHNTTPN

SEQ ID NO: 4982 - protein, 175 aa, Helicobacter pylori
  misc_feature (B) LOCATION 1...175
  hypothetical: YES
AMMFNNDIDSATGFYKPLIKINSAQDLIKNTEHVLLKAKIIGYGNVSTGTNGISNVNLEEQFKERLALYNNNNRMDTCVVRNTDDIKACGMAIGNQSMVNNPDNYKYLIGKAWRNIGISKTANGSKISVYYLGNSTPTENGGNTTNLPTNTTNNAHSANYALVKNAPFAHNTTPN

SEQ ID NO: 4983 - protein, 211 aa, Helicobacter pylori
  misc_feature (B) LOCATION 1...211
  hypothetical: YES
KPTNVWANAIGGASLNSGSNASLYGTSAGVDAFLNGNVEAIVGGFGSYGYSSFSNQANSLNSGANNANFGVYSRFFANHPEFDFEAQGALGSDQSSLNFKSTLLQDLNQSYNYLAYSATARASYGYDFAFFRNALVLKPSVGVSYNHLGSTNFKSNSQSQVALKNGASSQHLFNANATWKRVIIMGTLHTFICMREFYKSSLTLDRMMWRL

SEQ ID NO: 4984 - protein, 257 aa, Helicobacter pylori
  misc_feature (B) LOCATION 1...257
  hypothetical: YES
LNSGSNASLYGTSAGVDAFLNGNVEAIVGGFGSYGYSSFSNQANSLNSGANNANFGVYSRFFANQHEFDFEAQGALGSDQSSLNFKSTLLQDLNQSYNYLAYSATARASYGYDFAFFRNALVLKPSVGVSYNHLGSTNFKSNSQSQVALKNGASSQHLFNANANVEARYYYGDTSYFYLHAGVLQEFAHFGSNDVASLNTFKINAARSPLSTYARAMMGGELQLAKEVFLNLGVVYLHNLISNASHFASNLGMRYSF

SEQ ID NO: 4985 - protein, 407 aa, Helicobacter pylori
  misc_feature (B) LOCATION 1...407
  hypothetical: YES
SRTLCAKIVLQKERKKMEIQQTHRKINRPLVSLVLAGALISAIPQESHAAFFTTVIIPAIVGGIATGTAVGTVSGLLSWGLKQAEEANKTPDKPDKVWRIQAGKGFNEFPNKEYDLYKSLLSSKIDGGWDWGNAARHYWVKGGQWNKLEVDMKDAVGTYKLSGLRNFTGGDLDVNMQKATLRLGQFNGNSFTSYKDSADRTTRVNFNAKNISIDNFVEINNRVGSGAGRKASSTVLTLQASEGITSSKNAEISLYDGATLNLASNSVKLNGNVWMGRLQYVGAYLAPSYSTINTSKVQGEVDFNHLTVGDQNAAQAGIIASNKTHIGTLDLWQSAGLNIIAPPEGGYKDKPNSTTSQSGTKNDKKEISQNNNSNTEVINPPNNTQKTETEPTKSLMGLLLKAKTRLS

SEQ ID NO: 4986 - protein, 1288 aa, Helicobacter pylori
  misc_feature (B) LOCATION 1...1288
  hypothetical: YES
MEIQQTHRKINRPLVSLVLAGALISAIPQESHAAFFTTVIIPAIVGGIATGTAVGTVSGLLSWGLKQAEEANKTPDKPDKVWRIQAGKGFNEFPNKEYDLYKSLLSSKIDGGWDWGNAARHYWVKGGQWNKLEVDMKDAVGTYKLSGLRNFTGGDLDVNMQKATLRLGQFNGNSFTSYKDSADRTTRVNFNAKNISIDNFVEINNRVGSGAGRKASSTVLTLQASEGITSSKNAEISLYDGATLNLASNSVKLNGNVWMGRLQYVGAYLAPSYSTINTSKVQGEVDFNHLTVGDQNAAQAGIIASNKTHIGTLDLWQSAGLNIIAPPEGGYKDKPNSTTSQSGTKNDKKEISQNNNSNTEVINPPNNTQKTETEPTQVIDGPFAGGKDTVVNIFHLNTKADGTIKVGGFKASLTTNAAHLNIGKGGVNLSNQASGRTLLVENLTGNITVDGPLRVNNQVGGYALAGSSANFEFKAGVDTKNGTATFNNDISLGRFVNLKVDAHTANFKGIDTGNGGFNTLDFSGVTDKVNINKLITASTNVAVKNFNINELIVKTNGISVGEYTHFSEDIGSQSRINTVRLETGTRSIFSGGVKFKSGEKLVINDFYYSPWNYFDARNVKNVEITRKFASSTPENPWGTSKLMFNNLTLGQNAVMDYSQFSNLTIQGDFINNQGTINYLVRGGKVATLNVGNAAAMMFNNDIDSATGFYKPLIKINSAQDLIKNTEHVLLKAKIIGYGNVSTGTNGISNVNLEEQFKERLALYNNNNRMDTCVVRNTDDIKACGMAIGNQSMVNNPDNYKYLIGKAWRNIGISKTANGSKISVYYLGNSTPTENGGNTTNLPTNTTNNAHSANYALVKNAPFAHSATPNLVAINQHDFGTIESVFELANRSKDIDTLYTHSGAQGRDLLQTLLIDSHDAGYARQMIDNTSTGEITKQLNAATDALNNVASLEHKQSGLQTLSLSNAMILNSRLVNLSRKHTNHINSFAQRLQALKGQEFASLESAAEVLYQFAPKYEKPTNVWANAIGGASLNSGSNASLYGTSAGVDAFLNGNVEAIVGGFGSYGYSSFSNQANSLNSGANNANFGVYSRFFANQHEFDFEAQGALGSDQSSLNFKSTLLQDLNQSYNYLAYSATARASYGYDFAFFRNALVLKPSVGVSYNHLGSTNFKSNSQSQVALKNGASSQHLFNANANVEARYYYGDTSYFYLHAGVLQEFAHFGSNDVASLNTFKINAARSPLSTYARAMMGGELQLAKEVFLNLGVVYLHNLISNASHFASNLGMRYSF

SEQ ID NO: 4987 - protein, 1288 aa, Helicobacter pylori; identical to SEQ ID NO: 4986
  misc_feature (B) LOCATION 1...1288
  hypothetical: YES

SEQ ID NO: 4988 - protein, 75 aa, Helicobacter pylori
  misc_feature (B) LOCATION 1...75
  hypothetical: YES
MPKENTTHEDALAKCFAPAIFKAIMLNKLILAVVAAPIIKMLKLSKEIWWKKMGKKHAIDFKMRIKILASLAPSF

SEQ ID NO: 4989 - protein, 92 aa, Helicobacter pylori
  misc_feature (B) LOCATION 1...92
  hypothetical: YES
PKSPKKIVKRYEKSAWKMPKENTTHEDALAKCFAPAIFKAIMLNKLILAVVAAPIIKMLKLSKEIWWKKMGKKHAIDFKMRIKILASLAPSF

SEQ ID NO: 4990 - protein, 180 aa, Helicobacter pylori
  misc_feature (B) LOCATION 1...180
  hypothetical: YES
MLNKFKKIVGVGVLVGCLGVLQAKNSLFVLPYEQRDALNSLISGISSARENVKIAIYSFTHRDIARAIKSVASRGIKVQIIYDYESNHNNKQSTIGYLDKYPNTKVCLLKGLKAKNGNYYGIMHQKVAIIDDKIVFLGSANWSKNAFENNYEVLLKTDDTETILKAKSYYQKMLEGCVGF

SEQ ID NO: 4991 - protein, 185 aa, Helicobacter pylori
  misc_feature (B) LOCATION 1...185
  hypothetical: YES
NKDHLMLNKFKKIVGVGVLVGCLGVLQAKNSLFVLPYEQRDALNSLISGISSARENVKIAIYSFTHRDIARAIKSVASRGIKVQIIYDYESNHNNKQSTIGYLDKYPNTKVCLLKGLKAKNGNYYGIMHQKVAIIDDKIVFLGSANWSKNAFENNYEVFLKRDDTETIFKAKSYYQKMLEGCVGF

SEQ ID NO: 4992 - protein, 327 aa, Helicobacter pylori
  misc_feature (B) LOCATION 1...327
  hypothetical: YES
VLKGLKKAFKERFCSQVYISFNVDHNLLSAQVLRVKNHRIKEKFFKTFETKVETKNGEVPIQALKIARTYSQKYPYTYFSAMSKAKEVLCEKQAFEQIKQENQDYQACEVNQKYCVYVESKDFLKDFKRFKIQDVDFLFSPFSLIYDFVRDNLENKPLLYLLLERSRFYFLIADKKEIFLAKSVFLEEQPEEFIESKEEDSMGMDNEAVDLFLSEIQEDIDSLEEAIGLDSSKDNSEKITEDAYSLIEGMTNIPLIADVLQEGLRGVYHSREIDFVEKVVVLDSCQIHHKALMHLQETLMIEVDRLDFSLVERLNVLARMENEKHAF

SEQ ID NO: 4993 - protein, 343 aa, Helicobacter pylori
  misc_feature (B) LOCATION 1...343
  hypothetical: YES
RRAWILLGLKNLKGVWVLKGLKKAFKERFCSQVYISFNVDHNLLSAQVLRVKNHRIKEKFFKTFETKVETKNGEVPIQALKIARTYSQKYPYTYFSAMSKAKEVLCEKQAFEQIKQENQDYQACEVNQKYCVYVESKDFLKDFKRFKIQDVDFLFSPFSLIYDFVRDNLENKPLLYLLLERSRFYFLIADKKEIFLAKSVFLEEQPEEFIESKEEDSMGMDNEAVDLFLSEIQEDIDSLEEAIGLDSSKDNSEKITEDAYSLIEGMTNIPLIADVLQEGLRGVYHSREIDFVEKVVVLDSCQIHHKALMHLQETLMIEVDRLDFSLVERLNVLARMENEKHAF

SEQ ID NO: 4994 - protein, 90 aa, Helicobacter pylori
  misc_feature (B) LOCATION 1...90
  hypothetical: YES
MLTIETSKKFDKDLKILVKNGFDLKLLYKVVGNLATEQPLEPKYKDHPLKGALKDFRECHLKPDLLLVYQIKKQENTLFLVRLGSHSELF

SEQ ID NO: 4995 - protein, 93 aa, Helicobacter pylori
  misc_feature (B) LOCATION 1...93
  hypothetical: YES
DLKMLTIETSKKFDKDLKILVKNGFDLKLLYKVVGNLATEQPLEPKYKDHPLKGALKDFRECHLKPDLLLVYQIKKQENTLFLVRLGSHSELF

SEQ ID NO: 4996 - protein, 121 aa, Helicobacter pylori
  misc_feature (B) LOCATION 1...121
  hypothetical: YES
PPFNTYDPFSWQIFKEKTLSLKDEGAFNAMLKSLYYEKSAPELTYLLSQRNKDKIYYYLSPYEGIIEWQNTDERAMAYAIARQESFLLPALISRSFALGLMQIMPFNVGPFAKALAWIMLI

SEQ ID NO: 4997 - protein, 122 aa, Helicobacter pylori
  misc_feature (B) LOCATION 1...122
  hypothetical: YES
TPPFNTYDPFSWQIFKEKTLSLKDEGAFNAMLKSLYYEKSAPELTYLLSQRNKDKIYYYLSPYEGIIEWQNTDERAMAYAIARQESFLLPALISRSFALGLMQIMPFNVGPFAKALAWIMLI

SEQ ID NO: 4998 - protein, 194 aa, Helicobacter pylori
  misc_feature (B) LOCATION 1...194
  hypothetical: YES
RVGFRSFSGGHCAEIFRFNPHPMAFCARQKPLKEIMRFFILFFMGMLGVGFSQTELDLKDLEKKPAGIVRDYYLWRYISDKKTSLENAKKAYELTQNKNSALQKAMQEKGVENSDKSPDAKMPEDIYCKQITLESMLETTDAFQASCIAIALKSKIRDFDKIPIQTFKPLQEKIKEAYPILYEELEILQSKNVS

SEQ ID NO: 4999 - protein, 332 aa, Helicobacter pylori
  misc_feature (B) LOCATION 1...332
  hypothetical: YES
MRFFILFFMGMLGVGFSQTELDLKDLEKKPAGIVRDYYLWRYISDKKTSLENAKKAYELTQNKNSALQKAMQEKGVENSDKSPDAKMPEDIYCKQITLESMLETTDAFQASCIAIALKSKIRDFDKIPIQTFKPLQEKIKEAYPILYEELEILQSKNVSASLFKANAQVFSALFNHLSYEKKLQIFEKHIPIKELNRLLDEDYPAFNRLIYQVILDPKLDHFKDALAKSNATQSNAQTFFILGINEILHKKTSKALKYFERSEAVVKDDDFSKDRAIFWQYLASKKKKTLEHLSQSPALNLYSLYASRKPQNHAQLSHHFSYPKFKPREPSF

SEQ ID NO: 5000 - protein, 463 aa, Helicobacter pylori
  misc_feature (B) LOCATION 1...463
  hypothetical: YES
MAFCARQKPLKEIMRFFILFFMGMLGVGFSQTELDLKDLEKKPAGIVRDYYLWRYISDKKTSLENAKKAYELTQNKNSALQKAMQEKGVENSDKSPDAKMPEDIYCKQITLESMLETTDAFQASCIAIALKSKIRDFDKIPIQTFKPLQEKIKEAYPILYEELEILQSKNVSASLFKANAQVFSALFNHLSYEKKLQIFEKHIPIKELNRLLDEDYPAFNRLIYQVILDPKLDHFKDALAKSNATQSNAQTFFILGINEILHKKTSKALKYFERSEAVVKDDDFSKDRAIFWQYLASKKKKTLEHLSQSPALNLYSLYASRKLKTTPSYRIISHIQNLSQENPPFNTYDPFSWQIFKEKTLSLKDEGAFNAMLKSLYYEKSAPELTYLLSQRNKDKIYYYLSPYEGIIEWQNTDERAMAYAIARQESFLLPALISRSFALGLMQIMPFNVGPFAKALAWIMLI

SEQ ID NO: 5001 - protein, 157 aa, Helicobacter pylori
  misc_feature (B) LOCATION 1...157
  hypothetical: YES
VHLAHYLKRNFSFFPSVDIVDGGTMAQQLIPLITSYEKVLILDCVSAKGVEIGSVYAFDFKDAPKEITWAGSAHEVEMLHTLRLTEFLGDLPKTFIVGLVPFVIGSETTFKLSSEMLNALETALKAIETQLNAWGVKMQRTDHIALDCIAELSYKGF

SEQ ID NO: 5002 - protein, 185 aa, Helicobacter pylori
  misc_feature (B) LOCATION 1...185
  hypothetical: YES
WLWLHQRMSQKILILGIGNILFGDEGIGVHLAHYLKRNFSFFPSVDIVDGGTMAQQLIPLITSYEKVLILDCVSAKGVEIGSVYAFDFKDAPKEITWAGSAHEVEMLHTLRLTEFLGDLPKTFIVGLVPFVIGSETTFKLSSEMLNALETALKAIETQLNAWGVKMQRTDHIALDCIAELSYKGF

SEQ ID NO: 5003 - protein, 137 aa, Helicobacter pylori
  misc_feature (B) LOCATION 1...137
  hypothetical: YES
MRIVRNLFLVSFVAYSSAFAADLETGTKNDKKSGKKFYKLHKNHGSETETKNDKKLYDFTKNSGLEGVDLEKSPNLKSHKKSDKKFYKQLAKNNIAEGVSMPIVNFNKALSFGPYFERTKSKKTQYMDGGLMMHIRF

SEQ ID NO: 5004 - protein, 148 aa, Helicobacter pylori
  misc_feature (B) LOCATION 1...148
  hypothetical: YES
VIKKGYIRGDLMRIVRNLFLVSFVAYSSAFAADLETGTKNDKKSGKKFYKLHKNHGSETETKNDKKLYDFTKNSGLEGVDLEKSPNLKSHKKSDKKFYKQLAKNNIAEGVSMPIVNFNKALSFGPYFERTKSKKTQYMDGGLMMHIRF

SEQ ID NO: 5005 - protein, 157 aa, Helicobacter pylori
  misc_feature (B) LOCATION 1...157
  hypothetical: YES
WLFLTCYGSVIKKGYIRGDLMRIVRNLFLVSFVAYSSAFAADLETGTKNDKKSGKKFYKLHKNHGSETETKNDKKLYDFTKNSGLEGVDLEKSPNLKSHKKSDKKFYKQLAKNNIAEGVSMPIVNFNKALSFGPYFERTKSKKTQYMDGGLMMHIRF

SEQ ID NO: 5006 - protein, 46 aa, Helicobacter pylori
  misc_feature (B) LOCATION 1...46
  hypothetical: YES
IFHSVSVPLIQSGIKIASNNGIYADSVVLNEGGSHFKVFFNYGWVF

SEQ ID NO: 5007 - protein, 323 aa, Helicobacter pylori
  misc_feature (B) LOCATION 1...323
  hypothetical: YES
WLQSRCFRDSAFCLSSEKLFGKNLNKVVILALRDIIHEYGHTLGYTHNGNMTYQRVRLCQEGNGPEARCEGGHEVEKNGKEELEFSNGHEVRDHDGYTYDVCSRFGGKNQPAFPSNYPNSIYTNCAQVPAGLIGVTTAVWQQLINQNALPINFANLNSQTSHLNAGLNAQNFATSMVSAIAQNFSTTSTTTYRSSSKNFRSPILGVNVKIGYQHYFNDYIGLAYYGIIQYNYAQANDEKIQQLSYGGGMDVLFDFITTYTNKKQDHPTKKVFASSFGVFGGLRGLYNSYYVFNQVKGSGNLDIVTGFNYRYKHSKYSIALAFL

SEQ ID NO: 5008 - protein, 416 aa, Helicobacter pylori
  misc_feature (B) LOCATION 1...416
  hypothetical: YES
GDFMLKLASKTICLSLISSFTAVEAFQKHQKDGFFIEAGFETGLLQGAQTKEQAIAQNTQNTQKIYENPLTHPQTKEQPKEQNKSDTATPQSVYGRYYILQNTILEKATELFTAANINGNGLTFYSQNPVYVMAYNKDNAEFEGYGNNSVVVIQNFLPYNLNNIELSYTDAQGKAVNLGVIETIPKDSQIILPASLFNNFSNDSPFNSDGLQQLQTTTTPFSDANTQSLFEKLSQITTNLQMTYINTDPFSSGNNDPNGPLASPKPHYECPGYKKSCQVASVSFTPQTAEELTNLMLDMIAVFDSKSWEEAVLNAPFQFSNSPSECGIDYPKCVNPFNNGLVDPKDEKYALTPEEVINSYRVANELTVNLLNAAKGFLGLGSQLGSANAPDDDGFNQGVLGIAPFALVPKNCSVKI

SEQ ID NO: 5009 - protein, 132 aa, Helicobacter pylori
  misc_feature (B) LOCATION 1...132
  hypothetical: YES
SLGRALFHRAWFALRFVQYNNENASNWMQIPEKDLRKIKHMNNWMPSTNIGFIPVQGDHNVLTYFNYQRSFVPPQLDVLSYGGAEYFTQHFDTVEAGARYTYKDKSASMRTTLGFGRAILPPGSIQSIRAGP

SEQ ID NO: 5010 - protein, 231 aa, Helicobacter pylori
  misc_feature (B) LOCATION 1...231
  hypothetical: YES
ISFNADYFRIWARDFATGQYSVYTSGPMKGNVRPINGYSQGVELELYYRPIRGLQFHAAFNYIDTRVTSHGPLTDLNGDVLKGTSYNKHFPFVSPFQFIFDARYNWRKTTIGISSYFYSRAYSGISNSAAGGYYGMQYYSGGNNYESVLNSGYQCEAWCMTQHEGLLPWYWVWNIQVSQIFWENGRHRVTGSLQINNIFNMKYYFTGIGSSPAGLQPAPGRSVTAYLNYTF

SEQ ID NO: 5011 - protein, 376 aa, Helicobacter pylori
  misc_feature (B) LOCATION 1...376
  hypothetical: YES
LCEGPNVMSGWKPHIKHGVYRNWNNWRNNYTAVYLSDRIEAWDGRFFIVPGLRYAFVQYNNENASNWMQIPEKDLRKIKHMNNWMPSTNIGFIPVQGDHNVLTYFNYQRSFVPPQLDVLSYGGAEYFTQHFDTVEAGARYTYKDKFSFNADYFRIWARDFATGQYSVYTSGPMKGNVRPINGYSQGVELELYYRPIRGLQFHAAFNYIDTRVTSHGPLTDLNGDVLKGTSYNKHFPFVSPFQFIFDARYNWRKTTIGISSYFYSRAYSGISNSAAGGYYGMQYYSGGNNYESVLNSGYQCEAWCMTQHEGLLPWYWVWNIQVSQIFWENGRHRVTGSLQINNIFNMKYYFTGIGSSPAGLQPAPGRSVTAYLNYTF

SEQ ID NO: 5012 - protein, 73 aa, Helicobacter pylori
  misc_feature (B) LOCATION 1...73
  hypothetical: YES
RQRLPISGAATFLTNFGDRESIMGAYRNHHFDALLYYTHPNIFYYRDGDNSMKNLFDPKADNKVTASPSEQTM

SEQ ID NO: 5013 - protein, 104 aa, Helicobacter pylori
  misc_feature (B) LOCATION 1...104
  hypothetical: YES
MTSVLEKYCSFSIFLSLLGTFELEAKEEEKEEKKTERNKDKEKNAQHTLGKVTTQAAKIFNYNNQTTISSKELERRQANQISDMFRRNPNINVGGGAVIAQKIY

SEQ ID NO: 5014 - protein, 157 aa, Helicobacter pylori
  misc_feature (B) LOCATION 1...157
  hypothetical: YES
RTNNVMAKINGYLSERDTLTLSYNMTRDNANRPLRANFTGTFLPYSCGDFNAFPNEKNPSDCLFENDASLFKTYSVNLVHNVSLNYEREGGSRFGDPKLKINGYTSIRNVQIDPLFRPSDIATTIPFTPNPQLSQGEENQCVAQGGIYDALKQTCSI

SEQ ID NO: 5015 - protein, 814 aa, Helicobacter pylori
  misc_feature (B) LOCATION 1...814
  hypothetical: YES
MTSVLEKYCSFSIFLSLLGTFELEAKEEEKEEKKTERNKDKEKNAQHTLGKVTTQAAKIFNYNNQTTISSKELERRQANQISDMFRRNPNINVGGGAVIAQKIYVRGIEDRLARVTVDGVAQMGASYGHQGNTIIDPGMLKSVVVTKGAAQASAGPMALIGAIKMETRSASDFIPKGKDYAISGAATFLTNFGDRETIMGAYRNHHFDALLYYTHQNIFYYRDGDNAMKNLFDPKADNKVTASPSEQNNVMAKINGYLSERDTLTLSYNMTRDNANRPLRANFTGTFLPYSCGDFNAFPNEKNPSDCLFENDASLFKTYSVNLVHNVSLNYEREGGSRFGDPKLKINGYTSIRNVQIDPLFRPSDIATTIPFTPNPQLSQGEENQCVAQGGIYDALKQTCSITFKSLGGGSVVANKNLFIINSGFNANVIHTIDHKNDNLLEYGLNYQNLTTFDKAIPDSELVKPGDAPDACLRVTGPDDPNMNGRCQRNGATANVVGVYAQANYTLHPMVTLGAGTRYDVYTLVDKDWQLHVTQGFSPSAALNVSPLENLNFRLSYAYVTRGPMPGGLVWMRQDNLRYNRNLKPEIGQNAEFNTEYSSQYFDFRAAGFVQLISNYINQFSSTLFVTNLPAQDIIYVPGYEVSGTAKYKGFSLGLSVARSWPSLKGRLIADVYELAATTGNVFILTASYTIPRTGLSITWLSRFVTNLSYCSYSPYRNGPTDIDRRPSNCPKTPGIFHVHKPGYGVSSFFITYKPTYKKLKGLSLNAVFNNVFNQQYIDQASPVMSPDEPNQDKYARGMAEPGFNARFEISYKF

SEQ ID NO: 5016 - protein, 815 aa, Helicobacter pylori
  misc_feature (B) LOCATION 1...815
  hypothetical: YES
MNDKRFRKYCSFSIFLSLLGTFELEAKEEEKEEKKTERNKDKEKNAQHTLGKVTTQAAKIFNYNNQTTISSKELERRQANQISDMFRRNPNINVGGGAVIAQKIYVRGIEDRLARVTVDGVAQMGASYGHQGNTIIDPGMLKSVVVTKGAAQASAGPMALIGAIKMETRSASDFIPKGKDYAISGAATFLTNFGDRETIMGAYRNHHFDALLYYTHQNIFYYRDGDNAMKNLFDPKADNKVTASPSEQNNVMAKINGYLSERDTLTLSYNMTRDNANRPLRANFTGTFLPYSCGDFNAFPNEKNPSDCLFENDASLFKTYSVNLVHNVSLNYEREGGSRFGDPKLKINGYTSIRNVQIDPLFRPSDIATTIPFTPNPQLSQGEENQCVAQGGIYDALKQTCSITFKSLGGGSVVANKNLFIINSGFNANVIHTIDHKNDNLLEYGLNYQNLTTFDKAIPDSELVKPGDAPDACLRVTGPDDPNMNGRCQRNGATANVVGVYAQANYTLHPMVTLGAGTRYDVYTLVDKDWQLHVTQGFSPSAALNVSPLENLNFRLSYAYVTRGPMPGGLVWMRQDNLRYNRNLKPEIGQNAEFNTEYSSQYFDFRAAGFVQLISNYINQFSSTLFVTNLPAQDIIYVPGYEVSGTAKYKGFSLGLSVARSWPSLKGRLIADVYELAATTGNVFILTASYTIPRTGLSITWLSRFVTNLSYCSYSPYRNGPTDIDRRPSNCPKTPGIFHVHKPGYGVSSFFITYKPTYKKLKGLSLNAVFNNVFNQQYIDQASPVMSPDEPNQDKYARGMAEPGFNARFEISYKF

SEQ ID NO: 5017 - protein, 192 aa, Helicobacter pylori
  misc_feature (B) LOCATION 1...192
  hypothetical: YES
LLGRNGVTLNIRQVFWWDNFNWSIGFYNTFGNSDAFLGSHTMPRGNNTSYISNEISVTTRHAGMIGYDFWDNTAYDGLADAITNANTFTFYTSVGGIHKRFAWHVFGRVSHANKNALGQVGRANEYSLQFNASYAFTESVLLNFRITYYGARINKGYQAGYFGAPKFNNPDGDFSANYQDRSYMMTNLTLKF

SEQ ID NO: 5018 - protein, 197 aa, Helicobacter pylori
  misc_feature (B) LOCATION 1...197
  hypothetical: YES
LGAIMDTFLTSILVLLMRGLLNQRAIMQGLMWWIPLFYDTITKDVFGFKAGRYEANIDFMSGSNQGWEVYYQPYKTETQRLRFWWWSSFGRGLAFNSWIYEFFATVPYLKKGGNPSNSNDFINYGWHGITTTYSYKGLDAQFFYYFAPKTYNASGFKLVYDTNRNFENVGFRSQSMIMTTFPLYYRGWYNPETTLIA

SEQ ID NO: 5019 - protein, 208 aa, Helicobacter pylori
  misc_feature (B) LOCATION 1...208
  hypothetical: YES
PRDHTYSLEDSTPHGSLLGRNGVTLNIRQVFWWDNFNWSIGFYNTFGNSDAFLGSHTMPRGNNTSYISNEISVTTRHAGMIGYDFWDNTAYDGLADAITNANTFTFYTSVGGIHKRFAWHVFGRVSHANKNALGQVGRANEYSLQFNASYASTESVLLNFRITYYGARINKGYQAGYFGAPKFNNPDGDFSANYQDRSYMMTNLTLKF

SEQ ID NO: 5020 - protein, 264 aa, Helicobacter pylori
  misc_feature (B) LOCATION 1...264
  hypothetical: YES
KKGIYPTESFIDIVTLAQVKVNLLPKGTENHRLSVSLGGAIAAIPYDKTKYYINQANGKVFGPIVENFIGGYHGYFFNKYLGPAYAGTSQSASYHARPYVVDTLFYQTITTILWVKAGRYETNIDVMSGSNQGWEVYYQPYKTETQRLRFWWWSSFGRGLAFNSWIYEFFATVPYLKKGGNPSNSNDFINYGWHGITTTYSYKGLDAQFFYYFAPKTYNASGFKLVYDTNRNFENVGFRSQSMIMTTFPLYYRGWYNPETTLIA

SEQ ID NO: 5021 - protein, 263 aa, Helicobacter pylori
  misc_feature (B) LOCATION 1...263
  hypothetical: YES
KGIYPTESFIDIVTLAQVKVNLLPKGTENHRLSVSLGGAIAAIPYDKTKYYINQANGKVFGPIVENFIGGYHGYFFNKYLGPAYAGTSQSASYHARPYVVDTLFYQTITTILWVKAGRYETNIDVMSGSNQGWEVYYQPYKTETQRLRFWWWSSFGRGLAFNSWIYEFFATVPYLKKGGNPSNSNDFINYGWHGITTTYSYKGLDAQFFYYFAPKTYNASGFKLVYDTNRNFENVGFRSQSMIMTTFPLYYRGWYNPETTLIA

SEQ ID NO: 5022 - protein, 398 aa, Helicobacter pylori
  misc_feature (B) LOCATION 1...398
  hypothetical: YES
LGAIMDTFLTSILVLLMRGLLNQRAIMQGLMWWIPLFYDTITKDVFGFKAGRYEANIDFMSGSNQGWEVYYQPYKTETQRLRFWWWSSFGRGLAFNSWIYEFFATVPYLKKGGNPSNSNDFINYGWHGITTTYSYKGLDAQFFYYFAPKTYNAPGFKLVYDTNRNFENVGFRSQSMIMTTFPLYYRGWYNPETNTYSLEDSTPHGSLLGRNGVTLNIRQVFWWDNFNWSIGFYNTFGNSDAFLGSHTMPRGNNTSYISNEISVTTRHAGMIGYDFWDNTAYDGLADAITNANTFTFYTSVGGIHKRFAWHVFGRVSHANKNALGQVGRANEYSLQFNASYAFTESVLLNFRITYYGARINKGYQAGYFGAPKFNNPDGDFSANYQDRSYMMTNLTLKF

SEQ ID NO: 5023 - protein, 86 aa, Helicobacter pylori
  misc_feature (B) LOCATION 1...86
  hypothetical: YES
LPGDDVLMRDPTVIYQRNLRPSIGQNVEFNVDYNSKYFNVRGAAFYQVINNFINSYGQDTSKNGGGNATAKNMSGNLPETINVYGY

SEQ ID NO: 5024 - protein, 86 aa, Helicobacter pylori
  misc_feature (B) LOCATION 1...86
  hypothetical: YES
GALPGDDVLMRDPTVIYQRNLRPSIGQNVEFNVDYNSKYFNVRGAAFYQVINNFINSYGQDTSKNGGGNATAKNMSGNLPETINVY

SEQ ID NO: 5025 - protein, 560 aa, Helicobacter pylori
  misc_feature (B) LOCATION 1...560
  hypothetical: YES
MGNFNSYGDLVFNLSHSVSHAIINTQGTATIMANNNPLIQFNASSKEVGTYTLIDSAKAIYYGYNNQITGGSSLDNYLKLYALIDINGKHMVMTDNGLTYNGQAVSVKDGGLVVGFKDSQNQYIYTSILYNKVKIAVSNDPINNPQAPTLKQYIAQIQGVQSVDSIXQAGGNQAINWLNKIFETKGSPLFAPYYLESHSTKDLTTIAGDIANTLEVIANPNFKNDATNILQINTYTQQMSRLAKLSDTSTFARSDFLERLEALKNKRFADAIPNAMDVILKYSQRNRVKNNVWATGVGGASFISGGTXTLYGINXGYDRFIKGVIVGGYAAYGYSGFHANITQSGSSNVNVGVYSRAFIKRSELTMSLNETWGYNKTFINSYDPLLSIINQSYRYDTWTTDAKINYGYDFMFKDKSVIFKPQVGLSYYYIGLSGLRGIMDDPIYNQFRANADPNKKSVLTINFALESRHYFNKNSYYFVIADVGRDLFINSMGDKMVRFIGNNTLSYRDGGRYNTFASIITGGEIRLFKTFYVNAGIGARFGLDYKDINITGNIGMXXXF

SEQ ID NO: 5026 - protein, 1382 aa, Helicobacter pylori
  misc_feature (B) LOCATION 1...1382
  hypothetical: YES
LNFNNLTANGALNFNGYAPSLTKALMNVSGQFVLGNNGDINLSDINIFDNITKSVTYNILNAQKGITGISGANGYEKILFYGMKIQNATYSDNNNIQTWSFINPLNSSQIIQESIKNGDLTIEVLNNPNSASNTIFNIAPELYNYQDSKQNPTGYSYDYSDNQAGTYYLTSNIKGLFTPKGSQTPQTPGTYSPFNQPLNSLNIYNKGFSSENLKTLLGILSQNSATLKEMIESNQLDNITNINEVLQLLDKIKITQAQKQALLETINHLTDNINQTFNNGNLVIGATQDNVTNSTSSIWFGGNGYSSPCALDSATCSSFRNTYLGQLLGSTSPYLGYINADFKAKSIYITGTIGSSNAFESGGSADVTFQSANNLVLNKANIEAQATDNIFNLLGQEGIDKIFNQGNLANVLSQMAMEKIKQAGGLGNFIENALSPLSKELPASLQDETLGQLIGQNNLDDLLNNSGVMNEIQNIISQKLSIFGNFVTPSIIENYLAKQSLKSMLDDKGLLNFIGGYIDASELSSILGVILKDITNPPTSLQKDIGVVANDLLNEFLGQDVVKKLESQGLVSNIINNVISQGGLSGVYNQGLGSVLPPSLQNALKENDLGTLLSPRGLHDFWQKGYFNFLSNGYVFVNNSSFSNATGGSLNFVANKSIIFNGDNTIDFSKYQGALIFASNGVSNINITTLNATNGLSLNAGLNNVSVQKGEICINLANCPTTKNSSPANSSVTPTNESLSVHANNFTFLGTIISNGAIDLSQVTNNSVIGTLNLNENATLQANNLTITNAFNNASNSTANIDGNFTLNQQATLSTNASGLNVMGNFNSYGDLVFNLSHSVSHAIINTQGTATIMANNNPLIQFNASSKEVGTYTLIDSAKAIYYGYNNQITGGSSLDNYLKLYALIDINGKHMVMTDNGLTYNGQAVSVKDGGLVVGFKDSQNQYIYTSILYNKVKIAVSNDPINNPQAPTLKQYIAQIQGVQSVDSIDQAGGNQAINWLNKIFETKGSPLFAPYYLESHSTKDLTTIAGDIANTLEVIANPNFKNDATNILQINTYTQQMSRLAKLSDTSTFARSDFLERLEALKNKRFADAIPNAMDVILKYSQRNRVKNNVWATGVGGASFISGGTGTLYGINVGYDRFIKGVIVGGYAAYGYSGFHANITQSGSSNVNVGVYSRAFIKRSELTMSLNETWGYNKTFINSYDPLLSIINQSYRYDTWTTDAKINYGYDFMFKDKSVIFKPQVGLSYYYIGLSGLRGIMDDPIYNQFRANADPNKKSVLTINFALESRHYFNKNSYYFVIADVGRDLFINSMGDKMVRFIGNNTLSYRDGGRYNTFASIITGGEIRLFKTFYVNAGIGARFGLDYKDINITGNIGMRYAF

SEQ ID NO: 5027 - protein, 1413 aa, Helicobacter pylori
  misc_feature (B) LOCATION 1...1413
  hypothetical: YES
TLISIFSASQADFGGNTTIDTASFNFDSASSLNFNNLTANGALNFNGYAPSLTKALMNVSGQFVLGNNGDINLSDINIFDNITKSVTYNILNAQKGITGISGANGYEKILFYGMKIQNATYSDNNNIQTWSFINPLNSSQIIQESIKNGDLTIEVLNNPNSASNTIFNIAPELYNYQDSKQNPTGYSYDYSDNQAGTYYLTSNIKGLFTPKGSQTPQTPGTYSPFNQPLNSLNIYNKGFSSENLKTLLGILSQNSATLKEMIESNQLDNITNINEVLQLLDKIKITQAQKQALLETINHLTDNINQTFNNGNLVIGATQDNVTNSTSSIWFGGNGYSSPCALDSATCSSFRNTYLGQLLGSTSPYLGYINADFKAKSIYITGTIGSSNAFESGGSADVTFQSANNLVLNKANIEAQATDNIFNLLGQEGIDKIFNQGNLANVLSQMAMEKIKQAGGLGNFIENALSPLSKELPASLQDETLGQLIGQNNLDDLLNNSGVMNEIQNIISQKLSIFGNFVTPSIIENYLAKQSLKSMLDDKGLLNFIGGYIDASELSSILGVILKDITNPPTSLQKDIGVVANDLLNEFLGQDVVKKLESQGLVSNIINNVISQGGLSGVYNQGLGSVLPPSLQNALKENDLGTLLSPRGLHDFWQKGYFNFLSNGYVFVNNSSFSNATGGSLNFVANKSIIFNGDNTIDFSKYQGALIFASNGVSNINITTLNATNGLSLNAGLNNVSVQKGEICINLANCPTTKNSSPANSSVTPTNESLSVHANNFTFLGTIISNGAIDLSQVTNNSVIGTLNLNENATLQANNLTITNAFNNASNSTANIDGNFTLNQQATLSTNASGLNVMGNFNSYGDLVFNLSHSVSHAIINTQGTATIMANNNPLIQFNASSPEVGTYTLIDSAKAIYYGYNNQITGGSSLDNYLKLYALIDINGKHMVMTDNGLTYNGQAVSVKDGGLVVGFKDSQNQYIYTSILYNKVKIAVSNDPINNPQAPTLKQYIAQIQGVQSVDSIDQAGGNQAINWLNKIFETKGSPLFAPYYLESHSTKDLTTIAGDIANTLEVIANPNFKNDATNILQINTYTQQMSRLAKLSDTSTFARSDFLERLEALKNKRFADAIPNAMDVILKYSQRNRVKNNVWATGVGGASFISGGTGTLYGINVGYDRFIKGVIVGGYAAYGYSGFHANITQSGSSNVNVGVYSRAFIKRSELTMSLNETWGYNKTFINSYDPLLSIINQSYRYDTWTTDAKINYGYDFMFKDKSVIFKPQVGLSYYYIGLSGLRGIMDDPIYNQFRANADPNKKSVLTINFALESRHYFNKNSYYFVIADVGRDLFINSMGDKMVRFIGNNTLSYRDGGRYNTFASIITGGEIRLFKTFYVNAGIGARFGLDYKDINITGNIGMRYAF

SEQ ID NO: 5028 - protein, 251 aa, Helicobacter pylori
  misc_feature (B) LOCATION 1...251
  hypothetical: YES
MKLPVVESFFSLQGEGKRIGKPSLFLRLGGCNLSCKGFNCKTLFNDEILTGCDSLYAVHPKFKTSWDYYNEPKPLIERLVNLAPNYKDFDFILTGGEPSLYFNNPILLSVLEHFYHKKIPLFVESNGSIFFEFSPILKELHFTLSVKLSFSLEQESKRINLKALQNILNNAKSVHFKFVLESQNAAHSIAEIQSLLKQLSLKNNEIFLMPLGTTNNELDKNLKTLAPLAIEHGFRLSDRLHIRLWDNKKGF

SEQ ID NO: 5029 - protein, 257 aa, Helicobacter pylori
  misc_feature (B) LOCATION 1...257
  hypothetical: YES
ALTPNPMKLPVVESFFSLQGEGKRIGKPSLFLRLGGCNLSCKGFNCKTLFNDEILTGCDSLYAVHPKFKTSWDYYNEPKPLIERLVNLAPNYKDFDFILTGGEPSLYFNNPILLSVLEHFYHKKIPLFVESNGSIFFEFSPILKELHFTLSVKLSFSLEQESKRINLKALQNILNNAKSVHFKFVLESQNAAHSIAEIQSLLKQLSLKNNEIFLMPLGTTNNELDKNLKTLAPLAIEHGFRLSDRLHIRLWDNKKGF

SEQ ID NO: 5030 - protein, 93 aa, Helicobacter pylori
  misc_feature (B) LOCATION 1...93
  hypothetical: YES
KRNFSSSFGIFGGLRGLYNSYYVLNKVKGSGNLDVATGLNYRYKHSKYSVGISIPLIQRKASVVSSGGDYTNSFVFNEGASHFKVFFNYGWVF

SEQ ID NO: 5031 - protein, 544 aa, Helicobacter pylori
  misc_feature (B) LOCATION 1...544
  hypothetical: YES
VIETIPKHSKIVLPGEAFDSLKEAFDKIDPYTFFFPKFEATSTSISDTNTQRVFETLNNIKTNLIMKYSNENPNNFNTCPYNNNGNTKNDCWQNFTPQTAEEFTNLMLNMIAVLDSQSWGDAILNAPFEFTNSSTDCDSDPSKCVNPGVNGRVDTKVDQQYILNKQGIINNFRKKIEIDAVVLKNSGVVGLANGYGNDGEYGTLGVEAYALDPKKLFGNDLKTINLEDLRTILHEFSHTKGYGHNGNMTYQRVPVTKDGQVEKDSNGKPKDSDGLPYNVCSLYGGSNQPAFPSNYPNSIYHNCADVPAGFLGVTAAVWQQLINQNALPINYANLGSQTNYNLNASLNTQDLANSMLSTIQKTFVTSSVTNHHFSNASQSFRSPILGVNAKIGYQNYFNDFIGLAYYGIIKYNYAKAVNQKVQQLSYGGGIDLLLDFITTYSNKNSPTGIQTKRNFSSSFGIFGGLRGLYNSYYVLNKVKGSGNLDVATGLNYRYKHSKYSVGISIPLIQRKASVVSSGGDYTNSFVFNEGASHFKVFFNYGGCF

SEQ ID NO: 5032 - protein, 548 aa, Helicobacter pylori
  misc_feature (B) LOCATION 1...548
  hypothetical: YES
IDLGVIETIPKHSKIVLPGEAFDSLKEAFDKIDPYTFFFPKFEATSTSISDTNTQRVFETLNNIKTNLIMKYSNENPNNFNTCPYNNNGNTKNDCWQNFTPQTAEEFTNLMLNMIAVLDSQSWGDAILNAPFEFTNSSTDCDSDPSKCVNPGVNGRVDTKVDQQYILNKQGIINNFRKKIEIDAVVLKNSGVVGLANGYGNDGEYGTLGVEAYALDPKKLFGNDLKTINLEDLRTILHEFSHTKGYGHNGNMTYQRVPVTKDGQVEKDSNGKPKDSDGLPYNVCSLYGGFNQPAFPSNYPNSIYHNCADVPAGFLGVTAAVWQQLINQNALPINYANLGSQTNYNLNASLNTQDLANSMLSTIQKTFVTSSVTNHHFSNASQSFRSPILGVNAKIGYQNYFNDFIGLAYYGIIKYNYAKAVNQKVQQLSYGGGIDLLLDFITTYSNKNSPTGIQTKRNFSSSFGIFGGLRGLYNSYYVLNKVKGSGNLDVATGLNYRYKHSKYSVGISIPLIQRKASVVSSGGDYTNSFVFNEGASHFKVFFNYGWVF

SEQ ID NO: 5033 - protein, 668 aa, Helicobacter pylori
  misc_feature (B) LOCATION 1...668
  hypothetical: YES
MRKLFIPLLLFSALEANEKNGFFIEAGFETGLLEGTQTQEKRHTTTKNTYATYNYLPTDTILKRAANLFTNAEAISKLKFSSLSPVRVLYMYNGQLTIENFLPYNLNNVKLSFTDAQGNTIDLGVIETIPKHSKIVLPGEAFDSLKEAFDKIDPYTLFLPKFEATSTSISDTNTQRVFETLNNIKTNLIMKYSNENPNNFNTCPYNNNGNTKNDCWQNFTPQTAEEFTNLMLNMIAVLDSQSWGDAILNAPFEFTNSSTDCDSDPSKCVNPGVNGRVDTKVDQQYILNKQGIINNFRKKIEIDAVVLKNSGVVGLANGYGNDGEYGTLGVEAYALDPKKLFGNDLKTINLEDLRTILHEFSHTKGYGHNGNMTYQRVPVTKDGQVEKDSNGKPKDSDGLPYNVCSLYGGSNQPAFPSNYPNSIYHNCADVPAGFLGVTAAVWQQLINQNALPINYANLGSQTNYNLNASLNTQDLANSMLSTIQKTFVTSSVTNHHFSNASQSFRSPILGVNAKIGYQNYFNDFIGLAYYGIIKYNYAKAVNQKVQQLSYGGGIDLLLDFITTYSNKNSPTGIQTKRNFSSSFGIFGGLRGLYNSYYVLNKVKGSGNLDVATGLNYRYKHSKYSVGISIPLIQRKASVVSSGGDYTNSFVFNEGASHFKVFFNYGWVF

SEQ ID NO: 5034 - protein, 139 aa, Helicobacter pylori
  misc_feature (B) LOCATION 1...139
  hypothetical: YES
MRSPNLEKEETEIIETLLVREKMRLCPLYWRILAFLIDSLLVAFLLSDLLRACAFLHSLYWLTNPIYYSAFVVMGFIILYGVYEIFFVCLCKMSLAKLVFRIKIIDIYLADCPSRGYFIEAFRVKNRGFSMPLFMVCGV

SEQ ID NO: 5035 - protein, 159 aa, Helicobacter pylori
  misc_feature (B) LOCATION 1...159
  hypothetical: YES
MRSPNLEKEETEIIETLLVREKMRLCPLYWRILAFLIDSLLVAFLLSDLLRACAFLHSLYWLTNPIYYSAFVVMGFIILYGVYEIFFVCLCKMSLAKLVFRIKIIDIYLADCPSRAILLKRLGLKIVVFLCPFLWFVVFKNPYHRAWHEEKSKSLLVLF

SEQ ID NO: 5036 - protein, 146 aa, Helicobacter pylori
  misc_feature (B) LOCATION 1...146
  hypothetical: YES
MRLLFLLLSATLMLLAEEKIPLSDDAPIKLVHWQNALKEVQPDSNAPATPPIKAVQTTLTFETPFNKTPKIMEVEGQKVIVLKNAQLDSKKTMDFKEASLNALEMFSYQNDIYLLSKKAKAGLEIQASSSKDKKQLAFFFYPKVFI

SEQ ID NO: 5037 - protein, 148 aa, Helicobacter pylori
  misc_feature (B) LOCATION 1...148
  hypothetical: YES
KFMRLLFLLLSATLMLLAEEKIPLSDDAPIKLVHWQNALKEVQPDSNAPATPPIKAVQTTLTFETPFNKTPKIMEVEGQKVIVLKNAQLDSKKTMDFKEASLNALEMFSYQNDIYLLSKKAKAGLEIQASSSKDKKQLAFFFYPKVFI

SEQ ID NO: 5038 - protein, 160 aa, Helicobacter pylori
  misc_feature (B) LOCATION 1...160
  hypothetical: YES
KATRFLFLPKGFHLAPPPSLKEKSQHANLASQDEKERAKSPSNALELKPPLDLSHAYKGLAVIAVLLLILYVIKKKIVPTPGSFLKKDLKLDISVLGRVDANHKIISIETNKERYLVLLSDKYGLLLDKISPKTSKEELIKEAENKIKNSKLGNLYAGKF

SEQ ID NO: 5039 - protein, 293 aa, Helicobacter pylori
  misc_feature (B) LOCATION 1...293
  hypothetical: YES
MRLLFLLLSATLMLLAEEKIPLSDDAPIKLVHWQNALKEVQPDSNAPATPPIKAVQTTLTFETPFNKTPKIMEVEGQKVIVLKNAQLDSKKTMDFKEASLNALEMFSYQNDIYLLSKKAKAGLEIQASSSKDKKQLRFLFLPKGFHLAPPPSLKEKSQHANLASQDEKERAKSPSNALELKPPLDLSHAYKGLAVIAVLLLILYVIKKKIVPTPGSFLKKDLKLDISVLGRVDANHKIISIETNKERYLVLLSDKYGLLLDKISPKTSKEELIKEAENKIKNSKLGNLYAGKF

SEQ ID NO: 5040 - protein, 293 aa, Helicobacter pylori; identical to SEQ ID NO: 5039
  misc_feature (B) LOCATION 1...293
  hypothetical: YES

SEQ ID NO: 5041 - protein, 105 aa, Helicobacter pylori
  misc_feature (B) LOCATION 1...105
  hypothetical: YES
TKKLNNTLFNKGLIIFKMFKKIIFLCVFLIGGFVIPPLEAMPILRNKTPKKNYQEAHEKLYRSIINRQKLTRKKSGWYFLGGVGAVEAIKDYQGKEMKDWMPRSI

SEQ ID NO: 5042 - protein, 124 aa, Helicobacter pylori
  misc_feature (B) LOCATION 1...124
  hypothetical: YES
GLSRQGNERLDATLNLKTGVQSFFKKYIGIRGVFAWDLGSGKVNYQSYKDPTNSFFTMLAVGLDVIMEFPLGSYKHYLGAFGGARGALVVYTDKQNFKFFKHSVVSGGLAISGGWLILLRTPHF

SEQ ID NO: 5043 - protein, 231 aa, Helicobacter pylori
  misc_feature (B) LOCATION 1...231
  hypothetical: YES
MFKKIIFLCVFLIGGFVIPPLEAMPILRNKTPKKNYQEAHEKLYRSIINRQKLTRKKSGWYFLGGVGAVEAIKDYQGKEMKDWIATLNLKTGVQSFFKKYIGIRGVFAWDLGSGKVNYQSYKDPTNSFFTMLAVGLDVIMEFPLGSYKHYLGAFGGARGALVVYTDKQNFKFFKHSVVSGGLAISGGVMLTLFLRHRIELGFKILPTARLLSSSSRFETSPLFYAAYSYKF

SEQ ID NO: 5044 - protein, 68 aa, Helicobacter pylori
  misc_feature (B) LOCATION 1...68
  hypothetical: YES
GVSIIMVLKTKLKIISSVILSTLLWVGCSSEMATYQNVNDATKNTTASINSTDLLLTANAMLDSMLGT

SEQ ID NO: 5045 - protein, 155 aa, Helicobacter pylori
  misc_feature (B) LOCATION 1...155
  hypothetical: YES
RDVRFHVRDLVRQLKGKHLIEVSDVINDTTQPNLDMNLLTTEIARQLRLRSNGRFNITRASGGSGIEADSRMVKQREKERESEEYNQDTTVEKGTLKAADLSLSGKVSSIAASISSSRQRLDYDFTLSLTNRKTGEEVWSDVKPIVKNASNKRMF

SEQ ID NO: 5046 - protein, 210 aa, Helicobacter pylori
  misc_feature (B) LOCATION 1...210
  hypothetical: YES
MVLKTKLKIISSVILSTLLWVGCSSEMATYQNVNDATKNTTASINSTDLLLTANAMLDSMFSDPNFEQLKGKHLIEVSDVINDTTQPNLDMNLLTTEIARQLRLRSNGRFNITRASGGSGIEADSRMVKQREKERESEEYNQDTTVEKGTLKAADLSLSGKVSSIAASISSSRQRLDYDFTLSLTNRKTGEEVWSDVKPIVKNASNKRMF

SEQ ID NO: 5047 - protein, 92 aa, Helicobacter pylori
  misc_feature (B) LOCATION 1...92
  hypothetical: YES
APCYSDYLTCVNPYNDGLVDPKLIAKNKGDEYNIENGQTGSVILTPQDVIYSYRVANNIYVNLLPTRGGDLGLGSQYGGPNGQAMMAPILAL

SEQ ID NO: 5048 - protein, 215 aa, Helicobacter pylori
  misc_feature (B) LOCATION 1...215
  hypothetical: YES
MLKLASKTICLSLISSFTAVEAFQKHQKDGFFIEAGFETGLLQGTQTQEQTIATTQEKPKPKPKPKPITPQSTYGKYYISQSTILKNATELFAEDNITNLTFYSQNPVYVTAYNQESAEEAGYGNNSLIMIQNFLPYNLNNIELSYTDDQGNVVSLGVIETIPKQSQIILPASLFNDPQLNADGSNNSKPTPHDFLMPARRICLTSSARLQPIFK

SEQ ID NO: 5049 - protein, 393 aa, Helicobacter pylori
  misc_feature (B) LOCATION 1...393
  hypothetical: YES
YLCESLAHKRRGFRVRVSIWWPEWPGDDGTNFGALGILSPFLDPEILFGKELNKVAIMQLRDIIHEYGHTLGYTHNGNMTYQRVRMCEENNGPEERCQGGRIEQVDGKEVQVFDNGHEVRDTDGSTYDVCSRFKDKPYTAGSYPNSIYTDCSQVPAGLIGVTSAVWQQLIDQNALPVDFTNLSSQTNYLNASLNTQDFATTMLSAISQSLSSSKSSATTYRTSKTSRPFGAPLLGVNLKMGYQKYFNDYLGLSSYGIIKYNYAQANNEKIQQLSYGVGMDVLFDFITNYTNEKNPKSNLTKKVFTSSLGVFGGLRGLYNSYYVLNQYKGSGNLNVTGGLNYRYKHSKYSIGISVPLVQLKSRIVSSDGAYTNSITLNEGGSHFKVFFNYGWIF

SEQ ID NO: 5050 - protein, 529 aa, Helicobacter pylori
  misc_feature (B) LOCATION 1...529
  hypothetical: YES
MTYINYNQFSSGNGSGSKPPCPPYENQANCVAKVPPFTSQDAKNLTNLMLNMMAVFDSKSWEDAVLNAPFQFSDNNLSAPCYSDYLTCVNPYNDGLVDPKLIAKNKGDEYNIENGQTGSVILTPQDVIYSYRVANNIYVNLLPTRGGDLGLGSQYGGPNGPGDDGTNFGALGILSPFLDPEILFGKELNKVAIMQLRDIIHEYGHTLGYTHNGNMTYQRVRMCEENNGPEERCQGGRIEQVDGKEVQVFDNGHEVRDTDGSTYDVCSRFKDKPYTAGSYPNSIYTDCSQVPAGLIGVTSAVWQQLIDQNALPVDFTNLSSQTNYLNASLNTQDFATTMLSAISQSLSSSKSSATTYRTSKTSRPFGAPLLGVNLKMGYQKYFNDYLGLSSYGIIKYNYAQANNEKIQQLSYGVGMDVLFDFITNYTNEKNPKSNLTKKVFTSSLGVFGGLRGLYNSYYLLNQYKGSGNLNVTGGLNYRYKHSKYSIGISVPLVQLKSRIVSSDGAYTNSITLNEGGSHFKVFFNYGWIF

SEQ ID NO: 5051 - protein, 744 aa, Helicobacter pylori
  misc_feature (B) LOCATION 1...744
  hypothetical: YES
MLKLASKTICLSLISSFTAVEAFQKHQKDGFFIEAGFETGLLQGTQTQEQTIATTQEKPKPKPKPKPITPQSTYGKYYISQSTILKNATELFAEDNITNLTFYSQNPVYVTAYNQESAEEAGYGNNSLIMIQNFLPYNLNNIELSYTDDQGNVVSLGVIETIPKQSQIILPASLFNDPQLNADGFQQLQTNTTRFSDASTQNLFNKLSKVTTNLQMTYINYNQFSSGNGSGSKPPCPPYENQANCVAKVPPFTSQDAKNLTNLMLNMMAVFDSKSWEDAVLNAPFQFSDNNLSAPCYSDYLTCVNPYNDGLVDPKLIAKNKGDEYNIENGQTGSVILTPQDVIYSYRVANNIYVNLLPTRGGDLGLGSQYGGPNGPGDDGTNFGALGILSPFLDPEILFGKELNKVAIMQLRDIIHEYGHTLGYTHNGNMTYQRVRMCEENNGPEERCQGGRIEQVDGKEVQVFDNGHEVRDTDGSTYDVCSRFKDKPYTAGSYPNSIYTDCSQVPAGLIGVTSAVWQQLIDQNALPVDFTNLSSQTNYLNASLNTQDFATTMLSAISQSLSSSKSSATTYRTSKTSRPFGAPLLGVNLKMGYQKYFNDYLGLSSYGIIKYNYAQANNEKIQQLSYGVGMDVLFDFITNYTNEKNPKSNLTKKVFTSSLGVFGGLRGLYNSYYLLNQYKGSGNLNVTGGLNYRYKHSKYSIGISVPLVQLKSRIVSSDGAYTNSITLNEGGSHFKVFFNYGWIF

SEQ ID NO: 5052 - protein, 61 aa, Helicobacter pylori
  misc_feature (B) LOCATION 1...61
  hypothetical: YES
MQEFSLWCDFIERDFLENDFLKLINKGAICGXTSNPSLFCEAITKSAFYQDEIAKXQRQKS

SEQ ID NO: 5053 - protein, 316 aa, Helicobacter pylori
  misc_feature (B) LOCATION 1...316
  hypothetical: YES
MQEFSLWCDFIERDFLENDFLKLINKGAICGATSNPSLFCEAITKSAFYQDEIAKLKGKKAKEIYETLALKDILQASSALMPLYEKDPNNGYISLEIDPFLEDDAIKSIDEAKRLFKTLNRPNVMIKVPASESAFEVISALAQASIPINVTLVFSPKIAGEIAQILAKEARKRAVISVFVSRFDKEIDPLVPQNLQAQSGIMNATECYYQINQHANKLISTLFASTGVKSNSLAKDYYIKALCFKNSINTAPLDALNAYLLDPNTECQTPLKITEIEAFKKELKTHNIDLENTAQKLLKEGLIAFKQSFEKLLSSF

SEQ ID NO: 5054 - protein, 327 aa, Helicobacter pylori
  misc_feature (B) LOCATION 1...327
  hypothetical: YES
RLLSQFKTRINMQEFSLWCDFIERDFLENDFLKLINKGAICGATSNPSLFCEAITKSAFYQDEIAKLKGKKAKEIYETLALKDILQASSALMPLYEKDPNNGYISLEIDPFLEDDAIKSIDEAKRLFKTLNRPNVMIKVPASESAFEVISALAQASIPINVTLVFSPKIAGEIAQILAKEARKRAVISVFVSRFDKEIDPLVPQNLQAQSGIMNATECYYQINQHANKLISTLFASTGVKSNSLAKDYYIKALCFKNSINTAPLDALNAYLLDPNTECQTPLKITEIEAFKKELKTHNIDLENTAQKLLKEGLIAFKQSFEKLLSSF

SEQ ID NO: 5055 - protein, 87 aa, Helicobacter pylori
  misc_feature (B) LOCATION 1...87
  hypothetical: YES
MFILFKFGRVLGKAYSLYLYIYESLICQAFGLSLSCNNSMLFSTFLINLPLPHNESLCCCRDILAYSNSSSLKTYSLESNFSFNSLF

SEQ ID NO: 5056 - protein, 100 aa, Helicobacter pylori
  misc_feature (B) LOCATION 1...100
  hypothetical: YES
PKPYAVSILCICVMFILFKFGRVLGKAYSLYLYIYESLICQAFGLSLSCNNSMLFSTFLINLPLPHNESLCCCRDILAYSNSSSLKTYSLESNFSFNSLF

SEQ ID NO: 5057 - protein, 75 aa, Helicobacter pylori
  misc_feature (B) LOCATION 1...75
  hypothetical: YES
LKILTLFLIGLNALFALDLNALKTEIKETYLKEYKDLKLEIETINLEIPERFSHASILSYELNASNKLKKDGSCF

SEQ ID NO: 5058 - protein, 148 aa, Helicobacter pylori
  misc_feature (B) LOCATION 1...148
  hypothetical: YES
MEFLSGYFLWVKAFHVIAVISWMAALFYLPRLFVYHAENAHKKEFVGVVQIQEKKLYSFIASPAMGFTLITGILMLLIAPEMFKSGGWLHAKLALVVLLLIYHFYCKKCMRELEKDPTGKNARFYRVFNEIPTILMILIVILVVVKPF

SEQ ID NO: 5059 - protein, 148 aa, Helicobacter pylori; identical to SEQ ID NO: 5058
  misc_feature (B) LOCATION 1...148
  hypothetical: YES

SEQ ID NO: 5060 - protein, 66 aa, Helicobacter pylori
  misc_feature (B) LOCATION 1...66
  hypothetical: YES
RARESDRHFPKRSSSYDPVSKRLYVGGEVFVLGAEYKNKNLIFVPFILTDTRLPLPTQNVLVQMGG

SEQ ID NO: 5061 - protein, 120 aa, Helicobacter pylori
  misc_feature (B) LOCATION 1...120
  hypothetical: YES
FWTGFYIVPARNNKGYLWTFNDRTKFYGRGINAPVPAIYFANSSISGYVFLGLKTKRVRLDAMVAFGDYQEYSLMSSFRVWTYRDLSFDMGGGYVYAYNSKATRKSLGDSSFVFFGKFLF

SEQ ID NO: 5062 - protein, 170 aa, Helicobacter pylori
  misc_feature (B) LOCATION 1...170
  hypothetical: YES
KPFGYLGLLYKQGTQKNPHSYVGAPARLGVDFSYSNGWSFGIGAIGAWNIYNKQRLANLYISLGNFFGNPNNVKPYLSAGDVSDAYLQYANQRFKIALGRFNTDFVDFDWIGGNIQGVSVAFKQNSMRYFGIFMDSMLYNGHQINKEQGNRIATFLNALALMILCLNACM

SEQ ID NO: 5063 - protein, 169 aa, Helicobacter pylori
  misc_feature (B) LOCATION 1...169
  hypothetical: YES
PFGYLGLLYKQGTQKNPHSYVGAPARLGVDFSYSNGWSFGIGAIGAWNIYNKQRLANLYISLGNFFGNPNNVKPYLSAGDVSDAYLQYANQRFKIALGRFNTDFVDFDWIGGNIQGVSVAFKQNSMRYFGIFMDSMLYNGHQINKEQGNRIATFLNALALMILCLNACM

SEQ ID NO: 5064 - protein, 210 aa, Helicobacter pylori
  misc_feature (B) LOCATION 1...210
  hypothetical: YES
VFVLGAEYKNKNLIFVPFILTDTRLPLPTQNVLVQVGGKLEYDASLAKGFTSRTLVHGMYQYGNTDITTSAKNAGLFLIDQTFKYKIFNFGTGFYIVPARNNKGYLWTFNDRTKFYGRGINAPGVPAIYFANSSISGYVFLGLKTKRVRLDAMVAFGDYQEYSLMSSFRVWTYRDLSFDMGGGYVYAYNSKATRKSLGDSSFVFFGKFLF

SEQ ID NO: 5065 - protein, 252 aa, Helicobacter pylori
  misc_feature (B) LOCATION 1...252
  hypothetical: YES
MQYKKNKKRYYHLALGILFCNGLSLKALEIAVKPFGYLGLLYNQGTQKNPHSYVGALARLGVDFSYSNGWSFGIGAIGAWNIYNKQRLANLYISLGNFFGNPNNVKPYLSAGDVSDAYLQYANQRFKIALGRFNTDFVDFDWIGGNIQGVSVAFKQNSMRYFGIFMDSMLYNGHQINKEQGNRIATSLNALASYDPVSKRLYVGGEVFVLGAEYKNKNLIFVPFILTDTRLPLPTQNVLVQVGGKLEYRRFF

SEQ ID NO: 5066 - protein, 416 aa, Helicobacter pylori
  misc_feature (B) LOCATION 1...416
  hypothetical: YES
MQYKKNKKRYYHLALGILFCNGLSLKALEIAVKPFGYLGLLYNQGTQKNPHSYVGALARLGVDFSYSNGWSFGIGAIGAWNIYNKQRLANLYISLGNFFGNPNNVKPYLSAGDVSDAYLQYANQRFKIALGRFNTDFVDFDWIGGNIQGVSVAFKQNSMRYFGIFMDSMLYNGHQINKEQGNRIATSLNALASYDPVSKRLYVGGEVFVLGAEYKNKNLIFVPFILTDTRLPLPTQNVLVQVGGKLEYDASLAKGFTSRTLVHGMYQYGNTDITTSAKNAGLFLIDQTFKYKIFNFGTGFYIVPARNNKGYLWTFNDRTKFYGRGINAPGVPAIYFANSSISGYVFLGLKTKRVRLDAMVAFGDYQEYSLMSSFRVWTYRDLSFDMGGGYVYAYNSKATRKSLGDSSFVFFGKFLF

SEQ ID NO: 5067 - protein, 114 aa, Helicobacter pylori
  misc_feature (B) LOCATION 1...114
  hypothetical: YES
MRFLNNKHREKGLKAEEEACGFLKTLGFEMIERNFFSQFGEIDIIALKKGVLHFIEVKSGENFDPIYAITPSKLKKMIKTIRCYLSQKDPNSDFCIDALIVKNGKFELLENITF

SEQ ID NO: 5068 - protein, 114 aa, Helicobacter pylori; identical to SEQ ID NO: 5067
  misc_feature (B) LOCATION 1...114
  hypothetical: YES

SEQ ID NO: 5069 - protein, 85 aa, Helicobacter pylori
  misc_feature (B) LOCATION 1...85
  hypothetical: YES
LAGFGDHALTRFHFRGRVLPAHAYIQRNEGKLFGSLFLGRLAIALMDPIGFIIRDLGLGEALGIYNKHEIRSNLSPNGLNLTYKF

SEQ ID NO: 5070 - protein, 243 aa, Helicobacter pylori
  misc_feature (B) LOCATION 1...243
  hypothetical: YES
TLFKSSDKVCNLMRVIIKFMLISLKTFLKILLEIFLKTFQKIWIVCVVIWGLGCSFLNANSVQLEETLRRNPKNLIWQHFKKKFKKSNTIPYAPNSRWKYLGTSIGILGVSLVIGIVGLYLMPESVTNWDKEKFGVKSWFENVRMGPKLDNDSFIFNEILHPYFGAMYYMQPRMAGFSWMTSAFFSFITSTLFWEYGLEPFVEVPSWQDLVITPLLGFILGEGFYQLTPISNATKASCLALYF

SEQ ID NO: 5071 - protein, 279 aa, Helicobacter pylori
  misc_feature (B) LOCATION 1...279
  hypothetical: YES
MRVIIKFMLISLKTFLKILLKIFLKTFQKIWIVCVVIWGLGCSFLNANSVQLEETLRRNPKNLIWQHFKKKFKKSNTIPYAPNSRWKYLGTSIGILGVSLVIGIVGLYLMPESVTNWDKEKFGVKSWFENVRMGPKLDNDSFIFNEILHPYFGAMYYMQPRMAGFSWMTSAFFSFITSTLFWEYGLEAFVEVPSWQDLVITPLLGSILGEGFYQLTRYIQRNEGKLFGSLFLGRLAIALMDPIGFIIRDLGLGEALGIYNKHEIRSNLSPNGLNLTYKF

SEQ ID NO: 5072 - protein, 278 aa, Helicobacter pylori
  misc_feature (B) LOCATION 1...278
  hypothetical: YES
LNKLLKKGFLAFFLSVYLRADDLVTYTIAKEEDLGYQRFLAKKCLRGKTHPPCFTASKKPKRKPFNIDKSSHYYGTSVVQMSWLQSREKFENHSKYRNIPFAEVSLIYGYKQFFPKKEHYGFRFYVSLDYAYGFFLKNKGALGDSLRASSQIPKSYREKLQRKETFINAIFYGVGADFLYKRAFGTLILGVNFVGETWFYETKIFKQWAKDSLNTYRPNMFQVMLNVGYRYRFSRYKNWAIEFGARIPFLINDYFKTPLYTLHFKRNISVYLTSTYDF

SEQ ID NO: 5073 - protein, 285 aa, Helicobacter pylori
  misc_feature (B) LOCATION 1...285
  hypothetical: YES
KQIRKERLNKLLKKGFLAFFLSVYLRADDLVTYTIAKEEDLGYQRFLAKKCLRGKTHPPCFTASKKPKRKPFNIDKSSHYYGTSVVQMSWLQSREKFENHSKYRNIPFAEVSLIYGYKQFFPKKEHYGFRFYVSLDYAYGFFLKNKGALGDSLRASSQIPKSYREKLQRKETFINAIFYGVGADFLYKRAFGTLILGVNFVGETWFYETKIFKQWAKDSLNTYRPNMFQVMLNVGYRYRFSRYKNWAIEFGARIPFLINDYFKTPLYTLHFKRNISVYLTSTYDF

SEQ ID NO: 5074 - protein, 65 aa, Helicobacter pylori
  misc_feature (B) LOCATION 1...65
  hypothetical: YES
SAVVESVVILKIDINQGRSCSLYPTPKSVSLVRNQSVAYEILCENQPLWIEVSTNLGQTLPFSLI

SEQ ID NO: 5075 - protein, 100 aa, Helicobacter pylori
  misc_feature (B) LOCATION 1...100
  hypothetical: YES
TARMNRMKPIFLLIFLLLASLIAREKDASSNLFDLIDKGINREQELKEQEQKTRLKLAQSPLVALEIVPQETPYLEWQGARESYYLKVERCSGERGYFKD

SEQ ID NO: 5076 - protein, 145 aa, Helicobacter pylori
  misc_feature (B) LOCATION 1...145
  hypothetical: YES
MKPIFLLIFLLLASLIAREKDASSNLFDLIDKGINREQELKEQEQKTRLKLAQSPLVALEIVPQETPYLEWQGARESYYLKVSAVVESVVILKIDINQGRSCSLYPTPKSVSLVRNQSVAYEILCENQPLWIEVSTNLGKRTFQF

SEQ ID NO: 5077 - protein, 263 aa, Helicobacter pylori
  misc_feature (B) LOCATION 1...263
  hypothetical: YES
AGNVGYKPIKELLFYFNYQRSYIPPQFSNIGNFVGTSTDYFQIFNVMEGGSRYYFNHQVSFNANYFVIFANHYFTGRYGDNREPVNARSQGVELELYYTPIRGLNFHAAYTFIDANITSHTMVTNPANPKGPKKDIFGKKLPFVSPHQFILDASYTYAKTTIGLSSFFYSRAYSDVLNTVPFTEYAPTIKNGAIVTKTAGMTPYYWVWNLQISTTLWERKNQSVNASLQINNIFNMKYWFSGIGTSPNGKKLRSQEHHSVCEL

SEQ ID NO: 5078 - protein, 529 aa, Helicobacter pylori
  misc_feature (B) LOCATION 1...529
  hypothetical: YES
MRKVIIMNGYLRVKTPYFLASVVLTFWTFNSFMSAKDKHHFLKKVTTTEQKFSSSAPISWQSEEVRNSTSSRTVISNKELKKTGNLNIENALQNVPGIQIRDATGTGVLPKISVRGFGGGGNGHSNTNMILVNGIPIYGAPYSNIELAIFPVTFQSVDRIDVIKGGTSVQYGPNTFGGVVNVITKEIPKEWENQAAERITFWGRSSNGNFVDPKEKGKPLAQTLGNQMLFNTYGRTAGMLGKYIGISAQGNWINGQGFRQNSPTKVQNYLLDAIYKINATNTFKAYYQYYQYNSYHPGTLSAQDYAYNRFINERPDNQDGGRAKRFGIVYQNYFGDPDRKVGGDFKFTYFTHDMSRDFGFSNQYQSVYMSGQNKILPFKGKGEISAKNPNCGLYSYSDTNSPCWQFFDNIRRSVVNAFEPKLNLIVNTGKVKQTFNMGMRFLTEDLYRRSTTRKNPSMPNNGSGFDAGTSLNNFNNYTAVYASDEINFNNGMLTITPGLRYTFLNYEKKDAPPFKVGQTPKTTKERYNQ

SEQ ID NO: 5079 - protein, 533 aa, Helicobacter pylori
  misc_feature (B) LOCATION 1...533
  hypothetical: YES
MRKVIIMNGYLRVKTPYFLASVVLTFWTFNSFMSAKDKHHFLKKVTTTEQKFSSSAPISWQSEEVRNSTSSRTVISNKELKKTGNLNIENALQNVPGIQIRDATGTGVLPKISVRGFGGGGNGHSNTNMILVNGIPIYGAPYSNIELAIFPVTFQSVDRIDVIKGGTSVQYGPNTFGGVVNVITKEIPKEWENQAAERITFWGRSSNGNFVDPKEKGKPLAQTLGNQMLFNTYGRTAGMLGKYIGISAQGNWINGQGFRQNSPTKVQNYLLDAIYKINATNTFKAYYQYYQYNSYHPGTLSAQDYAYNRFINERPDNQDGGRAKRFGIVYQNYFGDPDRKVGGDFKFTYFTHDMSRDFGFSNQYQSVYMSGQNKILPFKGKGEISAKNPNCGLYSYSDTNSPCWQFFDNIRRSVVNAFEPKLNLIVNTGKVKQTFNMGMRFLTEDLYRRSTTRKNPSMPNNGSGFDAGTSLNNFNNYTAVYASDEINFNNGMLTITPGLRYTFLNYEKKDAPPFKVGQTPKTTKERYNQWNPA

SEQ ID NO: 5080 - protein, 793 aa, Helicobacter pylori
  misc_feature (B) LOCATION 1...793
  hypothetical: YES
IMNGYLRVKTPYFLASVVLTFWTFNSFMSAKDKHHFLKKVTTTEQKFSSSAPISWQSEEVRNSTSSRTVISNKELKKTGNLNIENALQNVPGIQIRDATGTGVLPKISVRGFGGGGNGHSNTNMILVNGIPIYGAPYSNIELAIFPVTFQSVDRIDVIKGGTSVQYGPNTFGGVVNVITKEIPKEWENQAAERITFWGRSSNGNFVDPKEKGKPLAQTLGNQMLFNTYGRTAGMLGKYIGISAQGNWINGQGFRQNSPTKVQNYLLDAIYKINATNTFKAYYQYYQYNSYHPGTLSAQDYAYNRFINERPDNQDGGRAKRFGIVYQNYFGDPDRKVGGDFKFTYFTHDMSRDFGFSNQYQSVYMSGQNKILPFKGKGEISAKNPNCGLYSYSDTNSPCWQFFDNIRRSVVNAFEPKLNLIVNTGKVKQTFNMGMRFLTEDLYRRSTTRKNPSMPNNGSGFDAGTSLNNFNNYTAVYASDEINFNNGMLTITPGLRYTFLNYEKKDAPPFKVGQTPKTTKERYNQWNPAVNVGYKPIKELLFYFNYQRSYIPPQFSNIGNFVGTSTDYFQIFNVMEGGSRYYFNHQVSFNANYFVIFANHYFTGRYGDNREPVNARSQGVELELYYTPIRGLNFHAAYTFIDANITSHTMVTNPANPKGPKKDIFGKKLPFVSPHQFILDASYTYAKTTIGLSSFFYSRAYSDVLNTVPFTEYAPTIKNGAIVTKTAGMTPYYWVWNLQISTTLWERKNQSVNASLQINNIFNMKYWFSGIGTSPNGKEAAPPRSITAYVSYNF

SEQ ID NO: 5081 - protein, 798 aa, Helicobacter pylori
  misc_feature (B) LOCATION 1...798
  hypothetical: YES
MRKVIIMNGYLRVKTPYFLASVVLTFWTFNSFMSAKDKHHFLKKVTTTEQKFSSSAPISWQSEEVRNSTSSRTVISNKELKKTGNLNIENALQNVPGIQIRDATGTGVLPKISVRGFGGGGNGHSNTNMILVNGIPIYGAPYSNIELAIFPVTFQSVDRIDVIKGGTSVQYGPNTFGGVVNVITKEIPKEWENQAAERITFWGRSSNGNFVDPKEKGKPLAQTLGNQMLFNTYGRTAGMLGKYIGISAQGNWINGQGFRQNSPTKVQNYLLDAIYKINATNTFKAYYQYYQYNSYHPGTLSAQDYAYNRFINERPDNQDGGRAKRFGIVYQNYFGDPDRKVGGDFKFTYFTHDMSRDFGFSNQYQSVYMSGQNKILPFKGKGEISAKNPNCGLYSYSDTNSPCWQFFDNIRRSVVNAFEPKLNLIVNTGKVKQTFNMGMRFLTEDLYRRSTTRKNPSMPNNGSGFDAGTSLNNFNNYTAVYASDEINFNNGMLTITPGLRYTFLNYEKKDAPPFKVGQTPKTTKERYNQWNPAVNVGYKPIKELLFYFNYQRSYIPPQFSNIGNFVGTSTDYFQIFNVMEGGSRYYFNHQVSFNANYFVIFANHYFTGRYGDNREPVNARSQGVELELYYTPIRGLNFHAAYTFIDANITSHTMVTNPANPKGPKKDIFGKKLPFVSPHQFILDASYTYAKTTIGLSSFFYSRAYSDVLNTVPFTEYAPTIKNGAIVTKTAGMTPYYWVWNLQISTTLWERKNQSVNASLQINNIFNMKYWFSGIGTSPNGKEAAPPRSITAYVSYNF

SEQ ID NO: 5082 - protein, 138 aa, Helicobacter pylori
  misc_feature (B) LOCATION 1...138
  hypothetical: YES
MLYLRKENGVRTLISLGILLSVLNGDDLRLYSKPLVYSAGSGIIGIDIDKRTFYKRAFAFTMKSLFGENLLLFVKLKHSALMSKHMKGPLENRHHHSFAKNYEKAVNGCQKYVHIKLPEGAPSNFQSGSYMATMVMRF

SEQ ID NO: 5083 - protein, 149 aa, Helicobacter pylori
  misc_feature (B) LOCATION 1...149
  hypothetical: YES
VKFPYLLNIRIMLYLRKENGVRTLISLGILLSVLNGDDLRLYSKPLVYSAGSGIIGIDIDKRTFYKRAFAFTMKSLFGENLLLFVKLKHSALMSKHMKGPLENRHHHSFAKNYEKAVNGCQKYVHIKLPEGPPSNFQSGSYMATMVMRF

SEQ ID NO: 5084 - protein, 204 aa, Helicobacter pylori
  misc_feature (B) LOCATION 1...204
  hypothetical: YES
MQGFLLQTQSIRDEDLIVHVLTKNQLKTLYRFYGKRHSVLNVGRKIDFEEENDDKFLPKLRNILHLGYIWEREMERLFFWQRFCALLFKHLEGVHSLDSIYFDTLDDGASKLSKQHPLRVILEMYAVLLNFEGRLQSYNSCFLCDAKLERSVALAQGFILAHPSCLKAKSLDLEKIQAFFRTQSTIDLETEEVEELWRTLNLGF

SEQ ID NO: 5085 - protein, 221 aa, Helicobacter pylori
  misc_feature (B) LOCATION 1...221
  hypothetical: YES
DCIQVLLIINQIILRVAMQGFLLQTQSIRDEDLIVHVLTKNQLKTLYRFYGKRHSVLNVGRKIDFEEENDDKFLPKLRNILHLGYIWEREMERLFFWQRFCALLFKHLEGVHSLDSIYFDTLDDGASKLSKQHPLRVILEMYAVLLNFEGRLQSYNSCFLCDAKLERSVALAQGFILAHPSCLKAKSLDLEKIQAFFRTQSTIDLETEEVEELWRTLNLGF

SEQ ID NO: 5086 - protein, 126 aa, Helicobacter pylori
  misc_feature (B) LOCATION 1...126
  hypothetical: YES
AVAFCLPYSSPKTSLATELHYSANERIEAFSSNDEKTESFELNEQSFEAIKENAAKYSYLKVYLKNVALKDSAPLVFVDMPGFDSPISSHTHAILEYLERGVHFVILTSVEEGNLTKRMVRELKTF

SEQ ID NO: 5087 - protein, 166 aa, Helicobacter pylori
  misc_feature (B) LOCATION 1...166
  hypothetical: YES
LEIDKTECSTLLASIQKQQLVIPVVGNFSAGKSTLLNRFLGSSVLPTGITPETSLATELHYSANERIEAFSSNDEKTESFELNEQSFEAIKENAAKYSYLKVYLNNEALKDSAPLVFVDMPGFDSPISSHTHAILEYLERGVHFVILTSVEEGNLTKRMVRELKTF

SEQ ID NO: 5088 - protein, 277 aa, Helicobacter pylori
  misc_feature (B) LOCATION 1...277
  hypothetical: YES
LKRALWLILGLFYALNAESFKDVLTKGDYTFFNKKVVSPIKRYADRSAFYLGLGYQLGSIQHNSSNLNLSQRFNKSQIIFSDSLSPVFKNSYVSNGLGVQVGYKWVGKHEETKWFGFRWGLFYDLSASLYGSQESQSIIISTYGTYMDLLLNAYNGDKFFAGFNLGIAFAGVYDRLSDALLYQTLLQNTFGGKVNLNGFQFLVDLGVRLGNEHNQFGFGIKIPTYYFNHYYSMNNISNNSENVLKVLRFLEYGINSLLYQVDFRRNYSVYFNYTYSF

SEQ ID NO: 5089 - protein, 284 aa, Helicobacter pylori
  misc_feature (B) LOCATION 1...284
  hypothetical: YES
NFNQRAFLKRALWLILGLFYALNAESFKDVLTKGDYTFFNKKVVSPIKRYADRSAFYLGLGYQLGSIQHNSSNLNLSQRFNKSQIIFSDSLSPVFKNSYVSNGLGVQVGYKWVGKHEETKWFGFRWGLFYDLSASLYGSQESQSIIISTYGTYMDLLLNAYNGDKFFAGFNLGIAFAGVYDRLSDALLYQTLLQNTFGGKVNLNGFQFLVDLGVRLGNEHNQFGFGIKIPTYYFNHYYSMNNISNNSENVLKVLRFLEYGINSLLYQVDFRRNYSVYFNYTYSF

SEQ ID NO: 5090 - protein, 178 aa, Helicobacter pylori
  misc_feature (B) LOCATION 1...178
  hypothetical: YES
GLGYQLSAINTSFSTSSIDKSYFMTGNGFGVVLGGKFVAKTQAVEHVGFRYGLFYDQTFSSHKSYISTYGLEFSGLWDAFNSPKMFLGLEFGLGIAGATYMPGGAMHGIIAQYLGKENSLFQLLVKVGFRFGFFHNEITFGLKFPVIPNKKTEIVDGLSATTLWQRLPVAYFNYIYNF

SEQ ID NO: 5091 - protein, 220 aa, Helicobacter pylori
  misc_feature (B) LOCATION 1...220
  hypothetical: YES
MNKTTIKILMGMALLSSLQAAEAELDEKSKKPKFADRNTFYLGVGYQLSAINTSFSTSSIDKSYFMTGNGFGVVLGGKFVAKTQAVEHVGFRYGLFYDQTFSSHKSYISTYGLEFSGLWDAFNSPKMFLGLEFGLGIAGATYMPGGAMHGIIAQYLGKENSLFQLLVKVGFRFGFFHNEITFGLKFPVIPNKKTEIVDGLSATTLWQRLPVAYFNYIYNF

SEQ ID NO: 5092 - protein, 229 aa, Helicobacter pylori
  misc_feature (B) LOCATION 1...229
  hypothetical: YES
VKGEKNAWYLGISYQVGQASQSVKNPPKSSEFNYPKFPVGKTDYLAVMQGLGLTVGYKQFFGEKRWFGARYYGFMDYGHAVFGANALTSDNGGVCKLNEPCATKVGTMGNLSDMFTYGVGIDTLYNVINKEDASFGFFFGAQIAGNSWGNTTGAFLETKSPYKHTSYSLDPAIFQFLFNLGIRTHIGQHQEFDFGVKIPTINVYYFNHGNLSFTYRRQYSLYVGYRYNF

SEQ ID NO: 5093 - protein, 229 aa, Helicobacter pylori; identical to SEQ ID NO: 5092
  misc_feature (B) LOCATION 1...229
  hypothetical: YES

SEQ ID NO: 5094 - protein, 228 aa, Helicobacter pylori
  misc_feature (B) LOCATION 1...228
  hypothetical: YES
KGEKNAWYLGISYQVGQASQSVKNPPKSSEFNYPKFPVGKTDYLAVMQGLGLTVGYKQFFGEKRWFGARYYGFMDYGHAVFGANALTSDNGGVCKLNEPCATKVGTMGNLSDMFTYGVGIDTLYNVINKEDASFGFFFGAQIAGNSWGNTTGAFLETKSPYKHTSYSLDPAIFQFLFNLGIRTHIGQHQEFDFGVKIPTINVYYFNHGNLSFTYRRQYSLYVGYRYNF

SEQ ID NO: 5095 - protein, 270 aa, Helicobacter pylori
  misc_feature (B) LOCATION 1...270
  hypothetical: YES
MKKFVVFKTLCLSVVLGNSLVAAEGSTEVQKQLEKPKDYKAVKGEKNAWYLGISYQVGQASQSVKNPPKSSEFNYPKFPVGKTDYLAVMQGLGLTVGYKQFFGEKRWFGARYYGFMDYGHAVFGANALTSDNGGVCKLNEPCATKVGTMGNLSDMFTYGVGIDTLYNVINKEDASFGFFFGAQIAGNSWGNTTGAFLETKSPYKHTSYSLDPAIFQFLFNLGIRTHIGQHQEFDFGVKIPTINVYYFNHGNLSFTYRRQYSLYVGYRYNF

SEQ ID NO: 5096 - protein, 57 aa, Helicobacter pylori
  misc_feature (B) LOCATION 1...57
  hypothetical: YES
QAIWGITSSGYLKDYIGKCDVSGVSSSNMTPQNMNTTWGKGCAGVERNSNFVKSKHH

SEQ ID NO: 5097 - protein, 66 aa, Helicobacter pylori
  misc_feature (B) LOCATION 1...66
  hypothetical: YES
LRKTFGLRAQTIVNTLKDYCPMLIAKSSSNGGTNGANTPSWQTAGGGLKFMLRLLGAEFSGYFRHD

SEQ ID NO: 5098 - protein, 72 aa, Helicobacter pylori
  misc_feature (B) LOCATION 1...72
  hypothetical: YES
LVTLKKSFKKTQQLNANQPKNITQPNNFNLNSPGSLTALAQSMLKNAQSQTEILKLANQVASDLGHNFFRLS

SEQ ID NO: 5099 - protein, 141 aa, Helicobacter pylori
  misc_feature (B) LOCATION 1...141
  hypothetical: YES
MGYAVVCGGYIKKPGENNQKNFHYTDENGNGTTINCGGSTNSNGTHSPNGTNTLKADKNVSLSIEQYEKIHEAYQILSKALKQAGLAPLNSKGEKLEAHVTTSKDQQGTSSDQTTTTTSVIDTTNDAQNLLTQSANDCQYP

SEQ ID NO: 5100 - protein, 144 aa, Helicobacter pylori
  misc_feature (B) LOCATION 1...144
  hypothetical: YES
LGLWNSMGYAVVCGGYIKKPGENNQKNFHYTDENGNGTTINCGGSTNSNGTHSPNGTNTLKADKNVSLSIEQYEKIHEAYQILSKALKQAGLAPLNSKGEKLEAHVTTSKDQQGTSSDQTTTTTSVIDTTNDCAKPLDSERKRL

SEQ ID NO: 5101 - protein, 143 aa, Helicobacter pylori
  misc_feature (B) LOCATION 1...143
  hypothetical: YES
GLWNSMGYAVVCGGYIKKPGENNQKNFHYTDENGNGTTINCGGSTNSNGTHSPNGTNTLKADKNVSLSIEQYEKIHEAYQILSKALKQAGLAPLNSKGEKLEAHVTTSKDQQGTSSDQTTTTTSVIDTTNDCAKPLDSERKRL

SEQ ID NO: 5102 - protein, 152 aa, Helicobacter pylori
  misc_feature (B) LOCATION 1...152
  hypothetical: YES
MLIAKSSSNGGTNGANTPSWQTAGGGKNSCATFGAEFSAISDMISNAQKIVQETQQLNANQPKNITQPNNFNLNSPGSLTALAQSMLKNAQSQTEILKLANQVASDFDKLSSGYLKDYIGKCDVSGVSSSNMTPQNMNTTWGERLRRRGKKL

SEQ ID NO: 5103 - protein, 643 aa, Helicobacter pylori
  misc_feature (B) LOCATION 1...643
  hypothetical: YES
MKKTKKTILLSLTLAASLLHAEDNGVFLSVGYQIGEAVQKVKNADKVQKLSDVYEQLSKLLANDNGTSSKTSAQAINQAVNNLNESAKTLAGGTTNSPAYQATLLALRSALGLWNSMGYAVVCGGYIKKPGENNQKNFHYTDENGNGTTINCGGSTNSNGTHSPNGTNTLKADKNVSLSIEQYEKIHEAYQILSKALKQAGLAPLNSKGEKLEAHVTTSKDQQGTSSDQTTTTTSVIDTTNDAQNLLTQAQTIVNTLKDYCPMLIAKSSSNGGTNGANTPSWQTAGGGKNSCATFGAEFSAISDMISNAQKIVQETQQLNANQPKNITQPNNFNLNSPGSLTALAQSMLKNAQSQTEILKLANQVASDFDKLSSGYLKDYIGKCDVSGVSSSNMTPQNMNTTWGKGCAGVEETLTSLKASTTDFNNQTTPQLDQAQTLANTLTQELGNNPFKRVGIIGSQTNNGAMNGLGVQAGYKQFFGQKRRWGLRYYGFFDYNHTYIKSSFFNSSSDVLTYGVGSDLLFNFINDKNTNFLGKNNKISVGLFGGIALAGTSWLNSQFVNLKTISNVYSAKVNTANFQFLFNLGLRTNLARPKKKDSDHSAQHGMELGVKIPTINTNYYSYLGTKLEYRRLYSVYLNYVFAY

SEQ ID NO: 5104 - protein, 212 aa, Helicobacter pylori
  misc_feature (B) LOCATION 1...212
  hypothetical: YES
MAYGLYRSKAVIGGVIDEMQTKVNQVYQMGFARNFLEHNSNSNNMNGFGVKMGYKQFFGKKRMFGLRYYGFYDFGYAQFGTESSLVKATLSSYGAGTDFLYNVFTRKRGTEAIDIGFFAGIQLAGQTWKTNFLDQVDGNHLKPKDTSFQFLFDLGIRTNFSKIAHQKRSRFSQGIEFGLKIPVLYHTYYQSEGVTAKYRRDFSFYVGYNIGF

SEQ ID NO: 5105 - protein, 278 aa, Helicobacter pylori
  misc_feature (B) LOCATION 1...278
  hypothetical: YES
QMQDVINYGESLLSNTVAYGDFITNWVAPYLDLNNKGLNFLPNYGGQLNGANNQTPQLTPQQAQQEQKVIMNQLEQATNAPTPAQINRILANPYSPTAKTLMAYGLYRSKAVIGGVIDEMQTKVNQVYQMGFARNFLEHTLYILITLNGFGVKMGYKQFFGKKRMFGLRYYGFYDFGYAQFGTESSLVKATLSSYGAGTDFLYNVFTRKRGTEAIDIGFFAGIQLAGQTWKTNFLDQVDGNHLKPKDTSFQFLFDLGIMDQIFPKSLISKKNLVFLKG

SEQ ID NO: 5106 - protein, 280 aa, Helicobacter pylori
  misc_feature (B) LOCATION 1...280
  hypothetical: YES
YNQMQDVINYGESLLSNTVAYGDFITNWVAPYLDLNNKGLNFLPNYGGQLNGANNQTPQLTPQQAQQEQKVIMNQLEQATNAPTPAQINRILANPYSPTAKTLMAYGLYRSKAVIGGVIDEMQTKVNQVYQMGFARNFLEHTLYILITLNGFGVKMGYKQFFGKKRMFGLRYYGFYDFGYAQFGTESSLVKATLSSYGAGTDFLYNVFTRKRGTEAIDIGFFAGIQLAGQTWKTNFLDQVDGNHLKPKDTSFQFLFDLGIMDQIFPKSLISKKNLVFLKG

SEQ ID NO: 5107 - protein, 325 aa, Helicobacter pylori
  misc_feature (B) LOCATION 1...325
  hypothetical: YES
KEKDNPLQNFVFNKKWLIYSSLLPLFFLNPLMAEDDGFFMGVSYQTSLAVQRVDNSGLNASQDASTYIRQNAIALESAAVPLAYYLEAMGQQTRVLMQMLCPDPSKRCLLYAGGYQNGQNNNGDTGNNPPRGNVNATFDMQSLVNNLNKLTQLIGETLIRNPENLPNSKVFNVKFGNQSTVIALPEGLANTMDALNNDITNALTTLWYNQTLTNKSFSTPSNTSVNFSPQVLQHLLQDGLATANNNQTICSTQNQCTATNEAKSIAQNAQNIFQALMQAGILGGLANEKQFGFTYNKAPNGGDSQQGYSKLCGPGITPKRQHHAS

SEQ ID NO: 5108 - protein, 326 aa, Helicobacter pylori
  misc_feature (B) LOCATION 1...326
  hypothetical: YES
KEKDNPLQNFVFNKKWLIYSSLLPLFFLNPLMAEDDGFFMGVSYQTSLAVQRVDNSGLNASQDASTYIRQNAIALESAAVPLAYYLEAMGQQTRVLMQMLCPDPSKRCLLYAGGYQNGQNNNGDTGNNPPRGNVNATFDMQSLVNNLNKLTQLIGETLIRNPENLPNSKVFNVKFGNQSTVIALPEGLANTMDALNNDITNALTTLWYNQTLTNKSFSTPSNTSVNFSPQVLQHLLQDGLATANNNQTICSTQNQCTATNEAKSIAQNAQNIFQALMQAGILGGLANEKQFGFTYNKAPNGGDSQQGYSKLCGPGITPKRQHHASA

SEQ ID NO: 5109 - protein, 697 aa, Helicobacter pylori
  misc_feature (B) LOCATION 1...697
  hypothetical: YES
LQNFVFNKKWLIYSSLLPLFFLNPLMAEDDGFFMGVSYQTSLAVQRVDNSGLNASQDASTYIRQNAIALESAAVPLAYYLEAMGQQTRVLMQMLCPDPSKRCLLYAGGYQNGQNNNGDTGNNPPRGNVNATFDMQSLVNNLNKLTQLIGETLIRNPENLPNSKVFNVKFGNQSTVIALPEGLANTMDALNNDITNALTTLWYNQTLTNKSFSTPSNTSVNFSPQVLQHLLQDGLATANNNQTICSTQNQCTATNEAKSIAQNAQNIFQALMQAGILGGLANEKQFGFTYNKAPNGSDSQQGYQSFSGPGYYTKNDNTTQAPLKALPAGATIGSGNGQYTYHPSSAVYYLADSIIANGITASMIFSGMQNFANKAAKLIGTSSYNQMQDVINYGESLLSNTVAYGDFITNWVAPYLDLNNKGLNFLPNYGGQLNGANNQTPQLTPQQAQQEQKVIMNQLEQATNAPTPAQINRILANPYSPTAKTLMAYGLYRSKAVIGGVIDEMQTKVNQVYQMGFARNFLEHNSNSNNMNGFGVKMGYKQFFGKKRMFGLRYYGFYDFGYAQFGTESSLVKATLSSYGAGTDFLYNVFTRKRGTEAIDIGFFAGIQLAGQTWKTNFLDQVDGNHLKPKDTSFQFLFDLGIRTNFSKIAHQKRSRFSQGIEFGLKIPVLYHTYYQSEGVTAKYRRAFSFYVGYNIGF

SEQ ID NO: 5110 - protein, 697 aa, Helicobacter pylori; identical to SEQ ID NO: 5109
  misc_feature (B) LOCATION 1...697
  hypothetical: YES

SEQ ID NO: 5111 - protein, 135 aa, Helicobacter pylori
  misc_feature (B) LOCATION 1...135
  hypothetical: YES
NPFFTITAKLLSNTQSAFDQGIALSSNIISAVNSLNPSNNSQEVKAQLQNTAQSMTELLQQIEHSITKTTSTTYAQSLLSNLTDAVNASSNNTTYVSALVNALNTLGVGVFPTTTSTHVVLNPPDKSYSIQLIPF

SEQ ID NO: 5112 - protein, 164 aa, Helicobacter pylori
  misc_feature (B) LOCATION 1...164
  hypothetical: YES
TAGKSTRHGMSNGLGVGIGYKYFFGKARKLGLRHYFFFDYGFSEIGLANQSVKANIFAYGVGTDFLWNLFRRTYNTKALNFGLFAGVQLGGATWLSSLRQQIIDNWGNANDIHSTNFQVALNFGVRTNFAEFKRFAKKFHNQGVISQKSVEFGIKVPLINQAYL

SEQ ID NO: 5113 - protein, 314 aa, Helicobacter pylori
  misc_feature (B) LOCATION 1...314
  hypothetical: YES
LHNALNFQAYQSTIEQYNNALKQISWISFSEPKNLLKNTSNNYQIGTVTNDQGQNISAYDCTSATGSLSSDASSGISCSATSSTSNTNSFDNSLVATSKVQTINGKEQIGVNSFNLVSQVWSVYNSLKTSEENLQKNAKILCNNGSQSGTSPCNISSGGLSITGNAQLQGIIRATNGTTTNTQASSNASKLKAMVMVNNEEEAETTNFNHSSGPTTLSSNRTVMGALNTVLQNVSYFQQSIQSAFHNQENNIQAWANALYNTNNPNGNQSQNLATNNNQDLRIQLRANFYQLIVNINQQVPTDMNALIIKANKP

SEQ ID NO: 5114 - protein, 365 aa, Helicobacter pylori
  misc_feature (B) LOCATION 1...365
  hypothetical: YES
RFKHFRGGGFPHHNLNACGAKPTGQVVFYPTNSLLGSTSSNSNNQQQYNNTLLMNTLQGELSTNNQNNPNGCANQIQCLEQFIQNLTPLAATPTSTNQANQQVQAIAQKLQSVAINALDNNAINNTTYNLNNLHNALNFQAYQSTIEQYNNALKQISWISFSEPKNLLKNTSNNYQIGTVTNDQGQNISAYDCTSATGSLSSDASSGISCSATSSTSNTNSFDNSLVATSKVQTINGKEQIGVNSFNLVSQVWSVYNSLKTSEENLQKNAKILCNNGSQSGTSPCNSSSGGLSISGNAQLQNILSPTNGTTTNTQAKSNASKLKAMVMVNNEEEAKTTNFNQSSGPTTQSSNSTVMGALNTVLQN

SEQ ID NO: 5115 - protein, 431 aa, Helicobacter pylori
  misc_feature (B) LOCATION 1...431
  hypothetical: YES
FQNQENNIQAWANALYNTSNPNGNQSQNLTTNNNQDLRIQLRANFYQLINTINQQVPTDMNALINQSQQTQQTSGSASTTNNACASGMGSSGNWCYQQWSDSKAYYSGLQSALGYQTQATTQNGSSGGSNITYNVQQITLTSGGLLNQIITNLKSVNGGSNGGSSGNGTSQINTAYQMLTDASDGKLGTYNSSNSSNSSNSGNNNGYTPCNSTNGSNGTSGSNCYEPNKQQNATTATTTTDSNLQKVYNDAQKIANIIASSGNNKGVENGLKQFFEALKSNSSSLSNLCGNGSSGSSSTCSGGLINLLGAIPTNGVSDTNNLINLLTEFIKTAGFIQNKDSNVSTSLTSAFQAITSAISQGFQALQNDISPNAILTLLQEITSNTTTIQSFSQTLRQLLGDKTFFMVQQKLIDAMINASNQDRNAQIQANE

SEQ ID NO: 5116 - protein, 1237 aa, Helicobacter pylori
  misc_feature (B) LOCATION 1...1237
  hypothetical: YES
MIKKAKKFIPLFLIGSLLAEDNGWYMSVGYQIGGTQQFINNKQLLENQNIINSITQSAINIAGPTTGLITLSSQSVIDALGYGVSNTVGNQLEGISNILNQIGKRKDFYSSRQISSISQQIIGLKGSSDPLKAHSSQITAKLLSNTQSAFDQGIALSSNIISAVNSLNPSNNSQEVKAQLQNTAQSMTELLQQIEHSITKTTSTTYAQSLLSNLTDAVNASSNNTTYVSALVNALNTLGVGVFPTTTSTHVVLNPPGQVVFYPTNSLLGSTSSNSNNQQQYNNTLLMNTLQGELSTNNQNNPNGCANQIQCLEQFIQNLTPLAATPTSTNQANQQVQAIAQKLQSVAINALDNNAINNTTYNLNNLHNALNFQAYQSTIEQYNNALKQISWISFSEPKNLLKNTSNNYQIGTVTNDQGQNISAYDCTSATGSLSSDASSGISCSATSSTNNTNSFDNSLVATSKVQTINGKEQIGVNSFNLVSQVWSVYNSLKTSEENLQKNAKILCNNGSQSGTSPCNSSSGGLSISGNAQLQNILSPTNGTTTNTQAKSNASKLKAMVMVNNEEEAKTTNFNQSSGPTTQSSNSTVMGALNTVLQNVSNFQQSIQSAFQNQENNIQAWANALYNTSNPNGNQSQNLTTNNNQDLRIQLRANFYQLINTINQQVPTDMNALINQSQQTQQTSGSASTTNNACASGMGSSGNWCYQQWSDSKAYYSGLQSALGYQTQATTQNGSSGGSNITYNVQQITLTSGGLLNQIITNLKSVNGGSNGGSSGNGTSQINTAYQMLTDASDGKLGTYNSSNSSNSSNSGNNNGYTPCNSTNGSNGTSGSNCYEPNKQQNATTATTTTDSNLQKVYNDAQKIANIIASSGNNKGVENGLKQFFEALKSNSSSLSNLCGNGSSGSSSTCSGGLINLLGAIPTNGVSDTNNLINLLTEFIKTAGFIQNNDSNVSTSLTSAFQAITSAISQGFQALQNDISPNAILTLLQEITSNTTTIQSFSQTLRQLLGDKTFFMVQQKLIDAMINARNQVQNAQNQANNYGSQPVLSQYAAGKSTQHGMSNGLGVGIGYKYFFGKARKLGLRHYFFFDYGFSEIGLANQSVKANIFAYGVGTDFLWNLFRRTYNTKALNFGLFAGVQLGGATWLSSLRQQIIDNWGNANDIHSTNFQVALNFGVRTNFAEFKRFAKKFHNQGVISQKSVEFGIKVPLINQAYLNSAGADVSYRRLYTFYINYIMGF

SEQ ID NO: 5117 - protein, 157 aa, Helicobacter pylori
  misc_feature (B) LOCATION 1...157
  hypothetical: YES
MIKRIACILSLSASLALAGEVNGFFMGAGYQQGRYGPYNSNYSDWRHGNDLYGLNFKLGFVGFANKWFGARVYGFLDWFNTSGTEHTKTNLLTYGGGGDLIVNLIPLDKFALGLIGGVQLAGNTWMFPYDVNQTRFQFLWNLGGRMRVGDTVRLKRA

SEQ ID NO: 5118 - protein, 186 aa, Helicobacter pylori
  misc_feature (B) LOCATION 1...186
  hypothetical: YES
MIKRIACILSLSASLALAGEVNGFFMGAGYQQGRYGPYNSNYSDWRHGNDLYGLNFKLGFVGFANKWFGARVYGFLDWFNTSGTEHTKTNLLTYGGGGDLIVNLIPLDKFALGLIGGVQLAGNTWMFPYDVNQTRFQFLWNLGGRMRVGDRSAFEAGVKFPMVNQGSKDVGLIRYYSWYVDYVFTF

SEQ ID NO: 5119 - protein, 186 aa, Helicobacter pylori; identical to SEQ ID NO: 5118
  misc_feature (B) LOCATION 1...186
  hypothetical: YES

SEQ ID NO: 5120 - protein, 197 aa, Helicobacter pylori
  misc_feature (B) LOCATION 1...197
  hypothetical: YES
GVTLIQQEGFIMIKRIACILSLSASLALAGEVNGFFMGAGYQQGRYGPYNSNYSDWRHGNDLYGLNFKLGFVGFANKWFGARVYGFLDWFNTSGTEHTKTNLLTYGGGGDLIVNLIPSDKFALGLIGGVQLAGNTWMFPYDVNQTRFQFLWNLGGRMRVGDRSAFEAGVKFPMVNQGSKDVGLIRYYSWYVDYVFTF

SEQ ID NO: 5121 - protein, 270 aa, Helicobacter pylori
  misc_feature (B) LOCATION 1...270
  hypothetical: YES
MKKFVALGLLSAVLSSSLLAEGDGVYIGTNYQLGQARLNSNIYNTGDCTGSVVGCPPGLTANKHNPGGTNINWHSKYANGALNGFGLNVGYKKFFQFKSLDMTSKWFGFRVYGLFDYGHADLGKQVYAPNKIQLDMVSWGVGSDLLADIIDKDNASFGIFGGVAIGGNTWKSSAANYWKEQIIEAKGPDVCTPTYCNPNAPYSTNTSTVAFQVWLNFGVRANIYKHNGVEFGVRVPLLINKFLSAGPNATNLYYHLKRDYSLYLGYNYTF

SEQ ID NO: 5122 - protein, 273 aa, Helicobacter pylori
  misc_feature (B) LOCATION 1...273
  hypothetical: YES
MEFMKKFVALGLLSAVLSSSLLAEGDGVYIGTNYQLGQARLNSNIYNTGDCTGSVVGCPPGLTANKHNPGGTNINWHSKYANGALNGFGLNVGYKKFFQFKSLDMTSKWFGFRVYGLFDYGHADLGKQVYAPNKIQLDMVSWGVGSDLLADIIDKDNASFGIFGGVAIGGNTWKSSAANYWKEQIIEAKGPDVCTPTYCNPNAPYSTNTSTVAFQVWLNFGVRANIYKHNGVEFGVRVPLLINKFLSAGPNATNLYYHLKRDYSLYLGYNYTF

SEQ ID NO: 5123 - protein, 273 aa, Helicobacter pylori; identical to SEQ ID NO: 5122
  misc_feature (B) LOCATION 1...273
  hypothetical: YES

SEQ ID NO: 5124 - protein, 277 aa, Helicobacter pylori
  misc_feature (B) LOCATION 1...277
  hypothetical: YES
ECKGMEFMKKFVALGLLSAVLSSSLLAEGDGVYIGTNYQLGQARLNSNIYNTGDCTGSVVGCPPGLTANKHNPGGTNINWHSKYANGALNGFGLNVGYKKFFQFKSLDMTSKWFGFRVYGLFDYGHADLGKQVYAPNKIQLDMVSWGVGSDLLADIIDKDNASFGIFGGVAIGGNTWKSSAANYWKEQIIEAKGPDVCTPTYCNPNAPYSTNTSTVAFQVWLNFGVRANIYKHNGVEFGVRVPLLINKFLSAGPNATNLYYHLKRDYSLYLGYNYTF

SEQ ID NO: 5125 - protein, 124 aa, Helicobacter pylori
  misc_feature (B) LOCATION 1...124
  hypothetical: YES
KKPFYSLSLASSLLNAEDNGFFISAGYQIGEAVQMVKNTGELKNLNDKYEQLSQSLAQLASLKKSIQTANNIQAVNNALSDLKSFASNNHTNKETSPIYNTRKLLSLQYWLFGVFMQGTLSVFM

SEQ ID NO: 5126 - protein, 135 aa, Helicobacter pylori
  misc_feature (B) LOCATION 1...135
  hypothetical: YES
QPHKQRNIAHLQHAQAVITSVLAFWSLYAGNALSFHVTGLNDGSNSPLGRIHRDGNCTGLQQCFMSKETYDKMKTLAENLQKAQGNLCALSECSSNQDSGFPVLDSAGKQVTITITTQTNGANKSETTTTTTTTN

SEQ ID NO: 5127 - protein, 195 aa, Helicobacter pylori
  misc_feature (B) LOCATION 1...195
  hypothetical: YES
MSNNPFKKVGMISSQNNNGALNGLGVQVGYKQFFGESKRWGLRYYGFFDYNHGYIKSSFFNSSSDIWTYGGGSDLLVNFINDSITRKNNKLSVGLFGGIQLAGTTWLNSQYMNLTAFNNPYSAKVNASNFQFLFNLGLRTNLATAKKKDSERSAQHGVELGIKIPTINTNYYSFLGTKLEYRRLYSVYLNYVFAY

SEQ ID NO: 5128 - protein, 621 aa, Helicobacter pylori
  misc_feature (B) LOCATION 1...621
  hypothetical: YES
LHAEDNGFFVSAGYQIGEAVQMVKNTGELKNLNDKYEQLSQSLAQLASLKKSIQTANNIQAVNNALSDLKSFASNNHTNKETSPIYNTAQAVITSVLAFWSLYAGNALSFHVTGLNDGSNSPLGRIHRDGNCTGLQQCFMSKETYDKMKTLAENLQKAQGNLCALSECSSNQSNGGKTSMTTALQTAQQLMDLIEQTKVSMVWKNIVIAGVTNKPNGAGAITSTGHVTDYAVFNNIKAMLPILQQALTLSQSNHTLSTQLQARAMGSQTNREFAKDIYALAQNQKQILSNASSIFNLFNSIPKDQLKYLENAYLKVPHLGKTPTNPYRQNVNLNKEINAVQDNVANYGNRLDSALSVAKDVYNLKSNQTEIVTTYNDAKNLSEEISKLPYNQVNVTNIVMSPKDSTAGQYQINPEQQSNLNQALAAMSNNPFKKVGMISSQNNNGALNGLGVQVGYKQFFGESKRWGLRYYGFFDYNHGYIKSSFFNSSSDIWTYGGGSDLLVNFINDSITRKNNKLSVGLFGGIQLAGTTWLNSQYMNLTAFNNPYSAKVNASNFQFLFNLGLRTNLATAKKKDSERSAQHGVELGIKIPTINTNYYSFLGTKLEYRRLYSVYLNYVFAY

SEQ ID NO: 5129 - protein, 637 aa, Helicobacter pylori
  misc_feature (B) LOCATION 1...637
  hypothetical: YES
MKRQFYSLSLSLASSLLHAEDNGFFVSAGYQIGEAVQMVKNTGELKNLNDKYEQLSQSLAQLASLKKSIQTANNIQAVNNALSDLKSFASNNHTNKETSPIYNTAQAVITSVLAFWSLYAGNALSFHVTGLNDGSNSPLGRIHRDGNCTGLQQCFMSKETYDKMKTLAENLQKAQGNLCALSECSSNQSNGGKTSMTTALQTAQQLMDLIEQTKVSMVWKNIVIAGVTNKPNGAGAITSTGHVTDYAVFNNIKAMLPILQQALTLSQSNHTLSTQLQARAMGSQTNREFAKDIYALAQNQKQILSNASSIFNLFNSIPKDQLKYLENAYLKVPHLGKTPTNPYRQNVNLNKEINAVQDNVANYGNRLDSALSVAKDVYNLKSNQTEIVTTYNDAKNLSEEISKLPYNQVNVTNIVMSPKDSTAGQYQINPEQQSNLNQALAAMSNNPFKKVGMISSQNNNGALNGLGVQVGYKQFFGESKRWGLRYYGFFDYNHGYIKSSFFNSSSDIWTYGGGSDLLVNFINDSITRKNNKLSVGLFGGIQLAGTTWLNSQYMNLTAFNNPYSAKVNASNFQFLFNLGLRTNLATAKKKDSERSAQHGVELGIKIPTINTNYYSFLGTKLEYRRLYSVYLNYVFAY

SEQ ID NO: 5130 - protein, 436 aa, Helicobacter pylori
  misc_feature (B) LOCATION 1...436
  hypothetical: YES
LHAEDNGFFVSAGYQIGEAVQMVKNTGELKNLNEKYEQLSQYLNQVASLKQSIQNANNIELVNSSLNYLKSFTNNNYNSTTQSPIFNAVQAVITSVLGFWSLYAGNYLTFFVVNKDTRKPASVQGNPPFSTIVQNCSGIENCAMNQTTYDKMKKLAEDLQAAQQNATTKANNLCALSGCATTQGQNPSSTVSNALNLAQQLMDLIANTNTAMMWKNIVIAGVSNVSGAIDSTGYPTQYAVFNNIKAMIPILQQAVTLSQSNHTLSASLQAQATGSQTNPKFAKDIYAFAQNQKQVISYAQDIFNLFSSIPKDQYRYLEKAYLKIPNAGKTPTNPYRQEVNLNQEIQTIQNNVSYYGNRVDAALSVAKDVYNLKSNQTEIVTTYNNAKNLSQEISKLPYNQVNTKDIITLPYDQNAPAAGQYNYQINPEQHPIFLKL

SEQ ID NO: 5131 - protein, 60 aa, Helicobacter pylori
  misc_feature (B) LOCATION 1...60
  hypothetical: YES
FDLGVRTNFAKTNFNKHRLDQGIEFGVKIPVIAHKYFATQGSSASYMRNFSFICGLFSRF

SEQ ID NO: 5132 - protein, 59 aa, Helicobacter pylori
  misc_feature (B) LOCATION 1...59
  hypothetical: YES
DLGVRTNFAKTNFNKHRLDQGIEFGVKIPVIAHKYFATQGSSASYMRNFSFICGLFSRF

SEQ ID NO: 5133 - protein, 178 aa, Helicobacter pylori
  misc_feature (B) LOCATION 1...178
  hypothetical: YES
KIQGFTQAQELKQLIRDGAVRLQTSAIPLSYYLDILGNTTKTLLSESLQNNPQQPNGQPNQALVNLEQSLGILGKLLDLSQQYASEGVINPLVVDVGKEQIGITDSMLLVAQNIVLALGQVDLSKIQQNNGNQQLYENIMKVMLLGAGGTNGAYNGVSVGDIATGNAKFSFANGLDWG

SEQ ID NO: 5134 - protein, 213 aa, Helicobacter pylori
  misc_feature (B) LOCATION 1...213
  hypothetical: YES
VWAISPQAMQNFPSQTGLIGANSTVSELNALIKSGISLDRETLGLGSFIEKNICSGASSCFSGNQLIYKKGLDRTINIINAVLGQFESSASSLYKISYIPNLFSLKDYQSASMNGFGAKMGYKQFFTHKKNIGLRYYGFLDYGYANFGDTNLKVGANLVTYGVGTDFLYNVYERSRRRERTTIGLFFGAQIAEQTWCFNVTTKAGLRLFRRKP

SEQ ID NO: 5135 - protein, 479 aa, Helicobacter pylori
  misc_feature (B) LOCATION 1...479
  hypothetical: YES
LKNHSFKKTIALSLLASMSLCNAEEDGAFFVIDYQTSLARQELKNPGFTQAQELKQLIRDGAVRLQTSAIPLSYYLDILGNKTKTLLSESLKNNPQQPNGQPNQALVNLEQSLGILGKLLDLSQQYASEGVIKPLVVDVGKEQIGITDSMLLVAQNIVLALGQVDLSKIQQNNGNQQLYENIMKVMLLGTGGTNGAYNGVSVGDIATGMQNFPSQTGLIGANSTVSELNALIKSGISLDRETLGLGSFIEKNICSGASSCFSGNQLIYKKGLDRTINIINAVLGQFESSASSLYKISYIPNLFSLKDYQSASMNGFGAKMGYKQFFTHKKNIGLRYYGFLDYGYANFGDTNLKVGANLVTYGVGTDFLYNVYERSRRRERTTIGLFFGAQIAGQTWSTNVTNLLSGQRPDVKSSSFQFLFDLGVRTNFAKTNFNKHRLDQGIEFGVKIPVIAHKYFATQGSSASYMRNFSFYVGYSVGF

SEQ ID NO: 5136 - protein, 47 aa, Helicobacter pylori
  misc_feature (B) LOCATION 1...47
  hypothetical: YES
NLRTLLKMLVGVSLLTHALMATEESAAPSWTKNLYMGFNYQTGSINL

SEQ ID NO: 5137 - protein, 94 aa, Helicobacter pylori
  misc_feature (B) LOCATION 1...94
  hypothetical: YES
NFFQWSFYQDDIGVDIGVFGGIAIAGNIWYIGNKGHELLRITNIIAVDNTSFQFLFNFGFQSLFVDEHEYEIGFKFPTLNNKYYTTDALKVQMR

SEQ ID NO: 5138 - protein, 245 aa, Helicobacter pylori
  misc_feature (B) LOCATION 1...245
  hypothetical: YES
LRTLLKMLVGVSLLTHALMATEESAAPSWTKNLYMGFNYQTGSINLMTNIHEVREVTSYQTGYTNVMTSINSVKKLTNMGSNGIGLVMGYNHFFHPDKVLGLRYFAFLDWQGYGMRYPKGYYGGNNMITYGVGVDAIWNFFQGSFYQDDIGVDIGVFGGIAIAGNSWYIGNKGQELLGITNSSAVDNTSFQFLFNFGFKALFVDEHEFEIGFKFPTLNNKYYTTDALKVQMRRVFAFYVGYNYHF

SEQ ID NO: 5139 - protein, 471 aa, Helicobacter pylori
  misc_feature (B) LOCATION 1...471
  hypothetical: YES
MKNTNTKEIKNTRMKKGYSQYHTLKKGLLKTALLFSLPLSVALAEDDGFYMGVGYQIGGAQQNINNKGSTLRNNVIDDFRQVGVGMAGGNGLLALATNTTMDALLGIGNQIVNTNTTVGNNNAELTQFKKILPQIEQRFETNKNAYSVQALQVYLSNVLYNLVNNSNNGSNNGVVPEYVGIIKVLYGSQNEFSLLATESVALLNALTRVNLDSNSVFLKGLLAQMQLFNDTSSAKLGQIAENLKNGGAGAMLQKDVKTISDRIATYQENLKQLGGMLKNYDEPYLPQFGPGTSSQHGVINGFGIQVGYKQFFGSKKNIGLRYYAFFDYGFTQLGSLNSAVKANIFTYGAGTDFLWNIFRRVFSDQSLNVGVFGGIQIAGNTWDSSLRGQIENSFKEYPTPTNFQFLFNLGLRAHFASTMHRRFLSASQSIQHGMEFGVKIPAINQRYLKANGADVDYRRLYAFYINYTIGF

SEQ ID NO: 5140 - protein, 489 aa, Helicobacter pylori
  misc_feature (B) LOCATION 1...489
  hypothetical: YES
GILASYVGYSVGFKGRLLMKNTNTKEIKNTRMKKGYSQYHTLKKGLLKTALLFSLPLSVALAEDDGFYMGVGYQIGGAQQNINNKGSTLRNNVIDDFRQVGVGMAGGNGLLALATNTTMDALLGIGNQIVNTNTTVGNNNAELTQFKKILPQIEQRFETNKNAYSVQALQVYLSNVLYNLVNNSNNGSNNGVVPEYVGIIKVLYGSQNEFSLLATESVALLNALTRVNLDSNSVFLKGLLAQMQLFNDTSSAKLGQIAENLKNGGAGAMLQKDVKTISDRIATYQENLKQLGGMLKNYDEPYLPQFGPGTSSQHGVINGFGIQVGYKQFFGSKEDIGLRYYAFFDYGFTQLGSLNSAVKANIFTYGAGTDFLWNIFRRVFSDQSLNVGVFGGIQIAGNTWDSSLRGQIENSFKEYPTPTNFQFLFNLGLRAHFASTMHRRFLSASQSIQHGMEFGVKIPAINQRYLKANGADVDYRRLYAFYINYTIGF

SEQ ID NO: 5141 - protein, 155 aa, Helicobacter pylori
  misc_feature (B) LOCATION 1...155
  hypothetical: YES
MRILILKNKPPTLRSKALTRSWGINFSLKNTLAYAFMGFFDYAHANSIKLKNPNYNSEAAQVASQILGKQEINRLTNIADPRTFEPNMLTYGGAMDVMVNVINNGIMSLGAFGGIQLAGNSWLMAXPSFEGILGEQALVSRKPLLSNFYSMWGLA

SEQ ID NO: 5142 - protein, 242 aa, Helicobacter pylori
  misc_feature (B) LOCATION 1...242
  hypothetical: YES
MKKFFSQSLLALIISMNAVSGMDGNGVFLGAGYLQGQAQMHADINSQKQATNATIKGFDALLGYQFFFEKHFGLRLYGFFDYAHANSIKLKNPNYNSEAAQVASQILGKQEINRLTNIADPRTFEPNMLTYGGAMDVMVNVINNGIMSLGAFGGIQLAGNSWLMATPSFEGILVEQALVSKKATSFQFLFNVGARLRILKHSSIEAGVKFPMLKKNPYITAKNLDIGFRRVYSWYVNYVFTF

SEQ ID NO: 5143 - protein, 242 aa, Helicobacter pylori; identical to SEQ ID NO: 5142
  misc_feature (B) LOCATION 1...242
  hypothetical: YES

SEQ ID NO: 5144 - protein, 263 aa, Helicobacter pylori
  misc_feature (B) LOCATION 1...263
  hypothetical: YES
TFLIIFWVFFLRIKHYVKELSMKKFFSQSLLALIISMNAVSGMDGNGVFLGAGYLQGQAQMHADINSQKQATNATIKGFDALLGYQFFFEKHFGLRLYGFFDYAHANSIKLKNPNYNSEAAQVASQILGKQEINRLTNIADPRTFEPNMLTYGGAMDVMVNVINNGIMSLGAFGGIQLAGNSWLMATPSFEGILVEQALVSKKATSFQFLFNVGARLRILKHSSIEAGVKFPMLKKNPYITAKNLDIGFRRVYSWYVNYVFTF

SEQ ID NO: 5145 - protein, 486 aa, Helicobacter pylori
  misc_feature (B) LOCATION 1...486
  hypothetical: YES
EEDGGFMTFGYELGQVVQQVKNPGKIKAEELAGLLNSTTTNNTNIKYCGTGGNVAGTLGNLFMNQLGNLIDLYPTLKTNNLHQCGSTNSGNGATAAAATNNSPCFQGNLALYNEMVDSIKTLSQNISKNIFQGDNNTTSANLSNQLSELNTASVYLTYMNSFLNANNQAGGIFQNNTNQAYENGVTAQQIAYVLKQASITMGPSGDSGAAGAFLDAALAQHVFNSANAGNDLSAKEFTSLVQNIVNNSQNALTLANNANISNSTGYQVSYGGNIDQARSTQLLNNTTNTLAKVTALNNELKANPWLGNFAAGNSSQVNAFNGFITKIGYKQFFGENKNVGLRYYGFFSYNGASVGFRSTQNNVGLYTYGVGTDVLYNIFSRSFGSRSLNAGFFGGIQLAGDTYISTLRNSPQLASRPTATKFQFLFDVGLRMNFGILKKDLKSHNQHSIEIGVQIPTIYNTYYKAGGAEVKYFRPYSVYWVYGYAF

SEQ ID NO: 5146 - protein, 527 aa, Helicobacter pylori
  misc_feature (B) LOCATION 1...527
  hypothetical: YES
MKQNLKPFKMIKENLMTQSQKVRFLAPLSLALSLSFNPVGAEEDGGFMTFGYELGQVVQQVKNPGKIKAEELAGLLNSTTTNNTNINIAGTGGNVAGTLGNLFMNQLGNLIDLYPTLKTNNLHQCGSTNSGNGATAAAATNNSPCFQGNLALYNEMVDSIKTLSQNISKNIFQGDNNTTSANLSNQLSELNTASVYLTYMNSFLNANNQAGGIFQNNTNQAYENGVTAQQIAYVLKQASITMGPSGDSGAAGAFLDAALAQHVFNSANAGNDLSAKEFTSLVQNIVNNSQNALTLANNANISNSTGYQVSYGGNIDQARSTQLLNNTTNTLAKVTALNNELKANPWLGNFAAGNSSQVNAFNGFITKIGYKQFFGENKNVGLRYYGFFSYNGAGVGNGPTYNQVNLLTYGVGTDVLYNVFSRSFGSRSLNAGFFGGIQLAGDTYISTLRNSPQLASRPTATKFQFLFDVGLRMNFGILKKDLKSHNQHSIEIGVQIPTIYNTYYKAGGAEVKYFRPYSVYWVYGYAF

SEQ ID NO: 5147 - protein, 87 aa, Helicobacter pylori
  misc_feature (B) LOCATION 1...87
  hypothetical: YES
GGNVAGALSNAFSQYLYSLLGAYPTKPNGNDVSANALLSGAVGSGTCAAAGTAGGTTLNTQSACTAAGYYWLPSLTDRILSTDRQPD

SEQ ID NO: 5148 - protein, 86 aa, Helicobacter pylori
  misc_feature (B) LOCATION 1...86
  hypothetical: YES
GNVAGALSNAFSQYLYSLLGAYPTKPNGNDVSANALLSGAVGSGTCAAAGTAGGTTLNTQSACTAAGYYWLPSLTDRILSTDRQPD

SEQ ID NO: 5149 - protein, 133 aa, Helicobacter pylori
  misc_feature (B) LOCATION 1...133
  hypothetical: YES
ALEKNGTATANSTSSTSGATGSDGQTYSQQAIQYLQGQQNILNNAANLLKQDELLLEAFNSAVAANIGNKEFNSAAFTGLVQGIIDQSQLVYNELTKNTISGSAVNNAGINSNQANACKGVLVSSLTLFTTCK

SEQ ID NO: 5150 - protein, 354 aa, Helicobacter pylori
  misc_feature (B) LOCATION 1...354
  hypothetical: YES
MQQQLTYLNAGNVFFNAMNKALEKNGTATANSTSSTSGATGSDGQTYSQQAIQYLQGQQNILNNAANLLKQDELLLEAFNSAVAANIGNKEFNSAAFTGLVQGIIDQSQLVYNELTKNTISGSAVNNAGINSNQANAVQGRASQLPNALYNVQVTLDKINALNNQVRSMPYLPQFRAGNSRATNILNGFYTKVGYKQFFGKKRNIGLRYYGFFSYNGASVGFRSTQNNVGLYTYGVGTDVLYNIFSRSYQNRSVDMGFFSGIQLAGETFQSTLRDDPNVKLHGKINNTHFQFLFDFGMRMNFGKLDGKSNRHNQHTVEFGVVVPTIYNTYYKSAGTTVKYFRPYSVYWSYGYSF

SEQ ID NO: 5151 - protein, 444 aa, Helicobacter pylori
  misc_feature (B) LOCATION 1...444
  hypothetical: YES
LSNAFSQYLYSLLGAYPTKLNGNDVSANALLSGAVGSGTCAAAGTAGGTTLNTQSACTAAGYYWLPSLTDRILSTIGSQTNYGTNTNFPNMQQQLTYLNAGNVFFNAMNKALEKNGTATANSTSSTSGATGSDGQTYSQQAIQYLQGQQNILNNAANLLKQDELLLEAFNSAVAANIGNKEFNSAAFTGLVQGIIDQSQLVYNELTKNTISGSAVNNAGINSNQANAVQGRASQLPNALYNVQVTLDKINALNNQVRSMPYLPQFRAGNSRATNILNGFYTKVGYKQFFGKKRNIGLRYYGFFSYNGASVGFRSTQNNVGLYTYGVGTDVLYNIFSRSYQNRSVDMGFFSGIQLAGETFQSTLRDDPNVKLHGKINNTHFQFLFDFGMRMNFGKLDGKSNRHNQHTVEFGVVVPTIYNTYYKSAGTTVKYFRPYSVYWSYGYSF

SEQ ID NO: 5152 - protein, 132 aa, Helicobacter pylori
  misc_feature (B) LOCATION 1...132
  hypothetical: YES
ETLARVLKVSCLAMGLAQMCCLTQLFSIVRNLHLGFFLGVAIGGTSWGPTNYYFKDLAEEYRGSFHPSNFQVLVNGGIRLGTKHQGFEIGLKIQTIRNNYYTASADNVPEGTTYRFTFHRPYAFYWRYIVSF

SEQ ID NO: 5153 - protein, 217 aa, Helicobacter pylori
  misc_feature (B) LOCATION 1...217
  hypothetical: YES
RRCCRREDTKRYVIEVVISLSTMTSLLSAETPKQEKAIKTSPTKKGERNAAFIGIDYQLGMLSTTAQNCSHGNCNGNQSGAYGSNTPNMPTASNPTGGLTHGALGTRGYKGLSNQQYAINGFGFVVGYKHFFKKAPQFGMRYYGFFDFASSYYKYYTYNDYGMRDARKGSQSFMFGYGAGTDVLFNPAIFNREKLAFGVFLGRCDWWHLLGSNKLLF

SEQ ID NO: 5154 - protein, 286 aa, Helicobacter pylori
  misc_feature (B) LOCATION 1...286
  hypothetical: YES
MKKSVIVGAISLAMTSLLSAETPKQEKAIKTSPTKKGERNAAFIGIDYQLGMLSTTAQNCSHGNCNGNQSGAYGSNTPNMPTASNPTGGLTHGALGTRGYKGLSNQQYAINGFGFVVGYKHFFKKAPQFGMRYYGFFDFASSYYKYYTYNDYGMRDARKGSQSFMFGYGAGTDVLFNPAIFNRENLHLGFFLGVAIGGTSWGPTNYYFKDLAEEYRGSFHPSNFQVLVNGGIRLGTKHQGFEIGLKIQTIRNNYYTASADNVPEGTTYRFTFHRPYAFYWRYIVSF

SEQ ID NO: 5155 - protein, 45 aa, Helicobacter pylori
  misc_feature (B) LOCATION 1...45
  hypothetical: YES
IDKPKATAGFFVGVNFAGNTWTNNRVGYFKDGYVYGVNTDADAHD

SEQ ID NO: 5156 - protein, 98 aa, Helicobacter pylori
  misc_feature (B) LOCATION 1...98
  hypothetical: YES
QRLYLGKLNAKVNHTIFQFLVNVGIRTNIFEHHGIEFGIKIPTLPNYFFKGSTTIRAKKQGPLENGNPTTITGAETNFSLTQTLRRQYSMYLRYVYTF

SEQ ID NO: 5157 - protein, 134 aa, Helicobacter pylori
  misc_feature (B) LOCATION 1...134
  hypothetical: YES
MFMASIRTLTHMTNADGTITCGDTTPASCNVGINPNSVYTTGKLNAKVNHTIFQFLVNVGIRTNIFEHHGIEFGIKIPTLPNYFFKGSTTIRAKKQGPLENGNPTTITGAETNFSLTQTLRRQYSMYLRYVYTF

SEQ ID NO: 5158 - protein, 340 aa, Helicobacter pylori
  misc_feature (B) LOCATION 1...340
  hypothetical: YES
LSSLWLTNPLNAHEKNGAFVGISLEVGRVDQKTNAYRNGELFQVPFGDVSANDDGKVPDGQTGGCQPASGTPGTPGYTKANCVVNWTSRTMLSTNKDIPGRNQPMYGLGVMTGYKHFVGKKRWFGLRYYGFFDYGHTNFSNSRAANAISPFYLSDQKADMYTYGFGTDMLFNVIDKPKATAGFFVGVNFAGNTWTNNRVGYFKDGYVYGVNTDADAYMTNADGTITCGDTTPASCNVGINPNSVYTTGKLNAKVNHTIFQFLVNVGIRTNIFEHHGIEFGIKIPTLPNYFFKGSTTIRAKKQGPLENGNPTTITGAETNFSLTQTLRRQYSMYLRYVYTF

SEQ ID NO: 5159 - protein, 387 aa, Helicobacter pylori
  misc_feature (B) LOCATION 1...387
  hypothetical: YES
MVNFMTKKKNRMQDCKMVCKNFNRKESVLIAQSLDISKKGSVILGALLSSLWLTNPLNAHEKNGAFVGISLEVGRADQKTNAYRNGELFQVPFGDVSANDDGKVPDGQTGGCQPASGTPGTPGYTKANCVVNWTSRTMLSTNKDIPGRNQPMYGLGVMTGYKHFVGKKRWFGLRYYGFFDYGHTNFSNSRAANAISPFYLSDQKADMYTYGFGTDMLFNVIDKPKATAGFFVGVNFAGNTWTNNRVGYFKDGYVYGVNTDADAYMTNADGTITCGDTTPASCNVGINPNSVYTTGKLNAKVNHTIFQFLVNVGIRTNIFEHHGIEFGIKIPTLPNYFFKGSTTIRAKKQGPLENGNPTTITGAETNFSLTQTLRRQYSMYLRYVYTF

SEQ ID NO: 5160 - protein, 266 aa, Helicobacter pylori
  misc_feature (B) LOCATION 1...266
  hypothetical: YES
LLARTILDFRGSLSNLNNTYNSITTTASNTPNSPFLKNLISQSTNPNNPGGLQAVYQVNQSAYSQLLSATQELGHNPFRRVGLISSQTNNGAMNGIGVQVGYKQFFGEKRRWGLRYYGFFDYNHAYIKSSFFNSASDVFTYGVGTDVLYNFINDKTTKNSKISFGVFGGIALAGTSWLNSQYVNLATFNNFYSAKMNVANFQFLFNLGLRMNLAKNKKKDSDHAAQHGVELGVKIPTINTNYYSFLGTKLEYRRLYSVYLNYVFAY

SEQ ID NO: 5161 - protein, 265 aa, Helicobacter pylori
  misc_feature (B) LOCATION 1...265
  hypothetical: YES
LARTILDFRGSLSNLNNTYNSITTTASNTPNSPFLKNLISQSTNPNNPGGLQAVYQVNQSAYSQLLSATQELGHNPFRRVGLISSQTNNGAMNGIGVQVGYKQFFGEKRRWGLRYYGFFDYNHAYIKSSFFNSASDVFTYGVGTDVLYNFINDKTTKNSKISFGVFGGIALAGTSWLNSQYVNLATFNNFYSAKMNVANFQFLFNLGLRMNLAKNKKKDSDHAAQHGVELGVKIPTINTNYYSFLGTKLEYRRLYSVYLNYVFAY

SEQ ID NO: 5162 - protein, 667 aa, Helicobacter pylori
  misc_feature (B) LOCATION 1...667
  hypothetical: YES
KKPFYSLSLASSLLNAEDNGFFISAGYQIGEAAQMVKNTGELKKLSDTYENLSNLLTNFNNLNQAVTNASSPSEINAAIDNLKANTQGLIGEKTNSPAYQAVYLALNAAVGLWNVIAYNVQCGPGNSGQQSVTFEGQPGHNSSSINCNLTGYNNGVSGPLSIENFKKLNQAYQTIQQALKQDSGFPVLDSAGKQVTITITTQTNGANKSETTTTTTTTNDAQTLLQEASKMISVLTTNCPWVNHNQGQNGGAPWGLDTAGNVCQVFATEFSAVTSMIKNAQEIVTQAQSLNQQNNQNAPQDFNPYTSADRAFAQNMLNHAQAQAKILELADQMKKDLNTIPSQFITNYLAACHNGGGTLPDAGVTNNTWGAGCAYVEETITALNNSLAHFGTQAEQIKQSELLARTILDFRGSLSNLNNTYNSITTTASNTPNSPFLKNLISQSTNPNNPGGLQAVYQVNQSAYSQLLSATQELGHNPFRRVGLISSQTNNGAMNGIGVQVGYKQFFGEKRRWGLRYYGFFDYNHAYIKSSFFNSASDVFTYGVGTDVLYNFINDKTTKNSKISFGVFGGIALAGTSWLNSQYVNLATFNNFYSAKMNVANFQFLFNLGLRMNLAKNKKKASDHAAQHGVELGVKIPTINTNYYSLLGTQLQYRRLYSVYLNYVFAY

SEQ ID NO: 5163 - protein, 668 aa, Helicobacter pylori
  misc_feature (B) LOCATION 1...668
  hypothetical: YES
MKKPFYSLSLASSLLNAEDNGFFISAGYQIGEAAQMVKNTGELKKLSDTYENLSNLLTNFNNLNQAVTNASSPSEINAAIDNLKANTQGLIGEKTNSPAYQAVYLALNAAVGLWNVIAYNVQCGPGNSGQQSVTFEGQPGHNSSSINCNLTGYNNGVSGPLSIENFKKLNQAYQTIQQALKQDSGFPVLDSAGKQVTITITTQTNGANKSETTTTTTTTNDAQTLLQEASKMISVLTTNCPWVNHNQGQNGGAPWGLDTAGNVCQVFATEFSAVTSMIKNAQEIVTQAQSLNQQNNQNAPQDFNPYTSADRAFAQNMLNHAQAQAKILELADQMKKDLNTIPSQFITNYLAACHNGGGTLPDAGVTNNTWGAGCAYVEETITALNNSLAHFGTQAEQIKQSELLARTILDFRGSLSNLNNTYNSITTTASNTPNSPFLKNLISQSTNPNNPGGLQAVYQVNQSAYSQLLSATQELGHNPFRRVGLISSQTNNGAMNGIGVQVGYKQFFGEKRRWGLRYYGFFDYNHAYIKSSFFNSASDVFTYGVGTDVLYNFINDKTTKNSKISFGVFGGIALAGTSWLNSQYVNLATFNNFYSAKMNVANFQFLFNLGLRMNLAKNKKKASDHAAQHGVELGVKIPTINTNYYSLLGTQLQYRRLYSVYLNYVFAY

SEQ ID NO: 5164 - protein, 108 aa, Helicobacter pylori
  misc_feature (B) LOCATION 1...108
  hypothetical: YES
YQILNQRKTMKKVLLLTLSLSLSFWLHAERNGFYLGLNFAEGSYIQGQGSIGEKASAENALNQAINNAQNSLFPNTQAIRDVQNALNAVKDSNKIANRFAGNGGSGGI

SEQ ID NO: 5165 - protein, 307 aa, Helicobacter pylori
  misc_feature (B) LOCATION 1...307
  hypothetical: YES
MKKVLLLTLSLSLSFWLHAERNGFYLGLNFAEGSYIQGQGSIGEKASAENALNQAINNAKNSLFPNTKAIRDVQNALNAVKDSNKIANRFAGNGGSGGIFNELSLGYKYFLGKKRIIGFRHSLFFGYQLGGVGSVPGSGLIAFLPYGFNTDLLINWTNDKRASQEYVERRVKGLSIFYKDMTGRTLDADTLKRASRHIIRKSSGLVIGMELGASTWFASNNLTPFNQVKSRTIFQLQGKFGVRFSSDEYDIDRYGDENYLGGSSVELGVKVPAFKVNYYSDDYGDKLDYKRVVSVYLNYTYNFKNKH

SEQ ID NO: 5166 - protein, 71 aa, Helicobacter pylori
  misc_feature (B) LOCATION 1...71
  hypothetical: YES
LNSLSLPPRTPNSITGAIDNLSSSAINLTSATTTSPAYQAVALALNAAVGMWQVIAFGISCGPGPILAQNI

SEQ ID NO: 5167 - protein, 193 aa, Helicobacter pylori
  misc_feature (B) LOCATION 1...193
  hypothetical: YES
RYHHFSGLSSCGFSAQCGCGHVASHSLWHQLWPWPNLGPEHLENGGVRSFDNTPNYSYNTGSGTTTTTCNGASNVGPNGILSSSEYQVLNTAYQTIQTALNQNQGGGMPALNSSKNMVVNINQTFTKNPTTEYTYPDGNGNYYSGGSSIPIQLKISSVNDAENLLQQAATIINVLTTQNPHVNGGGGVMGVWR

SEQ ID NO: 5168 - protein, 418 aa, Helicobacter pylori
  misc_feature (B) LOCATION 1...418
  hypothetical: YES
MVVVGSWGFGGKTGNVMDIFGDSFNAINEMIKNAQAVLEKTQQLNANENTQITQPDNFNPYTSKDTQFAQEMLNRANAQAEILSLAQQVADNFHSIQGPIQQDLEECTAGSAGVINDNTYGSGCAFVKETLNSLEQHTAYYGNQVNQDRALSQTILNFKEALSTLGNDSKAINSGISNLPNAKSLQNMTHATQNPNSPEGLLTYSLDTSKYNQLQTVAQELGKNPFRRIGVINYQNNNGAMNGIGVQAGYKQFFGKKRNWGLRYYGFFDYNHAYIKSNFFNSASDVWTYGVGMDALYNFINDKNTNFLGKNNKLSVGLFGGFALAGTSWLNSQQVNLTMMNGIYNANVSASNFQFLFDLGLRMNLARPKKKDSDHAAQHGMELGVKIPTINTDYYSFMGAELKYRRLYSVYLNYVFAY

SEQ ID NO: 5169 - protein, 493 aa, Helicobacter pylori
  misc_feature (B) LOCATION 1...493
  hypothetical: YES
MPALNSSKNMVVNINQTFTKNPTTEYTYPDGNGNYYSGGSSIPIQLKISSVNDAENLLQQAATIINVLTTQNPHVNGGGGAWGFGGKTGNVMDIFGDSFNAINEMIKNAQAVLEKTQQLNANENTQITQPDNFNPYTSKDTQFAQEMLNRANAQAEILSLAQQVADNFHSIQGPIQQDLEECTAGSAGVINDNTYGSGCAFVKETLNSLEQHTAYYGNQVNQDRALSQTILNFKEALSTLGNDSKAINSGISNLPNAKSLQNMTHATQNPNSPEGLLTYSLDTSKYNQLQTVAQELGKNPFRRIGVINYQNNNGAMNGIGVQAGYKQFFGKKRNWGLRYYGFFDYNHAYIKSNFFNSASDVWTYGVGMDALYNFINDKNTNFLGKNNKLSVGLFGGFALAGTSWLNSQQVNLTMMNGIYNANVSASNFQFLFDLGLRMNLARPKKKDSDHAAQHGMELGVKIPTINTDYYSFMGAELKYRRLYSVYLNYVFAY

SEQ ID NO: 5170 - protein, 696 aa, Helicobacter pylori
  misc_feature (B) LOCATION 1...696
  hypothetical: YES
MKIKKSLFALSFSLMASLSRAEDDGFYMSVGYQIGEAVQKVKNTGALQNLADRYDNLSNLLNQYNYLNSLVNLASTPSAITGAIDNLSSSAINLTSATTTSPAYQAVALALNAAVGMWQVIAFGISCGPGPNLGPEHLENGGVRSFDNTPNYSYNTGSGTTTTTCNGASNVGPNGILSSSEYQVLNTAYQTIQTALNQNQGGGMPALNSSKNMVVNINQTFTKNPTTEYTYPDGNGNYYSGGSSIPIQLKISSVNDAENLLQQAATIINVLTTQNPHVNGGGGAWGFGGKTGNVMDIFGDSFNAINEMIKNAQAVLEKTQQLNANENTQITQPDNFNPYTSKDTQFAQEMLNRANAQAEILSLAQQVADNFHSIQGPIQQDLEECTAGSAGVINDNTYGSGCAFVKETLNSLEQHTAYYGNQVNQDRALSQTILNFKEALSTLGNDSKAINSGISNLPNAKSLQNMTHATQNPNSPEGLLTYSLDTSKYNQLQTVAQELGKNPFRRIGVINYQNNNGAMNGIGVQAGYKQFFGKKRNWGLRYYGFFDYNHAYIKSNFFNSASDVWTYGVGMDALYNFINDKNTNFLGKNNKLSVGLFGGFALAGTSWLNSQQVNLTMMNGIYNANVSASNFQFLFDLGLRMNLARPKKKDSDHAAQHGMELGVKIPTINTDYYSFMGAELKYRRLYSVYLNYVFAY

SEQ ID NO: 5171 - protein, 275 aa, Helicobacter pylori
  misc_feature (B) LOCATION 1...275
  hypothetical: YES
LLDVKANSPAYQAVLLALNAAVGLWQVTSYAFTACGPGSNENANGGIQTFNNVPGQNTTTITCNSYYEPGHGGPISTENYAIINKAYQIIQKALTANGEGIPVLSNTTTKLDFTINGDKRTGGEPNKKLVYPWSHGKPISTSWNATITVPTTENINTTNSAQELLKQASIIITTLNSACPNFQNGGSGYWAGISGNGTMCGMFKNEISAIQGMIANAQEAVAQAKIVSENTQNQNSLDAENHSTPTQTLVLLKACSKTRSPSGDFKPSRTSGEKL

SEQ ID NO: 5172 - protein, 416 aa, Helicobacter pylori
  misc_feature (B) LOCATION 1...416
  hypothetical: YES
MCGMFKNEISAIQGMIANAQEAVAQAKIVSENTQNQNSLDAGKPFNPYTDASFAESMLKNAQAQAEILNQAEQVVKNFEKIPTAFVNDSLGVCYEVQGGERRGTNPGQTTSNTWGAGCAYVGQTITNLKNSIAHFGTQEQQIQQAENIADTLVNFKSRYSELGNTYNSITTALSNIPNAQSLQNAVSKKNNPYSPQGIDTNYYLNQNSYNQIQTINQELGRNPFRKVGIVSSQTNNGAMNGIGIQVGYKQFFGQKRKWGARYYGFFDYNHAFIKSSFFNSASDVWTYGFGADALYNFINDKATNFLGKNNKLSVGLFGGIALAGTSWLNSEYVNLATMNNVYNAKMNVANFQFLFNMGVRMNLARPKKKDSDHAAQHGIELGLKIPTINTNYYSFMGAELKYRRLYSVYLNYVFAY

SEQ ID NO: 5173 - protein, 635 aa, Helicobacter pylori
  misc_feature (B) LOCATION 1...635
  hypothetical: YES
LSSDPSAVNDARDNLGSSTRNLLDVKANSPAYQAVLLALNAAVGLWQVTSYAFTACGPGSNENANGGIQTFNNVPGQNTTTITCNSYYEPGHGGPISTKNYAIINKAYQIIQKALTANGEGIPVLSNTTTKLDFTINGDKRTGGEPNKKLVYPWSHGKAISTSWNATITAPTTENINTTNSAQELLKQASIIITTLNSACPNFQNGGSGYWAGISGNGTMCGMFKNEISAIQGMIANAQEAVAQAKIVSENTQNQNSLDAGKPFNPYTDASFAESMLKNAQAQAEILNQAEQVVKNFEKIPTAFVNDSLGVCYEVQGGERRGTNPGQTTSNTWGAGCAYVGQTITNLKNSIAHFGTQEQQIQQAENIADTLVNFKSRYSELGNTYNSITTALSNIPNAQSLQNAVSKKNNPYSPQGIDTNYYLNQNSYNQIQTINQELGRNPFRKVGIVSSQTNNGAMNGIGIQVGYKQFFGQKRKWGARYYGFFDYNHAFIKSSFFNSASDVWTYGFGADALYNFINDKATNFLGKNNKLSVGLFGGIALAGTSWLNSEYVNLATMNNVYNAKMNVANFQFLFNMGVRMNLARPKKKDSDHAAQHGIELGLKIPTINTNYYSFMGAELKYRRLYSVYLNYVFAY

SEQ ID NO: 5174 - protein, 646 aa, Helicobacter pylori
  misc_feature (B) LOCATION 1...646
  hypothetical: YES
SNYNNLNTLVSLSSDPSAVNDARDNLGSSARNLLDVKANSPAYQAVLLALNAAVGLWQVTSYAFTACGPGSNENANGGIQTFNNVPGQNTTTITCNSYYEPGHGGPISTENYAIINKAYQIIQKALTANGEGIPVLSNTTTKLDFTINGDKRTGGEPNKKLVYPWSHGKAISTSWNATITVPTTENINTTNSAQELLKQASIIITTLNSACPNFQNGGSGYWAGISGNGTMCGMFKNEISAIQGMIANAQEAVAQAKIVSENTQNQNSLDAGKPFNPYTDASFAESMLKNAQAQAEILNQAEQVVKNFEKIPTAFVNDSLGVCYEVQGGERRGTNPGQTTSNTWGAGCAYVGQTITNLKNSIAHFGTQEQQIQQAENIADTLVNFKSRYSELGNTYNSITTALSNIPNAQSLQNAVSKKNNPYSPQGIDTNYYLNQNSYNQIQTINQELGRNPFRKVGIVSSQTNNGAMNGIGIQVGYKQFFGQKRKWGARYYGFFDYNHAFIKSSFFNSASDVWTYGFGADALYNFINDKATNFLGKNNKLSVGLFGGIALAGTSWLNSEYVNLATMNNVYNAKMNVANFQFLFNMGVRMNLARPKKKDSDHAAQHGIELGLKIPTINTNYYSFMGAELKYRRLYSVYLNYVFAY

SEQ ID NO: 5175 - protein, 668 aa, Helicobacter pylori
  misc_feature (B) LOCATION 1...668
  hypothetical: YES
MVKNTKGIQQLSENYEKLNNLLNNYNTLNTLVKLSSDPSAVNDARDNLGSSTRNLLDVKANSPAYQAVLLALNAAVGLWQVTSYAFTACGPGSNENANGGIQTFNNVPGQNTTTITCNSYYEPGHGGPISTKNYAIINKAYQIIQKALTANGEGIPVLSNTTTKLDFTINGDKRTGGEPNKKLVYPWSHGKAISTSWNATITAPTTENINTTNSAQELLKQASIIITTLNSACPNFQNGGSGYWAGISGNGTMCGMFKNEISAIQGMIANAQEAVAQAKIVSENTQNQNSLDAGKPFNPYTDASFAESMLKNAQAQAEILNQAEQVVKNFEKIPTAFVNDSLGVCYEVQGGERRGTNPGQTTSNTWGAGCAYVGQTITNLKNSIAHFGTQEQQIQQAENIADTLVNFKSRYSELGNTYNSITTALSNIPNAQSLQNAVSKKNNPYSPQGIDTNYYLNQNSYNQIQTINQELGRNPFRKVGIVSSQTNNGAMNGIGIQVGYKQFFGQKRKWGARYYGFFDYNHAFIKSSFFNSASDVWTYGFGADALYNFINDKATNFLGKNNKLSVGLFGGIALAGTSWLNSEYVNLATMNNVYNAKMNVANFQFLFNMGVRMNLARPKKKDSDHAAQHGIELGLKIPTINTNYYSFMGAELKYRRLYSVYLNYVFAY

SEQ ID NO: 5176 - protein, 704 aa, Helicobacter pylori
  misc_feature (B) LOCATION 1...704
  hypothetical: YES
MMKKTPLLSLSLSFLLHAEDDGFYASAGIRIGEAAQMVKNTKGIQQLSENYEKLNNLLNNYNTLNTLVKLSSDPSAVNDARDNLGSSTRNLLDVKANSPAYQAVLLALNAAVGLWQVTSYAFTACGPGSNENANGGIQTFNNVPGQNTTTITCNSYYEPGHGGPISTKNYAIINKAYQIIQKALTANGEGIPVLSNTTTKLDFTINGDKRTGGEPNKKLVYPWSHGKAISTSWNATITAPTTENINTTNSAQELLKQASIIITTLNSACPNFQNGGSGYWAGISGNGTMCGMFKNEISAIQGMIANAQEAVAQAKIVSENTQNQNSLDAGKPFNPYTDASFAESMLKNAQAQAEILNQAEQVVKNFEKIPTAFVNDSLGVCYEVQGGERRGTNPGQTTSNTWGAGCAYVGQTITNLKNSIAHFGTQEQQIQQAENIADTLVNFKSRYSELGNTYNSITTALSNIPNAQSLQNAVSKKNNPYSPQGIDTNYYLNQNSYNQIQTINQELGRNPFRKVGIVSSQTNNGAMNGIGIQVGYKQFFGQKRKWGARYYGFFDYNHAFIKSSFFNSASDVWTYGFGADALYNFINDKATNFLGKNNKLSVGLFGGIALAGTSWLNSEYVNLATMNNVYNAKMNVANFQFLFNMGVRMNLARPKKKDSDHAAQHGIELGLKIPTINTNYYSFMGAELKYRRLYSVYLNYVFAY

SEQ ID NO: 5177 - protein, 255 aa, Helicobacter pylori
  misc_feature (B) LOCATION 1...255
  hypothetical: YES
MKKIFLGMALAFSVSMAEKSGAFLGGGFQYSNLENQNTTRTPSANNNTPINTSMFGNNQAAPAQETPSVINTNNYGQMYGVDAMAGYKWFFGKTKRFGFRTYGYYSYNHANLSFVGSKLGIMDGASQVNNFTYGVGFDALYNFYESKEGYNTAGLFVGFGLGGDSFIVQGESYLKSQMQICNNTAGCSASMNTSYFQMPVEFGFRSNFSKHSGIEVGFKLPLFTNQFYKERGVDGSVDVFYKRNFSIYFNYMINL

SEQ ID NO: 5178 - protein, 255 aa, Helicobacter pylori; identical to SEQ ID NO: 5177
  misc_feature (B) LOCATION 1...255
  hypothetical: YES

SEQ ID NO: 5179 - protein, 340 aa, Helicobacter pylori
  misc_feature (B) LOCATION 1...340
  hypothetical: YES
MILSIESSCDDSSLALTRIEDAKLIAHFKISQEKHHSSYGGVVPEIASRLHAENLPLLLERVKISLNKDFSKIKAIAITNQPGLSVTLIEGLMMAKALSLSLNLPLILEDHLRGHVYSLFINEKQTRMPLSVLLVSGGHSLILEARDYEDIKIVATSLDDSFGESFDKVSKMLDLGYPGGPIVEKLALDYAHPNEPLMFPIPLKNSPNLAFSFSGLKNAVRLEVEKNAHNLNDEVKQKIGYHFQSAAIEHLIQQTKRYFKIKRPKIFGIVGGASQNLALRKAFEDLCAEFDCELVLAPLEFCSDNAAMIGRSSLEAYQKKRFIPLEKADISPRTLLKNFE

SEQ ID NO: 5180 - protein, 340 aa, Helicobacter pylori; identical to SEQ ID NO: 5179
  misc_feature (B) LOCATION 1...340
  hypothetical: YES

SEQ ID NO: 5181 - protein, 340 aa, Helicobacter pylori; identical to SEQ ID NO: 5179
  misc_feature (B) LOCATION 1...340
  hypothetical: YES

SEQ ID NO: 5182 - protein, 354 aa, Helicobacter pylori
  misc_feature (B) LOCATION 1...354
  hypothetical: YES
QGIIQAKTPPKDKDMILSIESSCDDSSLALTRIEDAKLIAHFKISQEKHHSSYGGVVPEIASRLHAENLPLLLERVKISLNKDFSKIKAIAITNQPGLSVTLIEGLMMAKALSLSLNLPLILEDHLRGHVYSLFINEKQTRMPLSVLLVSGGHSLILEARDYEDIKIVATSLDDSFGESFDKVSKMLDLGYPGGPIVEKLALDYAHPNEPLMFPIPLKNSPNLAFSFSGLKNAVRLEVEKNAHNLNDEVKQKIGYHFQSAAIEHLIQQTKRYFKIKRPKIFGIVGGASQNLALRKAFEDLCAEFDCELVLAPLEFCSDNAAMIGRSSLEAYQKKRFIPLEKADISPRTLLKNFE

SEQ ID NO: 5183 - protein, 198 aa, Helicobacter pylori
  misc_feature (B) LOCATION 1...198
  hypothetical: YES
MLVTKLAPDFKAPAVLGNNEVDEHFELSKNLGKNGVILFFWPKDFTFVCPTEIIAFDKRVKDFHEKGFNVIGVSIDSEQVHFAWKNTPVEKGGIGQVSFPMVADITKSISRDYDVLFEEAIALRGAFLIDKNMKVRHAVINDLPLGRNADEMLRMVDALLHFEEHGEVCPAGWRKGDKGMKATHQGVAEYLKENSIKL

SEQ ID NO: 5184 - protein, 211 aa, Helicobacter pylori
  misc_feature (B) LOCATION 1...211
  hypothetical: YES
LIQQNFKTLKELYMLVTKLAPDFKAPAVLGNNEVDEHFELSKNLGKNGVILFFWPKDFTFVCPTEIIAFDKRVKDFHEKGFNVIGVSIDSEQVHFAWKNTPVEKGGIGQVSFPMVADITKSISRDYDVLFEEAIALRGAFLIDKNMKVRHAVINDLPLGRNADEMLRMVDALLHFEEHGEVCPAGWRKGDKGMKATHQGVAEYLKENSIKL

SEQ ID NO: 5185 - protein, 219 aa, Helicobacter pylori
  misc_feature (B) LOCATION 1...219
  hypothetical: YES
IKSVLGLILIQQNFKTLKELYMLVTKLAPDFKAPAVLGNNEVDEHFELSKNLGKNGVILFFWPKDFTFVCPTEIIAFDKRVKDFHEKGFNVIGVSIDSEQVHFAWKNTPVEKGGIGQVSFPMVADITKSISRDYDVLFEEAIALRGAFLIDKNMKVRHAVINDLPLGRNADEMLRMVDALLHFEEHGEVCPAGWRKGDKGMKATHQGVAEYLKENSIKL

SEQ ID NO: 5186 - protein, 428 aa, Helicobacter pylori
  misc_feature (B) LOCATION 1...428
  hypothetical: YES
MKKKFLSLTLGSLLVSALSAEDNGFFVSAGYQIGESAQMVKNTKGIQDLSDSYERLNNLLTNYSVLNALIRQSADPNAINNARGNLNASAKNLINDKKNSPAYQAVLLALNAAAGLWQVMSYAISPCGPGKDTSKNGGVQTFHNTPSNQWGGTTITCGTTGYEPGPYSILSTENYAKINKAYQIIQKAFGSSGKDIPALSDTNTELKFTINKNNGNTNTNNNGEEIVTKNNAQVLLEQASTIITTLNSACPWINNGGAGGASSGSLWEGIYLKGDGSACGIFKNEISAIQDMIKNAAIAVEQSKIVAANAQNQRNLDTGKTFNPYKDANFAQSMFANAKAQAEILNRAQAVVKDFERIPAEFVKDSLGVCHEVQNGHLRGTPSGTVTDNTWGAGCAYVGETVTNLKDSIAHFGDQAERIHNARNLATL

SEQ ID NO: 5187 - protein, 690 aa, Helicobacter pylori
  misc_feature (B) LOCATION 1...690
  hypothetical: YES
MKKKFLSLTLGSLLVSALSAEDNGFFVSAGYQIGESAQMVKNTKGIQDLSDSYERLNNLLTNYSVLNALIRQSADPNAINNARGNLNASAKNLINDKKNSPAYQAVLLALNAAAGLWQVMSYAISPCGPGKDTSKNGGVQTFHNTPSNQWGGTTITCGTTGYEPGPYSILSTENYAKINKAYQIIQKAFGSSGKDIPALSDTNTELKFTINKNNGNTNTNNNGEEIVTKNNAQVLLEQASTIITTLNSACPWINNGGAGGASSGSLWEGIYLKGDGSACGIFKNEISAIQDMIKNAAIAVEQSKIVAANAQNQRNLDTGKTFNPYKDANFAQSMFANAKAQAEILNRAQAVVKDFERIPAEFVKDSLGVCHEVQNGHLRGTPSGTVTDNTWGAGCAYVGETVTNLKDSIAHFGDQAERIHNARNLAYTLANFSSQYQKLGEHYDSITAAISSLPDAQSLQNVVSKKTNPNSPQGIQDNYYIDSNIHSQVQSRSQELGSNPFRRAGLIAASTTNNGAMNGIGFQVGYKQFFGKNKRWGARYYGFVDYNHTYNKSQFFNASSDVWTYGVGSDLLVNFINDKATKHNKISFGAFGGIALAGTSWLNSQYVNLANVNNYYKAKINTANFQFLFNLGLRMNLARKKHRATDNAAQHGIELGTKIPTINTNYYSLLGTTLQYRRLYSVYLNYVFAY

SEQ ID NO: 5188 - protein, 249 aa, Helicobacter pylori
  misc_feature (B) LOCATION 1...249
  hypothetical: YES
MKKGSLAIVLGSLLASGTFYTALADGMPMKQQHNNMGESVELHFHYPIKGKQEPKNNHLVVLIDPKIEANKVIPENYQKEFEKSLFLQLSNFLERKGYSVSQFKDVSEIPQDIKEKALLVLRMDGNVAILEDIVEESDALSEEKVIDMSSGYLNLNFVEPKSEDIIHSFGIDVSKIKAVIERVELRRTNSGGFVPKTFVHRIKETDHDRAIKKIMNQAYHKVMAHITKELSKKHMERYEKVSSEMKKRK

SEQ ID NO: 5189 - protein, 249 aa, Helicobacter pylori; identical to SEQ ID NO: 5188
  misc_feature (B) LOCATION 1...249
  hypothetical: YES

SEQ ID NO: 5190 - protein, 261 aa, Helicobacter pylori
  misc_feature (B) LOCATION 1...261
  hypothetical: YES
ELILKKKKERNLMKKGSLAIVLGSLLASGTFYTALADGMPMKQQHNNMGESVELHFHYPIKGKQEPKNNHLVVLIDPKIEANKVIPENYQKEFEKSLFLQLSNFLERKGYSVSQFKDVSEIPQDIKEKALLVLRMDGNVAILEDIVEESDALSEEKVIDMSSGYLNLNFVEPKSEDIIHSFGIDVSKIKAVIERVELRRTNSGGFVPKTFVHRIKETDHDRAIKKIMNQAYHKVMAHITKELSKKHMERYEKVSSEMKKRK

SEQ ID NO: 5191 - protein, 66 aa, Helicobacter pylori
  misc_feature (B) LOCATION 1...66
  hypothetical: YES
GVAYGSFLMDWFAARTTYSGGFTKNNNGGYDSHGRKVLYGTHAVQLTYKPHRFLIGRLLLPFASNL

SEQ ID NO: 5192 - protein, 126 aa, Helicobacter pylori
  misc_feature (B) LOCATION 1...126
  hypothetical: YES
EACMPKASQVLFFGAFLSTSLQGFEAKLNGFVDQSSTIGFNQHKINKERGIYPMQQFATIAGYLGLGFSLLPKKVSDHVLKGKIGGMVGSIFYDGTKKFEDGSVAYNLFGYYDGFMGVYTNILQTG

SEQ ID NO: 5193 - protein, 238 aa, Helicobacter pylori
  misc_feature (B) LOCATION 1...238
  hypothetical: YES
MPKASQVLFFGAFLSTSLQGFEAKLNGFVDQSSTIGFNQHKINKERGIYPMQQFATIAGYLGLGFSLLPKKVSDHVLKGKIGGMVGSIFYDGTKKFEDGSVAYNLFGYYDGFMGVYTNILQTDSLETQNMKHNKNVRNYVFSDAYLEYAYKNYFEIKAGRYLSTMPYKSGQTQGFQVSGQYKHARLTWFSSWGRAFAYGSFLMDWFAARNTYSGGFTKNNNGGYDSHGRKVLYGTHAV

SEQ ID NO: 5194 - protein, 260 aa, Helicobacter pylori
  misc_feature (B) LOCATION 1...260
  hypothetical: YES
MPKASQVLFFGAFLSTSLQGFEAKLNGFVDQSSTIGFNQHKINKERGIYPMQQFATIAGYLGLGFSLLPKKVSDHVLKGKIGGMVGSIFYDGTKKFEDGSVAYNLFGYYDGFMGVYTNILQTDSLETQNMKHNKNVRNYVFSDAYLEYAYKNYFEIKAGRYLSTMPYKSGQTQGFQVSGQYKHARLTWFSSWGRAFAYGSFLMDWFAARTTYSGGFTKNNNGGYDSHGRKVLYGTHAVQLTYKPHRFLIGRLLLPFASNL

SEQ ID NO: 5195 - protein, 108 aa, Helicobacter pylori
  misc_feature (B) LOCATION 1...108
  hypothetical: YES
YAFFCIFILISLGVRVLEIKKYFLYALFFLLFSGLFLSKLQAYKFNMSIVGKVSSYTKFGFNNQRYQPSKDIYPTGSYTSLLGELNLSMGLYKGLRAEVGAMMGSASL

SEQ ID NO: 5196 - protein, 107 aa, Helicobacter pylori
  misc_feature (B) LOCATION 1...107
  hypothetical: YES
AFFCIFILISLGVRVLEIKKYFLYALFFLLFSGLFLSKLQAYKFNMSIVGKVSSYTKFGFNNQRYQPSKDIYPTGSYTSLLGELNLSMGLYKGLRAEVGAMMGSASL

SEQ ID NO: 5197 - protein, 144 aa, Helicobacter pylori
  misc_feature (B) LOCATION 1...144
  hypothetical: YES
HKKDKFSFGVKGGRYDAEEYDWFTSYTQGVEGFVKYKDTRLRVMYSDARASASSDWFWYFGRYYTSGKALMIADLKYEKDNLKINPYFYAIFQRMYAPGINITYDTNPNFNNKGFRFVGTFVGFSPFLPLRLIKMILSYSNKCH

SEQ ID NO: 5198 - protein, 143 aa, Helicobacter pylori
  misc_feature (B) LOCATION 1...143
  hypothetical: YES
KKDKFSFGVKGGRYDAEEYDWFTSYTQGVEGFVKYKDTRLRVMYSDARASASSDWFWYFGRYYTSGKALMIADLKYEKDNLKINPYFYAIFQRMYAPGINITYDTNPNFNNKGFRFVGTFVGFSPFLPLRLIKMILSYSNKCH

SEQ ID NO: 5199 - protein, 202 aa, Helicobacter pylori
  misc_feature (B) LOCATION 1...202
  hypothetical: YES
GLSFCRHFRGFFPIFATPANQNDIILFQQVPLGKSGQTYFFRTRFYYNKWQFGGSVYKNIGNANGDIGIYGDPLGYNIWTNSIYDAEINNIVGADVINGFLYVGSQYRGFSWKILGRWTDSPRADERSLALFLSYFSNKYNIRMDLKLEYYGNITKKGYCIGYCGMYVPVDPNGPGTQPLTHNVYSDRSHIMFNITYGFRIY

SEQ ID NO: 5200 - protein, 435 aa, Helicobacter pylori
  misc_feature (B) LOCATION 1...435
  hypothetical: YES
MSIVGKVSSYTKFGFNNQRYQPSKDIYPTGSYTSLLGELNLSMGLYKGLRAEVGAMMAALPYDSTAYQGNNIPNGQPGSRTDPFGAGIFWQYIGWYAGHSGLNVQKPRLAMVHNAFLSYNYKKDKFSFGVKGGRYDAEEYDWFTSYTQGVEGFVKYKDTRLRVMYSDARASASSDWFWYFGRYYTSGKALMIADLKYEKDNLKINPYFYAIFQRMYAPGINITYDTNPNFNNKGFRFVGTFVGFFPIFATPANQNDIILFQQVPLGKSGQTYFFRTRFYYNKWQFGGSVYKNIGNANGDIGIYGDPLGYNIWTNSIYDAEINNIVGADVINGFLYVGSQYRGFSWKILGRWTDSPRADERSLALFLSYFSNKYNIRMDLKLEYYGNITKKGYCIGYCGMYVPVDPNGPGTQPLTHNVYSDRSHIMFNITYGFRIY

SEQ ID NO: 5201 - protein, 470 aa, Helicobacter pylori
  misc_feature (B) LOCATION 1...470
  hypothetical: YES
LGVRVLEIKKYFLYALFFLLFSGLFLSKLQAYKFNMSIVGKVSSYTKFGFNNQRYQPSKDIYPTGSYTSLLGELNLSMGLYKGLRAEVGAMMAALPYDSTAYQGNNIPNGQPGSRTDPFGAGIFWQYIGWYAGHSGLNVQKPRLAMVHNAFLSYNYKKDKFSFGVKGGRYDAEEYDWFTSYTQGVEGFVKYKDTRLRVMYSDARASASSDWFWYFGRYYTSGKALMIADLKYEKDNLKINPYFYAIFQRMYAPGINITYDTNPNFNNKGFRFVGTFVGFFPIFATPANQNDIILFQQVPLGKSGQTYFFRTRFYYNKWQFGGSVYKNIGNANGDIGIYGDPLGYNIWTNSIYDAEINNIVGADVINGFLYVGSQYRGFSWKILGRWTDSPRADERSLALFLSYFSNKYNIRMDLKLEYYGNITKKGYCIGYCGMYVPVDPNGPGTQPLTHNVYSDRSHIMFNITYGFRIY

SEQ ID NO: 5202 - protein, 157 aa, Helicobacter pylori
  misc_feature (B) LOCATION 1...157
  hypothetical: YES
MKSILLFIIFVVCQLEGKKFSQDNFKVDYNYYLRKQDLHIIKTQNDLSNAWYLPPQKAPKEHSWVDFAKKYLNMMDYLGTYFLPFYHSFTPIFQWYHPNINPYKRNEFKFQISFRVPVFRHILWTKGTLYLDYTQTNWFQIYNDPQSAPMRMIKFHA

SEQ ID NO: 5203 - protein, 251 aa, Helicobacter pylori
  misc_feature (B) LOCATION 1...251
  hypothetical: YES
LMKSILLFMIFVVCQLEGKKFSQDNFKVDYNYYLRKQDLHIIKTQNDLSNAWYLPPQKAPKEHSWVDFAKKYLNMMDYLGTYFLPFYHSFTPIFQWYHPNINPYQRNEFKFQISFRVPVFRHILWTKGTLYLAYTQTNWFQIYNDPQSAPMRMINFMPELIYVYPINFKPFGGKIGNFSEIWIGWQHISNGVGGAQCYQPFNKEGNPENQFPGQPVIVKDYNGQKDVRWGGCRSVSAGNALCFVWCGKREA

SEQ ID NO: 5204 - protein, 253 aa, Helicobacter pylori
  misc_feature (B) LOCATION 1...253
  hypothetical: YES
GCLMKSILLFMIFVVCQLEGKKFSQDNFKVDYNYYLRKQDLHIIKTQNDLSNAWYLPPQKAPKEHSWVDFAKKYLNMMDYLGTYFLPFYHSFTPIFQWYHPNINPYQRNEFKFQISFRVPVFRHILWTKGTLYLAYTQTNWFQIYNDPQSAPMRMINFMPELIYVYPINFKPFGGKIGNFSEIWIGWQHISNGVGGAQCYQPFNKEGNPENQFPGQPVIVKDYNGQKDVRWGGCRSVSAGNALCFVWCGKREA

SEQ ID NO: 5205 - protein, 356 aa, Helicobacter pylori
  misc_feature (B) LOCATION 1...356
  hypothetical: YES
LMKSILLFMIFVVCQLEGKKFSQDNFKVDYNYYLRKQDLHIIKTQNDLSNAWYLPPQKAPKEHSWVDFAKKYLNMMDYLGTYFLPFYHSFTPIFQWYHPNINPYQRNEFKFQISFRVPVFRHILWTKGTLYLAYTQTNWFQIYNDPQSAPMRMINFMPELIYVYPINFKPFGGKIGNFSEIWIGWQHISNGVGGAQCYQPFNKEGNPENQFPGQPVIVKDYNGQKDVRWGGCXSVXXGNXLCFVLVWEKGGLKIMVAYWPYVPYDQSNPQLIDYMGYGNAKIDYRRGRHHFELQLYDIFTQYWRYDRWHGAFRLGYTYRINPFVGIYAQWFNGYGDGLYEYDVFSNRIGVGIRLNP

SEQ ID NO: 5206 - protein, 215 aa, Helicobacter pylori
  misc_feature (B) LOCATION 1...215
  hypothetical: YES
MKKPYRKISDYAIVGGLSALVMVSIVGCKSNADDKPKEQSSLSQSVQKGAFVILEEQKDKSYKVVEEYPSSRTHIVVRDLQGNERVLSNEEIQKLIKEEEAKIDNGTSKLVQPNNGGSNEGSGFGLGSAILGSAAGAILGSYIGNKLFNNPNYQQNAQRTYKSPQAYQRSQNSFSKSAPSASSMGTASKGQSGFFGSSRPTSSPAISSGTRGFNA

SEQ ID NO: 5207 - protein, 110 aa, Helicobacter pylori
  misc_feature (B) LOCATION 1...110
  hypothetical: YES
MLRNQFRIVFVSCIVASSLQAQENTHTLGKVTTKGERTFEYNNKMYIDRKELQQRQSNQIRDIFRTRADVNVASGGLMAQKIYVRGIESRLLRVTIDGVAQNGNIFHHDA

SEQ ID NO: 5208 - protein, 115 aa, Helicobacter pylori
  misc_feature (B) LOCATION 1...115
  hypothetical: YES
IQRLKEMLRNQFRIVFVTCIVASSLQAQENTPTLGKVTTKGERTFEYNHQMYTDRKELQQRQSNQTRDIFRTRADVNAASGGLMAQKIYARGIESRLLRVTIDGVAQNGNIFHHD

SEQ ID NO: 5209 - protein, 114 aa, Helicobacter pylori
  misc_feature (B) LOCATION 1...114
  hypothetical: YES
IQRLKEMLRNQFRIVFVTCIVASSLQAQENTPTLGKVTTKGERTFEYNHQMYTDRKELQQRQSNQTRDIFRTRADVNAASGGLMAQKIYARGIESRLLRVTIDGVAQNGNIFHH

SEQ ID NO: 5210 - protein, 286 aa, Helicobacter pylori
  misc_feature (B) LOCATION 1...286
  hypothetical: YES
MLRNQFRIVFVSCIVASSLQAQENTHTLGKVTTKGERTFEYNNKMYIDRKELQQRQSNQIRDIFRTRADVNVASGGLMAQKIYVRGIESRLLRVTIDGVAQNGNIFHHDANTVIDPNMIKEVEVIKGAANASAGPGAVAGKLSFTTIDANDFLRKNQTYGAKAEAAFYTNFGYRMNATAAYRGKNWDILAYYNHQNIFYYRDGNNAFRSLFHPNYDLQDPSNSEMSVGTPSEVNSVLAKINGYINETDSISVSYNLTRDNSTRLLRPNTTSALSKANDQEASQPPL

SEQ ID NO: 5211 - protein, 182 aa, Helicobacter pylori
  misc_feature (B) LOCATION 1...182
  hypothetical: YES
MLPCLILFTSKRFWDTYQFGMLAGKNAHSLMIKQKFEWNEYNFGFGIYKSFGNANWMIGYHGNRLGFDFWTNTVYANTLNSLSYMMDANAFTVFAFGGGVHRKLLWGLLGRLTYGPRANEQVLSLNLGYKFTKNFSADIKFEYYNVLMHQGYKMGWNGPKLDSQPATDQDRSHIFTEIVWKL

SEQ ID NO: 5212 - protein, 188 aa, Helicobacter pylori
  misc_feature (B) LOCATION 1...188
  hypothetical: YES
GFVLKQMLPCLILFTSKRFWDTYQFGMLAGKNAHSLMIKQKFEWNEYNFGFGIYKSFGNANWMIGYHGNRLGFDFWTNTVYANTLNSLSYMMDANAFTVFAFGGGVHRKLLWGLLGRLTYGPRANEQVLSLNLGYKFTKNFSADIKFEYYNVLMHQGYKMGWNGPKLDSQPATDQDRSHIFTEIVWKL

SEQ ID NO: 5213 - protein, 83 aa, Helicobacter pylori
  misc_feature (B) LOCATION 1...83
  hypothetical: YES
MNYKVASARNIATLLFLFFSQSEAFDLGKIAKIKAGAESFSKVGFNNKPINXNKGIYPTETFMTINGLHAGGFYGALAQKRYG

SEQ ID NO: 5214 - protein, 125 aa, Helicobacter pylori
  misc_feature (B) LOCATION 1...125
  hypothetical: YES
GRKVRIPADYMSGYNQGLDMTLNLGNFKFWWFSSFGRGFAYNEWLYNFYSPKTYTLKNGQTINPGVHAFYIIWNYKGFSIQPFVYFSPFNEYDPNFTITYDSNPTFTGLGFRSQTDVTVLNPFYV

SEQ ID NO: 5215 - protein, 215 aa, Helicobacter pylori
  misc_feature (B) LOCATION 1...215
  hypothetical: YES
RLNMNYKVASARNIATLLFLFFSQSEAFDLGKIAKIKAGAESFSKVGFNNKPINTNKGIYPTETFMTIMAYMQVDFTELLPKSATANGHHLDGSLGGWGGAVIYDSTKDFINEVTGKPYGAMTWNYVGYWGGLVGQKPWASCGLATGNLTQGQYDKMTQAEMTQLSNQEALAASTCAKTYADHTRNYVIYNAYLRYNYKDIFEIRGGRYESQRII

SEQ ID NO: 5216 - protein, 327 aa, Helicobacter pylori
  misc_feature (B) LOCATION 1...327
  hypothetical: YES
MNYKVASARNIATLLFLFFSQSEAFDLGKIAKIKAGAESFSKVGFNNKPINTNKGIYPTETFMTIMAYMQVDFTELLPKSATANGHHLDGSLGGWGGAVIYDSTKDFINEVTGKPYGAMTWNYVGYWGGLVGQKPWASCGLATGNLTQGQYDKMTQAEMTQLSNQEALAASTCAKTYADHTRNYVIYNAYLRYNYKDIFEIRGGRYESPADYMSGYNQGLDMTLNLGNFKFWWFSSFGRGFAYNEWLYNFYSPKTYTLKNGQTINPGVHAFYIIWNYKGFSIQPFVYFSPFNEYDPNFTITYDSNPTFTGLGFRSQTDVTVLNPFYV

SEQ ID NO: 5217 - protein, 68 aa, Helicobacter pylori
  misc_feature (B) LOCATION 1...68
  hypothetical: YES
FKVTSKELDQRQSNEVKDLFRTNPDVNVGGGSVMGQKIYVRGIEDRLLSVTVDRDAQTGLHHGPKNLP

SEQ ID NO: 5218 - protein, 192 aa, Helicobacter pylori
  misc_feature (B) LOCATION 1...192
  hypothetical: YES
MFLRSYPKLRYALCLPLLTETCYSEERTLNKVTTQAKRIFTYNNEFKVTSKELDQRQSNEVKDLFRTNPDVNVGGGSVMGQKIYVRGIEDRLLRVTVDGAAQNGNIYHHQGNTVIDPGMLKSVEVTKGAANASAGPGAIAGVIKMETKGAADFIPRGKNYAASGAVSFYTNFGDRETFRSAYQSAHFDIIAY

SEQ ID NO: 5219 - protein, 258 aa, Helicobacter pylori
  misc_feature (B) LOCATION 1...258
  hypothetical: YES
MFLRSYPKLRYALCLPLLTETCYSEERTLNKVTTQAKRIFTYNNEFKVTSKELDQRQSNEVKDLFRTNPDVNVGGGSVMGQKIYVRGIEDRLLRVTVDGAAQNGNIYHHQGNTVIDPGMLKSVEVTKGAANASAGPGAIAGVIKMETKGAADFIPRGKNYAASGAVSFYTNFGDRETFRSAYQSAHFDIIAYYTHQNIFYYRSGATVMKNLFKPTQADKEPGTPSEQNNALIKMNGYLSDRDTLTFSWNMTRDNATRL

SEQ ID NO: 5220 - protein, 58 aa, Helicobacter pylori
  misc_feature (B) LOCATION 1...58
  hypothetical: YES
RLESPLHSGFSPSAALVISPIEPLSLKITYSQVTRGVMPGDGVYMRQNDLRYAKKYQV

SEQ ID NO: 5221 - protein, 136 aa, Helicobacter pylori
  misc_feature (B) LOCATION 1...136
  hypothetical: YES
IGLHHFQKQGSILHGFSRFVTGLDYCGFDIYLPDYGTAEKPKTPTDLAKCGSQLGLVHMHKPGYGVSNFYINWSPKTKSHWKGLLLSAVFNNVFNKFYVDQTSPYVMSPDMPGTDAIKRAIAEPGFNARFEVAYKW

SEQ ID NO: 5222 - protein, 138 aa, Helicobacter pylori
  misc_feature (B) LOCATION 1...138
  hypothetical: YES
IIIDYSSQYFSGRAAAFYQALDNFISRYAQRLIVTNLSQAIRIYGYEVGGTFRYKGVSLNVGISRTWPTTRGYLMADSYELAASTGNVFIIKLDYTISKNRDQSCMALAALLPVWIIAGLIFTCLIMGQLKNPKPLPI

SEQ ID NO: 5223 - protein, 207 aa, Helicobacter pylori
  misc_feature (B) LOCATION 1...207
  hypothetical: YES
LDNFISQYAQRLIVTNLSQAIRIYGYEVGGTFRYKGVSLNVGISRTWPTTRGYLMADSYELAASTGNVFIIKLDYTIPKTGINLAWLSRFVTGLDYCGFDIYLPDYGTAEKPKTPTDLAKCGSQLGLVHMHKPGYGVSNFYINWSPKTKSHWKGLLLSAVFNNVFNKFYVDQTSPYVMSPDMPGTDAIKRAIAEPGFNARFEVAYKW

SEQ ID NO: 5224 - protein, 292 aa, Helicobacter pylori
  misc_feature (B) LOCATION 1...292
  hypothetical: YES
RLESPLHSGFSPSAALVISPIEPLSLKITYSQVTRGVMPGDGVYMRQNDLRYAKNIKPEVGSNAEFNIDYSSQYFSGRAAAFYQALDNFISQYAQRLIVTNLSQAIRIYGYEVGGTFRYKGVSLNVGISRTWPTTRGYLMADSYELAASTGNVFIIKLDYTIPKTGINLAWLSRFVTGLDYCGFDIYLPDYGTAEKPKTPTDLAKCGSQLGLVHMHKPGYGVSNFYINWSPKTKSHWKGLLLSAVFNNVFNKFYVDQTSPYVMSPDMPGTDAIKRAIAEPGFNARFEVAYKW

SEQ ID NO: 5225 - protein, 219 aa, Helicobacter pylori
  misc_feature (B) LOCATION 1...219
  hypothetical: YES
HEEAALYKENRGSKKFNGTRVNLTLLRGRCVPKNAQFDPLFAPNGVYAKFPTYLASAWERENYPCVEGGYCTPSFSDVDKPSSQPRNLFLNNTGLNLKVAHVIDEATDSLFEYGFNYQNLSVFDARIPKSELYRPNQVYTDDKGQKQIACSLVDNNPNDPTLCQRGKANGNIYGGYVQANYSPHKIITFGAGVRWDAYTLYDKDWNHRYTQALALARPL

SEQ ID NO: 5226 - protein, 231 aa, Helicobacter pylori
  misc_feature (B) LOCATION 1...231
  hypothetical: YES
VLDSFTRYLYHSINSANNLSLQYKREAGNSFGDPRLDFTLYTSIRNAQFDPLFDPNGVYAKFPTSLASAWERENYPCVEGGYCTPSFSDVDKPSSQPRNLFLNNTGLNLKVAHVIDEATDSLFEYGFNYQNLSVFDARIPKSELYRPNQVYTDDKGQKQIACSLVDNNPNDPTLCQRGKANGNIYGGYVQANYSPHKIITFGAGVRWDAYTLYDKDWNHRYTQALALARPL

SEQ ID NO: 5227 - protein, 147 aa, Helicobacter pylori
  misc_feature (B) LOCATION 1...147
  hypothetical: YES
MGCSFIFKKVRVYSKMLVALGLSSVLIGCAMNPSAETKKPNDAKNQQPVQTHERMTTSSEHVTPLDFNYPVHIVQAPQNHHVVGILMPRIQVSDNLKPYIDKFQDALINQIQTIFEKRGYQVLRFQDEKALNVQDKKKIFSVLDLKG

SEQ ID NO: 5228 - protein, 282 aa, Helicobacter pylori
  misc_feature (B) LOCATION 1...282
  hypothetical: YES
MGCSFIFKKVRVYSKMLVALGLSSVLIGCAMNPSAETKKPNDAKNQQPVQTHERMTTSSEHVTPLDFNYPVHIVQAPQNHHVVGILMPRIQVSDNLKPYIDKFQDALINQIQTIFEKRGYQVLRFQDEKALNVQDKKKIFSVLDLKGWVGILEDLKMNLKDPNSPNLDTLVDQSSGSVWFNFYEPESNRVVHDFAVEVGTFQAITYTYTSTNNASGGFNSSKSVIHENLDKNREDAIHKILNRMYAVVMKKAVTELTKENIAKYRDAIDRMKGFKSSMPQKK

SEQ ID NO: 5229 - protein, 285 aa, Helicobacter pylori
  misc_feature (B) LOCATION 1...285
  hypothetical: YES
ESFMGCSFIFKKVRVYSKMLVALGLSSVLIGCAMNPSAETKKPNDAKNQQPVQTHERMTTSSEHVTPLDFNYPVHIVQAPQNHHVVGILMPRIQVSDNLKPYIDKFQDALINQIQTIFEKRGYQVLRFQDEKALNVQDKKKIFSVLDLKGWVGILEDLKMNLKDPNSPNLDTLVDQSSGSVWFNFYEPESNRVVHDFAVEVGTFQAITYTYTSTNNASGGFNSSKSVIHENLDKNREDAIHKILNRMYAVVMKKAVTELTKENIAKYRDAIDRMKGFKSSMPQKK

SEQ ID NO: 5230 - protein, 436 aa, Helicobacter pylori
  misc_feature (B) LOCATION 1...436
  hypothetical: YES
MMKFFLLKKFSEFLNTQTHFNLKRLNASSFLLETFSKEKHAFVVDLSAPYIGLSKKPPESVLKNTLALDFCLNKFTKNAKILQANVIDNDRILEIKGAKDLAYKSETFILRLEMIPKKANLMILDQEKCVIEAFRFNDRVAKNDILGALPPNIYEHQEEDLDFKGLLDILEKDFLSYQHKELEHKKNQIIKRLNAQKERLKEKLEKLEDPKTLQLEAKELQTQASLLLTYQHLINRRENRVILKDFEDKECMIEIDKSMPLNAFINKKFTLSKKKKQKSQFLYLEEENLKEKIAFKENQINYVRDAAEESVLEMFMPVKNSKIKRPMNGYEVLYYKDFKIGLGKNQKENIKLLQDARANDLWMHVRDIPGSHLIVFCQKNTPKDEVIMELAKMLIKMQKDAFNGYEIDYTQRKFVKIIKGAHVIYSKYRTISLKDT

SEQ ID NO: 5231 - protein, 363 aa, Helicobacter pylori
  misc_feature (B) LOCATION 1...363
  hypothetical: YES
MKFFLLKKFSXFLNTQTHFNLKRLNASSFLLETFSKEKHAFVVDLSAPYIGLSKKPPESVLKNTLALDFCLNKFTKNAKILQANVIDNDRILEIKGAKDLAYKSETFILRLEMIPKKANLMILDQEKCVIEAFRFNDRVAKNDILGALPPNIYEHQEEDLDFKGLLDILEKDFLSYQHKELEHKKNQIIKRLNAQKERLKEKLEKLEDPKTLQLEAKELQTQASLLLTYQHLINRRENRVILKDFEDKECMIEIDKSMPLNAFINKKFTLSKKKKQKSQFLYLEEENLKEKIAFKENQINYVRDAAEESVLEMFMPVKNSKIKRPMNGYEVLYYKDXKXGLGKTKKRISSFYKTQXRMIXGCX

SEQ ID NO: 5232 - protein, 442 aa, Helicobacter pylori
  misc_feature (B) LOCATION 1...442
  hypothetical: YES
GKIKGVMMKFFLLKKFSEFLNTQTHFNLKRLNASSFLLETFSKEKHAFVVDLSAPYIGLSKKPPESVLKNTLALDFCLNKFTKNAKILQANVIDNDRILEIKGAKDLAYKSETFILRLEMIPKKANLMILDQEKCVIEAFRFNDRVAKNDILGALPPNIYEHQEEDLDFKGLLDILEKDFLSYQHKELEHKKNQIIKRLNAQKERLKEKLEKLEDPKTLQLEAKELQTQASLLLTYQHLINRRENRVILKDFEDKECMIEIDKSMPLNAFINKKFTLSKKKKQKSQFLYLEEENLKEKIAFKENQINYVRDAAEESVLEMFMPVKNSKIKRPMNGYEVLYYKDFKIGLGKNQKENIKLLQDARANDLWMHVRDIPGSHLIVFCQKNTPKDEVIMELAKMLIKMQKDAFNGYEIDYTQRKFVKIIKGAHVIYSKYRTISLKDT

SEQ ID NO: 5233 - protein, 211 aa, Helicobacter pylori
  misc_feature (B) LOCATION 1...211
  hypothetical: YES
VKFFSKDLFKKVTPLFLSVYFLSPTLTQAKSRFYVASQYQVGKMIMKKYNDLKRTIEGASFSLGWEINPTNYWFYSRYYFFMDYGNVILNKRTGAQANMFTYGFGGDLIMEYNKNPLYVFSLFYGMQVAENTWTISKHSANFIIDDWRSIQGFSLKTSNFRMLGLVGFKFQTVLFHHDASIEVGIKWPFAFEYDSPFVRLFSVFISHTFYL

SEQ ID NO: 5234 - protein, 212 aa, Helicobacter pylori
  misc_feature (B) LOCATION 1...212
  hypothetical: YES
SVKFFSKDLFKKVTPLFLSVYFLSPTLTQAKSRFYVASQYQVGKMIMKKYNDLKRTIEGASFSLGWEINPTNYWFYSRYYFFMDYGNVILNKRTGAQANMFTYGFGGDLIMEYNKNPLYVFSLFYGMQVAENTWTISKHSANFIIDDWRSIQGFSLKTSNFRMLGLVGFKFQTVLFHHDASIEVGIKWPFAFEYDSPFVRLFSVFISHTFYL

SEQ ID NO: 5235 - protein, 54 aa, Helicobacter pylori
  misc_feature (B) LOCATION 1...54
  hypothetical: YES
HGAGWRYTNTFRLGVTYMGKSLRLMGAIDYDQAPSPQDAIGIPDSNGLYRGFWD

SEQ ID NO: 5236 - protein, 72 aa, Helicobacter pylori
  misc_feature (B) LOCATION 1...72
  hypothetical: YES
RFNQSERESLWHDSSRAKSNGQGVSGGYRVGSSLRVFDHGMFSVVYNSSVTFNMKGGLVAITELGPSFRGAF

SEQ ID NO: 5237 - protein, 156 aa, Helicobacter pylori
  misc_feature (B) LOCATION 1...156
  hypothetical: YES
RASMKNFSPLYCLKKLKKRHLIALSLPLLSYANGFKIQEQSLNGTALGSAYVAGARGADASFYNPANMGFTNDWGENRSEFEMTTTVINIPAFSFKVPTTNQGLYSVTSLEIDKSQQNILGIINTIGLGNILKALGNTAATNGLSQGINRVQGVMN

SEQ ID NO: 5238 - protein, 161 aa, Helicobacter pylori
  misc_feature (B) LOCATION 1...161
  hypothetical: YES
MKNFSPLYCLKKLKKRHLIALSLPLLSYANGFKIQEQSLNGTALGSAYVAGARGADASFYNPANMGFTNDWGENRSEFEMTTTVINIPAFSFKVPTTNQGLYSVTSLEIDKSQQNILGIINTIGLGNILKALGNTAATNGLSQAINRVQGLMNLTNQKVVT

SEQ ID NO: 5239 - protein, 164 aa, Helicobacter pylori
  misc_feature (B) LOCATION 1...164
  hypothetical: YES
MKNFSPLYCLKXLKKRHLIALSLPLLSYANGFKIQEQSLNGTALGSAYVAGARGADASFYNPANMGFTNDWGENRSEFEMTTTVINIPTFSFKVPTTNQXLYSVTSLEIDKSQQNILGIINTIGLGNILKALGNTAATNGLSQAINRVQGLMNLTNQKVVTLAS

SEQ ID NO: 5240 - protein, 184 aa, Helicobacter pylori
  misc_feature (B) LOCATION 1...184
  hypothetical: YES
SAWQYGRYQWLITRYQSCSRGYELTHSKVVTFVSRPDTQIVIGWTGTTNFVIPIFFYKTRTHNGFTFGGSFTAPSGLGMKWNGKGGEFLHDVFIMMVELALAMSYTINKRFSVGVGLRGLYATGSFNNTVYVPLEGASVLSAEQMLNLPNNVFADQVPSNMITLLEAIGYLYRIRNKFTRFGGG

SEQ ID NO: 5241 - protein, 355 aa, Helicobacter pylori
  misc_feature (B) LOCATION 1...355
  hypothetical: YES
MSYTINKRFSVGVGLRGLYATGSFNNTVYVPLEGASVLSAEQILNLPNNVFADQVPSNMMTLLGNIGYQPALNCQKAGGDMSDQSCQEFYNGLKKIMGYSGLIKASANLYGTTQVVQKSNGQGVSGGYRVGSSLRVFDHGMFSVVYNSSVTFNMKGGLVAITELGPSLGSVLTKGSLNINVSLPQTLSLAYAHQFFKDRLRVEGVFERTFWSQGNKFLVTPDFANATYKGLSGTVASLDSETLKKMVGLANFKSVMNMGAGWRDTNTFRLGVTYMGKSLRLMGAIDYDQAPSPQDAIGIPDSNGYTVAFGTKYNFRGFDLGVAGSFTFKSNRSSLYQSPTIGQLRIFSASLGYRW

SEQ ID NO: 5242 - protein, 587 aa, Helicobacter pylori
  misc_feature (B) LOCATION 1...587
  hypothetical: YES
MKNFSPLYCLKKLKKRHLIALSLPLLSYANGFKIQEQSLNGTALGSAYVAGARGADASFYNPANMGFTNDWGENRSEFEMTTTVINIPAFSFKVPTTNQGLYSVTSLEIDKSQQNILGIINTIGLGNILKALGNTAATNGLSQAINRVQGLMNLTNQKVVTLASKPDTQIVNGWTGTTNFVLPKFFYKTRTHNGFTFGGSFTAPSGLGMKWNGKGGEFLHDVFIMMVELAPSMSYTINKRFSVGVGLRGLYATGSFNNTVYVPLEGASVLSAEQILNLPNNVFADQVPSNMMTLLGNIGYQPALNCQKAGGDMSDQSCQEFYNGLKKIMGYSGLIKASANLYGTTQVVQKSNGQGVSGGYRVGSSLRVFDHGMFSVVYNSSVTFNMKGGLVAITELGPSLGSVLTKGSLNINVSLPQTLSLAYAHQFFKDRLRVEGVFERTFWSQGNKFLVTPDFANATYKGLSGTVASLDSETLKKMVGLANFKSVMNMGAGWRDTNTFRLGVTYMGKSLRLMGAIDYDQAPSPQDAIGIPDSNGYTVAFGTKYNFRGFDLGVAGSFTFKSNRSSLYQSPTIGQLRIFSASLGYRW

SEQ ID NO: 5243 - protein, 152 aa, Helicobacter pylori
  misc_feature (B) LOCATION 1...152
  hypothetical: YES
SGEHTMKKYILNLALVGALSASFLMAKPAHNANNSTHNTKETTDASAGVLATVDGRPITKSDFDMIKQRNPNFDFDKLKEKEKEALIEQAIRTALVENEAKAEKLNQTPEFKAMMEAVKKQALVEFWAKKQAEEVKKDPNPRKRNAGFLQRQ

SEQ ID NO: 5244 - protein, 168 aa, Helicobacter pylori
  misc_feature (B) LOCATION 1...168
  hypothetical: YES
KKIQIPEKEMQDFYNANKDQLFVKQEAHARHILVKTEDEAKRIISEIDKQPKAKKEAKFIELANRDTIDPNSKNAQNGGDLGKFQKNQMAPDFSKAAFALTPGDYTKTPVKTEFGYHIIYLISKDSPVTYTYEQAKPTELRGCYQEAFPRRMNRRMELSSTLSVINNR

SEQ ID NO: 5245 - protein, 299 aa, Helicobacter pylori
  misc_feature (B) LOCATION 1...299
  hypothetical: YES
MKKNILNLALVGALSASFLMAKPAHNANNSTHNTKETTDASAGVLATVDGRPITKSDFDMIKQRNPNFDFDKLKEKEKEALIEQAIRTALVENEAKAEKLNQTPEFKAMMEAVKKQALVEFWAKKQAEEVKKIQIPEKEMQDFYNANKDQLFVKQEAHARHILVKTEDEAKRIISEIDKQPKAKKEAKFIELANRDTIDPNSKNAQNGGDLGKFQKNQMAPDFSKAAFALTPGDYTKTPVKTEFGYHIIYLISKDSPVTYTYEQAKPTIKGMLQEKLFQERMNQRIEELRKHAKIVINK

SEQ ID NO: 5246 - protein, 175 aa, Helicobacter pylori
  misc_feature (B) LOCATION 1...175
  hypothetical: YES
MKNQVKKILGMSVVAAMVIVGCSHAPKSGISKSNKAYKEATKGAPDWVVGDLEKVAKYEKYSGVFLGRAEDLITNNDVDYSTNQATAKARANLAANLKSTLQKDLENEKTRTVDASGKRSISGTDTEKISQLVDKELIASKMLARYVGKDRVFVLVGLDKQIVDKVREELGMVKK

SEQ ID NO: 5247 - protein, 176 aa, Helicobacter pylori
  misc_feature (B) LOCATION 1...176
  hypothetical: YES
AMKNQVKKILGMSVVAAMVIVGCSHAPKSGISKSNKAYKEATKGAPDWVVGDLEKVAKYEKYSGVFLGRAEDLITNNDVDYSTNQATAKARANLAANLKSTLQKDLENEKTRTVDASGKRSISGTDTEKISQLVDKELITSKMLARYVGKDRVFVLVGLDKQIVDKVREELGMVKK

SEQ ID NO: 5248 - protein, 179 aa, Helicobacter pylori
  misc_feature (B) LOCATION 1...179
  hypothetical: YES
MKRSSVFSFLVAFLLVVGCSHKMDNKTVAGDVSTKAVQTAPVTTEPAPEKEEPKQEPAPVVEEKPAIESGTIIASIYFDFDKYEIKESDQETLDEIVQKAKENHMQVLLEGNTDEFGSSEYNQALGVKRTLSVKNALVIKGVEKDMIKTISFGESKPKCVQKTRECYRENRRVDVKLVK

SEQ ID NO: 5249 - protein, 179 aa, Helicobacter pylori; identical to SEQ ID NO: 5248
  misc_feature (B) LOCATION 1...179
  hypothetical: YES

SEQ ID NO: 5250 - protein, 187 aa, Helicobacter pylori
  misc_feature (B) LOCATION 1...187
  hypothetical: YES
NFIFGEFIMKRSSVFSFLVAFLLVVGCSHKMDNKTVAGDVSTKAVQTAPVTTEPAPEKEEPKQEPAPVVEEKPAIESGTIIASIYFDFDKYEIKESDQETLDEIVQKAKENHMQVLLEGNTDEFGSSEYNQALGVKRTLSVKNALVIKGVEKDMIKTISFGESKPKCVQKTRECYRENRRVDVKLVK

SEQ ID NO: 5251 - protein, 97 aa, Helicobacter pylori
  misc_feature (B) LOCATION 1...97
  hypothetical: YES
LTTKACWLLRVCCYRSLNITIKDRTMKTNGHFKDFAWKKCFLGASVVALLVGCSPHIIETNEVALKLNYHPASEKVQALDEKILLLRPAFQYSXNIC

SEQ ID NO: 5252 - protein, 260 aa, Helicobacter pylori
  misc_feature (B) LOCATION 1...260
  hypothetical: YES
MKTNGHFKDFAWKKCFLGASVVALLVGCSPHIIETNEVALKLNYHPASEKVQALDEKILLLRPAFQYSDNIAKEYENKFKNQTTLKVEEILQNQGYKVINVDSSDKDDFSFAQKKEGYLAVAMNGEIVLRPDPKRTIQKKSEPGLLFSTGLDKMERVLIPAGFVKVTILEPMSGESLDSFTMDLSELDIQEKFLKTTHSSHSGGLVSTMVKGTDNSNDAIKSALNKIFASIMQEMDKKLTQRNLESYQKDAKELKNKRNR

SEQ ID NO: 5253 - protein, 268 aa, Helicobacter pylori
  misc_feature (B) LOCATION 1...268
  hypothetical: YES
NITIKDRTMKTNGHFKDFAWKKCFLGASVVALLVGCSPHIIETNEVALKLNYHPASEKVQALDEKILLLRPAFQYSDNIAKEYENKFKNQTTLKVEEILQNQGYKVINVDSSDKDDFSFAQKKEGYLAVAMNGEIVLRPDPKRTIQKKSEPGLLFSTGLDKMERVLIPAGFVKVTILKPMSGESLDSFTMDLSELDIQEKFLKTTHSSHSGGLVSTMVKGTDNSNDAIKSALNKIFASIMQEMDKKLTQRNLESYQKDAKELKNKRNR

SEQ ID NO: 5254 - protein, 193 aa, Helicobacter pylori
  misc_feature (B) LOCATION 1...193
  hypothetical: YES
MQEALLRFQEGFKEWGYLILFLYSLGGGYVGIVIASILSATTHALDIKITILVAFLGNLIGSGALVIFARYQKREFLKYFQKHRRKLALASLWVKRYALLMIFVNKYLYGIKSVVPLAIGFSKYPLKKFLWLNVFSSFLWALIVGSVSFQASDWVKTLYERLSHYTSFFVISFVLIALLIWFLLKRYSRKMGF

SEQ ID NO: 5255 - protein, 193 aa, Helicobacter pylori; identical to SEQ ID NO: 5254
  misc_feature (B) LOCATION 1...193
  hypothetical: YES

SEQ ID NO: 5256 - protein, 201 aa, Helicobacter pylori
  misc_feature (B) LOCATION 1...201
  hypothetical: YES
KRIKRGFFMQEALLRFQEGFKEWGYLILFLYSLGGGYVGIVIASILSATTHALDIKITILVAFLGNLIGSGALVIFARYQKREFLKYFQKHRRKLALASLWVKRYALLMIFVNKYLYGIKSVVPLAIGFSKYPLKKFLWLNVFSSFLWALIVGSVSFQASDWVKTLYERLSHYTSFFVISFVLIALLIWFLLKRYSRKMGF

SEQ ID NO: 5257 - protein, 156 aa, Helicobacter pylori
  misc_feature (B) LOCATION 1...156
  hypothetical: YES
LTKKFMSWMVVIGALICVLLGVFIFFTSMSVKKSLTAYLNAYLEQRPNIEGMGIIGVPFKCERFFKIACVSKELRFLDPQNSPIMDFKNLKIKLHSLDKSSLTLSIHSQIQSPILEQSIQQKISQIPLKNLNALLEKFKPTRLNCSLTFNALDEKT

SEQ ID NO: 5258 - protein, 161 aa, Helicobacter pylori
  misc_feature (B) LOCATION 1...161
  hypothetical: YES
MEAQENLSLKNIFKTLSSKDAKAIEELQDKLRFLAPKLSVSIQARHFKNVLESFYQQNKESLGFFSPYFSLRSQTPSVSYESALASLENYFMALFQSHFKDDTALQQNFKGLLQAFVSMAKDKRSQIVLNAQAKDNTKLTFNALLESLSVNFFQSYKISHE

SEQ ID NO: 5259 - protein, 176 aa, Helicobacter pylori
  misc_feature (B) LOCATION 1...176
  hypothetical: YES
LMQRISCYTFFQEGLMEAQENLSLKNIFKTLSSKDAKAIEELQDKLRFLAPKLSVSIQARHFKNVLESFYQQNKESLGFFSPYFSLRSQTPSVSYESALASLENYFMALFQSHFKDDTALQQNFKGLLQAFVSMAKDKRSQIVLNAQAKDNTKLTFNALLESLSVNFFQSYKISHE

SEQ ID NO: 5260 - protein, 192 aa, Helicobacter pylori
  misc_feature (B) LOCATION 1...192
  hypothetical: YES
RVFLTKKFMSWMVVIGALICVLLGVFIFFTSMSVKKSLTAYLNAYLEQRPNIEGMGIIGVPFKCERFFKIACVSKELRFLNPQNSPIMDFKNLEIKLHSLDKSSLTLSIHSQIQSPILEQSIQQKISQIPLKNLNALLEKFKPTRLNCSLTFNALDEKTLNDNLKCDLTNAENLLLHFFSRGFNGGARKSLP

SEQ ID NO: 5261 - protein, 342 aa, Helicobacter pylori
  misc_feature (B) LOCATION 1...342
  hypothetical: YES
LTKKFMSWMVVIGALICVLLGVFIFFTSMSVKKSLTAYLNAYLEQRPNIEGMGIIGVPFKCEGFFKIACVSKELRFLDPQNSPIMDFKNLKIKLHSLDKSSLTLSIHSQIQSPILEQSIQQKISQIPLKNLNALLEKFKPTRLNCSLTFNALDEKTLNDNLKCDLTNAENILAYTFFQEGLMEAQENLSLKNIFKTLSSKDAKAIEELQDKLRFLAPKLSVSIQARHFKNVLESFYQQNKESLGFFSPYFSLRSQTPSVSYESALASLENYFMALFQSHFKDDTALQQNFKGLLQAFVSMAKDKRSQIVLNAQAKDNTKLTFNALLESLSVNFFQSYKISHE

SEQ ID NO: 5262 - protein, 133 aa, Helicobacter pylori
  misc_feature (B) LOCATION 1...133
  hypothetical: YES
WRRSVKGGGICVDNANANGNAVIKNVNFSDNGTLIYKGGENSAGNSLTLENNTVNSYNINAKAQNLIFNNNSFNSGSYSFNDTKNVTFKGTNTLINSDPFSRLKGSVSIDNNSIFNIERDLTDKTTLHAFKWG

SEQ ID NO: 5263 - protein, 156 aa, Helicobacter pylori
  misc_feature (B) LOCATION 1...156
  hypothetical: YES
ITPLMKTNLMADRLISTTQSKQTLLITTRLVADRLVLTPSKWILMGIRLMGGCLISINPLKPVLLTNTFNVNNQFKINGAQTDFTFSKGVVFNMQGLLSSLSVGTTYQLLNAKSVGYKDNNNALYQMLRWTSGENPSGKLVDENKTAPNSAKIYNV

SEQ ID NO: 5264 - protein, 176 aa, Helicobacter pylori
  misc_feature (B) LOCATION 1...176
  hypothetical: YES
PTKPRYTLLSGDNIKYNNQALADNVFSKNLWDLIHYDGEQGTLLRTDNNTYFVQFTQSNGQKFVFEETFNPGSITYKYFTIHSSPFHTEADSKDIWNQVRKQFDFIPGKTPVCVGVCYIAPYKNQDLIGSSAFAWSLNFGATVVGTLPLGSAQEKANNNGGPIWFGKNNLPYLHGN

SEQ ID NO: 5265 - protein, 1120 aa, Helicobacter pylori
  misc_feature (B) LOCATION 1...1120
  hypothetical: YES
KLSMEIKNSNFRDFTWGGFRFNSGRITFENTTFSGWTNINGATESGSSYVNMVANTDLIFTDSILGGGIRYDLKANNIIFNNTQMVVDVSKNVNQSSLNGNVTFNHSRLSVKPNAAINIGGDQTQTTLENASSLSFYNDSVANFNGTTAFNGVSYLNLNPNAQVSFNQANFNNANVTFYGIPLFGKTPNFGNSVRLINFKGDAKFNQATLNLRAKNIHLNFQGASTFENNSTMNLAESSQASFNALSVEGETNFNLNGSSLLSFNGNSVFNAPVNFYANNSQISFTHSATFNADASFDLGNNSTLNFQSVLLNSALNLLGNGGNNLAINAKGNFSFGSQGILNLSYMNLFGGDKKASVYDVLQAQNIDGLRGNNGYEKIRFYGIQIEKADYSFNNGVHSWSFTNPLNTTETITETLHNNRLKVQISQNGASNNAMFNLAPSLYDYQQNPYDESENSYNHTSDKAGTYYLSSSIKGFGKNNEIPGTYNAQNQPLQALHIYNQAISKQDLNMIASLGKEFLPKVAKLIASGALDNLNLNSPDSFETIFSILKEYGITLNQANWKSLLKIINNFSNTANYHFSQGSLVVGAIKEGQTNTNSVVWFGGDGYKNPCAVGDNTCQMFRQTNLGQLLNSSVPYLGYINANFKAKNIYITGTIGSGNAWGSGGSANVSFESATNLVLNQANIDAQGTDKIFSYLGKEGIDKLFGEKGLGNVLSNIVYEESLNDNAIPKDLANMIPKDLGSKTLSSLLSPTEVNNLLGVSAFKNAIMEILNSKTVGDVFGENGLLNALDPVKRKEIDQMLLEQIQAHSSGFEKFIVKTLGIENVENFINNWYGKQSLSSFANNFVPGGLNQALDKIGSSSDAKDLQSFLDKTTFGDILNQMINQAPLINKLISWLGPQDLSVLVNIALNSITNPSKELLGAISGMGQKVLNDLLGEGVVNKIMSNQVLGQMINKIIADKGFGGVYHQGLGSILPKSLQDELKKLGMGSLLKPKGLHNLWQKGNFNFVAKNHVFVNNSLFSNATGGELNFVAGKSIIFNGKNTINFTQYQGRLSFVSKDFSNISLDTLNATNGLTLNASKNDISVQKGQICVNVLDCMTAKGKTTQTNSSSRRQPQLMKR

SEQ ID NO: 5266 - protein, 1576 aa, Helicobacter pylori
  misc_feature (B) LOCATION 1...1576
  hypothetical: YES
VGYIQGVFKANQIDITGTIRSGNGAKTGGGATLVFNAQERLNIANANLNNDKAGLQNSWMNFIVNNGNLNVTNANFSNQTPHGGFNLKANNITWDKGSVSGGGNFGVDNANANGNAVIKNVNFSDNGTLIYKGGENSAGNSLTLENNTFNSYNINAKAQNLIFNNNSFNSGSYSFNDTKNVTFKGTNTLINSDPFSRLKGSVSIDNNSIFNIERDLTDKTTYTLLSGDNIKYNNQALADNVFSKNLWDLIHYDGEQGTLLRTDNNTYFVQFTQSNGQKFVFEETFNPGSITYKYFTIHSSPFHTEADSKDIWNQVRKQFDFIPGKTPVCVGVCYIAPYKNQDLIGSSAFAWSLNFGATVVGTLLLGSAQEKANNNGGSIWFGKNNLLYLHGNFNATNIFLTNNFNVGNPNAGGGATINFNADETLSADGLNYTNFQTVAMGLQTSASQHSWANFNSKLSMEIKNSNFRDFTWGGFRFNSGRITFENTTFSGWTNINGATESGSSYVNMVANTDLIFTDSILGGGIRYDLKANNIIFNNTQMVVDVSKNVNQSSLNGNVTFNHSRLSVKPNAAINIGGDQTQTTLENASSLSFYNDSVANFNGTTAFNGVSYLNLNPNAQVSFNQANFNNANVTFYGIPLFGKTPNFGNSVRLINFKGDAKFNQATLNLRAKNIHLNFQGASTFENNSTMNLAESSQASFNALSVEGETNFNLNGSSLLSFNGNSVFNAPVNFYANNSQISFTHSATFNADASFDLGNNSTLNFQSVLLNSALNLLGNGGNNLAINAKGNFSFGSQGILNLSYMNLFGGDKKASVYDVLQAQNIDGLRGNNGYEKIRFYGIQIEKADYSFNNGVHSWSFTNPLNTTETITETLHNNRLKVQISQNGASNNAMFNLAPSLYDYQQNPYDESENSYNHTSDKAGTYYLSSSIKGFGKNNEIPGTYNAQNQPLQALHIYNQAISKQDLNMIASLGKEFLPKVAKLIASGALDNLNLNSPDSFETIFSILKEYGITLNQANWKSLLKIINNFSNTANYHFSQGSLVVGAIKEGQTNTNSVVWFGGDGYKNPCAVGDNTCQMFRQTNLGQLLNSSVPYLGYINANFKAKNIYITGTIGSGNAWGSGGSANVSFESATNLVLNQANIDAQGTDKIFSYLGKEGIDKLFGEKGLGNVLSNIVYEESLNDNAIPKDLANMIPKDLGSKTLSSLLSPTEVNNLLGVSAFKNAIMEILNSKTVGDVFGENGLLNALDPVKRKEIDQMLLEQIQAHSSGFEKFIVKTLGIENVENFINNWYGKQSLSSFANNFVPGGLNQALDKIGSSSDAKDLQSFLDKTTFGDILNQMINQAPLINKLISWLGPQDLSVLVNIALNSITNPSKELLGAISGMGQKVLNDLLGEGVVNKIMSNQVLGQMINKIIADKGFGGVYHQGLGSILPKSLQDELKKLGMGSLLKPKGLHNLWQKGNFNFVAKNHVFVNNSLFSNATGGELNFVAGKSIIFNGKNTINFTQYQGRLSFVSKDFSNISLDTLNATNGLTLNASKNDISVQKGQICVNVLDCMTAKGKTTQTNSSSRRQPQLMKR

SEQ ID NO: 5267 - protein, 1775 aa, Helicobacter pylori
  misc_feature (B) LOCATION 1...1775
  hypothetical: YES
VNNQFKINGAQTDFTFSKGVVFNMQGLLSSLSVGTTYQLLNAKSVGYKDNNNALYQMLRWTSGENPSGKLVDENKTAPNSAKIYNVQFTDNGLTYYIKENFNNGITLTRLCTLGYTHCVNIDNDAFNLKNVNNNASNTVFYLNGMTTWKTAGTGVFTQDYSGTNSVLVFNQTTPFLAGANPTSNSVVGFGKTSGAEWGLVGYIQGVFKANQIDITGTIRSGNGAKTGGGATLVFNAQERLNIANANLNNDKAGLQNSWMNFIVNNGNLNVTNANFSNQTPHGGFNLKANNITWDKGSVSGGGNFGVDNANANGNAVIKNVNFSDNGTLIYKGGENSAGNSLTLENNTFNSYNINAKAQNLIFNNNSFNSGSYSFNDTKNVTFKGTNTLINSDPFSRLKGSVSIDNNSIFNIERDLTDKTTYTLLSGDNIKYNNQALADNVFSKNLWDLIHYDGEQGTLLRTDNNTYFVQFTQSNGQKFVFEETFNPGSITYKYFTIHSSPFHTEADSKDIWNQVRKQFDFIPGKTPVCVGVCYIAPYKNQDLIGSSAFAWSLNFGATVVGTLLLGSAQEKANNNGGSIWFGKNNLLYLHGNFNATNIFLTNNFNVGNPNAGGGATINFNADETLSADGLNYTNFQTVAMGLQTSASQHSWANFNSKLSMEIKNSNFRDFTWGGFRFNSGRITFENTTFSGWTNINGATESGSSYVNMVANTDLIFTDSILGGGIRYDLKANNIIFNNTQMVVDVSKNVNQSSLNGNVTFNHSRLSVKPNAAINIGGDQTQTTLENASSLSFYNDSVANFNGTTAFNGVSYLNLNPNAQVSFNQANFNNANVTFYGIPLFGKTPNFGNSVRLINFKGDAKFNQATLNLRAKNIHLNFQGASTFENNSTMNLAESSQASFNALSVEGETNFNLNGSSLLSFNGNSVFNAPVNFYANNSQISFTHSATFNADASFDLGNNSTLNFQSVLLNSALNLLGNGGNNLAINAKGNFSFGSQGILNLSYMNLFGGDKKASVYDVLQAQNIDGLRGNNGYEKIRFYGIQIEKADYSFNNGVHSWSFTNPLNTTETITETLHNNRLKVQISQNGASNNAMFNLAPSLYDYQQNPYDESENSYNHTSDKAGTYYLSSSIKGFGKNNEIPGTYNAQNQPLQALHIYNQAISKQDLNMIASLGKEFLPKVAKLIASGALDNLNLNSPDSFETIFSILKEYGITLNQANWKSLLKIINNFSNTANYHFSQGSLVVGAIKEGQTNTNSVVWFGGDGYKNPCAVGDNTCQMFRQTNLGQLLNSSVPYLGYINANFKAKNIYITGTIGSGNAWGSGGSANVSFESATNLVLNQANIDAQGTDKIFSYLGKEGIDKLFGEKGLGNVLSNIVYEESLNDNAIPKDLANMIPKDLGSKTLSSLLSPTEVNNLLGVSAFKNAIMEILNSKTVGDVFGENGLLNALDPVKRKEIDQMLLEQIQAHSSGFEKFIVKTLGIENVENFINNWYGKQSLSSFANNFVPGGLNQALDKIGSSSDAKDLQSFLDKTTFGDILNQMINQAPLINKLISWLGPQDLSVLVNIALNSITNPSKELLGAISGMGQKVLNDLLGEGVVNKIMSNQVLGQMINKIIADKGFGGVYHQGLGSILPKSLQDELKKLGMGSLLKPKGLHNLWQKGNFNFVAKNHVFVNNSLFSNATGGELNFVAGKSIIFNGKNTINFTQYQGRLSFVSKDFSNISLDTLNATNGLTLNASKNDISVQKGQICVNVLDCMTAKGKTTQTNSSSRRQPQLMKR

SEQ ID NO: 5268 - protein, 623 aa, Helicobacter pylori
  misc_feature (B) LOCATION 1...623
  hypothetical: YES
VDFSKVLQNTTIGTLDLGPNATFKANNLIVNNAFNNNSNYRANISGNFNVAKGATFSTNENGLNVGGNFNSEGPLIFNLNNPTHQTIINVTGTSTIMSYNNQALINFNTQLKQGAYTLINANRMVYGYDNQTILGGSLSDYLKLYTLIDFNGKRMQLNGDSLSYDNQPVSIKDGGLVVSFKDNQGQMVYSSILYDKIQVTVSDKPMSIQAPSLEYYVKRIQGSAGLNAIKSAGNNSIMWLSELFAAKGGNPLFAPYYLQDNPTEHIVTLMKDITSALGMLSNSNLKNNSTDVLQLNTYTQQMSRLAKLSNFASFDSTDFSERLSSLKNQRFADAVPNAMDVILKYSQRDKLKNNLWATGVGGVSFVENGTGTLYGVNVGYDRFVRGVIVGGYAAYGYSGFYERITSSKSDNVDVGLYARAFIKKSELTFSVNETWGANKTQISSNDALLSMINQSYKYSTWTTNAKVNYGYDFMFKNKSIILKPQIGLRYYYIGMSGLEGVMNNVLYNQFKANADPSKKSVLTIDFALENRHYFNTNSYFYAIGGVGRDLLVNSMGDKLVRFIGNNTLSYRKGDLYNTFANITTGGEVRLFKSFYANAGVGARFGLDYKMIDIIGNIGMRLAF

SEQ ID NO: 5269 - protein, 654 aa, Helicobacter pylori
  misc_feature (B) LOCATION 1...654
  hypothetical: YES
FLFKATAPTNETLEVSANNFAFLGTIKANGLVDFSKVLQNTTIGTLDLGPNATFKANNLIVNNAFNNNSNYRANISGNFNVAKGATFSTNENGLNVGGNFNSEGPLIFNLNNPTHQTIINVTGTSTIMSYNNQALINFNTQLKQGAYTLINANRMVYGYDNQTILGGSLSDYLKLYTLIDFNGKRMQLNGDSLSYDNQPVSIKDGGLVVSFKDNQGQMVYSSILYDKIQVTVSDKPMSIQAPSLEYYVKRIQGSAGLNAIKSAGNNSIMWLSELFAAKGGNPLFAPYYLQDNPTEHIVTLMKDITSALGMLSNSNLKNNSTDVLQLNTYTQQMSRLAKLSNFASFDSTDFSERLSSLKNQRFADAVPNAMDVILKYSQRDKLKNNLWATGVGGVSFVENGTGTLYGVNVGYDRFVRGVIVGGYAAYGYSGFYERITSSKSDNVDVGLYARAFIKKSELTFSVNETWGANKTQISSNDALLSMINQSYKYSTWTTNAKVNYGYDFMFKNKSIILKPQIGLRYYYIGMSGLEGVMNNVLYNQFKANADPSKKSVLTIDFALENRHYFNTNSYFYAIGGVGRDLLVNSMGDKLVRFIGNNTLSYRKGDLYNTFANITTGGEVRLFKSFYANAGVGARFGLDYKMIDIIGNIGMRLAF

SEQ ID NO: 5270 - protein, 69 aa, Helicobacter pylori
  misc_feature (B) LOCATION 1...69
  hypothetical: YES
MKTIKNGIMIGTLGALLLSGCSSFDAQRFACLPKDHSSKDASTKKEAQYIPKGFFDPYSSNLNHWDSTF

SEQ ID NO: 5271 - protein, 69 aa, Helicobacter pylori; identical to SEQ ID NO: 5270
  misc_feature (B) LOCATION 1...69
  hypothetical: YES

SEQ ID NO: 5272 - protein, 93 aa, Helicobacter pylori
  misc_feature (B) LOCATION 1...93
  hypothetical: YES
FKTIERNDFKLNGLTKILQNKGYKMKTIKNGIMIGTLGALLLSGCSSFDAQRFACLPKDHSSKDASTKKEAQYIPKGFFDPYSSNLNHWDSTF

SEQ ID NO: 5273 - protein, 97 aa, Helicobacter pylori
  misc_feature (B) LOCATION 1...97
  hypothetical: YES
LLLFFLGNRVFSIYLLLESFLWVILTTWCCLVMHEDQRQKDMEQLINGIDRIIKANSGKSLHQETQQANKTDKAWDLAANVFLIGLVVLAVFHMIKR

SEQ ID NO: 5274 - protein, 101 aa, Helicobacter pylori
  misc_feature (B) LOCATION 1...101
  hypothetical: YES
VIIFLLLFFLGNKVFSIYLLLESFLWVILTTWCCLVMHEDQRQKDMEQLINGIDRIIKANSGKSLHQETQQANKTDKAWDLAANVFLIGLVVLAVFHMIKR

SEQ ID NO: 5275 - protein, 272 aa, Helicobacter pylori
  misc_feature (B) LOCATION 1...272
  hypothetical: YES
MVVELKNIEKIYENGFHALKGVNLELKKGDILGVIGYSGAGKSTLIRLINCLERPSSGEVLVNGVNLLNLKPKELQKARQKIGMIFQHFNLLSAKNVFENVAFALEIARWEKTKIKSRVHELLELVGLEDKVHFYPKQLSGGQKQRVAIARSLANCPNLLLCDEATSALDSKTTHSILTLLSGIQKKFDLSIVFITHQIEVVKELCNQMCVISSGEIVERGSVEEIFANPKHAVTKELLGIKNEHADQKSQDIYRIVFLGEHLDEPIISXFX

SEQ ID NO: 5276 - protein, 279 aa, Helicobacter pylori
  misc_feature (B) LOCATION 1...279
  hypothetical: YES
MVVELKNIEKIYENGFHALKGVNLELKKGDILGVIGYSGAGKSTLIRLINCLERPSSGEVLVNGVNLLNLKPKELQKARQKIGMIFQHFNLLSAKNVFENVAFALEIARWEKTKIKSRVHELLELVGLEDKVHFYPKQLSGGQKQRVAIARSLANCPNLLLCDEATSALDSKTTHSILTLLSGIQKKFDLSIVFITHQIEVVKELCNQMCVISSGEIVERGSVEEIFANPKHAVTKELLGIKNEHADQKSQDIYRIVFLGEHLDEPIISNLIRRFKIRR

SEQ ID NO: 5277 - protein, 285 aa, Helicobacter pylori
  misc_feature (B) LOCATION 1...285
  hypothetical: YES
VKKSNNMVVELKNIEKIYENGFHALKGVNLELKKGDILGVIGYSGAGKSTLIRLINCLERPSSGEVLVNGVNLLNLKPKELQKARQKIGMIFQHFNLLSAKNVFENVAFALEIARWEKTKIKSRVHELLELVGLEDKVHFYPKQLSGGQKQRVAIARSLANCPNLLLCDEATSALDSKTTHSILTLLSGIQKKFDLSIVFITHQIEVVKELCNQMCVISSGEIVERGSVEEIFANPKHAVTKELLGIKNEHADQKSQDIYRIVFLGEHLDEPIISNLIRRFKIRR

SEQ ID NO: 5278 - protein, 311 aa, Helicobacter pylori
  misc_feature (B) LOCATION 1...311
  hypothetical: YES
VCWTDLIQGLLMMSALIVVPIVMIIHLGGIGEGIKIIREIKPENLSFXQGSSVVAIISSLAWGLGYFGQPHILVRFMSIRSIRDVPKATTIGISWMVISLIGACVMGLLGVAYVHKXDLSLEDPEKIFIVMSQLLFNPWITGILLSAILAAVMSTASSQLLVSSSTIAEDFYATIFNKNAPQKLVMTISRLSVLGVACIAFFISTDKNASILSIVSYAWAGFGASFGSVILFSLFWSRMTRIGAIAGMLSGASTVILYDKFGKSFLDIYEIVPGFIVASVAIVAFSLFSSVRSGTKEAFETMLKEIESLKH

SEQ ID NO: 5279 - protein, 446 aa, Helicobacter pylori
  misc_feature (B) LOCATION 1...446
  hypothetical: YES
RFECGASDMSGWLLMGLPGALYVGGLINSHIAIGLSLGALINWVFVAKRLRIYTSVIANSITISDYFETRFSDDKHILRLISAFVILILKIFYFSSGLVSGAKLFEPTFGIQYTYALSIGTLIIVSYTFLGRYKAVCWTDLIQGLLMMSALIVVPIVMIIHLGGIGEGIKIIKEIKPENLSFLQGSSVVAIISSLAWGLGYFGQPHILVRFMSIRSIRDVPKATTIGISWMVISLIGACVMGLLGVAYVHKFDLSLEDPEKIFIVMSQLLFNPWITGILLSAILAAVMSTASSQLLVSSSTIAEDFYATIFNKNAPQKLVMTISRLSVLGVACIAFFISTDKNASILSIVSYAWAGFGASFGSVILFSLFWSRMTRIGAIAGMLSGASTVILYDKFGKSFLDIYEIVPGFIVASVAIVAFSLFSSVRSGTKEAFETMLKEIESLKH

SEQ ID NO: 5280 - protein, 496 aa, Helicobacter pylori
  misc_feature (B) LOCATION 1...496
  hypothetical: YES
MGHVVLSTPIVTMFVVYSLLMLYIGFYFYKQNETTEDYFLGDRSMGPVISALSAGASDMSGWLLMGLPGALYVGGLINSHIAIGLSLGALINWVFVAKRLRIYTSVIANSITISDYFETRFSDDKHILRLISAFVILIFFIFYISSGLVSGAKLFEATFGIQYTYALSIGTLIIVSYTFLGGYKAVCWTDLIQGLLMMSALIVVPIVMIIHLGGIGEGIKIIREIKPENLSFLQGSSVVAIISSLAWGLGYFGQPHILVRFMSIRSIRDVPKATTIGISWMVISLIGACVMGLLGVAYVHKFDLSLEDPEKIFIVMSQLLFNPWITGILLSAILAAVMSTASSQLLVSSSTIAEDFYATIFNKNAPQKLVMTISRLSVLGVACIAFFISTDKNASILSIVSYAWAGFGASFGSVILFSLFWSRMTRIGAIAGMLSGASTVILYDKFGKSFLDIYEIVPGFIVASVAIVAFSLFSSVRSGTKEAFETMLKEIESLKH

SEQ ID NO: 5281 - protein, 437 aa, Helicobacter pylori
  misc_feature (B) LOCATION 1...437
  hypothetical: YES
MNPQIQPATKKPLKSLLAASSGNLVEWYDFYAYAFLAPYFAKEFTHTNDPTLALISAFLVFMLGFFMRPLGSLFFGKLGDKKGRKTSMVYSIILMALGSFMLALLPTKEIVGEWAFLFLLLARLLQGFSVGGEYGVVATYLSELGKNGKKGFYGSFQYVTLVGGQLLAIFSLFIVENVYTHEQISAFAWRYLFALEGILALLSLFLRNIMEETMDNEATPQKKTNVNNTKETHIKETQRGSLKELLNHKKALMIVFGLTMGGSLCFYTFTVYLKIFLTNSSSFSPKESSFIMLLALSYFIFLQPLCGMLADKIKRTQMLMVFAITGLIVTPIVFYGIKHATSVYEALFYEILALSSMSFYTCIAGVIKAELFPEHVRALGVGLAYAIANALFGGSASYIALEFKQHGFEEGFVGYVMLSIVIFMVMVIIFPKKTYLE

SEQ ID NO: 5282 - protein, 437 aa, Helicobacter pylori; identical to SEQ ID NO: 5281
  misc_feature (B) LOCATION 1...437
  hypothetical: YES

SEQ ID NO: 5283 - protein, 448 aa, Helicobacter pylori
  misc_feature (B) LOCATION 1...448
  hypothetical: YES
NYLKISCSRIAMNPQIQPATKKPLKSLLAASSGNLVEWYDFYAYAFLAPYFAKEFTHTNDPTLALISAFLVFMLGFFMRPLGSLFFGKLGDKKGRKTSMVYSIILMALGSFMLALLPTKEIVGEWAFLFLLLARLLQGFSVGGEYGVVATYLSELGKNGKKGFYGSFQYVTLVGGQLLAIFSLFIVENVYTHEQISAFAWRYLFALEGILALLSLFLRNIMEETMDNEATPQKKTNVNNTKETHIKETQRGSLKELLNHKKALMIVFGLTMGGSLCFYTFTVYLKIFLTNSSSFSPKESSFIMLLALSYFIFLQPLCGMLADKIKRTQMLMVFAITGLIVTPIVFYGIKHATSVYEALFYEILALSSMSFYTCIAGVIKAELFPEHVRALGVGLAYAIANALFGGSASYIALEFKQHGFEEGFVGYVMLSIVIFMVMVIIFPKKTYLE

SEQ ID NO: 5284 - protein, 53 aa, Helicobacter pylori
  misc_feature (B) LOCATION 1...53
  hypothetical: YES
PKIKKTFNAEHSNPMKEIIVALVGQPNVGKSSLINALSNAHLKVGNFTGVTRG

SEQ ID NO: 5285 - protein, 54 aa, Helicobacter pylori
  misc_feature (B) LOCATION 1...54
  hypothetical: YES
MKEIIVALVGQPNVGKSSLINALSNTHLKVGNFTEVTVDKMEVSLIQKDHQINS

SEQ ID NO: 5286 - protein, 139 aa, Helicobacter pylori
  misc_feature (B) LOCATION 1...139
  hypothetical: YES
LLNMWDEAKKEGININTEKLSQELGVVCVPTSARXKEDRLNTELLLDEIVRLYSQNTTNNENIKVPSQSFKESLKYSQSAQRIAKSVISENKQNASFEHTYKIDKIFNAPALWDFHFFXVYVYHLFFELFNRRGSAKSP

SEQ ID NO: 5287 - protein, 614 aa, Helicobacter pylori
  misc_feature (B) LOCATION 1...614
  hypothetical: YES
KWGILPGLPVDKMEVSLIHKDHQITIIDLPGTYALNDFTTEEKVTKDFLEKGQYNLILNVVDSTNLERNLALSAQLLDTNKKMLLALNMWDEAKKEGININTEKLSQELGVVCVPTSARSKEDRLNTELLLDEIVRLYSQNTTNNENIKVPSQSFKESLKYSQSAQRIAKSVISENKQNASFEHTYKIDKILMHQRYGIFIFLGFMFIIFSLSFLIGGGVQKALEEGFKILSDSIKENVANEDLASLVGDGIIGGVGATVSFLPLIVVLYFGISLLETTGYMSRVAFLLDGILHKFGLHGKSFIPLITGFGCSVPAYMATRTLQNYNERLITLFVIGFMSCSARLPIYVLFVGSFFPSSSAGFVLFCIYILGAVVALVMAKLLKLSVFKGQTESFIMEMPKYRFPSWRMVYFSIYTKSLSYLKKAGTYILVGAILIWFMSQYPKNDAAMKTYKQESLLVQKNANLSSEAKEEKLKELKTELDKKNLKNSVVGRGGAYLEKVFNPMDFDWRLSVSLVTGFMAKEVVVSTLGVLFSLGDQNEKSDAFREIIRKEVSVPSGIAFIVFVMFYIPCFAATITFGREAGGIKFVAYLFIFTTVVAYAFSLIAFYATQILV

SEQ ID NO: 5288 - protein, 642 aa, Helicobacter pylori
  misc_feature (B) LOCATION 1...642
  hypothetical: YES
MKEIIVALVGQPNVGKSSLINALSNAHLKVGNFAGVTVDKMEVSLIHKDHQITIIDLPGTYALNDFTTEEKVTKDFLEKGQYDLILNVVDSTNLERNLALSAQLLDTNKKMLLALNMWDEAKKEGININTEKLSQELGVVCVPTSARSKEDRLNTELLLDEIVRLYSQNTTNNENIKVPSQSFKESLKYSQSAQRIAKSVISENKQNASFEHTYKIDKILMHQRYGIFIFLGFMFIIFSLSFLIGGGVQKALEEGFKILSDSIKENVANEDLASLVGDGIIGGVGATVSFLPLIVVLYFGISLLETTGYMSRVAFLLDGILHKFGLHGKSFIPLITGFGCSVPAYMATRTLQNYNERLITLFVIGFMSCSARLPIYVLFVGSFFPSSSAGFVLFCIYILGAVVALVMAKLLKLSVFKGQTESFIMEMPKYRFPSWRMVYFSIYTKSLSYLKKAGTYILVGAILIWFMSQYPKNDAAMKTYKQESLLVQKNANLSSEAKEEKLKELKTELDKKNLKNSVVGRGGAYLEKVFNPMDFDWRLSVSLVTGFMAKEVVVSTLGVLFSLGDQNEKSDAFREIIRKEVSVPSGIAFIVFVMFYIPCFAATITFGREAGGIKFVAYLFIFTTVVAYAFSLIAFYATQILV

SEQ ID NO: 5289 - protein, 277 aa, Helicobacter pylori
  misc_feature (B) LOCATION 1...277
  hypothetical: YES
MKTNGLFKMWGLFLVLIALVFNACSDSHKEKKDALEVIKQRGVLKVGVFSDKPPFGSVDSKGNYQGYDVVIAKRMALDLLGDENKIEFIPVEASARVEFLKANKVDIIMANFTRTKEREKVVDFANPYMKVALGVISKDGVIKNIEELKDKELIVNKGTTADFYFTKNYPNIKLLKFEQNTETFLALLNNKAIALAHDNTLLLAWVKQHPEFKLGITSLGDKDVIAPAIKKGNPKLLEWLNNEIDSLISSDFLKEAYQETLEPIYGDGIKPEEIIFE

SEQ ID NO: 5290 - protein, 293 aa, Helicobacter pylori
  misc_feature (B) LOCATION 1...293
  hypothetical: YES
IKFAKKIVLILKKGGFMKTNGLFKMWGLFLVLIALVFNACSDSHKEKKDALEVIKQRGVLKVGVFSDKPPFGSVDSKGNYQGYDVVIAKRMALDLLGDENKIEFIPVEASARVEFLKANKVDIIMANFTRTKEREKVVDFANPYMKVALGVISKDGVIKNIEELKDKELIVNKGTTADFYFTKNYPNIKLLKFEQNTETFLALLNNKAIALAHDNTLLLAWVKQHPEFKLGITSLGDKDVIAPAIKKGNPKLLEWLNNEIDSLISSDFLKEAYQETLEPIYGDGIKPEEIIFE

SEQ ID NO: 5291 - protein, 61 aa, Helicobacter pylori
  misc_feature (B) LOCATION 1...61
  hypothetical: YES
ASGVISMAIVGGALIPPIQGVVTDMLTATESNLLYAYSVPLLCYFYILFFALKGYKQEENS

SEQ ID NO: 5292 - protein, 125 aa, Helicobacter pylori
  misc_feature (B) LOCATION 1...125
  hypothetical: YES
MNKIAPNKYLAFGALSSIILIALAILIGGKIALFALTFVGFFNSIMFPTIFSLATLNLGISLLMASGVISMAIVGGALIPPIQGVVTDMLTATESNLLYAYSVPLLCYFYILFFALKGYKQEENS

SEQ ID NO: 5293 - protein, 312 aa, Helicobacter pylori
  misc_feature (B) LOCATION 1...312
  hypothetical: YES
LASYGFFLGALFILASGIVCLQTAGNPFVTLLSKGKEARNLVLVQAFNSLGTTLGPIFGSLLIFSATKTSDNLSLIDKLADAKSVQMPYLGLAVFSLLLALVMYLLKLPDVEKEMPKETTQKSLFSHKHFVFGALGIFFYVGGEVAIGSFLVLSFEKLLNLDAQSSAHYLVYYWGGAMVGRFLGSALMNKIAPNKYLAFNALSSIILIALAILIGGKIALFALTFVGFFNSIMFPTIFSLATLNLGHLTSKASGVISMAIVGGALIPPIQGVVTDMLTATESNLLYAYSVPLLCYFYILFFALKGYKQEENS

SEQ ID NO: 5294 - protein, 407 aa, Helicobacter pylori
  misc_feature (B) LOCATION 1...407
  hypothetical: YES
MQKTSNTLALGSLTALFFLMGFITVLNDILIPHLKPIFDLTYFEASLIQFCFFGAYFIMGGVFGNVISKIGYPFGVVLGFVITASGCALFYPAAHFGSYGFFLGALFILASGIVCLQTAGNPFVTLLSKGKEARNLVLVQAFNSLGTTLGPIFGSLLIFSATKTSDNLSLIDKLADAKSVQMPYLGLAVFSLLLALVMYLLKLPDVEKEMPKETTQKSLFSHKHFVFGALGIFFYVGGEVAIGSFLVLSFEKLLNLDAQSSAHYLVYYWGGAMVGRFLGSALMNKIAPNKYLAFNALSSIILIALAILIGGKIALFALTFVGFFNSIMFPTIFSLATLNLGHLTSKASGVISMAIVGGALIPPIQGVVTDMLTATESNLLYAYSVPLLCYFYILFFALKGYKQEENS

SEQ ID NO: 5295 - protein, 102 aa, Helicobacter pylori
  misc_feature (B) LOCATION 1...102
  hypothetical: YES
MMAHSLILVSKTSLSNLLIFVVQPDGKLSMTDAAIDPNMTNSGLRWYRVNEIAEKFKLIKDKALVTVINKGYGKNPLTKNYNIKNYGELERVIKKLPLVRDK

SEQ ID NO: 5296 - protein, 226 aa, Helicobacter pylori
  misc_feature (B) LOCATION 1...226
  hypothetical: YES
MGQAFFKKIVGCFCLGYLFLSSAIEAVALDIKNFNRGRVKVVNKKIAYLGDEKPITIWTSLDNVTVIQLEKDETISYITTGFNKGWSIVPNSNHIFIQPKSVKSNLMFEKEAVNFALMTRDYQEFLKTKKLIVDAPDPKELEEQKKALEKEKEAKEQAQKAQKDKREKRKEERAKNRANLENLTNAMSNPQNLSNNKNLSELIKQQRENELDQMERTRGHARAGSS

SEQ ID NO: 5297 - protein, 240 aa, Helicobacter pylori
  misc_feature (B) LOCATION 1...240
  hypothetical: YES
VRTNKALYQFILRIAQKDNFASAYLTVKLEYPQRHEVSSVIEEELKKREEAKRQRELIKQENLNTTAYINRVMMASNEQIINKEKIREEKQKIILDQAKALETQYVHNALKRNPVPRNYNYYQAPEKRSKHIMPSEIFDDGTFTYFGFKNITLQPAIFVVQPDGKLSMTDAAIDPNMTNSGLRWYRVNEIAEKFKLIKDKALVTVINKGYGKNPLTKNYNIKNYGELERVIKKLPLVRDK

SEQ ID NO: 5298 - protein, 256 aa, Helicobacter pylori
  misc_feature (B) LOCATION 1...256
  hypothetical: YES
LHRIISCDSAWRTNLVVRTNKALYQFILRIAQKDNFASAYLTVKLEYPQRHEVSSVIEEELKKREEAKRQRELIKQENLNTTAYINRVMMASNEQIINKEKIREEKQKIILDQAKALETQYVHNALKRNPVPRNYNYYQAPEKRSKHIMPSEIFDDGTFTYFGFKNITLQPAIFVVQPDGKLSMTDAAIDPNMTNSGLRWYRVNEIAEKFKLIKDKALVTVINKGYGKNPLTKNYNIKNYGELERVIKKLPLVRDK

SEQ ID NO: 5299 - protein, 297 aa, Helicobacter pylori
  misc_feature (B) LOCATION 1...297
  hypothetical: YES
EELLMGQAFFKKIVGCFCLGYLFLSSAIEAVALDIKNFNRGRVKVVNKKIAYLGDEKPITIWTSLDNVTVIQLEKDETISYITTGFNKGWSIVPNSNHIFIQPKSVKSNLMFEKEAVNFALMTRDYQEFLKTKKLIVDAPDPKELEEQKKALEKEKEAKEQAQKAQKDKREKRKEERAKNRANLENLTNAMSNPQNLSNNKNLSELIKQQRENELDQMERLEDMQEQAQANALKQIEELNKKQAEEAVRQRAKDKISIKTDKSQKSPEDNSIELSPAIALGGLILLCGPIKPCINSF

SEQ ID NO: 5300 - protein, 522 aa, Helicobacter pylori
  misc_feature (B) LOCATION 1...522
  hypothetical: YES
MGQAFFKKIVGCFCLGYLFLSSAIEAVALDIKNFNRGRVKVVNKKIAYLGDEKPITIWTSLDNVTVIQLEKDETISYITTGFNKGWSIVPNSNHIFIQPKSVKSNLMFEKEAVNFALMTRDYQEFLKTKKLIVDAPDPKELEEQKKALEKEKEAKEQAQKAQKDKREKRKEERAKNRANLENLTNAMSNPQNLSNNKNLSELIKQQRENELDQMERLEDMQEQAQANALKQIEELNKKQAEEAVRQRAKDKISIKTDKSQKSPEDNSIELSPSDSAWRTNLVVRTNKALYQFILRIAQKDNFASAYLTVKLEYPQRHEVSSVIEEELKKREEAKRQRELIKQENLNTTAYINRVMMASNEQIINKEKIREEKQKIILDQAKALETQYVHNALKRNPVPRNYNYYQAPEKRSKHIMPSEIFDDGTFTYFGFKNITLQPAIFVVQPDGKLSMTDAAIDPNMTNSGLRWYRVNEIAEKFKLIKDKALVTVINKGYGKNPLTKNYNIKNYGELERVIKKLPLVRDK

SEQ ID NO: 5301 - protein, 126 aa, Helicobacter pylori
  misc_feature (B) LOCATION 1...126
  hypothetical: YES
VALLEPSVMYLTEKYQYSRFKVTWGLVALIFVVGVVLIFSLHKDYKDYLTFFEKSLFDWLDFASSTIIXPLGGMXTFIFMGWVLKKEKLRLLSAHFLGPKLFATWYFLLKYITPLIVFSIWLSKIY

SEQ ID NO: 5302 - protein, 187 aa, Helicobacter pylori
  misc_feature (B) LOCATION 1...187
  hypothetical: YES
FLLWAGLMIFTFVFEYGANVSQGTGLIFTSLPVVFGQMGAIGVLVSILFLLALAFAGITSTVALLEPSVMYLTEKYQYSRFKVTWGLVALIFVVGVVLIFSLHKDYKDYLTFFEKSLFDWLDFASSTIIMPLGGMATFIFMGWVLKKEKLRLLSAHFLGPKLFATWYFLLKYITPLIVFSIWLSKIY

SEQ ID NO: 5303 - protein, 205 aa, Helicobacter pylori
  misc_feature (B) LOCATION 1...205
  hypothetical: YES
MGNHFSKLGFVLAALGSAIGLGHIWRFPYMTGVSGGGAFVLLFLFLSLSVGAAMFIAEMLLGQSTQKNVTEAFKELDINPKKRWKYAGIMLISGPLILTFYGTILGWVLYYLVSISFNLPSSIQESEQIFTQTLQSIGLQSIGLFSVLFITGWIVSRGIKEGIEKLNLVLMPLLFATFFGLLFYAMSMDSFSKAFHFMLISSQKI

SEQ ID NO: 5304 - protein, 270 aa, Helicobacter pylori
  misc_feature (B) LOCATION 1...270
  hypothetical: YES
DMGNHFSKLGFVLAALGSAIGLGHIWRFPYMTGVSGGGAFVLLFLFLSLSVGAAMFIAEMLLGQSTQKNVTEAFKELDINPKKRWKYAGIMLISGPLILTFYGTILGWVLYYLVSISFNLPSSIQESEQIFTQTLQSIGLQSIGLFSVLFITGWIVSRGIKEGIEKLNLVLMPLLFATFFGLLFYAMSMDSFSKAFHFMFDFKPKDLTSQVFTYSLGQVFFSLSIGLGINITYAAVTDKTQNLLKSTIWVVLSGILISLVGRAYDFHFCV

SEQ ID NO: 5305 - protein, 442 aa, Helicobacter pylori
  misc_feature (B) LOCATION 1...442
  hypothetical: YES
MGNHFSKLGFVLAALGSAIGLGHIWRFPYMTGVSGGGAFVLLFLFLSLSVGAAMFIAEMLLGQSTQKNVTEAFKELDINPKKRWKYAGIMLISGPLILTFYGTILGWVLYYLVSISFNLPSSIQESEQIFTQTLQSIGLQSIGLFSVLFITGWIVSRGIKEGIEKLNLVLMPLLFATFFGLLFYAMSMDSFSKAFHFMFDFKPKDLTSQVFTYSLGQVFFSLSIGLGINITYAAVTDKTQNLLKSTIWVVLSGILISLVAGLMIFTFVFEYGANVSQGTGLIFTSLPVVFGQMGAIGVLVSILFLLALAFAGITSTVALLEPSVMYLTEKYQYSRFKVTWGLVALIFVVGVVLIFSLHKDYKDYLTFFEKSLFDWLDFASSTIIMPLGGMATFIFMGWVLKKEKLRLLSAHFLGPKLFATWYFLLKYITPLIVFSIWLSKIY

SEQ ID NO: 5306 - protein, 109 aa, Helicobacter pylori
  misc_feature (B) LOCATION 1...109
  hypothetical: YES
VXLYLALTLSLGIAMLLVEMLIGNLGKKDVVSNYQILDPKRKKYYPFTSFFILGGPLILSFYAVVLGWVLYYLFVVTFDLPKDLXQAKMQFXMLQNGSLIWPVIDFSAC

SEQ ID NO: 5307 - protein, 293 aa, Helicobacter pylori
  misc_feature (B) LOCATION 1...293
  hypothetical: YES
MGKFSKLGFILATLGSSIGLGHIWRFPYMVGHNGGSAFVLLYLALTLSLGIAMLLVEMLIGNLGKKDVVSNYQILDPKRKKYYPFTSFFILGGPLILSFYAVVLGWVLYYLFVVTFDLPKDLEQAKMQFSMLQNGSLIWPVIGFSACLLPTIWFVSRGIEKGIEKLNVVLMPLLFVIFIGLLIYAMTLESMPKALRFLFNFEIQKIDFKVVMDALGQMFFSLSLGVGTIITYSAFTPKKENLLKSSLFIVLPGILISLIAGVMIFTFVFEYHADVSQGPGLVFISLPLTFAKM

SEQ ID NO: 5308 - protein, 303 aa, Helicobacter pylori
  misc_feature (B) LOCATION 1...303
  hypothetical: YES
ARFIKIFGMGKFSKLGFILATLGSSIGLGHIWRFPYMVGHNGGSAFVLLYLALTLSLGIAMLLVEMLIGNLGKKDVVSNYQILDPKRKKYYPFTSFFILGGPLILSFYAVVLGWVLYYLFVVTFDLPKDLEQAKMQFSMLQNGSLIWPVIGFSACLLPTIWFVSRGIEEGIEKLNVVLMPLLFVIFIGLLIYAMTLESMPKALRFLFNFEIQKIDFKVVMDALGQMFFSLSLGVGTIITYSAFTPKKENLLKSSLFIVLPGILISLIAGVMIFTFVFEYHADVSQGPGLVFISLPLTFAKMGS

SEQ ID NO: 5309 - protein, 302 aa, Helicobacter pylori
  misc_feature (B) LOCATION 1...302
  hypothetical: YES
ARFIKIFGMGKFSKLGFILATLGSSIGLGHIWRFPYMVGHNGGSAFVLLYLALTLSLGIAMLLVEMLIGNLGKKDVVSNYQILDPKRKKYYPFTSFFILGGPLILSFYAVVLGWVLYYLFVVTFDLPKDLEQAKMQFSMLQNGSLIWPVIGFSACLLPTIWFVSRGIEEGIEKLNVVLMPLLFVIFIGLLIYAMTLESMPKALRFLFNFEIQKIDFKVVMDALGQMFFSLSLGVGTIITYSAFTPKKENLLKSSLFIVLPGILISLIAGVMIFTFVFEYHADVSQGPGLVFISLPLTFAKMG

SEQ ID NO: 5310 - protein, 442 aa, Helicobacter pylori
  misc_feature (B) LOCATION 1...442
  hypothetical: YES
MGKFSKLGFILATLGSSIGLGHIWRFPYMVGHNGGSAFVLLYLALTLSLGIAMLLVEMLIGNLGKKDVVSNYQILDPKRKKYYPFTSFFILGGPLILSFYAVVLGWVLYYLFVVTFDLPKDLEQAKMQFSMLQNGSLIWPVIGFSACLLPTIWFVSRGIEKGIEKLNVVLMPLLFVIFIGLLIYAMTLESMPKALRFLFNFEIQKIDFKVVMDALGQMFFSLSLGVGTIITYSAFTPKKENLLKSSLFIVLPGILISLIAGVMIFTFVFEYHADVSQGPGLVFISLPLTFAKMGISGQIVSLFFFMALVFAGITSTVSLIEPLALYLINRFNFSRLKASLWIGVVVYVLGVLVILSMNERYAKFLSFAHKSVFGWLDFITSSFLMPLGGLFSVLFIGWILNKKRSFLATKHFFSANAFKAWHFSVRFIAPVVILAIFILQFK

SEQ ID NO: 5311 - protein, 187 aa, Helicobacter pylori
  misc_feature (B) LOCATION 1...187
  hypothetical: YES
MLKTHLSSARGVVVLSKILPVNVVLMVSVRLFEKELKRKPYYIIASAHSDEGLEKLKKXGXDMVXXPTKLMAQRVSANXWCXLDMENILERFINKKDTLLDLEEVIVPKTSWLVLRKLKEAHFREIAKAFVIGITQKDGKYIPMPDGETIIASESKLLMVGTSEGVATCKQLITSHQKPKEVDYISL

SEQ ID NO: 5312 - protein, 348 aa, Helicobacter pylori
  misc_feature (B) LOCATION 1...348
  hypothetical: YES
LFEKLKFFKIKKDDENQPEVNLNSEIYEQFKVFRLPLILIQLLVLLGTLGYFALENYSLMQAFFQTTYTMTATGFGALNESQFGPISIFLTSILMFCGTGIIAFSVAILVSVVNKGTLTRLIKEKGMIYKIARLKDHYVICYHNEYTIELSKQFRSAQIPFVVVDNDPNFEEEAIKHKYPYYIIGDPHTNLAMLKTHLSSARGVVALSKILPVNVALMVSVRLFEKELKRKPYYIIASAHSDEGLEKLKKLGADMVVSPTKLMAQRVSAMAVRPDMENILERFINKKDTLLDLEEVIVPKTSWLVLRKLKEAHFREIAKAFVIGITQKDGKYIPMPDGKRLLQANPSY

SEQ ID NO: 5313 - protein, 351 aa, Helicobacter pylori
  misc_feature (B) LOCATION 1...351
  hypothetical: YES
ELVLFEKLKFFKIKKDDENQPEVNLNSEIYEQFKVFRLPLILIQLLVLLGTLGYFALENYSLMQAFFQTTYTMTATGFGALNESQFGPISIFLTSILMFCGTGIIAFSVAILVSVVNKGTLTRLIKEKGMIYKIARLKDHYVICYHNEYTIELSKQFRSAQIPFVVVDNDPNFEEEAIKHKYPYYIIGDPHTNLAMLKTHLSSARGVVALSKILPVNVALMVSVRLFEKELKRKPYYIIASAHSDEGLEKLKKLGADMVVSPTKLMAQRVSAMAVRPDMENILERFINKKDTLLDLEEVIVPKTSWLVLRKLKEAHFREIAKAFVIGITQKDGKYIPMPDGKRLLQANPSY

SEQ ID NO: 5314 - protein, 224 aa, Helicobacter pylori
  misc_feature (B) LOCATION 1...224
  hypothetical: YES
MDHEFLITMRLSFSLALITTLILLPIGIFLGYFLSLKRNLLTSLTETLVYMPLVLPPSVLGFYLLLIFSPSSFLGAFLQDVLNVKLVFSFQGLILGSVIFSLPFMVSPIKSALISLPTSLKEASYSLGKGEYYTLFFVLLPNIKPSVLMAIITTFMHTIGEFGVVMMLGGDILGETRVASITIFNEAEALNYSKAHQYALTLTLISFSLLFVTLFLNKKQSSFL

SEQ ID NO: 5315 - protein, 224 aa, Helicobacter pylori; identical to SEQ ID NO: 5314
  misc_feature (B) LOCATION 1...224
  hypothetical: YES

SEQ ID NO: 5316 - protein, 228 aa, Helicobacter pylori
  misc_feature (B) LOCATION 1...228
  hypothetical: YES
KRRTMDHEFLITMRLSFSLALITTLILLPIGIFLGYFLSLKRNLLTSLTETLVYMPLVLPPSVLGFYLLLIFSPSSFLGAFLQDVLNVKLVFSFQGLILGSVIFSLPFMVSPIKSALISLPTSLKEASYSLGKGEYYTLFFVLLPNIKPSVLMAIITTFMHTIGEFGVVMMLGGDILGETRVASITIFNEAEALNYSKAHQYALTLTLISFSLLFVTLFLNKKQSSFL

SEQ ID NO: 5317 - protein, 75 aa, Helicobacter pylori
  misc_feature (B) LOCATION 1...75
  hypothetical: YES
IQRSHQLFNLQEKKGILGFLHQKNILNIAQNDIHQLLILMVVFSMLATPFILKYLESIAQFILHQKSQENEPAKK

SEQ ID NO: 5318 - protein, 123 aa, Helicobacter pylori
  misc_feature (B) LOCATION 1...123
  hypothetical: YES
VLKFFEDSKQLSTPMGKSAVGILIFQDIAAIPMLLILTILGSKDSHVNLLILKTLISAGIILILLLLPGKKGANLILEQAKDTRLPEIFIGTDFSDCLQRGGVEPFFWVFYVFGGVHCGHGDF

SEQ ID NO: 5319 - protein, 194 aa, Helicobacter pylori
  misc_feature (B) LOCATION 1...194
  hypothetical: YES
VIVCSAAGLSHFFGFSMSLGAFIVGMAISKSRYKINVQEEFAQLKNLFLALFFITIGMQINVSFFMEKFFVVIFLLILVMSFKTFIIYALLRFFRDAKTAIKTALSLAQIGEFSFVIFLNSGSHQLFNLQEKKGILGFLHQKNILNIAQNDIHQLLILMVVFSMLATPFILKYLESIAQFILHQKSQENEPAKK

SEQ ID NO: 5320 - protein, 366 aa, Helicobacter pylori
  misc_feature (B) LOCATION 1...366
  hypothetical: YES
FRFYFFKANRSYWGKVFMVNSTLYIVIAGLWLAVGFGIFLKKLDMPVIIGYICTGTVLAAFFKINDFNLLSDIGEFGIVFLMFMIGIEFNFDKLKSIKQEVLVFGLLQVVLCALIAFLLGYFVLGLSPIFSLVLGMGLSLSSTAIVLKFFEDSKQLSTPMGKSAVGILIFQDIAAIPMLLILTILGSKDSHVNLLILKTLISAGIILILLLLPEKKGANLILEQAKDTRLPEIFIGTVLVIVCSAAGLSHFFGFSMSLGAFIVGMAISKSRYKINVQEEFAQLKNLFLALFFITIGMQINVSFFMEKFFVVIFLLILVMSFKTFIIYALLRFFRDAKTAIKTALSLAQIGEFSFVIFLNSALAPAL

SEQ ID NO: 5321 - protein, 416 aa, Helicobacter pylori
  misc_feature (B) LOCATION 1...416
  hypothetical: YES
MENSTLYIVIAGLWLAVGFGIFLKKLDMPVIIGYICTGTVLAAFFKINDFNLLSDIGEFGIVFLMFMIGIEFNFDKLKSIKQEVLVFGLLQVVLCALIAFLLGYFVLGLSPIFSLVLGMGLSLSSTAIVLKFFEDSKQLSTPMGKSAVGILIFQDIAAIPMLLILTILGSKDSHVNLLILKTLISAGIILILLLLPGKKGANLILEQAKDTRLPEIFIGTVLVIVCSAAGLSHFFGFSMSLGAFIVGMAISKSRYKINVQEEFAQLKNLFLALFFITIGMQINVSFFMEKFFVVIFLLILVMSFKTFIIYALLRFFRDAKTAIKTALSLAQIGEFSFVIFLNSGSHQLFNLQEKKGILGFLHQKNILNIAQNDIHQLLILMVVFSMLATPFILKYLESIAQFILHQKSQENEPAKK

SEQ ID NO: 5322 - protein, 265 aa, Helicobacter pylori
  misc_feature (B) LOCATION 1...265
  hypothetical: YES
MIKARFKKRLLGSRGAFDLNIDLEIKEAEVVALLGESGAGKSTILRILAGLEAVSSGYIEANHSVWLDTQKKIFLKPQQRKIGFVFQDYALFPHLNVYQNIAFAHPKDKNKIHEVLRLMRLENLSQQKIPKLSGGQAQRVALARALIAAKNLLLLDEPLNALDNALKNEVQQGLLDFIKRENLSVLLVSHDPNEITKLARTFLFLNNGVIDPNQENRLFSNRLLVKPLFEDENYCHYEVIPQTISLPKDCLNPTFKLDFIQNKKF

SEQ ID NO: 5323 - protein, 265 aa, Helicobacter pylori; identical to SEQ ID NO: 5322
  misc_feature (B) LOCATION 1...265
  hypothetical: YES

SEQ ID NO: 5324 - protein, 271 aa, Helicobacter pylori
  misc_feature (B) LOCATION 1...271
  hypothetical: YES
KTKLVFMIKARFKKRLLGSRGAFDLNIDLEIKEAEVVALLGESGAGKSTILRILAGLEAVSSGYIEANHSVWLDTQKKIFLKPQQRKIGFVFQDYALFPHLNVYQNIAFAHPKDKNKIHEVLRLMRLENLSQQKIPKLSGGQAQRVALARALIAAKNLLLLDEPLNALDNALKNEVQQGLLDFIKRENLSVLLVSHDPNEITKLARTFLFLNNGVIDPNQENRLFSNRLLVKPLFEDENYCHYEVIPQTISLPKDCLNPTFKLDFIQNKKF

SEQ ID NO: 5325 - protein, 276 aa, Helicobacter pylori
  misc_feature (B) LOCATION 1...276
  hypothetical: YES
MRVLEWKYWLNTDKWDTPTNKPPQTFKIQIFKIQIGIINNFNHLIKGSSMKNAFKAFALLIVFFSNALLAQDLKIAAAANLTRALKALVKEFQKEHPKDAINISFNSSGKLYAQIAQNAPFDLFISADIARPKKLYDEKITPFKEEVYAKGVLVLWSENLKMDSLEILKDPKIKRIAMANPKLAPYGKASMEVLDRLKLTPSLKSKIIYGASISQAHQFIATKNAQIGFGALSLIDKKDKNLSYFIIDKTLYNPIEQALIITKNGANNPLAKVFKD

SEQ ID NO: 5326 - protein, 295 aa, Helicobacter pylori
  misc_feature (B) LOCATION 1...295
  hypothetical: YES
MRVLEWKYWLNTDKWDTPTNKPPQTFKIQIFKIQIGIINNFNHLIKGSSMKNAFKAFALLIVFFSNALLAQDLKIAAAANLTRALKALVKEFQKEHPKDAINISFNSSGKLYAQIAQNAPFDLFISADIARPKKLYDEKITPFKEEVYAKGVLVLWSENLKMDSLEILKDPKIKRIAMANPKLAPYGKASMEVLDRLKLTPSLKSKIIYGASISQAHQFIATKNAQIGFGALSLIDKKDKNLSYFIIDKTLYNPIEQALIITKNGANNPLAKVFKDFLFSPKARAIFKEYGYIVD

SEQ ID NO: 5327 - protein, 319 aa, Helicobacter pylori
  misc_feature (B) LOCATION 1...319
  hypothetical: YES
ILLVELKLHPKIGYFSKRFNFLSKMRVLEWKYWLNTDKWDTPTNKPPQTFKIQIFKIQIGIINNFNHLIKGSSMKNAFKAFALLIVFFSNALLAQDLKIAAAANLTRALKALVKEFQKEHPKDAINISFNSSGKLYAQIAQNAPFDLFISADIARPKKLYDEKITPFKEEVYAKGVLVLWSENLKMDSLEILKDPKIKRIAMANPKLAPYGKASMEVLDRLKLTPSLKSKIIYGASISQAHQFIATKNAQIGFGALSLIDKKDKNLSYFIIDKTLYNPIEQALIITKNGANNPLAKVFKDFLFSPKARAIFKEYGYIVD

SEQ ID NO: 5328 - protein, 489 aa, Helicobacter pylori
  misc_feature (B) LOCATION 1...489
  hypothetical: YES
LQDKATLLAEILNKMSSILTDFEPKFLSSDDLLNLYAEYCNGHYCDFKYKQRRLSDGNIQSHLYFKKDHFIHDYNGIETFKRFIAVKAYDVDNITSLALSNLLCEKFNLDILLTIEAMDKERALFFIRERKKRSKDISYQNIEYLEQMVSTDRAQIQKVSLSIMVFANSKKELDKKSIIVYNTLKKEGFSAVLESINMRPIFFSFFPERNFLNSRLRPQTSQNIASLIMFEKYQEGFKENSWGDCPVSVFKNQNGSAHFFNFQAKQGKDKNDNVVGHTMIIGSTGSGKSTFISFLIANLLTKYDMSVVALDRMNGLEIMTDFFEGQYNTANTDGGFYINPFSLKDSEENRQFLANWIKFMLNIDSDNQQDNKASQSIDKVIRDTYNYMGDQKNQINLLEIAKNLGSSEQDFNEILKSQGEKIYFKNFQDCLDFSNSPLSVINMDAFANDKKLMGLIAMYLFHKLFFEAKEHNKPFFYSLMKLKTTLCIL

SEQ ID NO: 5329 - protein, 504 aa, Helicobacter pylori
  misc_feature (B) LOCATION 1...504
  hypothetical: YES
PTPSFFSKNAIENKELQDKATLLAEILNKMSSILTDFEPKFLSSDDLLNLYAEYCNGHYCDFKYKQRRLSDGNIQSHLYFKKDHFIHDYNGIETFKRFIAVKAYDVDNITSLALSNLLCEKFNLDILLTIEAMDKERALFFIRERKKRSKDISYQNIEYLEQMVSTDRAQIQKVSLSIMVFANSKKELDKKSIIVYNTLKKEGFSAVLESINMRPIFFSFFPERNFLNSRLRPQTSQNIASLIMFEKYQEGFKENSWGDCPVSVFKNQNGSAHFFNFQAKQGKDKNDNVVGHTMIIGSTGSGKSTFISFLIANLLTKYDMSVVALDRMNGLEIMTDFFEGQYNTANTDGGFYINPFSLKDSEENRQFLANWIKFMLNIDSDNQQDNKASQSIDKVIRDTYNYMGDQKNQINLLEIAKNLGSSEQDFNEILKSQGEKIYFKNFQDCLDFSNSPLSVINMDAFANDKKLMGLIAMYLFHKLFFEAKEHNKPFFYSLMKLKTTLCIL

SEQ ID NO: 5330 - protein, 93 aa, Helicobacter pylori
  misc_feature (B) LOCATION 1...93
  hypothetical: YES
VNNISNHIFKSPPFVEANQSVNFPVVFKLLLINTVGTSIFLAALVSMLVLRVRVSDALSVFGETLKEMRYPILTIGLVLSFAYVLNKKGISSI

SEQ ID NO: 5331 - protein, 169 aa, Helicobacter pylori
  misc_feature (B) LOCATION 1...169
  hypothetical: YES
NLKRKRSVHHFRSPHFSDFDWLLFGSFLEGAIGFGGPIAITAAILVGLGLSPLYSAGLCLIANTAPVAFGAVGIPISAMASAVGVPAILISAMTGKILFFVSLLVPFFIVFLMDGFKGIKETFPAVFIAAFSFAGAQFLSSNYLGPELPGIISALVSLVATALFLYFAA

SEQ ID NO: 5332 - protein, 212 aa, Helicobacter pylori
  misc_feature (B) LOCATION 1...212
  hypothetical: YES
VSEFHQVYDPLGNIWLSALVALLPILLFFLSLMVFKLKGYTAAFLSVALSAIIAVLVYKMPVSMVGSSFLYGFLYGLWLFAWIIIAAIFLYKLSVKSGYFEILKESVQSITLDHRILVILIGFCFGSFLEGAIGFGGPIAITAAILVGLGLSPLYSAGLCLIANTAPVAFGAVGIPISAMASAVGVPAILISAMTGKILFFVSLLVPFFIVF

SEQ ID NO: 5333 - protein, 427 aa, Helicobacter pylori
  misc_feature (B) LOCATION 1...427
  hypothetical: YES
VSEFHQVYDPLGNIWLSALVALLPILLFFLSLMVFKLKGYTAAFLSVALSAIIAVLVYKMPVSMVGSSFLYGFLYGLWPIAWIIIAAIFLYKLSVKSGYFEILKESVQSITLDHRILVILIGFCFGSFLEGAIGFGGPIAITAAILVGLGLSPLYSAGLCLIANTAPVAFGAVGIPISAMASAVGVPAILISAMTGKILFFVSLLVPFFIVFLMDGFKGIKETFPAVFIAAFSFAGAQFLSSNYLGPELPGIISALVSLVATALFLKFWQPKTIFRSDGKAISFTKTNHHICKIYVAWSPFVILVLVIVLWIQPFFKALFEKDGLLAFSNFYFEFNNISNHIFKSPPFVEANQSVNFPVVFKLLLINTVGTSIFLAALVSMLVLRVRVSDALSVFGETLKEMRYPILTIGLVLSFAYVSNNKRISSI

SEQ ID NO: 5334 - protein, 115 aa, Helicobacter pylori
  misc_feature (B) LOCATION 1...115
  hypothetical: YES
LAFTFFSPLIGWVGVFLTGSDTSSNLLFGSLQQLTAQRLHLPEVLTLTANTVGGTLGKMISPQSIAIACAAVGLAGKESDLFKFTVKYSLIFVAIMGVVISAIAYWIPEVVPAIK

SEQ ID NO: 5335 - protein, 115 aa, Helicobacter pylori; identical to SEQ ID NO: 5334
  misc_feature (B) LOCATION 1...115
  hypothetical: YES

SEQ ID NO: 5336 - protein, 130 aa, Helicobacter pylori
  misc_feature (B) LOCATION 1...130
  hypothetical: YES
KGDFFHLALALTHTGLAFTFFSPLIGWVGVFLTGSDTSSNLLFGSLQQLTAQRLHLPEVLTLTANTVGGTLGKMISPQSIAIACAAVGLAGKESDLFKFTVKYSLIFVAIMGVVISAIAYWIPEVVPAIK

SEQ ID NO: 5337 - protein, 103 aa, Helicobacter pylori
  misc_feature (B) LOCATION 1...103
  hypothetical: YES
WGVLTGSDTSSNLLFGSLQMLIATQLGLPEVLFLAANTSGGVVGKMISPQSIAIACAAVGLVGKESELFRFTVKYSIALAIIMGIVFTLIAYVFSFIIPVTPT

SEQ ID NO: 5338 - protein, 102 aa, Helicobacter pylori
  misc_feature (B) LOCATION 1...102
  hypothetical: YES
GVLTGSDTSSNLLFGSLQMLIATQLGLPEVLFLAANTSGGVVGKMISPQSIAIACAAVGLVGKESELFRFTVKYSIALAIIMGIVFTLIAYVFSFIIPVTPT

SEQ ID NO: 5339 - protein, 108 aa, Helicobacter pylori
  misc_feature (B) LOCATION 1...108
  hypothetical: YES
MVGWLGVFLTGSDTSSNLLFGSLQMLIATQLGLPEVLFLAANTSGGVVGKMISPQSIAIACAAVGLVGKESELFRFTVKYSIALAIIMGIVFTLIAYVFPFIIPVTPT

SEQ ID NO: 5340 - protein, 152 aa, Helicobacter pylori
  misc_feature (B) LOCATION 1...152
  hypothetical: YES
VFKSGMQACVCVLGVAWLGDTFVSNHIDEIKRYASFLIADYPFLLAVALFLASMLLYSQAATSKALIPSVITALGISANHTEHLYIIVASFASVSALFVLPTYPTLLGAIAMDHTGTTKMGRYVFDHAFLIPGVLVVFLSVALGFVVAPLVL

SEQ ID NO: 5341 - protein, 152 aa, Helicobacter pylori; identical to SEQ ID NO: 5340
  misc_feature (B) LOCATION 1...152
  hypothetical: YES

SEQ ID NO: 5342 - protein, 82 aa, Helicobacter pylori
  misc_feature (B) LOCATION 1...82
  hypothetical: YES
GGARLWRLAPVITTPIAPLKRGLIDEVFSVGVKSIDGLLTCGKGQKLGIFAGSGVGKSTLMGMITRGCLAPIKVIALIGERG

SEQ ID NO: 5343 - protein, 81 aa, Helicobacter pylori
  misc_feature (B) LOCATION 1...81
  hypothetical: YES
GGARLWRLAPVITTPIAPLKRGLIDEVFSVGVKSIDGLLTCGKGQKLGIFAGSGVGKSTLMGMITRGCLAPIKVIALIGER

SEQ ID NO: 5344 - protein, 85 aa, Helicobacter pylori
  misc_feature (B) LOCATION 1...85
  hypothetical: YES
TSASRVAKDIISESQNLCARKFRRLYALLKENEMLIRIGSYQMGNDKELDEAIKKKALMEQFLVQDENALQPFEQSFQQLEEILR

SEQ ID NO: 5345 - protein, 149 aa, Helicobacter pylori
  misc_feature (B) LOCATION 1...149
  hypothetical: YES
LPQLMERAGKEENKGSITAFFSVLVEGDDLSDPIADQARSILDGHIVLSRELTDYGIYPPINILNSASRVAKDIISESQNLCARKFRRLYALLKENEMLIRIGSYQMGNDKELDEAIKKKALMEQFLVQDENALQPFEQSFQQLEEILR

SEQ ID NO: 5346 - protein, 311 aa, Helicobacter pylori
  misc_feature (B) LOCATION 1...311
  hypothetical: YES
VITTPIAPLKRGLIDEVFSVGVKSIDGLLTCGKGQKLGIFAGSGVGKSTLMGMITRGCLAPIKVIALIGERGREIPEFIEKNLKGDLSSCVLVVATSDDSPLMRKYGAFCAMSVAEYFKNQGLDVLFIMDSVTRFAMAQREIGLALGEPPTSKGYPPSALSLLPQLMERAGKEENKGSITAFFSVLVEGDDLSDPIADQARSILDGHIVLSRELTDYGIYPPINILNSASRVAKDIISESQNLCARKFRRLYALLKENEMLIRIGSYQMGNDKELDEAIKKKALMEQFLVQDENALQPFEQSFQQLEEILR

SEQ ID NO: 5347 - protein, 73 aa, Helicobacter pylori
  misc_feature (B) LOCATION 1...73
  hypothetical: YES
ARIFWIWIFTACAKFSGNYDDWYIASTLIAKQQEAERNKKLKEKEELEKFIARFSANALKPSKPPAAKNNWIN

SEQ ID NO: 5348 - protein, 72 aa, Helicobacter pylori
  misc_feature (B) LOCATION 1...72
  hypothetical: YES
RIFWIWIFTACAKFSGNYDDWYIASTLIAKQQEAERNKKLKEKEELEKFIARFSANALKPSKPPAAKNNWIN

SEQ ID NO: 5349 - protein, 195 aa, Helicobacter pylori
  misc_feature (B) LOCATION 1...195
  hypothetical: YES
MLQTINLTQRYATKKLFENVNIKLDKNKRYGLIGANGAGKSTFLKILSKSIDCSSGEVIITSGMRMGVLGQDQYAFEDLSLKDAVLIGNRRLYDAIKEKERLYTEGDLSDDKVNARLGELETICVEEDPMYECEVVIEKILEDLGIPSSKHNDLMKTLPSSDKFKILLAQVLFPKPDILLLDEPTNNLDLTPLNG

SEQ ID NO: 5350 - protein, 317 aa, Helicobacter pylori
  misc_feature (B) LOCATION 1...317
  hypothetical: YES
MLQTINLTQRYATKKLFENVNIKLDKNKRYGLIGANGAGKSTFLKILSKSIDCSSGEVIITSGMRMGVLGQDQYAFEDLSLKDAVLIGNRRLYDAIKEKERLYTEGDLSDDKVNARLGELETICVEEDPMYECEVVIEKILEDLGIPSSKHNDLMKTLPSSDKFKILLAQVLFPKPDILLLDEPTNNLDLNAIEWLENNLKRHEGTMVVISHDRHFLNAVCTHILDLDFHSVREFSGNYDDWYIASTLIAKQQEAERNKKLKEKEELEKFIARFSANASKAKQATSRQKQLDKLDIQSLAISSRRDPSIIFKPKRTI

SEQ ID NO: 5351 - protein, 97 aa, Helicobacter pylori
  misc_feature (B) LOCATION 1...97
  hypothetical: YES
LLRSLCLVCVSVASALAVSVSGTIGWIGLVIPHVARLFFGANLQKLLLSSLLMGAFFLLLADVVAKTITPYDLPVGIATSVLGAPFFLWLLFRTRGV

SEQ ID NO: 5352 - protein, 96 aa, Helicobacter pylori
  misc_feature (B) LOCATION 1...96
  hypothetical: YES
LRSLCLVCVSVASALAVSVSGTIGWIGLVIPHVARLFFGANLQKLLLSSLLMGAFFLLLADVVAKTITPYDLPVGIATSVLGAPFFLWLLFRTRGV

SEQ ID NO: 5353 - protein, 98 aa, Helicobacter pylori
  misc_feature (B) LOCATION 1...98
  hypothetical: YES
VLLRSLCLVCVSVASALAVSVSGTIGWIGLVIPHVARLFFGANLQKLLLSSLLMGAFFLLLADVVAKTITPYDLPVGIATSVLGAPFFLWLLFRTRGV

SEQ ID NO: 5354 - protein, 171 aa, Helicobacter pylori
  misc_feature (B) LOCATION 1...171
  hypothetical: YES
VEYYAFNFSVLDFVLMGKATHLNLFAMPKAKHIKEATSVLERLDLESLKDQGINDLSGGQRQMVLLARSLLQRTPLLLLDEPTSALDLKNQALFFDAIKDEMKKRELSVLVNIHDPNLVARHSTHVVMLKDKKLFLQASTPIAMTSHNLSALYDTPLXAIWHDDKLVVYAL

SEQ ID NO: 5355 - protein, 206 aa, Helicobacter pylori
  misc_feature (B) LOCATION 1...206
  hypothetical: YES
GLLKPLEETEIKACNKDILPLKPYEKAKLIAYIPQVEYYAFNFSVLDFVLMGKATHLNLFAMPKAKHIKEATSVLERLDLESLKDQGINDLSGGQRQMVLLARSLLQRTPLLLLDEPTSALDLKNQALFFDAIKDEMKKRELSVLVNIHDPNLVARHSTHVVMLKDKKLFLQASTPIAMTSHNLSALYDTPLEAIWHDDKLVVYAL

SEQ ID NO: 5356 - protein, 205 aa, Helicobacter pylori
  misc_feature (B) LOCATION 1...205
  hypothetical: YES
LLKPLEETEIKACNKDILPLKPYEKAKLIAYIPQVEYYAFNFSVLDFVLMGKATHLNLFAMPKAKHIKEATSVLERLDLESLKDQGINDLSGGQRQMVLLARSLLQRTPLLLLDEPTSALDLKNQALFFDAIKDEMKKRELSVLVNIHDPNLVARHSTHVVMLKDKKLFLQASTPIAMTSHNLSALYDTPLEAIWHDDKLVVYAL

SEQ ID NO: 5357 - protein, 256 aa, Helicobacter pylori
  misc_feature (B) LOCATION 1...256
  hypothetical: YES
VMVLEVKNLSFKYSQKLILDKLSFSVPKNSITSILAPNGSGKTTLLKCLLGLLKPLEETEIKACNKDILPLKPYEKAKLIAYIPQVEYYAFNFSVLDFVLMGKATHLNLFAMPKAKHIKEATSVLERLDLESLKDQGINDLSGGQRQMVLLARSLLQRTPLLLLDEPTSALDLKNQALFFDAIKDEMKKRELSVLVNIHDPNLVARHSTHVVMLKDKKLFLQASTPIAMTSHNLSALYDTPLEAIWHDDKLVVYAL

SEQ ID NO: 5358 - protein, 59 aa, Helicobacter pylori
  misc_feature (B) LOCATION 1...59
  hypothetical: YES
VVICDEPVSALDVSIQAQVLNLLLDLQKEMGLTYIFISHDLGVVEHISDKIIVMNQGKS

SEQ ID NO: 5359 - protein, 268 aa, Helicobacter pylori
  misc_feature (B) LOCATION 1...268
  hypothetical: YES
MKLLEIKELKKSYAIDRGLFKPKRVIHALNGISFEVEQNEVLSIVGESGCGKSTTAKILAGIERQDSGAIYFNGKRHLHFSKQDWFDYRKKVQMIFQDPYSSLNPRWKVGEIIAEPLLLNSHFSKKEIKTKVLEIMQKVGLKLEWIDRYPHQFSGGQRQRIGIARALILHPSVVICDEPVSALDVSIQAQVLNLLLDLQKEMGLTYIFISHDLGVVEHISDKIIVMNQGQIVETGDVDSVISAPKHPYTQKLLNAVPHLEKSMQRFAE

SEQ ID NO: 5360 - protein, 172 aa, Helicobacter pylori
  misc_feature (B) LOCATION 1...172
  hypothetical: YES
AWWRKSLHEVVVMYKGHVVEQASAKELFADPRHPYTKALLNAIPKPGKEYRKKRLETVDENVDYLSFQKEVTMKLLEIKELKKFHAIDRGYFKPKRVIHALNGISFEVEQNEVLSIVGESGCGKSTTAKILAGIERQDSGAIYFNGKRHLHFSKQDWFDYRKKVQMIFQDPY

SEQ ID NO: 5361 - protein, 195 aa, Helicobacter pylori
  misc_feature (B) LOCATION 1...195
  hypothetical: YES
MIFQEPMTSLNPSYTVGFQINEVLKIHHPSLNKKERLERVVYELERVGIPHAGDKYHEYPFNLSGGQRQRVMIAMAMVCEPEILIADEPTTALDVTIQAQILELMKELQQKKGTSILFITHDLGVVAQIADEVVVMYKGHVVEQASAKELFADPRHPYTKALLNAIPKPGKEYRKKRLETVDENVDYLSFQKELR

SEQ ID NO: 5362 - protein, 287 aa, Helicobacter pylori
  misc_feature (B) LOCATION 1...287
  hypothetical: YES
MILEVKDLKTYFFTDKGVNKAVDGVSFGLKKSQTLCIVGESGSGKSITSLSILGLIEKPGKIVGGSIQFLGQDLLQLKEKQMQKEIRGKKIGMIFQEPMTSLNPSYTVGFQINEVLKIHHPSLNKKERLERVVYELERVGIPHAGDKYHEYPFNLSGGQRQRVMIAMAMVCEPEILIADEPTTALDVTIQAQILELMKELQQKKGTSILFITHDLGVVAQIADEVVVMYKGHVVEQASAKELFADPRHPYTKALLNAIPKPGKEYRKKRLETVDENVDYLSFQKELR

SEQ ID NO: 5363 - protein, 40 aa, Helicobacter pylori
  misc_feature (B) LOCATION 1...40
  hypothetical: YES
MSEAYFLHHKNASQVSLNEQVLNVMKQVQLDENFWNVSLM

SEQ ID NO: 5364 - protein, 516 aa, Helicobacter pylori
  misc_feature (B) LOCATION 1...516
  hypothetical: YES
MLEIKNLNCVLNSHFSLQNINISLSYSERVAIVGESGSGKSSIANLVMRLNPRFKPHNGEILFETTNLLKESEAFMQHLRGNIIAYIAQDPLSSLNPLHKIGKQMSEAYFLHHKNASQVLLKEQVLNAMKQVQLDEKFLDRYPYELSGGQRQRVCIAMGIINAPKLLICDEPTTALDAQIQNQILDLLKQLSVEKNIALLFISHDLKAVKRLADRVYVLKKGEIVETNLTKELFNDPKHEYSKLLIQASNLPAKNLKALDETLLEVKDFSVYYLQKRFFRPSLKKPLIASVDFSLKAKENIGIIGESGSGKSSLALGLLKLALNSGEEKILGQSVGLLNSKAFKPYRKILQMVFQDPYASLNPRLSIQSILIEALRFAYPKASQQEWHHLAELCLEEVCLNPELLNFYAYELSGGERQRVAIARAIALKPRIILLDEPTSALDKSIQKSVLELLLNLQEKQDLSYLFISHDLDVIKAFCDRVLVVSEGKIVETGAIEEVFDNPKHAYTKRLLESRL

SEQ ID NO: 5365 - protein, 519 aa, Helicobacter pylori
  misc_feature (B) LOCATION 1...519
  hypothetical: YES
RGYMLEIKNLNCVLNSHFSLQNINISLSYSERVAIVGESGSGKSSIANLVMRLNPRFKPHNGEILFETTNLLKESEAFMQHLRGNIIAYIAQDPLSSLNPLHKIGKQMSEAYFLHHKNASQVLLKEQVLNAMKQVQLDEKFLDRYPYELSGGQRQRVCIAMGIINAPKLLICDEPTTALDAQIQNQILDLLKQLSVEKNIALLFISHDLKAVKRLADRVYVLKKGEIVETNLTKELFNDPKHEYSKLLIQASNLPAKNLKALDETLLEVKDFSVYYLQKRFFRPSLKKPLIASVDFSLKAKENIGIIGESGSGKSSLALGLLKLALNSGEEKILGQSVGLLNSKAFKPYRKILQMVFQDPYASLNPRLSIQSILIEALRFAYPKASQQEWHHLAELCLEEVCLNPELLNFYAYELSGGERQRVAIARAIALKPRIILLDEPTSALDKSIQKSVLELLLNLQEKQDLSYLFISHDLDVIKAFCDRVLVVSEGKIVETGAIEEVFDNPKHAYTKRLLESRL

SEQ ID NO: 5366 - protein, 77 aa, Helicobacter pylori
  misc_feature (B) LOCATION 1...77
  hypothetical: YES
FLRALCGLLGTVLGIMVILYDMGVSGGMDAKTIMVGLSLALKATALGLAVAIPTLIAYNSLLRKSDVLSEKFRIMKT

SEQ ID NO: 5367 - protein, 76 aa, Helicobacter pylori
  misc_feature (B) LOCATION 1...76
  hypothetical: YES
LRALCGLLGTVLGIMVILYDMGVSGGMDAKTIMVGLSLALKATALGLAVAIPTLIAYNSLLRKSDVLSEKFRIMKT

SEQ ID NO: 5368 - protein, 93 aa, Helicobacter pylori
  misc_feature (B) LOCATION 1...93
  hypothetical: YES
STNTHSFIILERLCERMLLKEHMLFSVDVSHVALILRELFYHRQGVFMGGFSMAMLKDYVDVFVFAVLGVASFLALWFVIERVIFYSKVDLKA

SEQ ID NO: 5369 - protein, 145 aa, Helicobacter pylori
  misc_feature (B) LOCATION 1...145
  hypothetical: YES
MGGFSMAMLKDYVDVFVFAVLGVASFLALWFVIERVIFYSKVDLKAYDDIDALNLDLTKNLTILYVIFSNAPYVGLLGTVLGIMVIFYDMGVSGGMDAKTIMVGLSLALKATALGLAVAIPTLIAYNSLLRKSDVLSEKFRIMKT

SEQ ID NO: 5370 - protein, 69 aa, Helicobacter pylori
  misc_feature (B) LOCATION 1...69
  hypothetical: YES
AFFIIFILIVFALKNLTNSLLCFFTLPFAFLGGLIFMNLMGFNMSVAALVGFLALLGVASETAIVMIIY

SEQ ID NO: 5371 - protein, 163 aa, Helicobacter pylori
  misc_feature (B) LOCATION 1...163
  hypothetical: YES
KSGLVMASTKTPCWTRLNSLWAETLTTMIKGVESYPISLRLEDTERNTIEKLKNLYIKTAYNYMPLRELAHVYYDNSPAVLKSEKGLNVNFIYIVPQNGISSDTYRQLAQKTLEKIQLPSGYYYEFSGESQYLEEAFKTLQYIVPVSVFYHFYFNCLCVKESH

SEQ ID NO: 5372 - protein, 236 aa, Helicobacter pylori
  misc_feature (B) LOCATION 1...236
  hypothetical: YES
VSEVASVGGFVKDYEVTLQNDSLIRYNLSLEQVANAIKNSNNDTGGGVILENGFEKIIRSHGYIQSLNDLEEIVVKKEGAIPLKIKDIASVRLAPKPRRGAANLNGDKEVVGGIVMVRYHADTYKVLKAIKEKIATLQASNPDVKITSVYDRSELIEKGIDNLIHTLIEESVIVLVIIAIFLLHFRSALVVIITLPLRVCISFLLMSYFNIEASIMSLGGIAIAIGAMVNAAIVMV

SEQ ID NO: 5373 - protein, 667 aa, Helicobacter pylori
  misc_feature (B) LOCATION 1...667
  hypothetical: YES
TPTKAPKIVQEQVTYPLVSTFMSIANIDTVRGISSYESGLIYIIFKDGVNLYWARDRVLEQLNRVSNLPKDAKVEIGSDSTSIGWAYQYALSSDSKNLSDLKVLQDFYYRYALLGVDGVSEVASVGGFVKDYEVTLQNDSLIRYNLSLEQVANAIKNSNNDTGGGVILENGFEKIIRSHGYIQSLNDLEEIVVKKEGAIPLKIKDIASVRLAPKPRRGAANLNGDKEVVGGIVMVRYHADTYKVLKAIKEKIATLQASNPDVKITSVYDRSELIEKGIDNLIHTLIEESVIVLVIIAIFLLHFRSALVVIITLPLSVCISFLLMRYFNIEASIMSLGGIAIAIRAMVDAAIVMVENAHKHLQHIDTRDNTQRVNAIMQGVKHVGGAIFFALMIIVVSFLPIFALTGQEEKLFAPLAYTKTFAMLVGALLSITIVPVLMVWLIKGRILEESESPVNAFFMKIYGVSLRVVLKFRYAFLIASVLGLGGLVVAYKKLNWEFIPQINEGVIMYMPVTINGVGIDTALEYLKKSNAAIKQLDFVKQVFGKVGRANTSTDAAGLGMIETYIELKPQNEWKEKLSYKEVRDKLEKTLQLKGLTNSWTYPIRGRTDMLLTGIRTPLGIKLYGNDTDKLQELAILMEQQLKTLKESLSGFAERSNNGYYITLDLER

SEQ ID NO: 5374 - protein, 666 aa, Helicobacter pylori
  misc_feature (B) LOCATION 1...666
  hypothetical: YES
PTKAPKIVQEQVTYPLVSTFMSIANIDTVRGISSYESGLIYIIFKDGVNLYWARDRVLEQLNRVSNLPKDAKVEIGSDSTSIGWAYQYALSSDSKNLSDLKVLQDFYYRYALLGVDGVSEVASVGGFVKDYEVTLQNDSLIRYNLSLEQVANAIKNSNNDTGGGVILENGFEKIIRSHGYIQSLNDLEEIVVKKEGAIPLKIKDIASVRLAPKPRRGAANLNGDKEVVGGIVMVRYHADTYKVLKAIKEKIATLQASNPDVKITSVYDRSELIEKGIDNLIHTLIEESVIVLVIIAIFLLHFRSALVVIITLPLSVCISFLLMRYFNIEASIMSLGGIAIAIRAMVDAAIVMVENAHKHLQHIDTRDNTQRVNAIMQGVKHVGGAIFFALMIIVVSFLPIFALTGQEEKLFAPLAYTKTFAMLVGALLSITIVPVLMVWLIKGRILEESESPVNAFFMKIYGVSLRVVLKFRYAFLIASVLGLGGLVVAYKKLNWEFIPQINEGVIMYMPVTINGVGIDTALEYLKKSNAAIKQLDFVKQVFGKVGRANTSTDAAGLGMIETYIELKPQNEWKEKLSYKEVRDKLEKTLQLKGLTNSWTYPIRGRTDMLLTGIRTPLGIKLYGNDTDKLQELAILMEQQLKTLKESLSGFAERSNNGYYITLDLER

SEQ ID NO: 5375 - protein, 1035 aa, Helicobacter pylori
  misc_feature (B) LOCATION 1...1035
  hypothetical: YES
MIEKIIDLSVKNKLLTTLVTLLIFLASLWAIKSVRLDALPDLSPAQVVVQITYPNQSPKIVQEQVTYPLVSTFMSIANIDTVRGISSYESGLIYIIFKDGVNLYWARDRVLEQLNRVSNLPKDAKVEIGSDSTSIGWAYQYALSSDSKNLSDLKVLQDFYYRYALLGVDGVSEVASVGGFVKDYEVTLQNDSLIRYNLSLEQVANAIKNSNNDTGGGVILENGFEKIIRSHGYIQSLNDLEEIVVKKEGAIPLKIKDIASVRLAPKPRRGAANLNGDKEVVGGIVMVRYHADTYKVLKAIKEKIATLQASNPDVKITSVYDRSELIEKGIDNLIHTLIEESVIVLVIIAIFLLHFRSALVVIITLPLSVCISFLLMRYFNIEASIMSLGGIAIAIGAMVDAAIVMVENAHKHLQHIDTRDNTQRVNAIMQGVKHVGGAIFFALMIIVVSFLPIFALTGQEEKLFAPLAYTKTFAMLVGALLSITIVPVLMVWLIKGRILEESESPVNAFFMKIYGVSLRVVLKFRYAFLIASVLGLGGLVVAYKKLNWEFIPQINEGVIMYMPVTINGVGIDTALEYLKKSNAAIKQLDFVKQVFGKVGRANTSTDAAGLGMIETYIELKPQNEWKEKLSYKEVRDKLEKTLQLKGLTNSWTYPIRGRTDMLLTGIRTPLGIKLYGNDTDKLQELAILMEQQLKTLKESLSVFAERSNNGYYITLDLNDENLARYGINKNAVLDTIKFALGGATLTTMIKGVESYPISLRLEDTERNTIEKLKNLYIKTAYNYMPLRELAHVYYDNSPAVLKSEKGLNVNFIYIVPQNGISSDTYRQLAQKTLEKIQLPSGYYYEFSGESQYLEEAFKTLQYIVPVSVFIIFILIVFALKNLTNSLLCFFTLPFAFLGGLIFMNLMGFNMSVAALVGFLALLGVASETAIVMIIYLEDAFQKFIKTPLKERTTAALKETIMHGAVLRVRPKLMTFFSILASLIPIMYSHGTGSEIMKSIAAPMLGGMMSSVVLTLFIIPTAYFVIKNARIRKREY

SEQ ID NO: 5376 - protein, 75 aa, Helicobacter pylori
  misc_feature (B) LOCATION 1...75
  hypothetical: YES
MLVLLAIVLSISTFIAQGKIKVSLPNAKNAEKSRPNDQKVVVISVDEHDNIFVDDKPTNLEALSAVVKQTDPKTL

SEQ ID NO: 5377 - protein, 129 aa, Helicobacter pylori
  misc_feature (B) LOCATION 1...129
  hypothetical: YES
MKSIRRGDGLNVVPFIDIMLVLLAIVLSISTFIAQGKIKVSLPNAKNAEKSQPNDQKVVVISVDEHDNIFVDDKPTNLEALSAVVKQTDPKTLIDLKSDKSSRFETFISIMDILKEHNHENFSISTQAQ

SEQ ID NO: 5378 - protein, 53 aa, Helicobacter pylori
  misc_feature (B) LOCATION 1...53
  hypothetical: YES
SESDRQYRESQATFIMGLRFMTTTFLQRQYLNTNECATKTSGEGQASCVRALT

SEQ ID NO: 5379 - protein, 195 aa, Helicobacter pylori
  misc_feature (B) LOCATION 1...195
  hypothetical: YES
VGAMPTIQIRXFGAGGSGHSDATLMLVNGIPVYMAPYAHIELDIFPVTFQAIDRIDVIKGGGSVQYGPNTYGGIVNIITKPIPNQWENQAAERXTYWAKARNAGFAAPXDKTGDPSFIKSLGNNLLYNTYVRSGGMINKHVGIQRKLTGLEAKALGTIAPLVFQTIGWMGSMTSMKAMGLKPITNTTILAIXQPG

SEQ ID NO: 5380 - protein, 300 aa, Helicobacter pylori
  misc_feature (B) LOCATION 1...300
  hypothetical: YES
FALHKKVLLALTASLICQESLFAKDKDYTLGKVSTAGKKDRSDYSGQVNLGYSGITAPKSWQDEEVKKYTGSRTVISNKALTQQANQSIEEALQNVPGLQIRNATGVGAMPTIQIRGFGAGGSGHSDATLMLVNGIPVYMAPYAHIELDIFPVTFQAIDRIDVIKGGGSVQYGPNTYGGIVNIITKPIPNQWENQAAERITYWAKARNAGFAAPPDKTGDPSFIKSLGNNLLYNTYVRSGGMINKHVGIQAQANWVRGQGFRDNSPSSISNYWLDGVYDINESNGIKAYYQYYDFAIAQP

SEQ ID NO: 5381 - protein, 471 aa, Helicobacter pylori
  misc_feature (B) LOCATION 1...471
  hypothetical: YES
LHKKVLLALTASLICQESLFAKDKDYTLGKVSTAGKKDRSDYSGQVNLGYSGITAPKSWQDEEVKKYTGSRTVISNKALTQQANQSIEEALQNVPGLQIRNATGVGAMPTIQIRGFGAGGSGHSDATLMLVNGIPVYMAPYAHIELDIFPVTFQAIDRIDVIKGGGSVQYGPNTYGGIVNIITKPIPNQWENQAAERITYWAKARNAGFAAPPDKTGDPSFIKSLGNNLLYNTYVRSGGMINKHVGIQAQANWVRGQGFRDNSPSSISNYWLDGVYDINESNGIKAYYQYYDFAIAQPGSLSEQDYKINRFANLRPLNQKGGRSQRFGAVYENRFGDLDRVGGTFSFTYYGQLMTRDFQVSSSYNSANMVTCFSEAACRAAGLPAGYNLAVPYYATNYNGWAEVENPVRSINNAFEPKVNLIVNTGKVRQTFIMGLRFMTTTFLQRQYLNTNECATKTSGEGQASCVRALT

SEQ ID NO: 5382 - protein, 51 aa, Helicobacter pylori
  misc_feature (B) LOCATION 1...51
  hypothetical: YES
MSMFISNLAFTSEHKDAMEVAKIAILLGSLISGIIGALYLFALDKRAALKK

SEQ ID NO: 5383 - protein, 81 aa, Helicobacter pylori
  misc_feature (B) LOCATION 1...81
  hypothetical: YES
AKSLKSLRALKASAGWHILGAGLLAGIGFTMSMFISNLAFTSEHKDAMEVAKIAILLGSLISGIIGALYLFALDKRAALKK

SEQ ID NO: 5384 - protein, 334 aa, Helicobacter pylori
  misc_feature (B) LOCATION 1...334
  hypothetical: YES
KIMGLKIKILRLSMNLKKTENALSLTLKNFIKSESFGGIFLFLNAVLAMVVANSFLKESYFALWHTPFGFQVGDFFIGFSLHNWIDDVLMALFFLMIGLEIKRELLFGELSSFKKASFPVIAAIGGMIAPGLIYFFLNANTPSQHGFGIPMATDIAFALGVIMLLGKRVPTALKVFLITLAVADDLGAIVVIALFYTTNLKFAWLLGALGVVLVLAILNRLNIRSLIPYLLLGVLLWFCVHQSGIHATIAAVVLAFMIPVKIPKDSKNVELLELGKRYAETSSGVLLTKEQQEILHSIEEKASALQSPLERLEHFLAPISGYFIMPLFAFATLG

SEQ ID NO: 5385 - protein, 393 aa, Helicobacter pylori
  misc_feature (B) LOCATION 1...393
  hypothetical: YES
MNLKKTENALSLTLKNFIKSESFGGIFLFLNAVLAMVVANSFLKESYFALWHTPFGFQVGDFFIGFSLHNWIDDVLMALFFLMIGLEIKRELLFGELSSFKKASFPVIAAIGGMIAPGLIYFFLNANTPSQHGFGIPMATDIAFALGVIMLLGKRVPTALKVFLITLAVADDLGAIVVIALFYTTNLKFAWLLGALGVVLVLAILNRLNIRSLIPYLLLGVLLWFCVHQSGIHATIAAVVLAFMIPVKIPKDSKNVELLELGKRYAETSSGVLLTKEQQEILHSIEEKASALQSPLERLEHFLAPISGYFIMPLFAFANAGVSGDSSINLEVDKVLLGVILGLCLGKPLGIFLITFISEKLKITARPKGIGWMAYFRGWAFSRDWLYHVYVHF

SEQ ID NO: 5386 - protein, 404 aa, Helicobacter pylori
  misc_feature (B) LOCATION 1...404
  hypothetical: YES
MGLKIKILRLSMNLKKTENALSLTLKNFIKSESFGGIFLFLNAVLAMVVANSFLKESYFALWHTPFGFQVGDFFIGFSLHNWIDDVLMALFFLMIGLEIKRELLFGELSSFKKASFPVIAAIGGMIAPGLIYFFLNANTPSQHGFGIPMATDIAFALGVIMLLGKRVPTALKVFLITLAVADDLGAIVVIALFYTTNLKFAWLLGALGVVLVLAILNRLNIRSLIPYLLLGVLLWFCVHQSGIHATIAAVVLAFMIPVKIPKDSKNVELLELGKRYAETSSGVLLTKEQQEILHSIEEKASALQSPLERLEHFLAPISGYFIMPLFAFANAGVSGDSSINLEVDKVLLGVILGLCLGKPLGIFLITFISEKLKITARPKGIGWMAYFRGWAFSRDWLYHVYVHF

SEQ ID NO: 5387 - protein, 449 aa, Helicobacter pylori
  misc_feature (B) LOCATION 1...449
  hypothetical: YES
MGLKIKILRLSMNLKKTENALSLTLKNFIKSESFGGIFLFLNAVLAMVVANSFLKESYFALWHTPFGFQVGDFFIGFSLHNWIDDVLMALFFLMIGLEIKRELLFGELSSFKKASFPVIAAIGGMIAPGLIYFFLNANTPSQHGFGIPMATDIAFALGVIMLLGKRVPTALKVFLITLAVADDLGAIVVIALFYTTNLKFAWLLGALGVVLVLAILNRLNIRSLIPYLLLGVLLWFCVHQSGIHATIAAVVLAFMIPVKIPKDSKNVELLELGKRYAETSSGVLLTKEQQEILHSIEEKASALQSPLERLEHFLAPISGYFIMPLFAFANAGVSVDSSINLEVDKVLLGVILGLCLGKPLGIFLITFISEKLKITARPKGIGWWHILGAGLLAGIGFTMSMFISNLAFTSEHKDAMEVAKIAILLGSLISGIIGALYLFALDKRAALKK

SEQ ID NO: 5388 - protein, 209 aa, Helicobacter pylori
  misc_feature (B) LOCATION 1...209
  hypothetical: YES
MGFNRLVDRDIDKDNPRTKNRPSVDGRISVKGMVIFSVSNALLFVGVSYFINPLAFKLSLPFLIILGGYSYFKRFSSLAHFVVGLALGLAPIAGSVAVLGDIPLWNVFLALGVMLWVAGFDLLYSLQDMEFDKERGLFSIPSQLGEKWCLNLSRLSHLVALICWLCFVKCYHGGLFAYLGLGVSALILLYEQILVARDYKNIPKSLFCE

SEQ ID NO: 5389 - protein, 230 aa, Helicobacter pylori
  misc_feature (B) LOCATION 1...230
  hypothetical: YES
MGFNRLVDRDIDKDNPRTKNRPSVDGRISVKGMVIFSVSNALLFVGVSYFINPLAFKLSLPFLIILGGYSYFKRFSSLAHFVVGLALGLAPIAGSVAVLGDIPLWNVFLALGVMLWVAGFDLLYSLQDMEFDKERGLFSIPSQLGEKWCLNLSRLSHLVALICWLCFVKCYHGGLFAYLGLGVSALILLYEQILVARDYKNIPKAFFVSNGYLGVVFFIFIVLDVGFKHA

SEQ ID NO: 5390 - protein, 240 aa, Helicobacter pylori
  misc_feature (B) LOCATION 1...240
  hypothetical: YES
NHNKGAEISLWGLTRLVDRDIDKDNPRTKNRPSVDGRISVKGMVIFSVSNAILFVGWSNFINPLAFKLSLPFLIILGGYSYFKRFSSLAHFVVGLALGLAPIAGSVAVLGDIPLWNVFLALGVMLWVAGFDLLYSLQDMEFDKERGLFSIPSQLGEKWCLNLSRLSHLVALICWLCFVKCYHGGLFAYLGLGVSALILLYEQILVARDYKNIPKAFFVSNGYLGVVFFIFIVLDVGFKHA

SEQ ID NO: 5391 - protein, 294 aa, Helicobacter pylori
  misc_feature (B) LOCATION 1...294
  hypothetical: YES
LLKKITHQIKALSELVALEHTIFSSMFLLMAMVISSYQKNQTLFFGLETLILCFLALLGARNFAMGFNRLVDRDIDKDNPRTKNRPSVDGRISVKGMVIFSVSNALLFVGVSYFINPLAFKLSLPFLIILGGYSYFKRFSSLAHFVVGLALGLAPIAGSVAVLGDIPLWNVFLALGVMLWVAGFDLLYSLQDMEFDKERGLFSIPSQLGEKWCLNLSRLSHLVALICWLCFVKCYHGGLFAYLGLGVSALILLYEQILVARDYKNIPKAFFVSNGYLGVVFFIFIVLDVGFKHA

SEQ ID NO: 5392 - protein, 237 aa, Helicobacter pylori
  misc_feature (B) LOCATION 1...237
  hypothetical: YES
VKTLGLSSLGGTLEFYDFIIFVFFTSIIAKHFFPNTLSPIWSEINTYGIFAAGYLARPLGGIVMAHFGDKFGRKNMFMLSILLMVIPTFALALMPTFNDLVGFGVDSMGLTPKNAHYLGYIAPVFLVLVRICQGVAVGGELPGAWVFVHEHAPQGQKNTYIGFLTASVVSGILLGSLVYIGIYMVFDKPVVEDWAWRVAFGLGGIFGIISVYLRRFLEETPVFQQMKQGRCLSQIPA

SEQ ID NO: 5393 - protein, 452 aa, Helicobacter pylori
  misc_feature (B) LOCATION 1...452
  hypothetical: YES
VKTLGLSSLGGTLEFYDFIIFVFFTSIIAKHFFPNTLSPIWSEINTYGIFAAGYLARPLGGIVMAHFGDKFGRKNMFMLSILLMVIPTFALALMPTFNDLVGFGVDSMGLTPKNAHYLGYIAPVFLVLVRICQGVAVGGELPGAWVFVHEHAPQGQKNTYIGFLTASVVSGILLGSLVYIGIYMVFDKPVVEDWAWRVAFGLGGIFGIISVYLRRFLEETPVFQQMKQDDALVKFPLKEVFKNSLFGISISMLITWVLTACILIFILFVPNFTLTHPNFHFTPFEKTYFQILGLVGIVSSIIFTGFLADKIKPHKVCMAFSAAFGFFGFLFFKEFYSNAPSLVNTIILYFLACFCAGIMNFCPIFMSDVFSARIRFSGISFAYNIAYAITAGFTPQLSSWLNAKAIAVPESLQSYGLSFYILIVSLIAFITSLLMAPIYHKSNTQHEVSPTA

SEQ ID NO: 5394 - protein, 461 aa, Helicobacter pylori
  misc_feature (B) LOCATION 1...461
  hypothetical: YES
SIKHLGKKEVKTLGLSSLGGTLEFYDFIIFVFFTSIIAKHFFPNTLSPIWSEINTYGIFAAGYLARPLGGIVMAHFGDKFGRKNMFMLSILLMVIPTFALALMPTFNDLVGFGVDSMGLTPKNAHYLGYIAPVFLVLVRICQGVAVGGELPGAWVFVHEHAPQGQKNTYIGFLTASVVSGILLGSLVYIGIYMVFDKPVVEDWAWRVAFGLGGIFGIISVYLRRFLEETPVFQQMKQDDALVKFPLKEVFKNSLFGISISMLITWVLTACILIFILFVPNFTLTHPNFHFTPFEKTYFQILGLVGIVSSIIFTGFLADKIKPHKVCMAFSAAFGFFGFLFFKEFYSNAPSLVNTIILYFLACFCAGIMNFCPIFMSDVFSARIRFSGISFAYNIAYAITAGFTPQLSSWLNAKAIAVPESLQSYGLSFYILIVSLIAFITSLLMAPIYHKSNTQHEVSPTA

SEQ ID NO: 5395 - protein, 450 aa, Helicobacter pylori
  misc_feature (B) LOCATION 1...450
  hypothetical: YES
METIDSVVRLLSNLVWGIPMQILLVGTGLFLTFYLRGLQFSKIFYAIKILFDKESQSKGDISQFSALMLSLGATVGIGSIVGVATAISIAGPGAVFWMWVTGLVGMATKYSEGILAVKYREKGAFGYNGGPMYYIKNGLNMPKLAMAFAIFTIIASIGTGNMTQSNAVSSILSEQANLPNWVSGLLLTLLTAVIVIGGIKSIGKFTSYLAPVMVLLYLIAIIYIIVSHFDLALQAIKLIFEEAFNPKPVVGGASGTLVATMIKTGVARGLYSNEAGLGSSAIIAASAQTHHPVRQALVSMLQTFIVTLVVCSATASVILMAPEYNTLLPNGEKLSANLLTLKSTEYFLGSLGTVVIFTTMIFFAYSTIIGWAYYGEKCAEYAFGEKKVKYYRLIFLASVMVGAMAKIDFVWNLADLSNGLMAIPNLIALILLHKVVYSETRWYFSKHSNK

SEQ ID NO: 5396 - protein, 158 aa, Helicobacter pylori
  misc_feature (B) LOCATION 1...158
  hypothetical: YES
LWLPIPECLLGLKQYKRGIVIIKSELKKLGRLSQAEISVGVIFILASLGWIFLDTILKSWGIKIDKIDSVIAMGVSALLFILPANHQGDRLIDWGVAKKLPWDVLLLFGGGLSLSAQFSKTGLSLWIGHLVSGFSSLPILFIIVMVTLMVIFLNRNYF

SEQ ID NO: 5397 - protein, 234 aa, Helicobacter pylori
  misc_feature (B) LOCATION 1...234
  hypothetical: YES
LGKEVVKSELKKLRRLSQAEISVGVIFILASLGWIFLDTILKSWGIKIDKIDSVIAMGVSALLFILPANHQGDRLIDWGVAKKLPWDVLLLFGGGLALSAQFSKTGLSLWIGHLVSGFSHLPILFIIVMVTLMVIFLTEITSNTATAAAFLPVIGGVAMGMGYESHQSLLLTIPVALSATCAFMLPVATPPNAIAYGSGYVKITDMIKAGLWLNLVGVVLISAFSYCLVSLIFN

SEQ ID NO: 5398 - protein, 101 aa, Helicobacter pylori
  misc_feature (B) LOCATION 1...101
  hypothetical: YES
GFASLTLLVKNSFLDEMGKLYVVSAKAKGCSVGRIFYAHVFRNAILLVVAGFPQAFLGMFFSSSLLIEIVFSLDGLGLLGYESIVIGIIPLCLVRFIFSRF

SEQ ID NO: 5399 - protein, 100 aa, Helicobacter pylori
  misc_feature (B) LOCATION 1...100
  hypothetical: YES
FASLTLLVKNSFLDEMGKLYVVSAKAKGCSVGRIFYAHVFRNAILLVVAGFPQAFLGMFFSSSLLIEIVFSLDGLGLLGYESIVIGIIPLCLVRFIFSRF

SEQ ID NO: 5400 - protein, 185 aa, Helicobacter pylori
  misc_feature (B) LOCATION 1...185
  hypothetical: YES
MIAYILKRLLLIIPTLLAIMTINFFLIQSAPGGPIEQMMAKINNTQSKEIQGVVKERSYRASQGLESDLLENLKKLYGFDKPIGERYLLMLKKYLQFDFGESFYRQIKVIDLIKEKLPVSISLGFFSTLLIYLISIPLGIFKAKRNNEPLDVLSSVVIIVANAIPAFLFAVVLIVFFAGGNYWHW

SEQ ID NO: 5401 - protein, 348 aa, Helicobacter pylori
  misc_feature (B) LOCATION 1...348
  hypothetical: YES
MIAYILKRLLLIIPTLLAIMTINFFLIQSAPGGPIEQMMAKINNTQSKEIQGVVKERSYRASQGLESDLLENLKKLYGFDKPIGERYLLMLKKYLQFDFGESFYRQIKVIDLIKEKLPVSISLGFFSTLLIYLISIPLGIFKAKRNNEPLDVLSSVVIIVANAIPAFLFAVVLIVFFAGGNYWHWFPLKGLVSDNFESLSALGKIKDYLWHITLPVLCISLGGFASLTLLVKNSFLDEMGKLYVVSAKAKGCSVGRIFYAHVFRNAILLVVAGFPQAFLGMFFSSSLLIEIVFSLDGLGLLGYESIVSRDYPVVFGSLYIFTLLGLVASLISDLLCVVIDPRIDFEKR

SEQ ID NO: 5402 - protein, 168 aa, Helicobacter pylori
  misc_feature (B) LOCATION 1...168
  hypothetical: YES
IMAKKKHKIPTLKYFLRSLKQIYRLITFKEKMIFFLLVLMAVFSSFVEVMSLTLLMPFITLASDPSRALDDKDWKMVYDFFHFSSPVRLMYFFSFCLVGIYLFRMFYGVFFTYLRGRFSNKKAYQIKQQLFLQHIKNNYLSHLNHNFGFFKRHYQHVKRRACYEFTLL

SEQ ID NO: 5403 - protein, 377 aa, Helicobacter pylori
  misc_feature (B) LOCATION 1...377
  hypothetical: YES
KGFLGVKKVIVFIKKKGEMVVNSKVQTLKVFSKFFSNFKITKLKDNHEEAHKLFGENSRKAHDTEIIYSTLQVVPRYSIETVGFSLLILAVAYILFKYGEARMVLPTISMYALALYRILPSVTGVISYYNEIAYNQLATNVVFKSLSKTIVEEDLVPLDFNEKITLQNISFAYKSKHPVLKNFNLTIQKGQKIALIGHSGCGKSTLADIIMGLTYPKSGEIFIDNTLLTSENRRSWRKKIGYIPQNIYLFDGTVGDNIAFGSAIDEKRLIKVCKMAHIYDFLCEHEGLKTQVGEGGAKLSGGQKQRIGIARALYDNPEILVLDEATSALDNETESKIMDEIYQIAKNKTLIVIAHRLSTIERCEVIIDMSQHKDNLG

SEQ ID NO: 5404 - protein, 376 aa, Helicobacter pylori
  misc_feature (B) LOCATION 1...376
  hypothetical: YES
GFLGVKKVIVFIKKKGEMVVNSKVQTLKVFSKFFSNFKITKLKDNHEEAHKLFGENSRKAHDTEIIYSTLQVVPRYSIETVGFSLLILAVAYILFKYGEARMVLPTISMYALALYRILPSVTGVISYYNEIAYNQLATNVVFKSLSKTIVEEDLVPLDFNEKITLQNISFAYKSKHPVLKNFNLTIQKGQKIALIGHSGCGKSTLADIIMGLTYPKSGEIFIDNTLLTSENRRSWRKKIGYIPQNIYLFDGTVGDNIAFGSAIDEKRLIKVCKMAHIYDFLCEHEGLKTQVGEGGAKLSGGQKQRIGIARALYDNPEILVLDEATSALDNETESKIMDEIYQIAKNKTLIVIAHRLSTIERCEVIIDMSQHKDNLG

SEQ ID NO: 5405 - protein, 548 aa, Helicobacter pylori
  misc_feature (B) LOCATION 1...548
  hypothetical: YES
MIFFLLVLMAVFSSFVEVMSLTLLMPFITLASDPSRALDDKDWKMVYDFFHFSSPVRLMYFFSFCLVGIYLFRMFYGVFFTYLRGRFSNKKAYQIKQQLFLQHIKNNYLSHLNHNLDSLRDIINNKAEGMFMSFNAFLSLLTEITVIVFFYSTLILTNWKITLVFTTILALQIFFIVKKVTVLIKKKGEMAAKSKAQTLKVFSKFFSNFKITKLKDNHEEAHKLFGENSRKAHDTEIIYSTLQVVPRYSIETVGFSLLILAVAYILFKYGEARMVLPTISMYALALYRILPSVTGVISYYNEIAYNQLATNVVFKSLSKTIVEEDLVPLDFNEKITLQNISFAYKSKHPVLKNFNLTIQKGQKIALIGHSGCGKSTLADIIMGLTYPKSGEIFIDNTLLTSENRRSWRKKIGYIPQNIYLFDGTVGDNIAFGSAIDEKRLIKVCKMAHIYDFLCEHEGLKTQVGEGGAKLSGGQKQRIGIARALYDNPEILVLDEATSALDNETESKIMDEIYQIAKNKTLIVIAHRLSTIERCEVIIDMSQHKDNLG

SEQ ID NO: 5406 - protein, 578 aa, Helicobacter pylori
  misc_feature (B) LOCATION 1...578
  hypothetical: YES
MAKKKHKIPTLKYFLRSLKQIYRLITFKEKMIFFLLVLMAVFSSFVEVMSLTLLMPFITLASDPSRALDDKDWKMVYDFFHFSSPVRLMYFFSFCLVGIYLFRMFYGVFFTYLRGRFSNKKAYQIKQQLFLQHIKNNYLSHLNHNLDSLRDIINNKAEGMFMSFNAFLSLLTEITVIVFFYSTLILTNWKITLVFTTILALQIFFIVKKVTVLIKKKGEMAAKSKAQTLKVFSKFFSNFKITKLKDNHEEAHKLFGENSRKAHDTEIIYSTLQVVPRYSIETVGFSLLILAVAYILFKYGEARMVLPTISMYALALYRILPSVTGVISYYNEIAYNQLATNVVFKSLSKTIVEEDLVPLDFNEKITLQNISFAYKSKHPVLKNFNLTIQKGQKIALIGHSGCGKSTLADIIMGLTYPKSGEIFIDNTLLTSENRRSWRKKIGYIPQNIYLFDGTVGDNIAFGSAIDEKRLIKVCKMAHIYDFLCEHEGLKTQVGEGGAKLSGGQKQRIGIARALYDNPEILVLDEATSALDNETESKIMDEIYQIAKNKTLIVIAHRLSTIERCEVIIDMSQHKDNLG

SEQ ID NO: 5407 - protein, 194 aa, Helicobacter pylori
  misc_feature (B) LOCATION 1...194
  hypothetical: YES
VSLKVMPKDKIALIGPNGVGKSTLCKILVEELKPDTGVVKWGATVLKGYFPQNVSEEISGEETLYQWLFNFNKKIESAEVRNALGRMLFNGEEQEKCVNALSGGEKHRMVLSKLMLEGGNFLVLDEPTNHLDLEAIIALGEALFKFDGALICVSHDRELIDAYANRIIELVPSPKGASIIDFKGSYEEYLASKK

SEQ ID NO: 5408 - protein, 309 aa, Helicobacter pylori
  misc_feature (B) LOCATION 1...309
  hypothetical: YES
LDLDFHSVREFSGNYDDWYIASTLIAKQQEAERNKKLKEKEELEKFIARFSANASKAKQATSRQKQLDKLDIQSLAISSRRDPSIIFKPKRTIGNEALECENISKSYDDQIVLNQVSLKVMPKDKIALIGPNGVGKSTLCKILVEELKPDTGVVKWGATVLKGYFPQNVSEEISGEETLYQWLFNFNKKIESAEVRNALGRMLFNGEEQEKCVNALSGGEKHRMVLSKLMLEGGNFLVLDEPTNHLDLEAIIALGEALFKFDGALICVSHDRELIDAYANRIIELVPSPKGASIIDFKGSYEEYLASKK

SEQ ID NO: 5409 - protein, 289 aa, Helicobacter pylori
  misc_feature (B) LOCATION 1...289
  hypothetical: YES
MLAFLKTPRNSAFALGIFVGALLFYWCALRLSHSDFTYLLPLIIVLVALVYGVLFYLLLYFENPYFRLLSFLGSSFIHPFGFDWLVPDSFFSYSVFRVDKLSLGLIFLACIFLSAQNLKKYRMIGVLLLLGALDFHFFKISDLKEVGNIELVSTRTPQDLKFDSNYLNNIENNILKEIKLAQSKQKTLIVFPETAYPIALENSPFKTQLEDLSDKIAILIGTLRAQGYSLYNSSFLFSKKSVQIADKVILAPFGEIMPLPEFLQKPLEKLFFARALIYTATLPISAILH

SEQ ID NO: 5410 - protein, 395 aa, Helicobacter pylori
  misc_feature (B) LOCATION 1...395
  hypothetical: YES
SLWVENPILLSHSQVYSPPRCWVFKTPRNSAFALGFFVGALLFYWCALRLSHSDFTYLLPLIIVLVALVYGVLFYLLLYFENPYFRLLSFLGSSFIHPFGFDWLVPDSFFSYSVFRVDKLSLGLIFLACIFLSAQNLKKYRMIGVLLLLGALDFHFFKISDLKEVGNIELVSTRTPQDLKFDSNYLNNIENNILKEIKLAQSKQKTLIVFPETAYPIALENSPFKTQLEDLSAKIAILIGTLRAQGYSLYNSSFLFSKKSVQIADKVILAPFGEIMPLPEFLQKPLEKLFFGESAYLYRNAPHFSDFTLDDFTFRPLICYEGTSKPAYSSSPSKVFILMSNNAWFSPSIEPTLQRTLLKYYARRYDKIILHSANFSTSYILSPSLLGDILFRKRS

SEQ ID NO: 5411 - protein, 425 aa, Helicobacter pylori
  misc_feature (B) LOCATION 1...425
  hypothetical: YES
MRLILFNRNAFLLACMFVSSVYANAVLDAYAVENPYITITLTSLLAPLSMLAFLKTPRNSAFALGFFVGALLFYWCALSFRYSDFTYLLPLIIVLVALVYGVLFYLLLYFENPYFRLLSFLGSSFIHPFGFDWLVPDSFFSYSVFRVDKLSLGLIFLACIFLSAQNLKKYRMIGVLLLLGALDFHFFKISDLKEVGNIELVSTRTPQDLKFDSNYLNNIENNILKEIKLAQSKQKTLIVFPETAYPIALENSPFKTQLEDLSDKIAILIGTLRAQGYSLYNSSFLFSKKSVQIADKVILAPFGEIMPLPEFLQKPLEKLFFGESAYLYRNAPHFSDFTLDDFTFRPLICYEGTSKPAYSSSPSKVFILMSNNAWFSPSIEPTLQRTLLKYYARRYDKIILHSANFSTSYILSPSLLGDILFRKRS

SEQ ID NO: 5412 - protein, 213 aa, Helicobacter pylori
  misc_feature (B) LOCATION 1...213
  hypothetical: YES
MIKAIDISHAFEKPLYNGVNLRIKPKESLAILGVSGSGKSTLLSHLATMLKPDSGTVSLLEHQDIYALNSKKLLELRRLKVGIVFQSHYLFKGFSALENLQVASILAKQEINHSLLEQLGIAHTLKQGVGELSGGQQQRLSIARVLSKKPQIIIADEPTGNLDTTSANQVISMLQNYITENEGALVLATHDEHLAFTCSQVYRLEKESLIKEK

SEQ ID NO: 5413 - protein, 213 aa, Helicobacter pylori
  misc_feature (B) LOCATION 1...213
  hypothetical: YES
MIKAIDISHDFEKPLYNGVNLRIKPKESMEILGVSGSGKSTLISHLATMLKPDSGTVSLLEHQDIYALNSKKLLELRRLKVGIVFQSHYLFKGFSALENLQVASILAKQEINHSLLEQLGIAHTLKQGVGELSGGQQQRLSIARVLSKKPQIIIADEPTGNLDTTSANQVISMLQNYITENEGALVLATHDEHLAFTCSQVYRLEKESLIKEK

SEQ ID NO: 5414 - protein, 216 aa, Helicobacter pylori
  misc_feature (B) LOCATION 1...216
  hypothetical: YES
ETIMIKAIDISHAFEKPLYNGVNLRIKPKESLAILGVSGSGKSTLLSHLATMLKPDSGTVSLLEHQDIYALNSKKLLELRRLKVGIVFQSHYLFKGFSALENLQVASILAKQEINHSLLEQLGIAHTLKQGVGELSGGQQQRLSIARVLSKKPQIIIADEPTGNLDTTSANQVISMLQNYITENEGALVLATHDEHLAFTCSQVYRLEKESLIKEK

SEQ ID NO: 5415 - protein, 317 aa, Helicobacter pylori
  misc_feature (B) LOCATION 1...317
  hypothetical: YES
LLYFLAIYPICLAYGVGITNVFDHFFTNQLHLAPFHRGLLAVALVSLMMLVMVFNATIVTRICNALVYPLCLILLLFSLYLIPYWQGANLFVVPSFKEFVLAIWLTLPVLVFSFNHSPIISTFTQNVGKEYGAFKEYKLNQIELGTSLMLLGFVMFFVFSCVMCLNADDFVKAREQNIPILSYFANTLNNPLINYAGPVVAFLAIFSSFFGHYYGAKEGLEGIIIQSLKLKQASKTLSVGVTIFLWLTITLVAYINPNILDFIENLGGPIIALILFVMPMIAFYSVSSLKRFRNFKVDIFVFVFGSLTALSVFLGLF

SEQ ID NO: 5416 - protein, 174 aa, Helicobacter pylori
  misc_feature (B) LOCATION 1...174
  hypothetical: YES
QGLSGVLYAFFAGERQTICFIFGLVYNLSYAYVAYQWKLNADVILCLFLYMPVTIYGLFAWKKTEQHEGVIKAQKLPKNWRFALVLGVGVLTYASALFFKEIKTNFLWAESFNFVIFIIAFILQVLRYVENYALVTLENIVSIIVWFCIFQISTEQFGATLHNDSIPFYWLVLF

SEQ ID NO: 5417 - protein, 220 aa, Helicobacter pylori
  misc_feature (B) LOCATION 1...220
  hypothetical: YES
MLITTQLSKRFYATLILACVFLTITNILVKGSFINLLAGLSGVLYAFFAGERQTICFIFGLVYNLSYAYVAYQWKLNADVILCLFLYMPVTIYGLFAWKKTEQHEGVIKAQKLPKNWRFALVLGVGVLTYASALFFKEIKTNFLWAESFNFVIFIIAFILQVLRYVENYALVTLGNIVSIIVWFCIFQISTESLVQLFTTILYLFIGLYYFNRWNQSCKQ

SEQ ID NO: 5418 - protein, 98 aa, Helicobacter pylori
  misc_feature (B) LOCATION 1...98
  hypothetical: YES
VKKVESMNVVPFIDIMLVLLVIVLTTASFVQTSKLPISIPQVDKDSTDSKDVLDKKQVTIAISNKGSFYFDDKEISFENLKHKVSTLAKDTPIVFARR

SEQ ID NO: 5419 - protein, 118 aa, Helicobacter pylori
  misc_feature (B) LOCATION 1...118
  hypothetical: YES
AVKKVESMNVVPFIDIMLVLLVIVLTTASFVQTSKLPISIPQVDKDSTDSKDVLDKKQVTIAISNKGSFYFDDKEISFENLKHKVSTLAKDTPIVLQGDKKSNLDNFIKVVDLLQLTI

SEQ ID NO: 5420 - protein, 133 aa, Helicobacter pylori
  misc_feature (B) LOCATION 1...133
  hypothetical: YES
VKKVESMNVVPFIDIMLVLLVIVLTTASFVQTSKLPISIPQVDKDSTDSKDVLDKKQVTIAISNKGSFYFDDKEISFENLKHKVSTLAKDTPIVLQGDKKSNLDNFIKVVDLLQTNNLKQLYILVEDKKNQKN

SEQ ID NO: 5421 - protein, 115 aa, Helicobacter pylori
  misc_feature (B) LOCATION 1...115
  hypothetical: YES
IDGGMTKRVGIARAMATNPEILFLDEPTSGLDPYSAGKFDELIMTLKESLQLTVVMITHDLDSVHDCVDRFIMLKDGLLEFNGDLKDFIKKAQTQGLDEGNLFNSTRGEKFWKGM

SEQ ID NO: 5422 - protein, 261 aa, Helicobacter pylori
  misc_feature (B) LOCATION 1...261
  hypothetical: YES
MNATNNQVLIEVKDLHSAFGSTIIHRGVSFSVHKGEVMAILGGSGSGKSTLLRCMILLNRPTKGEVLLFGEDIWKLKEAEQQKIFNRCGICFQFGALYSSLTVLENVGVMLEQYGAYSKKIVEEISKMWIERVGLPPRAYHLYPYELSGGMTKRVGIARAMATNPEILFLDEPTSGLDPYSAGKFDELIMTLKESLQLTVVMITHDLDSVHDCVDRFIMLKDGLLEFNGDLKDFIKKAQTQGLDEGNLFNSTRGEKFWKGM

SEQ ID NO: 5423 - protein, 112 aa, Helicobacter pylori
  misc_feature (B) LOCATION 1...112
  hypothetical: YES
LHRQAQVRISLTQTTTLVATIGSNAPYIGLLGTVMGIMLTFMDLGSASGIDTKAIMTNLALALKATGMGLLVAIPAIVIYNLLVRKSEILVTKWDIFHHPVDTQSHEVYSKA

SEQ ID NO: 5424 - protein, 114 aa, Helicobacter pylori
  misc_feature (B) LOCATION 1...114
  hypothetical: YES
MXTHDRRKLRIXLTQTTTLVATIGSNAPYIGLLGTVMGIMLTFMDLGSASGIDTKAIMTNLALALKATGMGLLVAIPAIVIYNLLVRKSEILVTKWDIFHHPVDTQSHEVYSKA

SEQ ID NO: 5425 - protein, 150 aa, Helicobacter pylori
  misc_feature (B) LOCATION 1...150
  hypothetical: YES
MKEMVDYGIIGFLIFLSVIVIAIAIERLWFFATLRVDDYTDRRKLELALHKRLTLVATIGSNAPYIGLLGTVMGIMLTFMDLGSASGIDTKAIMTNLALALKATGMGLLVAIPAIVIYNLLVRKSEILVTKWDIFHHPVDTQSHEVYSKA

SEQ ID NO: 5426 - protein, 89 aa, Helicobacter pylori
  misc_feature (B) LOCATION 1...89
  hypothetical: YES
TLKGIVLFRLISAWVLQDKFLFVVCFILPFCLGVLGTQIFKQETPRQLPIVVVDLDKTTTSHQVAFELGATSAVEIKYQVTSLSEAKRF

SEQ ID NO: 5427 - protein, 284 aa, Helicobacter pylori
  misc_feature (B) LOCATION 1...284
  hypothetical: YES
TLLNSAEVYGALILPKDLERKIKMGRKVDLSFYYNAEYVLVGKTLKNAFLQTALTLDAKTLATKALVRDSNLISAKAQAMPIVLQLHALYNEENNYTQYLLSVMLPCMWLIFIAIGMLNFIQKTSNMRELLISIVANVCVFSFWGMGMAFYFNLIGMEGNYAHLSLVFLAVVLMTLIMSGFVVLVYGVSKSAIETAGAIGVYTAPSFAFAGVTYPQNNMEIFGSFWSHCLPISHFMRFFLQEAYYKMDFTESLNSLMPLLFFLIFLALGLLVFYFSFKKDKASA

SEQ ID NO: 5428 - protein, 365 aa, Helicobacter pylori
  misc_feature (B) LOCATION 1...365
  hypothetical: YES
LFRLISAWVLQDKFLFVVCFILPFCLGVLGTQIFKQETPRQLPIVVVDLDKTTTSHQVAFELGATSAVEIKYQVTSLSEAKRFLNSAEVYGALILPKDLERKIKMGRKVDLPFYYNAEYVLVGKTLKNAFLQTALTLDAKTLATKALVRDSNLISAKAQAMPIVLQLHALYNEENNYTQYLLSVMLPCMWLIFIAIGMLNFIQKTSNMRELLISIVANVCVFSFWGMGMAFYFNLIGMEGNYAHLSLVFLAVVLMTLIMSGFVVLVYGVSKSAIETAGAIGVYTAPSFAFAGVTYPQNNMEIFGSFWSHCLPISHFMRFFLQEAYYKMDFTESLNSLMPLLFFLIFLALGLLVFYFSFKKDKASA

SEQ ID NO: 5429 - protein, 133 aa, Helicobacter pylori
  misc_feature (B) LOCATION 1...133
  hypothetical: YES
MERKTLQSILCLIKKEMMRPKGILMNCCRTWKHQVLKQSTTGLVVLSIISSTAPFIGLFGTVVEILEAFNNLGALGQASFGVIAPIISKALIATAAGILAAIPAYSFYLILKRKVYDLSVYVQMQVDILSSKK

SEQ ID NO: 5430 - protein, 189 aa, Helicobacter pylori
  misc_feature (B) LOCATION 1...189
  hypothetical: YES
MFDSIVYFFNKSGFVTTLVLVWISLYLVMTLWVFLYKSIVLKIELRREMQSLSNILNGAQDAPEHFMFNKKRNDETKRYSNELLQAWKHQVLKQSTTGLVVLSIISSTAPFIGLFGTVVEILEAFNNLGALGQASFGVIAPIISKALIATAAGILAAIPAYSFYLILKRKVYDLSVYVQMQVDILSSKK

SEQ ID NO: 5431 - protein, 205 aa, Helicobacter pylori
  misc_feature (B) LOCATION 1...205
  hypothetical: YES
RSLACWLRLSLFKGIIMFDSIVYFFNKSGFVTTLVLVWISLYLVMTLWVFLYKSIVLKIELRREMQSLSNILNGAQDAQSILCLIKKEMMRPKGILMNCCRAWKHQVLKQSTTGLVVLSIISSTAPFIGLFGTVVEILEAFNNLGALGQASFGVIAPIISKALIATAAGILAAIPAYSFYLILKRKVYDLSVYVQMQVDILSSKK

SEQ ID NO: 5432 - protein, 139 aa, Helicobacter pylori
  misc_feature (B) LOCATION 1...139
  hypothetical: YES
DKKILLIIQGKFMEFHQVYDPLGHIWLSALVALSPIALFFISLIVFKLKGYSAGFLSLALSILIALFVYKMPVQMVSASFFYGFLYGLWPIAWIVIAAIFLYNLSVKSGYFEILKESVQSITLDHRILVILIGFCLAHF

SEQ ID NO: 5433 - protein, 309 aa, Helicobacter pylori
  misc_feature (B) LOCATION 1...309
  hypothetical: YES
MEFYQVYDPLGHIWLSALVALSPIALFFISLIVFKLKGYSAGFLSLALSILIALFVYKMPVQMVSASFFYGFLYGLWPIAWIVIAAIFLYNLSVKSGYFEILKESILSLTPDHRILVILIGFCFGSFLEGAIGFGGPVAITAAILVGLGLNPLYAAGLCLIANTAPVAFGAVGIPITAMASVVGIPELEISQMVGRVLPIFSIGIPFFIVFLMDGFRGIRETFPAVAVTGFSFAIAQFLSSNYLGPQLPDIISALVSLVATTLFLKFWQPKHIFTSNGKEPTISTEKHHICKVLVAWMPFVLLTNYDYH

SEQ ID NO: 5434 - protein, 457 aa, Helicobacter pylori
  misc_feature (B) LOCATION 1...457
  hypothetical: YES
MEFYQVYDPLGHIWLSALVALSPIALFFISLIVFKLKGYSAGFLSLALSILIALFVYKMPVQMVSASFFYGFLYGLWPIAWIVIAAIFLYNLSVKSGYFEILKESILSLTPDHRILVILIGFCFGSFLEGAIGFGGPVAITAAILVGLGLNPLYAAGLCLIANTAPVAFGAVGIPITAMASVVGIPELEISQMVGRVLPIFSIGIPFFIVFLMDGFRGIRETFPAVAVTGFSFAIAQFLSSNYLGPQLPDIISALVSLVATTLFLKFWQPKHIFTSNGKEPTISTEKHHICKVVVAWMPFVLLTITIIIWTQPWFKALFKEGGALAFSNFAFEFNSISQKIFKTVPIVTEATNFPVVFKLPLILTTGTSIFLAALLSVFLLRVKISDAIGVFGATLKEMRLPILTIGVVLAFAYVANYSGMSATLALALADTGHVFTFFSPVVGWLGVFLTGSDTKF

SEQ ID NO: 5435 - protein, 158 aa, Helicobacter pylori
  misc_feature (B) LOCATION 1...158
  hypothetical: YES
MKEIVTIENVSFNYHNRAIFKDFNLSIQEGDFLCVLGESGSGKSTLLGLILGLLKPSLGSVKIFNETLSNNAFLRQKIGYIAQGNSLFPHLNALQNMTFCLNLQGINKQAAQKEAKALALKMGLDESLMDKFPNELSGGQAKEWALLGGLSTGQNSFY

SEQ ID NO: 5436 - protein, 216 aa, Helicobacter pylori
  misc_feature (B) LOCATION 1...216
  hypothetical: YES
MKEIVTIENVSFNYHNRAIFKDFNLSIQEGDFLCVLGESGSGKSTLLGLILGLLKPSLGSVKIFNETLSNNAFLRQKIGYIAQGNSLFPHLNALQNMTFCLNLQGINKQAAQKEAKALALKMGLDESLMDKFPNELSGGQAQRVGIIRGIIHRPELILLDEPFSALDSLNRKNLQDLIKEIHQNSCATFIMVTHDENEAQKLATKTLEIKALKQEQ

SEQ ID NO: 5437 - protein, 226 aa, Helicobacter pylori
  misc_feature (B) LOCATION 1...226
  hypothetical: YES
RFFRKHRVISMKEIVTIENVSFNYHNRAIFKDFNLSIQEGDFLCVLGESGSGKSTLLGLILGLLKPSLGSVKIFNETLSNNAFLRQKIGYIAQGNSLFPHLNALQNMTFCLNLQGINKQAAQKEAKALALKMGLDESLMDKFPNELSGGQAQRVGIIRGIIHRPELILLDEPFSALDSLNRKNLQDLIKEIHQNSCATFIMVTHDENEAQKLATKTLEIKALKQEQ

SEQ ID NO: 5438 - protein, 174 aa, Helicobacter pylori
  misc_feature (B) LOCATION 1...174
  hypothetical: YES
MALLEIIHYPSKILRTISKEVVSFDSKLHQQLDDMHETMIASEGIGLAAIQVGLPLRMLIINLPQEDGVQHKEDCLEIINPKWIETKGSIMYREGCLSVPGFYEEVERFEKVKIEYQNRFAEVKILEASELLAVAIQHEIDHLNGVLFVDKLSILKRKKFEKELKELQKKQKHK

SEQ ID NO: 5439 - protein, 177 aa, Helicobacter pylori
  misc_feature (B) LOCATION 1...177
  hypothetical: YES
SDCMALLEIIHYPSKILRTISKEVVSFDSKLHQQLDDMHETMIASEGIGLAAIQVGLPLRMLIINLPQEDGVQHKEDCLEIINPKWIETKGSIMYREGCLSVPGFYEEVERFEKVKIEYQNRFAEVKILEASELLAVAIQHEIDHLNGVLFVDKLSILKRKKFEKELKELQKKQKHK

SEQ ID NO: 5440 - protein, 186 aa, Helicobacter pylori
  misc_feature (B) LOCATION 1...186
  hypothetical: YES
VVSGVVIIIVFFVPILTLQGLEGKMFRPLAQSIVYALLGTLVLSITIIPVVSSLVLKATPHSETFLTRFLNRIYAPLLEFFVHNPKKVILGAFVFLIASLSLFPFVGKNFMPALDEGDVVLSVETTPSISLDQSKDLMLNIESAIKKHVKEVKSIVARTGSDELGLDLGGLNQTDTFISFIPKKEW

SEQ ID NO: 5441 - protein, 221 aa, Helicobacter pylori
  misc_feature (B) LOCATION 1...221
  hypothetical: YES
IKPILLFLSSLKKNGALKPKMNWLEKIMDSLKDFKGINFSFTQPIEMRISEMLTGVRGDLAVKIFGDDISELNELSFQIAQALKGIKGSSEVLTTLNEGVNYLYVTPNKESMADVGITSNEFSKFLKSALEGLVVDVIPTGISRTPVMIRQESDFASSITKVKSLALTSKYGVLVPITSIAQIEDMDGPCSIVREHSMRMSVVPTTVVWLYLSLLYNTLSK

SEQ ID NO: 5442 - protein, 254 aa, Helicobacter pylori
  misc_feature (B) LOCATION 1...254
  hypothetical: YES
VYAGLAIAIGMLIDSSVVVVENAFEKLSANTKTTKLHAIYRSCKEIAVSVVSGVVIIIVFFVPILTLQGLEGKMFRPLAQSIVYALLGTLVLSITIIPVVSSLVLKATPHSETFLTRFLNRIYAPLLEFFVHNPKKVILGAFVFLIASLSLFPFVGKNFMPALDEGDVVLSVETTPSISLDQSKDLMLNIESAIKKHVKEVKSIVARTGSDELGLDLGGLNQTDTFISFIPKKEWSVKTKDELVRKNHGFFKRL

SEQ ID NO: 5443 - protein, 355 aa, Helicobacter pylori
  misc_feature (B) LOCATION 1...355
  hypothetical: YES
QRGSGVIDRVKRHDQQFRGRIMLASIIEFSLRQRIIVIVGAILVLFFGTYSFINTPVDAFPDISPTQVKIILKLPGSSPEEMENNIVRPLELELLGLKGQKSLRSISKYSISDITIDFDDSVDIYLARNIVNERLSSVMKDLPVGVEGGMAPIVTPLSDIFMFTIDGNITEIEKRQLLDFVIRPQLRMISGVADVNSIGGFSRAFVIVPDFNDMARLGVSISDLEAAVRVNLRNSGAGRVDRDGETFLVKIQTASLSLEDIGKITISTNLGHLHIKDFAKVISQSRTRLGFVTKDGVGETTEGLVLSLKDANTKEIITQVYQKLEELKPFLPSGVSINVFYDPQKSRQKASAPVS

SEQ ID NO: 5444 - protein, 1019 aa, Helicobacter pylori
  misc_feature (B) LOCATION 1...1019
  hypothetical: YES
MLASIIEFSLRQRIIVIVGAILVLFFGTYSFINTPVDAFPDISPTQVKIILKLPGSSPEEMENNIVRPLELELLGLKGQKSLRSISKYSISDITIDFDDSVDIYLARNIVNERLSSVMKDLPVGVEGGMAPIVTPLSDIFMFTIDGNITEIEKRQLLDFVIRPQLRMISGVADVNSIGGFSRAFVIVPDFNDMARLGVSISDLEAAVRVNLRNSGAGRVDRDGETFLVKIQTASLSLEDIGKITISTNLGHLHIKDFAKVISQSRTRLGFVTKDGVGETTEGLVLSLKDANTKEIITQVYQKLEELKPFLPSGVSINVFYDRSEFTQKAIATVSKTLIEAVVLIIITLFLFLGNLRASVAVGVILPLSLSVAFIFIKISDLTLNLMSLGGLVIAIGMLIDSSVVVVENAFEKLSANTKTTKLHAIYRSCKEIAVSVVSGVVIIIVFFVPILTLQGLEGKMFRPLAQSIVYALLGTLVLSITIIPVVSSLVLKATPHSETFLTRFLNRIYAPLLEFFVHNPKKVILGAFVFLIASLSLFPFVGKNFMPALDEGDVVLSVETTPSISLDQSKDLMLNIESAIKKHVKEVKSIVARTGSDELGLDLGGLNQTDTFISFIPKKEWSVKTKDELLEKIMDSLKDFKGINFSFTQPIEMRISEMLTGVRGDLAVKIFGDDISELNELSFQIAQALKGIKGSSEVLTTLNEGVNYLYVTPNKESMADVGITSNEFSKFLKSALEGLVVDVIPTGISRTPVMIRQESDFASSITKIKSLALTSKYGVLVPITSIAKIEEVDGPVSIVRENSMRMSVVRSNVVGRDLNSFVEEAKKVIAQNIKLPPSYYITYGGQFENQQRANKRLSTVIPLSILAIFFILFFTFKSIPLALLILLNIPFAVTGGLIALFAVGEYISVPASVGFIALFGIAVLNGVVMIGYFKELLLQGKSVEECVLLGAKRRLRPVLMTACIAGLGLLPLLFSHSVGSEVQKPLAIVVLGGLVTSSALTLLLLPPMFMLIAKKIKIV

SEQ ID NO: 5445 - protein, 60 aa, Helicobacter pylori
  misc_feature (B) LOCATION 1...60
  hypothetical: YES
MPINPLYLFPNLFTASSIFLGMMSIFYASSYQFVMACWLVVASLILDGLDGRVARLTKHH

SEQ ID NO: 5446 - protein, 237 aa, Helicobacter pylori
  misc_feature (B) LOCATION 1...237
  hypothetical: YES
MPINPLYLFPNLFTASSIFLGMMSIFYASSYQFVMACWLVVASLILDGLDGRVARLTNTTSKFGIEFDSLADVVAFGVAPSLITYFYVGYNFGRIGMAVSALFVIFGAIRLARFNISTNTSDPYSFIGIPIPAAAVLVVLCVLLDNKYHFLEGNTEKLFLGFIVLLGVLMVSNIRYPNFKKVKWNLKLFILVLIFLSLVFVRPLEALSVFMGLYLIYGIIRWIFLMVKIIFNKNKSA

SEQ ID NO: 5447 - protein, 241 aa, Helicobacter pylori
  misc_feature (B) LOCATION 1...241
  hypothetical: YES
KESLMPINPLYLFPNLFTASSIFLGMMSIFYASSYQFVMACWLVVASLILDGLDGRVARLTNTTSKFGIEFDSLADVVAFGVAPSLITYFYVGYNFGRIGMAVSALFVIFGAIRLARFNISTNTSDPYSFIGIPIPAAAVLVVLCVLLDNKYHFLEGNTEKLFLGFIVLLGVLMVSNIRYPNFKKVKWNLKLFILVLIFLSLVFVRPLEALSVFMGLYLIYGIIRWIFLMVKITFNKNKSA

SEQ ID NO: 5448 - protein, 122 aa, Helicobacter pylori
  misc_feature (B) LOCATION 1...122
  hypothetical: YES
VLGGNIASAGPLGTLIAYCFEGLVVYCIMLSLGELASVYPTTGSFGDYAAKFIALGTGYMVFWMYWLGWVITVALEYIAIGMLMQRWFVNIPIHYWVISCIALVFLLNFFSVKIFAEGEFLC

SEQ ID NO: 5449 - protein, 152 aa, Helicobacter pylori
  misc_feature (B) LOCATION 1...152
  hypothetical: YES
FMGCPNKRCFLKFFPNSTDKATPTYAMFFSLSFSLIGLLVQIYAKENVVEALINVISFTVIIVWVSVSISQYSFRKQYLKAGHSLEDLPYKAPFLPFLQLIGITGCIIGVIGSAMDKDQRIGMILTIVFAVVCYIGYYFTQKANENNKKDLI

SEQ ID NO: 5450 - protein, 225 aa, Helicobacter pylori
  misc_feature (B) LOCATION 1...225
  hypothetical: YES
LCFFFLSSVFVISVFLPMSDSSIAQSPFVSVLERINLPFIGMGIPYVADIMNAVIITAMFSTANSGLYGASRMIYGLSKQKMFFKVFSQLNRQGTPTYAMFFSLSFSLIGLLVQIYAKENVVEALINVISFTVIIVWVSVSISQYSFRKQYLKAGHSLEDLPYKAPFLPFLQLIGITGCIIGVIGSAMDKDQRIGMILTIVFAVVCYIGYYFTQKANENNKKDLI

SEQ ID NO: 5451 - protein, 237 aa, Helicobacter pylori
  misc_feature (B) LOCATION 1...237
  hypothetical: YES
MEHQNTTQKQGELKRDMKMRHLLMIAFGGAIGTGLFVGTGGNIASAGPLGTLIAYCFGGLVVYCIMLSLGELASVYPTTGSFGDYAAKFIGPGTGYMVFWMYWLGWVITVALEYIAIGMLMQRWFVNIPIHYWVISCIALVFLLNFFSVKIFAEGEFFFSLIKVLAVIAFISIGVIGIIYQIYLHGFSSIFDNFHFGDKGFFPNGSEAVFNAMLAVIFAFTGTEVIGVDVRERQDAG

SEQ ID NO: 5452 - protein, 475 aa, Helicobacter pylori
  misc_feature (B) LOCATION 1...475
  hypothetical: YES
MEHQNTTQKQGELKRDMKMRHLLMIAFGGAIGTGLFVGTGGNIASAGPLGTLIAYCFGGLVVYCIMLSLGELASVYPTTGSFGDYAAKFIGPGTGYMVFWMYWLGWVITVALEYIAIGMLMQRWFVNIPIHYWVISCIALVFLLNFFSVKIFAEGEFFFSLIKVLAVIAFISIGVIGIIYQIYLHGFSSIFDNFHFGDKGFFPNGSEAVFSAMLAVIFAFTGTEVIGVAVGETKNASEVMPKAIKATLWRIVFFFLGSVFVISVFLPMSDSSIAQSPFVSVLERINLPFIGMGIPYVADIMNAVIITAMFSTANSGLYGASRMIYGLSKQKMFFKVFSQLNRQGTPTYAMFFSLSFSLIGLLVQIYAKENVVEALINVISFTVIIVWVSVSISQYSFRKQYLKAGHSLEDLPYKAPFLPFLQLIGITGCIIGVIGSAMDKDQRIGMILTIVFAVVCYIGYYFTQKANENNKKDLI

SEQ ID NO: 5453 - protein, 73 aa, Helicobacter pylori
  misc_feature (B) LOCATION 1...73
  hypothetical: YES
FVTRMIKTTALVSLIGAVDLLKVGQQIIELNLLRMPNASFVVYGVILMFYFTLCYSLSLYSSYLEKKFQYIRG

SEQ ID NO: 5454 - protein, 164 aa, Helicobacter pylori
  misc_feature (B) LOCATION 1...164
  hypothetical: YES
SVLLKRKWLKMGVLLELDNLKRLLEGFETTLLIALSSAIISIVVGMLLGSLMAFGSKIMVLACRVYLESIRIIPLLAWLFIVYFGLASWFDLHISAVLASVIVFSLWGGAEMMDLTRGVLTSVSKHQVESALALGLDSKKVIFNVIFPQSFLSLLPSSLNLSRA

SEQ ID NO: 5455 - protein, 223 aa, Helicobacter pylori
  misc_feature (B) LOCATION 1...223
  hypothetical: YES
MGVLLELDNLKRLLEGFETTLLIALSSAIISIVVGMLLGSLMAFGSKIMVLACRVYLESIRIIPLLAWLFIVYFGLASWFDLHISAVLASVIVFSLWGGAEMMDLTRGVLTSVSKHQVESALALGLDSKKVIFNVIFPQSFLSLLPSSLNLFTRMIKTTALVSLIGAVDLLKVGQQIIELNLLRMPNASFVVYGVILMFYFTLCYSLSLYSSYLEKKFQYIRG

SEQ ID NO: 5456 - protein, 225 aa, Helicobacter pylori
  misc_feature (B) LOCATION 1...225
  hypothetical: YES
KKNSNTLEGKMSAILETKGLKKTYQNHLVLDGINFTLNKGEVAVILGPSGCGKSTFLKCLNGLEKIDEGEILFENTNLNTPSTNWNQMRQKIGMVFQNYELFPHLNVLDNILLAPLKVQKRSKDEVLSQAVELLKRVGLEHKQQAYPKELSGGQKQRVAIVRSLCMRPKIMLFDEVTASLDPEMVKEVLEVILELAKTGMSMVIVTHEMKFAQKIASKIVFFDSG

SEQ ID NO: 5457 - protein, 248 aa, Helicobacter pylori
  misc_feature (B) LOCATION 1...248
  hypothetical: YES
MSAILETKGLKKTYQNHLVLDGINFTLNKGEVAVILGPSGCGKSTFLKCLNGLEKIDEGEILFENTNLNTPSTNWNQMRQKIGMVFQNYELFPHLNVLDNILLAPLKVQKRSKDEVLSQAVELLKRVGLEHKQQAYPKELSGGQKQRVAIVRSLCMRPKIMLFDEVTASLDPEMVKEVLEVILELAKTGMSMVIVTHEMKFAQKIASKIVFFDSGKIAEENSAKEFFNHPKSQRAQKFLETFHFLGSC

SEQ ID NO: 5458 - protein, 52 aa, Helicobacter pylori
  misc_feature (B) LOCATION 1...52
  hypothetical: YES
MPKSFTLPTFVWCLFVGVILRNALSFFKIHSVFDREVSVIGNVSLSLFLAYA

SEQ ID NO: 5459 - protein, 408 aa, Helicobacter pylori
  misc_feature (B) LOCATION 1...408
  hypothetical: YES
LQEIKLDIYATLVCMVLVLLLGRYVISKVKFLRDYDIPEPVVGGVLVAFFIMLARQFYHFGLQFDSSLKDPLMLTFFITIGLSADFKSLQKGGKMLAVFLLAVAGFVVCQNAVGISIASLLGVNPLMGLLGGSIALVGGHGTSAAWANFFTQPPYHFSSSLEVGMACATFGLVSGGIIGGPVAKYLISKYKLEPKDTKEKDTLEGVVSKGFETPKEQRLITASSFVETLALIAIALLVGTFLSHLMPKSFTLPTFVWCLFVGVILRNALSFFKIHSVFDREVSVIGNVSLSLFLAYALMSVNLLELLKLAVPLAVILSVQVAVMILYVVLVTFRVCGKDYDAAVLCAGHCGFGLGATPTAMVNMQTITNHYGPSHVAFIVVPLVGAFFVDIINALAIKGFLLLPFFPS

SEQ ID NO: 5460 - protein, 415 aa, Helicobacter pylori
  misc_feature (B) LOCATION 1...415
  hypothetical: YES
LINKDTGLQEIKLDIYATLVCMVLVLLLGRYVISKVKFLRDYDIPEPVVGGVLVAFFIMLARQFYHFGLQFDSSLKDPLMLTFFITIGLSADFKSLQKGGKMLAVFLLAVAGFVVCQNAVGISIASLLGVNPLMGLLGGSIALVGGHGTSAAWANFFTQPPYHFSSSLEVGMACATFGLVSGGIIGGPVAKYLISKYKLEPKDTKEKDTLEGVVSKGFETPKEQRLITASSFVETLALIAIALLVGTFLSHLMPKSFTLPTFVWCLFVGVILRNALSFFKIHSVFDREVSVIGNVSLSLFLAYALMSVNLLELLKLAVPLAVILSVQVAVMILYVVLVTFRVCGKDYDAAVLCAGHCGFGLGATPTAMVNMQTITNHYGPSHVAFIVVPLVGAFFVDIINALAIKGFLLLPFFPS

SEQ ID NO: 5461 - protein, 429 aa, Helicobacter pylori
  misc_feature (B) LOCATION 1...429
  hypothetical: YES
SRSFRGLLYYNKINLINKDTGLQEIKLDIYATLVCMVLVLLLGRYVISKVKFLRDYDIPEPVVGGVLVAFFIMLARQFYHFGLQFDSSLKDPLMLTFFITIGLSADFKSLQKGGKMLAVFLLAVAGFVVCQNAVGISIASLLGVNPLMGLLGGSIALVGGHGTSAAWANFFTQPPYHFSSSLEVGMACATFGLVSGGIIGGPVAKYLISKYKLEPKDTKEKDTLEGVVSKGFETPKEQRLITASSFVETLALIAIALLVGTFLSHLMPKSFTLPTFVWCLFVGVILRNALSFFKIHSVFDREVSVIGNVSLSLFLAYALMSVNLLELLKLAVPLAVILSVQVAVMILYVVLVTFRVCGKDYDAAVLCAGHCGFGLGATPTAMVNMQTITNHYGPSHVAFIVVPLVGAFFVDIINALAIKGFLLLPFFPS

SEQ ID NO: 5462 - protein, 140 aa, Helicobacter pylori
  misc_feature (B) LOCATION 1...140
  hypothetical: YES
NTGKKGRLVTTEGPCITSKTALTCPNSPLAFAIFTIIASIGTGNMTQSNAVSSILSEQANLPNWVSGLLLTLLTAVIVIGGIKSIGKFTSYLAPVMVLLYLIAIIYIIVSHFDLALQAIKLIFEEAFNPKPVVAERAARW

SEQ ID NO: 5463 - protein, 149 aa, Helicobacter pylori
  misc_feature (B) LOCATION 1...149
  hypothetical: YES
SNLVWEFPIQIILAGTVLFLTLYFRGQQLSKISYAIKILFDKESHSKGDISQFSALMLSLGATVGIGSIVGVATAISIAGPGAVFWMWVTGLVGMATKYSEGILAVKYREKGAFGYNGGPMYYIKNGLNMPKLAIGVCDFYDYCEHWHR

SEQ ID NO: 5464 - protein, 160 aa, Helicobacter pylori
  misc_feature (B) LOCATION 1...160
  hypothetical: YES
METIDSVVRLLSNLVWGIPMQILLVGTGLFLTFYLRGLQFSKIFYAIKILFDKESHSKGDISQFSALMLSLGATVGIGSIVGVATAISIAGPGAVFWMWVTGLVGMATKYSEGILAVKYREKGAFGYNGGPMYYIKNGLNMPKLAIGVCDFYDYCEHWHR

SEQ ID NO: 5465 - protein, 257 aa, Helicobacter pylori
  misc_feature (B) LOCATION 1...257
  hypothetical: YES
METIDSVVRLLSNLVWGIPMQILLVGTGLFLTFYLRGLQFSKIFYAIKILFDKESHSKGDISQFSALMLSLGATVGIGSIVGVATAISIAGPGAVFWMWVTGLVGMATKYSEGILAVKYREKGAFGYNGGPMYYIKNGLNMPKLAMAFAIFTIIASIGTGNMTQSNAVSSILSEQANLPNWVSGLLLTLLTAVIVIGGIKSIGKFTSYLAPVMVLLYLIAIIYIIVSHFDLALQAIKLIFEEAFNPKPVVAERAARW

SEQ ID NO: 5466 - protein, 89 aa, Helicobacter pylori
  misc_feature (B) LOCATION 1...89
  hypothetical: YES
MGVVIGETTEIGDDVTIYHGVTLGGTGKFKGKRHPTLGNRVVVGAGAKVLGAICVGDDVRIGANAVVLSDLPTGSTAVGAKAKTITKDR

SEQ ID NO: 5467 - protein, 111 aa, Helicobacter pylori
  misc_feature (B) LOCATION 1...111
  hypothetical: YES
FITGIEIHPGAKIGRGLFIDHGMGVVIGETTEIGDDVTIYHGVTLGGTGKFKGKRHPTLGNRVVVGAGAKVLGAICVGDDVRIGANAVVLSDLPTGSTAVGAKAKTITKDR

SEQ ID NO: 5468 - protein, 110 aa, Helicobacter pylori
  misc_feature (B) LOCATION 1...110
  hypothetical: YES
ITGIEIHPGAKIGRGLFIDHGMGVVIGETTEIGDDVTIYHGVTLGGTGKFKGKRHPTLGNRVVVGAGAKVLGAICVGDDVRIGANAVVLSDLPTGSTAVGAKAKTITKDR

SEQ ID NO: 5469 - protein, 146 aa, Helicobacter pylori
  misc_feature (B) LOCATION 1...146
  hypothetical: YES
LLYPGIHALLCYRLAHALHKRRFYFIARALSQLARFITGIEIHPGAKIGRGLFIDHGMGVVIGETTEIGDDVTIYHGVTLGGTGKFKGKRHPTLGNRVVVGAGAKVLGAICVGDDVRIGANAVVLSDLPTGSTAVGAKAKTITKDR

SEQ ID NO: 5470 - protein, 171 aa, Helicobacter pylori
  misc_feature (B) LOCATION 1...171
  hypothetical: YES
MLDCSYSLERVLQEDPAARNKWEVLLLYPGIHALLCYRLAHALHKRRFYFIARALSQLARFITGIEIHPGAKIGRGLFIDHGMGVVIGETTEIGDDVTIYHGVTLGGTGKFKGKRHPTLGNRVVVGAGAKVLGAICVGDDVRIGANAVVLSDLPTGSTAVGAKAKTITKDR

SEQ ID NO: 5471 - protein, 171 aa, Helicobacter pylori
  misc_feature (B) LOCATION 1...171
  hypothetical: YES
MLDLSYSLERVLQEDPAARNKWEVLLLYPGIHALLCYRLAHALHKRRFYFIARALSQLARFITGIEIHPGAKIGRGLFIDHGMGVVIGETTEIGDDVTIYHGVTLGGTGKFKGKRHPTLGNRVVVGAGAKVLGAICVGDDVRIGANAVVLSDLPTGSTAVGAKAKTITKDR

SEQ ID NO: 5472 - protein, 58 aa, Helicobacter pylori
  misc_feature (B) LOCATION 1...58
  hypothetical: YES
LDFIENLGGPIIALILFVMPMIAFYSVSSLKRFRNFKVDIFVFVFGSLTALSVFLGLF

SEQ ID NO: 5473 - protein, 148 aa, Helicobacter pylori
  misc_feature (B) LOCATION 1...148
  hypothetical: YES
WGFLITLLYFLAIYPICLAYGVGITNVFDHFFTNQLHLAPFHRGLLAVALVSLMMLVMVFNATIVTRICNALVYPLCLILLLFSLYLIPYWQGANLFVVPSFKEFVLAIWLTLPVLVFSFNHSPIISTFTQNVGKEYGAFKEVQTQSN

SEQ ID NO: 5474 - protein, 147 aa, Helicobacter pylori
  misc_feature (B) LOCATION 1...147
  hypothetical: YES
GFLITLLYFLAIYPICLAYGVGITNVFDHFFTNQLHLAPFHRGLLAVALVSLMMLVMVFNATIVTRICNALVYPLCLILLLFSLYLIPYWQGANLFVVPSFKEFVLAIWLTLPVLVFSFNHSPIISTFTQNVGKEYGAFKEVQTQSN

SEQ ID NO: 5475 - protein, 317 aa, Helicobacter pylori; identical to SEQ ID NO: 5415
  misc_feature (B) LOCATION 1...317
  hypothetical: YES

SEQ ID NO: 5476 - protein, 104 aa, Helicobacter pylori
  misc_feature (B) LOCATION 1...104
  hypothetical: YES
STWQQANIGGGGFAVIHLANGENVALDFREKAPLKATKNMFLDKQGNVVPKLSEDGYLAAGVPGTVAGMEAMLKKYGTKKLSQLIDPAIKLAENGYAISQRQAE

SEQ ID NO: 5477 - protein, 225 aa, Helicobacter pylori
  misc_feature (B) LOCATION 1...225
  hypothetical: YES
MRRSFLKTIGLGVIALSLGLLNPLSAASYPPIKNTKVGLALSSHPLATEIGQKVLEEGGNAIDAAVAIGFALAVVHPAAGNIGGGGFAVIHLANGENVALDFREKAPLKATKNMFLDKQGNVVPKLSEDGYLAAGVPGTVAGMEAMLKKYGTKKLSQLIDPAIKLAENGYAISQRQAETLKEARERFLKYSSSKKYFFKKGHLDYQEGDLFVQKDLAKTLNPLPH

SEQ ID NO: 5478 - protein, 81 aa, Helicobacter pylori
  misc_feature (B) LOCATION 1...81
  hypothetical: YES
ANNFLEKMSASPNLSLFFESLDLSKERLELLLEAFYPMLKAAFCISLPLAIISFILGLLIAIVVALIKIAPPKHFMHKALL

SEQ ID NO: 5479 - protein, 88 aa, Helicobacter pylori
  misc_feature (B) LOCATION 1...88
  hypothetical: YES
ITCKPFGMSSFFKRSKSPRPSLSNTFISLFKETSLASVVTIAEVFRIAQQKANASYDFLPIYLEAALIYWLFCLVLEVIQKRVEKILN

SEQ ID NO: 5480 - protein, 94 aa, Helicobacter pylori
  misc_feature (B) LOCATION 1...94
  hypothetical: YES
FYVSIIKCTPLLVQIVIVFYGLPALGVYMDPIPAGIIAFSFNVGAYASETLRASFLSVPKDQWDSSLSLGLNYLQTFWHVIFFQALKVATAKPK

SEQ ID NO: 5481 - protein, 148 aa, Helicobacter pylori
  misc_feature (B) LOCATION 1...148
  hypothetical: YES
LVQIVVVFYGLPALGVYMDPIPAGIIAFSFNVGAYASETLRASFLSVPKDQWDSSLSLGLNYLQTFWHVIFFQALKVATPSLSNTFISLFKETSLASVVTIAEXFRIAQQKXNVSYDFXPIYLEXALIYWLFCLVLEVIQKRVEKILN

SEQ ID NO: 5482 - protein, 240 aa, Helicobacter pylori
  misc_feature (B) LOCATION 1...240
  hypothetical: YES
LEKMSASPNLSLFFESLDLSKERLELLLEAFYPMLKAAFCISLPLAIISFILGLLIAIVVALIKIAPPKHFMHKALLAGVNFYVSIIRGTPLLVQIVVVFYGLPALGVYMDPIPAGIIAFSFNVGAYASETLRASFLSVPKDQWDSSLSLGLNYLQTFWHVIFFQALKVATPSLSNTFISLFKETSLASVVTIAEVFRIAQQKANASYDFLPIYLEAALIYWLFCLVLEVIQKRVEKILN

SEQ ID NO: 5483 - protein, 189 aa, Helicobacter pylori
  misc_feature (B) LOCATION 1...189
  hypothetical: YES
MKKILFFIFVVLFSVGIYLTWHVLLEKSLELKLVTSANDLLLKLFALLGVFSILVLFQGVISSYKERQLKRILQKIDAMNGFEFEEYSKIFFTSKGFEVTITQKSGDYGADLIAEKDGVKWAVQAKRYSHKVSPKAIQEVVSSKAYYACEKACVITNSYFTQAAQKLAQANEVILIDRDEWVKFLGGKN

SEQ ID NO: 5484 - protein, 190 aa, Helicobacter pylori
  misc_feature (B) LOCATION 1...190
  hypothetical: YES
GMKKILFFIFVVLFSVGIYLTWHVLLEKSLELKLVTSANDLLLKLFALLGVFSILVLFQGVISSYKERQLKRILQKIDAMNGFEFEEYSKIFFTSKGFEVTITQKSGDYGADLIAEKDGVKWAVQAKRYSHKVSPKAIQEVVSSKAYYACEKACVITNSYFTQAAQKLAQANEVILIDRDEWVKFLGGKN

SEQ ID NO: 5485 - protein, 111 aa, Helicobacter pylori
  misc_feature (B) LOCATION 1...111
  hypothetical: YES
MAIYLDFENHIKEIQNEIELALIRGDEDAKEILEKRLDKEVKSIYSNLTDFQKLQLARHPDRPYAMDYIDLILKDKYEVFGDRHYNDDKAIVCFIGKIDNVPVVVIGYQNG

SEQ ID NO: 5486 - protein, 200 aa, Helicobacter pylori
  misc_feature (B) LOCATION 1...200
  hypothetical: YES
GTKNKPLRNFCIPNPCGYRKALKMAKFAEKFNLPILMLVDTAGAYPGIGAEERGQSEAIAKNLQEFASLKVPTISIIIGEGGSGGALAIAVADKLAMMEYSIFSVISPEGCAAILWDDPSKTEVAIKAMKITPRDLKEAGLIDDIILEPSKGAHRDKFSAANTIKEYFLDALRTIQQDPHFLDNRYQKLMSLGSFVESMN

SEQ ID NO: 5487 - protein, 312 aa, Helicobacter pylori
  misc_feature (B) LOCATION 1...312
  hypothetical: YES
MAIYLDFENHIKEIQNEIELALIRGDEDAKEILEKRLDKEVKSIYSNLTDFQKLQLARHPDRPYAMDYIDLILKDKYEVFGDRHYNDDKAIVCFIGKIDNVPVVVIGEEKGRGTKNKLLRNFGMPNPCGYRKALKMAKFAEKFNLPILMLVDTAGAYPGIGAEERGQSEAIAKNLQEFASLKVPTISIIIGEGGSGGALAIAVADKLAMMEYSIFSVISPEGCAAILWDDPSKTEVAIKAMKITPRDLKEAGLIDDIILEPSKGAHRDKFSAANTIKEYFLDALRTIQQDPHFLDNRYQKLMSLGSFVESMN

SEQ ID NO: 5488 - protein, 76 aa, Helicobacter pylori
  misc_feature (B) LOCATION 1...76
  hypothetical: YES
WAKGAGALVLEEYESAKKRGAKIYAEFAGYGESGDANHITAPAPEGERAFKAMKMALEMAKVEVCYVNAHGDKHAL

SEQ ID NO: 5489 - protein, 111 aa, Helicobacter pylori
  misc_feature (B) LOCATION 1...111
  hypothetical: YES
TPMGTSTHYNDWYESIALKNVFGSKEKVPPVSSTKGQIGHCLGAAGALVAVISIMAMNQGILPPTINQETPDPECDLDYIPNTAREKQVNAVMSNSFGFGGTNGVVIFKKA

SEQ ID NO: 5490 - protein, 148 aa, Helicobacter pylori
  misc_feature (B) LOCATION 1...148
  hypothetical: YES
PEELANRMGVSSGSGIGGLGNIEANSIFCFEKGPRKVNPFFITSALVNMIGGFTSIEFGIKGPNLSSVTACAAGTHAIIEAVKTILLNGADRMLVVGAESTICPVGIGGFASIKALSTRNDDPKKASRPFDKDRNGFVMGERRWGFSA

SEQ ID NO: 5491 - protein, 147 aa, Helicobacter pylori
  misc_feature (B) LOCATION 1...147
  hypothetical: YES
EELANRMGVSSGSGIGGLGNIEANSIFCFEKGPRKVNPFFITSALVNMIGGFTSIEFGIKGPNLSSVTACAAGTHAIIEAVKTILLNGADRMLVVGAESTICPVGIGGFASIKALSTRNDDPKKASRPFDKDRNGFVMGERRWGFSA

SEQ ID NO: 5492 - protein, 309 aa, Helicobacter pylori
  misc_feature (B) LOCATION 1...309
  hypothetical: YES
MGVSSGSGIGGLGNIEANSIFCFEKGPRKVNPFFITSALVNMIGGFTSIEFGIKGPNLSSVTACAAGTHAIIEAVKTILLNGADRMLVVGAESTICPVGIGGFASIKALSTRNDDPKKASRPFDKDRNGFVMGEGAGALVLEEYESAKKRGAKIYAEFAGYGESGDANHITAPAPEGEGAFRAMKMALEMAKVEVGYVNAHGTSTHYNDWYESIALKNVFGSKEKVPPVSSTKGQIGHCLGAAGALEAVISIMAMNQGILPPTINQETPDPECDLDYIPNTAREKQVNAVMSNSFGFGGTNGVVIFKKA

SEQ ID NO: 5493 - protein, 313 aa, Helicobacter pylori
  misc_feature (B) LOCATION 1...313
  hypothetical: YES
LANRMGVSSGSGIGGLGNIEANSIFCFEKGPRKVNPFFITSALVNMIGGFTSIEFGIKGPNLSSVTACAAGTHAIIEAVKTILLNGADRMLVVGAESTICPVGIGGFASIKALSTRNDDPKKASRPFDKDRNGFVMGEGAGALVLEEYESAKKRGAKIYAEFAGYGESGDANHITAPAPEGEGAFRAMKMALEMAKVEVGYVNAHGTSTHYNDWYESIALKNVFGSKEKVPPVSSTKGQIGHCLGAAGALEAVISIMAMNQGILPPTINQETPDPECDLDYIPNTAREKQVNAVMSNSFGFGGTNGVVIFKKA

SEQ ID NO: 5494 - protein, 79 aa, Helicobacter pylori
  misc_feature (B) LOCATION 1...79
  hypothetical: YES
FYYRRRKITTMPTAALQETPVIELINKVQKYYAKADVSAAALFNFGANLKKGPFKRKDVAYIYKFANTLIGVRITGETC

SEQ ID NO: 5495 - protein, 103 aa, Helicobacter pylori
  misc_feature (B) LOCATION 1...103
  hypothetical: YES
YNTKVGKVHTIEPGAYGAYLAKGVVVFDTKTKKKIITTENLPTKDAPEDEELAKKHEYVDKKSKEYANEVVGEVTKTFIDRPDFITGEEKSPRCQPPPCKKHR

SEQ ID NO: 5496 - protein, 102 aa, Helicobacter pylori
  misc_feature (B) LOCATION 1...102
  hypothetical: YES
NTKVGKVHTIEPGAYGAYLAKGVVVFDTKTKKKIITTENLPTKDAPEDEELAKKHEYVDKKSKEYANEVVGEVTKTFIDRPDFITGEEKSPRCQPPPCKKHR

SEQ ID NO: 5497 - protein, 134 aa, Helicobacter pylori
  misc_feature (B) LOCATION 1...134
  hypothetical: YES
LDMFSGVKYQVDVTKPAGQRIINPTINGKPINPKAVYKLAINNYRFGTLSTTLKLVTDADRYYDSYDALQDNGQIRDLIIKYITEEKNAKVTPELEHNWEIINYDFKNPLLEKLAEKLKEGSVKIPTSKRREDL

SEQ ID NO: 5498 - protein, 334 aa, Helicobacter pylori
  misc_feature (B) LOCATION 1...334
  hypothetical: YES
VGKVHTIEPGAYGAYLAKGVVVFDTKTKKKIITTENLPTKDAPEDEELAKKHEYVDKKSKEYANEVVGEVTKTFIDRPDFITGEEKITTMPTAALQETPVIELINKVQKYYAKADVSAAALFNFGANLKKGPFKRKDVAYIYKFANTLIGVRITGENLLKYMEWSYKFYNQLQPGDLTISFNENVRGYNFDMFSGVKYQVDVTKPAGQRIINPTINGKPINPKAVYKLAINNYRFGTLSTTLKLVTDADRYYDSYDALQDNGQIRDLIIKYITEEKNAKVTPELEHNWEIINYDFKNPLLEKLAEKLKEGSVKIPTSKDGRTLNVKSIKESEVE

SEQ ID NO: 5499 - protein, 581 aa, Helicobacter pylori
  misc_feature (B) LOCATION 1...581
  hypothetical: YES
MKKLILAVFFTLTLSVSAKEVKIVFLETSDIHGRLFSYDYAVGEQKPNNGLTRIATLIKKQRAENKNVVLIDSGDLLQGNSAELFNDEPIHPLVRAENDLKFDIRVLGNHEFNFSKDFLEKNIKGFNGDVVNANIIKIADNKPFVKPYIIKKIDGVRVAVVGFLVPHVPTWEASTPEHFAGLEFLDAEEALKKTLSELKGKYDILIGAFHLGREDEKGGDGIPDLAKKFPQFDIIFAGHEHAVYNTKVGKVHTIEPGAYGAYLAKGVVVFDTKTKKKIITTENLPTKDAPEDEELAKKYEYVDKKSKEYANEVVGEVTKTFIDRPDFITGEEKITTMPTAALQETPVIELINKVQKYYAKADVSAAALFNFGANLKKGPFKRKDVAYIYKFANTLIGVRITGENLLKYMEWSYKFYNQLQPGDLTISFNENVRGYNFDMFSGVKYQVDVTKPAGQRIINPTINGKPINPKAVYKLAINNYRFGTLSTTLKLVTDADRYYDSYDALQDNGQIRDLIIKYITEEKNAKVTPELEHNWEIINYDFKNPLLEKLAEKLKEGSVKIPTSKDGRTLNVKSIKESEVE

SEQ ID NO: 5500 - protein, 235 aa, Helicobacter pylori
  misc_feature (B) LOCATION 1...235
  hypothetical: YES
LSEPIDRFTRIRWLFKNDFEKIRQQRVLICGVGGVGGFALDSLYRVGIGQITIIDKDMFDVTNQNRQIGSERIGESKVLVLQDLYKGIQALNCRIDEAFLNSFNFRDYDYILDCMDDLPIKTSLAIKCQNFAYGKFISSMGSAKRLNPKHIQVGSVWESYGDKFGRKFRDFLKKRRFKGDFKVVFSPEVPHCIELGSFNAVTASFGLQIASEVVQDIIKNERQWNERLRRRIGRF

SEQ ID NO: 5501 - protein, 236 aa, Helicobacter pylori
  misc_feature (B) LOCATION 1...236
  hypothetical: YES
RLSEPIDRFTRIRWLFKNDFEKIRQQRVLICGVGGVGGFALDSLYRVGIGQITIIDKDMFDVTNQNRQIGSERIGESKVLVLQDLYKGIQALNCRIDEAFLNSFNFRDYDYILDCMDDLPIKTSLAIKCQNFAYGKFISSMGSAKRLNPKHIQVGSVWESYGDKFGRKFRDFLKKRRFKGDFKVVFSPEVPHCIELGSFNAVTASFGLQIASEVVQDIIKNERQWNERLRRRIGRF

SEQ ID NO: 5502 - protein, 60 aa, Helicobacter pylori
  misc_feature (B) LOCATION 1...60
  hypothetical: YES
LNSGTEATMSAIRLARAYSQKDDLIKFEGCYHGHSDSLLVKAGSGGATFGFSFFSGVPND

SEQ ID NO: 5503 - protein, 181 aa, Helicobacter pylori
  misc_feature (B) LOCATION 1...181
  hypothetical: YES
SSLGVPNDFSKHTLVARYNDLNSTEECFKKGDVGCVIIEPIAGNMGLVPAQKEFLLGLKALCEKYQAVLILDEVMSGFRASLSGSQEFYGVVPDLVTFGKVIGAGLPLACFGGRAEIMDLLSPIGGVYQAGTLSGNPLAVCAGLSALYKITRDQTLHTRLNALAARLTHRVQKSAHNYNFA

SEQ ID NO: 5504 - protein, 182 aa, Helicobacter pylori
  misc_feature (B) LOCATION 1...182
  hypothetical: YES
PSSLGVPNDFSKHTLVARYNDLNSTEECFKKGDVGCVIIEPIAGNMGLVPAQKEFLLGLKALCEKYQAVLILDEVMSGFRASLSGSQEFYGVVPDLVTFGKVIGAGLPLACFGGRAEIMDLLSPIGGVYQAGTLSGNPLAVCAGLSALYKITRDQTLHTRLNALAARLTHRVQKSAHNYNFA

SEQ ID NO: 5505 - protein, 430 aa, Helicobacter pylori
  misc_feature (B) LOCATION 1...430
  hypothetical: YES
MELLHSINDFNEAKQVIAGGVNSPVRAFKSVKGTPPFILKGKGAYLYDVDNNHYIDFVQSWGPLIFGHADEEIEENIINVLKKGTSFGAPTELETTLAKEIISCYEGLDKVRLVNSGTEATMSAIRLARAYSQKDDLIKFEGCYHGHSDSLLVKAGSGCATFGSPSSLGVPNDFSKHTLVARYNDLNSTEECFKKGDVGCVIIEPIAGNMGLVPAQKEFLLGLKALCEKYQAVLILDEVMSGFRASLSGSQEFYGVVPDLVTFGKVIGAGLPLACFGGRAEIMDLLSPIGGVYQAGTLSGNPLAVCAGLSALYKIKRDKTLYTRLNALAVRLTQGLQKSAQNYNIALETLNMGSMFGFFFNENAVRDFDDALKSDTEMFAKFHQKMLFKGVYLACSSFETGFICEPMTEEMIDLAISKADESFDEIINGV

SEQ ID NO: 5506 - protein, 414 aa, Helicobacter pylori
  misc_feature (B) LOCATION 1...414
  hypothetical: YES
LIQKNKSLSIFLISNSVVFLGKIILHKVFIMEALECLKRIEKESIQTIYIDPPYNTKSSNFEYEDAHADYEKWIEEHLILAKAVLKQSGCIFISMDDNKMAEVKIIANEIFGTRNFLGTFITKQATRSNAKHINITHEYVLSYAKNKAFAPGFKILRTLLPIYAKALKDLMRTIKNVFKQKGQAQAQLILKEQIKELSQKEHFNFLKNYNLVDEKGEIYFAKDLSTPSNPRSVAIQEINLFLEPLKSRGWSSDEKLKELYYQNRLIFKNNRPYEKYYLKESQDNCLSVLDFYSRQGTKDLEKLGLKGLFKTPKPVALIKYLLLCSTPKDSIILDFFAGSGTTAQAVIEVNKDYYLNWSFYLCQKEEKIKNNPQAVSILKNKGYKNTISDIMLLRLEKIIKRSEYEILKTKSILF

SEQ ID NO: 5507 - protein, 416 aa, Helicobacter pylori
  misc_feature (B) LOCATION 1...416
  hypothetical: YES
NPLIQKNKSLSIFLISNSVVFLGKIILHKVFIMEALECLKRIEKESIQTIYIDPPYNTKSSNFEYEDAHADYEKWIEEHLILAKAVLKQSGCIFISMDDNKMAEVKIIANEIFGTRNFLGTFITKQATRSNAKHINITHEYVLSYAKNKAFAPGFKILRTLLPIYAKALKDLMRTIKNVFKQKGQAQAQLILKEQIKELSQKEHFNFLKNYNLVDEKGEIYFAKDLSTPSNPRSVAIQEINLFLEPLKSRGWSSDEKLKELYYQNRLIFKNNRPYEKYYLKESQDNCLSVLDFYSRQGTKDLEKLGLKGLFKTPKPVALIKYLLLCSTPKDSIILDFFAGSGTTAQAVIEVNKDYYLNWSFYLCQKEEKIKNNPQAVSILKNKGYKNTISDIMLLRLEKIIKRSEYEILKTKSILF

SEQ ID NO: 5508 - protein, 136 aa, Helicobacter pylori
  misc_feature (B) LOCATION 1...136
  hypothetical: YES
KIPKFIQLYDNATSKIQALDFDAIKDKVHVLLNGYEEMPAEFFYFRLDSKIAHILIDEFQDTSLNDYKILAPFIDEIKAGIGQAKWHRSVFFVGDVKQSIYAFRGSTALYANAIERIVITIIWSVTTGARRQSLVS

SEQ ID NO: 5509 - protein, 176 aa, Helicobacter pylori
  misc_feature (B) LOCATION 1...176
  hypothetical: YES
MTSVVIKPHAYGEQVQEIEEESDSDYEKNNDQEAINFGIALHKGLEYQYAYNIPKQSVLEYLNYHYGFYGLDYQALEESLELFENDAGIQALFKNHALKGEAAFLFQGVVSRIDVLLWDRGQNLYVLDYKSSQNYQQSHKAQVSHYAEFLRTQXPHFKIQAGIIYAHKRLLEKXWX

SEQ ID NO: 5510 - protein, 306 aa, Helicobacter pylori
  misc_feature (B) LOCATION 1...306
  hypothetical: YES
VIIKTKQNFRIAIMDTKRQCMALKASAGSGKTFALSVRFLALLFKGANPSEILTLTFTKKATAEMKERILDYLKILQKENLESEKEKSQNILKELEEKYHLDPSLVRNNAQKIYQRFLNAEVRISTIDAFFQSILRKFCWFVGLSANFEVNEDTEAHQRQLNEGFLSALNNKQLEELSAFIVQCLSYDNYTSDSILERLRFLKNKLYLFDPNKKDPVFDEEGFLEKLRSLNNQIQSIETASNEAKKAIKCDSFRGFLNSSLTWLEKKSEYRYFKKLKNEIPTLESECEEIENDLKRYYRSQVNRNI

SEQ ID NO: 5511 - protein, 531 aa, Helicobacter pylori
  misc_feature (B) LOCATION 1...531
  hypothetical: YES
ISEFNHRSAPLIINYVNTIFKKAYQNSPTAYLEQKYPKTSNNKHVTEGYVKVSLVADEKELLLEQILQEAQNLLEHRIDPKDITILCATNKDALEIKNYLQEYLSAIRPSTESSAKLSQLVESKIIKNALEYALAEEPYKPFYKHSVLKLAGYLHDDVIALPGFNPKKESVASFVWKIMEQFKLYEEPAQSCLELAVGCEDADGFLEKLEAKEIASFNPKGAQIMTIHKSKGMQFPYVIVCERLGNPNSSHANQLLEEYDGTELARLYYRMKNREVVDKDYARALDKEEAAKDHEEINVYYVAFTRAELGLIVVAKDKKESKKESKNKKMHEQLELAPLEEGEIAPVISPQKEPLMTSVVIKPHAYGEQVQEIEEESDSDYEKNNDQEAINFGIALHKGLEYQYAYNIPKQSVLEYLNYHYGFYGLDYQALEESLELFENDAGIQALFKNHALKGEAAFLFQGVVSRIDVLLWDRGQNLYVLDYKSSQNYQQSHKAQVSHYAEFLRTQAPHFKIQAGIIYAHKRLLEKLWV

SEQ ID NO: 5512 - protein, 621 aa, Helicobacter pylori
  misc_feature (B) LOCATION 1...621
  hypothetical: YES
LNGYEEMPAEFFYFRLDSKIAHILIDEFQDTSLNDYKILAPFIDEIKAGIGQAKWHRSVFFVGDVKQSIYAFRGSFSSLFESVSKDFYHDNLEFNHRSAPLIINYVNTIFKKAYQNSPTAYLEQKYPKTSNNKHVTEGYVKVSLVADEKELLLEQILQEAQNLLEHRIDPKDITILCATNKDALEIKNYLQEYLSAIRPSTESSAKLSQLVESKIIKNALEYALAEEPYKPFYKHSVLKLAGYLHDDVIALPGFNPKKESVASFVWKIMEQFKLYEEPAQSCLELAVGCEDADGFLEKLEAKEIASFNPKGAQIMTIHKSKGMQFPYVIVCERLGNPNSSHANQLLEEYDGTELARLYYRMKNREVVDKDYARALDKEEAAKDHEEINVYYVAFTRAELGLIVVAKDKKESKKESKNKKMHEQLELAPLEEGEIAPVISPQKEPLMTSVVIKPHAYGEQVQEIEEESDSDYEKNNDQEAINFGIALHKGLEYQYAYNIPKQSVLEYLNYHYGFYGLDYQALEESLELFENDAGIQALFKNHALKGEAAFLFQGVVSRIDVLLWDRGQNLYVLDYKSSQNYQQSHKAQVSHYAEFLRTQAPHFKIQAGIIYAHKRLLEKLWV

SEQ ID NO: 5513 - protein, 946 aa, Helicobacter pylori
  misc_feature (B) LOCATION 1...946
  hypothetical: YES
MDTKRQCMALKASAGSGKTFALSVRFLALLFKGANPSEILTLTFTKKATAEMKERILDYLKILQKENLESEKEKSQNILKELEEKYHLDPSLVRNNAQKIYQRFLNAEVRISTIDAFFQSILRKFCWFVGLSANFEVNEDTEAHQRQLNEGFLSALNNKQLEELSAFIVQCLSYDNYTSDSILERLRFLKNKLYLFDPNKKDPVFDEEGFLEKLRSLNNQIQSIETASNEAKKAIKCDSFRGFLNSSLTWLEKKSEYRYFKKLKNEIPTLESECEEIENDLKRYYEAQETAIFKKFPKFIQLYDNATSKIQALDFDAIKDKVHVLLNGYEEMPAEFFYFRLDSKIAHILIDEFQDTSLNDYKILAPFIDEIKAGIGQAKWHRSVFFVGDVKQSIYAFRGSFSSLFESVSKDFYHDNLEFNHRSAPLIINYVNTIFKKAYQNSPTAYLEQKYPKTSNNKHVTEGYVKVSLVADEKELLLEQILQEAQNLLEHRIDPKDITILCATNKDALEIKNYLQEYLSAIRPSTESSAKLSQLVESKIIKNALEYALAEEPYKPFYKHSVLKLAGYLHDDVIALPGFNPKKESVASFVWKIMEQFKLYEEPAQSCLELAVGCEDADGFLEKLEAKEIASFNPKGAQIMTIHKSKGMQFPYVIVCERLGNPNSSHANQLLEEYDGTELARLYYRMKNREVVDKDYARALDKEEAAKDHEEINVYYVAFTRAELGLIVVAKDKKESKKESKNKKMHEQLELAPLEEGEIAPVISPQKEPLMTSVVIKPHAYGEQVQEIEEESDSDYEKNNDQEAINFGIALHKGLEYQYAYNIPKQSVLEYLNYHYGFYGLDYQALEESLELFENDAGIQALFKNHALKGEAAFLFQGVVSRIDVLLWDRGQNLYVLDYKSSQNYQQSHKAQVSHYAEFLRTQAPHFKIQAGIIYAHKRLLEKLWV

SEQ ID NO: 5514 - protein, 173 aa, Helicobacter pylori
  misc_feature (B) LOCATION 1...173
  hypothetical: YES
AYQKAHHSEAILPFLYPGVGFFALFGVYKDFGAVAIIWLLVVVVASDVGAFFGGKLLGKTPFTATSPNKTLEGALIGVVLASVLGSFVGMGKLSGGFLMALLFSFLIALMAVFGDLYESYLKRKVGVKDSGKILPGHGGVLDRLDSMLFGALSLHVLLYFLEIWKETAVFLGD

SEQ ID NO: 5515 - protein, 172 aa, Helicobacter pylori
  misc_feature (B) LOCATION 1...172
  hypothetical: YES
YQKAHHSEAILPFLYPGVGFFALFGVYKDFGAVAIIWLLVVVVASDVGAFFGGKLLGKTPFTATSPNKTLEGALIGVVLASVLGSFVGMGKLSGGFLMALLFSFLIALMAVFGDLYESYLKRKVGVKDSGKILPGHGGVLDRLDSMLFGALSLHVLLYFLEIWKETAVFLGD

SEQ ID NO: 5516 - protein, 266 aa, Helicobacter pylori
  misc_feature (B) LOCATION 1...266
  hypothetical: YES
VKEELFKEKSRYITGVVLIVVAGLILYADNLLLFWAVLGGIYAVGFFEALRLFQVKASFSLYLILVLSWVAAYFNGHPVECALISAMVMASVIAYQKAHHSEAILPFLYPGVGFFALFGVYKDFGAVAIIWLLVVVVASDVGAFFGGKLLGKTPFTATSPNKTLEGALIGVVLASVLGSFVGMGKLSGGFLMALLFSFLIALMAVFGDLYESYLKRKVGVKDSGKILPGHGGVLDRLDSMLFGALSLHVLLYFLEIWKETAVFLGD

SEQ ID NO: 5517 - protein, 424 aa, Helicobacter pylori
  misc_feature (B) LOCATION 1...424
  hypothetical: YES
MKDNNNYNVLIVGNKGREYALAQRLQQDERVNALYFCLGNGGTQDLGENLECEHYEHIVELALKKQIHLAIISEEEPLILGLTEMLEKAGILVFGASKEAAKLEASKSYMKAFVKECGIKSASYFETNDLKEALNYIQNASFPLVIKALNKNTSIVHHQEEALKILEDALKQSNEPVIIEPFLEGFELSVTALIANDDFILLPFCQNYKRLLEGDNGVNTGGMGAIAPANFFSNELEEKIKNHIFKPTLEKLQADNTPFKGVLLAEIVIIEEKGVLEPYLLDFSVRFKDIECQTILPLVENPLLDLFLATAKGELHSLELVFSKEFVMSVALVSRNYPTSSSPKQTLYIDPVDEKKGHLILGEVEQDNGVFESSGGRVIFAIGRGKSLLEARNHAYEIAQKVHFEGMFYRKDIGFKVLDLKEYS

SEQ ID NO: 5518 - protein, 432 aa, Helicobacter pylori
  misc_feature (B) LOCATION 1...432
  hypothetical: YES
KQPHFREDMKDNNNYNVLIVGNKGREYALAQRLQQDERVNALYFCLGNGGTQDLGENLECEHYEHIVELALKKQIHLAIISEEEPLILGLTEMLEKAGILVFGASKEAAKLEASKSYMKAFVKECGIKSASYFETNDLKEALNYIQNASFPLVIKALNKNTSIVHHQEEALKILEDALKQSNEPVIIEPFLEGFELSVTALIANDDFILLPFCQNYKRLLEGDNGVNTGGMGAIAPANFFSNELEEKIKNHIFKPTLEKLQADNTPFKGVLLAEIVIIEEKGVLEPYLLDFSVRFKDIECQTILPLVENPLLDLFLATAKGELHSLELVFSKEFVMSVALVSRNYPTSSSPKQTLYIDPVDEKKGHLILGEVEQDNGVFESSGGRVIFAIGRGKSLLEARNHAYEIAQKVHFEGMFYRKDIGFKVLDLKEYS

SEQ ID NO: 5519 - protein, 119 aa, Helicobacter pylori
  misc_feature (B) LOCATION 1...119
  hypothetical: YES
IIINFLEDLFYPLRMLENKRVLLLVSGSIAAYKSLQLVRLLFKSGASIQVVMSNGAQKFIKPLSFEALSHHKVLHDRNEKWYYNHQNKLHHNLSHALPSADLLIFAPLSANSLSKIAHA

SEQ ID NO: 5520 - protein, 304 aa, Helicobacter pylori
  misc_feature (B) LOCATION 1...304
  hypothetical: YES
YHQRDFFSLRSPKILAPSMNTNMLNSPIIQSNLKRLKDSNHIILDTQNALLACNTKGDGAMAEPLEILFKATQTLLKDAYFENREVIVMGGASVEKIDSVRVISNLSSGIQASALALALYFKGAKVTLIAFNFPTPLPKEIASVLVSDTASYENALNEAAKNLQKHALKPLLFNLAAISDYLPKTSFNHKLKKSELGETLNVECVQNKDLLASVNPNQFVKIGFKAEDDQQNAIKNAQNLLKPSQDNGKDCSVAALNLIKDSRPFGSLDNELWLFSHKKTQKIPSMNKLEASFKILDFIKDNAL

SEQ ID NO: 5521 - protein, 425 aa, Helicobacter pylori
  misc_feature (B) LOCATION 1...425
  hypothetical: YES
MNFLEDLFYPLRLLENKRVLLLVSGSIAAYKSLELVRLLFKSGASIQVVMSKGAQKFIKPLSFEALSHHKVLHDRNEKWYYNHQNKLHHNHIACAASADLLIFAPLSANSLSKIAHALADNTISATFLACASPKILAPSMNTNMLNSPIIQSNLKRLKDSNHIILDTQNALLACNTKGDGAMAEPLEILFKATQTLLKDAYFENREVIVMGGASVEKIDSVRVISNLSSGIQASALALALYFKGAKVTLIASNFPTPLPKEIASVLVSDTASYENALNEAAKNLQKHALKPLLFNLAAISDYLPKTSFNHKLKKSELGETLNVECVQNKDLLASVNPNQFVKIGFKAEDDQQNAIKNAQNLLKPSQDNGKDCSVAALNLIKDSRPFGSLDNELWLFSHKKTQKIPSMNKLEASFKILDFIKDNAL

SEQ ID NO: 5522 - protein, 105 aa, Helicobacter pylori
  misc_feature (B) LOCATION 1...105
  hypothetical: YES
GCGDYRGEQYHWKTFKHAHVKRWGCVSVCHILTKDISFYTKNADIVCVGVGKPDLIKASMLKKGAVVVDIGINHLNDGRIVGDVDFINAQKIAGFITPVPKAWGL

SEQ ID NO: 5523 - protein, 206 aa, Helicobacter pylori
  misc_feature (B) LOCATION 1...206
  hypothetical: YES
THDFCYNNRILMDKGQISMPNRGVVLLDGQALAYNIEKDLKNKIQIITAQTHKRPKLAVILVGKDPASITYVNMKIKACQRVGMDFDLKTLKENITEAELLSLIKDYNTDQNISGILVQLPLPRSIDTKMILEAIDPNKDVDGFHPLNIGKLCTQKESFLPATPMGVMRLLEHYHIEIKGKDVAIIGASNIIGKPLSMLMLNAGAA

SEQ ID NO: 5524 - protein, 341 aa, Helicobacter pylori
  misc_feature (B) LOCATION 1...341
  hypothetical: YES
MDKGQISMPNRGVVLLDGQALAYNIEKDLKNKIQIITAQTHKRPKLAVILVGKDPASITYVNMKIKACQRVGMDFDLKTLKENITEAELLSLIKDYNTDQNISGILVQLPLPRSIDTKMILEAIDPNKDVDGFHPLNIGKLCTQKESFLPATPMGVMRLLEHYHIEIKGKDVAIIGASNIIGKPLSMLMLNAGASVSVCHILTKDISFYTKNADIVCVGVGKPDLIKASMLKKGAVVVDIGINHLNDGRIVGDVDFINAQKIAGFITPVPKGVGPMTIVSLLENTLIAFENNKGRDFNEIFTLCLCFLLQLGGDDYYRAVGYLFYRASLYHSLSIYGRHAL

SEQ ID NO: 5525 - protein, 174 aa, Helicobacter pylori
  misc_feature (B) LOCATION 1...174
  hypothetical: YES
ELFFMAELGIVLGARIGYVLIYEPNSSYYLTHFWQIFNPFDSHGNFIGIRGMSYHGGLVGFLIASYLYSRKDLKKLLIYLDLIAISLPLGYVLGRIGNFLNQELFGRIVPKDSHLGQIIGIMVDNELRYPSQLIEAFLEGVVVFLMVMWAKKHTKTHGLLIVVYGLGYSLMRFI

SEQ ID NO: 5526 - protein, 283 aa, Helicobacter pylori
  misc_feature (B) LOCATION 1...283
  hypothetical: YES
MNAWNTIYERFNPIAFSLGGIEVHWYGLAYACAIVVAFYMALRMIQKDPKRFPIERKEFESYFLWAELGIVLGARIGYVLIYEPNSSYYLTHFWQIFNPFDSHGNFIGIRGMSYHGGLVGFLIASYLYSRKDLKKLLIYLDLIAISLPLGYVFGRIGNFLNQELFGRIVPKDSHLGQIIGIMVDNELRYPSQLIEAFLEGVVVFLMVMWAKKHTKTHGLLIVVYGLGYSLMRFIAEFYREPDSQLGVYFLNLSMGQILSVFMVIVSLGILLYATKNSKKIKEE

SEQ ID NO: 5527 - protein, 200 aa, Helicobacter pylori
  misc_feature (B) LOCATION 1...200
  hypothetical: YES
KRMKESFYIEGMTCTACSSGIERSLGRKSFVKKIEVSLLNKSANIEFNENETNLDEIFKLIEKLGYSPKKTLAEEKKEFFSPNVKLALAVIFTLFVVYLSMGAMLSPSLLPESLLTINHHSNFLNACLQLIGALIVMHLGRDFYIQGFKALWHRQPNMSSLIAIGTSAALISACGNCIWFIPIIIPISGLMGIIILKACA

SEQ ID NO: 5528 - protein, 598 aa, Helicobacter pylori
  misc_feature (B) LOCATION 1...598
  hypothetical: YES
SLMAQTTQHEQPYRHRHKCCLNFSLWQLYLVYTNHYTDQWSYGHYYFESVCVILMFVMVGKRIENVSKDKALDAMQALMKNAPKTALKMHNNQQIEVLVDSIVVGDILKVLPGSAIAVDGEIIEGEGELDESMLSGEALPVYKKVGDKVFSGTLNSNTSFLMKATQDNKNSTLSQIIEMIHNAQSSKAEISRLADKVSSVFVPSVIAIAVLAFVVWLIIAPKPDFWWNFRTALEVFVSVLVISCPCALGLATPMSILVANQKASSLGLFFKDAKSLEKARLVNTIVFDKTGTLTNGKPVVKSIHSNIELLELLSLASSIEKSSEHVIAKGIVEYAKERNAPLKDISEVKVKTGFGISAKVDYQGAKEIIKVGNSEFFNPINTLEIKENGILVFVGRAINEKEDELLGAFVLEDLPKKGVKEHIAQIKNLGINTFLLSGDNRENVKKCALELGIDGYISNAKPQDKLNKIKELKEKGRIVMMVGDGLNDAPSLAMSDVAVVMAKGSDVSVQAADIVSFNNDIKSVYSAIKLSQATIKNIKENLFWAFCYNSVFIPLACGVLYKANIMLSPAIAGLAMSLSSVSVVLNSQRLRNFKIKDH

SEQ ID NO: 5529 - protein, 745 aa, Helicobacter pylori
  misc_feature (B) LOCATION 1...745
  hypothetical: YES
MKESFYIEGMTCTACSSGIERSLGRKSFVKKIEVSLLNKSANIEFNENETNLDEIFKLIEKLGYSPKKTLAEEKKEFFSPNVKLALAVIFTLFVVYLSMGAMLSPSLLPESLLTINHHSNFLNACLQLIGALIVMHLGRDFYIQGFKALWHRQPNMSSLIAIGTSAALISSLWQLYLVYTNHYTDQWSYGHYYFESVCVILMFVMVGKRIENVSKDKALDAMQALMKNAPKTALKMHNNQQIEVLVDSIVVGDILKVLPGSAIAVDGEIIEGEGELDESMLSGEALPVYKKVGDKVFSGTLNSNTSFLMKATQDNKNSTLSQIIEMIHNAQSSKAEISRLADKVSSVFVPSVIAIAVLAFVVWLIIAPKPDFWWNFRTALEVFVSVLVISCPCALGLATPMSILVANQKASSLGLFFKDAKSLEKARLVNTIVFDKTGTLTNGKPVVKSIHSNIELLELLSLASSIEKSSEHVIAKGIVEYAKERNAPLKDISEVKVKTGFGISAKVDYQGAKEIIKVGNSEFFNPINTLEIKENGILVFVGRAINEKEDELLGAFVLEDLPKKGVKEHIAQIKNLGINTFLLSGDNRENVKKCALELGIDGYISNAKPQDKLNKIKELKEKGRIVMMVGDGLNDAPSLAMSDVAVVMAKGSDVSVQAADIVSFNNDIKSVYSAIKLSQATIKNIKENLFWAFCYNSVFIPLACGVLYKANIMLSPAIAGLAMSLSSVSVVLNSQRLRNFKIKDH

SEQ ID NO: 5530 - protein, 308 aa, Helicobacter pylori
  misc_feature (B) LOCATION 1...308
  hypothetical: YES
MANNASFYAAASMAYMLGAKHAFDADHIACIDNTIRKLTQQGKNAYGVGFYFSMGHSSVVILMTIISAFAIAWAKEHTPMLEEIGGVVGTLVSGLFLLIIGLLNAIILIDLLKIFKKSHSNESLSRQQNEEIERLLTSRGLLNRFFKPLFNFVSKSWHIYPVGFLFGLGFDTASEIALLALSSSAIKVSVVGMLSLPILFAAGMSLFDTLDGAFMLKAYDWAFKTPLRKIYYNISITALSVFIALFIGLIELFQVISEKLHLKFENRLLSTLQSLEFTDLGYYLVGLFVIAFLGSFFLWKIKFSKLES

SEQ ID NO: 5531 - protein, 331 aa, Helicobacter pylori
  misc_feature (B) LOCATION 1...331
  hypothetical: YES
VKLWFPYFLAIVFLHALGLALLFMANNASFYAAASMAYMLGAKHAFDADHIACIDNTIRKLTQQGKNAYGVGFYFSMGHSSVVILMTIISAFAIAWAKEHTPMLEEIGGVVGTLVSGLFLLIIGLLNAIILIDLLKIFKKSHSNESLSRQQNEEIERLLTSRGLLNRFFKPLFNFVSKSWHIYPVGFLFGLGFDTASEIALLALSSSAIKVSVVGMLSLPILFAAGMSLFDTLDGAFMLKAYDWAFKTPLRKIYYNISITALSVFIALFIGLIELFQVISEKLHLKFENRLLSTLQSLEFTDLGYYLVGLFVIAFLGSFFLWKIKFSKLES

SEQ ID NO: 5532 - protein, 350 aa, Helicobacter pylori
  misc_feature (B) LOCATION 1...350
  hypothetical: YES
FNKIYYNYLKNTIFTKRRAVKLWFPYFLAIVFLHALGLALLFMANNASFYAAASMAYMLGAKHAFDADHIACIDNTIRKLTQQGKNAYGVGFYFSMGHSSVVILMTIISAFAIAWAKEHTPMLEEIGGVVGTLVSGLFLLIIGLLNAIILIDLLKIFKKSHSNESLSRQQNEEIERLLTSRGLLNRFFKPLFNFVSKSWHIYPVGFLFGLGFDTASEIALLALSSSAIKVSVVGMLSLPILFAAGMSLFDTLDGAFMLKAYDWAFKTPLRKIYYNISITALSVFIALFIGLIELFQVISEKLHLKFENRLLSTLQSLEFTDLGYYLVGLFVIAFLGSFFLWKIKFSKLES

SEQ ID NO: 5533 - protein, 110 aa, Helicobacter pylori
  misc_feature (B) LOCATION 1...110
  hypothetical: YES
GVCAMVGDGNNDALTLKQASVSLGFEKSALSKSACDILLLEEDLSLLEKAFHNAQKVYQVVLQNIVLSLIYNAILIPVAMLGYINPLIASLSMSGSSLLVVLNSLRLKRS

SEQ ID NO: 5534 - protein, 147 aa, Helicobacter pylori
  misc_feature (B) LOCATION 1...147
  hypothetical: YES
GLKMKCSHCQLEFKESDLFKETINHKELHFCCAGCARVYALLTDLNLESFYDKLNDSTLAPVTPQDSMNILELEQALEENNKGDFILNLLLEKTHCNACLWLNQKVLERLKGVKKVSVNFTTHHLQIVFDKSLNPKEVIQKIESLGY

SEQ ID NO: 5535 - protein, 196 aa, Helicobacter pylori
  misc_feature (B) LOCATION 1...196
  hypothetical: YES
RASHKLPLRVRSATPIALVIGVFKNPLIVFKEALFLETLAKVKKIFIDKTGTLTQKEVLLKEKIIHEEFDERLLKSLLKTREHLAHNAILKTLDGDEVDLEKIEFFAHGLKASYQNETLLVGSLKFLNAMGVDLKVKESANIMVGFAKNKTLCALFILEERLKANAKEVIQALQNQGLELEILSGDNESSVKECAK

SEQ ID NO: 5536 - protein, 280 aa, Helicobacter pylori
  misc_feature (B) LOCATION 1...280
  hypothetical: YES
RVMAVRIMATVWTNSCKEFGLVSLFLSLLVLVVVGRFFIKGAFYGLKNGVLGMDLSVSFGALSAFVYSLYAMLVSQETYFEASSTILTLVFGSKFLELKARLFANEKCLALESHEIHSVIVVENGKQIEKHPKDVAIGSVVWVPSGAKIALDGVLLNSASVDASLISGEFKPLELGVNDPILGGYVNVGVPFSYQVSATFQNSRLSSLLETLKKSFLEKPLIESSANKIADIFSKAVLFLAFVSFLLWQFGLGGNFEKALMVCISVLVISCPCAFARLRP

SEQ ID NO: 5537 - protein, 279 aa, Helicobacter pylori
  misc_feature (B) LOCATION 1...279
  hypothetical: YES
VMAVRIMATVWTNSCKEFGLVSLFLSLLVLVVVGRFFIKGAFYGLKNGVLGMDLSVSFGALSAFVYSLYAMLVSQETYFEASSTILTLVFGSKFLELKARLFANEKCLALESHEIHSVIVVENGKQIEKHPKDVAIGSVVWVPSGAKIALDGVLLNSASVDASLISGEFKPLELGVNDPILGGYVNVGVPFSYQVSATFQNSRLSSLLETLKKSFLEKPLIESSANKIADIFSKAVLFLAFVSFLLWQFGLGGNFEKALMVCISVLVISCPCAFARLRP

SEQ ID NO: 5538 - protein, 323 aa, Helicobacter pylori
  misc_feature (B) LOCATION 1...323
  hypothetical: YES
LRVRSATPIALVIGVFKNPLIVFKEALFLETLAKVKKIFIDKTGTLTQKEVLLKEKIIHEEFDERLLKSLLKTREHLAHNAILKTLDGDEVDLEKIEFFAHGLKASYQNETLLVGSLKFLNAMGVDLKVKESANIMVGFAKNKTLCALFILEERLKANAKEVIQALQNQGLELEILSGDNESSVKECAKKLGISKYHAHLTPEDKAQIISSYKGVCAMVGDGNNDALALKQASVSLGFEKSALSKSACDILLLEEDLSLLEKAFHNAQKVYQVVLQNIVLSLIYNAILIPVAMLGYINPLIASLSMSGSSLLVVLNSLRLKRS

SEQ ID NO: 5539 - protein, 473 aa, Helicobacter pylori
  misc_feature (B) LOCATION 1...473
  hypothetical: YES
MKCSHCQLEFKESDLFKETINHKELHFCCAGCARVYALLTDLNLESFYDKLNDSTLAPVTPQDSMNILELEQALEENNKGDFILNLLLEKTHCNACLWLNQKVLERLKGVKKVSVNFTTHHLQIVFDKSLNPKEIIQKIESLGYGAKIYNAQNYTLKAQKEQRSYLLTLSVGFFATMNLMFIAIAKYASYGSASYGGANYGGGMDKLMQRNLDLVSLFLSLLVLVVVGRFFIKGAFYGLKNGVLGMDLSVSFGALSAFVYSLYAMLVSQETYFEASSTILTLVFGSKFLELKARLFANEKCLALESHEIHSVIVVENGKQIEKHPKDVAIGSVVWVPSGAKIALDGVLLNSASVDASLISGEFKPLELGVNDPILGGYVNVGVPFSYQVSATFQNSRLSSLLETLKKSFLEKPLIESSANKIADIFSKAVLFLAFVSFLLWQFGLGGNFEKALMVCISVLVISCPCAFARLRP

SEQ ID NO: 5540 - protein, 788 aa, Helicobacter pylori
  misc_feature (B) LOCATION 1...788
  hypothetical: YES
MKCSHCQLEFKESDLFKETINHKELHFCCAGCARVYALLTDLNLESFYDKLNDSTLAPVTPQDSMNILELEQALEENNKGDFILNLLLEKTHCNACLWLNQKVLERLKGVKKVSVNFTTHHLQIVFDKSLNPKEIIQKIESLGYGAKIYNAQNYTLKAQKEQRSYLLTLSVGFFATMNLMFIAIAKYASYGSASYGGANYGGGMDKLMQRNLDLVSLFLSLLVLVVVGRFFIKGAFYGLKNGVLGMDLSVSFGALSAFVYSLYAMLVSQETYFEASSTILTLVFGSKFLELKARLFANEKCLALESHEIHSVIVVENGKQIEKHPKDVAIGSVVWVPSGAKIALDGVLLNSASVDASLISGEFKPLELGVNDPILGGYVNVGVPFSYQVSATFQNSRLSSLLETLKKSFLEKPLIESSANKIADIFSKAVLFLAFVSFLLWQFGLGGNFEKALMVCISVLVISCPCAFALATPIALVIGVFKNPLIVFKEALFLETLAKVKKIFIDKTGTLTQKEVLLKEKIIHEEFDERLLKSLLKTREHLAHNAILKTLDGDEVDLEKIEFFAHGLKASYQNETLLVGSLKFLNAMGVDLKVKESANIMVGFAKNKTLCALFILEERLKANAKEVIQALQNQGLELEILSGDNESSVKECAKKLGISKYHAHLTPEDKAQIISSYKGVCAMVGDGNNDALALKQASVSLGFEKSALSKSACDILLLEEDLSLLEKAFHNAQKVYQVVLQNIVLSLIYNAILIPVAMLGYINPLIASLSMSGSSLLVVLNSLRLKRS

SEQ ID NO: 5541 - protein, 99 aa, Helicobacter pylori
  misc_feature (B) LOCATION 1...99
  hypothetical: YES
RSTLASADVGIGMGKGSELSKQSADIVITNDSLSSLVKVLAIAKKTKSIIWQNILFALGIKAVFIVLGLMGVASLWEAVFGDVGVTLLDLANSMRTMRA

SEQ ID NO: 5542 - protein, 156 aa, Helicobacter pylori
  misc_feature (B) LOCATION 1...156
  hypothetical: YES
HNKTRMKRAKRRKFITKFSRYYTPSVLFIALMIAVLPPLFSMGSFDEWIYRGLVALMVSCPCALVISVPLGYFGGVGAASRKGILMKGVHVLEVLTQTKSIAFDKTGTLTKGVFKVVDIVPQNGHSKEEVCITLLARSFYPRTRSLYPFKKHAKKC

SEQ ID NO: 5543 - protein, 179 aa, Helicobacter pylori
  misc_feature (B) LOCATION 1...179
  hypothetical: YES
RRSLHYASCSQLLSTHPIALSIQKACEEMLKDDKHQHDIKNYEELSGMGVKAQCHTDLIIAGNEKMLDQFHIAHSPSPENGTIVHVAFNQTYIGYIVISDEIKDDAIECLRDLKAQGIENFCILSGDRKSATESIARTLGCEYHASLLPEEKTSVFKTFNERYKAPAIFAGDGINDAPL

SEQ ID NO: 5544 - protein, 428 aa, Helicobacter pylori
  misc_feature (B) LOCATION 1...428
  hypothetical: YES
LNLKAVLEIQVEKLYKDSSIAKVVDLVQQATNEKSETEKFITKFSRYYTPSVLFIALMIAVLPPLFSMGSFDEWIYRGLVALMVSCPCALVISVPLGYFGGVGAASRKGILMKGVHVLEVLTQTKSIAFDKTGTLTKGVFKVVDIVPQNGHSKEEVLHYASCSQLLSTHPIALSIQKACEEMLKDDKHQHDIKNYEELSGMGVKAQCHTDLIIAGNEKMLDQFHIAHSPSPENGTIVHVAFNQTYIGYIVISDEIKDDAIECLRDLKAQGIENFCILSGDRKSATESIARTLGCEYHASLLPEEKTSVFKTFKERYKAPAIFVGDGINDAPTLASADVGIGMGKGSELSKQSADIVITNDSLSSLVKVLAIAKKTKSIIWQNILFALGIKAVFIVLGLMGVASLWEAVFGDVGVTLLALANSMRTMRA

SEQ ID NO: 5545 - protein, 108 aa, Helicobacter pylori
  misc_feature (B) LOCATION 1...108
  hypothetical: YES
ISRLPITVVEILFGSVGAYVGFIEPTKGFEIMSEIGFLFLMFLCGLEVEIYLFKKLGVSLLKRIFAYLLILYTLSFILTFSLNLEPIFMVIFPIIRFGHDHDFIQRLS

SEQ ID NO: 5546 - protein, 270 aa, Helicobacter pylori
  misc_feature (B) LOCATION 1...270
  hypothetical: YES
FSLLSGLGMIMTLSKDYRKEILWLDLVLKVGVIGELLSIFGLVVVDGVYSHGLGVDLIKDLGILIVFLILIIVAFQIFKTLFWWFPHLKLFVMPKSSQFNQDVRFSLMLFFSLVAIVVWLKIEMVLGAFLAGLVVSTFFPHKSELIHKLNDVGFGFFVPLFFIHVGSTLDLKLVFLNPHLILQGILIVIAMLSLHLITSTLLWRKYFKEAKHLFSFALGASMPLTFLVTTAAVGLKAQAISQNTYYALLMASTNEGVLFTIAIKMLNKKA

SEQ ID NO: 5547 - protein, 357 aa, Helicobacter pylori
  misc_feature (B) LOCATION 1...357
  hypothetical: YES
LPITVVEILFGSVGAYVGFIEPTKGFEIMSEIGFLFLMFLCGLEVEIYLFKKLGVSLLKRIFAYLLILYTLSFILTFSLNLEPIFMVIFPIISLGMIMTLVKDYRKEILWLDLVLKVGVIGELLSIFGLVVVDGVYSHGLGVDLIKDLGILIVFLILIIVAFQIFKTLFWWFPHLKLFVMPKSSQFNQDVRFSLMLFFSLVAIVVWLKIEMVLGAFLAGLVVSTFFPHKSELIHKLNDVGFGFFVPLFFIHVGSTLDLKLVFLNPHLILQGILIVIAMLSLHLITSTLLWRKYFKEAKHLFSFALGASMPLTFLVTTAAVGLKAQAISQNTYYAMLMAAIFERVLFTIAIKMLNKKA

SEQ ID NO: 5548 - protein, 383 aa, Helicobacter pylori
  misc_feature (B) LOCATION 1...383
  hypothetical: YES
MHAEFFTFALIMLLIVIAPYVSRISRLPITVVEILFGSVGAYVGFIEPTKGFEIMSEIGFLFLMFLCGLEVEIYLFKKLGVSLLKRIFAYLLILYTLSFILTFSLNLEPIFMVIFPIISLGMIMTLVKDYRKEILWLDLVLKVGVIGELLSIFGLVVVDGVYSHGLGVDLIKDLGILIVFLILIIVAFQIFKTLFWWFPHLKLFVMPKSSQFNQDVRFSLMLFFSLVAIVVWLKIEMVLGAFLAGLVVSTFFPHKSELIHKLNDVGFGFFVPLFFIHVGSTLDLKLVFLNPHLILQGILIVIAMLSLHLITSTLLWRKYFKEAKHLFSFALGASMPLTFLVTTAAVGLKAQAISQNTYYAMLMAAIFERVLFTIAIKMLNKKA

SEQ ID NO: 5549 - protein, 95 aa, Helicobacter pylori
  misc_feature (B) LOCATION 1...95
  hypothetical: YES
VEQNKIIKLFTVATMAMMPPTLIGTINGMNFKFMPELEWQYGYLFALIVMAISTILPVIYFKKKGLVVAFHGIFILTLRRSFYTAWHSLLGYATL

SEQ ID NO: 5550 - protein, 318 aa, Helicobacter pylori
  misc_feature (B) LOCATION 1...318
  hypothetical: YES
MVNVFFKQQKFVIKKRFNDFNGFDIEENEVLWFELINPTPNELATLSQEYAIHYNTDHSQRVSSVTKYWEDSSSVTINAFFTNQDENETFHMEMATFILSNNILFTIYYGTLEIFDSIQKKVLASPKKFEDGFDILTKIFEVYFEKGVECLEWINKQTSLLRKNIIFKETSTHDDILVRLSNLQEFNVALRDSFFDKRRIITALLRSNKVDSDTKNNLNIILTDFSSLVESTTVNLNSLDNIQNLFASQVNVEQNKIIKLFTVATMAMMPPTLIGTIYGMNFKFMPELEWQYGYLFALIVMAISTILPVIYFKKKGWL

SEQ ID NO: 5551 - protein, 321 aa, Helicobacter pylori
  misc_feature (B) LOCATION 1...321
  hypothetical: YES
GSLMVNVFFKQQKFVIKKRFNDFNGFDIEENEVLWFELINPTPNELATLSQEYAIHYNTDHSQRVSSVTKYWEDSSSVTINAFFTNQDENETFHMEMATFILSNNILFTIYYGTLEIFDSIQKKVLASPKKFEDGFDILTKIFEVYFEKGVECLEWINKQTSLLRKNIIFKETSTHDDILVRLSNLQEFNVALRDSFFDKRRIITALLRSNKVDSDTKNNLNIILTDFSSLVESTTVNLNSLDNIQNLFASQVNVEQNKIIKLFTVATMAMMPPTLIGTIYGMNFKFMPELEWQYGYLFALIVMAISTILPVIYFKKKGWL

SEQ ID NO: 5552 - protein, 106 aa, Helicobacter pylori
  misc_feature (B) LOCATION 1...106
  hypothetical: YES
MGALIAMFFLMLIKKTIAYKEDKKSAALKVVPYLVALMSLAFSWYLIVKVLKRLYAVSFEIQLACGCVLALLIFILFKRFVLKKAPQLENSHESVNELFNVPLIFA

SEQ ID NO: 5553 - protein, 185 aa, Helicobacter pylori
  misc_feature (B) LOCATION 1...185
  hypothetical: YES
RYRSFSRNQSNFRRCEQPYGSTLNSVPLWIMVVGAAGIALGLSLYGPKLIKTVGSEITELDKMQAFCIALSAVITVLLASQLGLPVSSTHIVVGAVFGVGFLRERLREQSRRRFARIRDNIVAAHFGEDLEEIEGFLERFDKANLKEKSLMLESLKKSKNTAIALELKKKDKKSLKKVYKEEVIK

SEQ ID NO: 5554 - protein, 184 aa, Helicobacter pylori
  misc_feature (B) LOCATION 1...184
  hypothetical: YES
RYRSFSRNQSNFRRCEQPYGSTLNSVPLWIMVVGAAGIALGLSLYGPKLIKTVGSEITELDKMQAFCIALSAVITVLLASQLGLPVSSTHIVVGAVFGVGFLRERLREQSRRRFARIRDNIVAAHFGEDLEEIEGFLERFDKANLKEKSLMLESLKKSKNTAIALELKKKDKKSLKKVYKEEVI

SEQ ID NO: 5555 - protein, 196 aa, Helicobacter pylori
  misc_feature (B) LOCATION 1...196
  hypothetical: YES
VPLWIMVVGAAGIALGLSLYGPKLIKTVGSEITELDKMQAFCIALSAVITVLLASQLGLPVSSTHIVVGAVFGVGFLRERLREQSRRRFARIRDNIVAAHFGEDLEEIEGFLERFDKANLKEKSLMLESLKKSKNTAIALELKKKEKKSLKKVYKEEVIKRSILKKIVTAWLVTVPVSALLGALLFVALGFIEKYF

SEQ ID NO: 5556 - protein, 301 aa, Helicobacter pylori
  misc_feature (B) LOCATION 1...301
  hypothetical: YES
GFDDDMEIRNIKEFEKASKKLQKDTLKIALALLFLIGAALLALIFGQANSKGLLLIFAAVIGGYMAMNIGANDVSNNVGPSVGSKAISMGGAILIAAVCEMLGAIIAGGEVVSTIKGRIVSPEFINDAHVFINVMLASLLSGALWLHVATLIGAPVSTSHSVVGGIMGAGMAAAGMSAINWHFLSGIVASWVISPLMGALIAMFFLMLIKKTIAYKEDKKSAALKVVPYLVALMSLAFSWYLIVKVLKRLYAVGFEIQLACGCVLALLIFILFKRFVLKKAPQLENSHESVNELFNVPLIF

SEQ ID NO: 5557 - protein, 334 aa, Helicobacter pylori
  misc_feature (B) LOCATION 1...334
  hypothetical: YES
MEIRNIKEFEKASKKLQKDTLKIALALLFLIGAALLALIFGQANSKGLLLIFAAVIGGYMAMNIGANDVSNNVGPAVGSKAISMGGAILIAAVCEMLGAIIAGGEVVSTIKGRIVSPEFINDAHVFINVMLASLLSGALWLHVATLIGAPVSTSHSVVGGIMGAGMAAAGMSAINWHFLSGIVASWVISPLMGALIAMFFLMLIKKTIAYKEDKKSAALKVVPYLVALMSLAFSWYLIVKVLKRLYAVGFEIQLACGCVLALLIFILFKRFVLKKAPQLENSHESVNELFNVPLIFAAALLSFAHGANDVANAIGPLAAISQTLEDASSPMGVL

SEQ ID NO: 5558 - protein, 533 aa, Helicobacter pylori
  misc_feature (B) LOCATION 1...533
  hypothetical: YES
MEIRNIKEFEKASKKLQKDTLKIALALLFLIGAALLALIFGQANSKGLLLIFAAVIGGYMAMNIGANDVSNNVGPAVGSKAISMGGAILIAAVCEMLGAIIAGGEVVSTIKGRIVSPEFINDAHVFINVMLASLLSGALWLHVATLIGAPVSTSHSVVGGIMGAGMAAAGMSAINWHFLSGIVASWVISPLMGALIAMFFLMLIKKTIAYKEDKKSAALKVVPYLVALMSLAFSWYLIVKVLKRLYAVGFEIQLACGCVLALLIFILFKRFVLKKAPQLENSHESVNELFNVPLIFAAALLSFAHGANDVANAIGPLAAISQTLEDASSPMGSTLNSVPLWIMVVGAAGIALGLSLYGPKLIKTVGSEITELDKMQAFCIALSAVITVLLASQLGLPVSSTHIVVGAVFGVGFLRERLREQSRRRFARIRDNIVAAHFGEDLEEIEGFLERFDKANLKEKSLMLESLKKSKNTAIALELKKKEKKSLKKVYKEEVIKRSILKKIVTAWLVTVPVSALLGALLFVALGFIEKYF

SEQ ID NO: 5559 - protein, 355 aa, Helicobacter pylori
  misc_feature (B) LOCATION 1...355
  hypothetical: YES
VRLFRFVGWYYFKYFLIVLLALELFFVGIDSLKYADKMPDSANMIILFFTYDILFALNYTLPISLLLAMVLFYITFIKSNQYTALLSIGFSKCQILSPIFLISLFFTAVYVGLNATPFVYMEEKTQNLIYKDNSLSVSEHLLVKYNDDYVYFDKINPLLQKAQNIKVFRLKDKTLESYAEAKEAFFEDKYWILHDTTIYEMPLSFELGANALNTTHLETFKTLKNFRPKVLDTIYQNKPAVSITDALLSLHALVRQNADTKKVRSFLYVFAILPFFVPFLSVLIAYFSPSLARYENLALLGLKFIIITLVVWGLFFALGKFSISGILIPEIGVLSPFFVFLALSLWYFKKLNKRL

SEQ ID NO: 5560 - protein, 355 aa, Helicobacter pylori; identical to SEQ ID NO: 5559
  misc_feature (B) LOCATION 1...355
  hypothetical: YES

SEQ ID NO: 5561 - protein, 358 aa, Helicobacter pylori
  misc_feature (B) LOCATION 1...358
  hypothetical: YES
GFKVRLFRFVGWYYFKYFLIVLLALELFFVGIDSLKYADKMPDSANMIILFFTYDILFALNYTLPISLLLAMVLFYITFIKSNQYTALLSIGFSKCQILSPIFLISLFFTAVYVGLNATPFVYMEEKTQNLIYKDNSLSVSEHLLVKYNDDYVYFDKINPLLQKAQNIKVFRLKDKTLESYAEAKEAFFEDKYWILHDTTIYEMPLSFELGANALNTTHLETFKTLKNFRPKVLDTIYQNKPAVSITDALLSLHALVRQNADTKKVRSFLYVFAILPFFVPFLSVLIAYFSPSLARYENLALLGLKFIIITLVVWGLFFALGKFSISGILIPEIGVLSPFFVFLALSLWYFKKLNKRL

SEQ ID NO: 5562 - protein, 83 aa, Helicobacter pylori
  misc_feature (B) LOCATION 1...83
  hypothetical: YES
VSEKDRAFLLASLSCVDYVVVFGEDTPIKLIQALKPDILVKGADYLNKEVIGSELAKETRLIEFEEGYSTSAIIEKIKRTHND

SEQ ID NO: 5563 - protein, 424 aa, Helicobacter pylori
  misc_feature (B) LOCATION 1...424
  hypothetical: YES
NLGGAANVANNLTSLKAKVFLCGVVGDDLKGKHFISTLNSIRIDTSGVLIDKTRCTTLKTRIIAQNQQIVRVDKEIKDPLNADLRKNLLDFIAEKIQEIDGVILSDYNKGVLDFELTQTIITLANKHHKLILCDPKGKDYSKYSHASLITPNRAELEQALHLKLDSHANLSKALQILQETYHIAMPLVTLSEQGIAFLEKGELVNCPTIAKEVYDVTGAGDTVIASLTLSLLESKSLKEACEFANAAAAVVVGKMGSALASLEEIALILNQTHPKILPLEKLLETLERNQQKIVFTNGCFDILHKGHASYLQKAKALGDILVVGLNSDNSIKRLKGDKRPIVSEKDRAFLLASLSCVDYVVVFGEDTPIKLIQALKPDILVKGADYLNKEVIGSELAKETRLIEFEEGYSTSAIIEKIKRTHND

SEQ ID NO: 5564 - protein, 447 aa, Helicobacter pylori
  misc_feature (B) LOCATION 1...447
  hypothetical: YES
VGEERTLSPEAPVPVLEVKKESKNLGGAANVANNLTSLKAKVFLCGVVGDDLEGKHFISTLKTRGIDTSGVLIDKTRCTTLKTRIIAQNQQIVRVDKEIKDPLNADLRKNLLDFIAEKIQEIDGVILSDYNKGVLDFELTQTIITLANKHHKLILCDPKGKDYSKYSHASLITPNRAELEQALHLKLDSHANLSKALQILQETYHIAMPLVTLSEQGIAFLEKGELVNCPTIAKEVYDVTGAGDTVIASLTLSLLESKSLKEACEFANAAAAVVVGKMGSALASLEEIALILNQTHPKILPLEKLLETLERNQQKIVFTNGCFDILHKGHASYLQKAKALGDILVVGLNSDNSIKRLKGDKRPIVSEKDRAFLLASLSCVDYVVVFGEDTPIKLIQALKPDILVKGADYLNKEVIGSELAKETRLIEFEEGYSTSAIIEKIKRTHND

SEQ ID NO: 5565 - protein, 272 aa, Helicobacter pylori
  misc_feature (B) LOCATION 1...272
  hypothetical: YES
LLILKEGIDLNHGYYQLGKYTIKDDFIPSKKAVVEDVLIQSSNVGMIKISKSLNPEDFYNGLLGYGFSQKTGIDLSLEATGKIPPLSAFKREVLKGSVSYGYGLNATFLQLLRAYAVFSNEGKLTTPYLVQRETAPNGDIYIPSPKPTFQVISPKSARKMKETLIKVVRYGTGKNAQFEGLYIGGKTGTARVAKNGSYSAESYNSSFFGFAEDERQVFTIGVVILGSHGKEEYYASKIAAPIFKEITEILVRYNYLSPSIAIQNALEKNRLK

SEQ ID NO: 5566 - protein, 284 aa, Helicobacter pylori
  misc_feature (B) LOCATION 1...284
  hypothetical: YES
THCLFLGGSIKILLILKEGIDLNHGYYQLGKYTIKDDFIPSKKAVVEDVLIQSSNVGMIKISKSLNPEDFYNGLLGYGFSQKTGIDLSLEATGKIPPLSAFKREVLKGSVSYGYGLNATFLQLLRAYAVFSNEGKLTTPYLVQRETAPNGDIYIPSPKPTFQVISPKSARKMKETLIKVVRYGTGKNAQFEGLYIGGKTGTARVAKNGSYSAESYNSSFFGFAEDERQVFTIGVVILGSHGKEEYYASKIAAPIFKEITEILVRYNYLSPSIAIQNALEKNRLK

SEQ ID NO: 5567 - protein, 313 aa, Helicobacter pylori
  misc_feature (B) LOCATION 1...313
  hypothetical: YES
SLCFFYFWDGAFKKAFLGQANMPTLVMIKQDTATRGTIYSQDNYSLATSQTLFKLGFDTRFLNPNKEDFFIDFLSIYSNIPKESLKDALNTKGYTILAYNLTPNMAANIRDLNKKFLAFGVFQNFKDAHDKVWQKQRLNIEVSGFSRHYPYQNSLEPIIAYVQKQEEDKLTLTTGKKSVEKSQNNLLEAQQNGIRSGKRDVSFNFIQNRSYTEVERLDGYEVYLSVPLKLQREIETLLDKTKDKLRAKEILVGIINPKSGEILSLASSNRFDPNAIKTSDYENLNLSVAEKVFEPRTTIKPIVYSLVVVSKFC

SEQ ID NO: 5568 - protein, 343 aa, Helicobacter pylori
  misc_feature (B) LOCATION 1...343
  hypothetical: YES
MDNKNIDPCFNPEQFLETQKYKGVVTALIFLLLFFIFLMVAFKKAFLGQANMPTLVMIKQDTATRGTIYSQDNYSLATSQTLFKLGFDTRFLNPNKEDFFIDFLSIYSNIPKESLKDALNTKGYTILAYNLTPNMAANIRDLNKKFLAFGVFQNFKDAHDKVWQKQGLNIEVSGVSRHYPYQNSLEPIIGYVQKQEEDKLTLTTGKKGVEKSQNNLLEAQQNGIRSGKRDVSFNFIQNRSYTEVERLDGYEVYLSVPLKLQREIETLLDKTKDKLRAKEILVGIINPKSGEILSLASSNRFDPNAIKTSDYENLNLSVAEKVFEPRTTIKPIVYSLVVVSKFC

SEQ ID NO: 5569 - protein, 613 aa, Helicobacter pylori
  misc_feature (B) LOCATION 1...613
  hypothetical: YES
MDNKNIDPCFNPEQFLETQKYKGVVTALIFLLLFFIFLMVAFKKAFFAQANMPTLVMIKQDTATRGTIYSQDNYSLATSQTLFKLGFDTRFLNPNKEDFFIDFLSIYSNIPKESLKDALNTKGYTILAYNLTPNMAANIRDLNKKFLAFGVFQNFKDAHDKVWQKQGLNIEVSGVSRHYPYQNSLEPIIGYVQKQEEDKLTLTTGKKGVEKSQNNLLEAQQNGIRSGKRDVSFNFIQNHSYTEVERLDGYEVYLSVPLKLQREIETLLDKTKDKLRAKEILVGIINPKSGEILSLASSNRFDPNAIKTSDYENLNLSVAEKVFEPGSTIKPIVYSLLLDKNLINPKERIDLNHGYYQLGKYTIKDDFIPSKKAVVEDVLIQSSNVGMIKISKSLNPEDFYNGLLGYGFSQKTGIDLSLEATGKIPPLSAFKREVLKGSVSYGYGLNATFLQLLRAYAVFSNEGKLTTPYLVQRETAPNGDIYIPSPKPTFQVISPKSARKMKETLIKVVRYGTGKNAQFEGLYIGGKTGTARVAKNGSYSAESYNSSFFGFAEDERQVFTIGVVILGSHGKEEYYASKIAAPIFKEITEILVRYNYLSPSIAIQNALEKNRLK

SEQ ID NO: 5570 - protein, 69 aa, Helicobacter pylori
  misc_feature (B) LOCATION 1...69
  hypothetical: YES
RALCGVCMKNLRYKLLLFVFIGVWGLLILNLFILSVKNQEYYEKLAERNMTKKEFLIPQGAILQTETMS

SEQ ID NO: 5571 - protein, 522 aa, Helicobacter pylori
  misc_feature (B) LOCATION 1...522
  hypothetical: YES
MNWCLACFCPSRLKQKELLEKIEVIQKFFPNFPKETLLNNYQKENSLYNHNLIKVVGFIPYATMQSLYTKLIQTQGIFVRPLDKRYYPNNALASHVLGYVGVASLQDLKDDEENQYSQIVGKTGIEKEYNKFLQGKVGYKIIHVNALNQELATLEVVPPSANNHLQLSLDKRLQKEADKLFENKRGAILVMDAENGELLVAGSYPEYNLNDFVGGISQDKWQKLQDDIYNPLLNRFANALYPPGSVVKMGVGLSFLENLHITENTTIPTPPFIEVGKRKFRDWKKTGHGNSNLYKAIRESVDVYFYKFGLEISIEKLSKTLREVGFGEKTGVDLPNEFVGIVPDNLWKLKRFNQDWRVGDTLITAIGQGSFLATPLQVLAYTGLIATGKLATPHFAIHNQQPLKDPLNSFQKKKLQALRVGMYEVCNHKDGTAYHSTRGSKVTLACKTGTAQVVEIAQNIVNRMKEKDMEYFHRSHAWITAFLPYEKPKYAITILVEHGEGGSKLGGLLVKMSNKLYELGYL

SEQ ID NO: 5572 - protein, 528 aa, Helicobacter pylori
  misc_feature (B) LOCATION 1...528
  hypothetical: YES
HEFLAINELMFDVFLPSRLKQKELLEKIEVIQKFFPNFPKETLLNNYQKENSLYNHNLIKVVGFIPYATMQSLYTKLIQTQGIFVRPLDKRYYPNNALASHVLGYVGVASLQDLKDDEENQYSQIVGKTGIEKEYNKFLQGKVGYKIIHVNALNQELATLEVVPPRSNNHSQLSLDKRFQKEAHKLFVNKRGPILVMDAENGELLVAGSYPEYNLNDFVGGISQDKWQKLQDDIYNPLLNRFANALYPPGSVVKMGVGLSFLENLHITENTTIPTPPFIEVGKRKFRDWKKTGHGNSNLYKAIRESVDVYFYKFGLEISIEKLSKTLREVGFGEKTGVDLPNEFVGIVPDNLWKLKRFNQDWRVGDTLITAIGQGSFLATPLQVLAYTGLIATGKLATPHFAIHNQQPLKDPLNSFQKKKLQALRVGMYEVCNHKDGTAYHSTRGSKVTLACKTGTAQVVEIAQNIVNRMKEKDMEYFHRSHAWITAFLPYEKPKYAITILVEHGEGGSKLGGLLVKMSNKLYELGYL

SEQ ID NO: 5573 - protein, 527 aa, Helicobacter pylori
  misc_feature (B) LOCATION 1...527
  hypothetical: YES
EFLAINELMFDVFLPSRLKQKELLEKIEVIQKFFPNFPKETLLNNYQKENSLYNHNLIKVVGFIPYATMQSLYTKLIQTQGIFVRPLDKRYYPNNALASHVLGYVGVASLQDLKDDEENQYSQIVGKTGIEKEYNKFLQGKVGYKIIHVNALNQELATLEVVPPRSNNHSQLSLDKRFQKEAHKLFVNKRGPILVMDAENGELLVAGSYPEYNLNDFVGGISQDKWQKLQDDIYNPLLNRFANALYPPGSVVKMGVGLSFLENLHITENTTIPTPPFIEVGKRKFRDWKKTGHGNSNLYKAIRESVDVYFYKFGLEISIEKLSKTLREVGFGEKTGVDLPNEFVGIVPDNLWKLKRFNQDWRVGDTLITAIGQGSFLATPLQVLAYTGLIATGKLATPHFAIHNQQPLKDPLNSFQKKKLQALRVGMYEVCNHKDGTAYHSTRGSKVTLACKTGTAQVVEIAQNIVNRMKEKDMEYFHRSHAWITAFLPYEKPKYAITILVEHGEGGSKLGGLLVKMSNKLYELGYL

SEQ ID NO: 5574 - protein, 588 aa, Helicobacter pylori
  misc_feature (B) LOCATION 1...588
  hypothetical: YES
MKNLRYKLLLFVFIGVWGLLILNLFILSVKNQEYYEKLAERNMTKKEFLIPTRGNITDRNHEFLAINELVFGVFLPSRLKQKELLEKIEVIQKFFPNFPKETLLNNYQKENSLYNHNLIKVVGFIPYATMQSLYTKLIQTQGIFVRPLDKRYYPNNALASHVLGYVGVASLQDLKDDEENQYSQIVGKTGIEKEYNKFLQGKVGYKIIHVNALNQELATLEVVPPSANNHLQLSLDKRLQKEADKLFENKRGAILVMDAENGELLVAGSYPEYNLNDFVGGISQDKWQKLQDDIYNPLLNRFANALYPPGSVVKMGVGLSFLENLHITENTTIPTPPFIEVGKRKFRDWKKTGHGNSNLYKAIRESVDVYFYKFGLEISIEKLSKTLREVGFGEKTGVDLPNEFVGIVPDNLWKLKRFNQDWRVGDTLITAIGQGSFLATPLQVLAYTGLIATGKLATPHFAIHNQQPLKDPLNSFQKKKLQALRVGMYEVCNHKDGTAYHSTRGSKVTLACKTGTAQVVEIAQNIVNRMKEKDMEYFHRSHAWITAFLPYEKPKYAITILVEHGEGGSKLGGLLVKMSNKLYELGYL

SEQ ID NO: 5575 - protein, 145 aa, Helicobacter pylori
  misc_feature (B) LOCATION 1...145
  hypothetical: YES
FFNPLSHQHDFFIGFFVCRAHGFMDGYIARSYKAKSRFGEIFDPLADKILILSAFLGLVYLDRVNAWVPFVILGREFFISGLRVLAANEKKDIPVNALGKYKTVSQVVAIGALLANLTYSYVLVAIAVFLTLYSGIDYTIKYYKS

SEQ ID NO: 5576 - protein, 179 aa, Helicobacter pylori
  misc_feature (B) LOCATION 1...179
  hypothetical: YES
MKVLKLLPNFLTILRIVLSLFLLFLLLNTHTYFSFLTPFHINMISSLVFLFAALTDLLDGYIARSYKAKSRFGEIFDPLADKILILSAFLGLVYLDRVNAWVPFVILGREFFISGLRVLAANEKKDIPVNALGKYKTVSQVVAIGALLANLTYSYVLVAIAVFLTLYSGIDYTIKYYKS

SEQ ID NO: 5577 - protein, 235 aa, Helicobacter pylori
  misc_feature (B) LOCATION 1...235
  hypothetical: YES
GVLVVILSATRSATIAFVATFLILSCFILYAKKSLKPLGYMVVVSFVLSALYVGSNALEKRGAIEQFRVQNQTFEEDLKRYAKKDADSSIGWRLERWKEALTVLRLRPFFGMAASEKCQRLEEILSLSKSYRAKDLILCYERYDNQIIHVLATRGIIGFLIWLFFLLVIVKIFWSGIKQNSLISFFILITLAFYLIFGIGFDPFDFFITGSFFVGMVMMVVFLKKDKSAFYHQRA

SEQ ID NO: 5578 - protein, 234 aa, Helicobacter pylori
  misc_feature (B) LOCATION 1...234
  hypothetical: YES
VLVVILSATRSATIAFVATFLILSCFILYAKKSLKPLGYMVVVSFVLSALYVGSNALEKRGAIEQFRVQNQTFEEDLKRYAKKDADSSIGWRLERWKEALTVLRLRPFFGMAASEKCQRLEEILSLSKSYRAKDLILCYERYDNQIIHVLATRGIIGFLIWLFFLLVIVKIFWSGIKQNSLISFFILITLAFYLIFGIGFDPFDFFITGSFFVGMVMMVVFLKKDKSAFYHQRA

SEQ ID NO: 5579 - protein, 429 aa, Helicobacter pylori
  misc_feature (B) LOCATION 1...429
  hypothetical: YES
LKAFFSADSVFTLIFALFFLTSFKKPLTQVLLIVLMVFLFFRCYFQASLKETFRINHLKTMPFKWLTLAFLGVFLSIFPNMFNMYDSQTFRYNLFALNMSLTYACGALCLLFSSRLRIKLNQKVLFYSMAVANFINGLLSLVQKIYFNMPRAQGFSTVKEYVVLVSVSILGCYIYALYSQNQKEKLFFTLSVFVGFLVVILSATRSATIAFVATFLILSCFILYAKKSLKPLGYMVVVSLVLSALYVGSNALKKRGAIKQSRVQNQTFEEDLKRYAKKDADSSIGWRLERWKEALTVLRLRPFFGMAASEKCQRLEEILSLSKSYRAKDLILCYERYDNQIIHVLATRGIIGFLIWLFFLLVIVKIFWSGIKQNSLISFFILITLAFYLIFGIGFDPFDFFITGSFFVGMVMMVVFLKKDKSAFYHQRA

SEQ ID NO: 5580 - protein, 64 aa, Helicobacter pylori
  misc_feature (B) LOCATION 1...64
  hypothetical: YES
KALPILQQSFITVAQFSPKLVRVVIGYAPKMTYEVKILKDKLYVSIMEKKPLIRHQMTPRPTKH

SEQ ID NO: 5581 - protein, 95 aa, Helicobacter pylori
  misc_feature (B) LOCATION 1...95
  hypothetical: YES
RAYRGLICSACEVRGCCLSFLASLRLRTTLKITNIVPFGSSSVKMVFNQEVKKFKEVSLKNFKSYLELEAVLTIPKKHYQFSSNLSSQSRNSALN

SEQ ID NO: 5582 - protein, 108 aa, Helicobacter pylori
  misc_feature (B) LOCATION 1...108
  hypothetical: YES
VNLMDYFSKSLFLNSLNTQRLIVSNKLAIDVQYGMLQSVRKNYPDVVDGGVREGPFWVLAGALMPSILIEIGYNSHAIESKRIQSKPYQKILAKGIADGIDSFFSKND

SEQ ID NO: 5583 - protein, 350 aa, Helicobacter pylori
  misc_feature (B) LOCATION 1...350
  hypothetical: YES
IRSSNDTQTTQTPWHSNTRRPKPTPKPIKKEAKKAKEKTTKHAHSKHAHSPLNERSAKKEIPKKEIPKKEIPKKEIPKKEIPKKEIPKKEIPKKEIPKKEAENESKNQIFIAEKNDTWIKTKRKKHKKIVLDAGHGGKDCGAMSANLVCEKDIVLEVVKFLHKELKKRGYSVLLTRDKDIYIDLVARTELANKKGADLFISVHANSIPKRSTSNAHGIETYFLSTARSERARKVAEQENKDDVNLMDYFSKSLFLNSLNTQRLIVSNKLAIDVQYGMLQSVRKNYPDVVDGGVREGPFWVLAGALMPSILIEIGYNSHAIESKRIQSKPYQKILAKGIADGIDSFFSKND

SEQ ID NO: 5584 - protein, 349 aa, Helicobacter pylori
  misc_feature (B) LOCATION 1...349
  hypothetical: YES
RSSNDTQTTQTPWHSNTRRPKPTPKPIKKEAKKAKEKTTKHAHSKHAHSPLNERSAKKEIPKKEIPKKEIPKKEIPKKEIPKKEIPKKEIPKKEIPKKEAENESKNQIFIAEKNDTWIKTKRKKHKKIVLDAGHGGKDCGAMSANLVCEKDIVLEVVKFLHKELKKRGYSVLLTRDKDIYIDLVARTELANKKGADLFISVHANSIPKRSTSNAHGIETYFLSTARSERARKVAEQENKDDVNLMDYFSKSLFLNSLNTQRLIVSNKLAIDVQYGMLQSVRKNYPDVVDGGVREGPFWVLAGALMPSILIEIGYNSHAIESKRIQSKPYQKILAKGIADGIDSFFSKND

SEQ ID NO: 5585 - protein, 469 aa, Helicobacter pylori
  misc_feature (B) LOCATION 1...469
  hypothetical: YES
VLVRLGVVACLFWLHYAYATTLKITNIVPFGSSSVKMVFNQEVKKFKEVSLKNFKSYLELEAVLTIPKKHYQFSKQSFITIAQFSPKLVRVVIGYAPKMTYEVKILKDKLYVSIMEKKPLIRHQMTPKPPKHHALKHQTPKPTPKPIKKEAKKAKEKTTKHAHSKHAHSPLNERSAKKEIPKKEIPKKEIPKKEIPKKEIPKKEIPKKEIPKKEIPKKEAENESKNQIFIAEKNDTWIKTKRKKHKKIVLDAGHGGKDCGAMSANLVCEKDIVLEVVKFLHKELKKRGYSVLLTRDKDIYIDLVARTELANKKGADLFISVHANSIPKRSTSNAHGIETYFLSTARSERARKVAEQENKDDVNLMDYFSKSLFLNSLNTQRLIVSNKLAIDVQYGMLQSVRKNYPDVVDGGVREGPFWVLAGALMPSILIEIGYNSHAIESKRIQSKPYQKILAKGIADGIDSFFSKND

SEQ ID NO: 5586 - protein, 469 aa, Helicobacter pylori; identical to SEQ ID NO: 5585
  misc_feature (B) LOCATION 1...469
  hypothetical: YES

SEQ ID NO: 5587 - protein, 104 aa, Helicobacter pylori
  misc_feature (B) LOCATION 1...104
  hypothetical: YES
WRIIIMQSLSWLNLAFRWLFITGLGYYIMTLLQWYHYSVFRILTKHHKMRWHGIYFLLPLGVFILSYAFKMPFVFDFFCGVIQMPMLIIWAKRNSKAFRFSRQG

SEQ ID NO: 5588 - protein, 400 aa, Helicobacter pylori
  misc_feature (B) LOCATION 1...400
  hypothetical: YES
VFTPRVKRFFIFLFLFLILHEILNTELAPLNGISLALGYLCLFILVLSASLIFEKVLSKQYLQTAKDKIASLKNLKVIAITGSFGKTSTKNFLHQILQTQFNAHASPKSVNTLLGIANDINQNLDDRSEIYIAEAGARNKGDIKEITRLIEPHLAVVAEVGEQHLEYFKTLENICETKAELLDSKRLEKAFCYSVEKIKPYAPKDSPLIDYSSLVRNVQSTLKGTSFETLINGVWESFETKVLGEFNAYNIASAILIAKHLGLETERIKRLVFELKPINHRLQLLEANQKIIIDDSFNGNLKGMLEGIRLASLHQGRKVIVTPGLVESNTESNEALAQKIDGVFDVAIITGELNSKTIASKLKTPQKILLKDKAQLENILQATTIQGDLILFATDAPNYI

SEQ ID NO: 5589 - protein, 493 aa, Helicobacter pylori
  misc_feature (B) LOCATION 1...493
  hypothetical: YES
MQSLSWLNLAFRWLFITGLGYYIMTLLQWYHYSVFRILTKHHKMRWHGIYFLLPLGVFILSYAFKMPFVFDFFCGVIQMPMLIIWAKRNDKPLVFTPRVKRFFIFLFLFLILHEILNTELAPLNGISLALGYLCLFILVLSASLIFEKVLSKQYLQTAKDKIASLKNLKVIAITGSFGKTSTKNFLHQILQTQFNAHASPKSVNTLLGIANDINQNLDDRSEIYIAEAGARNKGDIKEITRLIEPHLAVVAEVGEQHLEYFKTLENICETKAELLDSKRLEKAFCYSVEKIKPYAPKDSPLIDYSSLVRNVQSTLKGTSFETLINGVWESFETKVLGEFNAYNIASAILIAKHLGLETERIKRLVFELKPINHRLQLLEANQKIIIDDSFNGNLKGMLEGIRLASLHQGRKVIVTPGLVESNTESNEALAQKIDGVFDVAIITGELNSKTIASKLKTPQKILLKDKAQLENILQATTIQGDLILFANDAPNYI

SEQ ID NO: 5590 - protein, 111 aa, Helicobacter pylori
  misc_feature (B) LOCATION 1...111
  hypothetical: YES
KSLFFYCWRDLIKINPPPFKGYDWGMFLKLSFYICLPAALILKQPDLGTALIVLIMGFGILLIVGLRTRVWLPLLIALIVASPIAYHFLHDYQKKRIADFLSEKPNYHVMQ

SEQ ID NO: 5591 - protein, 139 aa, Helicobacter pylori
  misc_feature (B) LOCATION 1...139
  hypothetical: YES
NHKIRGYEKRMALDKRIWMHFDLLPFVFIIPLLVVSFLLIFESSAVLSLKQGVYYAIGFLLFWVVFFIPFRKLDRWLFALYWACVILLALVDFMGSSKLGAQRWLVIPFTSITLQPSEPVKIAILLLLARFDQNQPTSF

SEQ ID NO: 5592 - protein, 153 aa, Helicobacter pylori
  misc_feature (B) LOCATION 1...153
  hypothetical: YES
ANLKKPAPKPNSNSLPIATSDFIFAYFVKRFGFLGAILLFAIYIGLSLHLFFYLFESNSDWFLKIVALGISILIFVYSSVNIAMTLGLAPVVGIPLPLFSYGGSSFITFMILFAILGNVLAFRYILETIQTILWEFWILSSTGQSARLITDWS

SEQ ID NO: 5593 - protein, 373 aa, Helicobacter pylori
  misc_feature (B) LOCATION 1...373
  hypothetical: YES
MHFDLLPFVFIIPLLVVSFLLIFESSAVLSLKQGVYYAIGFLLFWVVFFIPFRKLDRWLFALYWACVILLALVDFMGSSKLGAQRWLVIPFTSITLQPSEPVKIAILLLLAHLIKINPPPFKGYDWGMFLKLSFYICLPAALILKQPDLGTALIVLIMGFGILLIVGLRTRVWLPLLIALIVASPIAYHFLHDYQKKRIADFLSEKPNYHVMQSIIAIGSGGFLGKSKEACTQTKFKFLPIATSDFIFAYFVERFGFLGAILLFAIYIGLSLHLFFYLFESNSDWFLKIVALGISILIFVYSSVNIAMTLGLAPVVGIPLPLFSYGGSSFITFMILFAILENLLAFRYIFGNNSKPSFGNFGFLAQLVRALGS

SEQ ID NO: 5594 - protein, 381 aa, Helicobacter pylori
  misc_feature (B) LOCATION 1...381
  hypothetical: YES
MALDKRIWMHFDLLPFVFIIPLLVVSFLLIFESSAVLSLKQGVYYAIGFLLFWVVFFIPFRKLDRWLFALYWACVILLALVDFMGSSKLGAQRWLVIPFTSITLQPSEPVKIAILLLLAHLIKINPPPFKGYDWGMFLKLSFYICLPAALILKQPDLGTALIVLIMGFGILLIVGLRTRVWLPLLIALIVASPIAYHFLHDYQKKRIADFLSEKPNYHVMQSIIAIGSGGFLGKSKEACTQTKFKFLPIATSDFIFAYFVERFGFLGAILLFAIYIGLSLHLFFYLFESNSDWFLKIVALGISILIFVYSSVNIAMTLGLAPVVGIPLPLFSYGGSSFITFMILFAILENLLAFRYIFGNNSKPSFGNFGFLAQLVRALGS

SEQ ID NO: 5595 - protein, 160 aa, Helicobacter pylori
  misc_feature (B) LOCATION 1...160
  hypothetical: YES
MLKKKIDLHKDSIRKLFFYYFIPLVFSMISLSTYSMVDGMFVGKKLGKEAIAAVNIAWPIFPGLIAYELLFGFGAASIVGYFLGQNKTHRARLVFSSVFYFVALSAFILSMALLPFSENIARFFGSNDALLSMSKRYIEIILMGSVFMVLHPLADDLCCE

SEQ ID NO: 5596 - protein, 300 aa, Helicobacter pylori
  misc_feature (B) LOCATION 1...300
  hypothetical: YES
MLKKKIDLHKDSIRKLFFYYFIPLVFSMISLSTYSMVDGMFVGKKLGKEAIAAVNIAWPIFPGLIAYELLFGFGAASIVGYFLGQNKTHRARLVFSSVFYFVALSAFILSMALLPFSENIARFFGSNDALLSMSKRYIEIILMGSVFMVLHPLADVFVVNDKRPVLAMVAMLIGSLANIFFNYLFIFVLEVGVQGSAIATVIGHAIGVLVLMQHFWRKKGQLYFIKRFSLSSVISSAKSGVPQSTAEFSASIMILLFNTAIMHTAGERFVSMYGIVMYNAIIFFTTLFAISQGIQPIAEL

SEQ ID NO: 5597 - protein, 190 aa, Helicobacter pylori
  misc_feature (B) LOCATION 1...190
  hypothetical: YES
MPTMLAVGFWVLVFLSTSNAVNLTDGLDGLASVPSIFTLLSLSIFVYVAGNAEFSKYLLYPKVIDVGELFVISLALVGSLFGFLWYNCNPASVFMGDSGSLAIGGFIAYNAIVSHNEILLVLMGSIFVIETLSVILQVGSYKTRKKRLFLMAPIHHHFEQKGWAENKVIVRFWIISMLSNLVALLSLKVC

SEQ ID NO: 5598 - protein, 353 aa, Helicobacter pylori
  misc_feature (B) LOCATION 1...353
  hypothetical: YES
MLYSLLYGYFNINLFQYLTFRAGLGFFIAFFLTLFLMPKFILWAKAKKANQPISSFVPSHQNKKDTPTMGGIVFVFATIVASVLCASLSNLYVLLGIIVLVGFSFVGFRDDYTKINQQNNAGMSAKMKFGMLFILSLIVSVLLSLKGLDTFLYAPFLKNPLFEMPTMLAVGFWVLVFLSTSNAVNLTDGLDGLASVPSIFTLLSLSIFVYVAGNAEFSKYLLYPKVIDVGELFVISLALVGSLFGFLWYNCNPASVFMGDSGSLAIGGFIAYNAIVSHNEILLVLMGSIFVIETLSVILQVGSYKTRKKRLFLMAPIHHHFEQKGWAENKVIVRFWIISMLSNLVALLSLKVC

SEQ ID NO: 5599 - protein, 376 aa, Helicobacter pylori
  misc_feature (B) LOCATION 1...376
  hypothetical: YES
ANQFALQFSFSNFKHGDFTTRDFMLYSLLYGYFNINLFQYLTFRAGLGFFIAFFLTLFLMPKFILWAKAKKANQPISSFVPSHQNKKDTPTMGGIVFVFATIVASVLCASLSNLYVLLGIIVLVGFSFVGFRDDYTKINQQNNAGMSAKMKFGMLFILSLIVSVLLSLKGLDTFLYAPFLKNPLFEMPTMLAVGFWVLVFLSTSNAVNLTDGLDGLASVPSIFTLLSLSIFVYVAGNAEFSKYLLYPKVIDVGELFVISLALVGSLFGFLWYNCNPASVFMGDSGSLAIGGFIAYNAIVSHNEILLVLMGSIFVIETLSVILQVGSYKTRKKRLFLMAPIHHHFEQKGWAENKVIVRFWIISMLSNLVALLSLKVC

SEQ ID NO: 5600 - protein, 117 aa, Helicobacter pylori
  misc_feature (B) LOCATION 1...117
  hypothetical: YES
TPSMIVTETSTGKILALVGGIDYKKSAFNRATQAKRQFGSAIKPFVYQIAFDNGYSTTSKIPDTARNFENGNYSKNSVQNHAWHPSNYTRKFLGLVTLQEALSHSLNLATINLAIAW

SEQ ID NO: 5601 - protein, 159 aa, Helicobacter pylori
  misc_feature (B) LOCATION 1...159
  hypothetical: YES
VITNQQNEVKTFTPIETKKITSKEQAFLTLSALMDAVENGTGSLARIKGLEIAGKTGTSNNNIDAWFIGFTPTLQSVIWFGRDDNTPIGKGATGGVVSAPVYSYFMRNILAIEPSLKRKFDVPKGLRKEIVDKIPYYSSPNSITPTPKKTDDSEERLLF

SEQ ID NO: 5602 - protein, 344 aa, Helicobacter pylori
  misc_feature (B) LOCATION 1...344
  hypothetical: YES
EWLMLKKIFYGFIVLFLIIVGLLAVLVAQVWVTTDKDIAKIKDYRPSVASQILDRKGRLIANIYDKEFRFYARFEEIPPRFVESLLAVEDTLFFEHGGINLDAVMRAMIKNAKSGRYTEGGSTLTQQLVKNMVLTREKTLTRKLKEAIISIRIEKVLSKEEILERYLNQTFFGHGYYGVKTASLGYFKKPLDKLTLKEITMLVALPRAPSFYDPTKNLEFSLSRANDILRRLYSLGWISSNELKSALNEVPIVYNQTSTQNIAPYVVDEVLKQLDQLDGLKTQGYTIKLTIDLDYQRLALESLRFGHQKILEKIAKEKPKTNASNDKDEDNLNAQHDSYRNEHR

SEQ ID NO: 5603 - protein, 660 aa, Helicobacter pylori
  misc_feature (B) LOCATION 1...660
  hypothetical: YES
MLKKIFYGFIVLFLIIVGLLAVLVAQVWVTTDKDIAKIKDYRPSVASQILDRKGRLIANIYDKEFRFYARFEEIPPRFVESLLAVEDTLFFEHGGINLDAVMRAMIKNAKSGRYTEGGSTLTQQLVKNMVLTREKTLTRKLKEAIISIRIEKVLSKEEILERYLNQTFFGHGYYGVKTASLGYFKKPLDKLTLKEITMLVALPRAPSFYDPTKNLEFSLSRANDILRRLYSLGWISSNELKSALNEVPIVYNQTSTQNIAPYVVDEVLKQLDQLDGLKTQGYTIKLTIDLDYQRLALESLRFGHQKILEKIAKEKPKTNASNDKDEDNLNASMIVTETSTGKILALVGGIDYKKSAFNRATQAKRQFGSAIKPFVYQIAFDNGYSTTSKIPDTARNFENGNYSKNSVQNHAWHPSNYTRKFLGLVTLQEALSHSLNLATINLSDQLGFEKIYQSLSDMGFKNLPKDLSIVLGSFAISPIDAAEKYSLFSNYGTMLKPMLIESITNQQNEVKTFTPIETKKITSKEQAFLTLSALMDAVENGTGSLARIKGLEIAGKTGTSNNNIDAWFIGFTPTLQSVIWFGRDDNTPIGKGATGGVVSAPVYSYFMRNILAIEPSLKRKFDVPKGLRKEIVDKIPYYSSPNSITPTPKKTDDSEERLLF

SEQ ID NO: 5604 - protein, 77 aa, Helicobacter pylori
  misc_feature (B) LOCATION 1...77
  hypothetical: YES
SMKKTTLFVLGLLFNSSLSAVDGISQTEPSSLNLAEDSLPLNHSNAQKLSLKNAWNRVLSNHEGLHAQNTPLSERVK

SEQ ID NO: 5605 - protein, 124 aa, Helicobacter pylori
  misc_feature (B) LOCATION 1...124
  hypothetical: YES
TQKWSETLKEMEKGHYNHFQNALKMQKVRQIATVNTLRAQLAYDKAHIASVKAKDVLEVSQLSFNSILSSKDDLAPSGKLEIHTEKNLPDLSFFVSSTLNSYPVLKTLENQIQISKENTKLQIA

SEQ ID NO: 5606 - protein, 177 aa, Helicobacter pylori
  misc_feature (B) LOCATION 1...177
  hypothetical: YES
KIRFKFLKKTQNFRSLNSLPQESFLRSYFLKHNNSVFEDMIPNWFVDVAGGMPILSPTGRIQKYQASKLAELQVNSEQIQAKKNMELLVNKTYKETLSYLKEYKSLLSSVKLAKENLKLQEQAFLQGLSTNAQVIDARNTLSSIIVEQKSVAYKYIVSLANLMALSDHIDLFYEFVY

SEQ ID NO: 5607 - protein, 510 aa, Helicobacter pylori
  misc_feature (B) LOCATION 1...510
  hypothetical: YES
MKKTTLFVLGLLFNSSLSAVDGISQTEPSSLNLAEDSLPLNHSNAQKLSLKNAWNRVLSNHEGLHAQEYAIKRASKMKLAAKLSFLPQIDLSAFYVYLSNPIKMDFASQKQAGVQKATNQIHQGLQNIQQNIPPQVLTPQIQAGIQGVMQGFGALSSTLEAPLLFSKQNVVIGALSIIYPLYMGGARFTMVRIADLMQKDANEVYRLKKLSTFQELVSVYYGMVLNAEVAETLEEVEKGHYKHFQNALKMQKVGQIARVETLGAQVAYDKAHIASVKAKDVLEVSQLSFNSILSSKDDLAPSGKLEIHTEKNLPDLSFFVSSTLNSYPVLKTLENQIQISKENTKLQIAKFLPQVSFFGSYLMKQNNSVFEDMIPNWFVGVAGRMPILSPTGRIQKYQASKLAELQVNSEQIQAKKNMELLVNKTYKETLSYLKEYKSLLSSVELAKENLKLQEQAFLQGLSTNAQVIDARNTLSSIIVEQKSVAYKYIVSLANLMALSDHIDLFYEFVY

SEQ ID NO: 5608 - protein, 80 aa, Helicobacter pylori
  misc_feature (B) LOCATION 1...80
  hypothetical: YES
GVRLSKWGGITPLEPAFFNTRLITGEYLFNQVALFELIKPYKIVQKEDLLGALLDYKNLGVARFLENGHDLNELLALIKH

SEQ ID NO: 5609 - protein, 331 aa, Helicobacter pylori
  misc_feature (B) LOCATION 1...331
  hypothetical: YES
LFKFFYLLCLTLGHLFCAPFILLLSFKEKYRHSLKARFFLKGNLLKSEPIFWFHACSYGEVKSLEPIIHALKEPILISVTTHTGFELAAQTYQHSQHIEVRYLPFETLLFAWEKNLKRLKTLVVTEAELWFNVFDTAQKLGAKTMLINARISVRSYPKYQRFSFFYALLFKRIDLILAQSKADQKRLLNLGAKKVVDFLNIKRFSKPVITSFYPKNPSALNIVLASTHEGEEELGLKAFLELKKTFKNARLFVVPRHPERFKSVRNLLQDILKTTLFSLECFSSKGFVECDILLVDRLGELNNFYKIADIVILGGSFVKMGGHNPFRAGVF

SEQ ID NO: 5610 - protein, 393 aa, Helicobacter pylori
  misc_feature (B) LOCATION 1...393
  hypothetical: YES
LFKFFYLLCLTLGHLFCAPFILLLSFKEKYRHSLKARFFLKGNLLKSEPIFWFHACSYGEVKSLEPIIHALKEPILISVTTHTGFELAAQTYQHSQHIEVRYLPFETLLFAWEKNLKRLKTLVVTEAELWFNVFDTAQKLGAKTMLINARISVRSYPKYQRFSFFYALLFKRIDLILAQSKADQKRLLNLGAKKVVDFLNIKRFSKPVITSFYPKNPSALNIVLASTHEGEEELGLKAFLELKKTFKNARLFVVPRHPERFKSVRNLLQDILKTTLFSLECFSSKGFVECDILLVDRLGELNNFYKIADIVILGGSFVKMGGHNPLEPAFFNTRLITGEYLFNQVALFELIKPYKIVQKEDLLGALLDYKNLGVARFLENGHDLNELLALIKH

SEQ ID NO: 5611 - protein, 175 aa, Helicobacter pylori
  misc_feature (B) LOCATION 1...175
  hypothetical: YES
KAQEESKVLIENAKNDGYKIGFKEGEEKMRNELTHSVNEEKNQLLHAITALDEKMKSSENHLMALEKELSAIAIDIAKEVILKEVEDNSQKVALALAEELLKNVLDATDIHLKVNPLDYPYLNEHLQNASKIKLESNEAISKGGVMITSSNGSLDGNLMERFKTLKESVLDNFKV

SEQ ID NO: 5612 - protein, 258 aa, Helicobacter pylori
  misc_feature (B) LOCATION 1...258
  hypothetical: YES
MSLNSRKNLIQKDHLNKHDIQKYEFKSMANLPPKTNPNSASLETPNPQEPLEKKAIENDLIDCLLKKTDELSSHLVKLQMQFEKAQEESKVLIENAKNDGYKIGFKEGEEKMRNELTHSVNEEKNQLLHAITALDEKMKSSENHLMALEKELSAIAIDIAKEVILKEVEDNSQKVALALAEELLKNVLDATDIHLKVNPLDYPYLNEHLQNASKIKLESNEAISKGGVMITSSNGSLDGNLMERFKTLKESVLDNFKV

SEQ ID NO: 5613 - protein, 65 aa, Helicobacter pylori
  misc_feature (B) LOCATION 1...65
  hypothetical: YES
MAEIKKAKNLGEWLDMRLGTNKLVKVLMTEYWIPKNINFLWAMGVILLTLFGVLVISGIFLLMYY

SEQ ID NO: 5614 - protein, 73 aa, Helicobacter pylori
  misc_feature (B) LOCATION 1...73
  hypothetical: YES
WLKRKESSMAEIKKAKNLGEWLDMRLGTNKLVKVLMTEYWIPKNINFLWAMGVILLTLFGVLVISGIFLLMYY

SEQ ID NO: 5615 - protein, 82 aa, Helicobacter pylori
  misc_feature (B) LOCATION 1...82
  hypothetical: YES
SSSYCPFWTEAQSSLPHKRPAFMVWFWLLIIDMIVLTIHGKLPPFGIGKYIGLFGSITFLALFFVVLPIITIAERKKQGGVR

SEQ ID NO: 5616 - protein, 91 aa, Helicobacter pylori
  misc_feature (B) LOCATION 1...91
  hypothetical: YES
MAFGVAQVIFFLLPFLDRSPVVAPAHKRPAFMVWFWLLIIDMIVLTIYGKLPPLGIGKYIGLFGSITFLALFFVVLPIITIAERKKQGGVR

SEQ ID NO: 5617 - protein, 176 aa, Helicobacter pylori
  misc_feature (B) LOCATION 1...176
  hypothetical: YES
LKARKKNPKSFLFGRCSCLKIFLWFARSWCFSFTWCATSMILRWIPSTLKGVTALKRRLTFTLNGISLWSYEVLRGFFFSADLGLMAFGVAQVIFFLLPFLDRSPVVAPAHKRPAFMVWFWLLIIDMIVLTIYGKLPPLGIGKYIGLFGSITFLALFFVVLPIITIAERKKQGGVR

SEQ ID NO: 5618 - protein, 225 aa, Helicobacter pylori
  misc_feature (B) LOCATION 1...225
  hypothetical: YES
PKIAPLAMALNPKTFQPLWIALVRATLLGWGHRNLSHVAGVLNASFLAHFIKDPVKTAKLSHKFNDERPYPMPAFSQFSDQDLSDIVAYLTSILPKNLSDKEVFAQSCQRCHSLDYAKDKAFSDPKDLANYLGSHAPDLSMMIRAKGEHGLNVFINDPQKLLPGTAMPRVGLNEKAQKQVISYLEKAGDRKKHERNTLGIKIMIFFAVLSFLAYDWKRKVWSEVH

SEQ ID NO: 5619 - protein, 285 aa, Helicobacter pylori
  misc_feature (B) LOCATION 1...285
  hypothetical: YES
MKEFKILIILIVVIGVIYYGVEPYAHSVMHPKVAPADFAFKDLEPIDLKNGDANKGKQLVAENCTACHGIKSQNIPAPMDSLSASNSFGVVPPDLSHVAGVLNASFLAHFIKDPVKTAKLSHKFNDERPYPMPAFSQFSDQDLSDIVAYLTSILPKNLSDKEVFAQSCQRCHSLDYAKDKAFSDPKDLANYLGSHAPDLSMMIRAKGEHGLNVFINDPQKLLPGTAMPRVGLNEKAQKQVISYLEKAGDRKKHERNTLGIKIMIFFAVLSFLAYAWKRKVWSEVH

SEQ ID NO: 5620 - protein, 52 aa, Helicobacter pylori
  misc_feature (B) LOCATION 1...52
  hypothetical: YES
VETRDFYGKKLRYHYKHEFSQAKDYVKIRGEDNLFSYTKVTSVGYRITEKTL

SEQ ID NO: 5621 - protein, 133 aa, Helicobacter pylori
  misc_feature (B) LOCATION 1...133
  hypothetical: YES
MLGVALACLISQIPLTISIENERANKDLTFFLECLKALQANAPIVYESLQKFSEKLNAFNRVRYLKSDLDLLHEQASRLGMVLATAKPCLNGRFELLYYHLERSVSISYHRYGNLGSRVLRQPTCHKSCCAEK

SEQ ID NO: 5622 - protein, 149 aa, Helicobacter pylori
  misc_feature (B) LOCATION 1...149
  hypothetical: YES
SYKRGLSHHRKDTLSDMLGVALACLISQIPLTISIENERANKDLTFFLECLKALQANAPIVYESLQKFSEKLNAFNRVRYLKSDLDLLHEQASRLGMVLATAKPCLNGRFELLYYHLERSVSISYHRYGNLGSRVLRQPTCHKSCCAEK

SEQ ID NO: 5623 - protein, 179 aa, Helicobacter pylori
  misc_feature (B) LOCATION 1...179
  hypothetical: YES
VFRVYPYSLRVLQEQNKKTKFTPKGVGVVIAPWNFPVGISVGTIAAPLAAGNRVIYKPSSLSSVTGYKLCECFWDAGVPRDALIYLPSKGSDISEHLLKDESIKFAILTGGEDTAYKMLKANPTLALSAETGGKNATIVSKMADRDQAIKNVIHSAFSNSGQKCSATSLLVLEKEVYGR

SEQ ID NO: 5624 - protein, 575 aa, Helicobacter pylori
  misc_feature (B) LOCATION 1...575
  hypothetical: YES
VFRVYPYSLRVLQEQNKKTKFTPKGVGVVIAPWNFPVGISVGTIAAPLAAGNRVIYKPSSLSSVTGYKLCECFWDAGVPRDALIYLPSKGSDISEHLLKDESIKFAILTGGEDTAYKMLKANPTLALSAETGGKNATIVSKMADRDQAIKNVIHSAFSNSGQKCSATSLLVLEKEVYEDENFKKTLIDATLSLSVGDPFDFKNKIGALADKPNEKVIKAIDELKSYENYEIPASFVDDNPYLMKPSIKYGTKKGDFTHQTELFTPILSVMKAKDLDEAIEIVNSTGYGLTSALESLDEREWEYYLERIEAGNIYINKPTTGAIVLRQPFGGVKKSAVGFGRKVGIFNYITQFVNIHQEEEDENALKNPLSEALEGLTQKGYDEHTHELKRAIFMAKSYAYHYKHEFSQAKDYVKIRGEDNLFSYTKVTSVGYRITEKDTLSDMLGVALACLISQIPLTISIENERANKDLTFFLECLKALQANAPIVYESLQKFSEKLNAFNRVRYLKSDLDLLHEQASRLGMVLATAKPCLNGRFELLYYHLERSVSISYHRYGNLGSRVLRQPTCHKSCCAEK

SEQ ID NO: 5625 - protein, 61 aa, Helicobacter pylori
  misc_feature (B) LOCATION 1...61
  hypothetical: YES
FLPLFCAWQGGGISCIKARFDPKGGIYTLWPLFGVSNQMLAGMALLLVRVVLFKMGRLRGR

SEQ ID NO: 5626 - protein, 173 aa, Helicobacter pylori
  misc_feature (B) LOCATION 1...173
  hypothetical: YES
LPLFCAWQGGGISCIKARFDPKGGIYTLWPLFGVSNQMLAGMALLLVTVVLFKMGRFKGAIISALPAVLILAITFYSGILKVMPKSNDSVLNNVSHVAQMQIIKEKIALTTDEKALKTLQKSFFNHAIDAILCVFFMLVALLVLIVSVRICSNAYFKNQIYPPLAETPYIKAA

SEQ ID NO: 5627 - protein, 82 aa, Helicobacter pylori
  misc_feature (B) LOCATION 1...82
  hypothetical: YES
YHILGDPSVMAFWYHFAILFEALFILTAVDAGTRTARFMIQDLPGNIYKPLGDLSSYKAVIFATLLCVAGWGHFLYQGTIRS

SEQ ID NO: 5628 - protein, 81 aa, Helicobacter pylori
  misc_feature (B) LOCATION 1...81
  hypothetical: YES
HILGDPSVMAFWYHFAILFEALFILTAVDAGTRTARFMIQDLPGNIYKPLGDLSSYKAVIFATLLCVAGWGHFLYQGTIRS

SEQ ID NO: 5629 - protein, 276 aa, Helicobacter pylori
  misc_feature (B) LOCATION 1...276
  hypothetical: YES
IVLCHFIAYRVLKLDDSRATPACVRNDGKDFVPTDKAITFGHHFAAIAGAGPLVGPILAAQMGYLPSILWILIGSVLGGCVHDFVVLFASIRRDGKSLGEMIKLEMGKFVGMIASLGILGIMLIIIAILAMVVVKALAHSPWGFFTIAMTIPIAILMGLYMRFFRPHKILEVSVIGFILLIIAIYAGKYVSLDPKLASIFTFEAGSLAWMIMGYGFVASILPVWFLLAPRDYLSTFLKIGVIGVLVVAIVFVAPPLQIRQITPFLDTELRFSKDVP

SEQ ID NO: 5630 - protein, 279 aa, Helicobacter pylori
  misc_feature (B) LOCATION 1...279
  hypothetical: YES
AIVLCHFIAYRVLKLDDSRATPACVRNDGKDFVPTDKAITFGHHFAAIAGAGPLVGPILAAQMGYLPSILWILIGSVLGGCVHDFVVLFASIRRDGKSLGEMIKLEMGKFVGMIASLGILGIMLIIIAILAMVVVKALAHSPWGFFTIAMTIPIAILMGLYMRFFRPHKILEVSVIGFILLIIAIYAGKYVSLDPKLASIFTFEAGSLAWMIMGYGFVASILPVWFLLAPRDYLSTFLKIGVIGVLVVAIVFVAPPLQIRQITPFLDTELRFSKDVPGC

SEQ ID NO: 5631 - protein, 535 aa, Helicobacter pylori
  misc_feature (B) LOCATION 1...535
  hypothetical: YES
MQKSLVSLAWVFVAILGAICLGVLALHKGESINTLWLVVASACIYSIGYRFYSHFIAYRVLKLDDSRATPACVRNDGKDFVPTDKAITFGHHFAAIAGAGPLVGPILAAQMGYLPSILWILIGSVLGGCVHDFVVLFASIRRDGKSLGEMIKLEMGKFVGMIASLGILGIMLIIIAILAMVVVKALAHSPWGFFTIAMTIPIAILMGLYMRFFRPHKILEVSVIGFILLIIAIYAGKYVSLDPKLASIFTFEAGSLAWMIMGYGFVASILPVWFLLAPRDYLSTFLKIGVIGVLVVAIVFVAPPLQIPKITPFVDGSGPVFAGSVFPFLFITVACGTISGFHALISSGTTPKMLAKESDARLVGYGSMVMESVVALMALVCAGILHPGLYFAINSPEVSIGKDIADAASVISSWGFSISAEEIREMTKNIGESSILSRTGGAPTFAIGLAMIVYHILGDPSVMAFWYHFAILFEALFILTAVDAGTRTARFMIQDLLGNIYKPLGDLSSYKAGIFATLLCVAGWGYFLYQGTIRS

SEQ ID NO: 5632 - protein, 210 aa, Helicobacter pylori
  misc_feature (B) LOCATION 1...210
  hypothetical: YES
KKTILFTLRLFSCFLLPGLVEILPNFFKSARPIEGYRPYTVLETAGRQIYIQEGCYHCHSQLIRPFQAEVDRYGAYSLSGEYAYDRPFLWGSKRIGPDLHRVGDYRTTDWHEKHMLDPKSVVPHSIMPAYKHLFIKKSDFDTAYAEALTQKKVFGVPYDTENGVKLGNVEEAKKAYLEEAKKITADMKDKRVLEAIERGEVLEIVALIAY

SEQ ID NO: 5633 - protein, 232 aa, Helicobacter pylori
  misc_feature (B) LOCATION 1...232
  hypothetical: YES
MFSFLEKNPFFFTLAFIFVFSIAGLVEILPNFFKSARPIEGLRPYTVLETAGRQIYIQEGCYHCHSQLIRPFQAEVDRYGAYSLSGEYAYDRPFLWGSKRIGPDLHRVGDYRTTDWHEKHMLDPKSVVPHSIMPAYKHLFIKKSDFDTAYAEALTQKKVFGVPYDTENGVKLGNVEEAKKAYLEEAKKITADMKDKRVLEAIERGEVLEIVALIAYLNSLGNSRINANQNAK

SEQ ID NO: 5634 - protein, 52 aa, Helicobacter pylori
  misc_feature (B) LOCATION 1...52
  hypothetical: YES
RKVEMDFLNDHINVFGLIAALVILVLTIYESSSLIKEMAIANLKVSSWKMGI

SEQ ID NO: 5635 - protein, 132 aa, Helicobacter pylori
  misc_feature (B) LOCATION 1...132
  hypothetical: YES
RNGDSKSQGELMENGHLIDGIGEFANNVPVGWIASFMCVIVWAFWYFFFGYPLSSFSQIGQYNEEVKAHNQKFEAKWKHLGQKELVDMGQGIFLVHCSQCHGITADGLHGSAQNLLRWDKEEGIMDTIKHGS

SEQ ID NO: 5636 - protein, 165 aa, Helicobacter pylori
  misc_feature (B) LOCATION 1...165
  hypothetical: YES
MDFLNDHINVFGLIAALVILVLTIYESSSLIKEMRDSKSQGELMENGHLIDGIGEFANNVPVGWIASFMCVIVWAFWYFFFGYPLSSFSQIGQYNEEVKAHNQKFEAKWKHLGQKELVDMGQGIFLVHCSQCHGITADGLHGSAQNLLRWDKEEGIMDTIKHGSK

SEQ ID NO: 5637 - protein, 64 aa, Helicobacter pylori
  misc_feature (B) LOCATION 1...64
  hypothetical: YES
RFDHLHPLHTNAVIYGFTLEGIWASWYYIGQRVFKITYHQHPFLKIVGLLHFWLWILLLSPRGY

SEQ ID NO: 5638 - protein, 228 aa, Helicobacter pylori
  misc_feature (B) LOCATION 1...228
  hypothetical: YES
LLVLLNLKXTPNLMWPLDIIVVVAWVLWGVNMFGSMSVRRENTIYVSLWYYIATYVGIAVMYIFNNLSIPTYFVADMGSVWHXISMYSGSNDALIQWWWGHNAVAFVFTSGVIGTIYYFLPKESGQPIFSYKLTLFSFWSLMFVYIWAGGHHLIYSTVXDXVQTLSSXFSVVLILPSXGTAINMLLXMRGQWHQXKESPLIKFLVLASTFYMLSTLEGSIQAIKSVNA

SEQ ID NO: 5639 - protein, 375 aa, Helicobacter pylori
  misc_feature (B) LOCATION 1...375
  hypothetical: YES
GLLACLLVLLNLKITPNLMWPLDIIVVVAWVLWGVNMFGSMSVRRENTIYVSLWYYIATYVGIAVMYIFNNLSIPTYFVADMGSVWHSISMYSGSNDALIQWWWGHNAVAFVFTSGVIGTIYYFLPKESGQPIFSYKLTLFSFWSLMFVYIWAGGHHLIYSTVPDWVQTLSSVFSVVLILPSWGTAINMLLTMRGQWHQLKESPLIKFLVLASTFYMLSTLEGSIQAIKSVNALAHFTDWIIGHVHDGVLGWVGFTLIASMYHMTPRLFKREIYSGRLVDFQFWIMTLGIVLYFSSMWIAGITQGMMWRDVDQYGNLTYQFIDTVKALIPYYNIRGVGGLMYFIGFIIFAYNIFMTITAGKKLEREPNYATPMAR

SEQ ID NO: 5640 - protein, 488 aa, Helicobacter pylori
  misc_feature (B) LOCATION 1...488
  hypothetical: YES
MQENVPLSYDYSISKLFLYAMIAFGIIGMLIGIVLAFELSFPSLNYIAGEYGVFGRLRPLHTNAVIYGFTLGGIWASWYYIGQRVLKITYHQHPFLKIVGLLHFWLWILLLVLGVISLFAGLTQSKEYAELMWPLDIIVVVAWVLWGVNMFGSMSVRRENTIYVSLWYYIATYVGIAVMYIFNNLSIPTYFVADMGSVWHSISMYSGSNDALIQWWWGHNAVAFVFTSGVIGTIYYFLPKESGQPIFSYKLTLFSFWSLMFVYIWAGGHHLIYSTVPDWVQTLSSVFSVVLILPSWGTAINMLLTMRGQWHQLKESPLIKFLVLASTFYMLSTLEGSIQAIKSVNALAHFTDWIIGHVHDGVLGWVGFTLIASMYHMTPRLFKREIYSGRLVDFQFWIMTLGIVLYFSSMWIAGITQGMMWRDVDQYGNLTYQFIDTVKALIPYYNIRGVGGLMYFIGFIIFAYNIFMTITAGKKLEREPNYATPMAR

SEQ ID NO: 5641 - protein, 128 aa, Helicobacter pylori
  misc_feature (B) LOCATION 1...128
  hypothetical: YES
RIAKFYLSWLFCLFIGIFFITTSLGRVWCGWACPQTFLRVLYRDVIETKIFKLHKKISNKQESHKNTPSYKIRKALSVLLFAPVVAWLMMLFFFYFIAPEDFFMYLKNPSDHPIAMGFWLFSALVVPI

SEQ ID NO: 5642 - protein, 132 aa, Helicobacter pylori
  misc_feature (B) LOCATION 1...132
  hypothetical: YES
YPCHKRFSLTHSQKESPQSNSPKGVKITLILVRKFKTPSINTLSNKIAIIITCCFLSESVKLLGYSGLKNFRILRMLETSSHFLKSFRLKRYIGFLLISLALLITPFVRIDGAHLFLISFEHKQLHFLGKNL

SEQ ID NO: 5643 - protein, 180 aa, Helicobacter pylori
  misc_feature (B) LOCATION 1...180
  hypothetical: YES
NAWSMHHYQAKYNRPSLIQWSSTNAINTRQKVRLVRLKTIAYMGVIAVVVALLIITSFKKERMLLDINRNSDLYEIRSSGYVDNDYVFLFHNTDNKDHEFYFKILGQKDIQIKKPLNPIAIKAGQKIKAVVILRKPLKGNATEYKHAKDALIPITIQAYSVDDKNITIERESVFIVPSED

SEQ ID NO: 5644 - protein, 458 aa, Helicobacter pylori
  misc_feature (B) LOCATION 1...458
  hypothetical: YES
MLETSSHFLKSFRLKRYIGFLLISLALLITPFVRIDGAHLFLISFEHKQLHFLGKIFSAEELQILPFMVILLFIGIFFITTSLGRVWCGWACPQTFLRVLYRDVIETKIFKLHKKISNKQESPKNTPSYKIRKALSVLLFAPVVAGLMMLFFFYFIAPEDFFMYLKNPSDHPIAMGFWLFSALVVLFDIVVVAERFCIYLCPYARVQSVLYDNDTLNPIYDEKRGGVLYDNQGRLFPLPPKKRSAENECVNCLHCVQVCPTHIDIRKGLQLECINCLECVDACTITMAKYNRPSLIQWSSTNAINTRQKVRLVRLKTIAYMGVIAVVVALLIITSFKKERMLLDINRNSDLYEIRSSGYVDNDYVFLFHNTDNKDHEFYFKILGQKDIQIKKPLNPIAIKAGQKIKAVVILRKPLKGNATEYKHAKDALIPITIQAYSVDDKNITIERESVFIVPSED

SEQ ID NO: 5645 - protein, 143 aa, Helicobacter pylori
  misc_feature (B) LOCATION 1...143
  hypothetical: YES
MMFDNTLINLFETAPLLTSLLAGILTFLSPCVLPLIPAYMSYISQISLEDIKDGKAKRVSVFLKSLMFVVGFSLVFLGVGMSMAKLIHSFSFSWVNYIAGGIVILFGLHFLGVFRFAFLYKTQSVGLASKSNSMQRFTPFFLA

SEQ ID NO: 5646 - protein, 239 aa, Helicobacter pylori
  misc_feature (B) LOCATION 1...239
  hypothetical: YES
MFDNTLINLFETAPLLTSLLAGILTFLSPCVLPLIPAYMSYISQISLEDIKDGKAKRVSVFLKSLMFVVGFSLVFLGVGMSMAKLIHSFSFSWVNYIAGGIVILFGLHFLGVFRFAFLYKTQSVGLASKSNSMQRFYPFLLGMSFALGWTPCIGPIFTSIVIMSASKDAYGLMLMVVFVMGLAIPFLLVALMLERALLFLKSLRKYNRAIEIVSGLVLILMGILIMTNSLESLTNFLQN

SEQ ID NO: 5647 - protein, 259 aa, Helicobacter pylori
  misc_feature (B) LOCATION 1...259
  hypothetical: YES
VRFCYSKKYKKTIILKKDWMMFDNTLINLFETAPLLTSLLAGILTFLSPCVLPLIPAYMSYISQISLEDIKDGKAKRVSVFLKSLMFVVGFSLVFLGVGMSMAKLIHSFSFSWVNYIAGGIVILFGLHFLGVFRFALLYKTQSAGLASKSNSMQRFYPFLLGMSFALGWTPCIGPIFTSIVIMSASKDAYGLMLMVVFVMGLAIPFVLVALMLERALLFLKSLRKYNRAIEIVSGLVLILMGILIMTNSLESLTNFLQN

SEQ ID NO: 5648 - protein, 151 aa, Helicobacter pylori
  misc_feature (B) LOCATION 1...151
  hypothetical: YES
CLRTLPKLDAYNRPSWAYGNRIHDLCERRGHFDAGEIVEHFGDENAKKGFCLYKMGCKRPYTFNNCSKLRFNSHIFWPLGAGHGCIGCSEPNFWDTMSPFEEPLANRSIKTAFDGLGADKVADKVGTTLLSATAIGIAAHALLSKAIKNKE

SEQ ID NO: 5649 - protein, 240 aa, Helicobacter pylori
  misc_feature (B) LOCATION 1...240
  hypothetical: YES
ITTTLFCYVKIMKISSEGVVMFYDEKRPIKGLEERLEVISSFNGHNEHKNLQDEFKGAGISRRDLLKWAGMMSVTLALPASFAPLTLKAVEVANRLPVIWLHMAECTGCSESLLRSADPTIDSIIFDYINLEYHETIMVASGFQAEKSLHDAIEKHKNNYILMVEGVIPQGTDTLFTQGPNAETGAEECRKVAQHAAAIFAIGTCSSFGGVQAAYPNPSNAQPLHKIIDKPVINVPGLPA

SEQ ID NO: 5650 - protein, 242 aa, Helicobacter pylori
  misc_feature (B) LOCATION 1...242
  hypothetical: YES
WPITTTLFCYVKIMKISSEGVVMFYDEKRPIKGLEERLEVISSFNGHNEHKNLQDEFKGAGISRRDLLKWAGMMSVTLALPASFAPLTLKAVEVANRLPVIWLHMAECTGCSESLLRSADPTIDSIIFDYINLEYHETIMVASGFQAEKSLHDAIEKHKNNYILMVEGVIPQGTDTLFTQGPNAETGAEECRKVAQHAAAIFAIGTCSSFGGVQAAYPNPSNAQPLHKIIDKPVINVPGLPA

SEQ ID NO: 5651 - protein, 384 aa, Helicobacter pylori
  misc_feature (B) LOCATION 1...384
  hypothetical: YES
MFYDEKKTYQRIEERLEVISSFNAHNEHKNLQDEFKGAGISRRDLLKWAGMMSVTLALPASFAPLTLKAVEVANRLPVIWLHMAECTGCSESLLRSADPTIDSIIFDYINLEYHETIMVASGFQAEKSLHDAIEKHKNNYILMVEGGIPQGTEYFLTQGPNAETGAEECRKVAQHAAAIFAIGTCSSFGGVQAAYPNPSNAQPLHKIIDKPVINVPGCPPSEKNIVGNVLYYLMFGTLPKLDAYNRPSWAYGNRIHDLCERRGHFDAGEIVEHFGDENAKKGFCLYKMGCKRPYTFNNCSKLRFNSHIFWPLGAGHGCIGCSEPNFWDTMSPFEEPLANRSIKTAFDGLGADKVADKVGTTLLSATAIGIAAHALLSKAIKNKE

SEQ ID NO: 5652 - protein, 224 aa, Helicobacter pylori
  misc_feature (B) LOCATION 1...224
  hypothetical: YES
MDKMNKVVLHKEYSGFVRFFHWVRALSIFTLIATGFYIAYPFLQPNSSFYKGVYLLQAYVRSFHVMFGFLLISALIFRTYLFFTKESLMERRSFSQLLSPKAWIDQMKAYFLISDKPHTKGLYNPIQLVAYFTLVVLIVLMSLSGIVLYYNVYHEGLGAFLANAFKWFEALCGGLANVRFIHHLATWGFILFVPVHVYMVFFHSIRYDSSGADSMINGYGYTKE

SEQ ID NO: 5653 - protein, 228 aa, Helicobacter pylori
  misc_feature (B) LOCATION 1...228
  hypothetical: YES
KGLRMDKMNKVVLHKEYSGFVRFFHWVRALSIFTLIATGFYIAYPFLQPNSSFYKGVYLLQAYVRSFHVMFGFLLISALIFRTYLFFTKESLMERRSFSQLLSPKAWIDQMKAYFLISDKPHTKGLYNPIQLVAYFTLVVLIVLMSLSGIVLYYNVYHEGLGAFLANAFKWFEALCGGLANVRFIHHLATWGFILFVPVHVYMVFFHSIRYDSSGADSMINGYGYTKE

SEQ ID NO: 5654 - protein, 255 aa, Helicobacter pylori
  misc_feature (B) LOCATION 1...255
  hypothetical: YES
PNREQSSPLKGKSVAVYTSPIDLAAKVDLVFTMLSDKAAIDAVLAPKFWEQMSKKIVVNMSTIAPLESLSLEKIAQKHQATYLEAPVSGSVGAAKAGALLILAAGDEEVISKLKPVLAHLGSQTFYLGKVGQGTGAKLSINSLLAQMGVAYSEALLLAKRLGVDAESFLQIIGQSGMNSPLFQAKKGMWLQDNYPAAFSLKLMAKDIRLAKNEAGEAMKLPFLFQAEELYSQAEKSGLGGLDMAAVYHYLEKGEH

SEQ ID NO: 5655 - protein, 285 aa, Helicobacter pylori
  misc_feature (B) LOCATION 1...285
  hypothetical: YES
MKIGWIGLGAMGTPMATRLRDAGLEVSVYNRTESKAAPLKEKGVAVYTSPIDLAAKVDLVFTMLSDKAAIDAVLAPKFWEQMSKKIVVNMSTIAPLESLSLEKIAQKHQATYLEAPVSGSVGAAKAGALLILAAGDEEVISKLKPVLAHLGSQTFYLGKVGQGTGAKLSINSLLAQMGVAYSEALLLAKRLGVDAESFLQIIGQSGMNSPLFQAKKGMWLQDNYPAAFSLKLMAKDIRLAKNEAGEAMKLPFLFQAEELYSQAEKSGLGGLDMAAVYHYLEKGEH

SEQ ID NO: 5656 - protein, 128 aa, Helicobacter pylori
  misc_feature (B) LOCATION 1...128
  hypothetical: YES
RVSGNLKSDQSTCAPYHIDKNQEYKGRYIGQVPRGMLSHWVRIKNGVVENYQAVVPSTWNAGPRDSKNQRGAYEMSLIGTKIADLTQPLEIIRTIHSFDPCIACSVHVMDFKGQSLNEFKVEPNFAKF

SEQ ID NO: 5657 - protein, 169 aa, Helicobacter pylori
  misc_feature (B) LOCATION 1...169
  hypothetical: YES
GINMSKKIVVDPITRIEGHLRIEVIVDDDNVITDAFSSSTLFRGLETIIKGRDPRDAGFIAQRICGVCTYSHYKAGVTAVENALGITPPLNAQLVRSLMNMALLFHDHVVHFYTLHGLDWCDILSTLKADPIQAAKLSFKYSPYPINTGAGRIKSGSKTLGMISLKADL

SEQ ID NO: 5658 - protein, 301 aa, Helicobacter pylori
  misc_feature (B) LOCATION 1...301
  hypothetical: YES
NAWNDFVKSGSLGPFSNGYYEHKTIRLNPEQNLIVLSHYLKLLEIQREAAKMTAIFGAKQPHPQSLTVGGVTSVMDILDPTRLAEWKSKFEVVANFINHAYYPDLVMAGEMFANEPSVIKGCGLRNFIAYEEVLLGKDKYLLSSGVVLDGDISKLHPIDESLIKEEVTHSWYQYEDTKEVQLHPYDGQTNPHYTGLKDGESVGIENKIIPAKVLDTKDKYSWIKSPRYDSKPMEVGPLSSVVVGLAAKNPYVTEVATKFLKDTKLPLEALFSTLGRTAARCIEAKTIADNGLLAFDALVEI

SEQ ID NO: 5659 - protein, 578 aa, Helicobacter pylori
  misc_feature (B) LOCATION 1...578
  hypothetical: YES
MSKKIVVDPITRIEGHLRIEVIVDDDNVITDAFSSSTLFRGLETIIKGRDPRDAGFIAQRICGVCTYSHYKAGVTAVENALGITPPLNAQLVRSLMNMALLFHDHVVHFYTLHGLDWCDILSTLKADPIQAAKLSFKYSPYPINTGAGELKAVQKRLNDFAKSGSLGPFSNGYYGHKTYRLNPEQNLIVLSHYLKLLEIQREAAKMTAIFGAKQPHPQSLTVGGVTSVMDILDPTRLAEWKSKFEVVANFINHAYYPDLVMAGEMFANEPSVIKGCGLRNFIAYEEVLLGKDKYLLSSGVVLDGDISKLHPIDESLIKEEVTHSWYQYEDTKEVQLHPYDGQTNPHYTGLKDGESVGIENKIIPAKVLDTKDKYSWIKSPRYDSKPMEVGPLSSVVVGLAAKNPYVTEVATKFLKDTKLPLEALFSTLGRTAARCIEAKTIADNGLLAFDALVENLKSDQSTCAPYHIDKNQEYKGRYIGQVPRGMLSHWVRIKNGVVENYQAVVPSTWNAGPRDSKNQRGAYEMSLIGTKIADLTQPLEIIRTIHSFDPCIACSVHVMDFKGQSLNEFKVEPNFAKF

SEQ ID NO: 5660 - protein, 107 aa, Helicobacter pylori
  misc_feature (B) LOCATION 1...107
  hypothetical: YES
RMRMKNLKSLLSFLFASFWVAIPLIALYACTCAIATFIENDYGTSASKAIVYNTPWFNFLHAYLLVVLIGTFINSKALERKRYASLFFHSSLIFIILGAAITRCCGE

SEQ ID NO: 5661 - protein, 113 aa, Helicobacter pylori
  misc_feature (B) LOCATION 1...113
  hypothetical: YES
MKNLKSLLSFLFASFWVAIPLIALYACTCAIATFIENDYGTSASKAIVYNTPWFNFLHAYLLVVLIGTFINSKALERKRYASLFFHSSLIFIILGAAITRFFESGRAYACARK

SEQ ID NO: 5662 - protein, 130 aa, Helicobacter pylori
  misc_feature (B) LOCATION 1...130
  hypothetical: YES
SPLWLKTRFPNIWLAKILYMAILLCAIAHSVGLILRWYVSGHSPWSNAYESMLYIAWASVIAGFVLRSKLALSASSFLAGIALFVAHLGFMDPQIGPLVPVLKSYWLNIHVSVITASYGFLGLCFVLGIL

SEQ ID NO: 5663 - protein, 133 aa, Helicobacter pylori
  misc_feature (B) LOCATION 1...133
  hypothetical: YES
LAPLLPRSPMKAKLTLHGGKSAKIERQKIENPANKEDSKSAILERLKRLREYSKDHLKAFQRLQVQDFDGRIKPLDTISIEYIHKILRKDDFQGLNAMQVLLGIMFFPNDWRSIKMIYTSNKSLINPICTPLY

SEQ ID NO: 5664 - protein, 161 aa, Helicobacter pylori
  misc_feature (B) LOCATION 1...161
  hypothetical: YES
MAFGLVFCARDLSLVLFILRKQGRFNLDKTILSISAINEMSMILGLFMLTAGNFLGGVWANESWGRYWGWDPKETWALISICVYALILHLRFLGSQNWPFILASSSVLGFYSVLMTYFGVNYYLSGLHSYAAGDPLPIPTFLYFLVAIPFALVSWRISNAI

SEQ ID NO: 5665 - protein, 227 aa, Helicobacter pylori
  misc_feature (B) LOCATION 1...227
  hypothetical: YES
SKRLKPIHATLDHKPFLLEPLEIYKQNAIKKDDATILVLKATYNGVTKFNLIKTNRNEGIEESEMFKDDKLSLSFGSAYIELPFQIKLKRFELERYAGSMSPSSYASEVEVLKLDNTLIKPYRIFMNHVLDYEGYRFFQSSYDTDEKGTILSVNKDPGKIPTYLGYAMLILGALWLLLDKKGRFLKLSRFLKSQQAASFLFALILVSPFTSSFANEGQIDIAWGQKR

SEQ ID NO: 5666 - protein, 226 aa, Helicobacter pylori
  misc_feature (B) LOCATION 1...226
  hypothetical: YES
KRLKPIHATLDHKPFLLEPLEIYKQNAIKKDDATILVLKATYNGVTKFNLIKTNRNEGIEESEMFKDDKLSLSFGSAYIELPFQIKLKRFELERYAGSMSPSSYASEVEVLKLDNTLIKPYRIFMNHVLDYEGYRFFQSSYDTDEKGTILSVNKDPGKIPTYLGYAMLILGALWLLLDKKGRFLKLSRFLKSQQAASFLFALILVSPFTSSFANEGQIDIAWGQKR

SEQ ID NO: 5667 - protein, 936 aa, Helicobacter pylori
  misc_feature (B) LOCATION 1...936
  hypothetical: YES
MKNLKSLLSFLFASFWVAIPLIALYACTCAIATFIENDYGTSASKAIVYNTPWFNFLHAYLLVVLIGTFINSKALERKRYASLFFHSSLIFIILGAAITRFFGVEGLMHVRENSAQSSFESADTYLNITLNDEKKLSLKTPLTFYYSKRLKPIHATLDHKPLLLEPLEIYKQNAIKKDDATILVLKATYNGVSRKFNLIKTNRNEGIEESEMFKDDKLSLSFGSAYIELPFQIKLKRFELERYAGSMSPSSYASEVEVLKLDNTLIKPYRIFMNHVLDYEGYRFFQSSYDTDEKGTILSVNKDPGKIPTYLGYAMLILGALWLLLDKKGRFLKLSRFLKSQQAASFLFALILVSPFTSSFANEGQIDMHGGKSAKIERQKIENPANKEDSKSAILERLKRLREYSKDHLKAFQRLQVQDFDGRIKPLDTISIEYIHKILRKDDFQGLNAMQVLLGIMFFPNDWRSIKMIYTSNKALRKLIGTPLDESRIAFRDAFDSRGYKLKNLVEEVNQKSPNARNELDKDALKVDERINLVYTLFSAQFLRIFPSDKTTAWLSPIEAINSPNKEISSVATEFLKNIFSGFDDALKTNQWDKVEKTLKDLSTYQQEHAKNLYLSSSKVDSEIFLNHTNFFNSLTLPYIFLGLLLFIVVITSLVKNTIPNIWLTKILYMAILLCAIAHSVGLILRWYVSGHSPWSNAYESMLYIAWASVIAGFVLRSKLALSASSFLAGIALFVAHLGFMDPQIGPLVPVLKSYWLNIHVSVITASYGFLGLCFVLGILSLVLFILRKQGRFNLDKTILSISAINEMSMILGLFMLTAGNFLGGVWANESWGRYWGWDPKETWALISICVYALILHLRFLGSQNWPFILASSSVLGFYSVLMTYFGVNYYLSGLHSYAAGDPLPIPTFLYFLVAIPFALVILAYFKRHLSLPKLV

SEQ ID NO: 5668 - protein, 146 aa, Helicobacter pylori
  misc_feature (B) LOCATION 1...146
  hypothetical: YES
EQEEQDLWFSRRNASQSISVYGKKKLNEDVTVPRASLPSLLQEVAKISQKYGFKIPRFGHTGDGNVHVNIMLEDPKRDLEKGHKAMEEIFQAAISLEGTLSGEHGIGLSKAKFMPLAFNHSEMELFRNIKKALDPGNVLNPFKMGL

SEQ ID NO: 5669 - protein, 373 aa, Helicobacter pylori
  misc_feature (B) LOCATION 1...373
  hypothetical: YES
MLEKQHIQYFKNLVGGEDFFTDLAHLNAYCYDATKERHLPSGVIFPKNEREISQILKYCNEHRLIVVPRGAGSGFTGGALSVSGGLVLSVQKHLDKILEIDTKNLIARVEPGVINKHFQNEVEKLDLFYPPDPASENQSTLGGNVAENAGGMRAAKYGITKDYVMALRVVLANGEIIRAGKKTIKDVAGFNIAGLMIASEGCLGVISEITLKLLAKPPLKQSAMGVFNHIEDAMNAVYKTMSSGVTPVAMEFLDNLSIKAVEERFSKGLPKDAGAILITQVDGVVKEQIAWQLNEIEKHFKANGCVGFKIAQNEQEEQDLWFSRRNASQSISVYGKKKLNEDVTVPTASLPSLLQKVAKISQKYGFKIPCFGH

SEQ ID NO: 5670 - protein, 182 aa, Helicobacter pylori
  misc_feature (B) LOCATION 1...182
  hypothetical: YES
MQFEEMKELAHQIGVFYHVGVDGIALFLLLLNAIVVLLSVVYVKERRKDFVICLLLLXGILMGVFSSLNVIFFYAFWEISLLPVLYLIGRFGRNNKIYSGMKFFLYTFLASLCMLLGILYIGYDYANNYGMMSFDILDWYQLNFSSGIKTWLFVAFLIGIAVKIPLFPFTHGCLMRILTPPL

SEQ ID NO: 5671 - protein, 233 aa, Helicobacter pylori
  misc_feature (B) LOCATION 1...233
  hypothetical: YES
MLSALLSKMGTYALLRFLLPLFPELSEIYLTPIAIVALCMIIYGGFLAYAQKDLKTLIAYSSFSHMGVVVLGVFSFNVEGVSGAVFMMFAHGVIVMGLFLLAGILEERASSLEIARFGSIAKSAPVFAAFFMIVLMANVGMPLSIGFVGEFLNLLGFFATYPLLAIIAGTSLILSAVYILTSYKDVFFGNLKTGNNQISVFEDLNAREVGVLSVILAFDLNFRDLYKSAFKTD

SEQ ID NO: 5672 - protein, 242 aa, Helicobacter pylori
  misc_feature (B) LOCATION 1...242
  hypothetical: YES
EMQFLHAHLLSVVIFFPMLSALLAFFMSDQASRAYAIVIALIELLLVLLLWHGFDIQTAGMQFEEMKELAYQIGVNYHVGVDGIALFLLLLNAIVVLLSVIYVKERRKDFVICLLLLEGILMGVFSSLNVIFFYAFWEISLLPVLYLIGRFGRNNKIYSGMKFFLYTFLASLCMLLGILYIGYDYANNYGMMSFDILDWYQLNFSSGIKTWLFVAFLIGIAVKIPLFPFTHGCLMRILTPPL

SEQ ID NO: 5673 - protein, 296 aa, Helicobacter pylori
  misc_feature (B) LOCATION 1...296
  hypothetical: YES
NPALSLHTWLPYAYSNAPTLGSVMLSALLSKMGTYALLRFLLPLFPELSEIYLTPIAIVALCMIIYGGFLAYAQKDLKTLIAYSSFSHMGVVVLGVFSFNVEGVSGAVFMMFAHGVIVMGLFLLAGILEERASSLEIARFGSIAKSAPVFAAFFMIVLMANVGMPLSIGFVGEFLSLLGFFATYPLLAIIAGTSIILSAVYMLTSYKDVFFGNLKTGNNQISVFEDLNAREVGVLSVILALILILGIYPKALLKPIEQGFKQLLEVIEIRSLLFLGSLDTKIKEVSYVNRYSPHLF

SEQ ID NO: 5674 - protein, 512 aa, Helicobacter pylori
  misc_feature (B) LOCATION 1...512
  hypothetical: YES
MQFLHAHLLSVVIFFPMLSALLAFFMSDQASRAYAIVIALIELLLVLLLWHGFDIQTAGMQFEEMKELAYQIGVNYHVGVDGIALFLLLLNAIVVLLSVIYVKERRKDFVICLLLLEGILMGVFSSLNVIFFYAFWEISLLPVLYLIGRFGRNNKIYSGMKFFLYTFLASLCMLLGILYIGYDYANNYGMMSFDILDWYQLNFSSGIKTWLFVAFLIGIAVKIPLFPLHTWLPYAYSNAPTLGSVMLSALLSKMGTYALLRFLLPLFPELSEIYLTPIAIVALCMIIYGGFLAYAQKDLKTLIAYSSFSHMGVVVLGVFSFNVEGVSGAVFMMFAHGVIVMGLFLLAGILEERASSLEIARFGSIAKSAPVFAAFFMIVLMANVGMPLSIGFVGEFLSLLGFFATYPLLAIIAGTSIILSAVYMLTSYKDVFFGNLKTGNNQISVFEDLNAREVGVLSVILALILILGIYPKALLKPIEQGSKQLLEVIEIRSLPFLGSLDTKIKEVSYVNR

SEQ ID NO: 5675 - protein, 62 aa, Helicobacter pylori
  misc_feature (B) LOCATION 1...62
  hypothetical: YES
CNKPQNIESPYFGVFVLLVFTFWVFKLTLRIQRFLSRKMAQKKGEKLKAQLPMNVACGSQAA

SEQ ID NO: 5676 - protein, 79 aa, Helicobacter pylori
  misc_feature (B) LOCATION 1...79
  hypothetical: YES
MWPVALKQPNRVSHHFYIMAMLFILFDVEIVFMFPWAIDFKKLGLFGLVEMLGFVFFLAIGFIYALKRNALSWQKLEVK

SEQ ID NO: 5677 - protein, 79 aa, Helicobacter pylori; identical to SEQ ID NO: 5676
  misc_feature (B) LOCATION 1...79
  hypothetical: YES

SEQ ID NO: 5678 - protein, 135 aa, Helicobacter pylori
  misc_feature (B) LOCATION 1...135
  hypothetical: YES
EPDATSRRTLNHPYFGVFVLLVFTFWVFNLTLRIQRFLSRKMAQKKGEKLKLAPYECGPVALKQPNRVSHHFYIMAMLFILFDVEIVFMFPWAIDFKKLGLFGLVEMLGFVFFLAIGFIYALKRNALSWQKLEVK

SEQ ID NO: 5679 - protein, 326 aa, Helicobacter pylori
  misc_feature (B) LOCATION 1...326
  hypothetical: YES
VLMALXDKRYGLEAGIKYFTMGAMASAFFAMGAMAFYLLTGSLNLEVITLYLHTEGITNPMLFAMGTIFLIGAIGFKVSLVPFHTWMPDVYEGNNPVFASYISIVPKIAGFVVATRLFGAFIDTHTAWVEDIFYVLILMTITIPNFIALWQEDVKRMLAYSSISHSGFALACVFIHTEDSQQAMFVYWFMFAFTYIGAFGLLWLLKSREKTWDERYDHPYSKFNGLIKTHPLVAILGAIFVFGLAGIPPFSVFWGKFLAVESALESNHILLAVVMLVNSAVAAFYYFRWLVAMFFNKPLQTQSYAKTIFTPKTPPCPFMRSLLPWR

SEQ ID NO: 5680 - protein, 492 aa, Helicobacter pylori
  misc_feature (B) LOCATION 1...492
  hypothetical: YES
MLIDSLHISFDSFSFESILPMLVLVCGGIFTLLINAFTSRFSRNLNVFLCMLFLVLDFLVVLGLEEQENAFFGFLSLDTLSLISQSIVLISAFFLIFLALSKERFNEFQTAEFYSLYLFIVAGFQFMVSSNHLLLILIGLETASLPLCVLMALSDKRYGLEAGIKYFTMGAMASAFFAMGAMAFYLLTGSLNLEVITLYLHTEGITNPMLFAMGTIFLIGAIGFKVSLVPFHTWMPDVYEGNNPVFASYISIVPKIAGFVVATRLFGAFIDTHTAWVEDIFYVLILMTITIPNFIALWQEDVKRMLAYSSISHSGFALACVFIHTEDSQQAMFVYWFMFAFTYIGAFGLLWLLKSREKTWDERYDHPYSKFNGLIKTHPLVAILGAIFVFGLAGIPPFSVFWGKFLAVESALESNHILLAVVMLVNSAVAAFYYFRWLVAMFFNKPLQTQSYAQNDIYTQNATMPIYAVIIAMALACLFSVFMMRGLLEFVA

SEQ ID NO: 5681 - protein, 496 aa, Helicobacter pylori
  misc_feature (B) LOCATION 1...496
  hypothetical: YES
KRSLMLIDILHISFDSFSFESILPMLVLVCGGIFTLLINAFTSRFSRNLNVFLCMLFLVLDFLVVSGLEEQENAFFGFLSLDTLSLISQSIVLISAFFLIFLALSKERFNEFQTAEFYSLYLFIVAGFQFMVSSNQFVVILIGLETAPLPLCVLMALSDKRYGLEAGIKYFTMGAMASAFFAMGAMAFYLLTGSLNLEVITLYLHTEGITNPMLFAMGTIFLIGAIGFKVSLVPFHTWMPDVYEGNNPVFASYISIVPKIAGFVVATRLFGAFIDTHTAWVEDIFYVLILMTITIPNFIALWQEDVKRMLAYSSISHSGFALACVFIHTEDSQQAMFVYWFMFAFTYIGAFGLLWLLKSREKTWDERYDHPYSKFNGLIKTHPLVAILGAIFVFGLAGIPPFSVFWGKFLAVESALESNHILLAVVMLVNSAVAAFYYFRWLVAMFFNKPLQTQSYAQNDIYTQNATMPIYAVIIAMALACLFSVFMMRGLLEFVA

SEQ ID NO: 5682 - protein, 70 aa, Helicobacter pylori
  misc_feature (B) LOCATION 1...70
  hypothetical: YES
QILFNWLRRATIQLLSFEVVSTLTILAPLMVVGSLSLVEINHYQSGGFLDWLVFKQPLAFVLFLIASYAN

SEQ ID NO: 5683 - protein, 90 aa, Helicobacter pylori
  misc_feature (B) LOCATION 1...90
  hypothetical: YES
VHFHANSIIAMGSAFVSMAPIPFFPNFTLFGYEIKPLISDINIGFLFFLAVGSAGIYAPILAGLASNNKYSLIGSAERRSNCSALKWSAL

SEQ ID NO: 5684 - protein, 329 aa, Helicobacter pylori
  misc_feature (B) LOCATION 1...329
  hypothetical: YES
MSAYIIETLIKILILVAVFSALGGFATYIERKVLAYFQRRLGPCYVGPFGLLQVAADGIKLFTKEDIIPQGANKFIFTLAPIIAMVSAFVSMAPIPFFPNFTLFGYEIKPLISDINIGFLFFLAVGSAGIYAPILAGLASNNKYSLIGSARATIQLLSFEVVSTLTILAPLMVVGSLSLVEINHYQSGGFLDWLVFKQPLAFVLFLIASYAELNRTPFDLLEHEAEIVAGYCTEYSGLKWGMFFLAEYAHLFAFSFVISIVFFGGFNAWGFIPGGIAILIKAGFFVFLSMWVRATYPHVRPDQLMNMCWKIMLPLALLNIVLTGIVILI

SEQ ID NO: 5685 - protein, 207 aa, Helicobacter pylori
  misc_feature (B) LOCATION 1...207
  hypothetical: YES
MSKNLQKKNPKKSLQQAQKAIREMKMFETIAFYFFAILTLSMALVVITTTNILYAITALASSMVFISAFFFLLDAEFLGVVQITVYVGAVIVMYAFGMMFFNSAAEVVERKQSPKILCVLSFGVALLLTLILSAPSIGENLSKQVNSNAIDAQIPNIKAIGYVLFTNYLIPFEAAALMLLVAMVGGIATGIQKIHGKNHTQFIKESL

SEQ ID NO: 5686 - protein, 207 aa, Helicobacter pylori
  misc_feature (B) LOCATION 1...207
  hypothetical: YES
MSKNLQKKNPKKSXPQAQKAIREMKMFETIAFYFFAILTLSMALVVITTTNILYAITALASSMVFISAFFFLLDAEFLGVVQITVYVGAVIVMYAFGMMFFNSAAEVVERKQSPKILCVLSFGVALLLTLILSAPSIXENLSKQVNSNAIDAQXPNIKAIGYVLFTNYLIPFEAAALMLLVAMVGGIATGIQKIHGKNHTQFIKESL

SEQ ID NO: 5687 - protein, 208 aa, Helicobacter pylori
  misc_feature (B) LOCATION 1...208
  hypothetical: YES
IMSKNLQKKNPKKSLQQAQKAIREMKMFETIAFYFFAILTLSMALVVITTTNILYAITALASSMVFISAFFFLLDAEFLGVVQITVYVGAVIVMYAFGMMFFNSAAEVVERKQSPKILCVLSFGVALLLTLILSAPSIGENLSKQVNSNAIDAQIPNIKAIGYVLFTNYLIPFEAAALMLLVAMVGGIATGIQKIHGKNHTQFIKESL

SEQ ID NO: 5688 - protein, 59 aa, Helicobacter pylori
  misc_feature (B) LOCATION 1...59
  hypothetical: YES
RELGFFIHSEGEPYPHRLKIRAPSFYHIGALSDILVGQYLADAVTVIGSTNAVFGEVDR

SEQ ID NO: 5689 - protein, 103 aa, Helicobacter pylori
  misc_feature (B) LOCATION 1...103
  hypothetical: YES
KRGCKMAQNFTKLNPQFENIIFEHDDNQMILNFGPQHPSSHGQLRLILELEGEKIIKATPEIGYLHRGCEKLGENMTYNEYMPTTDRLDYTSSTSNNYAYAMR

SEQ ID NO: 5690 - protein, 273 aa, Helicobacter pylori
  misc_feature (B) LOCATION 1...273
  hypothetical: YES
LRLRYAVETLLNLEIPRRAAVIRTILLELNRMISHIFFISVHALDVGAMSVFLYAFKTREYGLDLMEDYCGARLTHNAIRIGGVPLDLPPNWLEGLKKFLGEMRECKKLIQGLLDKNRIWRMRLENVGVVTPKMAQSWGMSGIMLRGTGIAYDIRKEEPYELYKELDFDVPVGNYGDSYDRYCLYMLEIDESIRIIEQLIPMYAKTDTPIMAQNPHYISAPKEDIMTQNYALMQHFVLVAQGMRPPVGKCMPPQKALKGIRVFYPFRGRAIPS

SEQ ID NO: 5691 - protein, 409 aa, Helicobacter pylori
  misc_feature (B) LOCATION 1...409
  hypothetical: YES
MAQNFTKLNPQFENIIFEHDDNQMILNFGPQHPSSHGQLRLILELEGEKIIKATPEIGYLHRGCEKLGENMTYNEYMPTTDRLDYTSSTSNNYAYAYAVETLLNLEIPRRAQVIRTILLELNRMISHIFFISVHALDVGAMSVFLYAFKTREYGLDLMEDYCGARLTHNAIRIGGVPLDLPPNWLEGLKKFLGEMRECKKLIQGLLDKNRIWRMRLENVGVVTPKMAQSWGMSGIMLRGTGIAYDIRKEEPYELYKELDFDVPVGNYGDSYDRYCLYMLEIDESIRIIEQLIPMYAKTDTPIMAQNPHYISAPKEDIMTQNYALMQHFVLVAQGMRPPVGEVYAPTESPKGELGFFIHSEGEPYPHRLKIRAPSFYHIGALSDILVGQYLADAVTVIGSTNAVFGEVDR

SEQ ID NO: 5692 - protein, 95 aa, Helicobacter pylori
  misc_feature (B) LOCATION 1...95
  hypothetical: YES
TPKRGALFIQTLTQPNTISRNSIKGLTEVFSAVASFLHQVVELRIIDAVVDTIGRSVFVIGRVFRASQDGNLTSILRFMVAGVLILLAFVAFFGR

SEQ ID NO: 5693 - protein, 130 aa, Helicobacter pylori
  misc_feature (B) LOCATION 1...130
  hypothetical: YES
MFVAAGLGAYAIALFHLFTHAFFKSLLFLGSGNVMHAMEDNLDITKMGALYKPMRITAVFMIIGSVALCGIYPFAGYFSKDKILEVAFGMHHHILWFVLLIGAIFTAFYSFRLIMLVFFAPKQHEINHPP

SEQ ID NO: 5694 - protein, 497 aa, Helicobacter pylori
  misc_feature (B) LOCATION 1...497
  hypothetical: YES
FFKRYERLSMQYSSLLSVVLFLPLIGAVYAGLFGAKAKALHVGVFNSLCVLVSFIGAVVLFIQAWHHQSYEKYLFDWIVVGNFKVGFSLMLDNINAVMIVVVTLVSFLVHVYSIGYMEHDTGFNRYFSYLSGFVFSMLVLVLSDNFLGLFIGWEGVGLCSYLLIGFWYHKKSANNASIEAFVMNRITDLGMLMGIILIFWNFGTLQYKEVFSMLNNADYSMLFYISVFLFIGAMGKSAQFPMHTWLANAMEGPTPVSALIHAATMVTAGVYLIIRANPLYSAVFEVGYFIACLGAFVALFGASMALVNKDLKRIVAYSTLSQLGYMFVAAGLGAYAIALFHLFTHAFFKSLLFLGSGNVMHAMEDNLDITKMGALYKPMRITAVFMIIGSVALCGIYPFAGYFSKDKILEVAFGMHHHILWFVLLIGAIFTAFYSFRLIMLVFFAPKQHEINHPHEGQKFHAFEHATVRGFGGHCRFFRRAVFSFYLSSEFLVLESI

SEQ ID NO: 5695 - protein, 612 aa, Helicobacter pylori
  misc_feature (B) LOCATION 1...612
  hypothetical: YES
MQYSSLLSVVLFLPLIGAVYAGLFGAKAKALHVGVFNSLCVLVSFIGAVVLFIQAWHHQSYEKYLFDWIVVGNFKVGFSLMLDNINAVMIVVVTLVSFLVHVYSIGYMEHDTGFNRYFSYLSGFVFSMLVLVLSDNFLGLFIGWEGVGLCSYLLIGFWYHKKSANNASIEAFVMNRITDLGMLMGIILIFWNFGTLQYKEVFSMLNNADYSMLFYISVFLFIGAMGKSAQFPMHTWLANAMEGPTPVSALIHAATMVTAGVYLIIRANPLYSAVFEVGYFIACLGAFVALFGASMALVNKDLKRIVAYSTLSQLGYMFVAAGLGAYAIALFHLFTHAFFKSLLFLGSGNVMHAMEDNLDITKMGALYKPMRITAVFMIIGSVALCGIYPFAGYFSKDKILEVAFGMHHHILWFVLLIGAIFTAFYSFRLIMLVFFAPKQHEINHPHEAKNFMLLSMLPLGVLAVIAGFFEEPFFHFISQVIPSVGEYLVPLALLISITTIVVLLSIAYAIFKYKNGITSKKEGGFLYKLLLNQYYIPQLYQGMTKVFSAVASFLHQVVELRIIDAVVDTIGRSVFVIGRVFRASQDGNLTSMLRFMVAGVLILLAFVAFFGR

SEQ ID NO: 5696 - protein, 153 aa, Helicobacter pylori
  misc_feature (B) LOCATION 1...153
  hypothetical: YES
VHHLXRLLDSGSERCIGCGLCEKICTSNCIRIITHKGEDNRKKIDSYTINLGRCIYCGLCAEVCPELAIVMGNRFENASTQRSQYGSKSEFLTSEQDAKNCSHAEFLGFGAVSPNYNERMQATPLDYVQEPSKEESKEEFXTSPESHKGDENV

SEQ ID NO: 5697 - protein, 220 aa, Helicobacter pylori
  misc_feature (B) LOCATION 1...220
  hypothetical: YES
MAKQEYKQLPKRAEVHSATEQFKDTIKTSLGLDLFKGLGLTIKEFFSPSVTIHYPMEQLPLSPRYRAVHHLQRLLDSGSERCIGCGLCEKICTSNCIRIITHKGEDNRKKIDSYTINLGRCIYCGLCAEVCPELAIVMGNRFENASTQRSQYGSKSEFLTSEQDAKNCSHAEFLGFGAVSPNYNERMQATPLDYVQEPSKEESKEESPTSPESHKGDENV

SEQ ID NO: 5698 - protein, 223 aa, Helicobacter pylori
  misc_feature (B) LOCATION 1...223
  hypothetical: YES
GGFMAKQEYKQLPKRAEVHSATEQFKDTIKTSLGLDLFKGLGLTIKEFFSPSVTIHYPMEQLPLSPRYRAVHHLQRLLDSGSERCIGCGLCEKICTSNCIRIITHKGEDNRKKIDSYTINLGRCIYCGLCAEVCPELAIVMGNRFENASTQRSQYGSKSEFLTSEQDAKNCSHAEFLGFGAVSPNYNERMQATPLDYVQEPSKEESKEESPTSPESHKGDENV

SEQ ID NO: 5699 - protein, 116 aa, Helicobacter pylori
  misc_feature (B) LOCATION 1...116
  hypothetical: YES
RIEATECEPIKPLKEKIAFNAYLKYPETQFNNATHKSENLQLKAGVYVSKAFLKKLNKEVGQNITLTKEEEELTGVLYLDESLDQEVFVISPSLLTNHFNFFREGVFDSVDLKEQA

SEQ ID NO: 5700 - protein, 163 aa, Helicobacter pylori
  misc_feature (B) LOCATION 1...163
  hypothetical: YES
TPQLEEIKTSHLVITIGSSIKTENPLVRYAINNALKLNKASLIAMHPIKDNALANLCRSSFCITHEVGAEEILLGMLLKMLNIESTALKSLEDSKQSIVDEAALKALEEERKKALEQAEQGCSIGENKEEAVASKENKEENKTEAAAPKENQTENKTEVKEKN

SEQ ID NO: 5701 - protein, 179 aa, Helicobacter pylori
  misc_feature (B) LOCATION 1...179
  hypothetical: YES
RVESQAKGIISFVGSVPCYDCGECIAVCPVGALSYKDFAYTANAWELKKIHSTCSHCSAGCLISYDVRHFDTLGEESKIFRVLNDFYHNPICGAGRFAFDVSSSPKGSANLKEAQNALKECEAVRIGGDITNEEAFLIERLRKELNFKIYNKDLYPFQQFLKVLGEVKRPSLKRLKLLI

SEQ ID NO: 5702 - protein, 232 aa, Helicobacter pylori
  misc_feature (B) LOCATION 1...232
  hypothetical: YES
HLPLYPYFIPLSRNFMITMNINGKTIECQEGQSVLEAARSAGIYIPTICYLSGCSPTVACKMCMVEMDGKRIYSCNTKAKNNATILTNTPTLMDERKSIMQTYDVNHPLECGVCDKSGECELQDMTHLTGVEHQPYAVADDFKALDSWAKALYDPNLCIMCERCVTTCKDNVDENNPKATKADLHAPDKFKDSMSKDAFSVWSRKQKALFLLWVACLAMIVGNALRYALWAL

SEQ ID NO: 5703 - protein, 276 aa, Helicobacter pylori
  misc_feature (B) LOCATION 1...276
  hypothetical: YES
NKPNKGAVLEKTKKRQLLQKKTKKRIKQKRLPQKKIKQKTRQRLKRKIEVPTKTTYLLLEEAGINLETYEKILALLQKSNNTLLVVGEEIYSHKQAHNIAKMLRLLAQKSAIKLILIPPSANALGIASICELSEEVFEHEKIVGIRAQGDFTINSDDRVFGKDAVSKVDFILPSLNQLEGTITNVEGRVLPLKPALRFEGYDLSDIMQGFGFVEENLTECTHKLPTEAGFKALEFDHLTNYFTNDRANHRGYLLGTSHFENSAKESKPQNASLSSL

SEQ ID NO: 5704 - protein, 849 aa, Helicobacter pylori
  misc_feature (B) LOCATION 1...849
  hypothetical: YES
MITMNINGKTIECQEGQSVLEAARSAGIYIPTICYLSGCSPTVACKMCMVEMDGKRIYSCNTKAKNNATILTNTPTLMDERKSIMQTYDVNHPLECGVCDKSGECELQDMTHLTGVEHQPYAVADDFKALDSWAKALYDPNLCIMCERCVTTCKDNVGENNLKATKADLHAPDKFKDSMSKDAFSVWSRKQKGIISFVGSVPCYDCGECIAVCPVGALSYKDFAYTANAWELKKIHSTCSHCSAGCLISYDVRHFDTLGEESKIFRVLNDFYHNPICGAGRFAFDVSSSPKGSANLKEAQNALKECEAVRIGGDITNEEAFLIERLRKELNFKIYNKDLYPFQQFLKVLGEVKRPSVEEIKTSHLVITIGSSIKTENPLVRYAINNALKLNKASLIAMHPIKDNALANLCRSSFCITHEVGAEEILLGMLLKMLNIESTALKSLEDSKQSIVDEAALKALEEERKKALEQAEQGCSIGENKEEAVASKENKEENKTEAAAPKENQTENKTEVKEEKIEVPTKTTYLLLEEAGINLETYEKILALLQKSNNTLLVVGEEIYSHKQAHNIAKMLRLLAQKSAIKLILIPPSANALGIASICELSEEVFEHEKIVGIRAQGDFTINSDDRVFGKDAVSKVDFILPSLNQLEGTITNVEGRVLPLKPALRFEGYDLSDIMQGFGFVEENLTECTHKLPTEAGFKALEFDHLTNYFTNDRANHRGYLLGTSHFENSAKECEATECEPIKPLKEKIAFNAYLKYPETQFNNATHKSENLQLKAGVYVSKAFLKKLNKEVGQNITLTKEEEELTGVLYLDESLDQEVFVISPSLLTNHFNFFREGVFDSVDLKEQA

SEQ ID NO: 5705 - protein, 100 aa, Helicobacter pylori
  misc_feature (B) LOCATION 1...100
  hypothetical: YES
MIGLNHYLIVSGLLFCIGLAGMLKRKNILLLFFSTEIMLNAINIGFVAISRYTHNLDGQMFALFIIAIAASEVAIGLGLVILWFKKYKSLDIDSLNAMKG

SEQ ID NO: 5706 - protein, 134 aa, Helicobacter pylori
  misc_feature (B) LOCATION 1...134
  hypothetical: YES
SGGFNAFSRYGWRHRYRDSKNPWEKSHAIYKGISMIGLNHYLIVSRLLSCIGLPSMQKCKNILLLFISTEIMLNAINIGFVAISRYTHNLDGQMFALFIIAIAASEVAIGLGLVILWFKKYKSLDIDSLNAMKG

SEQ ID NO: 5707 - protein, 105 aa, Helicobacter pylori
  misc_feature (B) LOCATION 1...105
  hypothetical: YES
MKFLALFFLALAGVAFAHDGGMGGMDMIKSYSILGAMIGLGIAAFGGAIGMGNAAAATITGTARNPGVGGKLLTTMFVAMAMIEAQVIYTLVFAIIAIYSNPFLS

SEQ ID NO: 5708 - protein, 77 aa, Helicobacter pylori
  misc_feature (B) LOCATION 1...77
  hypothetical: YES
NMGCAGCHGNDGKGLQKNQVFAADLTTYGTESFLRNILTHGKKGNIGRMPSFKYKNFSDLQVKALVEFIKSLKPLED

SEQ ID NO: 5709 - protein, 80 aa, Helicobacter pylori
  misc_feature (B) LOCATION 1...80
  hypothetical: YES
PTVVKSKAGLPAGEMPAIEMDEKDAKAIASYVMAELSSVKKTKNPQLIDKGKELFETWVAQVVMAMMVRACKKIKCLRPI

SEQ ID NO: 5710 - protein, 79 aa, Helicobacter pylori
  misc_feature (B) LOCATION 1...79
  hypothetical: YES
TVVKSKAGLPAGEMPAIEMDEKDAKAIASYVMAELSSVKKTKNPQLIDKGKELFETWVAQVVMAMMVRACKKIKCLRPI

SEQ ID NO: 5711 - protein, 126 aa, Helicobacter pylori
  misc_feature (B) LOCATION 1...126
  hypothetical: YES
MDYPAGEMPAIEMDEKDAKAIASYVMAELSSVKKTKNPQLIDKGKELFESMGCAGCHGNDGKGLQENQVFAADLTTYGTESFLRNILTHGKKGNIGRMPSFKYKNFSDLQVKALVEFIKSLKPLED

SEQ ID NO: 5712 - protein, 63 aa, Helicobacter pylori
  misc_feature (B) LOCATION 1...63
  hypothetical: YES
SLQKAQQILRDLRASPSDYPEVTEFLVKEGITSISLNPDSVIPTWNAVAKLEKELKDHGLTAR

SEQ ID NO: 5713 - protein, 101 aa, Helicobacter pylori
  misc_feature (B) LOCATION 1...101
  hypothetical: YES
RVALSNMQETQTKIYINIGNPEKAFSFSQLPNHGVGLARMEMIILNQIKAHPLALVDLHHKKSVKEKNEIENLMAGYANPKDFFVKKIAEGIGMISAAFYP

SEQ ID NO: 5714 - protein, 100 aa, Helicobacter pylori
  misc_feature (B) LOCATION 1...100
  hypothetical: YES
VALSNMQETQTKIYINIGNPEKAFSFSQLPNHGVGLARMEMIILNQIKAHPLALVDLHHKKSVKEKNEIENLMAGYANPKDFFVKKIAEGIGMISAAFYP

SEQ ID NO: 5715 - protein, 185 aa, Helicobacter pylori
  misc_feature (B) LOCATION 1...185
  hypothetical: YES
IVRTSDFKSNEYMRMLGGSSYEPNEENPMLGYRGASRYYSESYNEAFSWECEALALVREEMGLTNMKVMIPFLRTIEEGKKVLEILRKNNLESGKNGLEIYIMCELPVNVILADDFLSLFDGFSIGSNDLTQLTLGVDRDSELVSHVFDERNEAMLKMFKKAIEACKRHNKYCGICGQVQAITLK

SEQ ID NO: 5716 - protein, 184 aa, Helicobacter pylori
  misc_feature (B) LOCATION 1...184
  hypothetical: YES
VRTSDFKSNEYMRMLGGSSYEPNEENPMLGYRGASRYYSESYNEAFSWECEALALVREEMGLTNMKVMIPFLRTIEEGKKVLEILRKNNLESGKNGLEIYIMCELPVNVILADDFLSLFDGFSIGSNDLTQLTLGVDRDSELVSHVFDERNEAMLKMFKKAIEACKRHNKYCGICGQVQAITLK

SEQ ID NO: 5717 - protein, 251 aa, Helicobacter pylori
  misc_feature (B) LOCATION 1...251
  hypothetical: YES
PSLEHKLAKTKALSCYHCYIFVLRNLMIILREFCAIYQVFPRVDNKNVNLVGGKNASIGEMFQELVPIGIKVPDGFAITSEAYWYLLEQGGAKPKIIELLENVDATEIDVLKIRSKQIRELIFGTPFPSDLRDEIFQAYEILSQQYHMKEADVAVRSSATAEDLPDASFAGQQDTYLNIKGKTELIHYIKSCLASLFTDRAISYRASRGFDHLKVALSVGVQKMVRADKGSAGVMFSIDTETGFKDAVFIT

SEQ ID NO: 5718 - protein, 488 aa, Helicobacter pylori
  misc_feature (B) LOCATION 1...488
  hypothetical: YES
MARAGKSLSFKRAQKPFKAKKPKKKIKSLKNSNSKTLTEKKEIILQGRAIGSKIGSGKVRIINDLEHMNSFKEGEILVTDNTDPDWEPCMKKASAVITNRGGRTCHAAIVAREIGVPAIVGVSGATDSLYTGMEITVSCAEGEEGYVYAGIYEHEIERVELSNMQETQTKIYINIGNPEKAFSFSQLPNHGVGLARMEMIILNQIKAHPLALVDLHHKKSVKEKNEIENLMAGYANPKDFFVKKIAEGIGMISAAFYPKPVIVRTSDFKSNEYMRMLGGSSYEPNEENPMLGYRGASRYYSESYNEAFSWECEALALVREEMGLTNMKVMIPFLRTIEEGKKVLEILRKNNLESGKNGLEIYIMCELPVNVILADDFLSLFDGFSIGSNDLTQLTLGVDRDSELVSHVFDERNEAMLKMFKKAIEACKRHNKYCGICGQAPSDYPEVTEFLVKEGITSISLNPDSVIPTWNAVAKLEKELKDHGLTAR

SEQ ID NO: 5719 - protein, 136 aa, Helicobacter pylori
  misc_feature (B) LOCATION 1...136
  hypothetical: YES
VCGVLSLQARLSFENCSKPLDCSLFATTCTPQNPIGSCMVSSQGGVCGVLSLQARLSFENCSKPLDCSLFATTCTPQNPIGSCMVSSQGGVRGVLSLQARLSFKNCFLVKSLKPSQLTLMLTGFLGGFSFLTTGFW

SEQ ID NO: 5720 - protein, 88 aa, Helicobacter pylori
  misc_feature (B) LOCATION 1...88
  hypothetical: YES
FSGAQIYAPLVNRFKLPIIVSGFEPVDILESVLMLTKQALNKEAKLEIQYKRAVSYEGNTKAQELVNACMEVRENFEWRGLGNINDPP

SEQ ID NO: 5721 - protein, 107 aa, Helicobacter pylori
  misc_feature (B) LOCATION 1...107
  hypothetical: YES
GGVCGVLSLQAHLSFENCSKPLDCSLFATTCTPQNPIGSCMVSSQGGVCGVLSLQAHLSFENCSKPLDCSLFATTCTPQNPIGSYMVSSQGGVRGVLSLQARLSFKN

SEQ ID NO: 5722 - protein, 370 aa, Helicobacter pylori
  misc_feature (B) LOCATION 1...370
  hypothetical: YES
MSVDHLISPFRDKRIILALSNEIKKFASKLTKKLVIMEVCGGHTHSIMKYGLLDLMPKNLEFAHGPGCPVCVMPKARLDEAYELASMKDSIVLSLGDMMRVPGSYGSLIQAREKGLDARFLYSPMQALEIAKENPHKKVIYIAIGFETTTPMTASVLLNAKKEKLKNLFFHINHILVPPSVSTILEDKACRINALLAPSHVSVISGAQIYAPLVDRFKLPIIVSGFEPVDILESVLMLTKQALNKEAKLEIQYKRAVSYEGNTKAQELVNACMEVRENFEWRGLGNIKRSALKLKEAFASYDAEKVFKAYLSHKTSKENKACKCGEILKGIAKPLDCSLFATTCTPQNPIGSCMVSSEGACAAYYRYKRV

SEQ ID NO: 5723 - protein, 54 aa, Helicobacter pylori
  misc_feature (B) LOCATION 1...54
  hypothetical: YES
KRACESAYLRNITETMPYFHNGQFWDVKDAIKEMGSIQLGIEISDAEPNKIEPL

SEQ ID NO: 5724 - protein, 243 aa, Helicobacter pylori
  misc_feature (B) LOCATION 1...243
  hypothetical: YES
EPMPMGKALKEYQIKKTRDVGIGAKNSEIMTSAQVELGKMLYFDPRISTSYLVSCNTCHNLGLGGVDLIPSAIGSQWKKNPHLLSSPTVYNSVFNDVQFWDGRVTHLNEQAQGPIQSSFEMGADPKVVVEKINSIPGYVKLFRKAYGSKVKIDFKLIADSIAMFEATLITPSRYDDFLRGNPKALSKAEKEGLDLFISKGCVACHNGINLGGTMQPFGVVKPYKFANVGDFKGDKNGLVKVPT

SEQ ID NO: 5725 - protein, 350 aa, Helicobacter pylori
  misc_feature (B) LOCATION 1...350
  hypothetical: YES
MKKTILLSALLAFSCAHALSDMDLIKKAKESQLEPMPMGKALKEYQIKKTRDVGIGAKNSEIMTSAQVELGKMLYFDPRISTSYLVSCNTCHNLGLGGVDLIPSAIGSQWKKNPHLLSSPTVYNSVFNDVQFWDGRVTHLNEQAQGPIQSSFEMGADPKVVVEKINSIPGYVKLFRKAYGSKVKIDFKLIADSIAMFEATLITPSRYDDFLRGNPKALSKAEKEGLDLFISKGCVACHNGINLGGTMQPFGVVKPYKFANVGDFKGDKNGLVKVPTLRNITETMPYFHNGQFWDVKDAIKEMGSIQLGIEISDAEAKKIETFFEALKGKKPKIIYPELPVMTDKTPKPSF

SEQ ID NO: 5726 - protein, 35 aa, Helicobacter pylori
  misc_feature (B) LOCATION 1...35
  hypothetical: YES
LSKHAVAYREISWILRRPPGREAHLEMCFISTHGF

SEQ ID NO: 5727 - protein, 50 aa, Helicobacter pylori
  misc_feature (B) LOCATION 1...50
  hypothetical: YES
VVDYEEQLHPFLEAKYPQVLEEIHTKKVLDKDLEAMLRKVLEEFKLTYSE

SEQ ID NO: 5728 - protein, 104 aa, Helicobacter pylori
  misc_feature (B) LOCATION 1...104
  hypothetical: YES
KERLNFDDEKGAGSLTALPIVETHAGDVSAYIPTNIISITDGQIFLETDLFYSGIRPGYQCGLVGFKGWRGRSNQSDQAGFRDFAPGFSAIQRVASLHGNSLLI

SEQ ID NO: 5729 - protein, 119 aa, Helicobacter pylori
  misc_feature (B) LOCATION 1...119
  hypothetical: YES
PKRAKCDLYLCGYWPKRIHRCASGPQIRRIRSDGIQRRDQCFGFRLSCDAIFSPLCGCGYGEYFRDHARHALIVYDDLSKHAVAYREISLILRRPPGREAFPGDVFYIHSRLLERAAKL

SEQ ID NO: 5730 - protein, 213 aa, Helicobacter pylori
  misc_feature (B) LOCATION 1...213
  hypothetical: YES
VFYIHSRLLERAAKLCDEKGAGSLTALPIVETQAGDVSAYIPTNIISITDGQIFLETDLFYSGIRPAINVGLSVSRVGGAAQIKATKQVSGTLRLDLAQYRELQAFTQFASDLDEASKKQLERGQRMVEVLKQAPYSPLPIEKQVVIIYAGAKGFLDSVSVKKVVDYEEQLHPFLEAKYPQVLEEIHTKKVLDKDLEAMLRKVLEEFKLTYSE

SEQ ID NO: 5731 - protein, 257 aa, Helicobacter pylori
  misc_feature (B) LOCATION 1...257
  hypothetical: YES
MSQLKLEEISSVIEEKIKNFELDCDMAEVGKVVSYADGVAKIYGLNGVMSYEVLEFETGDKGVAANLEEDSVGVIVFGFGNNIKEGTSVKRTKSLMKVPVGDAVVGRVLNALGEPIDGKGEIETNEFSLIEQKAPGIMDRKSVHEPLQTGIKAIDALVPIGRGQRELIIGDKQTGKTTVAIDAIINQKGQNVICIYVAIGQKESTVAQVVRKLEEYGAMEYSVVINASASDSAAMQYLAPYAGVAMGNILEIMPAMP

SEQ ID NO: 5732 - protein, 273 aa, Helicobacter pylori
  misc_feature (B) LOCATION 1...273
  hypothetical: YES
KNRLFNLFNQSKEIKIMSQLKLEEISSVIEEKIKNFELDCDMAEVGKVVSYADGVAKIYGLNGVMSYEVLEFETGDKGVAANLEEDSVGVIVFGFGNNIKEGTSVKRTKSLMKVPVGDAVVGRVLNALGEPIDGKGEIETNEFSLIEQKAPGIMDRKSVHEPLQTGIKAIDALVPIGRGQRELIIGDKQTGKTTVAIDAIINQKGQNVICIYVAIGQKESTVAQVVRKLEEYGAMEYSVVINASASDSAAMQYLAPYAGVAMGNILEIMPAMP

SEQ ID NO: 5733 - protein, 503 aa, Helicobacter pylori
  misc_feature (B) LOCATION 1...503
  hypothetical: YES
MSQLKLEEISSVIEEKIKNFELDCDMAEVGKVVSYADGVAKIYGLNGVMSYEVLEFETGDKGVAANLEEDSVGVIVFGFGNNIKEGTSVKRTKSLMKVPVGDAVVGRVLNALGEPIDGKGEIETNEFSLIEQKAPGIMDRKSVHEPLQTGIKAIDALVPIGRGQRELIIGDKQTGKTTVAIDAIINQKGQNVICIYVAIGQKESTVAQVVRKLEEYGAMEYSVVINASASDSAAMQYLAPYAGVAMGEYFRDHARHALIVYDDLSKHAVAYREISWILRRPPGREAFPGDVFYIHSRLLERAAKLCDEKGAGSLTALPIVETQAGDVSAYIPTNIISITDGQIFLETDLFYSGIRPAINVGLSVSRVGGAAQIKATKQVSGTLRLDLAQYRELQAFTQFASDLDEASKKQLERGQRMVEVLKQAPYSPLPIEKQVVIIYAGAKGFLDSVSVKKVVDFEEQLHPFLEAKYPQVLEEIHTKKVLDKDLEAMLRKVLEEFKLTYSE

SEQ ID NO: 5734 - protein, 180 aa, Helicobacter pylori
  misc_feature (B) LOCATION 1...180
  hypothetical: YES
MQDLKVISKHYAKALKNHTKSDLALLEEIVVGLKNLAEAIKLHKLNQVLAHVSLKVKKEVVLEILEKITPTKACSILKPVMEVVLKNNRLDMLELVAEELSFDSKRTLEATLLVPQKLENNELEEVQQKLQARFNAPVEIAQDTWSKKGVSLSVSSLDLEIGFSKEDILKKIEKQVIQSI

SEQ ID NO: 5735 - protein, 180 aa, Helicobacter pylori; identical to SEQ ID NO: 5734
  misc_feature (B) LOCATION 1...180
  hypothetical: YES

SEQ ID NO: 5736 - protein, 114 aa, Helicobacter pylori
  misc_feature (B) LOCATION 1...114
  hypothetical: YES
FLRGKFIQERLKALCCQGVEGEFGVLYGHSNMITLLQAGVVEIETENQKEHIAINWGYAEVTNERVDILADGAVFIKKGSDDRDDAISRAKKLLEDASSDRLAVSSVLAKIESL

SEQ ID NO: 5737 - protein, 123 aa, Helicobacter pylori
  misc_feature (B) LOCATION 1...123
  hypothetical: YES
MALLKISVVVPEGEVYTGEVKSVVLPGVEGEFGVLYGHSNMITLLQAGVVEIETENQKEHIAINWGYAEVTNERVDILADGAVFIKKGSDDRDDAISRAKKLLEDASSDRLAVSSVLAKIESL

SEQ ID NO: 5738 - protein, 240 aa, Helicobacter pylori
  misc_feature (B) LOCATION 1...240
  hypothetical: YES
LTMAEYFRDEKGLDVLMFIDNIFRYAQSGAEMSALLGRIPSAVGYQPTLAGEMGKLQERIASTKNGSITSVQAVYVPADDLTDPAPASVFAHLDATTVLNRKIAEKGIYPAVDPLDSTSRILSPQMIGEKHYEIATGIQQVLQKYKDLQDIIAILGLDELSEEDKKTVERARKIEKFLSQPFFVAEVFTGSPGKYVTLQETLEGFGGILEGKYDHIPENAFYMVGSIQEVLEKAKNMKNS

SEQ ID NO: 5739 - protein, 247 aa, Helicobacter pylori
  misc_feature (B) LOCATION 1...247
  hypothetical: YES
DRIAFTGLTMAEYFRDEKGLDVLMFIDNIFRYAQSGAEMSALLGRIPSAVGYQPTLAGEMGKLQERIASTKNGSITSVQAVYVPADDLTDPAPASVFAHLDATTVLNRKIAEKGIYPAVDPLDSTSRILSPQMIGEKHYEIATGIQQVLQKYKELQDIIAISGLDELSEEDKKTVERARKIEKFLSQPFFVAEVFTGSPGKYVTLQETLEGFGGILEGKYDHIPENAFYMVGSIQEVLEKAKNMKNS

SEQ ID NO: 5740 - protein, 246 aa, Helicobacter pylori
  misc_feature (B) LOCATION 1...246
  hypothetical: YES
RIAFTGLTMAEYFRDEKGLDVLMFIDNIFRYAQSGAEMSALLGRIPSAVGYQPTLAGEMGKLQERIASTKNGSITSVQAVYVPADDLTDPAPASVFAHLDATTVLNRKIAEKGIYPAVDPLDSTSRILSPQMIGEKHYEIATGIQQVLQKYKELQDIIAISGLDELSEEDKKTVERARKIEKFLSQPFFVAEVFTGSPGKYVTLQETLEGFGGILEGKYDHIPENAFYMVGSIQEVLEKAKNMKNS

SEQ ID NO: 5741 - protein, 469 aa, Helicobacter pylori
  misc_feature (B) LOCATION 1...469
  hypothetical: YES
MKAMEGKIIQVLGPVVDVEFESYLPAIFEALDINFEVNGTQKALVLEVAAHLGGNRVRAIAMDMTEGLVRNQAVKARGKMIEVPVGEEVLGRIFNVVGESIDNLEPLKPSLTWPIHRKAPSFEQQSTKTEMFETGIKVIDLLAPYSKGGKVGLFGGAGVGKTVIIMELIHNVAYKHNGYSVFAGVGERTREGNDLYFEMKEGGVLDKVALCYGQMNEPPGARNRIAFTGLTMAEYFRDEKGLDVLMFIDNIFRYAQSGAEMSALLGRIPSAVGYQPTLAGEMGKLQERIASTKNGSITSVQAVYVPADDLTDPAPASVFAHLDATTVLNRKIAEKGIYPAVDPLDSTSRILSPQMIGEKHYEIATGIQQVLQKYKDLQDIIAILGLDELSEEDKKTVERARKIEKFLSQPFFVAEVFTGSPGKYVTLQETLEGFGGILEGKYDHIPENAFYMVGSIQEVLEKAKNMKNS

SEQ ID NO: 5742 - protein, 79 aa, Helicobacter pylori
  misc_feature (B) LOCATION 1...79
  hypothetical: YES
NMANLRDISKKIGSVKTTQRITHAMKLVSTSKLRKAEEVARNSRAYALKLDAVFDDVLSKMINQGIEDIQSQYLGTEKT

SEQ ID NO: 5743 - protein, 150 aa, Helicobacter pylori
  misc_feature (B) LOCATION 1...150
  hypothetical: YES
HARMNTKKKTLKRRLRGIGKKGNEYFSFNGIEVLDKINNLSSMPNYERAQEFMKKVVEDYLSGKTDKVIIIHNGFKNMITQEIRVKTILPIGYKIIHQNPQPSETQETITSEPSGSEDEILDSLAEKYVEYSLYYALIDSLAAEHSARMQ

SEQ ID NO: 5744 - protein, 149 aa, Helicobacter pylori
  misc_feature (B) LOCATION 1...149
  hypothetical: YES
HARMNTKKKTLKRRLRGIGKKGNEYFSFNGIEVLDKINNLSSMPNYERAQEFMKKVVEDYLSGKTDKVIIIHNGFKNMITQEIRVKTILPIGYKIIHQNPQPSETQETITSEPSGSEDEILDSLAEKYVEYSLYYALIDSLAAEHSARM

SEQ ID NO: 5745 - protein, 259 aa, Helicobacter pylori
  misc_feature (B) LOCATION 1...259
  hypothetical: YES
MANLRDIRKKIGSVKNTQRITHAMKLVSTSKLRKAEEVARNSRAYALKLDAVFDDVLSKMKNQGIEDIQSKYFRELERLEIKKVDIIFITADKGLCGGFNTNTIKKVLACTNEYKEKDIKARLRGIGKKGNEYFSFNGIEVLDKINNLSSMPNYERAQEFMKKVVEDYLSGKTDKVIIIHNGFKNMITQEIRVKTILPIGYKIIHQNPQPSETQETITSEPSGSEDEILDSLAEKYVEYSLYYALIDSLAAEHSARMQA

SEQ ID NO: 5746 - protein, 301 aa, Helicobacter pylori
  misc_feature (B) LOCATION 1...301
  hypothetical: YES
MANLRDIRKKIGSVKNTQRITHAMKLVSTSKLRKAEEVARNSRAYALKLDAVFDDVLSKMKNQGIEDIQSKYFRELERLEIKKVDIIFITADKGLCGGFNTNTIKKVLACTNEYKEKDIKVRLRGIGKKGNEYFSFNGIEVLDKINNLSSMPNYERAQEFMKKVVEDYLSGKTDKVIIIHNGFKNMITQEIRVKTILPIGYKIIHQNPQPSETQETITSEPSGSEDEILDSLAEKYVEYSLYYALIDSLAAEHSARMQAMDTATNNAKDLVKTLTISYNKARQEAITTELVEINAGVEALK

SEQ ID NO: 5747 - protein, 123 aa, Helicobacter pylori
  misc_feature (B) LOCATION 1...123
  hypothetical: YES
WAMNVWVYRPLLAFMDNRQAEIKDSLAKIKTDNTQSVEIGHQIETLLKEAAEKRREMLAEAIQKATESYDAVIKQKENELNQEFEAFAKQLQNEKQILKEQLQAQMTVFEDELNKRVAMGLGS

SEQ ID NO: 5748 - protein, 144 aa, Helicobacter pylori
  misc_feature (B) LOCATION 1...144
  hypothetical: YES
MNISVNPYLMAVVFVVFVLLLWAMNVWVYRPLLAFMDNRQAEIKDSLAKIKTDNTQSVEIGHQIETLLKEAAEKRREMLAEAIQKATESYDAVIKQKENELNQEFEAFAKQLQNEKQILKEQLQAQMTVFEDELNKRVAMGLGS

SEQ ID NO: 5749 - protein, 127 aa, Helicobacter pylori
  misc_feature (B) LOCATION 1...127
  hypothetical: YES
MFVVKMVLGFLILLSPLCATGLDISQTDIIERSLNFLLFVGILWYFLAKRLRSFLHSKSLEISKRLEEIQAQLKVSKEHKKKLLKELEQAKEKAELIISDANKEALHDHAKIRITNQNGCGKFDQKF

SEQ ID NO: 5750 - protein, 171 aa, Helicobacter pylori
  misc_feature (B) LOCATION 1...171
  hypothetical: YES
MFVVKMVLGFLILLSPLCATGLDISQTDIIERSLNFLLFVGILWYFLAKRLRSFLHSKSLEISKRLEEIQAQLKVSKEHKKKLLKELEQAKEKAELIISDANKEAYTITQKYELQTKMDVENLIKNSKALMDLEVKKIKRELVESVFKDLRESKKVSFNAQDCVNILKQRL

SEQ ID NO: 5751 - protein, 172 aa, Helicobacter pylori
  misc_feature (B) LOCATION 1...172
  hypothetical: YES
WMFVVKMVLGFLILLSPLCATGLDISQTDIIERSLNFLLFVGILWYFLAKRLRSFLHSKSLEISKRLEEIQAQLKVSKEHKKKLLKELEQAKEKAELIISDANKEAYTITQKYELQTKMDVENLIKNSKALMDLEVKKIKRELVESVFKDLRESKKVSFNAQDCVNILKQRL

SEQ ID NO: 5752 - protein, 185 aa, Helicobacter pylori
  misc_feature (B) LOCATION 1...185
  hypothetical: YES
MQMVPMGLQNVYESIISAILSVAKDIIGEELARKYFPLAGTIALYVFFSNMIGIIPGFESPTASWSFTLVLALIVFFYYHFEGIRVQGFFKYFAHFAGPVKWLAPFMFPIEIISHFSRIVSLSFRLFGNIKGDDMFLLIMLLLVPWAVPVAPFMVLFFMGILQAFVFMILTYVYLAGAVLTDEGH

SEQ ID NO: 5753 - protein, 209 aa, Helicobacter pylori
  misc_feature (B) LOCATION 1...209
  hypothetical: YES
FYHRVFCRFDSGFDVFHFAWRIAQMQMVPMGLQNVYESIISAILSVAKDIIGEELARKYFPLAGTIALYVFFSNMIGIIPGFESPTASWSFTLVLALIVFFYYHFEGIRVQGFFKYFAHFAGPVKWLAPFMFPIEIISHFSRIVSLSFRLFGNIKGDDMFLLIMLLLVPWAVPVAPFMVLFFMGILQAFVFMILTYVYLAGAVLTDEGH

SEQ ID NO: 5754 - protein, 226 aa, Helicobacter pylori
  misc_feature (B) LOCATION 1...226
  hypothetical: YES
MEHRVFTIANFFSSNHDFITGFFVVLTAVLMFFISLGASRKMQMVPMGLQNVYESIISAILSVAKDIIGEELARKYFPLAGTIALYVFFSNMIGIIPGFESPTASWSFTLVLALIVFFYYHFEGIRVQGFFKYFAHFAGPVKWLAPFMFPIEIISHFSRIVSLSFRLFGNIKGDDMFLLIMLLLVPWAVPVAPFMVLFFMGILQAFVFMILTYVYLAGAVLTDEGH

SEQ ID NO: 5755 - protein, 77 aa, Helicobacter pylori
  misc_feature (B) LOCATION 1...77
  hypothetical: YES
MQQEEIIEGYYGASKGLKKSGIYAKLDFLQSATGLILALFMIAHMFLVSSILISDEAMYKVAKFFEGSLFMKAGEPG

SEQ ID NO: 5756 - protein, 99 aa, Helicobacter pylori
  misc_feature (B) LOCATION 1...99
  hypothetical: YES
DRFIKKNYFKCSKIKAVFLRQAIQVKFEFLGAVFMQQEEIIEGYYGASKGLKKSGIYAKLDFLQSATGLILALFMIAHMFLVSSILISDEAMYKVAKFF

SEQ ID NO: 5757 - protein, 255 aa, Helicobacter pylori
  misc_feature (B) LOCATION 1...255
  hypothetical: YES
MQQEEIIEGYYGASKGLKKSGIYAKLDFLQSATGLILALFMIAHMFLVSSILISDEAMYKVAKFFEGSLFLKAGEPAIVSVVAAGVILILVAHAFLALRKFPINYRQYKVFKTHKHLMKHGDTSLWFIQALTGFAMFFLASIHLFVMLTEPESIGPHGSSYRFVTQNFWLLYIFLLFAVELHGSIGLYRLAIKWGWFKNVSIQGLRKIKWAMSVFFIVLGLCTYGAYIKKGLENKDNGIKTMQEAIEADGKFHKE

SEQ ID NO: 5758 - protein, 107 aa, Helicobacter pylori
  misc_feature (B) LOCATION 1...107
  hypothetical: YES
ASALLGIMPYITSSIIMELLSATFPNLAKMIKERDGMQKYMQIVRYLTILITLIQAVSVSVGLRSINGGANGAIMIDMQVFMIVSSCPTLTGTMLLMWIGEQITQEA

SEQ ID NO: 5759 - protein, 108 aa, Helicobacter pylori
  misc_feature (B) LOCATION 1...108
  hypothetical: YES
LSIISLGIMPYITSSIIMELLSATFPNLAKMIKERDGMQKYMQIVRYLTILITLIQAVSVSVGLRSISGGANGAIMIDMQVFMIFSSCPMLTGTMLLMWIGEQITQEA

SEQ ID NO: 5760 - protein, 136 aa, Helicobacter pylori
  misc_feature (B) LOCATION 1...136
  hypothetical: YES
YASLYDCFFVSYAYRDDVAHVDRGANHARGVGNGISLIIFAGIVSGIPSAISGTFNLVNTGVINILMLIGIVLIVLATIFAIIYVELAERRIPISYARKVVMQNQNKRIMNYIPIKLNLSGVIPPIFVQLCSGSLR

SEQ ID NO: 5761 - protein, 273 aa, Helicobacter pylori
  misc_feature (B) LOCATION 1...273
  hypothetical: YES
VSYAYRDDVAHVDRGANHARGVGNGISLIIFAGIVSGIPSAISGTFNLVNTGVINILMLIGIVLIVLATIFAIIYVELAERRIPISYARKVVMQNQNKRIMNYIPIKLNLSGVIPPIFASALLVFPSTILQQATSNKTLQAIADFLSPQGYAYNILMFLLIIFFAYFYSSIVFNSKDIADNLRRNGGYIPGLRPGEGTSSFLNAVASKLTLWGSLYLALISTVPWILVKAMGVPFYFGGTAVLIVVQVAIDTMKKIEAQIYMSKYKTLSAVGF

SEQ ID NO: 5762 - protein, 352 aa, Helicobacter pylori
  misc_feature (B) LOCATION 1...352
  hypothetical: YES
MPYITSSIIMELLSATFPNLAKMKKERDGMQKYMQIVRYLTILITLIQAVSVSVGLRSISGGANGAIMIDMQVFMIVSAFSMLTGTMLLMWIGEQITQRGVGNGISLIIFAGIVSGIPSAISGTFNLVNTGVINILMLIGIVLIVLATIFAIIYVELAERRIPISYARKVVMQNQNKRIMNYIPIKLNLSGVIPPIFASALLVFPSTILQQATSNKTLQAIADFLSPQGYAYNILMFLLIIFFAYFYSSIVFNSKDIADNLRRNGGYIPGLRPGEGTSSFLNAVASKLTLWGSLYLALISTVPWILVKAMGVPFYFGGTAVLIVVQVAIDTMKKIEAQIYMSKYKTLSAVGF

SEQ ID NO: 5763 - protein, 200 aa, Helicobacter pylori
  misc_feature (B) LOCATION 1...200
  hypothetical: YES
VFMTSALLGLQIVLAVLIVVVVLLQKSSSIGLGAYSGSNDSLFGAKGPASFMAKLTMFLGLLFVINTIALGYFYNKEYGKSVLDETKTNKELSPLVPATGTLNPTLNPTLNPTLNPLEQAPTNPLMPTQTPKELPKEPAKTPFVESPKQNEKNEKNDAKENGIKGVEKNKENAKTPPTTHQKPKTHATTNAHTNQKKDEK

SEQ ID NO: 5764 - protein, 144 aa, Helicobacter pylori
  misc_feature (B) LOCATION 1...144
  hypothetical: YES
MNFFKILLMELRAIVSHKGVLLILIGAPLIYGLLYPLPYLKDIVTQQKIALVDEDNSFLSRQLAFMVQSSNELEIAFFSPSMLEAKKLLKEEKIYGILHIPSHFEANIYKQSACNDRFLCERQLLFDLWCVSECGGGEHQRLKR

SEQ ID NO: 5765 - protein, 376 aa, Helicobacter pylori
  misc_feature (B) LOCATION 1...376
  hypothetical: YES
MNFFKILLMELRAIVSHKGVLLILIGAPLIYGLLYPLPYLKDIVTQQKIALVDEDNSFLSRQLAFMVQSSNELEIAFFSPSMLEAKKLLKEEKIYGILHIPSHFEANIYKQVPVTIDFYANANYFLIYGALANAVVGSINALNDEIRFKRNAQIEEAELGTDGIKIKPIALYNPSEGYLNYALSSVFIFILHQVMLIASSMFTSSRRLELALLDKKQIALRLCARLLVFMGAFSVFVLWYFGALFSFYGIERHGSALMVFLNSLIFMLAALSLGSFLGAWIKNEAHTTQIVLISSLPLIFMMGFVWPFESLPSYLQVFVQIVPAYHGISLLGRLNQMHAEFIDVSIHFYALIAIFIVSFIGCVFKLSSLKKACENA

SEQ ID NO: 5766 - protein, 377 aa, Helicobacter pylori
  misc_feature (B) LOCATION 1...377
  hypothetical: YES
RMNFFKILLMELRAIVSHKGVLLILIGAPLIYGLLYPLPYLKDIVTQQKIALVDEDNSFLSRQLAFMVQSSNELEIAFFSPSMLEAKKLLKEEKIYGILHIPSHFEANIYKQVPVTIDFYANANYFLIYGALANAVVGSINALNDEIRFKRNAQIEEAELGTDGIKIKPIALYNPSEGYLNYALSSVFIFILHQVMLIASSMFTSSRRLELALLDKKQIALRLCARLLVFMGAFSVFVLWYFGALFSFYGIERHGSALMVFLNSLIFMLAALSLGSFLGAWIKNEAHTTQIVLISSLPLIFMMGFVWPFESLPSYLQVFVQIVPAYHGISLLGRLNHMHAEFIDVYIHFYALIAIFIVSFIGCVFKLSSLKKACENA

SEQ ID NO: 5767 - protein, 159 aa, Helicobacter pylori
  misc_feature (B) LOCATION 1...159
  hypothetical: YES
MKLFNPRLIVFIFALLLGVGFSVPSLLETKGPKITLGLDLRGGLNMLLGVQTDEALKNKYLSLASALEYNAKKQNILLKDIKSSLEGISFELLDEDEAKKLDALLLELQGHSQFEIKKEAEFYSVKLTPLEQEELRKNTILQVIGIIRIRLDHLAWQSL

SEQ ID NO: 5768 - protein, 177 aa, Helicobacter pylori
  misc_feature (B) LOCATION 1...177
  hypothetical: YES
MKLFNPRLIVFIFALLLGVGFSVPSLLETKGPKITLGLDLRGGLNMLLGVQTDEALKNKYLSLASALEYNAKKQNILLKDIKSSLEGISFELLDEDEAKKLDALLLELQGHSQFEIKKEAEFYSVKLTPLEQEELRKNTILQVIGIIRNRLDRFGLAEPVVIQQGRVEFRCNCPALR

SEQ ID NO: 5769 - protein, 526 aa, Helicobacter pylori
  misc_feature (B) LOCATION 1...526
  hypothetical: YES
MKLFNPRLIVFIFALLLGVGFSVPSLLETKGPKITLGLDLRGGLNMLLGVQTDEALKNKYLSLASALEYNAKKQNILLKDIKSSLEGISFELLDEDEAKKLDALLLELQGHSQFEIKKEAEFYSVKLTPLEQEELRKNTILQVIGIIRNRLDQFGLAEPVVIQQGREEISVQLPGIKTLEEERRAKDLISKSAHLQMMAVDEEHNKDAMNMTDLEAQKLGSVLLSDAEMGGKILLKAIPILDGEMLTDAKVVYDQNNQPVVSFTLDAQGAKIFGDFSGANVGKRMAIVLDNKVYSAPVIRERIGGGSGQINGNFSVAQASDLAIALRSGAMNAPIQVLEKRIVGPSLGKDSIKTSIIALVGGFILVMGFMALYYSMAGVIACMALVVNLFLIVAVMAIFGATLTLPGMAGIVLTVGIAVDANIIINERIREVLREGEGVVKAIHLGYINASRAIFDSNITSLIASVLLYAYGTGAIKGFALTTGIGILASIITAIIGTQGIYQALLPKLAQTKSLYFWFGVKNKRA

SEQ ID NO: 5770 - protein, 74 aa, Helicobacter pylori
  misc_feature (B) LOCATION 1...74
  hypothetical: YES
DHAGYHGCVLRSIDLMKTLLVTIRDTGSDTNNGKENEIEEVVKKLQAITSQNLEGAKETSGTKEGPRKRSKKRK

SEQ ID NO: 5771 - protein, 92 aa, Helicobacter pylori
  misc_feature (B) LOCATION 1...92
  hypothetical: YES
RALKKLQGLKKAPEKEVKKENKEKAKEEVKANKTPTTENLASGNPLADEPDLDYANMSAEEVEAEIERLLNKRQEADKERRAQKKQGRSSQA

SEQ ID NO: 5772 - protein, 95 aa, Helicobacter pylori
  misc_feature (B) LOCATION 1...95
  hypothetical: YES
MDDLQEIMEDFLIEAFEMNEQLDQDLVELEHNPEDLDLLNRIFRVAHTIKGSSSFLNLNILTHLAHNMEDVLNRARKGEIKITPDIMDVCCAPLI

SEQ ID NO: 5773 - protein, 336 aa, Helicobacter pylori
  misc_feature (B) LOCATION 1...336
  hypothetical: YES
ALKKWKRKLNDCLTNAKKPIKNEELKKSKEDQAKPKQEVAPAMRTPITETPHTETSQVPKAETKAKAKADTEENKAPSIGVEQTVRVDVRRLDHLMNLIGELVLGKNRLIRIYSDVEGRYDGEKFLEELNQVVSSISAVTTDLQLAVMKTRMQPVGKVFNKFPRMVRDLSRELGKSIELIIEGEETELDKSIVEEIGDPLIHIIRNSCDHGIEPLEERRRLNKPETGKVQLSAYNEGNHIVIKISDDGKGLDPVMLKEKAIEKGVISERDAESMSDREAFNLIFKPGFSTRKVVSNVSGRGVGMDVVKTNMKSLMGSLKSIQSGGRHDSKLKSLSL

SEQ ID NO: 5774 - protein, 527 aa, Helicobacter pylori
  misc_feature (B) LOCATION 1...527
  hypothetical: YES
MDDLQEIMEDFLIEAFEMNEQLDQDLVELEHNPEDLDLLNRIFRVAHTIKGSSSFLNLNILTHLTHNMEDVLNRARKGEIKITPDIMDVVLRSIDLMKTLLVTIRDTGSDTNNGKENEIEEVVKKLQAITSQNLEGAKETSGTKEAPEKEVKKENKEKAKEEVKANKTPTTENLTSDNPLADEPDLDYANMSAEEVEAEIERLLNKRQEADKERRAQKKQEDQAKPKQEVAPAKETPKTETPKTETRKVPKAETKAKAKADTEENKAPSIGVEQTVRVDVRRLDHLMNLIGELVLGKNRLIRIYSDVEERYDGEKFLEELNQVVSSISAVTTDLQLAVMKTRMQPVGKVFNKFPRMVRDLSRELGKSIELIIEGEETELDKSIVEEIGDPLIHIIRNSCDHGIEPLEERRRLNKPETGKVQLSAYNEGNHIVIKISDDGKGLDPVMLKEKAIEKGVISERDAESMSDREAFNLIFKPGFSTRKVVSNVSGRGVGMDVVKTNMKSLMGSLKSIQSGGRHDSKLKSLSL

SEQ ID NO: 5775 - protein, 88 aa, Helicobacter pylori
  misc_feature (B) LOCATION 1...88
  hypothetical: YES
NPSHFSYHQALLVGVQEEYYAIPLSSVLETVRISQDEIYTVDGKSVLRLRDEVLSLVRLSDIFKVDAILNPTLMCMWLSLAWPIKKLA

SEQ ID NO: 5776 - protein, 89 aa, Helicobacter pylori
  misc_feature (B) LOCATION 1...89
  hypothetical: YES
MLKNGDKIPDAILVDIEMPKMDGYTFASEVRKYNKFKNLPLIAVTSRVTKTDRMRGVESGMTEYITKPYSGEYLTTVVKRSIKLEGDQS

SEQ ID NO: 5777 - protein, 227 aa, Helicobacter pylori
  misc_feature (B) LOCATION 1...227
  hypothetical: YES
SGCYFESNSDVYVVIIGLADQKIGVIVDYLIGQEEVVIKSLGYYLKNTRGIAGATVRGDGKITLIVDVGAMMEMAKSIKVNITTLMNESENTKSKNSPSDYVVLAIDDSSTDRAIIRKCLKPLGITLLEATNGLEGLEMLKNGDKIPDAILVDIEMPKMDGYTFASEVRKYNKFKNLPLIAVTSRVTKTDRMRGVESGMTEYITKPYSGEYLTTVVKRSIKLEGDQS

SEQ ID NO: 5778 - protein, 279 aa, Helicobacter pylori
  misc_feature (B) LOCATION 1...279
  hypothetical: YES
VGVQEEYYAIPLSSVLETVRISQDEIYTVDGKSVLRLRDEVLSLVRLSDIFKVDAILESNSDVYVVIIGLADQKIGVIVDYLIGQEEVVIKSLGYYLKNTRGIAGATVRGDGKITLIVDVGAMMEMAKSIKVNITTLMNESENTKSKNSPSDYVVLAIDDSSTDRAIIRKCLKPLGITLLEATNGLEGLEMLKNGDKIPDAILVDIEMPKMDGYTFASEVRKYNKFKNLPLIAVTSRVTKTDRMRGVESGMTEYITKPYSGEYLTTVVKRSIKLEGDQS

SEQ ID NO: 5779 - protein, 279 aa, Helicobacter pylori; identical to SEQ ID NO: 5778
  misc_feature (B) LOCATION 1...279
  hypothetical: YES

SEQ ID NO: 5780 - protein, 59 aa, Helicobacter pylori
  misc_feature (B) LOCATION 1...59
  hypothetical: YES
FGVKQKEALKELSKSVHFLSMSATPIPRTLNMALSQIKGISSLKTPPTDRKPSRTFLKE

SEQ ID NO: 5781 - protein, 92 aa, Helicobacter pylori
  misc_feature (B) LOCATION 1...92
  hypothetical: YES
IGMIQSSLYRALNKGFDYQILACKDFKESELAKEVISYFKPNIKAVLFPELRAKKNDDLRSFFEEFLQLLGGLREFYQALENKQETIHHCPY

SEQ ID NO: 5782 - protein, 233 aa, Helicobacter pylori
  misc_feature (B) LOCATION 1...233
  hypothetical: YES
VFLTAECESIKELDPATQMSLKEDLLEIEIPPTLFSLDEPSYKDLKTKVEQSPLNSFSKDLTSFGLWFLGEKANDLLGVYQSIISPRALEEIQELASLNELDDERFKFLKVLENAQGYEDLEIHVHALEGFIALHSNRKITLLAPNKTILDNSISVLDAGNMECVIAPFVLNFKTPDRVFISLNSFERKEKRQKSKLALNELNAGEWAVHDDYGVGVFSQLIQHSVLGARGIF

SEQ ID NO: 5783 - protein, 240 aa, Helicobacter pylori
  misc_feature (B) LOCATION 1...240
  hypothetical: YES
LWGGRVFSIDPAQRFRSKRDFLEIAYLGEDKLLLPVENLHLIARYVVQSDSVPVKDRLGKGSFLKLKAKVRAKLLEIAGKIIELAAERNLILGKKMDTHLAELEIFKSHAGFEYTSDQEKAIAEISRDLSSHRVMDRLLSGDVGFGKTEVAMLAIFCAFLNGFQSALVVPTTLLAHQHFETLKARFENFGVKVARLDRYIKTSEKSKLLKAVELGLVDVLIGHACDFRHEIQKLGLNGRR

SEQ ID NO: 5784 - protein, 321 aa, Helicobacter pylori
  misc_feature (B) LOCATION 1...321
  hypothetical: YES
KRLFTENCAGNGQIFYIHNHIASISKVKTKLEDLIPKLKIAILHSQINANESEEIMLEFAKGNYQVLLCTSIVESGIHLPNANAIIIDNAQNFGLADLHQLRGRVGRAQKEGFCYFLIEDPRSLNEQALNRLLALEKNSILERGESIAYHDLEIRGDGNLLGQDQSGHIKNIGYALYTRMLEDAIYELSGGKKRLEKSVEIQLGVSAFLNPELIASDSLRLDLYRRLSLCENVDEVGQIHEEIEDRFGKMDDLSAQFLQIITLKILANQLGILKLSNFNQNITLTYSDEKKESLKAPSKDDNDILETLLKHLHAQISLKRR

SEQ ID NO: 5785 - protein, 1001 aa, Helicobacter pylori
  misc_feature (B) LOCATION 1...1001
  hypothetical: YES
MIQSSLYRALNKGFDYQILACKDFKESELAKEVISYFKPNIKAVLFPELRAKKNDDLRSFFEEFLQLLGGLREFYQALENKQETIIIAPISALLHPLPKKELLESFKITLLEKYNLKDLKDKLFYYGYEILDLVEVEGEASFRGDIVDIYIPNSKAYRLSFFDAECESIKELDSATQMSLKEDLLEIEIPPTLFSLDEPSYKDLKTKVEQSPLNSFSKDLTSFGLWFLGEKANDLLGVYQSIISPRALEEIQELASLNELDDERFKFLKVLENAQGYEDLEIHVHALEGFIALHSNRKITLLAPNKTILDNSISVLDAGNMECVIAPFVLNFKTPDRIFISLNSFERKKKRQKSKLALNELNAGEWVVHDDYGVGVFSQLIQHSVLGSKRDFLEIAYLGEDKLLLPVENLHLIARYVVQSDSVPVKDRLGKGSFLKLKAKVRAKLLEIAGKIIELAAERNLILGKKMDTHLAELEIFKSHAGFEYTSDQEKAIAEISRDLSSHRVMDRLLSGDVGFGKTEVAMHAIFCAFLNGFQSALVVPTTLLAHQHFETLKARFENFGVKVARLDRYIKTSEKSKLLKAVELGLVDVLIGTHAILGTKFKNLGLMVVDEEHKFGVKQKEALKELSKSVHFLSMSATPIPRTLNMALSQIKGISSLKTPPTDRKPSRTFLKEKNDELLKEIIYRELRRNGQIFYIHNHIASISKVKTKLEDLIPKLKIAILHSQINANESEEIMLEFAKGNYQVLLCTSIVESGIHLPNANTIIIDNAQNFGLADLHQLRGRVGRGKKEGFCYFLIEDQKSLNEQALKRLLALEKNSYLGSGESIAYHDLEIRGGGNLLGQDQSGHIKNIGYALYTRMLEDAIYELSGGKKRLEKSVEIQLGVSAFLNPELIASDSLRLDLYRRLSLCENVDEVGQIHEEIEDRFGKMDDLSAQFLQIITLKILANQLGILKLSNFNQNITLTYSDEKKESLKAPSKDDNDILETLLKHLHAQISLKRR

SEQ ID NO: 5786 - protein, 1001 aa, Helicobacter pylori
  misc_feature (B) LOCATION 1...1001
  hypothetical: YES
MIQSSLYRALNKGFDYQILACKDFKESELAKEVISYFKPNIKAVLFPELRAKKNDDLRSFFEEFLQLLGGLREFYQALENKQETIIIAPISALLHPLPKKELLESFKITLLEKYNLKDLKDKLFYYGYEILDLVEVEGEASFRGDIVDIYIPNSKAYRLSFFDAECESIKELDPATQMSLKEDLLEIEIPPTLFSLDEPSYKDLKTKVEQSPLNSFSKDLTSFGLWFLGEKANDLLGVYQSIISPRALEEIQELASLNELDDERFKFLKVLENAQGYEDLEIHVHALEGFIALHSNRKITLLAPNKTILDNSISVLDAGNMECVIAPFVLNFKTPDRIFISLNSFERKKKRQKSKLALNELNAGEWVVHDDYGVGVFSQLIQHSVLGSKRDFLEIAYLGEDKLLLPVENLHLIARYVVQSDSVPVKDRLGKGSFLKLKAKVRAKLLEIAGKIIELAAERNLILGKKMDTHLAELEIFKSHAGFEYTSDQEKAIAEISRDLSSHRVMDRLLSGDVGFGKTEVAMHAIFCAFLNGFQSALVVPTTLLAHQHFETLKARFENFGVKVARLDRYIKTSEKSKLLKAVELGLVDVLIGTHAILGTKFKNLGLMVVDEEHKFGVKQKEALKELSKSVHFLSMSATPIPRTLNMALSQIKGISSLKTPPTDRKPSRTFLKEKNDELLKEIIYRELRRNGQIFYIHNHIASISKVKTKLEDLIPKLKIAILHSQINANESEEIMLEFAKGNYQVLLCTSIVESGIHLPNANTIIIDNAQNFGLADLHQLRGRVGRGKKEGFCYFLIEDQKSLNEQALKRLLALEKNSYLGSGESIAYHDLEIRGGGNLLGQDQSGHIKNIGYALYTRMLEDAIYELSGGKKRLEKSVEIQLGVSAFLNPELIASDSLRLDLYRRLSLCENVDEVGQIHEEIEDRFGKMDDLSAQFLQIITLKILANQLGILKLSNFNQNITLTYSDEKKESLKAPSKDDNDILETLLKHLHAQISLKRR

SEQ ID NO: 5787 - protein, 441 aa, Helicobacter pylori
  misc_feature (B) LOCATION 1...441
  hypothetical: YES
MITLFSFGAFAYYFVSSQISHENYQNEMRHYQFVTTINEILNNYSDYRAIEDYLYKIGFRETTIENLEKVLAKRRHQLHHRNIWYAEVFKFSDMVFILLKKDEHFVLYKDLHSVSYRNYFLAITVGLLLILFLFLFVLQSLLPLRELRSQVKRFAQGDKSVSCKSKQKDEIGDLANEFDNCIQKINAMNESRVLFLRSIMHELRTPITKGKILSSMLKEELSCKRFSSIFDHLNMLIEQFARIEQLASKNYGSNKEKFLMSDLIDKIEKMLLIDEDKKSPIHVSSSNYIIEADFELFAIALKNMIDNAIKYSDDKQVFLDFIGNNLVVSNKSKPLKEDFEKYLQPYFKSSNPSQAHGFGLGMYIIKNALEAMGLNLSYHYSNGRICFTIHDCVFNSFYDLEADNEELPPPENLREVKGMKGTEKANCGVKEKQKERTCSND

SEQ ID NO: 5788 - protein, 442 aa, Helicobacter pylori
  misc_feature (B) LOCATION 1...442
  hypothetical: YES
LRFSIFFKVVALFMITLFSFGAFAYYFVSSQISHENYQNEMRHYQFVTTINEILNNYSDYRAIEDYLYKIGFRETTIENLEKVLAKRRHQLHHRNIWYAEVFKFSDMVFILLKKDEHFVLYKDLHSVSYRNYFLAITVGLLLILFLFLFVLQSLLPLRELRSQVKRFAQGDKSVSCKSKQKDEIGDLANEFDNCIQKINAMNESRVLFLRSIMHELRTPITKGKILSSMLKEELSCKRFSSIFDHLNMLIEQFARIEQLASKNYGSNKEKFLMSDLIDKIEKMLLIDEDKKSPIHVSSSNYIIEADFELFAIALKNMIDNAIKYSDDKQVFLDFIGNNLVVSNKSKPLKEDFEKYLQPYFKSSNPSQAHGFGLGMYIIKNALEAMGLNLSYHYSNGRICFTIHDCVFNSFYDLEADNEELPPPRKFERGEGNEGNRKSQLWG

SEQ ID NO: 5789 - protein, 444 aa, Helicobacter pylori
  misc_feature (B) LOCATION 1...444
  hypothetical: YES
GVLRFSIFFKVVALFMITLFSFGAFAYYFVSSQISHENYQNEMRHYQFVTTINEILNNYSDYRAIEDYLYKIGFRETTIENLEKVLAKRRHQLHHRNIWYAEVFKFSDMVFILLKKDEHFVLYKDLHSVSYRNYFLAITVGLLLILFLFLFVLQSLLPLRELRSQVKRFAQGDKSVSCKSKQKDEIGDLANEFDNCIQKINAMNESRVLFLRSIMHELRTPITKGKILSSMLKEELSCKRFSSIFDHLNMLIEQFARIEQLASKNYGSNKEKFLMSDLIDKIEKMLLIDEDKKSPIHVSSSNYIIEADFELFAIALKNMIDNAIKYSDDKQVFLDFIGNNLVVSNKSKPLKEDFEKYLQPYFKSSNPSQAHGFGLGMYIIKNALEAMGLNLSYHYSNGRICFTIHDCVFNSFYDLEADNEELPPPRKFERGEGNEGNRKSQLWG

SEQ ID NO: 5790 - protein, 97 aa, Helicobacter pylori
  misc_feature (B) LOCATION 1...97
  hypothetical: YES
NDSGSKHFILPFLTLLLQMYLSRTREYMADSGAAFLMHDNKPMIRALQKISNDYTNNDYKEIDKNSTRSAAYLFNAEMFSTHPSIKNRIQSLRKRVI

SEQ ID NO: 5791 - protein, 225 aa, Helicobacter pylori
  misc_feature (B) LOCATION 1...225
  hypothetical: YES
MNTSLLTQAQVLSSKENQIHRLLLELLEEAKLHFEPKLYIINAPYMNAFASGWDESNSLIALTSALIERLDRDELKAVIAHELSHIRHNDIRLTMCVGILSNIMLLVANFSVYFFMGNRKNSGANLARMILWVLQIILPFLTLLLQMYLSRTREYMADSGAAFLMHDNKPMIRALQKISNDYTNNDYKEIDKNSTRSAAYLFNAEMFSTHPSIKNRIQSLRKRVI

SEQ ID NO: 5792 - protein, 337 aa, Helicobacter pylori
  misc_feature (B) LOCATION 1...337
  hypothetical: YES
LNWNFTCLKGVMRARCSKKSSMRKEKIMTNFEKIIAQNRLKTNAVLTTYCAIFAFIGLLVDAIRINANDLGIALFKLMTFQIFPTITIVMFVVAFVIILVCIQNFSSIMLSGDEYKLIDPSKVLSSKENQIHRLLLELLEEAKLHFEPKLYIINAPYMNAFASGWDESNSLIALTSALIERLDRDELKAVIAHELSHIRHNDIRLTMCVGILSNIMLLVANFSVYFFMGNRKNSGANLARMILWVLQIILPFLTLLLQMYLSRTREYMADSGAAFLMHDNKPMIRALQKISNDYTNNDYKEIDKNSTRSAAYLFNAEMFSTHPSIKNRIQSLRKRVI

SEQ ID NO: 5793 - protein, 347 aa, Helicobacter pylori
  misc_feature (B) LOCATION 1...347
  hypothetical: YES
LLNTSKKKRNLNWNFTCLKGVMRARCSKKSSMRKEKIMTNFEKIIAQNRLKTNAVLTTYCAIFAFIGLLVDAIRINANDLGIALFKLMTFQIFPTITIVMFVVAFVIILVCIQNFSSIMLSGDEYKLIDPSKVLSSKENQIHRLLLELLEEAKLHFEPKLYIINAPYMNAFASGWDESNSLIALTSALIERLDRDELKAVIAHELSHIRHNDIRLTMCVGILSNIMLLVANFSVYFFMGNRKNSGANLARMILWVLQIILPFLTLLLQMYLSRTREYMADSGAAFLMHDNKPMIRALQKISNDYTNNDYKEIDKNSTRSAAYLFNAEMFSTHPSIKNRIQSLRKRVI

SEQ ID NO: 5794 - protein, 68 aa, Helicobacter pylori
  misc_feature (B) LOCATION 1...68
  hypothetical: YES
ENAYSKNQNKEIPMTTDRNLFFCASLLIFLGVLMSYSLSTYTTVVLYHYGEFHFFIRQLVSAIMGIII

SEQ ID NO: 5795 - protein, 233 aa, Helicobacter pylori
  misc_feature (B) LOCATION 1...233
  hypothetical: YES
KRLMSKKNSSLLCLNSFVFVALAIGVGVLQNDLGQIVLLGAVLAVLLVFSGGSVHLFGLIVSGAFAISVLAIVTSEHRILRLKLWWSNLQNSLFTLLPDKLANALRISDLPESYQVFHAGNAMHNGGLLGQGLGLGQIKLGFLSEVHTDMVLAGIAEEWGFLGLCVCFILFSVMIVLIFRIANRLKEPKYSLFCVGVVLLIGFSLVINAFGVGGIFPVKGLAVPFLSYGGSCF

SEQ ID NO: 5796 - protein, 232 aa, Helicobacter pylori
  misc_feature (B) LOCATION 1...232
  hypothetical: YES
RLMSKKNSSLLCLNSFVFVALAIGVGVLQNDLGQIVLLGAVLAVLLVFSGGSVHLFGLIVSGAFAISVLAIVTSEHRILRLKLWWSNLQNSLFTLLPDKLANALRISDLPESYQVFHAGNAMHNGGLLGQGLGLGQIKLGFLSEVHTDMVLAGIAEEWGFLGLCVCFILFSVMIVLIFRIANRLKEPKYSLFCVGVVLLIGFSLVINAFGVGGIFPVKGLAVPFLSYGGSCF

SEQ ID NO: 5797 - protein, 388 aa, Helicobacter pylori
  misc_feature (B) LOCATION 1...388
  hypothetical: YES
MTTDRNLFFCASLLIFLGVLMSYSLSTYTTVVLYHYGEFHFFIRQLVSAIMGIIIMWGLSRVDPRKWFSRLGFFLLFVPSLLIIGMFFLPESLSSSAGGAKRWIRLGFFSLAPLEFLKIGFTFFLAWSLSRTFVAKEKANVKEELITFVPYSFVFVALAIGVGVLQNDLGQIVLLGAVLAVLLVFSGGSVHLFGLIVSGAFAISVLAIVTSEHRILRLKLWWSNLQNSLFTLLPDKLANALRISDLPESYQVFHAGNAMHNGGLLGQGLGLGQIKLGFLSEVHTDMVLAGIAEEWGFLGLCVCFILFSVMIVLIFRIANRLKEPKYSLFCVGVVLLIGFSLVINAFGVGGIFPVKGLAVPFLSYGGSSLLANCIAIGLVLSLARYTKG

SEQ ID NO: 5798 - protein, 281 aa, Helicobacter pylori
  misc_feature (B) LOCATION 1...281
  hypothetical: YES
VMIDPKMVEFSIYADIPHLLTPIITDPKKAIGALQSVAKEMERRYSLMSEYKVKTIDSYNEQAQSNDVEAFPYLIVVIDELADLMMTGGKEAEFPIARIAQMGRASGLHLIVATQRPSVDVVTGLIKTNLPSRVSFRVGTKIDSKVILDTDGAQSLLGRGDMLFTPPGTNGLVRLHAPFATEDEIKKIVDFIKAQKEVEYDKDFLLEESRMPLDTPNYQGDDILERAKAVILEKKITSTSFLQRQLKIGYNQAATITDELEAQGFLSPRNAKGNREILQNF

SEQ ID NO: 5799 - protein, 844 aa, Helicobacter pylori
  misc_feature (B) LOCATION 1...844
  hypothetical: YES
MKSKKLYLALIIGVLLAFLTLSSWLGNSGLVGRFGVWFAAINKKYFGYLSLINLPYLAWVLFLLYRAKNPFTEIVLEKTLGHLLGILSLLFLQSSLLNQGEIGNSARLFLHPFIGDFGLYVLIMLMVVISYLILFKLPPKSVFYPYMNKTQSLLKEIYKQCLQAFSPNFSLKKEGFENTPSDSQKKETNNDKEKENLKENPIDENHNTPNEESFLAIPTPYNTTLNNSEPQEGLVQISPHPPTHYTIYPKRNRFDDLTNPTLKEPKQETKEREPTLKKETPTTLKPIMPISASNTENHDKTENHKTPNHPIKEDDLQESPQENPQKENIEENIEEKETQNAPSFSPLTLTSAKKPVMVKELSENKEILDGLDYGEVQKPKDYELPTTQLLNAVCLKETSLDENEIDQKIQDLLSKLRTFKIDGDIIRTYSGPIVTTFEFRPAPSVKVSRILGLSDDLAMTLCAESIRIQAPIKGKDVVGIEIPNSQSQIIYLREILESELFQKSSSPLTLALGKDIVGNPFITDLKKLPHLLIAGTTGSGKSVGVNAMILSLLYKNPPDQLKLVMIDPKMVEFSIYADIPHLLTPIITDPKKAIGALQSVAKEMERRYSLMSEYKVKTIDSYNEQAQSNGVEAFPYLIVVIDELADLMMTGGKEAEFPIARIAQMGRASGLHLIVATQRPSVDVVTGLIKTNLPSRVSFRVGTKIDSKVILDTDGAQSLLGRGDMLFTPPGTNGLVRLHAPFATEDEIKKIVDFIKAQKEVEYDKDFLLEESRMPLDTPNYQGDDILERAKAVILEKKITSTSFLQRQLKIGYNQAATITDELEAQGFLSPRNAKGNREILQNF

SEQ ID NO: 5800 - protein, 847 aa, Helicobacter pylori
  misc_feature (B) LOCATION 1...847
  hypothetical: YES
VQPMKSKKLYLALIIGVLLAFLTLSSWLGNSGLVGRFGVWFAAINKKYFGYLSLINLPYLAWVLFLLYRAKNPFTEIVLEKTLGHLLGILSLLFLQSSLLNQGEIGNSARLFLHPFIGDFGLYVLIMLMVVISYLILFKLPPKSVFYPYMNKTQSLLKEIYKQCLQAFSPNFSLKKEGFENTPSDSQKKETNNDKEKENLKENPIDENHNTPNEESFLAIPTPYNTTLNNSEPQEGLVQISPHPPTHYTIYPKRNRFDDLTNPTLKEPKQETKEREPTLKKETPTTLKPIMPISASNTENHDKTENHKTPNHPIKEDDLQESPQENPQKENIEENIEEKETQNAPSFSPLTLTSAKKPVMVKELSENKEILDGLDYGEVQKPKDYELPTTQLLNAVCLKETSLDENEIDQKIQDLLSKLRTFKIDGDIIRTYSGPIVTTFEFRPAPSVKVSRILGLSDDLAMTLCAESIRIQAPIKGKDVVGIEIPNSQSQIIYLREILESELFQKSSSPLTLALGKDIVGNPFITDLKKLPHLLIAGTTGSGKSVGVNAMILSLLYKNPPDQLKLVMIDPKMVEFSIYADIPHLLTPIITDPKKAIGALQSVAKEMERRYSLMSEYKVKTIDSYNEQAQSNGVEAFPYLIVVIDELADLMMTGGKEAEFPIARIAQMGRASGLHLIVATQRPSVDVVTGLIKTNLPSRVSFRVGTKIDSKVILDTDGAQSLLGRGDMLFTPPGTNGLVRLHAPFATEDEIKKIVDFIKAQKEVEYDKDFLLEESRMPLDTPNYQGDDILERAKAVILEKKITSTSFLQRQLKIGYNQAATITDELEAQGFLSPRNAKGNREILQNF

SEQ ID NO: 5801 - protein, 849 aa, Helicobacter pylori
  misc_feature (B) LOCATION 1...849
  hypothetical: YES
RHVQPMKSKKLYLALIIGVLLAFLTLSSWLGNSGLVGRFGVWFAAINKKYFGYLSLINLPYLAWVLFLLYRAKNPFTEIVLEKTLGHLLGILSLLFLQSSLLNQGEIGNSARLFLHPFIGDFGLYVLIMLMVVISYLILFKLPPKSVFYPYMNKTQSLLKEIYKQCLQAFSPNFSLKKEGFENTPSDSQKKETNNDKEKENLKENPIDENHNTPNEESFLAIPTPYNTTLNNSEPQEGLVQISPHPPTHYTIYPKRNRFDDLTNPTLKEPKQETKEREPTLKKETPTTLKPIMPISASNTENHDKTENHKTPNHPIKEDDLQESPQENPQKENIEENIEEKETQNAPSFSPLTLTSAKKPVMVKELSENKEILDGLDYGEVQKPKDYELPTTQLLNAVCLKETSLDENEIDQKIQDLLSKLRTFKIDGDIIRTYSGPIVTTFEFRPAPSVKVSRILGLSDDLAMTLCAESIRIQAPIKGKDVVGIEIPNSQSQIIYLREILESELFQKSSSPLTLALGKDIVGNPFITDLKKLPHLLIAGTTGSGKSVGVNAMILSLLYKNPPDQLKLVMIDPKMVEFSIYADIPHLLTPIITDPKKAIGALQSVAKEMERRYSLMSEYKVKTIDSYNEQAQSNGVEAFPYLIVVIDELADLMMTGGKEAEFPIARIAQMGRASGLHLIVATQRPSVDVVTGLIKTNLPSRVSFRVGTKIDSKVILDTDGAQSLLGRGDMLFTPPGTNGLVRLHAPFATEDEIKKIVDFIKAQKEVEYDKDFLLEESRMPLDTPNYQGDDILERAKAVILEKKITSTSFLQRQLKIGYNQAATITDELEAQGFLSPRNAKGNREILQNF

SEQ ID NO: 5802 - protein, 152 aa, Helicobacter pylori
  misc_feature (B) LOCATION 1...152
  hypothetical: YES
EVDDVLVRAVSGISTITTKPGNINVDFADLKSALGFKGFALMGIGEATGEDSAKLAVQNAIQSPLLDDASIEGAKSIIVFFEHHPDYPMMAYSQACDFIQDQAHQDVDVKFGQHTSENIPIDHVRVTIIATGSERNSNGAGLESIATLLNLW

SEQ ID NO: 5803 - protein, 179 aa, Helicobacter pylori
  misc_feature (B) LOCATION 1...179
  hypothetical: YES
LVRAVSGISTIITKPGNINVDFADLKSALGFKGFALMGIGEATGEDSAKLAVQNAIQSPLLDDASIEGAKSIIVFFEHHPDYPMMAYSQACDFIQDQAHQDVDVKFGQHTSENIPIDHVRVTIIATGSERNSNGAGLESIATPSQPVVKPTRKVGNGEYLRIPTEEELSIPTTIRIQQD

SEQ ID NO: 5804 - protein, 176 aa, Helicobacter pylori
  misc_feature (B) LOCATION 1...176
  hypothetical: YES
LRSFYGDLKVFSGKLEVCNINMNNASKSTILDLRKNIGVVFQDYKLIQDYTIEQNIKLPMVICGIKKEECHLQLEKLLGHIDLRHKANRYPKELSGGEQQRVAMARAMANCPELILADEPTGNLDDYSSDKIWSLLRGMNTQLNATIVVVTHKFPKNFSAYHRKFYIEEGEVYEYS

SEQ ID NO: 5805 - protein, 220 aa, Helicobacter pylori
  misc_feature (B) LOCATION 1...220
  hypothetical: YES
SSQRIIYAYNTSKTSRSLNMPIYASNEKTLCFISGPAGAVKARFLRSFYGDLKVFSGKLEVCNINMNNASKSTILDLRKNIGVVFQDYKLIQDYTIEQNIKLPMVICGIKKEECHLQLEKLLGHIDLRHKANRYPKELSGGEQQRVAMARAMANCPELILADEPTGNLDDYSSDKIWSLLRGMNTQLNATIVVVTHKFPKNFSAYHRKFYIEEGEVYEYS

SEQ ID NO: 5806 - protein, 223 aa, Helicobacter pylori
  misc_feature (B) LOCATION 1...223
  hypothetical: YES
MSVIIAANNLCLQYQQNEPVIKHANLRIKRKDFVFISGPSGSGKSTLLRSFYGDLKVFSGKLEVCNINMNNASKSTILDLRKNIGVVFQDYKLIQDYTIEQNIKLPMVICGIKKEECHLQLEKLLGHIDLRHKANRYPKELSGGEQQRVAMARAMANCPELILADEPTGNLDDYSSDKIWSLLRGMNTQLNATIVVVTHKFPKNFSAYHRKFYIEEGEVYEYS

SEQ ID NO: 5807 - protein, 268 aa, Helicobacter pylori
  misc_feature (B) LOCATION 1...268
  hypothetical: YES
MNTLKKHLAFIIPLVALLFSLECVLFINQAIAQKEKKLIEDYSIVLASTQKLGLELLRQNFNEIIALKEIDPNYSLEPLQKTLGADGLKELKKNLPFFYSLQLSTFPTQERLENIKEKLLKIPGVQKVEVFAKTYMQVYDLLSLIKATIYIFALVVFVLSVLLMFKQVRIWIYQYHERLEIMDLLGASVSFKNGFLYKIALMDSLIASFLAPMFMLYITSQKGFEKTMDTLGIIGGAFVLNHFLWGLLFSLVVSFVSVLLVAWRTRHV

SEQ ID NO: 5808 - protein, 273 aa, Helicobacter pylori
  misc_feature (B) LOCATION 1...273
  hypothetical: YES
KRGKFMNTLKKHLAFIIPLVALLFSLECVLFINQAIAQKEKKLIEDYSIVLASTQKLGLELLRQNFNEIIALKEIDPNYSLEPLQKTLGADGLKELKKNLPFFYSLQLSTFPTQERLENIKEKLLKIPGVQKVEVFAKTYMQVYDLLSLIKATIYIFALVVFVLSVLLMFKQVRIWIYQYHERLEIMDLLGASVSFKNGFLYKIALMDSLIASFLAPMFMLYITSQKGFEKTMDTLGIIGGAFVLNHFLWGLLFSLVVSFVSVLLVAWRTRHV

SEQ ID NO: 5809 - protein, 120 aa, Helicobacter pylori
  misc_feature (B) LOCATION 1...120
  hypothetical: YES
YFQFKGLNLMFNFFKKIVNKIKGEEVKEKKRESVPKEELEEILIGFDIQYDLIESLLKHLGDLITPKQLEVALLRFVRGESYYDKTRLKTITTKPLVHLIVGVNGAGKTTTIAKLAKLSL

SEQ ID NO: 5810 - protein, 152 aa, Helicobacter pylori
  misc_feature (B) LOCATION 1...152
  hypothetical: YES
RPVISAKEGSDPSSLAYNTIESAIAKNIDEVFIDTAGRLHNQTNLKNELSKIAHTCSKVLKDAPFYKFLILDGTQGSSGLTQAKIFHETLALDGVIMTKLDGTSKGGAILSVLYELKLPILYLGMGEKEDDLIAFDEERFIEDLVDAVFVEQ

SEQ ID NO: 5811 - protein, 293 aa, Helicobacter pylori
  misc_feature (B) LOCATION 1...293
  hypothetical: YES
MFNFFKKIVNKIKGEEVKEKKRESVPKEELEEILIGFDIQYDLIESLLKHLGDLITPKQLEVALLRFVRGESYYDKTRLKTITTKPLVHLIVGVNGAGKTTTIAKLAKLSLKQHKKALLGAGDTFRAAAVKQLQLWGEKLNVQVISAKEGSDPSSLAYNTIESAIAKNIDEVFIDTAGRLHNQTNLKNELSKIAHTCSKVLKDAPFYKFLILDGTQGSSGLTQAKIFHETLALDGVIMTKLDGTSKGGAILSVLYELKLPILYLGMGEKEDDLIAFDEERFIEDLVDAVFVEQ

SEQ ID NO: 5812 - protein, 236 aa, Helicobacter pylori
  misc_feature (B) LOCATION 1...236
  hypothetical: YES
RQKQSHFLLGGMRIHPKTKASVSFSGAYTESIRDVTGVASTKDNVVTIDEINRAINNACAKAGLDNDKHILHALPYRFTLDKQEVNDPLGMSGTRLEVFIHIVYTEKNNIENLEKIMIQSGVEIENIVINSYAASIATLSNDERELGVACVDMGGETCNLTIYSGNSIRYNKYLPVGSHHLTTDLSHMLNTPFPYAEEVKIKYGDLSFESGAETPSQSVQIPTTGSDGHESHIVPL

SEQ ID NO: 5813 - protein, 320 aa, Helicobacter pylori
  misc_feature (B) LOCATION 1...320
  hypothetical: YES
MEHKEIVIGVDIGSRKICAIVAEFKDGILRIIGTAHQDSKEINSKAIKRGRINSLAHASNAIKEVINSAKKMAGLNADEDRNNPISSFRESYHPKTKAIVSFSGAYTESIRDVTGVASTKDNVVTIDEINRAINNACAKAGLDNDKHILHALPYRFTLDKQEVNDPLGMSGTRLEVFIHIVYTEKNNIENLEKIMIQSGVEIENIVINSYAASIATLSNDERELGVACVDMGGETCNLTIYSGNSIRYNKYLPVGSHHLTTDLSHMLNTPFPYAEEVKIKYGDLSFESGAETPSQSVQIPTTGSDGHESHIVPLSEMPTS

SEQ ID NO: 5814 - protein, 349 aa, Helicobacter pylori
  misc_feature (B) LOCATION 1...349
  hypothetical: YES
MQGEIMEHKEIVIGVDIGSRKICAIVAEFKDGILRIIGTAHQDSKEINSKAIKRGRINSLAHASNAIKEVINSAKKMAGLNADEDRNNPISSFRESYHPKTKAIVSFSGAYTESIRDVTGVASTKDNVVTIDEINRAINNACAKAGLDNDKHILHALPYRFTLDKQEVNDPLGMSGTRLEVFIHIVYTEKNNIENLEKIMIQSGVEIENIVINSYAASIATLSNDERELGVACVDMGGETCNLTIYSGNSIRYNKYLPVGSHHLTTDLSHMLNTPFPYAEEVKIKYGDLSFESGAETPSQSVQIPTTGSDGHESHIVPLSEIQTIMRERALETFKIIHRSIQDSGFEEH

SEQ ID NO: 5815 - protein, 123 aa, Helicobacter pylori
  misc_feature (B) LOCATION 1...123
  hypothetical: YES
MPETEANKLKIAEKEKEKANKERELELSTYLEELICDYKNLLDMEIVFSAELGSTQIPLLQILRFEKGSVIDLQKPAGESVDTFVNGRVIGKGEVMVFERNLAIRLNEILDSNAIVYYLAKNS

SEQ ID NO: 5816 - protein, 125 aa, Helicobacter pylori
  misc_feature (B) LOCATION 1...125
  hypothetical: YES
SFMPETEANKLKIAEKEKEKANKERELELSTYLEELICDYKNLLDMEIVFSAELGSTQIPLLQILRFEKGSVIDLQKPAGESVDTFVNGRVIGKGEVMVFERNLAIRLNEILDSNAIVYYLAKNS

SEQ ID NO: 5817 - protein, 184 aa, Helicobacter pylori
  misc_feature (B) LOCATION 1...184
  hypothetical: YES
PKFCESLPKSFSKTLLALSLGLILLGVFIPFPKVRKHQSVPLALHFTEHYARFIPTILSVAIPLIQRDAVGLFQVANASIATTFLTHATKRALNHVTINDQRLGERPYGGNFNMPSGHSSMVGLAVAFLMRRYSVKKYLWLLPLIPLTMLARIYLDMHTIGAVLAGLGTGMLCVGLFTSPKNLN

SEQ ID NO: 5818 - protein, 191 aa, Helicobacter pylori
  misc_feature (B) LOCATION 1...191
  hypothetical: YES
MKKFLFKQKFCESLPKSFSKTLLALSLGLILLGVFIPFPKVPKHQSVPLALHFTEHYARFIPTILSVAIPLIQRDAVGLFQVANASIATTFLTHATKRALNHVTINDQRLGERPYGGNFNMPSGHSSMVGLAVAFLMRRYSVKKYLWLLPLIPLTMLARIYLDMHTIGAVLAGLGTGMLCVGLFTSPKNLN

SEQ ID NO: 5819 - protein, 93 aa, Helicobacter pylori
  misc_feature (B) LOCATION 1...93
  hypothetical: YES
VRNVVLFILTAIFLAFMLLVSYCMPHYSVAVISGVEVKRMNENENTPNNKEVKTLARDVYFVQTYDPKDQKSVTVYRNEDTRFGFPFYFKFNS

SEQ ID NO: 5820 - protein, 175 aa, Helicobacter pylori
  misc_feature (B) LOCATION 1...175
  hypothetical: YES
LIKFVRNVVLFILTAIFLAFMLLVSYCMPHYSVAVISGVEVKRMNENENTPNNKEVKTLARDVYFVQTYDPKDQKSVTVYRNEDTRFGFPFYFKFNSADISALAQSLVNQQVEVQYYGWRINLFNMFPNVIFLKPLKESDEMSKPVFSWILYALLLVGFFISARSVCTLFKGKAH

SEQ ID NO: 5821 - protein, 178 aa, Helicobacter pylori
  misc_feature (B) LOCATION 1...178
  hypothetical: YES
GIKLIKFVRNVVLFILTAIFLAFMLLVSYCMPHYSVAVISGVEVKRMNENENTPNNKEVKTLARDVYFVQTYDPKDQKSVTVYRNEDTRFGFPFYFKFNSADISALAQSLVNQQVEVQYYGWRINLFNMFPNVIFLKPLKESDEMSKPVFSWILYALLLVGFFISARSVCTLFKGKAH

SEQ ID NO: 5822 - protein, 440 aa, Helicobacter pylori
  misc_feature (B) LOCATION 1...440
  hypothetical: YES
LGLGFKILALVVLILGGYLIFNAFITKPRALSFSLKSEENALNDNNEALFWDLKKPIKVKIVAPKGIKRYEIKVTTKDNLILYEKESLVLDKPKSLEVPLIRPEIMGLEGKCLDYEFQASDWSYANFFNGNKASFKQEVCIDTIKPSIVILSRSPSIAYGGSAIVIFEALDKNLSQAFVRVKKKDFKAFRLLEFKQRNVFIALVPWSYENKDFKAFIVAKDKAYNSNTTPLLFKRKTHRLRERDINLSALKDKIAKQEKFQNHTEQTLLEMFSNARLKDLEKIQKIALEQGDFDKDFSHFQALKPLNGPFKMTSNFLENRRFLKDNQVLFKFLHLGVDLMPSKDLSLAFDPSVKRVFKGELDFYGNSLINCYGLGLCVFLAHLKDDESVGSSGLKLGIGLHLGMLLQGVFVRPNEWLNEQWIKTNIIAPIEQAKRLLMKG

SEQ ID NO: 5823 - protein, 443 aa, Helicobacter pylori
  misc_feature (B) LOCATION 1...443
  hypothetical: YES
GLILGLGFKILALVVLILGGYLIFNAFITKPRALSFSLKSEENALNDNNEALFWDLKKPIKVKIVAPKGIKRYEIKVTTKDNLILYEKESLVLDKPKSLEVPLIRPEIMGLEGKCLDYEFQASDWSYANFFNGNKASFKQEVCIDTIKPSIVILSRSPSIAYGGSAIVIFEALDKNLSQAFVRVKKKDFKAFRLLEFKQRNVFIALVPWSYENKDFKAFIVAKDKAYNSNTTPLLFKRKTHRLRERDINLSALKDKIAKQEKFQNHTEQTLLEMFSNARLKDLEKIQKIALEQGDFDKDFSHFQALKPLNGPFKMTSNFLENRRFLKDNQVLFKFLHLGVDLMPSKDLSLAFDPSVKRVFKGELDFYGNSLINCYGLGLCVFLAHLKDDESVGSSGLKLGIGLHLGMLLQGVFVRPNEWLNEQWIKTNIIAPIEQAKRLLMKG

SEQ ID NO: 5824 - protein, 202 aa, Helicobacter pylori
  misc_feature (B) LOCATION 1...202
  hypothetical: YES
LKNIIHIHQNKELRFVKKCLLGYFFAPLCGAILLVLFLVSSGAKSFQISNLFNNQLAYIVLLSLFLCAIGFIAGAVGFYRLSKITRHLSFFENFAFSFLAVILCALLSYLVPNASNALSLIGNGVSIFYLHKLYRELSLYTQERFFLSGFRLLLFSFMLALLGVLVQALVIIFLTIAVILMCVALSFLGRAFLNFSQVFLKA

SEQ ID NO: 5825 - protein, 47 aa, Helicobacter pylori
  misc_feature (B) LOCATION 1...47
  hypothetical: YES
MLDKRIKTLLLFFGLNMVCLSVSFTNKPHLCFWFLVLGCYLVYEWQK

SEQ ID NO: 5826 - protein, 52 aa, Helicobacter pylori
  misc_feature (B) LOCATION 1...52
  hypothetical: YES
LMMNGIPIKKLNEKLKMFFNVENAIYVFLLVSYLIVGMRVTLSLIDNHGVLK

SEQ ID NO: 5827 - protein, 86 aa, Helicobacter pylori
  misc_feature (B) LOCATION 1...86
  hypothetical: YES
ARIMLDKRIKTLLLFFGLNMVCLSVSFTNKPHLCFWFLVLGCYLVYEWQKKQKKDFQSAKSLKFDSVSELEKDLNMEVTNDEWDTH

SEQ ID NO: 5828 - protein, 127 aa, Helicobacter pylori
  misc_feature (B) LOCATION 1...127
  hypothetical: YES
MLDKRIKTLLLFFGLNMVCLSVSFTNKPHLCFWFLVLGCYLVYEWQKKQKKDFQSAKSLKFDSVSELEKDLNMEVTNDEWDTIKKLNEKLKMFFNVENAIYVFLLVSYLIVGMRVTLSLIDNHGVLK

SEQ ID NO: 5829 - protein, 118 aa, Helicobacter pylori
  misc_feature (B) LOCATION 1...118
  hypothetical: YES
VVLSDLLLPKPLPTKADPMFLILSNPFFSTSAIKFLILSIGKLNFFPNASLSPIINIRKNKKFNIIENKSLDKPVKRFVPPPNKEAKIFPILNPFIFGCVSSCLFGSLMRVLVGSISQ

SEQ ID NO: 5830 - protein, 128 aa, Helicobacter pylori
  misc_feature (B) LOCATION 1...128
  hypothetical: YES
SLTCGTLILLVVLSDLLLPKPLPTKADPMFLILSNPFFSTSAIKFLILSIGKLNFFPNASLSPIINIRKNKKFNIIENKSLDKPVKRFVPPPNKEAKIFPILNPFIFGCVSSCLFGSLMRVLVGSISQ

SEQ ID NO: 5831 - protein, 72 aa, Helicobacter pylori
  misc_feature (B) LOCATION 1...72
  hypothetical: YES
GQKEEKGIIDGYCQSDVLNTYWLFFKYEVLKGALNKEQYLGLLNDFLAKFPKEKSYSSVFINALEKEIREFA

SEQ ID NO: 5832 - protein, 129 aa, Helicobacter pylori
  misc_feature (B) LOCATION 1...129
  hypothetical: YES
MRKGRVMLCVFDIETIPNISLCKEHFQLKEDDALKICEWSFEKQKEKSGSEFLPLYLHEIISIAAVIGDDYGQFIKVGNFGQKHENKEDFASEKELLEDFFKYFNEKQPRLISFXGRGFGYSPTHAQSP

SEQ ID NO: 5833 - protein, 220 aa, Helicobacter pylori
  misc_feature (B) LOCATION 1...220
  hypothetical: YES
KRDKNVKMRKGRVMLCVFDIETIPNISLCKEHFQLKEDDALKICEWSFEKQKEKSGSEFLPLYLHEIISIAAVIGDDYGQFIKVGNFGQKHENKEDFASEKELLEDFFKYFNEKQPRLISFNGRGFDIPLLTLKALKYNLTLDAFYSQENKWENYRARYSEQFHLDLMDSLSHYGSVRGLNLNGVCSMTNIPGKFDVSGDLVHAIYYNPHLRPKGGKRHY

SEQ ID NO: 5834 - protein, 276 aa, Helicobacter pylori
  misc_feature (B) LOCATION 1...276
  hypothetical: YES
MRKGRVMLCVFDIETIPNISLCKEHFQLKEDDALKICEWSFEKQKEKSGSEFLPLYLHEIISIAAVIGDDYGQFIKVGNFGQKHENKEDFASEKELLEDFFKYFNEKQPRLISFNGRGFDIPLLTLKALKYNLTLDAFYSQENKWENYRARYSEQFHLDLMDSLSHYGSVRGLNLNGVCSMTNIPGKFDVSGDLVHAIYYNPHLSQKEKKGIIDGYCQSDVLNTYWLFLKYEVLKGALNKEQYLGLLNDFLAKFPKEKSYSSVFINALEKEIREFA

SEQ ID NO: 5835 - protein, 192 aa, Helicobacter pylori
  misc_feature (B) LOCATION 1...192
  hypothetical: YES
MLDIWIDMIICIFYLLFFTTPYIVGDILQLKFIRQKLCEKPVLLPQKDYEEAGNYAIRKMQLSIISQILDGVIFAGWVFFGLTHLEDLTHYLNLPETLGYLVFALLFLAIQSVLALPISYYTTMHLDKEFGFSKVSLSLFFKDFFKGLLLTLGVGLLLIYTLIMIIEHVEHWEISSFFVVFVFMILANLFLP

SEQ ID NO: 5836 - protein, 407 aa, Helicobacter pylori
  misc_feature (B) LOCATION 1...407
  hypothetical: YES
MLDIWIDMIICIFYLLFFTTPYIVGDILQLKFIRQKLCEKPVLLPQKDYEEAGNYAIRKMQLSIISQILDGVIFAGWVFFGLTHLEDLTHYLNLPETLGYLVFALLFLAIQSVLALPISYYTTMHLDKEFGFSKVSLSLFFKDFFKGLLLTLGVGLLLIYTLIMIIEHVEHWEISSFFVVFVFMILANLFYPKIAQLFNQFTPLNNRDLESQIESMMDKVGFKSQGIFVMDASKRDGRLNAYFGGLGKNKRVVLFDTLISKVGTEGLLAILGHELGHFKNKDLLKNLGIMGGLLALVFALIAHLPPLVFEGFNVSQTPASLITILLLFLPVFSFYAMPLIGFFSRKNEYNADKFGASLSSKETLAKALVSIVNENKAFPYSHPFYVFLHFTHPPLLERLKALDYEIE

SEQ ID NO: 5837 - protein, 408 aa, Helicobacter pylori
  misc_feature (B) LOCATION 1...408
  hypothetical: YES
NMLDIWIDMIICIFYLLFFTTPYIVGDILQLKFIRQKLCEKPVLLPQKDYEEAGNYAIRKMQLSIISQILDGVIFAGWVFFGLTHLEDLTHYLNLPETLGYLVFALLFLAIQSVLALPISYYTTMHLDKEFGFSKVSLSLFFKDFFKGLLLTLGVGLLLIYTLIMIIEHVEHWEISSFFVVFVFMILANLFYPKIAQLFNQFTPLNNRDLESQIESMMDKVGFKSQGIFVMDASKRDGRLNAYFGGLGKNKRVVLFDTLISKVGTEGLLAILGHELGHFKNKDLLKNLGIMGGLLALVFALIAHLPPLVFEGFNVSQTPASLITILLLFLPVFSFYAMPLIGFFSRKNEYNADKFGASLSSKETLAKALVSIVNENKAFPYSHPFYVFLHFTHPPLLERLKALDYEIE

SEQ ID NO: 5838 - protein, 142 aa, Helicobacter pylori
  misc_feature (B) LOCATION 1...142
  hypothetical: YES
VQESVVHVDYDSLETCKNFKPSVGTELVVLEKNIAHVRFKGNENMVYEENFVHAGFVLLACNYAALCALNKKYSVVVSNNINFYAPLELNQEALIKAQVIQDGVKKAEIKIEAFVLDIQVLEGMIEIVVFDKKPFKFNFKEE

SEQ ID NO: 5839 - protein, 160 aa, Helicobacter pylori
  misc_feature (B) LOCATION 1...160
  hypothetical: YES
GGILKCLNQASVKIKDKIVQESVVHVDYDSLETCKNFKPSVGTELVVLEKNIAHVRFKGNENMVYEENFVHAGFVLLACNYAALCALNKKYSVVVSNNINFYAPLELNQEALIKAQVIQDGVKKAEIKIEAFVLDIQVLEGMIEIVVFDKKPFKFNFKEE

SEQ ID NO: 5840 - protein, 248 aa, Helicobacter pylori
  misc_feature (B) LOCATION 1...248
  hypothetical: YES
MQKSIFKITLLLVFLFLRNAVGLDDKKAAPKSVQNTPKNLPPIQLRLDQAYEDLIKMLDNMGKSTQYEFPKIKEILEQSEEEWLGVAHEECVALVMLISPKASIENSPIYKNCYEAYVKQRIHDLYDFYIEGKKVKRKIKKAHEHEMALNKSQPLKKEPPKSENKKGLTKPSLKDAKIPKGYYLQIGAFLNSPSKDFLQTLKTFPHQMEEKDSLTHYLIGPYKTKEEALKQLENAAKSFKNKPALVEK

SEQ ID NO: 5841 - protein, 248 aa, Helicobacter pylori; identical to SEQ ID NO: 5840
  misc_feature (B) LOCATION 1...248
  hypothetical: YES

SEQ ID NO: 5842 - protein, 248 aa, Helicobacter pylori; identical to SEQ ID NO: 5840
  misc_feature (B) LOCATION 1...248
  hypothetical: YES

SEQ ID NO: 5843 - protein, 122 aa, Helicobacter pylori
  misc_feature (B) LOCATION 1...122
  hypothetical: YES
VVSIRLIVLPLGLISQTKGMLFSYLKKLISLTLYKPCMMLVAFFNYGIIYKVNTLIPTKHEVTQGFYGNADKMANEGKIIDVFGNVLKGDWNSYIAHSSIVGFLTNYCFRFCDLFLSSQTSA

SEQ ID NO: 5844 - protein, 350 aa, Helicobacter pylori
  misc_feature (B) LOCATION 1...350
  hypothetical: YES
AFGVINWGVKILDDFDTYFINTIFYPSEELAILIAQSLNDGLEIPTNTNLSPSEIFSIGNLASSAYAMIVNLWDNAFDGINMFNWLTMIPKIIMFFLVILGELLFLGLLLIIVLLVTAEIFMWSALGLIVLPLGLIPQTKGMLFSYLKKLISLTLYKPCMMLVAFFNYGIIYKVNTLIPTKHEVTQGFYGNADKMANEGKIIDVFGNVLKGDWNSYIAHSSIVGFLTIIVLGSVICFFLVKRVPDFINNIFGTSGGVGAVTEMMQKIGMTIGGAVFGGSAVIVANQVKQAYQSAGGGLAGLQAGAKAFGLGAISGGASAMANHRSVKAGVKHFVASVKSGFGFDNDKNNK

SEQ ID NO: 5845 - protein, 421 aa, Helicobacter pylori
  misc_feature (B) LOCATION 1...421
  hypothetical: YES
MNFFDTLMGMFVEPSQKVAKSLAEHVGSFFHAQLILNTIITILFMIWAYKRVKEGDMFEFKTAMGVVVFIAFVGFINWGIKNPNDFNTYFINTIFYPSEKLAILIAQSLNDGLEIPTNTNLSPSEIFSIGNLASSAYAMIVNLWDNAFDGINMFNWLTMIPKIIMFFLVILGELLFLGLLLIIVLLVTAEIFMWSALGLIVLPLGLIPQTKGMLFSYLKKLISLTLYKPCMMLVAFFNYGIIYKVNTLIPTKHEVTQGFYGNADKMANEGKIIDVFGNVLKGDWNSYIAHSSIVGFLTIIVLGSVICFFLVKRVPDFINNIFGTSGGVGAVTEMMQKIGMTIGGAVFGGSAVMVANQVKQAYQSAGGGLAGLQAGAKAFGLGAISGGASAMANHRSVKAGVKHFVASVKSGFGFDNDKNNK

SEQ ID NO: 5846 - protein, 421 aa, Helicobacter pylori
  misc_feature (B) LOCATION 1...421
  hypothetical: YES
MNFFDTLMGMFVEPSQKVAKSLAEHVGSFFHAQLILNTIITILFMIWAYKRVKEGDMFEFKTAMGVVVFIAFVGFINWGIKNPNDFNTYFINTIFYPSEKLAILIAQSLNDGLEIPTNTNLSPSEIFSIGNLASSAYAMIVNLWDNAFDGINMFNWLTMIPKIIMFFLVILGELLFLGLLLIIVLLVTAEIFMWSALGLIVLPLGLIPQTKGMLFSYLKKLISLTLYKPCMMLVAFFNYGIIYKVNTLIPTKHEVTQGFYGNADKMANEGKIIDVFGNVLEGDWNSYIAHSSIVGFLTIIVLGSVICFFLVKRVPDFINNIFGTSGGVGAVTEMMQKIGMTIGGAVFGGSAVMVANQVKQAYQSAGGGLAGLQAGAKAFGLGAISGGASAMANHRSVKAGVKHFVASVKSGFGFDNDKNNK

SEQ ID NO: 5847 - protein, 425 aa, Helicobacter pylori
  misc_feature (B) LOCATION 1...425
  hypothetical: YES
REGAMNFFDTLMGMFVEPSQKVAKSLAEHVGSFFHAQLILNTIITILFMIWAYKRVKEGDMFEFKTAMGVVVFIAFVGFINWGIKNPNDFNTYFINTIFYPSEKLAILIAQSLNDGLEIPTNTNLSPSEIFSIGNLASSAYAMIVNLWDNAFDGINMFNWLTMIPKIIMFFLVILGELLFLGLLLIIVLLVTAEIFMWSALGLIVLPLGLIPQTKGMLFSYLKKLISLTLYKPCMMLVAFFNYGIIYKVNTLIPTKHEVTQGFYGNADKMANEGKIIDVFGNVLKGDWNSYIAHSSIVGFLTIIVLGSVICFFLVKRVPDFINNIFGTSGGVGAVTEMMQKIGMTIGGAVFGGSAVMVANQVKQAYQSAGGGLAGLQAGAKAFGLGAISGGASAMANHRSVKAGVKHFVASVKSGFGFDNDKNNK

SEQ ID NO: 5848 - protein, 276 aa, Helicobacter pylori
  misc_feature (B) LOCATION 1...276
  hypothetical: YES
MLRKNILAYYGANFLLIIAQSLPHAILTPLLLSKGLSLSEILLVQTFFSFCVLVAEYPSGVLADLMSRKNLFLVSNVFLIASFSLVLFFDSFILMLLAWGLYGLYSACSSGTIEASLITDIKENKKDLSKFLAKNNQITYLGMIIGSSLGSFLYLKVHAMLYVVGIFLIMLCALTIIIYFKEKEGDFKSQKNLKLLKEQVKGSLKELKDNPKLKILLVGHLITPVFFMSHFQMWQAYFLKQGVKEQYLFVFYIAFQVISIPHSFFKSQKLXAKKSP

SEQ ID NO: 5849 - protein, 386 aa, Helicobacter pylori
  misc_feature (B) LOCATION 1...386
  hypothetical: YES
MLRKNILAYYGANFLLIIAQSLPHAILTPLLLSKGLSLSEILLVQTFFSFCVLVAEYPSGVLADLMSRKNLFLVSNVFLIASFSFVLFFDSFILMLLAWGLYGLYSACSSGTIEASLITDIKENKKDLSKFLAKNNQITYLGMIIGSSLGSFLYLKVHAMLYVVGIFLIMLCALTIIIYFKEKEGDFKSQKNLKLLKEQVKGSLKELKDNPKLKILLVGHLITPVFFMSHFQMWQAYFLKQGVKEQYLFVFYIAFQVISILIHFLKAKNYSQKIALSSLLVLLGVSPLLLSNIPYCFIGVYALMVAFFAYMSYCLGYQFSKFVSKNNISSLSSLLSSCVRVVSVLILSLSSLELRYFSPLTIITMHFALTLIILFFFLYKAKPFDE

SEQ ID NO: 5850 - protein, 394 aa, Helicobacter pylori
  misc_feature (B) LOCATION 1...394
  hypothetical: YES
ASFNYNFQMLRKNILAYYGANFLLIIAQSLPHAILTPLLLSKGLSLSEILLVQTFFSFCVLVAEYPSGVLADLMSRKNLFLVSNVFLIASFSFVLFFDSFILMLLAWGLYGLYSACSSGTIEASLITDIKENKKDLSKFLAKNNQITYLGMIIGSSLGSFLYLKVHAMLYVVGIFLIMLCALTIIIYFKEKEGDFKSQKNLKLLKEQVKGSLKELKDNPKLKILLVGHLITPVFFMSHFQMWQAYFLKQGVKEQYLFVFYIAFQVISILIHFLKAKNYSQKIALSSLLVLLGVSPLLLSNIPYCFIGVYALMVAFFAYMSYCLGYQFSKFVSKNNISSLSSLLSSCVRVVSVLILSLSSLELRYFSPLTIITMHFALTLIILFFFLYKAKPFDE

SEQ ID NO: 5851 - protein, 73 aa, Helicobacter pylori
  misc_feature (B) LOCATION 1...73
  hypothetical: YES
KTRSNPSSATRRFTMMIPSSPHELIKVSPSLSKKYKLGKVPNQATFYDDLQAAKTRGELSYDKSLVPVGSSEL

SEQ ID NO: 5852 - protein, 80 aa, Helicobacter pylori
  misc_feature (B) LOCATION 1...80
  hypothetical: YES
MEDFLYNTLYFIEDYKLVVIFSFIGLIALFFLYKFIKTQKKVFKDKANQPQKKKSFKEIIIDGLKERVKTFGFRLQAILL

SEQ ID NO: 5853 - protein, 101 aa, Helicobacter pylori
  misc_feature (B) LOCATION 1...101
  hypothetical: YES
VVGTMEDFLYNTLYFIEDYKLVVIFSFIGLIALFFLYKFIKTQKKVFKDKANQPQKKKSFKEIIIDGLKERVKTFGFWLPSYTITILFFYHIRVIFLDSLR

SEQ ID NO: 5854 - protein, 633 aa, Helicobacter pylori
  misc_feature (B) LOCATION 1...633
  hypothetical: YES
KKGLKPLAFGCQAILLLSYSFITSGLFFLILLGNFYDDNRLPESDDDLFDIWVYAIQDFPAYYFKALTFSSLKIYGFNISLVVYSSILCSYIFITFFVWFLKYLTRTRDIGANKKVDDLFGSASWETEEKMIKAKLITPNNKKRAFDKREVIVGRRGLGDFIAYAGQAFIGLIAPTRSGKGVGFIMPNMINYPQNIVVFDPKADTMETCGKIREKRFNQKVFIYEPFSLKTHRFNPFAYVDFGNDVVLTEDILSQIDTRLKGHGMVASGGDFSTQIFGLAKLVFPERPNEKDPFFSNQARNLFVINCNIYRDLMWTKKGLEFVKRKKIIMPETPTMFFIGSMASGINLIDEDTNMEKVVSLMEFFGGEEDKSGDNLRALSPATRNMWNNFKTMGGAKETYSSVQGVYTSAFAPYNNAMIRNFTSANDFDFRRLRIDAVSIGVIANPKESTIVGPILELFFNVMIYSNLILPIHDPQCKRSCLMLMDEFTLCGYLETFVKAVGIMAEYNMRPAFVFQSKAQLENDPPLGYGRNGAKTILDNLSLNMYYGINNDNYYEHFEKLSKVLGKYTRQDVSRSIDDNTGKTNTSISNKERFLMTPDELMTMGDELIILENTLKPIKCHKALYYDDPFFTA

SEQ ID NO: 5855 - protein, 748 aa, Helicobacter pylori
  misc_feature (B) LOCATION 1...748
  hypothetical: YES
MEDFLYNTLYFIEDYKLVVIFSFIGLIALFFLYKFIKTQKKVFKDKANQPQKKKSFKEIIIDGLKERVKTFGFWLQAILLLSYSFITSGLFFLILLGNFYDDNRLPESDDDLFDIWVYAIQDFPAYYFKALTFSSLKIYGFNISLVVYSSILCSYIFITFFVWFLKYLTRTRDIGANKKVDDLFGSASWETEEKMIKAKLITPNNKKRAFDKREVIVGRRGLGDFIAYAGQAFIGLIAPTRSGKGVGFIMPNMINYPQNIVVFDPKADTMETCGKIREKRFNQKVFIYEPFSLKTHRFNPFAYVDFGNDVVLTEDILSQIDTRLKGHGMVASGGDFSTQIFGLAKLVFPERPNEKDPFFSNQARNLFVINCNIYRDLMWTKKGLEFVKRKKIIMPETPTMFFIGSMASGINLIDEDTNMEKVVSLMEFFGGEEDKSGDNLRALSPATRNMWNNFKTMGGAKETYSSVQGVYTSAFAPYNNAMIRNFTSANDFDFRRLRIDAVSIGVIANPKESTIVGPILELFFNVMIYSNLILPIHDPQCKRSCLMLMDEFTLCGYLETFVKAVGIMAEYNMRPAFVFQSKAQLENDPPLGYGRNGAKTILDNLSLNMYYGINNDNYYEHFEKLSKVLGKYTRQDVSRSIDDNTGKTNTSISNKERFLMTPDELMTMGDELIILENTLKPIKCHKALYYDDPFFTDELIKVSPSLSKKYKLGKVPNQATFYDDLQAAKTRGELSYDKSLVPVGSSEL

SEQ ID NO: 5856 - protein, 338 aa, Helicobacter pylori
  misc_feature (B) LOCATION 1...338
  hypothetical: YES
NEFYKLAIASWQEPLRVSIEFVDLPKKIIRFPAHDLKVGEFGFVVTQLSDYEIVNSEVVIIAVENGVATAKFKAFESMKQSHLPTPRMVAKKGDLVYFRQFNNQAFLIAPNDELYEQIRATNTDINFISSDLLVTFLNGFDPKIANLRKACNVYSVGVIYIVTTNTLNILSCESFEILEKRELDTSGVTKTSTPFFSRVEGIDAGTLGKLFSGSQSKNYFAYYDALVKKEKRKEVRIEKKEERIDARENKREIKQEAIKEPKKANQGTENAPTLEEKNYQKAERKFDAKEERRRSRDERKKTKATKKAMEFEQRAREHQERDEKELEERRKALEMNKK

SEQ ID NO: 5857 - protein, 450 aa, Helicobacter pylori
  misc_feature (B) LOCATION 1...450
  hypothetical: YES
MLRLLIGLLLMSFISLQSASWQEPLRVSIEFVDLPKKIIRFPAHDLKVGEFGFVVTKLSDYEIVNSEVVIIAVENGVATAKFKAFESMKQSHLPTPRMVAKKGDLVYFRQFNNQAFLIAPNDELYEQIRATNTDINFISSDLLVTFLNGFDPKIANLRKACNVYSVGVIYIVTTNTLNILSCESFEILEKRELDTSGVTKTSTPFFSRVEGIDAGTLGKLFSGSQSKNYFAYYDALVKKEKRKEVRIEKKEERIDARENKREIKQEAIKEPKKANQGTENAPTLEEKNYQKAERKFDAKEERRRSRDERKKTKATKKAMEFEEREKEHDERDEKETEERRKALEMDKGNEKVNAKENEREINQESANEPSSENNATLKDTENTSVLKESAAKKEAPKPSSKEEKRRLKEEKKKAKAEQRAREFEQRAREHQERDEKELEERRKALEMNKK

SEQ ID NO: 5858 - protein, 496 aa, Helicobacter pylori
  misc_feature (B) LOCATION 1...496
  hypothetical: YES
MFNIKRTFLITIISFFLIVPNWLKAIDLPIVSNLKIYQTVYCMLIPSYVLTNKSFADILTGYTSIGASGSGKSSGQGVIEALSTPLATSLAASNLVKYLNTLGPLWGSAWASVATAIQGFALTPSSGCNFGWNALINKNIDVSMDSVLDNLSNKIQNFTKGGVEDNVKGNILLQIIGSITAQASTNITADGLIWLIGKEFTANKLQNNTIAMLAFAALESVVKGADAAVLPAYGVVNLPDIIIGQGSYLDFVSYLIYIVFGIFVFISFMKLRDISNGIQINIGFEYMRFVGGTLFKMAMVSFIAYAGFGYLYKISYSIYFGLAGAFGLNQVLFWALDLVLNYTVNSILPAVRAVFSNVGNNAPSLLQGLQVAGISLFAIFMQVTIIMRISTVVVKPLIAGAFSGIVFPIAVCLIVLDWFKDSMKNILIWFINNLFILVLAIPILLFGVLALLAFNLTITPSVAIQNINQGGLGIDSTIASLITLFILKGFIETIIE

SEQ ID NO: 5859 - protein, 535 aa, Helicobacter pylori
  misc_feature (B) LOCATION 1...535
  hypothetical: YES
MFNIKRTFLITIISFFLIVPNWLKAIDLPIVSNLKIYQTVYCMLIPSYVLTNKSFADILTGYTSIGASGSGKSSGQGVIEALSTPLATSLAASNLVKYLNTLGPLWGSAWASVATAIQGFALTPSSGCNFGWNALINKNIDVSMDSVLDNLSNKIQNFTKGGVEDNVKGNILLQIIGSITAQASTNITADGLIWLIGKEFTANKLQNNTIAMLAFAALESVVKGADAAVLPAYGVVNLPDIIIGQGSYLDFVSYLIYIVFGIFVFISFMKLRDISNGIQINIGFEYMRFVGGTLFKMAMVSFIAYAGFGYLYKISYSIYFGLAGAFGLNQVLFWALDLVLNYTVNSILPAVRAVFSNVGNNAPSLLQGLQVAGISLFAIFMQVTIIMRISTVVVKPLIAGAFSGIVFPIAVCLIVLDWFKDSMKNILIWFINNLFILVLAIPILLFGVLALLAFNLTITPSVAIQNINQGGLGIDSTIASLITLFILKGFIETIIESVNAIVNTIFSSVSMDGSRMDRERDALMVGRVGGSMFKG

SEQ ID NO: 5860 - protein, 539 aa, Helicobacter pylori
  misc_feature (B) LOCATION 1...539
  hypothetical: YES
INKNMFNIKRTFLITIISFFLIVPNWLKAIDLPIVSNLKIYQTVYCMLIPSYVLTNKSFADILTGYTSIGASGSGKSSGQGVIEALSTPLATSLAASNLVKYLNTLGPLWGSAWASVATAIQGFALTPSSGCNFGWNALINKNIDVSMDSVLDNLSNKIQNFTKGGVEDNVKGNILLQIIGSITAQASTNITADGLIWLIGKEFTANKLQNNTIAMLAFAALESVVKGADAAVLPAYGVVNLPDIIIGQGSYLDFVSYLIYIVFGIFVFISFMKLRDISNGIQINIGFEYMRFVGGTLFKMAMVSFIAYAGFGYLYKISYSIYFGLAGAFGLNQVLFWALDLVLNYTVNSILPAVRAVFSNVGNNAPSLLQGLQVAGISLFAIFMQVTIIMRISTVVVKPLIAGAFSGIVFPIAVCLIVLDWFKDSMKNILIWFINNLFILVLAIPILLFGVLALLAFNLTITPSVAIQNINQGGLGIDSTIASLITLFILKGFIETIIESVNAIVNTIFSSVSMDGSRMDRERDALMVGRVGGSMFKG

SEQ ID NO: 5861 - protein, 218 aa, Helicobacter pylori
  misc_feature (B) LOCATION 1...218
  hypothetical: YES
MNDTTEHHGSNPLNAPPPSNSQSNDLLNLLDSLYPKGSLGEQRFHEALKNQEELKNILIEIEKLPQEKRYELLMQIGQAKQRIMEAYAHSFLGYIGGLEHLLGLCMGGIFVLFAIYFVFLRTSKNTELVESLKTKLKLQYFYYAFGVGAVLFFGLETIRSIYELYILGIGSTNDKVLFVLKNICFIGMGYLIYKVIKVIGIKNFINGLFASKKQGGAE

SEQ ID NO: 5862 - protein, 218 aa, Helicobacter pylori; identical to SEQ ID NO: 5861
  misc_feature (B) LOCATION 1...218
  hypothetical: YES

SEQ ID NO: 5863 - protein, 250 aa, Helicobacter pylori
  misc_feature (B) LOCATION 1...250
  hypothetical: YES
KRLIQRDETIATQRENGIISKQFLNLILERSFMNDTTEHHGSNPLNAPPPSNSQSNDLLNLLDSLYPKGSLGEQRFHEALKNQEELKNILIEIEKLPQEKRYELLMQIGQAKQRIMEAYAHSFLGYIGGLEHLLGLCMGGIFVLFAIYFVFLRTSKNTELVESLKTKLKLQYFYYAFGVGAVLFFGLETIRSIYELYILGIGSTNDKVLFVLKNICFIGMGYLIYKVIKVIGIKNFINGLFASKKQGGAE

SEQ ID NO: 5864 - protein, 118 aa, Helicobacter pylori
  misc_feature (B) LOCATION 1...118
  hypothetical: YES
MVIHEKIKSRFSRNWSLRNRGRHFASSSVYFFSLLVITAVNRSSAVAWLLMPEHLIGWFLISFSGEFVADMAFGKKSKIFKTRFGISIVSGVSLLLGAYQRFYFLYGLALLIGGLSFL

SEQ ID NO: 5865 - protein, 145 aa, Helicobacter pylori
  misc_feature (B) LOCATION 1...145
  hypothetical: YES
MVIHEKIKSRFSRNWSLRNRGRHFASSSVYFFSLLVITAVNRSSAVAWLLMPEHLIGWFLISFSGEFVADMAFGKKSKIFKTRFGISIVSGVSLLLGALPAHLFFVWFGFINWWAVFFIEAGADLLVGCVIQKIFFGKYWVDRYY

SEQ ID NO: 5866 - protein, 154 aa, Helicobacter pylori
  misc_feature (B) LOCATION 1...154
  hypothetical: YES
WYFKKERNPMVIHEKIKSRFSRNWSLRNRGRHFASSSVYFFSLLVITAVNRSSAVAWLLMPEHLIGWFLISFSGEFVADMAFGKKSKIFKTRFGISIVSGVSLLLGALPAHLFFVWFGFINWWAVFFIEAGADLLVGCVIQKIFFGKYWVDRYY

SEQ ID NO: 5867 - protein, 49 aa, Helicobacter pylori
  misc_feature (B) LOCATION 1...49
  hypothetical: YES
VKIMNIYQKNLQALFKKDPLLFAKLKAIKENKKYEVFLGNDSAEFQPLR

SEQ ID NO: 5868 - protein, 175 aa, Helicobacter pylori
  misc_feature (B) LOCATION 1...175
  hypothetical: YES
VETFLRIFEKDIFNTPYKLEVINATEGGARIKGTKEMPFKEVCEKIDKSKPKPPINLIYPTQSEQAKNLKIAKKKCEEIIKYANEKKTQVEEAFLKVAEFLEKVEKLHEKNKLEELDFEELENLSAEIDNVKELFDDKRFNSYFMDAIQSYIFHQELHIAEIVCKKTSNEDGIKG

SEQ ID NO: 5869 - protein, 592 aa, Helicobacter pylori
  misc_feature (B) LOCATION 1...592
  hypothetical: YES
GMIALNFNLLDKETNTPLFEKSPLDSSLELYKNSEIHMLYPYLYYFGLGNGVFYRLLLGNENLKRLVVIEPEIEVIFIVLNLLDFSTEILENRLILLHASFCNYNMIASLFDMDKKSRLYARMYDLKLFNAYYERYSHQMIEINQHFTRALEHGAISVGNDAKDALIGIKQHVANLPEVIKSPSLVDFVNALKNRDTAIIVSTGPSLNKQLPLLKEIAPYATLFCIDASFPILARAGIKPDIVLSLERVDLTAKFYEETPLDFQEGVIFALTSIVHKRLIQAIQKGVKQFSFRPFGYTNLFDLHQYGYVGIGMSAANMAYELVVHSRFKRCVFIGQDLSFSQSGNSHASGAIYGDREIKPKKDKDKIFIEKYGGNGKVETTLVWKLFLEFFEKDIFNTPYKLEVINATEGGARIKGTKEMPFKEVCEKIDKSKPKPPINLIYPTQSEQAKNLKIAKKKCEEIIKYANEKKTQVEEAFLKVAEFLEKVEKLHEKNKLEELDFEELENLSAEIDNVKELFDDKRFNSYFMDAIQSYIFHQELHIAEIVCKKTSNEDGLRAKQLEYIYAHKYWLFSLAGGMDCVIEAIKMALKEW

SEQ ID NO: 5870 - protein, 627 aa, Helicobacter pylori
  misc_feature (B) LOCATION 1...627
  hypothetical: YES
MNIYQKNLQALFKKDPLLFAKLKAIKENKKYEVFLGNDSANFNLLDKETNTPLFEKSPLDSSLELYKNSEIHMLYPYLYYFGLGNGVFYRLLLGNENLKRLVVIEPEIEVIFIVLNLLDFSTEILENRLILLHASFCNYNMIASLFDMDKKSRLYARMYDLKLFNAYYERYSHQMIEINQHFTRALEHGAISVGNDAKDALIGIKQHVANLPEVIKSPSLVDFVNALKNRDTAIIVSTGPSLNKQLPLLKEIAPYATLFCIDASFPILARAGIKPDIVLSLERVDLTAKFYEETPLDFQEGVIFALTSIVHKRLIQAIQKGVKQFSFRPFGYTNLFDLHQYGYVGIGMSAANMAYELVVHSRFKRCVFIGQDLSFSQSGNSHASGAIYGDREIKPKKDKDKIFIEKYGGNGKVETTLVWKLFLEFFEKDIFNTPYKLEVINATEGGARIKGTKEMPFKEVCEKIDKSKPKPPINLIYPTQSEQAKNLKIAKKKCEEIIKYANEKKTQVEEAFLKVAEFLEKVEKLHEKNKLEELDFEELENLSAEIDNVKELFDDKRFNSYFMDAIQSYIFHQELHIAEIVCKKTSNEDGLRAKQLEYIYAHKYWLFSLAGGMDCVIEAIKMALKEW

SEQ ID NO: 5871 - protein, 214 aa, Helicobacter pylori
  misc_feature (B) LOCATION 1...214
  hypothetical: YES
LLSNKSNLVRLELFAPMKRFLKSLDMGYPLKSTIITNASHANHLEESCLLIEISSLLKGISIRLASRAFLMRSMSSLLTLKIPSSIFAQTLMVKFSELCPKSVIPMKVGMFLSIFSIPSITSFIVLCTSSISLPYPTPQTHSMRRHAVLLLLIILELATLLLGKTAKRPSCKRKEVLKKLSASTLPSRPEISMMSPFLKGCKIIRIIPPAMLER

SEQ ID NO: 5872 - protein, 217 aa, Helicobacter pylori
  misc_feature (B) LOCATION 1...217
  hypothetical: YES
GLFLLSNKSNLVRLELFAPMKRFLKSLDMGYPLKSTIITNASHANHLEESCLLIEISSLLKGISIRLASRAFLMRSMSSLLTLKIPSSIFAQTLMVKFSELCPKSVIPMKVGMFLSIFSIPSITSFIVLCTSSISLPYPTPQTHSMRRHAVLLLLIILELATLLLGKTAKRPSCKRKEVLKKLSASTLPSRPEISMMSPFLKGCKIIRIIPPAMLER

SEQ ID NO: 5873 - protein, 268 aa, Helicobacter pylori
  misc_feature (B) LOCATION 1...268
  hypothetical: YES
MKKLLLLLEHKIVKIGLIIVIVLVGFFLFYEQEIKEKAVNVSQGKFPTSSYLFQAYEGIKNKIDTINQVKPNDETKSVNENIEKTQKDLDDFNALVQKLPNLPKDFNKTLIKPQSPFFNYNTANEDEKNRLVILASRISSQKETQPPISIKNSVSHIKSKEKRELEKEWAKPSVSFGSFSLLSSSSSFSSFEVSFLSRGIGLDCEKLKSFLKAFSSSLFSLLSSLFCHPLSLFCSLIGLIFCFSKFSRELVNASNNSLEFSSLSRLGS

SEQ ID NO: 5874 - protein, 268 aa, Helicobacter pylori; identical to SEQ ID NO: 5873
  misc_feature (B) LOCATION 1...268
  hypothetical: YES

SEQ ID NO: 5875 - protein, 272 aa, Helicobacter pylori
  misc_feature (B) LOCATION 1...272
  hypothetical: YES
RKQEMKKLLLLLEHKIVKIGLIIVIVLVGFFLFYEQEIKEKAVNVSQGKFPTSSYLFQAYEGIKNKIDTINQVKPNDETKSVNENIEKTQKDLDDFNALVQKLPNLPKDFNKTLIKPQSPFFNYNTANEDEKNRLVILASRISSQKETQPPISIKNSVSHIKSKEKRELEKEWAKPSVSFGSFSLLSSSSSFSSFEVSFLSRGIGLDCEKLKSFLKAFSSSLFSLLSSLFCHPLSLFCSLIGLIFCFSKFSRELVNASNNSLEFSSLSRLGS

SEQ ID NO: 5876 - protein, 173 aa, Helicobacter pylori
  misc_feature (B) LOCATION 1...173
  hypothetical: YES
MKKFTLSLFLCCTLLNAEEDIFRNNTNETDLTNSFEHGKENNNLIPAKSDSLESFKEQENKEKAKQLMDLKALQSVYFSKNRKLQDNNFNVLYVAGNTNKIRLRYAMTTTFIFDNDPIIYVSLGDPSDFELTYPTNDHYDLSNMLVIKPLLIGVDTNLTVVGASGTIYTLLFV

SEQ ID NO: 5877 - protein, 176 aa, Helicobacter pylori
  misc_feature (B) LOCATION 1...176
  hypothetical: YES
GAIMKKFTLSLFLCCTLLNAEEDIFRNNTNETDLTNSFEHGKENNNLIPAKSDSLESFKEQENKEKAKQLMDLKALQSVYFSKNRKLQDNNFNVLYVAGNTNKIRLRYAMTTTFIFDNDPIIYVSLGDPSDFELTYPTNDHYDLSNMLVIKPLLIGVDTNLTVVGASGTIYTLLFV

SEQ ID NO: 5878 - protein, 274 aa, Helicobacter pylori
  misc_feature (B) LOCATION 1...274
  hypothetical: YES
MDEIKTLLVDFFPQAKHFGIILIKAIVVFCIGFYFSFFLRNKTMKLLSKKDEILANFVAQVTFILILIITTIIALSTLGVQTTSIITVLGTVGIAVALALKDYLSSIAGGIILIILHPFKKGDIIEISGLEGKVEALNFFNTSLRLHDGRLAVLPNRSVANSNIINSNNTACRRIEWVCGVGYGSDIELVHKTIKDVIDGMEKIDKNMPTFIGITDFGQSSLNFTIRVWAKIEDGIFNVRSELIERIKNALDANRIEIPFNKLDISINKQDSSK

SEQ ID NO: 5879 - protein, 309 aa, Helicobacter pylori
  misc_feature (B) LOCATION 1...309
  hypothetical: YES
VVIRLVLNMLTCQISYIRISYLVSVSDFVICKERFMDEIKTLLVDFFPQAKHFGIILIKAIVVFCIGFYFSFFLRNKTMKLLSKKDEILANFVAQVTFILILIITTIIALSTLGVQTTSIITVLGTVGIAVALALKDYLSSIAGGIILIILHPFKKGDIIEISGLEGKVEALNFFNTSLRLHDGRLAVLPNRSVANSNIINSNNTACRRIEWVCGVGYGSDIELVHKTIKDVIDGMEKIDKNMPTFIGITDFGQSSLNFTIRVWAKIEDGIFNVRSELIERIKNALDANRIEIPFNKLDISINKQDSSK

SEQ ID NO: 5880 - protein, 310 aa, Helicobacter pylori
  misc_feature (B) LOCATION 1...310
  hypothetical: YES
VVVIRLVLNMLTCQISYIRISYLVSVSDFVICKERFMDEIKTLLVDFFPQAKHFGIILIKAIVVFCIGFYFSFFLRNKTMKLLSKKDEILANFVAQVTFILILIITTIIALSTLGVQTTSIITVLGTVGIAVALALKDYLSSIAGGIILIILHPFKKGDIIEISGLEGKVEALNFFNTSLRLHDGRLAVLPNRSVANSNIINSNNTACRRIEWVCGVGYGSDIELVHKTIKDVIDGMEKIDKNMPTFIGITDFGQSSLNFTIRVWAKIEDGIFNVRSELIERIKNALDANRIEIPFNKLDISINKQDSSK

SEQ ID NO: 5881 - protein, 482 aa, Helicobacter pylori
  misc_feature (B) LOCATION 1...482
  hypothetical: YES
MIKQILTILTPFFVATLLYFLGAPDGLNPNAWLYFCIFMGMIIGLILEPVPSGLIALSALVPCIALKIGASSEVASANKAISWGLSGYANKTVWLVFVAFILGLGYEKSLLGKRIALLLIRFLGQTPLGLGYAIGLSELCLAPFIPSNSARSGGILYPIVSSIPPLMGSTPSNNPDKIGAYLMWVALASTCITSSMFLTALAPNPLAMEIATKMGVNEISWFSWFLAFLPCGVVLILLVPLLAYKTCKPTLKGSKEVSLWAKKELESMGRFSLKEILMLSLTLLALLGWIFGKSLGLHASATALIVMVLMAFCKIVSYEDIIKNKSAFNIFLLLGSLLTMAGGLKNVGFLNFIGNAAQNFLEHAHLDPLIAVLFIVALFYLSHYFFASITAHVSALFALFVGIGSHIQGVNLQELSLFLMLSLGIMGILTPYGTGPSTIYYGSGYIQSKDFWKWGFIFGFLYLIVFLSVCAPWVKFIAYRWL

SEQ ID NO: 5882 - protein, 494 aa, Helicobacter pylori
  misc_feature (B) LOCATION 1...494
  hypothetical: YES
AKLLLSLAKGYIMIKQILTILTPFFVATLLYFLGAPDGLNPNAWLYFCIFMGMIIGLILEPVPSGLIALSALVLCIALKIGASSEVASANKAISWGLSGYANKTVWLVFVAFILGLGYEKSLLGKRIALLLIRFLGQTPLGLGYAIGLSELCLAPFIPSNSARSGGILYPIVSSIPPLMGSTPSNNPDKIGAYLMWVALASTCITSSMFLTALAPNPLAMEIATKMGVNEISWFSWFLAFLPCGVVLILLVPLLAYKTCKPTLKGSKEVSLWAKKELESMGRFSLKEILMLSLTLLALLGWIFGKSLGLHASATALIVMVLMAFCKIVSYEDIIKNKSAFNIFLLLGSLLTMAGGLKNVGFLNFIGNAAQNFLEHAHLDPLIAVLFIVALFYLSHYFFASITAHVSALFALFVGIGSHIQGVNLQELSLFLMLSLGIMGILTPYGTGPSTIYYGSGYIQSKDFWKWGFIFGFLYLIVFLSVCAPWVKFIAYRWL

SEQ ID NO: 5883 - protein, 210 aa, Helicobacter pylori
  misc_feature (B) LOCATION 1...210
  hypothetical: YES
MFVVFIEGFGLAISLCAAVGAQSLFIVERGMARNYVFLICALCFMCDIVLMSMGVFGVGAYFAKNLYLSLFLNLFGAVFTGFYAFLALKTLFQTFKKKQVQTPKKLSLKKTLLFTLGVTLLNPQVYLEMVFLIGASAMSFNLVQKFVFLAGTLSAAFSWLLLLCTMSLRYGSKLLNNQKIFMGVNLFVTAIMGTLSVTLFRDFLALLSKT

SEQ ID NO: 5884 - protein, 210 aa, Helicobacter pylori; identical to SEQ ID NO: 5883
  misc_feature (B) LOCATION 1...210
  hypothetical: YES

SEQ ID NO: 5885 - protein, 215 aa, Helicobacter pylori
  misc_feature (B) LOCATION 1...215
  hypothetical: YES
KDLSKMFVVFIEGFGLAISLCAAVGAQSLFIVERGMARNYVFLICALCFMCDIVLMSMGVFGVGAYFAKNLYLSLFLNLFGAVFTGFYAFLALKTLFQTFKKKQVQTPKKLSLKKTLLFTLGVTLLNPQVYLEMVFLIGASAMSFNLVQKFVFLAGTLSAAFSWLLLLCTMSLRYGSKLLNNQKIFMGVNLFVTAIMGTLSVTLFRDFLALLSKT

SEQ ID NO: 5886 - protein, 104 aa, Helicobacter pylori
  misc_feature (B) LOCATION 1...104
  hypothetical: YES
MRVQNFIHFSVVVGFFLGLVFSVLKFNEPESILLWTVLSTLGGYLIALLFASIFIACTDLDICLFDKKGTEESLLRFNHEFKNREKEVASILNYIRNYDFDDGK

SEQ ID NO: 5887 - protein, 110 aa, Helicobacter pylori
  misc_feature (B) LOCATION 1...110
  hypothetical: YES
SIWGRLMRVQNFIHFSVVVGFFLGLVFSVLKFNEPESILLWTVLSTLGGYLIALLFASIFIACTDLDICLFDKKGTEESLLRFNHEFKNREKEVASILNYIRNYDFDDGK

SEQ ID NO: 5888 - protein, 205 aa, Helicobacter pylori
  misc_feature (B) LOCATION 1...205
  hypothetical: YES
MKKKPLMWRICALRRLLLGFKRERELLSFAKHWNIPTIVVFTHTQAEAGDAFVQETKGIIDEEWGFKGFVRAYVRVNSVAFSFRGLKVPVEGLEELVDETKKCLSDAEKNKKRHFLSIQRVKIQERKQAMIEECKTIIHVASGAAGVAGLIPIPFSDALAIAPIQAGMIYKMNDAFGMDLDKSVGASLVAGLLGVNCRASGEDSR

SEQ ID NO: 5889 - protein, 303 aa, Helicobacter pylori
  misc_feature (B) LOCATION 1...303
  hypothetical: YES
LKIKITTTPCKALKKKWKILLKHLMKKKPLMWRICALRRLLLGFKRERELLSFAKHWNIPTIVVFTHTQAEAGDAFVQETKGIIDEEWGFKGFVRAYVRVNSVAFSFRGLKVPVEGLEELVDETKKCLSDAEKNKKRHFLSIQRVKIQERKQAMIEECKTIIHVASGAAGVAGLIPIPFSDALAIAPIQAGMIYKMNDAFGMDLDKSVGASLVAGLLGVTAVAQVGRTLVNGFLKFIPVVGSVAGGATAAVITEGIGFAYLKVLEKCFNDETGEVNLPGEVGMITSLFKENYLNLDTIKKLKP

SEQ ID NO: 5890 - protein, 310 aa, Helicobacter pylori
  misc_feature (B) LOCATION 1...310
  hypothetical: YES
FCGTLKALKIKITTTPCKALKKKWKILLKHLMKKKPLMWRICALRRLLLGFKRERELLSFAKHWNIPTIVVFTHTQAEAGDAFVQETKGIIDEEWGFKGFVRAYVRVNSVAFSFRGLKVPVEGLEELVDETKKCLSDAEKNKKRHFLSIQRVKIQERKQAMIEECKTIIHVASGAAGVAGLIPIPFSDALAIAPIQAGMIYKMNDAFGMDLDKSVGASLVAGLLGVTAVAQVGRTLVNGFLKFIPVVGSVAGGATAAVITEGIGFAYLKVLEKCFNDETGEVNLPGEVGMITSLFKENYLNLDTIKKLKP

SEQ ID NO: 5891 - protein, 182 aa, Helicobacter pylori
  misc_feature (B) LOCATION 1...182
  hypothetical: YES
VGKSLRYSLNLDLNQKADLFFTELEPTGLTLSPIMKRFTIKGDFDSGLKSYDMSYMYASLQAISAIRRLPLGLYDGVHVYSKTPMKDIEKLRNALKTINHHGIGIEGWWQQNGNFFSAMELEKRALFIVLMLIILMASLNIISSLLMVVMNRRKEIALLFSMGSSQKEIQKTFFYLGNIISL

SEQ ID NO: 5892 - protein, 365 aa, Helicobacter pylori
  misc_feature (B) LOCATION 1...365
  hypothetical: YES
KLFLKPLKETSLALVGVAKNIKIVALKAGLKRAYLPNRSLIFFLIKRYLRFDKSQPFISITALLAFFGVAVGVMVLIVAMAIMNGMSKEFEKKLFVMNYPLTLYTTSPYGISEEVVQALEKKFPNLLFSPYLQTQSPIKSAHSMNGGVVFGVDFSKERHINEVLNDALKNINENDLFKNPFNLIVGKSLRYSLNLDLNQKADLFFTELEPTGLTLSPIMKRFTIKGDFDSGLKSYDMSYMYASLQAISAIRRLPLGLYDGVHVYSKTPMKDIEKLRNALKTINHHGIGIEGWWQQNGNFFSAMELEKRALFIVLMLIILMASLNIISSLLMVVMNRRKEIALLFSMGSSQKEIQKTFFYLGNIIS

SEQ ID NO: 5893 - protein, 364 aa, Helicobacter pylori
  misc_feature (B) LOCATION 1...364
  hypothetical: YES
KLFLKPLKETSLALVGVAKNIKIVALKAGLKRAYLPNRSLIFFLIKRYLRFDKSQPFISITALLAFFGVAVGVMVLIVAMAIMNGMSKEFEKKLFVMNYPLTLYTTSPYGISEEVVQALEKKFPNLLFSPYLQTQSPIKSAHSMNGGVVFGVDFSKERHINEVLNDALKNINENDLFKNPFNLIVGKSLRYSLNLDLNQKADLFFTELEPTGLTLSPIMKRFTIKGDFDSGLKSYDMSYMYASLQAISAIRRLPLGLYDGVHVYSKTPMKDIEKLRNALKTINHHGIGIEGWWQQNGNFFSAMELEKRALFIVLMLIILMASLNIISSLLMVVMNRRKEIALLFSMGSSQKEIQKTFFYLGNII

SEQ ID NO: 5894 - protein, 430 aa, Helicobacter pylori
  misc_feature (B) LOCATION 1...430
  hypothetical: YES
VGVAKNIKIVALKAGLKRAYLPNRSLIFFLIKRYLRFDKSQPFISITALLAFFGVAVGVMVLIVAMAIMNGMSKEFEKKLFVMNYPLTLYTTSPYGISEEVVQALEKKFPNLLFSPYLQTQSPIKSAHSMNGGVVFGVDFSKERHINEVLNDALKNINENDLFKNPFNLIVGKSLRYSLNLDLNQKADLFFTELEPTGLTLSPIMKRFTIKGDFDSGLKSYDMSYMYASLQAISAIRRLPLGLYDGVHVYSKTPMKDIEKLRNALKTINHHGIGIEGWWQQNGNFFSAMELEKRALFIVLMLIILMASLNIISSLLMVVMNRRKEIALLFSMGSSQKEIQKTFFYLGNIIGLGGVILGVVLAFISMYLLSVFPIISLPADVYGINTLPLDLSLMDFTLTLIGSVIIVALSSYYPSKKASAIDALSVLRNE

SEQ ID NO: 5895 - protein, 168 aa, Helicobacter pylori
  misc_feature (B) LOCATION 1...168
  hypothetical: YES
LEGLFVAPVLAILGAISADEMEKKRDDAKAYYSQVEVAVKKADVVIDNLQAVKKMADLFTRQITKFDALFFLLSQDAIATMKKHHYDTSRYNQKEKDQLCVTVSTLFSLSAFLKAPIMDKHQKLNKKAQKALNLMRDQMDSLENGNYSLDGIRFRQAQLKDLRDDKTS

SEQ ID NO: 5896 - protein, 170 aa, Helicobacter pylori
  misc_feature (B) LOCATION 1...170
  hypothetical: YES
QCLEGLFVAPVLAILGAISADEMVKKRDDAEAYYSQVEVAVKKADVVIDNLQAVKKMADLFTRQITKFDALFFLLSQDAIATMKKHHYDTSRYNQKEKDQLCVTVSTLFSLSAFLKAPIMDKHQKLNKKAQKALNLMRDQMDSLENGNYSLDGIRFRQAQLKDLRDDKTS

SEQ ID NO: 5897 - protein, 33 aa, Helicobacter pylori
  misc_feature (B) LOCATION 1...33
  hypothetical: YES
VRAVFVFGLKAAFCIGIFFYGAYYFLDEFLIKL

SEQ ID NO: 5898 - protein, 106 aa, Helicobacter pylori
  misc_feature (B) LOCATION 1...106
  hypothetical: YES
MQETKRAMNIYYVGYVFLGMTLLCAVFFQSIQRTKSSFIITISHTLGFIVILLPILSHFYGVNGIWVTYPIAQFLAFLVALGVTYYEIKKGVFTTYKEKNPIALKT

SEQ ID NO: 5899 - protein, 121 aa, Helicobacter pylori
  misc_feature (B) LOCATION 1...121
  hypothetical: YES
KAAFCIGIFFYGAYYFLDEFLIKLYLQPSEQDALFMQETKRAMNIYYVGYVFLGMTLLCAVFFQSIQRTKSSFIITISHTLGFIVILLPILSHFYGVNGIWVTYPIAQFLAVFGSVRGNLL

SEQ ID NO: 5900 - protein, 60 aa, Helicobacter pylori
  misc_feature (B) LOCATION 1...60
  hypothetical: YES
TDVASAIFPGSYNVGIGSGALFGSIVIHQLGLEYIGFVGGALGLLALFWLRFITIKFKKT

SEQ ID NO: 5901 - protein, 61 aa, Helicobacter pylori
  misc_feature (B) LOCATION 1...61
  hypothetical: YES
ATDVASAIFPGSYNVGIGSGALFGSIVIHQLGLEYIGFVGGALGLLALFWLRFITIKFKKT

SEQ ID NO: 5902 - protein, 326 aa, Helicobacter pylori
  misc_feature (B) LOCATION 1...326
  hypothetical: YES
MMITKQSYQRFALMRVFVFSLSAFIFNTTEFVPVALLSDIAKSFEMESATVGLMITAYAWVVSLGSLPLMLLSAKIERKRLLLFLFALFIFSHILSALAWNFWVLLLSRMGIAFAHSIFWSITASLVIRVAPRNKKQQALGLLALGSSLAMILGLPLGRIIGQILDWRSTFGVIGGVATLIMLLMWKLLPHLPSRNAGTLASVPILMKRPLLVGIYLLVIMVISGHFTTYSYIEPFIIQISQFSPDITTLMLFVFGLADVVGSFLFGRLYAKNSRKFIAFAMVLVICPQLLLFVFKNLEWVIFLQIFLWGIGITSLTITLQNEGIH

SEQ ID NO: 5903 - protein, 327 aa, Helicobacter pylori
  misc_feature (B) LOCATION 1...327
  hypothetical: YES
MMITKQSYQRFALMRVFVFSLSAFIFNTTEFVPVALLSDIAKSFEMESATVGLMITAYAWVVSLGSLPLMLLSAKIERKRLLLFLFALFIFSHILSALAWNFWVLLLSRMGIAFAHSIFWSITASLVIRVAPRNKKQQALGLLALGSSLAMILGLPLGRIIGQILDWRSTFGVIGGVATLIMLLMWKLLPHLPSRNAGTLASVPILMKRPLLVGIYLLVIMVISGHFTTYSYIEPFIIQISQFSPDITTLMLFVFGLADVVGSFLFGRLYAKNSRKFIAFAMVLVICPQLLLFVFKNLEWVIFLQIFLWGIGITSLTITLQNEGIHN

SEQ ID NO: 5904 - protein, 391 aa, Helicobacter pylori
  misc_feature (B) LOCATION 1...391
  hypothetical: YES
MMITKQSYQRFALMRVFVFSLSAFIFNTTEFVPVALLSDIAKSFEMESATVGLMITAYAWVVSLGSLPLMLLSAKIERKRLLLFLFALFIFSHILSALAWNFWVLLLSRMGIAFAHSIFWSITASLVIRVAPRNKKQQALGLLALGSSLAMILGLPLGRIIGQILDWRSTFGVIGGVATLIMLLMWKLLPHLPSRNAGTLASVPILMKRPLLVGIYLLVIMVISGHFTTYSYIEPFIIQISQFSPDITTLMLFVFGLAGVVGSFLFGRLYAKNSRKFIAFAMVLVICPQLLLFVFKNLEWVIFLQIFLWGIGITSLTIALQMRVLQLAPDATDVASAIFSGSYNVGIGSGALFGSIVIHQLGLEYIGFVGGALGLLALFWLRFITIKFKKT

SEQ ID NO: 5905 - protein, 391 aa, Helicobacter pylori
  misc_feature (B) LOCATION 1...391
  hypothetical: YES
MMITKQSYQRFALMRVFVFSLSAFIFNTTEFVPVALLSDIAKSFEMESATVGLMITAYAWVVSLGSLPLMLLSAKIERKRLLLFLFALFIFSHILSALAWNFWVLLLSRMGIAFAHSIFWSITASLVIRVAPRNKKQQALGLLALGSSLAMILGLPLGRIIGQILDWRSTFGVIGGVATLIMLLMWKLLPHLPSRNAGTLASVPILMKRPLLVGIYLLVIMVISGHFTTYSYIEPFIIQISQFSPDITTLMLFVFGLAGVVGSFLFGRLYAKNSRKFIAFAMVLVICPQLLLFVFKNLEWVIFLQIFLWGIGITSLTIALQMRVLQLAPDATDVASAIFPGSYNVGIGSGALFGSIVIHQLGLEYIGFVGGALGLLALFWLRFITIKFKKT

SEQ ID NO: 5906 - protein, 88 aa, Helicobacter pylori
  misc_feature (B) LOCATION 1...88
  hypothetical: YES
LHPLADVFVVNDKRXVLAMVXMLIXSLANIFFNYLFIFXLEVGVQGXAIVTVIGHAIGGLVLMQHFWRKKGELYFIKLIFFIFSHFFS

SEQ ID NO: 5907 - protein, 130 aa, Helicobacter pylori
  misc_feature (B) LOCATION 1...130
  hypothetical: YES
MLKKKIDLHKDSIRKLFFYYFIPLVFSMISLSTYSMVDDMFVGKKLGKEAIAAVNIAWPIFPGLIAYELLFGFGAASIVGYFLGQNKTHRARLVFSSVFYFVALSAFILSMALLPFSENIARFLGAMTLY

SEQ ID NO: 5908 - protein, 141 aa, Helicobacter pylori
  misc_feature (B) LOCATION 1...141
  hypothetical: YES
MLKKKIDLHKDSIRKLFFYYFIPLVFSMISLSTYSMVDDMFVGKKLGKEAIAAVNIAWPIFPGLIAYELLFGFGAASIVGYFLGQNKTHRARLVFSSVFYFVALSAFILSMALLPFSENIAQFFGSNDALLNMSNAILKSF

SEQ ID NO: 5909 - protein, 146 aa, Helicobacter pylori
  misc_feature (B) LOCATION 1...146
  hypothetical: YES
MIFVVNDKRPVLAMVAMLIGSLANIFFNYLFIFVLEVGVQGSAIATVIGHAIGVLVLMQHFWRKKGQLYFIKRFSLSSVISSAKSGVPQSTAEFSASIMILLFNTAIMHTAGERFVSMYGIVMYNAIIFFTTLFAISQGIQPIAEL

SEQ ID NO: 5910 - protein, 161 aa, Helicobacter pylori
  misc_feature (B) LOCATION 1...161
  hypothetical: YES
NHFNGCVFRVQHLLADVFVVNDKRPVLAMVAMLIGSLANIFFNYLFIFVLEVGVQGSAIATVIGHAIGVLVLMQHFWRKKGQLYFIKRFSLSSVISSAKSGVPQSTAEFSASIMILLFNTAIMHTAGERFVSMYGIVMYNAIIFFTTLFAISQGIQPIAEL

SEQ ID NO: 5911 - protein, 416 aa, Helicobacter pylori
  misc_feature (B) LOCATION 1...416
  hypothetical: YES
VYADSFHSSSPLLVGLAVGGAYLTQIIFQTPMGILSDKIGRKVVVMVCLLLFLIGSLVCFVANDIITLVIGRFIQGMGALGGVVSAMVADEVKEEERTKAMAIMGAFIFISFTISMAIGPGVVAFLGGAKWLFLLTAILTLLSLLMLLKVKDAPKISYQIKNIKAYQPNSKALYLLYLSSFFEKMFMTLIFVLIPLALVNEFHKDESFLILVYVPGALLGVLSMGIASVMAEKYNKPKGVMLSGVLLFIVSYLCLFLADSSFLGKYLWLFIVGVAFFFIGFATLEPIMQSLASKFAKVHEKGKVLGQFTTFGYLGSFVGGVSGGLSYHHLGVSNTSLIIVALGLIWGLSLFLLHNPSKQKNVYFPLDAYNEEQFETLGDKIIEWYVNISEEIIIVKYNSDHISEEGIIHLAQNFRK

SEQ ID NO: 5912 - protein, 421 aa, Helicobacter pylori
  misc_feature (B) LOCATION 1...421
  hypothetical: YES
LPVISWYADSFHSSSPLLVGLAVGGAYLTQIIFQTPMGILSDKIGRKVVVMVCLLLFLIGSLVCFVANDIITLVIGRFIQGMGALGGVVSAMVADEVKEEERTKAMAIMGAFIFISFTISMAIGPGVVAFLGGAKWLFLLTAILTLLSLLMLLKVKDAPKISYQIKNIKAYQPNSKALYLLYLSSFFEKMFMTLIFVLIPLALVNEFHKDESFLILVYVPGALLGVLSMGIASVMAEKYNKPKGVMLSGVLLFIVSYLCLFLADSSFLGKYLWLFIVGVAFFFIGFATLEPIMQSLASKFAKVHEKGKVLGQFTTFGYLGSFVGGVSGGLSYHHLGVSNTSLIIVALGLIWGLSLFLLHNPSKQKNVYFPLDAYNEEQFETLGDKIIEWYVNISEEIIIVKYNSDHISEEGIIHLAQNFRK

SEQ ID NO: 5913 - protein, 426 aa, Helicobacter pylori
  misc_feature (B) LOCATION 1...426
  hypothetical: YES
GFLSFCLSSVVYADSFHSSSPLLVGLAVGGAYLTQIIFQTPMGILSDKIGRKVVVMVRLLLFLIGSLVCFVANDIITLVIGRFIQGMGALGGVVSAMVADEVKEEERTKAMAIMGAFIFISFTISMAIGPGVVAFLGGAKWLFLLTAILTLLSLLMLLKVKDAPKISYQIKNIKAYQPNSKALYLLYLSSFFEKMFMTLILVLIPLALVNEFHKDESFLILVYVPGALLGVLSMGIASVMAEKYNKPKGVMLSGVLLFIVSYLCLFLADSSFLGKYLWLFIVGVAFFFIGFATLEPIMQSLASKFAKVHEKGKVLGQFTTFGYLGSFVGGVSGGLSYHHLGVSNTSLIIVALGLIWGLSLFLLHNPSKQKNVYFPLDAYNEEQFETLGDKIIEWYVNISEEIIIVKYNSDHISEEGIIHLAQNFRK

SEQ ID NO: 5914 - protein, 217 aa, Helicobacter pylori
  misc_feature (B) LOCATION 1...217
  hypothetical: YES
MPVIRVLVMLATMMMKLVKTAKEKKVFKNVGISIMGIAFWEAIKDSIKKQIKKSDWICGNVKTADDYLKTHPNSWFNSAIGVTAITAMLMNVCFADDQSKKEVAQAQKEAENARDRANKSGIELEQEEQKTEQEKQKTEQEKQKTEQEKQKTEQEKQKTEQEKQKTSNIETNNQIKVEQEQQKTEQEKQKTNNTQKDLVNKAEQNCQENHNQFFIKN

SEQ ID NO: 5915 - protein, 383 aa, Helicobacter pylori
  misc_feature (B) LOCATION 1...383
  hypothetical: YES
MPVIRVLVMLATMMMKLVKTAKEKKVFKNVGISIMGIAFWEAIKDSIKKQIKKSDWICGNVKTADDYLKTHPNSWFNSAIGVTAITAMLMNVCFADDQSKKEVAQAQKEAENARDRANKSGIELEQEEQKTEQEKQKTEQEKQKTEQEKQKTEQEKQKTEQEKQKTSNIETNNQIKVEQEQQKTEQEKQKTNNTQKDLVNKAEQNCQENHNQFFIKKLGIKAGIAIEIEAECKTPKPTKTNQTPIQPKHLPNSKQPHSQRGSKAQELIAYLQKELESLPYSQKAIAKQVDFYRPSSIAYLELDPRDFNATEEWQKENLKIRSKAQAKMLEMRSLKPDPQAHLSTSQSLLLVQKIFADVSKEIKVVANTEKKVEKAGYGYSKRM

SEQ ID NO: 5916 - protein, 383 aa, Helicobacter pylori; identical to SEQ ID NO: 5915
  misc_feature (B) LOCATION 1...383
  hypothetical: YES

SEQ ID NO: 5917 - protein, 142 aa, Helicobacter pylori
  misc_feature (B) LOCATION 1...142
  hypothetical: YES
VFSGNKRAINYRTIVSAFVIQVALGALALYVPLGREILQGLASGIQSVIGYGYEGVRFLFGNLAPNAKGDQGIGGFIFAINVLAIIIFFASLISLLYYLKIMPLVINLIGGALQKCLGTSKAESMSAAANXXVAHTEDXLSH

SEQ ID NO: 5918 - protein, 418 aa, Helicobacter pylori
  misc_feature (B) LOCATION 1...418
  hypothetical: YES
MIFSSLFSVVGMAVLFLIAWVFSGNKRAINYRTIVSAFVIQVALGALALYVPLGREILQGLASGIQSVIGYGYEGVRFLFGNLAPNAKGDQGIGGFIFAINVLAIIIFFASLISLLYYLKIMPLVINLIGGALQKCLGTSKAESMSAAANIFVAHTEAPLVIKPYLKSMSDSEIFAVMCVGMASVAGPVLAGYASMGIPLPYLIAASFMSAPGGLLFAKIIYPQNETISSHADVSAEEHVNIIEAIANGASTGLHLALHVGAMLLAFVGMLALVNGLLGVVGGFLGMEHLSLGVVLGTLLKPLAFMLGVPWSQAGIAGEIIGIKIALNEFVGYMQLLPYLGDNPPLILSEKTKAIITFALCGFANLSSVAMLIGGLGSLVPKKKDFIARLALKAVLVGTLSNFMSATIAGLFIGLSAN

SEQ ID NO: 5919 - protein, 426 aa, Helicobacter pylori
  misc_feature (B) LOCATION 1...426
  hypothetical: YES
FLNIRDLTMIFSSLFSVVGMAVLFLIAWVFSGNKRAINYRTIVSAFVIQVALGALALYVPLGREILQGLASGIQSVIGYGYEGVRFLFGNLAPNAKGDQGIGGFIFAINVLAIIIFFASLISLLYYLKIMPLVINLIGGALQKCLGTSKAESMSAAANIFVAHTEAPLVIKPYLKSMSDSEIFAVMCVGMASVAGPVLAGYASMGIPLPYLIAASFMSAPGGLLFAKIIYPQNETISSHADVSAEEHVNIIEAIANGASTGLHLALHVGAMLLAFVGMLALVNGLLGVVGGFLGMEHLSLGVVLGTLLKPLAFMLGVPWSQAGIAGEIIGIKIALNEFVGYMQLLPYLGDNPPLILSEKTKAIITFALCGFANLSSVAMLIGGLGSLVPKKKDFIARLALKAVLVGTLSNFMSATIAGLFIGLSAN

SEQ ID NO: 5920 - protein, 420 aa, Helicobacter pylori
  misc_feature (B) LOCATION 1...420
  hypothetical: YES
MAAPLLALPFLSNPLVLGALAVIGVGAYLYPNKQDSLVVQADGLYSEILGFFISFSSKILKGIGEPLANVIQPFGMVLGMLLILLYSFKRYQNNDLFEIKTFLMLFVFVGYLSLYHYAFKSDGSSSGNGRSSFAFQNHVTEIFDTPANLLNAGISNVVKEYQTNSAREHKNIDTHHSITNANISFHVRQILTSLNKLYEDFKINNGLSLKTLIAAVLLLVILGLELFLLFKVFCYVFMTYLEKIIYLSLVIFMLLLGFFQQTRGFLVSYVKKIISLTFYMPLLLLLVLFNSFALQYAIKVGGSNEIVAKFGIIVAIGISLTFIQKVPEMINAIFGTQGGLTDAKSFIYQGVQMASAGAGAIAGSLKSVGRSAFGRTLEAYKDAKSTINSTTANMRDMPGHPGVRVGVETIELPKSHRASK

SEQ ID NO: 5921 - protein, 420 aa, Helicobacter pylori; identical to SEQ ID NO: 5920
  misc_feature (B) LOCATION 1...420
  hypothetical: YES

SEQ ID NO: 5922 - protein, 424 aa, Helicobacter pylori
  misc_feature (B) LOCATION 1...424
  hypothetical: YES
RLNNMAAPLLALPFLSNPLVLGALAVIGVGAYLYPNKQDSLVVQADGLYSEILGFFISFSSKILKGIGEPLANVIQPFGMVLGMLLILLYSFKRYQNNDLFEIKTFLMLFVFVGYLSLYHYAFKSDGSSSGNGRSSFAFQNHVTEIFDTPANLLNAGISNVVKEYQTNSAREHKNIDTHHSITNANISFHVRQILTSLNKLYEDFKINNGLSLKTLIAAVLLLVILGLELFLLFKVFCYVFMTYLEKIIYLSLVIFMLLLGFFQQTRGFLVSYVKKIISLTFYMPLLLLLVLFNSFALQYAIKVGGSNEIVAKFGIIVAIGISLTFIQKVPEMINAIFGTQGGLTDAKSFIYQGVQMASAGAGAIAGSLKSVGRSAFGRTLEAYKDAKSTINSTTANMRDMPGHPGVRVGVETIELPKSHRASK

SEQ ID NO: 5923 - protein, 283 aa, Helicobacter pylori
  misc_feature (B) LOCATION 1...283
  hypothetical: YES
VFSDTISKEAHTSDVFESLLNYSDAETTKPWYHYHNMIDIFKRSHYETFWLEKQIVDEWGITQNLVSNRSKNRYYILGNYGAYDEELVKFYSKNVQPQLKSKNFIVFHLLGSHSWYADRFPKSFAKFKPSDLSFSNLHASSDRDKQIVADYVNSLYYNDFVLNGIFNLFKDKDAIVFYLSDHAQDIFESGPTYGHSCSKAGLEIPFMIYVSDIFKEKHPEKVKLIKNALNKPFMSDDLIHSLLPLVGIHTKDEIESKNLFSPQFDAQRKRAVCYGSMNYDRTK

SEQ ID NO: 5924 - protein, 310 aa, Helicobacter pylori
  misc_feature (B) LOCATION 1...310
  hypothetical: YES
MAIAFLIIPYRANSPTRERERESNNLFVFSDTISKEAHTSDVFESLLNYSDAETTKPWYHYHNMIDIFKRSHYETFWLEKQIVDEWGITQNLVSNRSKNRYYILGNYGAYDEELVKFYSKNVQPQLKSKNFIVFHLLGSHSWYADRFPKSFAKFKPSDLSFSNLHASSDRDKQIVADYVNSLYYNDFVLNGIFNLFKDKDAIVFYLSDHAQDIFESGPTYGHSCSKAGLEIPFMIYVSDIFKEKHPEKVKLIKNALNKPFMSDDLIHSLLPLVGIHTKDEIESKNLFSPQFDAQRKRAVCYGSMNYDRTK

SEQ ID NO: 5925 - protein, 566 aa, Helicobacter pylori
  misc_feature (B) LOCATION 1...566
  hypothetical: YES
KKFSNSLKGQKKTMKFLKFFASSVTLDEKFLMFLLCNALSNAYKNSDLFSFSKGFLGAFLIGFVVYYGCALIPKKRLKYSLEWLFIGSGIIFSVAEIFTLFMFKMPFSKGLIDTLLATNSSETMAFIKSYKNYLLYYALILIALLIAIKIIRFRALVPGVIASVLGLSILTIGSVRNIKHLTKNDAILKRSLFSLSLARGFYSAYLSLFDRQQAIKFYSFLNNLYLPSDYLSSTGDISNVVLVIGESASRNFMQLYGYSVPNNPLCERTRQARERERESNNLFVFSDTISKEAHTSDVFESLLNYSDAETTKPWYHYHNMIDIFKRSHYETFWLEKQIVDEWGITQNLVSNRSKNRYYILGNYGAYDEELVKFYSKNVQPQLKSKNFIVFHLLGSHSWYADRFPKSFAKFKPSDLSFSNLHASSDRDKQIVADYVNSLYYNDFVLNGIFNLFKDKDAIVFYLSDHAQDIFESGPTYGHSCSKAGLEIPFMIYVSDIFKEKHPEKVKLIKNALNKPFMSDDLIHSLLPLVGIHTKDEIESKNLFSPQFDAQRKRAVCYGSMNYDRTK

SEQ ID NO: 5926 - protein, 265 aa, Helicobacter pylori
  misc_feature (B) LOCATION 1...265
  hypothetical: YES
MKFLKFFASSVTLDEKFLMFLLCNALSNAYKNSDLFSFSKGFLGAFLIGFVVYYGCALIPKKRLKYSLEWLFIGSGIIFSVAEIFTLFMFKMPFSKGLIDTLLATNSSETMAFIKSYKNYLLYYALILIALLIAIKIIRFRALVPGVIASVLGLSILTIGSVRNIKHLTKNDAILKRSLFSLSLARGFYSAYLSLFDRQQAIKFYSFLNNLYLPSDYLSSTGDISNVVLVIGESASRNFMQLYGYSVPNNPLSSELANERERERE

SEQ ID NO: 5927 - protein, 265 aa, Helicobacter pylori
  misc_feature (B) LOCATION 1...265
  hypothetical: YES
MKFLKFFASSVTLDEKFLMFLLCNALSNAYKNSDLFSFSKGFLGAFLIGFVVYYGCALIPKKRLKYSLEWLFIGSGIIFSVAEIFTLFMFKMPFSKGLIDTLLATNSSETMAFIKSYKNYLLYYALILIALLIAIKIIRFRALVPGVIASVLGLSILTIGSVRNIKHLTKNDAILKRSLFSLSLARGFYSAYLSLFDRQQAIKFYSFLNNLYLPSDYLSSTGDISNVVLVIAKARAEISCNSMAIAFLIIPYTSELANERERERE

SEQ ID NO: 5928 - protein, 276 aa, Helicobacter pylori
  misc_feature (B) LOCATION 1...276
  hypothetical: YES
MKFLKFFASSVTLDEKFLMFLLCNALSNAYKNSDLFSFSKGFLGAFLIGFVVYYGCALIPKKRLKYSLEWLFIGSGIIFSVAEIFTLFMFKMPFSKGLIDTLLATNSSETMAFIKSYKNYLLYYALILIALLIAIKIIRFRALVPGVIASVLGLSILTIGSVRNIKHLTKNDAILKRSLFSLSLARGFYSAYLSLFDRQQAIKFYSFLNNLYLPSDYLSSTGDISNVVLVIGESASRNFMQLYGYSVPNNPLSSELANERERERERVTTCSCFLTR

SEQ ID NO: 5929 - protein, 168 aa, Helicobacter pylori
  misc_feature (B) LOCATION 1...168
  hypothetical: YES
MLKKIFLTNSLGILCSRIFGFLRDLMMANILGAGVYSDIFFVAFKLPNLFRRIFAEGSFSQSFLPSFIRSSIKGGFASLVGLIFCGVLFMWCLLVALNPLWLTKLLAYGFDEETLKLCTPIVAINFWYLLLVFITTFLGALLQYKHSFFAALMRKLTQFMHDFSPFDF

SEQ ID NO: 5930 - protein, 420 aa, Helicobacter pylori
  misc_feature (B) LOCATION 1...420
  hypothetical: YES
MLKKIFLTNSLGILCSRIFGFLRDLMMANILGAGVYSDIFFVAFKLPNLFRRIFAEGSFSQSFLPSFIRSSIKGGFASLVGLIFCGVLFMWCLLVALNPLWLTKLLAYGFDEETLKLCTPIVAINFWYLLLVFITTFLGALLQYKHSFFASAYSASLLNLCMILALLISKEKTHLEALYYLSYGVLLGGVAQILLHFYPLVKLGLWDLLFKGLLGFKTKNTNKKEYRLNRAKKDLKAFFKQFFPSVLGNSSAQIASFLDTTIASFLASGSVSYLYYANRVFQLPLALFAIAISTALFPSIAIALKNNQQDLILQRLQKAWFFLVGVLLLCSIGGIMLSKEITELLFERGQFSPKDTLITSQVFSLYLLGLLPFGLTKLFSLWLYAKLEQKKAAKISLISLFLGLAASLSLMPLLGVLGLR

SEQ ID NO: 5931 - protein, 426 aa, Helicobacter pylori
  misc_feature (B) LOCATION 1...426
  hypothetical: YES
VINTTSMLKKIFLTNSLGILCSRIFGFLRDLMMANILGAGVYSDIFFVAFKLPNLFRRIFAEGSFSQSFLPSFIRSSIKGGFASLVGLIFCGVLFMWCLLVALNPLWLTKLLAYGFDEETLKLCTPIVAINFWYLLLVFITTFLGALLQYKHSFFASAYSASLLNLCMILALLISKEKTHLEALYYLSYGVLLGGVAQILLHFYPLVKLGLWDLLFKGLLGFKTKNTNKKEYRLNRAKKDLKAFFKQFFPSVLGNSSAQIASFLDTTIASFLASGSVSYLYYANRVFQLPLALFAIAISTALFPSIAIALKNNQQDLILQRLQKAWFFLVGVLLLCSIGGIMLSKEITELLFERGQFSPKDTLITSQVFSLYLLGLLPFGLTKLFSLWLYAKLEQKKAAKISLISLFLGLAASLSLMPLLGVLGLR

SEQ ID NO: 5932 - protein, 245 aa, Helicobacter pylori
  misc_feature (B) LOCATION 1...245
  hypothetical: YES
MQMMQNLSFLGMFLAALSMSLGHCVGMCGGIVSAFSQIRFSKVTSFSYQIACHALYNVGRISTYMLLGAITAGLGNSLSVSMGFRGVLLMSMGIVLILLALLGAKAEKLSFQIPFISFLMKKTLQSQNVLGLYFLGVLNGFLPCMMVYSFLASVILSHSTFMGAMLGLSFGLGTSVPLFLMGIFLSKISISYRKFFNLLSKGLMGVFGLYVLYMGIMLISHQTPHAMRHQNNATPQQEGHFHDHH

SEQ ID NO: 5933 - protein, 76 aa, Helicobacter pylori
  misc_feature (B) LOCATION 1...76
  hypothetical: YES
MXMSHIIKSIEALDDYTIRFTLNGPEAPFLANLGMDFLSILSKDYADYLAQNNKKDELAKXPVGTGPFKFFLWNKR

SEQ ID NO: 5934 - protein, 116 aa, Helicobacter pylori
  misc_feature (B) LOCATION 1...116
  hypothetical: YES
MLMTGHNLNEVEQLEKLHNIVVDRSPGLIANWLSLNTQKKYFNNPLVRLAINHAINVDDYIKVIYEGFAQKMVNPFPPTIWGYNYNIKPYEYDLKKAKELLKQAGYPNGFKTTIFT

SEQ ID NO: 5935 - protein, 210 aa, Helicobacter pylori
  misc_feature (B) LOCATION 1...210
  hypothetical: YES
MAKAMWRRGNIYDTLVQFKYGTTEVEPALATSWEISPDGLVYTFHLRKGVYFHQTKYWNKKVEFSAKDVLFSFERQMDKAKRYYSPGAKSYKYWEGMGMSHIIKSIEALDDYTIRFTLNGPEAPFLANLGMDFLSILSKDYADYLAQNNKKDELAKKPVGTGPFKFFLWNKDEKIILVKNQDYWGPKTYLIRWWCAPFIIFHSRLSVKNR

SEQ ID NO: 5936 - protein, 251 aa, Helicobacter pylori
  misc_feature (B) LOCATION 1...251
  hypothetical: YES
TILCPGAKSYKYWEGMGMSHIIKSIEALDDYTIRFTLNGPEAPFLANLGMDFLSILSKDYADYLAQNNKKDELAKKPVGTGPFKFFLWNKDEKIILVKNQDYWGLKAYLDKVVVRTIHNFSTRALALRTGEIMLMTGHNLNEVEQLEKLHNIVVDRSPGLIANWLSLNTQKKYFNNPLVRLAINHAINVDDYIKVIYEGFAQKMVNPFPPTIWGYNYNIKPYEYDLKKAKELLKQAGYPNGFKTNICTSLL

SEQ ID NO: 5937 - protein, 505 aa, Helicobacter pylori
  misc_feature (B) LOCATION 1...505
  hypothetical: YES
LGGVLVFARGADGSSMDPALVTDGESYVATGNIYDTLVQFKYGTTEVEPALATSWEISPDGLVYTFHLRKGVYFHQTKYWNKKVEFSAKDVLFSFERQMDKAKRYYSPGAKSYKYWEGMGMSHIIKSIEALDDYTIRFTLNGPEAPFLANLGMDFLSILSKDYADYLAQNNKKDELAKKPVGTGPFKFFLWNKDEKIILVKNQDYWGPKAYLDKVVVRTIPNSSTRALALRTGEIMLMTGPNLNEVEQLEKLPNIVVDRSPGLIANWLSLNTQKKYFNNPLVRLAINHAINVDDYIKVIYEGFAQKMVNPFPPTIWGYNYNIKPYEYDLKKAKELLKQAGYPNGFKTTIFTTSTRNPKGAVFIQASLAKIGIDVKIEVYEWGAYLKRTGLGEHEMAFAGWMADIADPDNFLYTLWSKQAASAIPTQNGSFYKSDAFSDLLIKAKRVSDQKEREALYLKAQEIIHKDAPYVPLAYPYSVVPHLSKVKGYKTTGVSVNRFFKVYLEK

SEQ ID NO: 5938 - protein, 52 aa, Helicobacter pylori
  misc_feature (B) LOCATION 1...52
  hypothetical: YES
NPSINHQKIASFREIREIVARSQGELILEIERNNQILEKRLTPKIVAGIKRV

SEQ ID NO: 5939 - protein, 75 aa, Helicobacter pylori
  misc_feature (B) LOCATION 1...75
  hypothetical: YES
SESNDPNEIIKYKIIGIKPDMQKMGVVSYSVFQAFEKALSRFKEGVVLIVDSLRRLIMGSASVKELSGVIGIVGR

SEQ ID NO: 5940 - protein, 89 aa, Helicobacter pylori
  misc_feature (B) LOCATION 1...89
  hypothetical: YES
KLKGMDKEENEENKINQANDSYGQKSPFQKLWILFGGAFFNFLFAVLVYFFLALSGEKVLLPVIGGLEKNALEAGLLKGDRILLSTIKK

SEQ ID NO: 5941 - protein, 93 aa, Helicobacter pylori
  misc_feature (B) LOCATION 1...93
  hypothetical: YES
RIEWGNRHCGALSHANSVSMLLLFGAFLSINLGILNLLPIPALDGAQMLGVVFKNIFHIALPTPIQNALWLVGVGFLVFVMFLGLFNDITRLL

SEQ ID NO: 5942 - protein, 110 aa, Helicobacter pylori
  misc_feature (B) LOCATION 1...110
  hypothetical: YES
MMFIVAVLMLAFLIFVHELGHFIIARICGVKVEVFSIGFGKKLWFFKLFGTQFALSLIPLGGYVKLKGMDKEENEENKINQANDSYAKKALSKSYGYCLVGRFLIFFLRF

SEQ ID NO: 5943 - protein, 137 aa, Helicobacter pylori
  misc_feature (B) LOCATION 1...137
  hypothetical: YES
MQKMGVVSYSVFQAFEKALSRFKEGVVLIVDSLRRLIMGSASVKELSGVIGIVGALSHANSVSMLLLFGAFLSINLGILNLLPIPALDGAQMLGVVFKNIFHIALPTPIQNALWLVGVGFLVFVMFLGLFNDITRLL

SEQ ID NO: 5944 - protein, 254 aa, Helicobacter pylori
  misc_feature (B) LOCATION 1...254
  hypothetical: YES
LFGGAFFNFLFAVLVYFFLALSGEKVLLPVIGGLEKNALEAGLLKGDRILSINHQKIASFREIREIVARSQGELILEIERNNQILEKRLTPKIVAVISESNDPNEIIKYKIIGIKPDMQKMGVVSYSVFQAFEKALSRFKEGVVLIVDSLRRLIMGSASVKELSGVIGIVGALSHANSVSMLLLFGAFLSINLGILNLLPIPALDGAQMLGVVFKNIFHIALPTPIQNALWLVGVGFLVFVMFLGLFNDITRLL

SEQ ID NO: 5945 - protein, 351 aa, Helicobacter pylori
  misc_feature (B) LOCATION 1...351
  hypothetical: YES
MMFIVAVLMLAFLIFVHELGHFIIARICGVKVEVFSIGFGKKLWFFKLFGTQFALSLIPLGGYVKLKGMDKEENEENKINQANDSYAQKSPFQKLWILFGGAFFNFLFAVLVYFFLALSGEKVLLPVIGGLEKNALEAGLLKGDRILSINHQKIASFREIREIVARSQGELILEIERNNQILEKRLTPKIVAVISESNDPNEIIKYKIIGIKPDMQKMGVVSYSVFQAFEKALSRFKEGVVLIVDSLRRLIMGSASVKELSGVIGIVGALSHANSVSMLLLFGAFLSINLGILNLLPIPALDGAQMLGVVFKNIFHIALPTPIQNALWLVGVGFLVFVMFLGLFNDITRLL

SEQ ID NO: 5946 - protein, 350 aa, Helicobacter pylori
  misc_feature (B) LOCATION 1...350
  hypothetical: YES
MALRVLLFFCFLFLQAEDKSQELSSIQKQMALVDKKLAKDDNVWLKKFENYKIYNQIYTEKESVRQELRRLKNKKSKDLLKISTLEHTLKALESQQKMFESYGVNPFKDLIERPNIPNIPNIANPIAIIDGISFIKSMRLKHENLKNNQTSLGEVLKLLDQKHQLLNQWHALDKSAKLSDEIYQTQAKRLELQGAQNILKTTIGIFQKDSDEAISIVKSQVKNQLFKLVYVFLAALLSVVFAWILKIISSKYIENNERVYTVNKAINFVNVSVIXXIXLFSYLENVTYLVTVLGFASAGLAIXMKDLFMSLLGWFIILIGGSVHVGDRVRIAKGTDIFIGDVLDTSNVVH

SEQ ID NO: 5947 - protein, 523 aa, Helicobacter pylori
  misc_feature (B) LOCATION 1...523
  hypothetical: YES
MALRVLLFFCFLFLQAEDKSQELSSIQKQMALVDKKLAKDDNVWLKKFENYKIYNQIYTEKESVRQELRRLKNKKSKDLLKISTLEHTLKALESQQKMFESYGVNPFKDLIERPNIPNIPNIANPIAIIDGISFIKSMRLKHENLKNNQTSLGEVLKLLDQKHQLLNQWHALDKSAKLSDEIYQTQAKRLELQGAQNILKTTIGIFQKDSDEAISIVKSQVKNQLFKLVYVFLAALLSVVFAWILKIISSKYIENNERVYTVNKAINFVNVSVIVLIFLFSYLENVTYLVTVLGFASAGLAIAMKDLFMSLLGWFIILIGGSVHVGDRVRIAKGTDIFIGDVLDISMLHITILEDVTFTTYTNNRRAGRIIFVPNNYIFTTMFANYSHFGMKTVWDGVDFCVTFDSDFKKASKIALNIATELSKEYTDITYKQLNKMRDRYSLRSLSVKPRCFLMPENNGIKISVWYQTNSYATMSLRSKIVAEIVEAFLKEENIHIAYTTSKLLKVDADALGDGFGNKREQK

SEQ ID NO: 5948 - protein, 532 aa, Helicobacter pylori
  misc_feature (B) LOCATION 1...532
  hypothetical: YES
RNDFKGVRKMALRVLLFFCFLFLQAEDKSQELSSIQKQMALVDKKLAKDDNVWLKKFENYKIYNQIYTEKESVRQELRRLKNKKSKDLLKISTLEHTLKALESQQKMFESYGVNPFKDLIERPNIPNIPNIANPIAIIDGISFIKSMRLKHENLKNNQTSLGEVLKLLDQKHQLLNQWHALDKSAKLSDEIYQTQAKRLELQGAQNILKTTIGIFQKDSDEAISIVKSQVKNQLFKLVYVFLAALLSVVFAWILKIISSKYIENNERVYTVNKAINFVNVSVIVLIFLFSYLENVTYLVTVLGFASAGLAIAMKDLFMSLLGWFIILIGGSVHVGDRVRIAKGTDIFIGDVLDISMLHITILEDVTFTTYTNNRRAGRIIFVPNNYIFTTMFANYSHFGMKTVWDGVDFCVTFDSDFKKASKIALNIATELSKEYTDITYKQLNKMRDRYSLRSLSVKPRCFLMPENNGIKISVWYQTNSYATMSLRSKIVAEIVEAFLKEENIHIAYTTSKLLKVDADALGDGFGNKREQK

SEQ ID NO: 5949 - protein, 251 aa, Helicobacter pylori
  misc_feature (B) LOCATION 1...251
  hypothetical: YES
MGAILSILKLEIKSYLTNTSALFWTFIYPILMLLLLIFVFSKNTTEIFYFNNIIGLMGLLIISSAIFGLTQAITSSRSHNIFLFYMLSPATFKQITLALIASRLIVVILYAFIFIVLSFYALNIITILNFKALILGFISIFSSALFCFCLAIFVARIFQNEQSILGFCNIINLYALMSCNVFVPLEYLPNIGQLFIKTSIFYYLNQLLIKAFQGIDTILVLATSTFFIIGGIILFLLSANRMLLTPKERMR

SEQ ID NO: 5950 - protein, 251 aa, Helicobacter pylori; identical to SEQ ID NO: 5949
  misc_feature (B) LOCATION 1...251
  hypothetical: YES

SEQ ID NO: 5951 - protein, 267 aa, Helicobacter pylori
  misc_feature (B) LOCATION 1...267
  hypothetical: YES
RKTNHKRLISVTKGYLMGAILSILKLEIKSYLTNTSALFWTFIYPILMLLLLIFVFSKNTTEIFYFNNIIGLMGLLIISSAIFGLTQAITSSRSHNIFLFYMLSPATFKQITLALIASRLIVVILYAFIFIVLSFYALNIITILNFKALILGFISIFSSALFCFCLAIFVARIFQNEQSILGFCNIINLYALMSCNVFVPLEYLPNIGQLFIKTSIFYYLNQLLIKAFQGIDTILVLATSTFFIIGGIILFLLSANRMLLTPKERMR

SEQ ID NO: 5952 - protein, 84 aa, Helicobacter pylori
  misc_feature (B) LOCATION 1...84
  hypothetical: YES
VSLGAFQGYYGGLVDLVGQRLSEIWSAIPMLFLLIVISSAFNSNFWIILFLVLLFSWMGLSQVVRTEFLKARNMDYTKAARALG

SEQ ID NO: 5953 - protein, 340 aa, Helicobacter pylori
  misc_feature (B) LOCATION 1...340
  hypothetical: YES
LSVSGLFKMRILSFKKNKRAVFSLYLFIALLALSLLAPLWVNDRPLFIYKDNKAYFPMFKNYAEVEFGGDFFTPTDYNDPYVQNTLLKDAFIIHALIPYSYDTIIMDLDSPAPTPPSFKHLLGTDDQARDVLARLVYGYRVSLVFGILLTLFSVLIGVSLGAFQGYYGGLVDLVGQRLSEIWSAIPMLFLLIVISSAFNSNFWIILFLVLLFSWMGLSQVVRTEFLKARNMDYTKAARALGVNDLKIIFYHVLPNALVATITYIPFLMAASISTLVSLDFLGFGMPIGSASLGELVNQGKDNLTTPHLAVVAFVAISLLLSVLVFIGEGVRDAFNANMLK

SEQ ID NO: 5954 - protein, 347 aa, Helicobacter pylori
  misc_feature (B) LOCATION 1...347
  hypothetical: YES
IVFHQGSLSVSGLFKMRILSFKKNKRAVFSLYLFIALLALSLLAPLWVNDRPLFIYKDNKAYFPMFKNYAEVEFGGDFFTPTDYNDPYVQNTLLKDAFIIHALIPYSYDTIIMDLDSPAPTPPSFKHLLGTDDQARDVLARLVYGYRVSLVFGILLTLFSVLIGVSLGAFQGYYGGLVDLVGQRLSEIWSAIPMLFLLIVISSAFNSNFWIILFLVLLFSWMGLSQVVRTEFLKARNMDYTKAARALGVNDLKIIFYHVLPNALVATITYIPFLMAASISTLVSLDFLGFGMPIGSASLGELVNQGKDNLTTPHLAVVAFVAISLLLSVLVFIGEGVRDAFNANMLK

SEQ ID NO: 5955 - protein, 151 aa, Helicobacter pylori
  misc_feature (B) LOCATION 1...151
  hypothetical: YES
VSDSNALKEVFLNISAKEDHCDVLINSAGYGVFGSVEDTPIEEVKKQFSVNFFALCEVVQLCLPLLKNKPYSKIFNLSSIAGRVSMLFLGHYSASKHALEAYSDALRLELKPFNVQVCLIEPGPVKSNWEKTAFENDERKDSVYALEVNAA

SEQ ID NO: 5956 - protein, 216 aa, Helicobacter pylori
  misc_feature (B) LOCATION 1...216
  hypothetical: YES
IMGVGEKEEKKESQKVAVITGASSGIGLECVLMLLNQGYKVYALSRHATLCVALNHALCECVDIDVSDSNALKEVFLNISAKEDHCDVLINSAGYGVFGSVEDTPIEEVKKQFSVNFFALCEVVQLCLPLLKNKPYSKIFNLSSIAGRVSMLFLGHYSASKHALEAYSDALRLELKPFNVQVCLIEPGPVKSNWEKTAFENDERKDSVYALEVNAA

SEQ ID NO: 5957 - protein, 226 aa, Helicobacter pylori
  misc_feature (B) LOCATION 1...226
  hypothetical: YES
MGVGEKEEKKESQKVAVITGASSGIGLECVLMLLNQGYKVYALSRHATLCVALNHALCECVDIDVSDSNALKEVFLNISAKEDHCDVLINSAGYGVFGSVEDTPIEEVKKQFSVNFFALCEVVQLCLPLLKNKPYSKIFNLSSIAGRVSMLFLGHYSASKHALEAYSDALRLELKPFNVQVCLIEPGPVKSNWEKTAFENDERKDSVYALEVNAAKTFILACIKKP

SEQ ID NO: 5958 - protein, 268 aa, Helicobacter pylori
  misc_feature (B) LOCATION 1...268
  hypothetical: YES
MGVGEKEEKKESQKVAVITGASSGIGLECVLMLLNQGYKVYALSRHATLCVALNHALCECVDIDVSDSNALKEVFLNISAKEDHCDVLINSAGYGVFGSVEDTPIEEVKKQFSVNFFALCEVVQLCLPLLKNKPYSKIFNLSSIAGRVSMLFLGHYSASKHALEAYSDALRLELKPFNVQVCLIEPGPVKSNWEKTAFENDERKDSVYALEVNAAKSFYSGVYQKALNAKEVAQKIVFLSMSHKIKARYLIGLKTQLLLALYQILPSS

SEQ ID NO: 5959 - protein, 118 aa, Helicobacter pylori
  misc_feature (B) LOCATION 1...118
  hypothetical: YES
MLMHSILILLVIIITTYFTRIWPFMVFNSKNPPNDFVRYLGRALSCSVIGMLVVYCFKDIHVLKPPYGINEITAFLSVILLHRIFKVFVLSITLPTILYMVLVQSHALEKAFFNIHVS

SEQ ID NO: 5960 - protein, 79 aa, Helicobacter pylori
  misc_feature (B) LOCATION 1...79
  hypothetical: YES
LIIPKECLIALMGCGSVFIKDKRSKPYLMFFIFLKNKILVILILIKVNKAHFLKGIGGILRFNTPTTPQTKSPNLLRSH

SEQ ID NO: 5961 - protein, 80 aa, Helicobacter pylori
  misc_feature (B) LOCATION 1...80
  hypothetical: YES
FLIIPKECLIALMGCGSVFIKDKRSKPYLMFFIFLKNKILVILILIKVNKAHFLKGIGGILRFNTPTTPQTKSPNLLRSH

SEQ ID NO: 5962 - protein, 80 aa, Helicobacter pylori
  misc_feature (B) LOCATION 1...80
  hypothetical: YES
MKNLRHFRKLIAFLGFSPLLLQADMTTFFNSIEQQLTSPTAKGILMVIFLGLAIFIWKNLDRWKEILMTVLALKXVPMQX

SEQ ID NO: 5963 - protein, 164 aa, Helicobacter pylori
  misc_feature (B) LOCATION 1...164
  hypothetical: YES
MKNLRHFRKLIAFLGFSPLLLQADMTTFFNSIEQQLTSPTAKGILMVIFLGLAIFIWKNLDRWKEILMTVLALKEVPMQLVAISVSNLKEISSKEKFLWLNAKSFLLSGFVPFIMIPWLDILNSFVLYVCFLLIFSIAEFFDEDISDILIAHSKIKTKANSFYA

SEQ ID NO: 5964 - protein, 170 aa, Helicobacter pylori
  misc_feature (B) LOCATION 1...170
  hypothetical: YES
KRKEHCMKNLRHFRKLIAFLGFSPLLLQADMTTFFNSIEQQLTSPTAKGILMVIFLGLAIFIWKNLDRWKEILMTVLALKEVPMQLVAISVSNLKEISSKEKFLWLNAKSFLLSGFVPFIMIPWLDILNSFVLYVCFLLIFSIAEFFDEDISDILIAHSKIKTKANSFYA

SEQ ID NO: 5965 - protein, 128 aa, Helicobacter pylori
  misc_feature (B) LOCATION 1...128
  hypothetical: YES
VMAQSLLVHAFFAALLALAFMINLYTLFKEKNFIQLNRKIYLVMPAIYILLSIALLSGVFIWAMQQFEFSFSAVVMLLGLLLMLIAEIKRHKSVKFAITKKERMKAYIKKAKILYFLETILIIVLMGI

SEQ ID NO: 5966 - protein, 143 aa, Helicobacter pylori
  misc_feature (B) LOCATION 1...143
  hypothetical: YES
MLEMSLQALNTQDSSVMAQSLLVHAFFAALLALAFMINLYTLFKEKNFIQLNRKIYLVMPAIYILLSIALLSGVFIWAMQQFEFSFSAVVMLLGLLLMLIAEIKRHKSVKFAITKKERMKAYIKKAKILYFLETILIIVLMGI

SEQ ID NO: 5967 - protein, 149 aa, Helicobacter pylori
  misc_feature (B) LOCATION 1...149
  hypothetical: YES
IVRKKLMLEMSLQALNTQDSSVMAQSLLVHAFFAALLALAFMINLYTLFKEKNFIQLNRKIYLVMPAIYILLSIALLSGVFIWAMQQFEFSFSAVVMLLGLLLMLIAEIKRHKSVKFAITKKERMKAYIKKAKILYFLETILIIVLMGI

SEQ ID NO: 5968 - protein, 112 aa, Helicobacter pylori
  misc_feature (B) LOCATION 1...112
  hypothetical: YES
MDWGRVIHVLFSLISLTTIAGFLYEPNTVVLFVALALNLISVTLKIGVCKRFASELLASSLATVLHLIPAFVFLQILNNLVTAYMLMIGALISNAFSLIFLLIESVVTSETD

SEQ ID NO: 5969 - protein, 192 aa, Helicobacter pylori
  misc_feature (B) LOCATION 1...192
  hypothetical: YES
LLLATVGALLGLMNFQAVVQYKWVFFIAEIVAFFGLMFSKSKPGLNLFMLFAFTSLSGVTLVPLLGMVIAKAGLGAVWQALGMTTIVFGLMSVYALKTKNDLANMGKMLFIALIVVVVCSLINLFLGSPMFQVVIAGASAILFSLYIAYDTQNIVKGMYDSPIDAAVSLYLDFLNVFISILQIIGIFSDRDK

SEQ ID NO: 5970 - protein, 192 aa, Helicobacter pylori; identical to SEQ ID NO: 5969
  misc_feature (B) LOCATION 1...192
  hypothetical: YES

SEQ ID NO: 5971 - protein, 215 aa, Helicobacter pylori
  misc_feature (B) LOCATION 1...215
  hypothetical: YES
DPVLHESELVSFVKTTYKFFAGSLLLATVGALLGLMNFQAVVQYKWVFFIAEIVAFFGLMFSKSKPGLNLFMLFAFTSLSGVTLVPLLGMVIAKAGLGAVWQALGMTTIVFGLMSVYALKTKNDLANMGKMLFIALIVVVVCSLINLFLGSPMFQVVIAGASAILFSLYIAYDTQNIVKGMYDSPIDAAVSLYLDFLNVFISILQIIGIFSDRDK

SEQ ID NO: 5972 - protein, 214 aa, Helicobacter pylori
  misc_feature (B) LOCATION 1...214
  hypothetical: YES
PVLHESELVSFVKTTYKFFAGSLLLATVGALLGLMNFQAVVQYKWVFFIAEIVAFFGLMFSKSKPGLNLFMLFAFTSLSGVTLVPLLGMVIAKAGLGAVWQALGMTTIVFGLMSVYALKTKNDLANMGKMLFIALIVVVVCSLINLFLGSPMFQVVIAGASAILFSLYIAYDTQNIVKGMYDSPIDAAVSLYLDFLNVFISILQIIGIFSDRDK

SEQ ID NO: 5973 - protein, 65 aa, Helicobacter pylori
  misc_feature (B) LOCATION 1...65
  hypothetical: YES
FLIRMRRIWGALSKEVSGFHFIIIPKNLDFKMVLGLLPYALSLALVGTIESLLTAKPLDVILKDA

SEQ ID NO: 5974 - protein, 71 aa, Helicobacter pylori
  misc_feature (B) LOCATION 1...71
  hypothetical: YES
VSAIALIFDTHAPNLGSIEQGVSGFHFIIIPKNLDFKMVLGLLPYALSLALVGTIESLLTAKPLDVILKDA

SEQ ID NO: 5975 - protein, 92 aa, Helicobacter pylori
  misc_feature (B) LOCATION 1...92
  hypothetical: YES
VALILVGVVKNYGLEYAGVATLMAGILQILLGYLKIGNLLKFIPQSVMYGFVNALGILLLTEQFKFLQNQNLGVFVLLAIGILIIIFCPLMH

SEQ ID NO: 5976 - protein, 97 aa, Helicobacter pylori
  misc_feature (B) LOCATION 1...97
  hypothetical: YES
RRTGSVALILVGVVKNYGLEYAGVATLMAGILQILLGYLKIGNLLKFIPQSVMYGFVNALGILLLTEQFKFLQNQNLGVFVLLAIGILIIIFCPLMH

SEQ ID NO: 5977 - protein, 250 aa, Helicobacter pylori
  misc_feature (B) LOCATION 1...250
  hypothetical: YES
MLEKIQKEWLSNIQKDLLSGFVVGLSVIPETAGFAIMVGLDVGVAFYTTFYMAFVLSLFGARKAMISAAAGSVALILVGVVKNYGLEYAGVATLMAGILQILLGYLKIGNLLKFIPQSVMYGFVNALGILLLTEQFKFLQNQNLGVFVLLAIGILIIYLFPLITKKIPSNLICILAVSAIALIFDTHAPNLGSIEQGVSGFHFIIIPKNLDFKMVLGLLPYALSLALVGTIESLLTAKTLDVILKDARER

SEQ ID NO: 5978 - protein, 136 aa, Helicobacter pylori
  misc_feature (B) LOCATION 1...136
  hypothetical: YES
MIFYTTIKEPLKNLQYRYAQFFGKIKPCSFLESLKSCFFQTYSFSLTRKQDFKSHLRHFIDSAHSNALVGNLYRALFIGDSLNKDLRDRANALGINHLLAISGFHLGILSASVYFLFSLFYTPLQKRYFPYRNAFX

SEQ ID NO: 5979 - protein, 437 aa, Helicobacter pylori
  misc_feature (B) LOCATION 1...437
  hypothetical: YES
LKDKTFQGAFELLTTPKEYSWCGVVLSLLLAINLYLEYLNHQKLDFSKPTSLNAQILLQYPKTKDQKTYFVLKLQSKGMIFYTTIKEPLKNLQYRYAQFFGKIKPCSFLESLKSCFFQTYSFSLTRKQDFKSHLRHFIDSAHSNALVGNLYRALFIGDSLNKDLRDRANALGINHLLAISGFHLGILSASVYFLFSLFYTPLQKRYFPYRNAFYDIGVLVWVFLLGYLLLLDFLPSFFRAFLMGLLGFLACFFGVRILSFKLLVLACCIAIALLPKLLFSVGFLLSVCGVWYIFLFLKHTQIFFKDSSFFKRSFQAIALSVLVFLNMLIVAHAFFPMFSPYQLFSIPLGLIFIVFFPLSLFLHAVGLGSLLDNILSMPLTIPTISVSSPLWLLGAHLFLTILSVRFFKVYLSMNVLSMGFFLYCCYQYIIMPSLIVG

SEQ ID NO: 5980 - protein, 441 aa, Helicobacter pylori
  misc_feature (B) LOCATION 1...441
  hypothetical: YES
NAHNLKDKTFQGGFELLTTPKEYSWCGVVLSLLLAINLYLEYLNHQKLDFSKPTSLNAQILLQYPKTKDQKTYFVLKLQSKGMIFYTTIKEPLKNLQYRYAQFFGKIKPCSFLESLKSCFFQTYSFSLTRKQDFKSHLRHFIDSAHSNALVGNLYRALFIGDSLNKDLRDRANALGINHLLAISGFHLGILSASVYFLFSLFYTPLQKRYFPYRNAFYDIGVLVWVFLLGYLLLLDFLPSFFRAFLMGLLGFLACFFGVRILSFKLLVLACCIAIALLPKLLFSVGFLLSVCGVWYIFLFLKHTQIFFKDSSFFKRSFQAIALSVLVFLNMLIVAHAFFPMFSPYQLFSIPLGLIFTVFFPLSLFLHAVGLGSLLDNILSMPLTIPTISVSSPLWLLGAHLFLTILSVRFFKVYLSMNVLSMGFFLYCCYQYIIMPSLIVG

SEQ ID NO: 5981 - protein, 248 aa, Helicobacter pylori
  misc_feature (B) LOCATION 1...248
  hypothetical: YES
MRFYFKFLWLLGIFLIFYFLDIKGSSSYISDRVKSALMSAKNSLLDNVQAYFFQAQNIKEFQKERLILEALKLENADLKERLNSIYPLENPKMTYTPTFMTSFINLEDTHSVSLNPIVNLEENKIYGLVSHNQAIGIAVLEKGRLNGFLNAHKRCAYSVMIGQNQVLGFIGTNFKQELVVDFIVPSAEINIGDQVLTSGLDGIFGAGVFVGEVSSVEDHYTYKSAVLKNAFLSEAKLLRHVFLSGVKN

SEQ ID NO: 5982 - protein, 248 aa, Helicobacter pylori; identical to SEQ ID NO: 5981
  misc_feature (B) LOCATION 1...248
  hypothetical: YES

SEQ ID NO: 5983 - protein, 249 aa, Helicobacter pylori
  misc_feature (B) LOCATION 1...249
  hypothetical: YES
CMRFYFKFLWLLGIFLIFYFLDIKGSSSYISDRVKSALMSAKNSLLDNVQAYFFQAQNIKEFQKERLILEALKLENADLKERLNSIYPLENPKMTYTPTFMTSFINLEDTHSVSLNPIVNLEENKIYGLVSHNQAIGIAVLEKGRLNGFLNAHKRCAYSVMIGQNQVLGFIGTNFKQELVVDFIVPSAEINIGDQVLTSGLDGIFGAGVFVGEVSSVEDHYTYKSAVLKNAFLSEAKLLRHVFLSGVKN

SEQ ID NO: 5984 - protein, 80 aa, Helicobacter pylori
  misc_feature (B) LOCATION 1...80
  hypothetical: YES
LPIILXVIVMMFFSKIVGDFIEKHYRVKTLAFVFLLVVGVFLFLEGLHLHINKNYLYAGIGFALLIECLXIFIEKKMKKS

SEQ ID NO: 5985 - protein, 242 aa, Helicobacter pylori
  misc_feature (B) LOCATION 1...242
  hypothetical: YES
MEFLSSLLDALSTPHGIVSLATLTLLEIVLGIDNIIFITVMVYKLPKHQQNKVMILGLGLAMITRIGLLGSLFFISHLQKPLFAIAGMSFSWRDVVLLLGGAFLAFKALVELKEQIYPKEKRQEKAFGFFITLIEIMFLDIVFSLDSVITAIGIAKHLEVMALAIILSVIVMMFFSKIVGDFIEKHYRVKTLAFVFLLVVGVFLFLEGLHLHINKNYLYAGIGFALLIECLNIFIEKKMKKS

SEQ ID NO: 5986 - protein, 244 aa, Helicobacter pylori
  misc_feature (B) LOCATION 1...244
  hypothetical: YES
PFMEFLSSLLDALSTPHGIVSLATLTLLEIVLGIDNIIFITVMVYKLPKHQQNKVMILGLGLAMITRIGLLGSLFFISHLQKPLFAIAGMSFSWRDVVLLLGGAFLAFKALVELKEQIYPKEKRQEKAFGFFITLIEIMFLDIVFSLDSVITAIGIAKHLEVMALAIILSVIVMMFFSKIVGDFIEKHYRVKTLAFVFLLVVGVFLFLEGLHLHINKNYLYAGIGFALLIECLNIFIEKKMKKS

SEQ ID NO: 5987 - protein, 387 aa, Helicobacter pylori
  misc_feature (B) LOCATION 1...387
  hypothetical: YES
MGFLFEKSLMGFCAHSIKIIKVTGLILSFLAAFLVAEDTHEPEEIKAKVAYVKIPQLEDLENTPVYIGQTIGVTYDLLLFDAEFLEAKIKDGWDKTQIELLNKMPKWKKVEKELFRATYYYKIKGIRASIPSLEVSAFSNKDKYIDHSIAPKVALQVTDLSKNPRYANVMAKDLQVVQYKTKDYDDKNNILVMELAFKEANWEDFHVKEAIKQGFDNASLNQIKAKEGSVFYYCVLPKTLQNLSFDYFSLSNRQFKTLSFSAIPTQDTTGIQSDLIPKNNFLVFSNVALLALCVFFLALFFIFGRKLIFLGLGILCLGFVLYNLLFTQKSALLLAHKKIRILPTQNSTILGLSRDEMPIKILGSHDDYYKILTPHEQIGWVKKDEVK

SEQ ID NO: 5988 - protein, 389 aa, Helicobacter pylori
  misc_feature (B) LOCATION 1...389
  hypothetical: YES
KLMGFLFEKSLMGFCAHSIKIIKVTGLILSFLAAFLVAEDTHEPEEIKAKVAYVKIPQLEDLENTPVYIGQTIGVTYDLLLFDAEFLEAKIKDGWDKTQIELLNKMPKWKKVEKELFRATYYYKIKGIRASIPSLEVSAFSNKDKYIDHSIAPKVALQVTDLSKNPRYANVMAKDLQVVQYKTKDYDDKNNILVMELAFKEANWEDFHVKEAIKQGFDNASLNQIKAKEGSVFYYCVLPKTLQNLSFDYFSLSNRQFKTLSFSAIPTQDTTGIQSDLIPKNNFLVFSNVALLALCVFFLALFFIFGRKLIFLGLGILCLGFVLYNLLFTQKSALLLAHKKIRILPTQNSTILGLSRDEMPIKILGSHDDYYKILTPHEQIGWVKKDEVK

SEQ ID NO: 5989 - protein, 191 aa, Helicobacter pylori
  misc_feature (B) LOCATION 1...191
  hypothetical: YES
KFVLRSISRIKMLSVYEKGNALDKRVLEEWLLSEDILMENAAMALERAVLQNASLGAKVIILCGSGDNGGDGYTLARRLVGRFKTLVFEMKLAKSPMCQLQKERAKKVGVVIKAWEEKNEDLECDVLVDCVVGSAFKGGLEPFLDFESLSQKARFKIACDIPSGIDSKGRVDKRRLRRIRLSAWALSSHAY

SEQ ID NO: 5990 - protein, 227 aa, Helicobacter pylori
  misc_feature (B) LOCATION 1...227
  hypothetical: YES
VLLGKHSGAGLLSALXALSFGSGVVSIQALECEITSNNKPLELVFCENFPKKLSAFALGMGLENIPKDFKKWLELAPCVLDAGVFYHKEVLQALEKEVILTPHPKEFLSLLKSVGINISMLELLDNKLEIARDFSQKYPKVVLLLKGANTLIAHQGRVFINNLGSVALAKAGSGDVLAGLIVSLLSQNYTPLXAAINASLAHALAGLXFKNXXALTPXDLIEKXKRL

SEQ ID NO: 5991 - protein, 252 aa, Helicobacter pylori
  misc_feature (B) LOCATION 1...252
  hypothetical: YES
LRSISRIKMLSVYEKGNALDKRVLEEWLLSEDILMENAAMALERAVLQNASLGAKVIILCGSGDNGGDGYTLARRLVGRFKTLVFEMKLAKSPMCQLQKERAKKVGVVIKAWEEKNEDLECDVLVDCVVGSAFKGGLEPFLDFESLSQKARFKIACDIPSGIDSKGRVDKRAFKXGYRLSAWALFKSCLLSXKXKXYIXXLKXXHLXVFNQIYEIPTXTFLLEKXDLKLPLRDRKKRSQRRLRACACAFGQA

SEQ ID NO: 5992 - protein, 302 aa, Helicobacter pylori
  misc_feature (B) LOCATION 1...302
  hypothetical: YES
EAFKADTTISMGAIKSCLLSDKAKDYIGELKVGHLGVFNQIYEIPTDTFLLEKSDLKLPLRDRKNAHKGDYGHAHVLLGKHSGAGLLSALSALSFGSGVVSIQALECEITSNNKPLELVFCENFPKKLSAFALGMGLENIPKDFKKWLELAPCVLDAGVFYHKEVLQALEKEVILTPHPKEFLSLLKSVGINISMLELLDNKLEIARDFSQKYPKVVLLLKGANTLIAHQGRVFINNLGSVALAKAGSGDVLAGLIVSLLSQNYTPLDAAINASLAHALAGLEFKNHYALTPLDLIEKIKRL

SEQ ID NO: 5993 - protein, 472 aa, Helicobacter pylori
  misc_feature (B) LOCATION 1...472
  hypothetical: YES
LRSISRIKMLSVYEKGNALDKRVLEEWLLSEDILMENAAMALERAVLQNASLGAKVIILCGSGDNGGDGYTLARRLVGRFKTLVFEMKLAKSPMCQLQKERAKKVGVVIKAWEEKNEDLECDVLVDCVVGSAFKGGLEPFLDFESLSQKARFKIACDIPSGIDSKGRVDKRAFKADTTISMGAIKSCLLSDKAKDYIGELKVGHLGVFNQIYEIPTDTFLLEKSDLKLPLRDRKNAHKGDYGHAHVLLGKHSGAGLLSALSALSFGSGVVSIQALECEITSNNKPLELVFCENFPKKLSAFALGMGLENIPKDFKKWLELAPCVLDAGVFYHKEVLQALEKEVILTPHPKEFLSLLKSVGINISMLELLDNKLEIARDFSQKYPKVVLLLKGANTLIAHQGRVFINNLGSVALAKAGSGDVLAGLIVSLLSQNYTPLDAAINASLAHALAGLEFKNHYALTPLDLIEKIKRL

SEQ ID NO: 5994 - protein, 122 aa, Helicobacter pylori
  misc_feature (B) LOCATION 1...122
  hypothetical: YES
VFVGLYHGASIFDLKFEVYLTMLISLMPFVATIYINFPKTTETSHGYARWANVKDIECFKIFSKEGFCKVVHRLGVQFDNGFILGKFGFPKLRNVCYDKPLGTMIVAPPGAEKLHVWLCQIY

SEQ ID NO: 5995 - protein, 681 aa, Helicobacter pylori
  misc_feature (B) LOCATION 1...681
  hypothetical: YES
MLISLMPFVATIYINFPKTTETSHGYARWANVKDIECFKIFSKEGFCKVVHRLGVQFDNGFILGKFGFPKLRNVCYDKPLGTMIVAPPGAGKTACVALPNLLTLPNSCIITDIKGELRDKTAGYRQKFLNNRILIFNPYGDDNTCYFNPFDKRIVEKMTFAEQLRHVKAVGDGIFVDEEDHWVSKAKELFVFFALLQVVTKGHSSFYDVSIAPANDYAPLIHPKSPYYKQLYQHDKKTGEVILDPQTNAPMKNPQANVLKLFLNQVADQKYIDMNDEKNYDPREPEPPYGTKGALDEIIRTDARSWANTPDDEFGSIMSSFKRFMYVYKDPKVREATSKMSFDYEELRTGNISIYIVIAQIDIGTLSSLVRAFLESIAKNLMVKESSKPEERIFIIADEFVRFGKLPFLLEMPALCRSYNVVPLFITQDYAMIRKYYSDDDLKILKGVVHYNIVFKMNSAEDAEIVSKEVGEFTRRSKNYSTEKGQLVFGGSSSYSHEGRNLLTAQDIMNINSDEVIVIVTGAKATPLKLKANYWFKDKELLKRANLPIDLEVERQRVEEPIQPTTEIETTPNQNKADLEPSNKGEKVENESNERNTNENNPTTPQELENSNLKESEKDNESPITLENANENIEQGNHNEIDEILKKPLSEISMEEKRALFKKMQQSDEESEQEVTQSTQS

SEQ ID NO: 5996 - protein, 712 aa, Helicobacter pylori
  misc_feature (B) LOCATION 1...712
  hypothetical: YES
LRQAYFFSQSVFVGLYHGASIFDLKFEVYLTMLISLMPFVATIYINFPKTTETSHGYARWANVKDIECFKIFSKEGFCKVVHRLGVQFDNGFILGKFGFPKLRNVCYDKPLGTMIVAPPGAGKTACVALPNLLTLPNSCIITDIKGELRDKTAGYRQKFLNNRILIFNPYGDDNTCYFNPFDKRIVEKMTFAEQLRHVKAVGDGIFVDEEDHWVSKAKELFVFFALLQVVTKGHSSFYDVSIAPANDYAPLIHPKSPYYKQLYQHDKKTGEVILDPQTNAPMKNPQANVLKLFLNQVADQKYIDMNDEKNYDPREPEPPYGTKGALDEIIRTDARSWANTPDDEFGSIMSSFKRFMYVYKDPKVREATSKMSFDYEELRTGNISIYIVIAQIDIGTLSSLVRAFLESIAKNLMVKESSKPEERIFIIADEFVRFGKLPFLLEMPALCRSYNVVPLFITQDYAMIRKYYSDDDLKILKGVVHYNIVFKMNSAEDAEIVSKEVGEFTRRSKNYSTEKGQLVFGGSSSYSHEGRNLLTAQDIMNINSDEVIVIVTGAKATPLKLKANYWFKDKELLKRANLPIDLEVERQRVEEPIQPTTEIETTPNQNKADLEPSNKGEKVENESNERNTNENNPTTPQELENSNLKESEKDNESPITLENANENIEQGNHNEIDEILKKPLSEISMEEKRALFKKMQQSDEESEQEVTQSTQS

SEQ ID NO: 5997 - protein, 717 aa, Helicobacter pylori
  misc_feature (B) LOCATION 1...717
  hypothetical: YES
YALKSLRQAYFFSQSVFVGLYHGASIFDLKFEVYLTMLISLMPFVATIYINFPKTTETSHGYARWANVKDIECFKIFSKEGFCKVVHRLGVQFDNGFILGKFGFPKLRNVCYDKPLGTMIVAPPGAGKTACVALPNLLTLPNSCIITDIKGELRDKTAGYRQKFLNNRILIFNPYGDDNTCYFNPFDKRIVEKMTFAEQLRHVKAVGDGIFVDEEDHWVSKAKELFVFFALLQVVTKGHSSFYDVSIAPANDYAPLIHPKSPYYKQLYQHDKKTGEVILDPQTNAPMKNPQANVLKLFLNQVADQKYIDMNDEKNYDPREPEPPYGTKGALDEIIRTDARSWANTPDDEFGSIMSSFKRFMYVYKDPKVREATSKMSFDYEELRTGNISIYIVIAQIDIGTLSSLVRAFLESIAKNLMVKESSKPEERIFIIADEFVRFGKLPFLLEMPALCRSYNVVPLFITQDYAMIRKYYSDDDLKILKGVVHYNIVFKMNSAEDAEIVSKEVGEFTRRSKNYSTEKGQLVFGGSSSYSHEGRNLLTAQDIMNINSDEVIVIVTGAKATPLKLKANYWFKDKELLKRANLPIDLEVERQRVEEPIQPTTEIETTPNQNKADLEPSNKGEKVENESNERNTNENNPTTPQELENSNLKESEKDNESPITLENANENIEQGNHNEIDEILKKPLSEISMEEKRALFKKMQQSDEESEQEVTQSTQS

SEQ ID NO: 5998 - protein, 223 aa, Helicobacter pylori
  misc_feature (B) LOCATION 1...223
  hypothetical: YES
MEESTAFILALVGLFTGITAGFFGIGGGEIVVPSAIFAHFSYSHAVGISLMQMLFSSVVGSIINYKKGLLDLKEGSFAALGGLMGAILGSFILKVINDKILMSVFVVVVCYTFIKYAFSSNKKPEHFEEMHFDLHANNKTPEKKRAIPFVSMDRTHGVLMLAGFVTGIFSIPLGMGGGILMVPFLGYFLKYDSKKIVPLGLFFVVFASLSGVISLYNGKFLMI

SEQ ID NO: 5999 - protein, 277 aa, Helicobacter pylori
  misc_feature (B) LOCATION 1...277
  hypothetical: YES
MEESTAFILALVGLFTGITAGFFGIGGGEIVVPSAIFAHFSYSHAVGISLMQMLFSSVVGSIINYKKGLLDLKEGSFAALGGLMGAILGSFILKVINDKILMSVFVVVVCYTFIKYAFSSNKKPEHFEEMHFDLHANNKTPEKKRAIPFVSMDRTHGVLMLAGFVTGIFSIPLGMGGGILMVPFLGYFLKYDSKKIVPLGLFFVVFASLSGVISLYNGKVLDDISVQAGVITGVGAFLGVGIGIKLIALANEKVHKILLLLIYALSILATLHKLIMG

SEQ ID NO: 6000 - protein, 352 aa, Helicobacter pylori
  misc_feature (B) LOCATION 1...352
  hypothetical: YES
MDFVGFEDLKCKDKENSQKVFVIRNDKLGDFILAIPALIALKHAFLEKGVEVYLGVVVPSYTTPIALEFPFIDEVIIEDNHLATTLKNRSIDALIFLFSNFKNAKLAFSLRKSIPYILAPKTKIYSWLYQKRVRQNRSLCLKTEYEYNLDLIHAFCKDYDLPNAQLKKIAWKLKDKSKERSIIASKLNANVDLLWIGVHMHSGGSSPVLPASHFIELIAILHEKLSCEIILICGPGERKATEELLKEVPFAHLYDTSHSLVDLAKLCANLSVCIGNASGPLHVNALFDNQSIGFYPNELTASIARWRPFNEQFLGITPPNGSNDMGLIDIQKESEKIMGFITKNLSHHMQER

SEQ ID NO: 6001 - protein, 352 aa, Helicobacter pylori
  misc_feature (B) LOCATION 1...352
  hypothetical: YES
MDFVGFEDLKCKDKENSQKVFVIRNDKLGDFILEIPALIALKHAFLEKGVEVYLGVVVPSYTTPIALEFPFIDEVIIEDNHLATTHKNRSIDALIFLFSNFKNAKLAFSLRKSIPYILAPKTKIYSWLYQKRVRQNRSLCLKTEYEYNLDLIHAFCKDYDLPNAQLKKIAWKLKDKSKERSIIASKLNANVDLLWIGVHMHSGGSSPVLPASHFIELIAILHEKLSCEIILICGPGERKATEELLKEVPFAHLYDTSHSLVDLAKLCANLSVCIGNASGPLHVNALFDNQSIGFYPNELTASIARWRPFNEQFLGITPPNGSNDMGLIDIQKESEKIMGFITKNLSHHMQER

SEQ ID NO: 6002 - protein, 363 aa, Helicobacter pylori
  misc_feature (B) LOCATION 1...363
  hypothetical: YES
HDKKFDLLGGVMDFVGFEDLKCKDKENSQKVFVIRNDKLGDFILVIPALIALKHAFLEKGVEVYLGVVVPSYTTPIALEFPFIDEVIIEDNHLATTPKNRSTDALIFLFSNFKNAKLAFSLRKSIPYILAPKTKIYSWLYQKRVRQNRSLCLKTEYEYNLDLIHAFCKDYDLPNAQLKKIAWKLKDKSKERSIIASKLNANVDLLWIGVHMHSGGSSPVLPASHFIELIAILHEKLSCEIILICGPGERKATEELLKEVPFAHLYDTSHSLVDLAKLCANLSVCIGNASGPLHVNALFDNQSIGFYPNELTASIARWRPFNEQFLGITPPNGSNDMGLIDIQKESEKIMGFITKNLSHHMQER

SEQ ID NO: 6003 - protein, 69 aa, Helicobacter pylori
  misc_feature (B) LOCATION 1...69
  hypothetical: YES
AEGQKFSISSLRFLSLFCIVVAAVIGLCLIWSFNGWSFWEVTGLFLFYVVVCSAPTFPNIFIANILDDR

SEQ ID NO: 6004 - protein, 136 aa, Helicobacter pylori
  misc_feature (B) LOCATION 1...136
  hypothetical: YES
VFVKNLKREMEEIENSDPNQNNPLITATMGIGGAAISIFFPDTKPIVDGVKPLAEKGLQEAFRKDKLAEGQKFSISSLRFLSLFCIVVAAVIGLCLIWSFNGWSFWEVTGLFLFYVVVCSAPTFPNIFIANILDDR

SEQ ID NO: 6005 - protein, 130 aa, Helicobacter pylori
  misc_feature (B) LOCATION 1...130
  hypothetical: YES
MNLVFLWAALGGAIGSSLRYFVGKMMPSKFLMFESFPLGTFSVNLIGCFIIGFMGHLAAKKVFGDDFGIFFVTGVLGGFTTFSSYGLDTLKLLQKSQYLEAISYVLGTNLLGLIGVAIGWFLAKNFVGVN

SEQ ID NO: 6006 - protein, 130 aa, Helicobacter pylori; identical to SEQ ID NO: 6005
  misc_feature (B) LOCATION 1...130
  hypothetical: YES

SEQ ID NO: 6007 - protein, 131 aa, Helicobacter pylori
  misc_feature (B) LOCATION 1...131
  hypothetical: YES
CMNLVFLWAALGGAIGSSLRYFVGKMMPSKFLMFESFPLGTFSVNLIGCFIIGFMGHLAAKKVFGDDFGIFFVTGVLGGFTTFSSYGLDTLKLLQKSQYLEAISYVLGTNLLGLIGVAIGWFLAKNFVGVN

SEQ ID NO: 6008 - protein, 118 aa, Helicobacter pylori
  misc_feature (B) LOCATION 1...118
  hypothetical: YES
VILAFAFGMSLLGLAGMFIDIPFLSTGVHIPRKEDILWISLIGISGTLGQYFLTYAYMNAPAGIIAPIEYTRIVWGLLFGLYLGDTFLDLKSSLGVALILCSGLLIALPALLKELKKI

SEQ ID NO: 6009 - protein, 263 aa, Helicobacter pylori
  misc_feature (B) LOCATION 1...263
  hypothetical: YES
MENVFYRSITMTLLLLLIYPFKPYRLKSYKQGGFKKLAFRVVVGGLAMLAFFYNIEKISLATATAFSQCAPIYTVLLSPLLLKEKLKRSALISACIGLVGVVLISDPSVENVGLVEIIMGILSGIFVSLAYITLRDLREYYDKQAVILAFAFGMSLLGLAGMFIDIPFLSTGVHIPRKEDILWISLIGISGTLGQYFLTYAYMNAPAGIIAPIEYTRIVWGLLFGLYLGDTFLDLKSSLGVALILCSGLLIALPALLKELKKI

SEQ ID NO: 6010 - protein, 276 aa, Helicobacter pylori
  misc_feature (B) LOCATION 1...276
  hypothetical: YES
ARFVKITADYFSPMENVFYRSITMTLLLLLIYPFKPYRLKSYKQGGFKKLAFRVVVGGLAMLAFFYNIEKISLATANAFSQCAPIYTVLLSPLLLKEKLKRSALISACIGLVGVVLISDPSVENVGLVEIIMGILSGIFVSLAYITLRDLREYYDKQAVILAFAFGMSLLGLAGMFIDIPFLSTGVHIPRKEDILWISLIGISGTLGQYFLTYAYMNAPAGIIAPIEYTRIVWGLLFGLYLGDTFLDLKSSLGVALILCSGLLIALPALLKELKKI

SEQ ID NO: 6011 - protein, 298 aa, Helicobacter pylori
  misc_feature (B) LOCATION 1...298
  hypothetical: YES
MRNTILFGVSMILLANLCFGIMSAFVKITADYFSPMENVFYRSITMTLLLLLIYPFKPYRLKSYKQGGFKKLAFRVVVGGLAMLAFFYNIEKISLATATAFSQCAPIYTVLLSPLLLKEKLKRSALISACIGLVGVVLISDPSVENVGLVEIIMGILSGIFVSLAYITLRDLREYYDKQAVILAFAFGMSLLGLAGMFIDIPFLSTGVHIPRKEDILWISLIGISGTLGQYFLTYAYMNAPAGIIAPIEYTRIVWGLLFGLYLGDTFLDLKSSLGVALILCSGLLIALPALLKELKKI

SEQ ID NO: 6012 - protein, 190 aa, Helicobacter pylori
  misc_feature (B) LOCATION 1...190
  hypothetical: YES
MELILGSQSSARANLLKEHGIKFEQKALYFDEESLKTTDPREFVYLACKGKLEKAKELLANNCAIVVADSVVSVGNRMQRKAKNKREALEFLKRQNGNEIEVLTCSALISPVLEWLDLSVFRARLKAFDCSEIEKYLESGLWQGSAGCVRLEDFHKPYIKSSSKNLSVGLGLNVEGLLGALKLGVKLSLL

SEQ ID NO: 6013 - protein, 190 aa, Helicobacter pylori; identical to SEQ ID NO: 6012
  misc_feature (B) LOCATION 1...190
  hypothetical: YES

SEQ ID NO: 6014 - protein, 193 aa, Helicobacter pylori
  misc_feature (B) LOCATION 1...193
  hypothetical: YES
RDNMELILGSQSSARANLLKEHGIKFEQKALYFDEESLKTTDPREFVYLACKGKLEKAKELLANNCAIVVADSVVSVGNRMQRKAKNKREALEFLKRQNGNEIEVLTCSALISPVLEWLDLSVFRARLKAFDCSEIEKYLESGLWQGSAGCVRLEDFHKPYIKSSSKNLSVGLGLNVEGLLGALKLGVKLSLL

SEQ ID NO: 6015 - protein, 150 aa, Helicobacter pylori
  misc_feature (B) LOCATION 1...150
  hypothetical: YES
SSSQSIALLIGLWFGFQKRIALGVWFFFSILLGEFTLKSLKLLVARPRPVTNGELVFAHGFSFPSGHALASALFYGSLALLLCYSNANNRIKTIGAIILLFWIFLMAYDRVYLGVHYPSDVLGGFLLGIAWSCCSLALYLGFLKRPYKAA

SEQ ID NO: 6016 - protein, 149 aa, Helicobacter pylori
  misc_feature (B) LOCATION 1...149
  hypothetical: YES
SSQSIALLIGLWFGFQKRIALGVWFFFSILLGEFTLKSLKLLVARPRPVTNGELVFAHGFSFPSGHALASALFYGSLALLLCYSNANNRIKTIGAIILLFWIFLMAYDRVYLGVHYPSDVLGGFLLGIAWSCCSLALYLGFLKRPYKAA

SEQ ID NO: 6017 - protein, 228 aa, Helicobacter pylori
  misc_feature (B) LOCATION 1...228
  hypothetical: YES
MVFDRTTSVREKKAAKALGIVGIVFFILFGIVISGVASQKEWVQQLDLFFIDLIRNPAPIQGSTWLSFVFFSTWFAQSKLTTPIALLIGLWFGFQKRIALGVWFFFSILLGEFTLKSLKLLVARPRPVTNGELVFAHGFSFPSGHALASALFYGSLALLLCYSNANNRIKTIGAIILLFWIFLMAYDRVYLGVHYPSDVLGGFLLGIAWSCCSLALYLGFLKRPYKAA

SEQ ID NO: 6018 - protein, 183 aa, Helicobacter pylori
  misc_feature (B) LOCATION 1...183
  hypothetical: YES
MFISSSYTLSFVWLFLIFFFFKNKPLGLRFSLSLISVILSNIALKDSLSLNEFLSSFTAPLSPFSCLLILAYASFSCHILKKPPLETLQSYSVMLFFNLLLLTDILGFLPFSIYHHFMASLIFSALFCSSLFLSSPLLGVIALVALSSSLLMRSNFQILDSLLDFPLFLFVFFKTLYLAKKRL

SEQ ID NO: 6019 - protein, 183 aa, Helicobacter pylori; identical to SEQ ID NO: 6018
  misc_feature (B) LOCATION 1...183
  hypothetical: YES

SEQ ID NO: 6020 - protein, 185 aa, Helicobacter pylori
  misc_feature (B) LOCATION 1...185
  hypothetical: YES
LVMFISSSYTLSFVWLFLIFFFFKNKPLGLRFSLSLISVILSNIALKDSLSLNEFLSSFTAPLSPFSCLLILAYASFSCHILKKPPLETLQSYSVMLFFNLLLLTDILGFLPFSIYHHFMASLIFSALFCSSLFLSSPLLGVIALVALSSSLLMRSNFQILDSLLDFPLFLFVFFKTLYLAKKRL

SEQ ID NO: 6021 - protein, 107 aa, Helicobacter pylori
  misc_feature (B) LOCATION 1...107
  hypothetical: YES
MDTIKSIPIRTFILLYKSSPKCVVLASITVLFVGILXSLNILVMIKLIDIVVNLLQKHTHFEYSLLLPTLLLWGALLFLTHVFSGNFIKLANHYCRTIFYKYHHSAC

SEQ ID NO: 6022 - protein, 589 aa, Helicobacter pylori
  misc_feature (B) LOCATION 1...589
  hypothetical: YES
MDTIKSIPIRTFILLYKSSPKCVVLASITVLFVGILPSLNILVMIKLIDIVVNLLQKHTHFEYSLLLPTLLLWGALLFLTHVFSGILSSLQTIIAEQFSINIITQLANKLTQVKNLNFFENKDHTIKLNTIHNGLHIRPLNYVSNLFFNLQRIIGLISLFGILFSISIYLPFIMIFATVPCILISNHIAKKHSASIDKLQDQKESMQNYLYSGLDNQKNKDNLLFNFMLNFHHKFIETKELYLNNFVKVAQKNLIFTIYADVLITTLSIALFFLMVFIILSKLIGVGAIAGYIQAFSSTQQQLQDLSFYGKWFFAINKYFENYFCILDYKIPKPETQIKLEEKIHSITFENISFSYPNSKLIFENFNLSLHSNKIYALVGKNASGKSTLINLLLGFYTPNSGQIIINNKYPLQDLELNSYHQQMSAIFQDFSLYAGYSIDDNLFMQNNITKEQLKQKREILKSFDENFQNCLNDCNNTLFGAQYNGVDFSLGQKQRIATMRAFLKPSNCIVLDEPSSAIDPIMEKEFLDFIFKKSQSKMALIITHRMNSVKQANEIIVLDQGKLIEQGNFETLMKKQGLFCELFLKQQY

SEQ ID NO: 6023 - protein, 593 aa, Helicobacter pylori
  misc_feature (B) LOCATION 1...593
  hypothetical: YES
IRTPMDTIKSIPIRTFILLYKSSPKCVVLASITVLFVGILPSLNILVMIKLIDIVVNLLQKHTHFEYSLLLPTLLLWGALLFLTHVFSGILSSLQTIIAEQFSINIITQLANKLTQVKNLNFFENKDHTIKLNTIHNGLHIRPLNYVSNLFFNLQRIIGLISLFGILFSISIYLPFIMIFATVPCILISNHIAKKHSASIDKLQDQKESMQNYLYSGLDNQKNKDNLLFNFMLNFHHKFIETKELYLNNFVKVAQKNLIFTIYADVLITTLSIALFFLMVFIILSKLIGVGAIAGYIQAFSSTQQQLQDLSFYGKWFFAINKYFENYFCILDYKIPKPETQIKLEEKIHSITFENISFSYPNSKLIFENFNLSLHSNKIYALVGKNASGKSTLINLLLGFYTPNSGQIIINNKYPLQDLELNSYHQQMSAIFQDFSLYAGYSIDDNLFMQNNITKEQLKQKREILKSFDENFQNCLNDCNNTLFGAQYNGVDFSLGQKQRIATMRAFLKPSNCIVLDEPSSAIDPIMEKEFLDFIFKKSQSKMALIITHRMNSVKQANEIIVLDQGKLIEQGNFETLMKKQGLFCELFLKQQY

SEQ ID NO: 6024 - protein, 47 aa, Helicobacter pylori
  misc_feature (B) LOCATION 1...47
  hypothetical: YES
VVWVFVGSLFVASKLGMEFMLKEDRGRFLVWLKAKPGVSIDYMTAKE

SEQ ID NO: 6025 - protein, 53 aa, Helicobacter pylori
  misc_feature (B) LOCATION 1...53
  hypothetical: YES
VCSSAFEHVPMIGLILLIGMVGKNATLLIDVSNEERKKGLNIQEAILFAGKPV

SEQ ID NO: 6026 - protein, 62 aa, Helicobacter pylori
  misc_feature (B) LOCATION 1...62
  hypothetical: YES
SVTVLAEPNRNAGVSLGEILTQVSKNTKEWLVEGANYRFTGEADNAKESNGEFLVALATRLC

SEQ ID NO: 6027 - protein, 171 aa, Helicobacter pylori
  misc_feature (B) LOCATION 1...171
  hypothetical: YES
LFVRSSNVPDTTLNDYAKNTIRPMLQKINGVGGVQLNGFRERQIKIYADPTLMNKYNLTYADLFSTLKAENVEIDGGRIVNTQRELSILINANTYSVADVEKIQVGNHVRLGDIAKIEIRLEQNNTFAIFKDKPGVNLDIQKIAGANEIDIVDRVYQPLKHIPTIIPSYEI

SEQ ID NO: 6028 - protein, 1028 aa, Helicobacter pylori
  misc_feature (B) LOCATION 1...1028
  hypothetical: YES
MYKTAINRPITTLMFALAIVFFGVMGFKKLSVALFPKIDLPTVVVTTTYPGASAEIIESKVTDKIEEAVMGIDGIKKVTSTSSKNVSIVVIEFELEKPNEEALNDVVNKISSVRFDDSNIKKPSINKFDTDSQAIISLFVSSSSVPATTLNDYAKNTIKPMLQKINGVGGVQLNGFRERQIRIYADPTLMNKYNLTYADLFSTLKAENVEIDGGRIVNSQRELSILINANSYSVADVEKIQVGNHVRLGDIAKIEIGLEEDNTFASFKDKPGVILEIQKIAGANEIEIVDRVYEALKHIQAISPSYEIRPFLDTTSYIRTSIEDVKFDLILGAILAVLVVFAFLRSGTITLVSAISIPISIMGTFALIQWMGFSLNMLTMVALTLAIGIIIDDAIVVIENIHKKLEMGMSKRKASYEGVKEIGFALVAISAMLLSVFVPIGNMKGIIGRFFQSFGITVALAIALSYVVVVTIIPMVSSVVVNPRHSRFYMWSEPFFKALESRYTKLLQWVLNHKLIIFIAVVLVFVGSLFVASKLGMEFMLKEDRGRFLVWLKAKPGVSIDYMTQKSKIFQKAIEKHDEVEFTTLQVGYGTTQNPFKAKIFVQLKPLKERKKEHELGQFELMSALKKELKSMPEAKDLDSINLSEVALIGGGGDSSPFQTFVFSHSQEAVDKSVENLRKFLLESPELKGKVESYHTSTSESQPQLQLKILRQNANKYGVSAQTIGSVVSSAFSGTSQASVFKEDGKEYDMIIRVPDDKRVSVEDIKRLQVRNKYDKLMFLDALVEITETKSPSSISRYNRQRSVTVLAEPNRNAGVSLGEILTQVSKNTKEWLVEGANYRFTGEADNAKESNGEFLVALATAFVLIYMILAALYESILEPFIIMVTMPLSFSGAFFALGLVHQPLSMFSMIGLILLIGMVGKNATLLIDVANEERKKGLNIQEAILFAGKTRLRPILMTTIAMVCGMLPLALASGDGTAMKSPIGIAMSGGLMISMVLSLLIVPVFYRLLAPIDDKIKRFYQNQKALE

SEQ ID NO: 6029 - protein, 255 aa, Helicobacter pylori
  misc_feature (B) LOCATION 1...255
  hypothetical: YES
MGFLKVLKHDALGQVGNIVIGNFLITLTVLAVCFSSQSAEETTMLTLSYTLFFILGAFLLVAISVGAIKNLNALFSKRGVLSFSLPISLESLLLPKILLPMVFFIFSLFWFVASVRLGYYLFNAQSSVLFILHTALKTFALKPTKTIGVALFLGLVLMKFLFVLSVLNATRIKKARFLLGGLLFILVGVVLELAFNSLLPLMSSSLSINEGFYYFLQQQELQENKYYLLWGVDFLKILLLYGVIRYLLTHKLELD

SEQ ID NO: 6030 - protein, 265 aa, Helicobacter pylori
  misc_feature (B) LOCATION 1...265
  hypothetical: YES
IFYPNGYNNRMGFLKVLKHDALGQVGNIVIGNFLITLTVLAVCFSSQSAEETTMLTLSYTLFFILGAFLLVAISVGAIKNLNALFSKRGVLSFSLPISLESLLLPKILLPMVFFIFSLFWFVASVRLGYYLFNAQSSVLFILHTALKTFALKPTKTIGVALFLGLVLMKFLFVLSVLNATRIKKARFLLGGLLFILVGVVLELAFNSLLPLMSSSLSINEGFYYFLQQQELQENKYYLLWGVDFLKILLLYGVIRYLLTHKLELD

SEQ ID NO: 6031 - protein, 157 aa, Helicobacter pylori
  misc_feature (B) LOCATION 1...157
  hypothetical: YES
LASRYSVAVGNLFSEHLYDLRNETMTNLIGFLLVLASIWVFFLALGVLLGKMLVFSGLGIIDKALGFIFSCLKTFLVLSFILYALSKMDLMKDANAYLQEKXXIFPTXKXXXSKIMRLDGVKHVEKNLKDNLEEMSDEVKNKGSIDNAKESFNKGYG

SEQ ID NO: 6032 - protein, 236 aa, Helicobacter pylori
  misc_feature (B) LOCATION 1...236
  hypothetical: YES
LNYIDLALLVVVVAFGIRGFYHGFVSEIAATLGIVLGVYLASRYSVAVGNLFSEHLYDLRNETMTNLIGFLLVLASIWVFFLALGVLLGKMLVFSGLGIIDKALGFIFSCLKTFLVLSFILYALSKMDLMKDANAYLQEKSAIFPTMKSVASKIMRLDGVKHVEKNLKDNLEEMSDEVKNKGSIDNAKESFNKATDKGVEALKEKAKDLPKNMLEPKHNKPNQTPPIPTPSNKEPL

SEQ ID NO: 6033 - protein, 237 aa, Helicobacter pylori
  misc_feature (B) LOCATION 1...237
  hypothetical: YES
GLNYIDLALLVVVVAFGIRGFYHGFVSEIAATLGIVLGVYLASRYSVAVGNLFSEHLYDLRNETMTNLIGFLLVLASIWVFFLALGVLLGKMLVFSGLGIIDKALGFIFSCLKTFLVLSFILYALSKMDLMKDANAYLQEKSAIFPTMKSVASKIMRLDGVKHVEKNLKDNLEEMSDEVKNKGSIDNAKESFNKATDKGVEALKEKAKDLPKNMLEPKHNKPNQTPPIPTPSNKEPL

SEQ ID NO: 6034 - protein, 79 aa, Helicobacter pylori
  misc_feature (B) LOCATION 1...79
  hypothetical: YES
MLEKLIERVLFATRWLLAPLCIAMSLVLVVLGYVFMKELWHMLSHLNTISETDLVLSALGLVDLLVHGRACFDGAARQL

SEQ ID NO: 6035 - protein, 177 aa, Helicobacter pylori
  misc_feature (B) LOCATION 1...177
  hypothetical: YES
MLEKLIERVLFATRWLLAPLCIAMSLVLVVLGYVFMKELWHMLSHLDTISETDLVLSALGLVDLLFMAGLVLMVLLASYESFVSKLDKVDASEITWLKHTDFNALKLKVSLSIVAISAIFLLKRYMSLEDVLSSIPKDTPLSHNPIFWQVVIHLVFVCSALLTAVTNNIAFSQKERH

SEQ ID NO: 6036 - protein, 189 aa, Helicobacter pylori
  misc_feature (B) LOCATION 1...189
  hypothetical: YES
SRLQKAIIKRVEMLEKLIERVLFATRWLLAPLCIAMSLVLVVLGYVFMKELWHMLSHLDTISETDLVLSALGLVDLLFMAGLVLMVLLASYESFVSKLDKVDASEITWLKHTDFNALKLKVSLSIVAISAIFLLKRYMSLEDVLSSIPKDTPLSHNPIFWQVVIHLVFVCSALLTAVTNNIAFSQKERH

SEQ ID NO: 6037 - protein, 318 aa, Helicobacter pylori
  misc_feature (B) LOCATION 1...318
  hypothetical: YES
MLSRDIVQYSKIRTELYAYLTYLFSHNIRNHLPEITLDYLNRQISKMQAEIKMAKSFFVLDAKGMLMLKPSQFKEQGHKEGLLEHDLTEGIELESHVSFSDKYYFYQAVNEKRCILTDPYPSKKGNHLVVSASYPVYDQNNDLAFVVCLQIPLRVAIEISSPSKYFKTFSEGSMVMYFMISIMLTLVSLLLFVKCISSFWTAIVHFSSFDIKEVFHPIVLLTLALATFDLVKAIFEEEVLGKNSGDNHHAIHRTMIRFLGSIIIALAIEALMLVFKFSVSEPDKITYAVYLAIGVAVLLISLAIYVKFAYSVLPKRER

SEQ ID NO: 6038 - protein, 319 aa, Helicobacter pylori
  misc_feature (B) LOCATION 1...319
  hypothetical: YES
VMLSRDIVQYSKIRTELYAYLTYLFSHNIRNHLPEITLDYLNRQISKMQAEIKMAKSFFVLDAKGMLMLKPSQFKEQGHKEGLLEHDLTEGIELESHVSFSDKYYFYQAVNEKRCILTDPYPSKKGNHLVVSASYPVYDQNNDLAFVVCLQIPLRVAIEISSPSKYFKTFSEGSMVMYFMISIMLTLVSLLLFVKCISSFWTAIVHFSSFDIKEVFHPIVLLTLALATFDLVKAIFEEEVLGKNSGDNHHAIHRTMIRFLGSIIIALAIEALMLVFKFSVSEPDKITYAVYLAIGVAVLLISLAIYVKFAYSVLPKRER

SEQ ID NO: 6039 - protein, 325 aa, Helicobacter pylori
  misc_feature (B) LOCATION 1...325
  hypothetical: YES
IFFKGLVMLSRDIVQYSKIRTELYAYLTYLFSHNIRNHLPEITLDYLNRQISKMQAEIKMAKSFFVLDAKGMLMLKPSQFKEQGHKEGLLEHDLTEGIELESHVSFSDKYYFYQAVNEKRCILTDPYPSKKGNHLVVSASYPVYDQNNDLAFVVCLQIPLRVAIEISSPSKYFKTFSEGSMVMYFMISIMLTLVSLLLFVKCISSFWTAIVHFSSFDIKEVFHPIVLLTLALATFDLVKAIFEEEVLGKNSGDNHHAIHRTMIRFLGSIIIALAIEALMLVFKFSVSEPDKITYAVYLAIGVAVLLISLAIYVKFAYSVLPKRER

SEQ ID NO: 6040 - protein, 197 aa, Helicobacter pylori
  misc_feature (B) LOCATION 1...197
  hypothetical: YES
MKGLWLVISLVFVGFLWANESYVFNNSKGRLTEKSVAFIEGVSKELYLKTGVRFAIDMTDFEKNPIALANKKERQSYQEGFLKQLKPPFVVFFFYHDAQKIELVANPKDLLDTDKIFFEKIAPLLPTNAKEYTPQRISAMLINGYSVAVDALAEKYHVNITQNFSAPKGVTFVKVVIYILLLTLLGAFLGLYFFKKS

SEQ ID NO: 6041 - protein, 197 aa, Helicobacter pylori; identical to SEQ ID NO: 6040
  misc_feature (B) LOCATION 1...197
  hypothetical: YES

SEQ ID NO: 6042 - protein, 198 aa, Helicobacter pylori
  misc_feature (B) LOCATION 1...198
  hypothetical: YES
HMKGLWLVISLVFVGFLWANESYVFNNSKGRLTEKSVAFIEGVSKELYLKTGVRFAIDMTDFEKNPIALANKKERQSYQEGFLKQLKPPFVVFFFYHDAQKIELVANPKDLLDTDKIFFEKIAPLLPTNAKEYTPQRISAMLINGYSVAVDALAEKYHVNITQNFSAPKGVTFVKVVIYILLLTLLGAFLGLYFFKKS

SEQ ID NO: 6043 - protein, 235 aa, Helicobacter pylori
  misc_feature (B) LOCATION 1...235
  hypothetical: YES
KRLMVLFLSIFKKSFNDFLSARMLLINLGPILLSLAFFGAIFYYNGGSIVNYCQTLLPQSLNDYAHSQGFFAGVFAWVFKALVYFLIFWIVILLSLVINIFASIFYTPLVVSYLHQKYYPHVVLEEFGSILFSIKYFLKSLTFMLLFLAVLTPLYFIPFIGVFGVFFSIVPHFLFFKNTMSLDIASMIFNHQSYQNLLKQHRLKHYRFSFFCYLFSLIPFFNFFATLLQTLMLTH

SEQ ID NO: 6044 - protein, 240 aa, Helicobacter pylori
  misc_feature (B) LOCATION 1...240
  hypothetical: YES
LFLSIFKKSFNDFLSARMLLINLGPILLSLAFFGAIFYYNGGSIVNYCQTLLPQSLNDYAHSQGFFAGVFAWVFKALVYFLIFWIVILLSLVINIFASIFYTPLVVSYLHQKYYPHVVLEEFGSILFSIKYFLKSLTFMLLFLAVLTPLYFIPFIGVFGVFFSIVPHFLFFKNTMSLDIASMIFNHQSYQNLLKQHRLKHYRFSFFCYLFSLIPFFNFFATLLQTLMLTHYFFIFKEKEC

SEQ ID NO: 6045 - protein, 242 aa, Helicobacter pylori
  misc_feature (B) LOCATION 1...242
  hypothetical: YES
MVLFLSIFKKSFNDFLSARMLLINLGPILLSLAFFGAIFYYNGGSIVNYCQTLLPQSLNDYAHSQGFFAGVFAWVFKALVYFLIFWIVILLSLVINIFASIFYTPLVVSYLHQKYYPHVVLEEFGSILFSIKYFLKSLTFMLLFLAVLTPLYFIPFIGVFGVFFSIVPHFLFFKNTMSLDIASMIFNHQSYQNLLKQHRLKHYRFSFFCYLFSLIPFFNFFATLLQTLMLTHYFFIFKEKEC

SEQ ID NO: 6046 - protein, 242 aa, Helicobacter pylori
  misc_feature (B) LOCATION 1...242
  hypothetical: YES
MVLFLSIFKKSFNDFLSARMLLINLGPILLSLAFFGAIFYYNGGSIVNYCQTLLPQSLNDYAHSQGFFAGVFAWVFKALVYFLIFWIVILLSLVINIFASIFYTPLVVSYLHQKYYPHVVLEEFGSILFSIKYFLKSLTFMLLFLAVLTPLYFIPFIGVFGVFFSIVPHFHFFKNTMSLDIASMIFNHQSYQNLLKQHRLKHYRFSFFCYLFSLIPFFNFFATLLQTLKLTHYIFIFKEKEC

SEQ ID NO: 6047 - protein, 103 aa, Helicobacter pylori
  misc_feature (B) LOCATION 1...103
  hypothetical: YES
LNLLAVHYSMRPADDDHRYGHGKAEALAGMAQAMFIGASAVLVAIQAVEQLRDPQPLGAATWGIAVMLLSLLLTALLLAFQTHVIRRTGTTAIRADSRTTGRT

SEQ ID NO: 6048 - protein, 167 aa, Helicobacter pylori
  misc_feature (B) LOCATION 1...167
  hypothetical: YES
MSPDSPHARVRRLATLASLGVAVTMVIGKAIAWWLSKTVSLLAGLTDSLLDSAASLLNLLAVHYSMRPADDDHRYGHGKAEALAGMAQAMFIGASAVLVAIQAVEQLRDPQPLGAATWGIAVMLLSLLLTALLLAFQTHVIRRTGSTAIRADSLHYRSDLLLNASIL

SEQ ID NO: 6049 - protein, 70 aa, Helicobacter pylori
  misc_feature (B) LOCATION 1...70
  hypothetical: YES
GGGFEVPGEYVSILKRDFYAMLLTMPFIAAIHEISAYCGHPSNFLVEGLVMLGLVCVFGICSRLCAKLGW

SEQ ID NO: 6050 - protein, 146 aa, Helicobacter pylori
  misc_feature (B) LOCATION 1...146
  hypothetical: YES
VALVYTICISINARIFYDIDGSASDSIFDPKNSYYMWLVGLIAALLSNLLFDPRGRDCYKSFQVRFPKFLKAIFKARFFGAFYDAVLGSRLRDFYVMLLTMPFIAAIHEISAYCGHPSNFLVEGLVMLGLVCVFGICSRLCAKLGW

SEQ ID NO: 6051 - protein, 161 aa, Helicobacter pylori
  misc_feature (B) LOCATION 1...161
  hypothetical: YES
MNIKKRLSDWEYQWAVALVYTICISINARIFYDIDGSASDSIFDPKNSYYMWLVGLIAALLSNLLFDPRGRDCYKSFQVRYPRFLKAIFKARFFGAFYNAVLGSRLRDFYVMLLTMPFIAAIHEISAYCGHPSNFLVEGLVMLGLVCVFGICSRLCAKLGW

SEQ ID NO: 6052 - protein, 116 aa, Helicobacter pylori
  misc_feature (B) LOCATION 1...116
  hypothetical: YES
VPAVGGALIWXXIXIYELYHGXVNEXIFXVLYSILLIGVLIDSVIKPILIVFIKKRIFKTTLKINEILIFFSMIAGISQFGFWGIIVGPTITAFFIALLRLYENYFIQKEQKTCEC

SEQ ID NO: 6053 - protein, 349 aa, Helicobacter pylori
  misc_feature (B) LOCATION 1...349
  hypothetical: YES
MKAQYFFWILFLIGFYWMLYLYQDFLMDALIAGLLCVGLFQVKVFLNKRFSNVISSFLCVLVLASVVIVPLYFIVYKGSNVIFEINFEKLSALIKWLKGTITENLSHFPAIHDGVSKFLENFSAASITGYLLKVSSYIGKYSLKLVTDALFILGLLFFFFYYGEKFYRYFLGVLPLEMNQSKKIFEEVAGILRIVLLTSLITVILEGVAFGTMIIWFGHDGWSLGILYGLASLVPAVGGALIWIPIAIYELYHGHVNEAIFIVLYSILLIGVLIDSVIKPILIVFIKKRIFKTTLKINEILIFFSMIAGISQFGFWGIIVGPTITAFFIALLRLYENYFIQKEQKTCEC

SEQ ID NO: 6054 - protein, 359 aa, Helicobacter pylori
  misc_feature (B) LOCATION 1...359
  hypothetical: YES
FLVQFNGDNCMKAQYFFWILFLIGFYWMLYLYQDFLMDALIAGLLCVGLFQVKVFLNKRFSNVISSFLCVLVLASVVIVPLYFIVYKGSNVIFEINFEKLSALIKWLKGTITENLSHFPAIHDGVSKFLENFSAASITGYLLKVSSYIGKYSLKLVTDALFILGLLFFFFYYGEKFYRYFLGVLPLEMNQSKKIFEEVAGILRIVLLTSLITVILEGVAFGTMIIWFGHDGWSLGILYGLASLVPAVGGALIWIPIAIYELYHGHVNEAIFIVLYSILLIGVLIDSVIKPILIVFIKKRIFKTTLKINEILIFFSMIAGISQFGFWGIIVGPTITAFFIALLRLYENYFIQKEQKTCEC

SEQ ID NO: 6055 - protein, 88 aa, Helicobacter pylori
  misc_feature (B) LOCATION 1...88
  hypothetical: YES
VGVLSLKIEAISNFYGLCVLGVLLACFYLLDAYYLMQERLFREQYQWLIKNRLKTDERLFEVFPIHQTCQSTQFLSPCVRLVFSPIGR

SEQ ID NO: 6056 - protein, 141 aa, Helicobacter pylori
  misc_feature (B) LOCATION 1...141
  hypothetical: YES
MENTPKDRARILIEELKILQGVINRMAQNSLECKKWTLALAVGVLSLKIEAISNFYGLCVLGVLLACFYLLDAYYLMQERLFREQYQWLIKNRLKTDERLFEVFPIHQTCQSTQFLSAMRSFSLFPYWALGLCLVGYGFCC

SEQ ID NO: 6057 - protein, 144 aa, Helicobacter pylori
  misc_feature (B) LOCATION 1...144
  hypothetical: YES
ISNMENTPKDRARILIEELKILQGVINRMAQNSLECKKWTLALAVGVLSLKIEAISNFYGLCVLGVLLACFYLLDAYYLMQERLFREQYQWLIKNRLKTDERLFEVFPIHQTCQSTQFLSAMRSFSLFPYWALGLCLVGYGFCC

SEQ ID NO: 6058 - protein, 171 aa, Helicobacter pylori
  misc_feature (B) LOCATION 1...171
  hypothetical: YES
MKIFGTDGVRGKAGVKLTPMFVMRLGIAAGLYFKKHSQTNKILIGKDTRKSGYMVENALVSALTSIGYNVIQIGPMPTPAIAFLTEDMRCDAGIMISASHNPFEDNGIKFFNSYGYKLKEEEERAIEEIFHDEELLHSSYKVGESVGSAKRIDDVIGPLYRAFEALYTQTF

SEQ ID NO: 6059 - protein, 445 aa, Helicobacter pylori
  misc_feature (B) LOCATION 1...445
  hypothetical: YES
MKIFGTDGVRGKAGVKLTPMFVMRLGIAAGLYFKKHSQTNKILIGKDTRKSGYMVENALVSALTSIGYNVIQIGPMPTPAIAFLTEDMRCDAGIMISASHNPFEDNGIKFFNSYGYKLKEEEERAIEEIFHDEELLHSSYKVGESVGSAKRIDDVIGRYIAHLKHSFPKHLNLQKLRIVLDTANGAAYKVAPVVFSELGADVLVINDEPNGCNINEQCGALHPNQLSQEVKKYRADLGFAFDGDADRLVVADNLGNIVHGDKLLGVLGVYQKSKNALSSQAVVATSMSNLALKEYLKSQDLELKHCAIGDKFVSECMRLNKANFGGEQSGHIIFSDYAKTGDGLVCALQVSALVLESKLVSSIALNPFELYPQSLVNLNIQKKPPLESLKGYSALLKELDQLEIRHLIRYSGTENKLRILLEAKDEKLLESKMQELKEFFEGQLC

SEQ ID NO: 6060 - protein, 445 aa, Helicobacter pylori
  misc_feature (B) LOCATION 1...445
  hypothetical: YES
MKIFGTDGVRGKAGVKLTPMFVMRLGIAAGLYFKKHSQTNKILIGKDTRKSGYMVENALVSALTSIGYNVIQIGPMPTPAIAFLTEDMRCDAGIMISASHNPFEDNGIKFFNSYGYKLKEEEERAIEEIFHDEELLHSSYKVGESVGSAKRIDDVIGRYIAHLKHSFPKHLNLQKLRIVLDTANGAAYKVAPVVFSELGADVLVINDEPNGCNINEQCGALHPNQLSQEVKKYRADLGFAFDGDADRLVVVDNLGNIVHGDKLLGVLGVYQKSKNALSSQAVVATSMSNLALKEYLKSQDLELKHCAIGDKFVSECMRLNKANFGGEQSGHIIFSDYAKTGDGLVCALQVSALVLESKLVSSIALNPFELYPQSLVNLNIQKKPPLESLKGYSALLKELDQLEIRHLIRYSGTENKLRILLEAKDEKLLESKMQELKEFFEGQLC

SEQ ID NO: 6061 - protein, 452 aa, Helicobacter pylori
  misc_feature (B) LOCATION 1...452
  hypothetical: YES
FKRYFITMKIFGTDGVRGKAGVKLTPMFVMRLGIAAGLYFKKHSQTNKILIGKDTRKSGYMVENALVSALTSIGYNVIQIGPMPTPAIAFLTEDMRCDAGIMISASHNPFEDNGIKFFNSYGYKLKEEEERAIEEIFHDEELLHSSYKVGESVGSAKRIDDVIGRYIAHLKHSFPKHLNLQKLRIVLDTANGAAYKVAPVVFSELGADVLVINDEPNGCNINEQCGALHPNQLSQEVKKYRADIGFAFDGDADRLVVADNLGNIVHGDKLLGVLGVYQKSKNALSSQAVVATSMSNLALKEYLKSQDLELKHCAIGDKFVSECMRLNKANFGGEQSGHIIFSDYAKTGDGLVCALQVSALVLESKLVSSIALNPFELYPQSLVNLNIQKKPPLESLKGYSALLKELDQLEIRHLIRYSGTENKLRILLEAKDEKLLESKMQELKEFFEGQLC

SEQ ID NO: 6062 - protein, 315 aa, Helicobacter pylori
  misc_feature (B) LOCATION 1...315
  hypothetical: YES
KTMSMEFDAVIIGGGVSGCATFYTLSEYSSLKRVAIVEKCSKLAQISSSAKANSQTIHDGSIETNYTPEKAKKVRLSAYKTRQYALNKGLQNEVIFETQKMAIGVGDEECEFMKKRYESFKEIFVGLEEFDKQKIKELEPNVILGANGIDRHENIIGHGYRKDWSTMNFAKLSENFVEEALKLKPNNQVFLNFKVKKIEKRNDTYAVISEDAEEVYAKFVLVNAGSYALLAQSMGYGLDLGCLPVAGSFYFVPDLLRGKVYTVQNPKLPFAAVHGDPDAVIKGKTRIGPTALTMPKLERNKCWLKGISLELLKWI

SEQ ID NO: 6063 - protein, 450 aa, Helicobacter pylori
  misc_feature (B) LOCATION 1...450
  hypothetical: YES
MSMEFDAVIIGGGVSGCATFYTLSEYSSLKRVAIVEKCSKLAQISSSAKANSQTIHDGSIETNYTPEKAKKVRLSAYKTRQYALNKGLQNEVIFETQKMAIGVGDEECEFMKKRYESFKEIFVGLEEFDKQKIKELEPNVILGANGIDRHENIIGHGYRKDWSTMNFAKLSENFVEEALKLKPNNQVFLNFKVKKIEKRNDTYAVISEDAEEVYAKFVLVNAGSYALPLAQSMGYGLDLGCLPVAGSFYFVPDLLRGKVYTVQNPKLPFAAVHGDPDAVIKGKTRIGPTALTMPKLERNKCWLKGISLELLKMDLNRDVFKIAFDLMSDKEIRNYVFKNMVFELPIIGKRKFLKDAQKIIPTLSLEDLEYAHGFGEVRPQVLDRTKRKLELGEKKICTHKGITFNMTPSPGATSCLQNALVDSQEIAAYLGESFELERFYKDLSPEELEN

SEQ ID NO: 6064 - protein, 116 aa, Helicobacter pylori
  misc_feature (B) LOCATION 1...116
  hypothetical: YES
VMNFFVGGLSIVCNVVVITYSALHPTAPVEGAEDIVQVSHHLTSFYGPATGLLFGFTYLYAAINHTFGLDWRPYSWYSLFVAINTVPAAILSHYSDMLDDHKVLGITEGDWWAIIX

SEQ ID NO: 6065 - protein, 195 aa, Helicobacter pylori
  misc_feature (B) LOCATION 1...195
  hypothetical: YES
MLGLVLLYVGIVLISNGICGLTKVDPKSTAVMNFFVGGLSIVCNVVVITYSALHPTAPVEGAEDIVQVSHHLTSFYGPATGLLFGFTYLYAAINHTFGLDWRPYSWYSLFVAINTVPAAILSHYSDMLDDHKVLGITEGDWWAIIWLAWGVLWLTAFIENILKIPLGKFTPWLAIIEGILTAWIPAWLLFIQHWV

SEQ ID NO: 6066 - protein, 196 aa, Helicobacter pylori
  misc_feature (B) LOCATION 1...196
  hypothetical: YES
GNARTCIVICWDCLNQQWDCGLTKVDPKSTAVMNFFVGGLSIVCNVVVITYSALHPTAPVEGAEDIVQVSHHLTSFYGPATGLLFGFTYLYAAINHTFGLDWRPYSWYSLFVAINTVPAAILSHYSDMLDDHKVLGITEGDWWAIIWLAWGVLWLTAFIENILKIPLGKFTPWLAIIEGILTAWIPAWLLFIQHWV

SEQ ID NO: 6067 - protein, 115 aa, Helicobacter pylori
  misc_feature (B) LOCATION 1...115
  hypothetical: YES
MKFFTRITDSYKKVVVTLGLVVTTNPLMAVTSPATGVTETKSLVIQIISVLAIVGGCALGVKGIADIWKISDDIKRGQATVFAYAQPIAMLAVAGGIIYLSTKFGFNIGESGGAS

SEQ ID NO: 6068 - protein, 115 aa, Helicobacter pylori; identical to SEQ ID NO: 6067
  misc_feature (B) LOCATION 1...115
  hypothetical: YES

SEQ ID NO: 6069 - protein, 122 aa, Helicobacter pylori
  misc_feature (B) LOCATION 1...122
  hypothetical: YES
FQFERKRMKFFTRITDSYKKVVVTLGLVVTTNPLMAVTSPATGVTETKSLVIQIISVLAIVGGCALGVKGIADIWKISDDIKRGQATVFAYAQPIAMLAVAGGIIYLSTKFGFNIGESGGAS

SEQ ID NO: 6070 - protein, 159 aa, Helicobacter pylori
  misc_feature (B) LOCATION 1...159
  hypothetical: YES
QWLQAGGDLDSYTFSGVLLENTDKKIEKIEDKDAKEIKRFSNTLFLSSVDRYFTTLLFTKDPQGFEALIDSEIGTKNPLGFISLKNEANLHGYIGPKDYRSLKAISPMLTDVIEYGLITFFAKGVFVLLDYLYQFVGNWGLGYHSFNDYRAHYPLPLKL

SEQ ID NO: 6071 - protein, 158 aa, Helicobacter pylori
  misc_feature (B) LOCATION 1...158
  hypothetical: YES
WLQAGGDLDSYTFSGVLLENTDKKIEKIEDKDAKEIKRFSNTLFLSSVDRYFTTLLFTKDPQGFEALIDSEIGTKNPLGFISLKNEANLHGYIGPKDYRSLKAISPMLTDVIEYGLITFFAKGVFVLLDYLYQFVGNWGLGYHSFNDYRAHYPLPLKL

SEQ ID NO: 6072 - protein, 170 aa, Helicobacter pylori
  misc_feature (B) LOCATION 1...170
  hypothetical: YES
SMQKLKELAPKMKELQEKYKGEPQKLQAHMMQLYKKHGANPLGGCLPLILQIPVFFAIYRVLYNAVELKSSEWVLWIHDLSIMDPYFILPLLMGASMYWHQSVTPNTMTDPMQAKIFKLLPLLFTIFLITFPAGLVLYWTTHNILSVLQQLIINKVLENKKRAHAQNIKE

SEQ ID NO: 6073 - protein, 197 aa, Helicobacter pylori
  misc_feature (B) LOCATION 1...197
  hypothetical: YES
MDKNNNNNLRLILAIALSFLFIALYSYFFQEPNKTTTETTKQETTNNHTATSPTASNTITQDFSVTQTIPQESLLSTISFEHAKIEIDSLGRIKQVYLKDKKYLTPKEKGFLEHVSHLFSSKENSQPSLKELPLLAADKLKPLEVRFLDPTLNNKAFNTPYSASKTTLGPNEQLVLTQDLGTLSIIKTLTFYDDLHY

SEQ ID NO: 6074 - protein, 201 aa, Helicobacter pylori
  misc_feature (B) LOCATION 1...201
  hypothetical: YES
GLITMDKNNNNNLRLILAIALSFLLIALNSYFFQEPNKTTTETTKQETTNNHTATSPTASNTITQDFSVTQTIPQESLLSTISFEHAKIEIDSLGRIKQVYLKDKKYLTPKEKGFLEHVSHLFSSKENSQPSLKELPLLAADKLKPLEVRFLDPTLNNKAFNTPYSASKTTLGPNEQLVLTQDLGTLSIIKTLTFYDDLHY

SEQ ID NO: 6075 - protein, 358 aa, Helicobacter pylori
  misc_feature (B) LOCATION 1...358
  hypothetical: YES
MMICIIDLKIAFKSPNNLIPSYVITNGYRPVADLDSYTFSGVLLENTDKKIEKIEDKDAKEIKRFSNTLFLSSVDRYFTTLLFTKDPQGFEALIDSEIGTKNPLGFISLKNEANLHGYIGPKDYRSLKAISPMLTDVIEYGLITFFAKGVFVLLDYLYQFVGNWGWAIILLTIIVRIILYPLSYKGMVSMQKLKELAPKMKELQEKYKGEPQKLQAHMMQLYKKHGANPLGGCLPLILQIPVFFAIYRVLYNAVELKSSEWVLWIHDLSIMDPYFILPLLMGASMYWHQSVTPNTMTDPMQAKIFKLLPLLFTIFLITFPAGLVLYWTTHNILSVLQQLIINKVLENKKRAHAQNIKE

SEQ ID NO: 6076 - protein, 549 aa, Helicobacter pylori
  misc_feature (B) LOCATION 1...549
  hypothetical: YES
MDKNNNNNLRLILAIALSFLFIALYSYFFQEPNKTTTETTKQETTNNHTATSPTASNTITQDFSVTQTIPQESLLSTISFEHAKIEIDSLGRIKQVYLKDKKYLTPKEKGFLEHVSHLFSSKENSQPSLKELPLLAADKLKPLEVRFLDPTLNNKAFNTPYSASKTTLGPNEQLVLTQDLGTLSIIKTLTFYDDLHYDLKIAFKSPNNLIPSYVITNGYRPVADLDSYTFSGVLLENTDKKIEKIEDKDAKEIKRFSNTLFLSSVDRYFTTLLFTKDPQGFEALIDSEIGTKNPLGFISLKNEANLHGYIGPKDYRSLKAISPMLTDVIEYGLITFFAKGVFVLLDYLYQFVGNWGWAIILLTIIVRIILYPLSYKGMVSMQKLKELAPKMKELQEKYKGEPQKLQAHMMQLYKKHGANPLGGCLPLILQIPVFFAIYRVLYNAVELKSSEWVLWIHDLSIMDPYFILPLLMGASMYWHQSVTPNTMTDPMQAKIFKLLPLLFTIFLITFPAGLVLYWTTHNILSVLQQLIINKVLENKKRAHAQNIKE

SEQ ID NO: 6077 - protein, 549 aa, Helicobacter pylori; identical to SEQ ID NO: 6076
  misc_feature (B) LOCATION 1...549
  hypothetical: YES

SEQ ID NO: 6078 - protein, 130 aa, Helicobacter pylori
  misc_feature (B) LOCATION 1...130
  hypothetical: YES
MKKIILACLVAFVGANLSAEPKWYSKAYNKTNAQKGYLYGSGSATSKEASKQKALADLVASISVVVNSQIHIQKSRVDNKLKSSDSQTINLKTDDLELNNVEIVNQEAQKGIYYTRVRNQSKLVFAGFKG

SEQ ID NO: 6079 - protein, 303 aa, Helicobacter pylori
  misc_feature (B) LOCATION 1...303
  hypothetical: YES
MKKIILACLVAFVGANLSAEPKWYSKAYNKTNAQKGYLYGSGSATSKEASKQKALADLVASISVVVNSQIHIQKSRVDNKLKSSDSQTINLKTDDLELNNVEIVNQEAQKGIYYTRVRINQNLFLQGLRDKYNALYGQFSTLMPKVCKGVFLQQSKSMGDLLAKAAPMERILKAYSVPVSSLENYEKIYYQNAFKPKVRIAFDDNSDTEIKNALMSAYARVLTPSDEEKLYQIKNEVFTDSANGITRIRVIISASDCQGTPVLNRSLEVDEKNKNFAITRLQSLLYKELKGYANKEGQGNTGL

SEQ ID NO: 6080 - protein, 306 aa, Helicobacter pylori
  misc_feature (B) LOCATION 1...306
  hypothetical: YES
GLIMKKIILACLVAFVGANLSAEPKWYSKAYNKTNAQKGYLYGSGSATSKEASKQKALADLVASISVVVNSQIHIQKSRVDNKLKSSDSQTINLKTDDLELNNVEIVNQEAQKGIYYTRVRINQNLFLQGLRDKYNALYGQFSTLMPKVCKGVFYKQSKSMGDLLAKAAPMERILKAYSVPVSSLENYEKIYYQNAFKPKVRIAFDDNSDTEIKNALMSAYARVLTPSDEEKLYQIKNEVFTDSANGITRIRVIISASDCQGTPVLNRSLEVDEKNKNFAITRLQSLLYKELKGYANKEGQGNTGL

SEQ ID NO: 6081 - protein, 115 aa, Helicobacter pylori
  misc_feature (B) LOCATION 1...115
  hypothetical: YES
IVSQRMKSNFQYSTLENIPKAFDILKDPPKKLYCVGDIKLLEAPLKVAIIGTRRPTPYSKQHTITLARELAKNGAVIVSGGALGVDIIAQENALPKTIMLSLAVWILSIPRTTIK

SEQ ID NO: 6082 - protein, 137 aa, Helicobacter pylori
  misc_feature (B) LOCATION 1...137
  hypothetical: YES
MPIKGSFLARNRLVIALTDAVIIPQADLKSGSMSSARLAQKYQKPLFVLPQRLNESDGTNELLEKGQAQGIFNIQNFINTLLKDYHLKEMPEMKDEFLEYCAKNPSYEEAYLKFGDKLLEYELLGKIKRINHLVVLA

SEQ ID NO: 6083 - protein, 199 aa, Helicobacter pylori
  misc_feature (B) LOCATION 1...199
  hypothetical: YES
KWCGYCERRSVRRGYYRSRKRLTKNHHAFACSLDFIYPTNNHKVIQEIAQNGLILSEHEKDFMFIKGFFLVRNCLVIALTDAVIIPQADLKSGSMSSVRLAQKYQKPLFVLPQRLNESDGTNELLEKGQAQGIFNIQNFINTLLKDYHLKEMPEMKDEFLEYCAKNPSYEEAYLKFGDKLLEYELLGKIKRINHLVVLA

SEQ ID NO: 6084 - protein, 254 aa, Helicobacter pylori
  misc_feature (B) LOCATION 1...254
  hypothetical: YES
MKSNFQYSTLENIPKAFDILKDPPKKLYCVGDIKLLEAPLKVAIIGTRRPTPYSKQHTITLARELAKNGAVIVSGGALGVDIIAQENALPKTIMLSPCSLDFIYPTNNHKVIQEIAQNGLILSEYEKDFMPIKGSFLARNRLVIALSDAVIIPQADLKSGSMSSARLAQKYQKPLFVLPQRLNESDGTNELLEKGQAQGIFNIQNFINTLLKDYHLKEMPEMKDEFLEYCAKNPSYEEAYLKFGDKLLEYRAVG

SEQ ID NO: 6085 - protein, 154 aa, Helicobacter pylori
  misc_feature (B) LOCATION 1...154
  hypothetical: YES
VIVAWLFRFKSIAFSILITLLVILVDIWVYSDVRQFLLDTSSSFIWLLIALLIKWGVIVISARKCYQFSQKMFALIQRKRQIRENLKNRSNRKDAKNFEKLSNIAEEIISKKQEESHHKEDSNDENHKDKLSNITEEMILKKQEELKARKDKGD

SEQ ID NO: 6086 - protein, 186 aa, Helicobacter pylori
  misc_feature (B) LOCATION 1...186
  hypothetical: YES
MNKKNSVISGLMNFFSEKNERWLLAHRHTRGFVIVAWLFRFKSIAFSILITLLVILVDIWVYSDVRQFLLDTSSSFIWLLIALLIKWGVIVISARKCYQFSQKMFALIQRKRQIRENLKNRSNRKDAKNFEKLSNIAEEIISKKQEESHHKEDSNDENHKDKLSNITEEMILKKQEELKARKDKGD

SEQ ID NO: 6087 - protein, 194 aa, Helicobacter pylori
  misc_feature (B) LOCATION 1...194
  hypothetical: YES
RSLGKGRPMNKKNSVISGLMNFFSEKNERWLLAHRHTRGFVIVAWLFRFKSIAFSILITLLVILVDIWVYSDVRQFLLDTSSSFIWLLIALLIKWGVIVISARKCYQFSQKMFALIQRKRQIRENLKNRSNRKDAKNFEKLSNIAEEIISKKQEESHHKEDSNDENHKDKLSNITEEMILKKQEELKARKDKGD

SEQ ID NO: 6088 - protein, 283 aa, Helicobacter pylori
  misc_feature (B) LOCATION 1...283
  hypothetical: YES
SRIKSHDRRERIKMSKIAKTAIISPKAEIGKGVEIGEFCVIGDGVKLDEGVKLHNNVTLQGHTFIGKNTEIFPFAVLGTQPQDLKYKGEYSELMVGEDNLIREFCMINPGTEGGIKKTLIGDKNLLMAYVHVAHDCVIGSHCILANGVTLAGHIEIGDYVNIGGLTAIHQFVRIAKGCMIAGKSALGKDVPPYCTVEGNRAFIRGLNRHRMRQLLESKDIDFIHALYKRLFRPIPSLRESAKLELEEHANNPFVKEICSFILESSRGVAYKSSEYSSEEKQEE

SEQ ID NO: 6089 - protein, 191 aa, Helicobacter pylori
  misc_feature (B) LOCATION 1...191
  hypothetical: YES
MIFPERFQNAFLGLSELFYYASSLSFYTILSLSPILLFVFSLFVSHYLQAHSGEMEALIFPNAPKLIGAIKDFLENFKKTDMTLGTLEEVSIVVALVLFCENYRSIASKIFDAKPRDYAHFKGKEIFLFWGFGTTLVFLFALPLVVFFDIKIQVFFEDKDSSLLHVLRWIGTYAFFLILFTIPTNKVFKLK

SEQ ID NO: 6090 - protein, 272 aa, Helicobacter pylori
  misc_feature (B) LOCATION 1...272
  hypothetical: YES
KRYRKTALLRLDNGDKLSLMREFFKSVRGFLNLLRMIFPERFQNAFLGLSELFYYASSLSFYTILSLSPILLFVFSLFVSHYLQAHSGEMEALIFPNAPKLIGAIKDFLENFKKTDMTLGTLEEVSIVVALVLFCENYRSIASKIFDAKPRDYAHFKGKEIFLFWGFGTTLVFLFALPLVVFFDIKIQVFFEDKDSSLLHVLRWIGTYAFFLILFTIPTNKVFKHYFWVFLWVFFTSVSWHVLKWASTLFMCYTNPHLLMSLYGSRFPFCGF

SEQ ID NO: 6091 - protein, 292 aa, Helicobacter pylori
  misc_feature (B) LOCATION 1...292
  hypothetical: YES
MREFFKSVRGFLNLLRMIFPERFQNAFLGLSELFYYASSLSFYTILSLSPILLFVFSLFVSHYLQAHSGEMEALIFPNAPKLIGAIKDFLENFKKTDMTLGTLEEVSIVVALVLFCENYRSIASKIFDAKPRDYAHFKGKEIFLFWGFGTTLVFLFALPLVVFFDIKIQVFFEDKDSSLLHVLRWIGTYAFFLILFTIPTNKVFKHYFWVFLWVFFTSVSWHVLKWAFTYYVLYNRTYHELYGSVSILWFLMSWVYVSWLVILIGMYGCKMCDTYDPKGVFKKFLGFFKKET

SEQ ID NO: 6092 - protein, 174 aa, Helicobacter pylori
  misc_feature (B) LOCATION 1...174
  hypothetical: YES
MAEEQENTAQQPQKKSKALLFVIIGSVLVMLLLVGVIIMLLMGNKEESKENASKNTQEVQANPMANKNQEAKEGSNIQQYLVLGPLYAIDAPFAVNLVSQNGRRYLKASISLELSNEKLLNEVKVKDTAIKDTIIEILSSKSVEEVVTNKGKNKLKDEIKSHLNSFLIDGFIKN

SEQ ID NO: 6093 - protein, 183 aa, Helicobacter pylori
  misc_feature (B) LOCATION 1...183
  hypothetical: YES
MAEEQENTAQQPQKKSKALLFVIIGSVLVMLLLVGVIIMLLMGNKEESKENASKNTQEVQANPMANKNQEAKEGSNIQQYLVLGPLYAIDAPFAVNLVSQNGRRYLKASISLELSNEKLLNEVKVKDTAIKDTIIEILSSKSVEEVVTNKGKNKLKDEIKSHLNSFLIDGFIKNVFFTDFIIQ

SEQ ID NO: 6094 - protein, 209 aa, Helicobacter pylori
  misc_feature (B) LOCATION 1...209
  hypothetical: YES
KSRNFSYNQTEKIWENHFNLFSVGIGMAEEQENTAQQPQKKSKALLFVIIGSVLVMLLLVGVIIMLLMGNKEESKENASKNTQEVQANPMANKNQEAKEGSNIQQYLVLGPLYAIDAPFAVNLVSQNGRRYLKASISLELSNEKLLNEVKVKDTAIKDTIIEILSSKSVEEVVTNKGKNKLKDEIKSHLNSFLIDGFIKNVFFTDFIIQ

SEQ ID NO: 6095 - protein, 89 aa, Helicobacter pylori
  misc_feature (B) LOCATION 1...89
  hypothetical: YES
LSQRSFLGRFMGITQAPFLTRLYYRLRGQGVRCKAISSRNSLMRLLRCFAAPVSLGVASFMHSRPLALLIGVALLVGVFYLLKRFYGEN

SEQ ID NO: 6096 - protein, 134 aa, Helicobacter pylori
  misc_feature (B) LOCATION 1...134
  hypothetical: YES
NIFIIKSLPVFYTYEPEKGLNFNLSNLYVFGFLIFLGILSQVILKSGSVQNFVKKAKKYSKNAKTPEFIAFFSGIIIFVDDYFNALTVGQISKSLNDAHNSTRERLAYIIDSTSAPVCLLVPISSWGHISWDYE

SEQ ID NO: 6097 - protein, 306 aa, Helicobacter pylori
  misc_feature (B) LOCATION 1...306
  hypothetical: YES
NSPLLKDSFSVLLQSLSSNYYAIFALIAVFLTILWQINLPSMRKYQNIGVKDFYSEQEEDSSKLAPLSLLPLSILLLIVSISSLIFYTGVILKNTDASFSLFYGGLFSLIVTYLLAYPFLEKGSFLKLIIEGFKSVGPAILVLTLAWAIGPVIRDDAQTGLYLAQVSKGFLNSGGGVYMPLIFFLISGFIAFSTGTSWGAFAIMLPIGAGMANESDIILIISAILSGAVYGDHTSPISDTTILSATGAGCSVQSHFITQLPYATIAMLCSAGEFRGGKFYAFAPARSFNWCSFTCRGVLSFKKVLW

SEQ ID NO: 6098 - protein, 305 aa, Helicobacter pylori
  misc_feature (B) LOCATION 1...305
  hypothetical: YES
SPLLKDSFSVLLQSLSSNYYAIFALIAVFLTILWQINLPSMRKYQNIGVKDFYSEQEEDSSKLAPLSLLPLSILLLIVSISSLIFYTGVILKNTDASFSLFYGGLFSLIVTYLLAYPFLEKGSFLKLIIEGFKSVGPAILVLTLAWAIGPVIRDDAQTGLYLAQVSKGFLNSGGGVYMPLIFFLISGFIAFSTGTSWGAFAIMLPIGAGMANESDIILIISAILSGAVYGDHTSPISDTTILSATGAGCSVQSHFITQLPYATIAMLCSAGEFRGGKFYAFAPARSFNWCSFTCRGVLSFKKVLW

SEQ ID NO: 6099 - protein, 329 aa, Helicobacter pylori
  misc_feature (B) LOCATION 1...329
  hypothetical: YES
VCLLVPISSWGAYIMGIMNNDNSPLLKDSFSVLLQSLSSNYYAIFALIAVFLTILWQINLPSMRKYQNIGVKDFYSEQEEDSSKLAPLSLLPLSILLLIVSISSLIFYTGVILKNTDASFSLFYGGLFSLIVTYLLAYPFLEKGSFLKLIIEGFKSVGPAILVLTLAWAIGPVIRDDAQTGLYLAQVSKGFLNSGGGVYMPLIFFLISGFIAFSTGTSWGAFAIMLPIGAGMANESDIILIISAILSGAVYGDHTSPISDTTILSATGAGCSVQSHFITQLPYATIAMLCSAVSLGVASFMHSRPLALLIGVALLVGVFYLLKRFYGEN

SEQ ID NO: 6100 - protein, 477 aa, Helicobacter pylori
  misc_feature (B) LOCATION 1...477
  hypothetical: YES
MVVFTKRVALSLFTGILVSAVLTHSLHLSQLVEYIYHKITSVFYTYEPEKGLNFNLSNLYVFGFLIFLGILSQVILKSGSVQNFVKKAKKYSKNAKTPEFIAFFSGIIIFVDDYFNALTVGQISKSLNDAHNSTRERLAYIIDSTSAPVCLLVPISSWGAYIMGIMNNDNSPLLKDSFSVLLQSLSSNYYAIFALIAVFLTILWQINLPSMRKYQNIGVKDFYSEQEEDSSKLAPLSLLPLSILLLIVSISSLIFYTGVILKNTDASFSLFYGGLFSLIVTYLLAYPFLEKGSFLKLIIEGFKSVGPAILVLTLAWAIGPVIRDDAQTGLYLAQVSKGFLNSGGGVYMPLIFFLISGFIAFSTGTSWGAFAIMLPIGAGMANESDIILIISAILSGAVYGDHTSPISDTTILSATGAGCSVQSHFITQLPYATIAMLCSAVSLGVASFMHSRPLALLIGVALLVGVFYLLKRFYGEN

SEQ ID NO: 6101 - protein, 477 aa, Helicobacter pylori; identical to SEQ ID NO: 6100
  misc_feature (B) LOCATION 1...477
  hypothetical: YES

SEQ ID NO: 6102 - protein, 159 aa, Helicobacter pylori
  misc_feature (B) LOCATION 1...159
  hypothetical: YES
SFNKRANPFGITPLRLIEIAQKGSKKEVLKAVNAMQEDLDKECVKAFLKAFFEKSLNTDTLKISELCKKVGYDKDDYLKARAKARKFLVPDQWFQFFEILSQEDDKAQKAFLFVLLELEMNDLAKEHLAVLSFEEYMLLNAYMDLKQEHKKAYKLEAFL

SEQ ID NO: 6103 - protein, 173 aa, Helicobacter pylori
  misc_feature (B) LOCATION 1...173
  hypothetical: YES
MGVLGMFAFFSWVFLFKHNLSHKIRLYHEKKDFDKLLKQILSQDTQKTFLKTKFKSDLAKNLSQILARYDLKADLNTPNSGCEKVDNLFKHYHNIENNTLEPKDHAKHSLAYEHAYFSKRLKAFIHNDLKNAFEVLTNAQIPLELRRYAYRNRPKRQQKRGFKGCECDARGFG

SEQ ID NO: 6104 - protein, 198 aa, Helicobacter pylori
  misc_feature (B) LOCATION 1...198
  hypothetical: YES
IGGAHAFLYYLTFLFIVGFGVFVYSIDPQAYAFNLGSYSFNLPIAVWLMGVLGMFAFFSWVFLFKHNLSHKIRLYHEKKDFDKLLKQILSQDTQKTFLKTKFKSDLAKNLSQILARYDLKADLNTPNSGCEKVDNLFKHYHNIENNTLEPKDHAKHSLAYEHAYFSKRLKAFIHNDLKNAFEVLTNAQIPLELRRYAL

SEQ ID NO: 6105 - protein, 337 aa, Helicobacter pylori
  misc_feature (B) LOCATION 1...337
  hypothetical: YES
MRFYIIFTFLFIVGFGVFVYSIDPQAYAFNLGSYSFNLPIAVWLMGVLGMFAFFSWVFLFKHNLSHKIRLYHEKKDFDKLLKQILSQDTQKTFLKTKFKSDLAKNLSQILARYDLKADLNTPNSGCEKVDNLFKHYHNIENNTLEPKDHAKHSLAYEHAYFSKRLKAFIHNDLKNAFEVLTNAQIPLELRRYAFIEIAQKGSKKEVLKAVNAMQEDLDKECVKAFLKAFFEKSLNTDTLKISELCKKVGYDKDDYLKLAQKAQKFLVPDQWFQFFEILSQEDDKAQKAFLFVLLELEMNDLAKEHLAVLSFEEYMLLNAYMDLKQEHKKAYKLEAFL

SEQ ID NO: 6106 - protein, 98 aa, Helicobacter pylori
  misc_feature (B) LOCATION 1...98
  hypothetical: YES
QKITRYKGILMGWALKKVCFLGVIFLISACTVKKNGVKNLSYKHESLRAYENAKDYDPTTKKATYKRNFFERHFKHHTDSQGNNTKQPLDNGMRDSNA

SEQ ID NO: 6107 - protein, 99 aa, Helicobacter pylori
  misc_feature (B) LOCATION 1...99
  hypothetical: YES
QKITRYKGILMGWALKKVCFLGVIFLISACTVKKNGVKNLSYKHESLRAYENAKDYDPTTKKATYKRNFFERHFKHHTDSQGNNTKQPLDNGMRDSNAI

SEQ ID NO: 6108 - protein, 136 aa, Helicobacter pylori
  misc_feature (B) LOCATION 1...136
  hypothetical: YES
RPNQLAEYRATRRRHMVDSRTANVRFIVLGFGGVISKQSEQSFNANYSKILHKEFKVGESEKSVSGRKFSLQMGAFINQICAQTLSDKLPAENNNYSVKVAFKDDLYKVLVQGFQSEEEARDFMKKYNQNAVLTRE

SEQ ID NO: 6109 - protein, 314 aa, Helicobacter pylori
  misc_feature (B) LOCATION 1...314
  hypothetical: YES
MGWALKKVCFLGVIFLISACTVKKNGVKNLSYKHESLRAYENAKDYDPTTKKATYKRNFFERHFKHHTDSQGNNTKQPLDNGMRDSNAIQRATMHPYQVGGKWYYPTKVDLGEKFDGIASWYGPNFHAKKTSNGEIYNMYAHTAAHKTLPMNTVVKVINVDNNSSTIVRINDRGPFVSNRIIDLSNAAARDIDMVQKGTASVRLIVLGFGGVISKQYEQSFNANYSKILHKEFKVGESEKSVSGGKFSLQMGAFRNQIGAQTLADKLQAENKNYSVKVAFKDDLYKVLVQGFQSEEEARDFMKKYNQNAVLTRE

SEQ ID NO: 6110 - protein, 93 aa, Helicobacter pylori
  misc_feature (B) LOCATION 1...93
  hypothetical: YES
MSAHFLKIVFLVGMCVSSLFAEGLEGFFNALEAQLKSPIAKGILMVIFIGIAIYVWRNLDRWKEILFTILGVVFGIFLFFKAPSLANWFMGVF

SEQ ID NO: 6111 - protein, 101 aa, Helicobacter pylori
  misc_feature (B) LOCATION 1...101
  hypothetical: YES
LRLNKRVMMSAHFLKLVFLVGMCVSSLFAEGLEGFFNALEAQLKSPIAKGILMVIFIGIAIYVWRNLDRWKEILFTILGVVFGIFLFFKAPSLANWFMGVF

SEQ ID NO: 6112 - protein, 65 aa, Helicobacter pylori
  misc_feature (B) LOCATION 1...65
  hypothetical: YES
AMIIIVLFCVNGALFLALGLISAYLMRWSAIVFSWLNSAAFYFISAYKVFLNKSMMGNVLNTNTA

SEQ ID NO: 6113 - protein, 69 aa, Helicobacter pylori
  misc_feature (B) LOCATION 1...69
  hypothetical: YES
RERFRVSALKFFAPTIKPLPLFSPNHSHSFVVLVIGESARKSNYALYGYEKPTTPRLSKRLENHELTLF

SEQ ID NO: 6114 - protein, 140 aa, Helicobacter pylori
  misc_feature (B) LOCATION 1...140
  hypothetical: YES
GCKPYCSSADLSSCSKESLINAYDNTIFYNDYLLDKIISMLENAKQPALMIYLSDHGESLGEGAYYLHGIPKSIAPKEQYEIPFILYANDLFKEKHSIIQTQTPINQNTIFHSVLGVFEDFKTPSAVYRPSLDLLKHKKE

SEQ ID NO: 6115 - protein, 523 aa, Helicobacter pylori
  misc_feature (B) LOCATION 1...523
  hypothetical: YES
LTSLFHLKFLKPLSCLQAGLLYSLIFGVLYHFPLFAYVYKESNQVSFIAMIIIVLFCVNGALFLALGLISAYLMRWSAIVFSWLNSVAFYFISAYKVFLNKSMMGNVLNTNTHEVLGFLSVKLFVFIVVFGVLPGYVIYKIPLKNSSKKAPFLAILALVFIFIASAFMNAKNWLWFDKHAKFIGGLILPFAYSVNAFRVSALKFFAPTIKPLPLFSPNHSHSFVVLVIGESARKSNYALYGYEKPTTPRLSKRLENHELTLFNATSCATYTTASLECILDSSFKNSLGAYENLPTYLTKAGVKVFWYSANDGEKNVKVTSYLKNYELIQKCPNCEAIAPYDESLLYNLPNLLKERSNENILLILHLAGSHGPNYDNKVPLNFRVFKPYCSSADLSSCSKESLINAYDNTIFYNDYLLDKIISMLENAKQPALMIYLSDHGESLGEGAYYLHGIPKSIAPKEQYEIPFILYANDLFKEKHSIIQTQTPINQNTIFHSVLGVFEDFKTPSAVYRPSLDLLKHKKE

SEQ ID NO: 6116 - protein, 89 aa, Helicobacter pylori
  misc_feature (B) LOCATION 1...89
  hypothetical: YES
ASLRFRKAGVLMKKLKGLFLSLLLWVYPLKSEPINEGAYILEEIGDVLRFLPIFVGTVSLAMRDYRGLGELAVGTLVTQGVIYGLKGAF

SEQ ID NO: 6117 - protein, 116 aa, Helicobacter pylori
  misc_feature (B) LOCATION 1...116
  hypothetical: YES
RWGLEWGFAKRPCCNSWRGMPSGHAGGAFSAAGFVYYRYGWKPALPVIALAILTDTSRVVAGQHTILQVTIGSLIAWGFAYLFTSRYKPKRWMLYPEISSDFKGSSRYGVGFSYQW

SEQ ID NO: 6118 - protein, 207 aa, Helicobacter pylori
  misc_feature (B) LOCATION 1...207
  hypothetical: YES
LRFRKAGVLMKKLKGLFLSLLLWVYPLKSEPINEGAYILEEIGDVLRFLPIFVGTVSLAMRDYRGLGELAVGTLVTQGVIYGLKGAFSTAHKDGARVGFAKRPCCNSWRGMPSGHAGGAFSAAGFVYYRYGWKPALPVIALAILTDTSRVVAGQHTILQVTIGSLIAWGFAYLFTSRYKPKRWMLYPEISSDFKGSSRYGVGFSYQW

SEQ ID NO: 6119 - protein, 173 aa, Helicobacter pylori
  misc_feature (B) LOCATION 1...173
  hypothetical: YES
GTFLAFGFFQTWRSVVVICFKKCFALGFYKPFLLLVGFLNVSVTKALMDASMQEKQDLSLLLVVALFLCCVFIIGVPFFINALFRVQNSLKETYKLATNLSANLTQSAFQSLQHATTSPAPSHISSSASQSVSKEKETHSPTFKVETTQLDVKIPNFKQKKVKKDTIDTKNEI

SEQ ID NO: 6120 - protein, 213 aa, Helicobacter pylori
  misc_feature (B) LOCATION 1...213
  hypothetical: YES
SGVKALNFTLKSVETLMKHDAYEIILSWFITPLTAILGRFAEFFLYTLHAQLVFNSAVALAFMLFAYRSLKEQNFFSASALLEALWFVGFFALFNYALKNPSRFYELFQNAIFIAPNMITQSLSQSLSNFSNHALSLDFIFNHGFYALSFISDLSHNEMSVWLFLSILQALFLSVLFAIIILVYLEAHVWCSLGHFFSVWVFPNLEERCGYML

SEQ ID NO: 6121 - protein, 362 aa, Helicobacter pylori
  misc_feature (B) LOCATION 1...362
  hypothetical: YES
LNFTLKSVETLMKHDAYEIILSWFITPLTAILGRFAEFFLYTLHAQLVFNSAVALAFMLFAYRSLKEQNFFSASALLEALWFVGFFALFNYALKNPSRFYELFQNAIFIAPNMITQSLSQSLSNFSNHALSLDFIFNHGFYALSFISDLSHNEMSVWLFLSILQALFLSVLFAIIILVYLEAHVWCSLGALFLAFGFFKTWRSVVVICLKKCFALGFYKPFLLLVGFLNVSVTKALMDASMQEKQDLSLLLVVALFLCCVFIIGVPFFINALFRVQNSLKETYKLATNLSANLTQSAFQSLQHATTSPAPSHISSSASQSVSKEKETHSPTFKVETTQLDVKIPNFKQKKVKKDTIDTKNEI

SEQ ID NO: 6122 - protein, 77 aa, Helicobacter pylori
  misc_feature (B) LOCATION 1...77
  hypothetical: YES
LITDASFKAYFKYVIVVIFIVAAIITPPDVVSQIFMALPLVGLYGLSILIAKMVNPAPKDNENDHENDAKEHTKSES

SEQ ID NO: 6123 - protein, 76 aa, Helicobacter pylori
  misc_feature (B) LOCATION 1...76
  hypothetical: YES
ITDASFKAYFKYVIVVIFIVAAIITPPDVVSQIFMALPLVGLYGLSILIAKMVNPAPKDNENDHENDAKEHTKSES

SEQ ID NO: 6124 - protein, 249 aa, Helicobacter pylori
  misc_feature (B) LOCATION 1...249
  hypothetical: YES
MFEDLKPHLQELRKRLMVSVGTILVAFLGCFHFWKNIFEFVKNSYKGTLIQLSPIEGVMVAVKISFSAAIVISMPIIFWQLWLFIAPGLYKNEKKVILPFVFFGSGMFLMGAAFSYYVVFPFIIEYLATFGSDVFAANISASSYVSFFTRLILGFGVAFELPVLAYFLAKVGLITDASLKAYFKYAIVVIFIVAAIITPPDVVSQIFMALPLVGLYGLSILIAKMVNPAPKDNENDHENDAKEHTKSES

SEQ ID NO: 6125 - protein, 551 aa, Helicobacter pylori
  misc_feature (B) LOCATION 1...551
  hypothetical: YES
LKLFFRRYSKYLKEHYKSFIVVLFSSLVVALSTAWGTYLVKPTLDEIFINKDTHMLKILPFLVILAYLGKSGGMYVGTYFTNFIGLDIVKKIRNAMLESLLKMEMDFFNRTKKGELIARITNDIGLIRASLSNYLSESLREGLTIVGLVGVVIYQSPKLALVGLVIMPLAAIPISKIIRKVKKLAKAHQESNAKITARLSEVFNNVEAIKISNGEKLEHRAFVKENEAFFKIGIKNIAVAEISSPLMEFLGSIAIALVIYLGGNEVIKGHISVGAFFSFITALFMLYTPIKRLTRIVSNFQEALVASDRIHEILEREPAIIDGELTLDDAIHTIEFKKVWLAYALEDQERYVLSDINLKFQQNEIVALKGESGSGKSSLVNLILRLYEPSKGEIFINDQKIESITQKSLREKISVVTQRVFIFNGSVAENVAYGLEIDEIKIKECLKKAQALDFVEKMPHGIESVLDEFGANLSGGQRQRIAIARALYKDAQVLIFDEATSALDNHTEESVKQSILELKQNRLIILISHNPSTLKLATKHVKLEHGRLIEC

SEQ ID NO: 6126 - protein, 570 aa, Helicobacter pylori
  misc_feature (B) LOCATION 1...570
  hypothetical: YES
KSPNKNTIIRVQSNPKVKHLKLFFRRSSKYLKEHYKSFIVVLFSSLVVALSTAWGTYLVKPTLDEIFINKDTHMLKILPFLVILAYLGKSGGMYVGTYFTNFIGLDIVKKIRNAMLESLLKMEMDFFNRTKKGELIARITNDIGLIRASLSNYLSESLREGLTIVGLVGVVIYQSPKLALVGLVIMPLAAIPISKIIRKVKKLAKAHQESNAKITARLSEVFNNVEAIKISNGEKLEHRAFVKENEAFFKIGIKNIAVAEISSPLMEFLGSIAIALVIYLGGNEVIKGHISVGAFFSFITALFMLYTPIKRLTRIVSNFQEALVASDRIHEILEREPAIIDGELTLDDAIHTIEFKKVWLAYALEDQERYVLSDINLKFQQNEIVALKGESGSGKSSLVNLILRLYEPSKGEIFINDQKIESITQKSLREKISVVTQRVFIFNGSVAENVAYGLEIDEIKIKECLKKAQALDFVEKMPHGIESVLDEFGANLSGGQRQRIAIARALYKDAQVLIFDEATSALDNHTEESVKQSILELKQNRLIILISHNPSTLKLATKHVKLEHGRLIEC

SEQ ID NO: 6127 - protein, 438 aa, Helicobacter pylori
  misc_feature (B) LOCATION 1...438
  hypothetical: YES
MKKIWLLVWGLYSLAFLHAIETIEKAPTNVEDRDKAPHLLLLAGIQGDEPGGFNATNLFLMHYSVLKGLVEVVPVLNKPSMLRNHRGLYGDMNRKFAALDKNDPEYPTIQEIKSLIAKPSVDAVLHLHDGGGYYRPVYIDAMLNPKRWGNCFIIDQDEVKGAKFPNLLAFANNTIENINAHLLHPIEKYHLKNTRTAQGDTEMQKALTFYAINQKKSAFANEASKELPLESRVFYHLQAIEGLLNQLNIPFKRDFELNPNSVHALINDKSLWAKISSLPKMPLFNLRPKLNHFPLPSNTKIPQIPIESNAYIVGLVKNKQEVFLKYGNKLMTRLSPFYIEFDHSLEEVKMQIDNKDQMVKIGSVVEVKESFYIHAMDNIRANVIGFSVSNESKPNETGYTIKFKDFQKRFSLDKQERIYRIEFYKNNAFSGMILVKFV

SEQ ID NO: 6128 - protein, 441 aa, Helicobacter pylori
  misc_feature (B) LOCATION 1...441
  hypothetical: YES
RDWMKKIWLLVWGLYSLAFLHAIETIEKAPTNVEDRDKAPHLLLLAGIQGDEPGGFNATNLFLMHYSVLKGLVEVVPVLNKPSMLRNHRGLYGDMNRKFAALDKNDPEYPTIQEIKSLIAKPSVDAVLHLHDGGGYYRPVYIDAMLNPKRWGNCFIIDQDEVKGAKFPNLLAFANNTIENINAHLLHPIEKYHLKNTRTAQGDTEMQKALTFYAINQKKSAFANEASKELPLESRVFYHLQAIEGLLNQLNIPFKRDFELNPNSVHALINDKSLWAKISSLPKMPLFNLRPKLNHFPLPSNTKIPQIPIESNAYIVGLVKNKQEVFLKYGNKLMTRLSPFYIEFDHSLEEVKMQIDNKDQMVKIGSVVEVKESFYIHAMDNIRANVIGFSVSNESKPNETGYTIKFKDFQKRFSLDKQERIYRIEFYKNNAFSGMILVKFV

SEQ ID NO: 6129 - protein, 249 aa, Helicobacter pylori
  misc_feature (B) LOCATION 1...249
  hypothetical: YES
MTKAFVPLSLLVSAILLAFSLILIPTSKSAYYGFLRQKKDKIDINIRAGEFGQKLGDWLVYVDKTENNSYDNLVLFSNKSLSQESFILAQKGNINNQNGVFELNLYNGHAYFTQGDKMRKVDFEELHLRNKLKSFNSNDAAYLQGTDYLGYWKKAFGKNANKNQKRRFSQAILVSLFPLASVFLIPLFGIANPRFKTNWSYFXVLGAVGVYFLMVHVISTDLFLMTFFFPFIWAFISYLLFRKFILKRY

SEQ ID NO: 6130 - protein, 345 aa, Helicobacter pylori
  misc_feature (B) LOCATION 1...345
  hypothetical: YES
MVKHYLFMAVSQVFFSFFLVLFFISSIVLLISIASVTLVIKVSFLDLVQLFLYSLPGTIFFILPITFFAACALGLSRLSYDHELLVFFSLGVSPKKMTKAFVPLSLLVSAILLAFSLILIPTSKSAYYGFLRQKKDKIDINIRAGEFGQKLGDWLVYVDKTENNSYDNLVLFSNKSLSQESFILAQKGNINNQNGVFELNLYNGHAYFTQGDKMRKVDFEELHLRNKLKSFNSNDAAYLQGTDYLGYWKKAFGKNANKNQKRRFSQAILVSLFPLASVFLIPLFGIANPRFKTNWSYFYVLGAVGVYFLMVHVISTDLFLMTFFFPFIWAFISYLLFRKFILKRY

SEQ ID NO: 6131 - protein, 346 aa, Helicobacter pylori
  misc_feature (B) LOCATION 1...346
  hypothetical: YES
GMVKHYLFMAVSQVFFSFFLVLFFISSIVLLISIASVTLVIKVSFLDLVQLFLYSLPGTTFFILPITFFAACALGLSRLSYDHELLVFFSLGVSPKKMTKAFVPLSLLVSAILLAFSLILIPTSKSAYYGFLRQKKDKIDINIRAGEFGQKLGDWLVYVDKTENNSYDNLVLFSNKSLSQESFILAQKGNINNQNGVFELNLYNGHAYFTQGDKMRKVDFEELHLRNKLKSFNSNDAAYLQGTDYLGYWKKAFGKNANKNQKRRFSQAILVSLFPLASVFLIPLFGIANPRFKTNWSYFHVLGAVGVYFLMVHVISTDLFLMTFFFPFIWAFISYLLFRKFILKRY

SEQ ID NO: 6132 - protein, 80 aa, Helicobacter pylori
  misc_feature (B) LOCATION 1...80
  hypothetical: YES
YLINRHSQLPNIFPDKSARNVVINTGVGNGKDFSALVSDFICDSSLISPNQAYPLYYYDDLGNRYNAISGYGAQPLQEAL

SEQ ID NO: 6133 - protein, 343 aa, Helicobacter pylori
  misc_feature (B) LOCATION 1...343
  hypothetical: YES
LYNTFFKEAFRKQSEKLGIVYTPIEVVDFILRATNGILKKHFNTDFNDQSITIFDPFMGTGSFIARLLSKENDFISDEALKEKFQKGLFAFDIVLLSYYIALINITQAAQNRDSSLKNFKNIALTDSLDYLEEKNDKGVIPGFEYLFEDLKENKEIKTTMEKQNIRVIIGNPPYSSGAKSENDNNQNLSHPKLEKRVYETYGKNSTAQNKNSTRDTLIHSIRMASDLLKDKGVLGFVVNGSFIDSKSADGFRKCVAQDFSHLYALNLRGNARTSGEERKKQGDGIFDSGSRVTVAIIFFVKDKDAPNHTIFYYEVEDYLKREAKLNLLANFENLDSVPFKEIT

SEQ ID NO: 6134 - protein, 342 aa, Helicobacter pylori
  misc_feature (B) LOCATION 1...342
  hypothetical: YES
YNTFFKEAFRKQSEKLGIVYTPIEVVDFILRATNGILKKHFNTDFNDQSITIFDPFMGTGSFIARLLSKENDFISDEALKEKFQKGLFAFDIVLLSYYIALINITQAAQNRDSSLKNFKNIALTDSLDYLEEKNDKGVIPGFEYLFEDLKENKEIKTTMEKQNIRVIIGNPPYSSGAKSENDNNQNLSHPKLEKRVYETYGKNSTAQNKNSTRDTLIHSIRMASDLLKDKGVLGFVVNGSFIDSKSADGFRKCVAQDFSHLYALNLRGNARTSGEERKKQGDGIFDSGSRVTVAIIFFVKDKDAPNHTIFYYEVEDYLKREAKLNLLANFENLDSVPFKEIT

SEQ ID NO: 6135 - protein, 394 aa, Helicobacter pylori
  misc_feature (B) LOCATION 1...394
  hypothetical: YES
IRKSASLKPKGTKLDKKLINNEFVCKIVGTHKGLAKQDVIALDDENQEDNDLKNKADTFVSQRAISFCKSIQTSKNIKDSFETIMECYDEELKKKSFKNLKISIDHVDGTMNCKERLDKLENLNTFEPNICKVLSNARCLSEGVDVPSLDSVIFSDGRSAMVDIIQAVGRVMRKAKNKKRGYIILPIALRESEIKNLDEAVKNTNFQNIWKVLKALRSHDSSLVDEAIFKEKIKIFGSDDASNPDDEEELQKDKTEQSSNDPKEAQKTLFDAILLQDLANAVYNVMPTKLGDRNYWENFAKKTGNIARTLNERLKELFGKNPEIFDNFLTSLRGNIHQSIKEEEALDMIISHIITKPIFDAIFGDNIKNPIAKALDKMVLKLSDLGLEGETKDP

SEQ ID NO: 6136 - protein, 1160 aa, Helicobacter pylori
  misc_feature (B) LOCATION 1...1160
  hypothetical: YES
LDKKLINNEFVCKIVGTHKGLAKQDVIALDDENQEDNDLKNKADTFVSQRAISFCKSIQTSKNIKDSFETIMECYDEELKKKSFKNLKISIDHVDGTMNCKERLDKLENLNTFEPNICKVLSNARCLSEGVDVPALDSVIFFDGRSAMVDIIQAVGRVMRKAKNKKRGYIILPIALRESEIKNLDEAVKNTNFQNIWKVLKALRSHDSSLVDEAIFKEKIKIFGSDDASNPDDEEELQKDKTEQSSNDPKEAQKTLFDAILLQDLANAVYNVMPTKLGDRNYWENFAKKTGNIARTLNERLKELFGKNPEIFDNFLTSLRGNIHQSIKEEEALDMIISHIITKPIFDAIFGDNIKNPIAKALDKMVLKLSDLGLEGETKDLKNLYESVKTEAARAKSQKSQQELIKNLYNTFFKEAFRKQSEKLGIVYTPIEVVDFILRATNGILKKHFNTDFNDQSITIFDPFMGTGSFIARLLSKENDFISDEALKEKFQKGLFAFDIVLLSYYIALINITQAAQNRDSSLKNFKNIALTDSLDYLEEKNDKGVIPGFEYLFEDLKENKEIKTTMEKQNIRVIIGNPPYSSGAKSENDNNQNLSHPKLEKRVYETYGKNSTAQNKNSTRDTLIHSIRMASDLLKDKGVLGFVVNGSFIDSKSADGFRKCVAQDFSHLYALNLRGNARTSGEERKKQGDGIFDSGSRVTVAIIFFVKDKDAPNHTIFYYEVEDYLKREAKLNLLANFENLDSVPFKEITPNDKGDWINQRNDDFEKLIPLKRDKKSKIFNAIFDLNSNGVKTSRDPWVYNFSQKTLMQSVQNCIDTYNADLKRFNERFREAFKQRTAKDKGIKKSADRYKHLNDREITTDKTKIAWTDGLKNKLIKNENLPESGMERVRLALYRPFNKQWLYWDKNLINRQSQLPKIFPDKSARNVVINTGVGNGKDFSALVSDFISDFSLISPNQAYPLYYYDDLGNRYNAISGYALNLFRRHYKDNAITEEEIFYYIYAIFHHKGYLEKYKNSLAKEAPRIALSEDFKELSMLGKELAELHLNYESGEMHTSVKHNLLESAEMEGYYDVIQMKKDKKGDRIKYNHHITITQIPKKAFDYVVNGKSAIDWVIERYQITKDKDSLIENNPNHYAGGKYIFELLCRVITLSVKSVDLIEK

SEQ ID NO: 6137 - protein, 255 aa, Helicobacter pylori
  misc_feature (B) LOCATION 1...255
  hypothetical: YES
MDIYALYIAIGLFTGILSGIFGIGGGMIIVPIMLATGHSFEESIGISILQMVLSSFVGSVLNFKKKSLDFSLGLLIGAGGLIGASFSGFILKIVSSKILMVIFALLVVYSMIQFVLKPKKKDLITDTKRYHLQGLKLFLIGALTGFFAITLGIGGGMLMVPLMHYFLGYDSKKCVALGLFFILFSSISGAFSLMYHHIINKEVLLAGAIVGLGSVMGVSIGIKWIMGLLNEKMHKALILGVYGLSLLIVLYKIFF

SEQ ID NO: 6138 - protein, 264 aa, Helicobacter pylori
  misc_feature (B) LOCATION 1...264
  hypothetical: YES
GGFYFLRVFMDIYALYIAIGLFTGILSGIFGIGGGMIIVPIMLATGHSFEESIGISILQMVLSSFVGSVLNFKKKSLDFSLGLLIGAGGLIGASFSGFILKIVSSKILMVIFALLVVYSMIQFVLKPKKKDLITDTKRYHLQGLKLFLIGALTGFFAITLGIGGGMLMVPLMHYFLGYDSKKCVALGLFFILFSSISGAFSLMYHHIINKEVLLAGAIVGLGSVMGVSIGIKWIMGLLNEKMHKALILGVYGLSLLIVLYKIFF

SEQ ID NO: 6139 - protein, 55 aa, Helicobacter pylori
  misc_feature (B) LOCATION 1...55
  hypothetical: YES
FKKDVMLKIMGIVEKHHLSFAFPSQSLYVESLPEVSLKERAKIYNLQLLVDVFFG

SEQ ID NO: 6140 - protein, 245 aa, Helicobacter pylori
  misc_feature (B) LOCATION 1...245
  hypothetical: YES
IALFKGYGEALVTNVATKSTHNFRKEVINLILKVVYFLIFIVALLGVLKQLGFNVSAIIASLGIGGLAVALAVKDVLANFFASVILLLDNSFSQGDWIVCGEVEGTVVEMGLRRTTIRAFDNALLSVPNSELAGKPIRNWSRRKVGRRIKMEIGLTYSSSQSALQLCVKDIKEMLENHPKIANGADSALQNASDYRYMFKKDIVSIDDFLGYKNNLFVFLDQFADSSINILVYCFSKTVVWEEWL

SEQ ID NO: 6141 - protein, 244 aa, Helicobacter pylori
  misc_feature (B) LOCATION 1...244
  hypothetical: YES
ALFKGYGEALVTNVATKSTHNFRKEVINLILKVVYFLIFIVALLGVLKQLGFNVSAIIASLGIGGLAVALAVKDVLANFFASVILLLDNSFSQGDWIVCGEVEGTVVEMGLRRTTIRAFDNALLSVPNSELAGKPIRNWSRRKVGRRIKMEIGLTYSSSQSALQLCVKDIKEMLENHPKIANGADSALQNASDYRYMFKKDIVSIDDFLGYKNNLFVFLDQFADSSINILVYCFSKTVVWEEWL

SEQ ID NO: 6142 - protein, 327 aa, Helicobacter pylori
  misc_feature (B) LOCATION 1...327
  hypothetical: YES
ERFYLVCVGFCMRLLLWWVLVLSLFLDPLRAVEEHETDAVDLFLIFNQINQLNQVIETYKKNPERSAEISLYNTQKNDLIKSLTSKVLNERDKIGIDINQNLKEQEKIKKRLSKSIKGDDFYTFMKDRLSLDILLIDETLYRFIDKIRSSIDIFSEQKDVESISDAFLLRLGQFKLYTFPKNLGNVKMHELEQMFSDYELRLNTYTEVLRYIKNHPKEVLPKNLIMEVNMDFVLNKISKVLPFTAHSLQVSKIALALMILALLLGLRKLITWLLALLLDRIFEIMQRNKKMHVNVQSSIVSPVSVFLALFIAIWLFTFEGPNALFLH

SEQ ID NO: 6143 - protein, 627 aa, Helicobacter pylori
  misc_feature (B) LOCATION 1...627
  hypothetical: YES
VGFCMRLLLWWVLVLSLFLDPLRAVEEHETDAVDLFLIFNQINQLNQVIETYKKNPERSAEISLYNTQKNDLIKSLTSKVLNERDKIGIDINQNLKEQEKIKKRLSKSIKGDDFYTFMKDRLSLDILLIDETLYRFIDKIRSSIDIFSEQKDVESISDAFLLRLGQFKLYTFPKNLGNVKMHELEQMFSDYELRLNTYTEVLRYIKNHPKEVLPKNLIMEVNMDFVLNKISKVLPFTAHSLQVSKIALALMILALLLGLRKLITWLLALLLDRIFEIMQRNKKMHVNVQSSIVSPVSVFLALFSCDVALDIFYYPNASPPKVSMWVGAVYIMLLAWLVIALFKGYGEALVTNVATKSTHNFRKEVINLILKVVYFLIFIVALLGVLKQLGFNVSAIIASLGIGGLAVALAVKDVLANFFASVILLLDNSFSQGDWIVCGEVEGTVVEMGLRRTTIRAFDNALLSVPNSELAGKPIRNWSRRKVGRRIKMEIGLTYSSSQSALQLCVKDIKEMLENHPKIANGADSALQNASDYRYMFKKDIVSIDDFLGYKNNLFVFLDQFADSSINILVYCFSKTVVWEEWLEVKEDVMLKIMGIVEKHHLSFAFPSQSLYVESLPEVSLKEGAKI

SEQ ID NO: 6144 - protein, 217 aa, Helicobacter pylori
  misc_feature (B) LOCATION 1...217
  hypothetical: YES
MALDWDFMLHSIPAFFKGLKLTLYISFFGILLSLLVGFLCAIVLYFKTRFLSPVVYIYGEIARNTPLLIQLFFLYYGLNEIGLSALECAILALGFLGGGYMSQSFLLGFKSLASIQRESALSLGFSPLKMMYYIILPQSLSVSMPSIGANVIFLLKETSVVGAIALTDIMFVAKDLIGIYYKTTESLLMLSLTYLIALLPLSALFVILERSFKKKVA

SEQ ID NO: 6145 - protein, 230 aa, Helicobacter pylori
  misc_feature (B) LOCATION 1...230
  hypothetical: YES
CGALSAINFKVSVMALDWDFMLHSIPAFFKGLKLTLYISFFGILLSLLVGFLCAIVLYFKTRFLSPVVYIYGEIARNTPLLIQLFFLYYGLNEIGLSALECAILALGFLGGGYMSQSFLLGFKSLASIQRESALSLGFSPLKMMYYIIPPQSLSVSMPSIGANVIFLLKETSVVGAIALTDIMFVAKDLIGIYYKTTESLLMLSLTYLIAVLPLSALFVILERSFKKKVA

SEQ ID NO: 6146 - protein, 141 aa, Helicobacter pylori
  misc_feature (B) LOCATION 1...141
  hypothetical: YES
MLEIDNQTPLESDFLLLEKIADVLASTQIIELVLVSDETMREINRDLRDCDYATDVLSFPLEAIPHTPLGSVVINAPLAQENALKLGHSLEDEIALLFIHGVLHLLGYDHEKDKGEQRQKEGELIKAFDLPLSLIERTQEC

SEQ ID NO: 6147 - protein, 151 aa, Helicobacter pylori
  misc_feature (B) LOCATION 1...151
  hypothetical: YES
GFFKLLFISLMLEIDNQTPLESDFLLLEKIADVLASTQIIELVLVSDETMREINRDLRDCDYATDVLSFPLEAIPHTPLGSVVINAPLAQENALKLGHSLEDEIALLFIHGVLHLLGYDHEKDKGEQRQKEGELIKAFDLPLSLIERTQEC

SEQ ID NO: 6148 - protein, 279 aa, Helicobacter pylori
  misc_feature (B) LOCATION 1...279
  hypothetical: YES
EKFYKPGKRIDKDYKKQVVKHKGHIPFKDSFKEETLENFTNLLKEHRITPSYKTDIESVKKEGELFKITTTSNTTYHAKFVVVAIGKMGQPNRPTTYKIPVALSKQVVFSINDCKENEKTLVIGGGNSAVEYAIALCKTTPTTLNYRKKEFSRINEDNAKNLQEVLDNNTLKSKLGVDIESLEEDNTQIKVNFTDNTSESFDRLLYAIGGSTPLEFFKRCSLELDPSTNIPVVKENLESNNIPNLFIVGDILFKSGASIATALNHGYDVAIEIAKRLQS

SEQ ID NO: 6149 - protein, 324 aa, Helicobacter pylori
  misc_feature (B) LOCATION 1...324
  hypothetical: YES
MDQEILDVLIVGAGPGGIATVVECEIAGVKKVLLCEKTESHSGMLEKFYKAGKRIDKDYKKQVVELKGHIPFKDSFKEETLENFTNLLKEHRITPSYKTDIESVKKEGELFKITTTSNTTYHAKFVVVAIGKMGQPNRPTTYKIPVALSKQVVFSINDCKENEKTLVIGGGNSAVEYAIALCKTTPTTLNYRKKEFSRINEDNAKNLQEVLDNNTLKSKLGVDIESLEEDNTQIKVNFTDNTSESFDRLLYAIGGSTPLEFFKRCSLELDPSTNIPVVKENLESNNIPNLFIVGDILFKSGASIATALNHGYDVAIEIAKRLQS

SEQ ID NO: 6150 - protein, 76 aa, Helicobacter pylori
  misc_feature (B) LOCATION 1...76
  hypothetical: YES
MLHKAKVGIVFQALLGIFCVFLLLFYLSAFLMVAFKDTKRMFISVLIGSVVFLWSDLLVFVGFKNISFVLDIGYEI

SEQ ID NO: 6151 - protein, 176 aa, Helicobacter pylori
  misc_feature (B) LOCATION 1...176
  hypothetical: YES
MTAMMRYFHIYATTFFFPLALLFAVSGLSLLFKARQDTGAKIKEWVLEKSLKKEERLDFLKGFIKENHIAMPKKIEPREYRGALVIGTPLYEINLETKGTQTKIKTIERGFLGALIMLHKAKVGIVFQALLGIFCVFLLLFYLSAFLMVAFKDTKRMFISVLIGSVVFFGAIYWSL

SEQ ID NO: 6152 - protein, 184 aa, Helicobacter pylori
  misc_feature (B) LOCATION 1...184
  hypothetical: YES
IREPQVAIMTAMMRYFHIYATTFFFPLALLFAVSGLSLLFKARQDTGAKIKEWVLEKSLKKEERLDFLKGFIKENHIAMPKKIEPREYRGALVIGTPLYEINLETKGTQTKIKTIERGFLGALIMLHKAKVGIVFQALLGIFCVFLLLFYLSAFLMVAFKDTKRMFISVLIGSVVFFGAIYWSL

SEQ ID NO: 6153 - protein, 106 aa, Helicobacter pylori
  misc_feature (B) LOCATION 1...106
  hypothetical: YES
NQRFQRGDKDLRAKIDVGDRNDEISQVGRGINLFVENARLIMEEIKGISTLNKTSMDKLVQITQETQKSMKNSSTTLNSVKNKTTDIASMMNASIEQSPRVKEAFD

SEQ ID NO: 6154 - protein, 162 aa, Helicobacter pylori
  misc_feature (B) LOCATION 1...162
  hypothetical: YES
RYSDQTNLLALNAAIEAARAGEHGRGFAVVADEVRNLAGRTQKSLAEINSTIMVIVQEINDVSSQMNLNSQKMERLSDMSKSVQETYEKMSSNLSSVVLDSNQSMDDYAKSGHQIEAMVSDFAEVEKVASKTLADSSDILNIATHVSGTTMNLDKQVNLFKT

SEQ ID NO: 6155 - protein, 198 aa, Helicobacter pylori
  misc_feature (B) LOCATION 1...198
  hypothetical: YES
EINDVCFSICFAGTRIMFVVLAALLGLGGLFIGFVKVMQKDVLVQLMEHLETGQYKKREKTLAYMTKLLEQGIHKYYKNSDNATARKMALDYFKRINDDKGMIYMVVVDKNGVVLFDPVNPKTVGQSGLSLQSVDGVYYVRGYLEAAKKGGGYTYYKMPKYDGGVPEKKFAYSHYDEVSQMVIAATSYYTDVNTENSD

SEQ ID NO: 6156 - protein, 564 aa, Helicobacter pylori
  misc_feature (B) LOCATION 1...564
  hypothetical: YES
MFASVFASLGTRIMFVVLAALLGLGGLFIGFVKVMQKDVLVQLMEHLETGQYKKREKTLAYMTKLLEQGIHKYYKNSDNATARKMALDYFKRINDDKGMIYMVVVDKNGVVLFDPVNPKTVGQSGLSLQSVDGVYYVRGYLEAAKKGGGYTYYKMPKYDGGVPEKKFAYSHYDEVSQMVIAATSYYTDINTENQAIKEGVNKVFNENTTKLFLWILTATIALVVLTLIYAKLRIVKRIDELVLKINAFSRGDKDLRAKIDVGDRNDEISQVGRGINLFVENARLIMEEIKGISTLNKTSMDKLVQITQETQKSMKNSSTTLNSVKNKATDIASMMNASIEQSQGLRKRLIETQGLVKESKDAIGDLFSQITESAHTEEELSSKVEQLSRNADDVKSILDIINDIADQTNLLALNAAIEAARAGEHGRGFAVVADEVRNLAGRTQKSLAEINSTIMVIVQEINDVSSQMNLNSQKMERLSDMSKSVQETYEKMSSNLSSVVLDSNQSMDDYAKSGHQIEAMVSDFAEVEKVASKTLADSSDILNITTHVSGTTMNLDKQVNLFKT

SEQ ID NO: 6157 - protein, 564 aa, Helicobacter pylori
  misc_feature (B) LOCATION 1...564
  hypothetical: YES
MFASVFASLGTRIMFVVLAALLGLGGLFIGFVKVMQKDVLVQLMEHLETGQYKKREKTLAYMTKLLEQGIHKYYKNSDNATARKMALDYFKRINDDKGMIYMVVVDKNGVVLFDPVNPKTVGQSGLSLQSVDGVYYVRGYLEAAKKGGGYTYYKMPKYDGGVPEKKFAYSHYDEVSQMVIAATSYYTDINTENQAIKEGVNKVFNENTTKLFLWILTATIALVVLTLIYAKLRIVKRIDELVLKXNAFSRGDKDLRAKIDVGDRNDEISQVGRGINLFVENARLIMEEIKGISTLNKTSMDKLVQITQETQKSMKNSSTTLNSVKNKATDIASMMNASIEQSQGLRKRLIETQGLVKESKDAIGDLFSQITESAHTEEELSSKVEQLSRNADDVKSILDIINDIADQTNLLALNAAIEAARAGEHGRGFAVVADEVRNLAGRTQKSLAEINSTIMVIVQEINDVSSQMNLNSQKMERLSDMSKSVQETYEKMSSNLSSVVLDSNQSMDDYAKSGHQIEAMVSDFAEVEKVASKTLADSSDILNITTHVSGTTMNLDKQVNLFKT

SEQ ID NO: 6158 - protein, 234 aa, Helicobacter pylori
  misc_feature (B) LOCATION 1...234
  hypothetical: YES
IVLVAIALLISGCASYKITPEHVTSYNNGIQVMTSTQVRSKVQLEIAQSKLKGLNESPLVLYVAAQVLEGKPVVFSRKAISVSINQTNLPVLSLRQVMKSSFDFEGILQSFNISVPTAPIDNINMSTPPMFYYGQGSFLAYNGMMYGGMGMYGPGFGMMMMDDVEEQEVMQESRQALKILAINYLKKNTLNVENKAKGGFVVVDTKNLKTPGVVVVKVFLEDEIHTFKIDISKM

SEQ ID NO: 6159 - protein, 237 aa, Helicobacter pylori
  misc_feature (B) LOCATION 1...237
  hypothetical: YES
MRKIVLVAIALLISGCASYKITPEHVTSYNNGIQVMTSTQARSKVQLEIAQSKLKGLNESPLVLYVAAQVLEGKPVVFSRKAISVSINQTNLPVLSLRQVMKSSFDFEGILQSFNISVPTAPIDNINMSTPPMFYYGQGSFLAYNGMMYGGMGMYGPGFGMMMMDDVEEQEVMQESRQALKILAINYLKKNTLNVENKAKGGFVVVDTKNLKTPGVVVVKVFLEDEIHTFKIDISKM

SEQ ID NO: 6160 - protein, 237 aa, Helicobacter pylori
  misc_feature (B) LOCATION 1...237
  hypothetical: YES
MRKIVLVAIALLISGCASYKITPEHVTSYNNGIQVMTSTQARSKVQLEIAQSKLKGLNESPLVLYVAAQVLEGKPVVFSRKAISVSINQTNLPVLSLRQVMKSSFDFEGILQSFNISVPTAPIDNINMITPPMFYYGQGSFLAYNGMMYGGMGMYGPGFGMMMMDDVEEQEVMQESRQALKILAINYLKKNTLNVENKAKGGFVVVDTKNLKTPGVVVVKVFLEDEIHTFKIDISKM

SEQ ID NO: 6161 - protein, 84 aa, Helicobacter pylori
  misc_feature (B) LOCATION 1...84
  hypothetical: YES
KGVFMFLLRHLTSACVFLASKCLPDSFVLVALLSFVVFVLVYCLTGQDASSVISSWGNGAWTLLGFSMQMALILVLGQALASAN

SEQ ID NO: 6162 - protein, 279 aa, Helicobacter pylori
  misc_feature (B) LOCATION 1...279
  hypothetical: YES
LKSYPYQSAIFLLSLIIIGIILIGLPFLMAMIHPKKEEIVEIDQAFKGEYKETELISHQQDKTIAHFLENSALLSYLLVFLGFGYLGIYFFKGGGISLNIVNTIFLFLGILLHKTPLAYVKAINHSARSVAGILLQFPFYAGIMGMMASHSVGGHSLAQMLSLAFTHIANEKTFALMTFLSAGIVNIFIPSGGGQWAIQAPIMLPAGQSLGVDPGVISMAIAWGDAWTNMIQPFLALPALAITGLGAKDIMGYCVLTLIFVGLVVCGAVLFFGVSSSYA

SEQ ID NO: 6163 - protein, 454 aa, Helicobacter pylori
  misc_feature (B) LOCATION 1...454
  hypothetical: YES
MFLLRHLTSACVFLASKCLPDSFVLVALLSFVVFVLVYCLTGQDASSVISSWGNGAWTLLGFSMQMALILVLGQALASAKLVQKLLKYLASLPKGYYTALWLVTFLSLIANWINWGFGLVISAIFAKEIAKNVKGVDYRLLIASAYSGFVIWHGGLSGSIPLSVATQNENLSKISAGVIEKAIPISQTIFSSYNLIIIGIILIGLPFLMAMIHPKKEEIVEIDSKLLKDEYKETELISHQQDKTIAHFLENSALLSYLLVFLGFGYLGIYFFKGGGISLNIVNTIFLFLGILLHKTPLAYVKAINHSARSVAGILLQFPFYAGIMGMMASHSVGGHSLAQMLSLAFTHIANEKTFALMTFLSAGIVNIFIPSGGGQWAIQAPIMLPAGQSLGVDPGVISMAIAWGDAWTNMIQPFWALPALAIAGLGAKDIMGYCVLTLIFVGLVVCGVFYFLV

SEQ ID NO: 6164 - protein, 456 aa, Helicobacter pylori
  misc_feature (B) LOCATION 1...456
  hypothetical: YES
VFMFLLRHLTSACVFLASKCLPDSFVLVALLSFVVFVLVYCLTGQDASSVISSWGNGAWTLLGFSMQMALILVLGQALASAKLVQKLLKYLASLPKGYYTALWLVTFLSLIANWINWGFGLVISAIFAKEIAKNVKGVDYRLLIASAYSGFVIWHGGLSGSIPLSVATQNENLSKISAGVIEKAIPISQTIFSSYNLIIIGIILIGLPFLMAMIHPKKEEIVEIDSKLLKDEYKETELISHQQDKTIAHFLENSALLSYLLVFLGFGYLGIYFFKGGGISLNIVNTIFLFLGILLHKTPLAYVKAINHSARSVAGILLQFPFYAGIMGMMASHSVGGHSLAQMLSLAFTHIANEKTFALMTFLSAGIVNIFIPSGGGQWAIQAPIMLPAGQSLGVDPGVISMAIAWGDAWTNMIQPFWALPALAIAGLGAKDIMGYCVLTLIFVGLVVCGVFYFLV

SEQ ID NO: 6165 - protein, 98 aa, Helicobacter pylori
  misc_feature (B) LOCATION 1...98
  hypothetical: YES
AQSNPEDESLAIYNISQDALSHWQSDVSKVYPQLVTYVYSGTAMLNRVVQRRGMEVGLICNKGFEPMHSMGRALQSYLGYALEERLHINTHKYDDPLV

SEQ ID NO: 6166 - protein, 171 aa, Helicobacter pylori
  misc_feature (B) LOCATION 1...171
  hypothetical: YES
KGLEVLLKETDVKGQVVIPVRQEEVKTAVKELLEAGAKAIVICLLQSHKNAESERIVRDIALKEIEKLGKNIPVFASVDYYPQRKESHRMNTTILEAYAAEPSRQTLSKVSNRFKEHGAKFDLRVMTTHGGTISWKAKELARTIVSGPIGGVIGSKLLGETLGYDNIACSD

SEQ ID NO: 6167 - protein, 557 aa, Helicobacter pylori
  misc_feature (B) LOCATION 1...557
  hypothetical: YES
MKDARVQVMGIDAGGTMTDTFFVKENGSFVVGKAQSNPEDESLAIYNSSQDALSHWQSDVSKVYPELVTYVYSGTAMLNRVVQRRGMEVGLICNKGFEQMHSMGRALQSYLGYALEERLHINTHKYDDPLIPLKRIRGVTERTDVKGQVVIPVRQEEVKTAVKELLEAGAKAIVICLLQSHKNAESERIVRDIALKEIEKLGKNIPVFASVDYYPQRKESHRMNTTILEAYAAEPSRQTLSKVSNRFKEHGAKFDLRVMATHGGTISWKAKELARTIVSGPIGGVIGSKLLGETLGYDNIACSDIGGTSFDMALIVKSNFNIASDPDMARLVLSLPLVAMDSVGAGAGSFVRIDPHSRSVKLGPDSAGYRVGTCWKDSGLDTVSVTDCHIVLGYLNPDNFLGGLIKLDVDRAKKHIKEQIADPLGISVEDAAAGVIELLDLELKEYLRSNISAKGYSPSDFACFSYGGAGPAHTYGYTEGLGFKDVVVPAWAAGFSALGCACADFEYRYDKSVDIAIPQYSSDESKIEACKIIQDAWDELTLKVTEEIKINGFSEKM

SEQ ID NO: 6168 - protein, 220 aa, Helicobacter pylori
  misc_feature (B) LOCATION 1...220
  hypothetical: YES
MEGVLNFLTNINVIFTLLGYLIGGIPFGYALMKIFYGMDITKIGSGGIGATNVLRALQSKGVSNAKQMALLVLILDLFKGMFAVFLSKLFGLDYSLQWMVAIASILGHCYSPFLNFNGGKGVSTIMGSVVLLIPIESLIGLTVWFFVGKVLKISSLASILGVGTATVLIFFVPYMHIPDSVNILKEVGTQTPMVLIFIFTLIKHAGNIFNLLTGKEKKVL

SEQ ID NO: 6169 - protein, 221 aa, Helicobacter pylori
  misc_feature (B) LOCATION 1...221
  hypothetical: YES
FSPPLGYLIGGIPFGYALMKIFYGMDITKIGSGGIGATNVLRALQSKGVSNAKQMALLVLILDLFKGMFAVFLSKLFGLDYSLQWMVAIASILGHCYSPFLNFNGGKGVSTIMGSVVLLIPIESLIGLTVWFFVGKVLKISSLASILGVGTATVLIFFVPYMHIPDSVNILKEISTQTPMVLIFSFTLIKHAAIIQFIYRQKKRFYETKQAPISIIGFETI

SEQ ID NO: 6170 - protein, 145 aa, Helicobacter pylori
  misc_feature (B) LOCATION 1...145
  hypothetical: YES
MDAIYPYVLVVHLLCAIIFIGYLFFDMVIFPNVKKMFGEEFANKANTGIAQRAIKIMPLCVLGLVLTGGMMLSQYMGGDKGWCETPFQKILMLKVILALSIFLLVLFSLSCKFLGKKNPIGKYTHHIALAFGFLIAILAKTMWFV

SEQ ID NO: 6171 - protein, 145 aa, Helicobacter pylori; identical to SEQ ID NO: 6170
  misc_feature (B) LOCATION 1...145
  hypothetical: YES

SEQ ID NO: 6172 - protein, 245 aa, Helicobacter pylori
  misc_feature (B) LOCATION 1...245
  hypothetical: YES
MNFYQKIYTHKVVFSSLFFLLFLFNVETLLFSHFSDDFSQLFFLFENHVYDFIIKLDYLGLIGVSSIYLLALILKPFTLTRQKCACIGILCLSFYAWNFPIKNSSIALYVFYFALLGTLLWRFLGASMKQSFLPSMNICVVWVFASSLQSFRFLSVSDCVDFSLFILALFLLILVLIYHKRLFGLYEYANTLILIVGLCVVVLCSSMFIQTKEYYGMRLGFYFLGLLGWLLEYIHNTLRRLEHKI

SEQ ID NO: 6173 - protein, 245 aa, Helicobacter pylori; identical to SEQ ID NO: 6172
  misc_feature (B) LOCATION 1...245
  hypothetical: YES

SEQ ID NO: 6174 - protein, 75 aa, Helicobacter pylori
  misc_feature (B) LOCATION 1...75
  hypothetical: YES
MRKIRIQYRIYDFTHRHSPALGDAGSPASDSTMGPTCGLNADNQHNHIYDTCVPTFLVYNLPLIVFGVVGALLLG

SEQ ID NO: 6175 - protein, 84 aa, Helicobacter pylori
  misc_feature (B) LOCATION 1...84
  hypothetical: YES
YHRCVLCPFMRKIRIQYRIYDFTHRHSPALGDAGSPASDSTMGPTCGLNADNQHNHIYDTCVPTFLVYNLPLIVFGVVGALLLG

SEQ ID NO: 6176 - protein, 83 aa, Helicobacter pylori
  misc_feature (B) LOCATION 1...83
  hypothetical: YES
HRCVLCPFMRKIRIQYRIYDFTHRHSPALGDAGSPASDSTMGPTCGLNADNQHNHIYDTCVPTFLVYNLPLIVFGVVGALLLG

SEQ ID NO: 6177 - protein, 437 aa, Helicobacter pylori
  misc_feature (B) LOCATION 1...437
  hypothetical: YES
MLENSSVWSNPAFVAIICMCVLSLLRLNVMLSMISATLIAGLMGGLGITESFNMMIDGMKGNLNIALSYILLGALAVAIAKSNLIKVALNKLIGLMDYKRSTFCFLIAFIACFSQNLVPVHIAFIPILIPPLLHLMNRLELDRRAVACALTFGLQAPYLVLPVGFGLIFQTTILEQLKANGVSTTIAQITGVMWIAGLAMVVGLFLAVLTLYKKPRHYQEKSFNIEDYASLQLNYHDYLTFIGIVVAFVIQLATDSMPLAAFLALAIILLGRGIKFKETDSLMDDSVKMMAFIAFVMLVASGFGEVLQKVHAIDGLVNAITSIIQGKLLGAFLMLVVGLFITMGIGTSFGTIPIIAVFYVPLCAKLGFSIESTILLIGIAAALGDAGSPASDSTMGPTCGLNADNQHNHIYDTCVPTFLVYNLPLIVFGVVGALLLG

SEQ ID NO: 6178 - protein, 55 aa, Helicobacter pylori
  misc_feature (B) LOCATION 1...55
  hypothetical: YES
FVWAVLFASYFLIEPFLNWMQLQDPSRQLTHDYLEVLVIALPSIFSRNVLVSELV

SEQ ID NO: 6179 - protein, 102 aa, Helicobacter pylori
  misc_feature (B) LOCATION 1...102
  hypothetical: YES
VVLTGQNLGANKPKIATEYAHLILKISMGLMGVLGVILILFAKEFASLFSQDGEVLEVARSYLIAVGLSQAPLIGYFVLDGVFRGAGISKVSLYINTLSLCG

SEQ ID NO: 6180 - protein, 101 aa, Helicobacter pylori
  misc_feature (B) LOCATION 1...101
  hypothetical: YES
VLTGQNLGANKPKIATEYAHLILKISMGLMGVLGVILILFAKEFASLFSQDGEVLEVARSYLIAVGLSQAPLIGYFVLDGVFRGAGISKVSLYINTLSLCG

SEQ ID NO: 6181 - protein, 122 aa, Helicobacter pylori
  misc_feature (B) LOCATION 1...122
  hypothetical: YES
PPFDCFWGGWSVTIRLIYQVKKIFSLALPSGVNAFLDVLVVALSVFFVGKISHHHIVALGVGLQFLMLFYGINTILYTGTNAILSRLVGARDFAQINHAFSSIFIGAFVICLGRPVCFLFFD

SEQ ID NO: 6182 - protein, 417 aa, Helicobacter pylori
  misc_feature (B) LOCATION 1...417
  hypothetical: YES
VLVVALSVFFVGKISHHHIVALGVGLQFLMLFYGINTILYTGTNAILSRLVGARDFAQINHAFSSIFIGAFVICLGVLFASYFLIEPFLNWMQLQDPSRQLTQDYLEVLVIALPSIFLKNVLVSALASFSDTLTPFIVKIIMVIACIFLNQALIFGDFGFKEMGIVGSALANVVVSYWELLALSLWIQIKKIPLKFKITFHFSFLKTMFKVGWPAGFERLLSLFSLILLSKFVASYGDKVLAGMQIGIRVETFSFMPGFGFMIAAMVLTGQNLGANKPKIATEYAHLILKISMGLMGVLGVILILFAKEFASLFSQDGEVLEVARSYLIAVGLSQAPLIGYFVLDGVFRGAGISKVSLYINTLSLWGLRIMPIYLLLIYHFKVEFIFVVIALETFLRSFIYYKVFSKGIWKRCGKKA

SEQ ID NO: 6183 - protein, 58 aa, Helicobacter pylori
  misc_feature (B) LOCATION 1...58
  hypothetical: YES
RGEMMKDFLEDYKKSVLERKSEGIPPLPLNAKQVEAVVEILMKDPTNAAFAKNYSFTE

SEQ ID NO: 6184 - protein, 91 aa, Helicobacter pylori
  misc_feature (B) LOCATION 1...91
  hypothetical: YES
PHPFPFRHQFPAGSGLVAFAAVTGTMPLNMPESVLVRFKGEMNPGITLRDLVNAIPYYAIKKGLLTVEKKGKINVFNGRILEIEGLPDIKM

SEQ ID NO: 6185 - protein, 148 aa, Helicobacter pylori
  misc_feature (B) LOCATION 1...148
  hypothetical: YES
DFDERSHKRRFRKELLIHRVSPGVDEGAKVKAEFLAQLSQKKLECPHISALEATTLLGTMLGGYNVEPLIVGLESQDKNIAKESAKALKTTLLVYGSFDKIAAMSKTNALAKEVLESWANAEWFLNKEPLNECIEACVFKIDGRNQYR

SEQ ID NO: 6186 - protein, 268 aa, Helicobacter pylori
  misc_feature (B) LOCATION 1...268
  hypothetical: YES
NLIYRSSQRSAAACVVRLNKEPMIEYLKSNIKLIDEMIASGYEDKETLKKRRDAMQAWVDKPVLLEPDSNAQYAAVIEIDVAEITEPILACPNDPDDVATLSEVLADTTGKRPHAIDEVFIGSCMTNIGHFRAFGEIVKNAPPSQARLWVVPPSKMDEQELINEGYYAIFGAAGARTEVPGCSLCMGNQARVRDNAVVFSTSTRNFDNRMGRGAKVYLGSAELGAACALLGRIPTKEEYMNLVSEKLESQKDKIYRYMNFNLMENFRL

SEQ ID NO: 6187 - protein, 267 aa, Helicobacter pylori
  misc_feature (B) LOCATION 1...267
  hypothetical: YES
LIYRSSQRSAAACVVRLNKEPMIEYLKSNIKLIDEMIASGYEDKETLKKRRDAMQAWVDKPVLLEPDSNAQYAAVIEIDVAEITEPILACPNDPDDVATLSEVLADTTGKRPHAIDEVFIGSCMTNIGHFRAFGEIVKNAPPSQARLWVVPPSKMDEQELINEGYYAIFGAAGARTEVPGCSLCMGNQARVRDNAVVFSTSTRNFDNRMGRGAKVYLGSAELGAACALLGRIPTKEEYMNLVSEKLESQKDKIYRYMNFNLMENFRL

SEQ ID NO: 6188 - protein, 339 aa, Helicobacter pylori
  misc_feature (B) LOCATION 1...339
  hypothetical: YES
MNALKRACLRLMGETNTDDLSPASDAFTRSDIPLHAKAMLKNRIENYEQRIEAIKTKGVPVAYVGDVVGTGSSRKSATNSIMWHFGKDIPFVPNKRSGGIVIGGVIAPIFFATCEDSGALPIVADVKDLKEGDIIKIYPYKGEITLNDKVVSTFKLEPETLLDEVRASGRIPLIIGRGLTNKARKFLGLGESEAFKKPSAPKSDAKGYTLAQKIVGHACGVKGILPGAYCEPKVTTVGSQDTTGAMTRDEVKELASLKFDAPFVLQSFCHTAAYPKPSDVSLHATLPGFITQRGGVALHPGDGVIHTWLNRMGLPDTLGTGGDSHTRFPLGISFRQGAG

SEQ ID NO: 6189 - protein, 580 aa, Helicobacter pylori
  misc_feature (B) LOCATION 1...580
  hypothetical: YES
MKDFLEDYKKSVLERKSEGIPPLPLNAKQVEAVVEILMKDPTNAAFAKELLIHRVSPGVDEGAKVKAEFLAQLSQKKLECPHISALEATTLLGTMLGGYNVEPLIVGLESQDKNIAKESAKALKTTLLVYGSFDKIAAMSKTNALAKEVLESWANAEWFLNKEPLNECIEACVFKIDGETNTDDLSPASDAFTRSDIPLHAKAMLKNRIENYEQRIEAIKTKGVPVAYVGDVVGTGSSRKSATNSIMWHFGKDIPFVPNKRSGGIVIGGVIAPIFFATCEDSGALPIVADVKDLKEGDIIKIYPYKGEITLNDKVVSTFKLEPETLLDEVRASGRIPLIIGRGLTNKARKFLGLGESEAFKKPSAPKSDAKGYTLAQKIVGHACGVKGILPGAYCEPKVTTVGSQDTTGAMTRDEVKELASLKFDAPFVLQSFCHTAAYPKPSDVSLHATLPGFITQRGGVALHPGDGVIHTWLNRMGLPDTLGTGGDSHTRFPLGISFPAGSGLVAFAAVTGTMPLNMPESVLVRFKGEMNPGITLRDLVNAIPYYAIKKGLLTVEKKGKINVFNGRILEIEGLPDIKM

SEQ ID NO: 6190 - protein, 853 aa, Helicobacter pylori
  misc_feature (B) LOCATION 1...853
  hypothetical: YES
MMKDFLEDYKKSVLERKSEGIPPLPLNAKQVEAVVEILMKDPTNAAFAKELLIHRVSPGVDEGAKVKAEFLAQLSQKKLECPHISALEATTLLGTMLGGYNVEPLIVGLESQDKNIAKESAKALKTTLLVYGSFDKIAAMSKTNALAKEVLESWANAEWFLNKEPLNECIEACVFKIDGETNTDDLSPASDAFTRSDIPLHAKAMLKNRIENYEQRIEAIKTKGVPVAYVGDVVGTGSSRKSATNSIMWHFGKDIPFVPNKRSGGIVIGGVIAPIFFATCEDSGALPIVADVKDLKEGDIIKIYPYKGEITLNDKVVSTFKLEPETLLDEVRASGRIPLIIGRGLTNKARKFLGLGESEAFKKPSAPKSDAKGYTLAQKIVGHACGVKGILPGAYCEPKVTTVGSQDTTGAMTRDEVKELASLKFDAPFVLQSFCHTAAYPKPSDVSLHATLPGFITQRGGVALHPGDGVIHTWLNRMGLPDTLGTGGDSHTRFPLGISFPAGSGLVAFAAVTGTMPLNMPESVLVRFKGEMNPGITLRDLVNAIPYYAIKKGLLTVEKKGKINVFNGRILEIEGLPDIKMEQAFELSDASAERSAAACVVRLNKEPMIEYLKSNIKLIDEMIASGYEDKETLKKRRDAMQAWVDKPVLLEPDSNAQYAAVIEIDVAEITEPILACPNDPDDVATLSEVLADTTGKRPHAIDEVFIGSCMTNIGHFRAFGEIVKNAPPSQARLWVVPPSKMDEQELINEGYYAIFGAAGARTEVPGCSLCMGNQARVRDNAVVFSTSTRNFDNRMGRGAKVYLGSAELGAACALLGRIPTKEEYMNLVSEKLESQKDKIYRYMNFNLMENFRL

SEQ ID NO: 6191 - protein, 853 aa, Helicobacter pylori; identical to SEQ ID NO: 6190
  misc_feature (B) LOCATION 1...853
  hypothetical: YES

SEQ ID NO: 6192 - protein, 165 aa, Helicobacter pylori
  misc_feature (B) LOCATION 1...165
  hypothetical: YES
LMNKPFLILLIALIAFSGCNMRKYFKPAKHQIKGEAYFPNHLQESIVSSNRYGAILKNGAVIGDKGLTQLRIGKNFNYESSFLNESQGFFILAQDCLNKIDKKTSKSRAAKTEETELKLKGVEAEVQDKVCHQVELISNNPNASQQSIVIPLETFALARALKGIF

SEQ ID NO: 6193 - protein, 175 aa, Helicobacter pylori
  misc_feature (B) LOCATION 1...175
  hypothetical: YES
RKKPFKERIDLMNKPFLILLIALIAFSGCNMRKYFKPAKHQIKGEAYFPNHLQESIVSSNRYGAILKNGAVIGDKGLTQLRIGKNFNYESSFLNESQGFFILAQDCLNKIDKKTSKSRAAKTEETELKLKGVEAEVQDKVCHQVELISNNPNASQQSIVIPLETFALARALKGIF

SEQ ID NO: 6194 - protein, 375 aa, Helicobacter pylori
  misc_feature (B) LOCATION 1...375
  hypothetical: YES
VVLADNSANLYDITSQKLLFSEKGSPSTTINSLMAMPIFMDTVVVFPMLDGRLLVVDYVHGNPTPIRNIVISSDKFFNNITYLIVDGNNMIASTGKRILSVVSGQEFNYDGDIVDLLYDKGTLYVLTLDGQILQMDKSLRELNSVKLPFASLNTIVLNNNKLYSLEKRGYVIEVDLNDFDSYNVYKTPTIGSFKFFSSNRLDKGVFYDKNRVYYDRYYLDYNDFKPKLYPHAAEFKTSQKGEKGNAPIYLQERHKAKENKQPLEENKVKPRNSGFEEEEVKTRRPEPTKDQNNAIQQGETKNNESKNTPISKENAAKKEAPKPSSKEEKRRLKEEKKKAKAEQRAREFEQRAREHQERDEKELEERRKALEMNKK

SEQ ID NO: 6195 - protein, 400 aa, Helicobacter pylori
  misc_feature (B) LOCATION 1...400
  hypothetical: YES
RQPTIYRYSFGDFCLGASVKGNLLAVVLADNSANLYDITSQKLLFSEKGSPSTTINSLMAMPIFMDTVVVFPMLDGRLLVVDYVHGNPTPIRNIVISSDKFFNNITYLIVDGNNMIASTGKRILSVVSGQEFNYDGDIVDLLYDKGTLYVLTLDGQILQMDKSLRELNSVKLPFASLNTIVLNNNKLYSLEKRGYVIEVDLNDFDSYNVYKPPTIGSFKFFSSNRLDKGVFYDKNRVYYDRYYLDYNDFKPKLYPHAAEFKTSQKGEKGNAPIYLQERHKAKENKQPLEENKVKPRNSGFEEEEVKTRRPEPTKDQNNAIQQGETKNNESKNTPISKENAAKKEAPKPSSKEEKRRLKEEKKKAKAEQRAREFEQRAREHQERDEKELEERRKALEMNKK

SEQ ID NO: 6196 - protein, 542 aa, Helicobacter pylori
  misc_feature (B) LOCATION 1...542
  hypothetical: YES
LMNKPFLILLIALIAFSGCNMRKYFKPAKHQIKGEAYFPNHLQESIVSSNRYGAILKNGAVIGDKGLTQLRIGKNFNYESSFLNESQGFFILAQDCLNKIDKKTSKSRAAKTEETELKLKGVEAEVQDKVCHQVELISNNPNASQQSIVIPLETFALSASVKGNLLAVVLADNSANLYDITSQKLLFSEKGSPSTTINSLMAMPIFMDTVVVFPMLDGRLLVVDYVHGNPTPIRNIVISSDKFFNNITYLIVDGNNMIASTGKRILSVVSGQEFNYDGDIVDLLYDKGTLYVLTLDGQILQMDKSLRELNSVKLPFASLNTIVLNNNKLYSLEKRGYVIEVDLNDFDSYNVYKTPTIGSFKFFSSNRLDKGVFYDKNRVYYDRYYLDYNDFKPKLYPHAAEFKTSQKGEKGNAPIYLQERHKAKENKQPLEENKVKPRNSGFEEEEVKTRRPEPTKDQNNAIQQGETKNNESKNTPISKENAAKKEAPKPSSKEEKRRLKEEKKKAKAEQRAREFEQRAREHQERDEKELEERRKALEMNKK

SEQ ID NO: 6197 - protein, 396 aa, Helicobacter pylori
  misc_feature (B) LOCATION 1...396
  hypothetical: YES
CFVQILWLGFSMFNYEELFQTYKTPFYLYDFDKIKQAFLNYKEAFKGRKSLICYALKANSNLSILSLLANLGSGADCVSIGEIQRALKAGIKPYKIVFSGVGKSAFEIEQALKLNILFLNVESFMELKTIETIAQSLGIKARISIRINPNIDAKTHPYISTGLKENKFGVEEKEALEMFLWAKKSAFLEPVSVHFHIGSQLLDLDPITEASQKVAKIAKSLIALGIDLRFFDVGGGIGVSYENEETIKLYDYAQGILNSLQGLDLTIICEPGRSIVAESGELITQVLYEKKAQNKRFVIVDAGMNDFLRPSLYHAKHAIRVITPCGGREISPCDVVGPVCESSDTFLKDANLPELEPGDKLAIEKVGAYGSSMAQSIQFAPQTLRISPRRSQNQSD

SEQ ID NO: 6198 - protein, 405 aa, Helicobacter pylori
  misc_feature (B) LOCATION 1...405
  hypothetical: YES
MFNYEELFQTYKTPFYLYDFDKIKQAFLNYKEAFKGRKSLICYALKANSNLSILSLLANLGSGADCVSIGEIQRALKAGIKPYKIVFSGVGKSAFEIEQALKLNILFLNVESFMELKTIETIAQSLGIKARISIRINPNIDAKTHPYISTGLKENKFGVEEKEALEMFLWAKKSAFLEPVSVHFHIGSQLLDLDPITEASQKVAKIAKSLIALGIDLRFFDVGGGIGVSYENEETIKLYDYAQGILNSLQGLDLTIICEPGRSIVAESGELITQVLYEKKAQNKRFVIVDAGMNDFLRPSLYHAKHAIRVITPCGGREISPCDVVGPVCESSDTFLKDANLPELEPGDKLAIEKVGAYGSSMASQYNSRPKLLELALEDHKIRVIRKREALEDLWRLEIEGLEGV

SEQ ID NO: 6199 - protein, 196 aa, Helicobacter pylori
  misc_feature (B) LOCATION 1...196
  hypothetical: YES
KSKSMKLRRGKIMPFSKFLENLTAPFKRIKNRSLVLALGFLILTFCLLLFLILSDVSRLISSKDFLYVIQSHPKQTLIEDENYFYANKGLYKTNKEAFLRVYKIPESMPIEKRESLSKVSKIFLALLFFISSMLFGIFWRLPKRLDTKMSLESAHKNELENAFQRYDALGVRFEDIAGVNEVKEELLEVIDYLKKP

SEQ ID NO: 6200 - protein, 305 aa, Helicobacter pylori
  misc_feature (B) LOCATION 1...305
  hypothetical: YES
IFMQAKKHAPLLFSLMKWTLWVRLGGGHRSDEREATLNQLLTEMDGFLQNDEVVVIGATNQMEVMDEALLRSKRFDRRIFISLPDLLERQSILEKLLENKKHALDYLKIAKICVGFSGAMLATLINESALNALKHQRKEITHGDILEVKDKIAYGKKKPQTLDENQKELVALYQSAKALSAYWLEIEFDKASLLGEFIAFNENKIHSESEIKNYIKVYLSGTIILELLYKERYSLSKQDLQKAKFLNEFMASELLLAPTKESLSVLYEEQLEFLKPQIAACKRLSALLLEQECLEHANFYDLLNG

SEQ ID NO: 6201 - protein, 324 aa, Helicobacter pylori
  misc_feature (B) LOCATION 1...324
  hypothetical: YES
MPFSKFLENLTAPFKRIKNRSLVLALGFLILTFCLLLFLILSDVSRLISSKDFLYVIQSHPKQTLIEDENYFYANKGLYKTNKEAFLRVYKIPESMPIEKRESLSKVSKIFLALLFFISSMLFGIFWRLPKRLDTKMSLESAHKNELENAFQRYDALGVRFEDIAGVNEVKEELLEVIDYLKNPKKYQDLGIFLPKGVLLLGPPGVGKTMIAKALASEARVPFFYESGSAFSQIYVGAGAKKVHELFMHAKKHAPSIIFIDEIDALGKARGWHTSDEREATLNQLLTEMDGFLQNDEVVVIGATNQMEVMDEALLRSKRFDRRI

SEQ ID NO: 6202 - protein, 550 aa, Helicobacter pylori
  misc_feature (B) LOCATION 1...550
  hypothetical: YES
MPFSKFLENLTAPFKRIKNRSLVLALGFLILTFCLLLFLILSDVSRLISSKDFLYVIQSHPKQTLIEDENYFYANKGLYKTNKEAFLRVYKIPESMPIEKRESLSKVSKIFLALLFFISSMLFGIFWRLPKRLDTKMSLESAHKNELENAFQRYDALGVRFEDIAGVNEVKEELLEVIDYLKNPKKYQDLGIFLPKGVLLVGPPGVGKTMIAKALASEARVPFFYESGSAFSQIYVGAGAKKVHELFMHAKKHAPSIIFIDEIDALGKARGGHRSDEREATLNQLLTEMDGFLQNDEVVVIGATNQMEVMDEALLRSKRFDRRIFISLPDLLERQSILEKLLENKKHALDYLKIAKICVGFSGAMLATLINESALNALKHQRKEITHGDILEVKDKIAYGKKKPQTLDENQKELVALYQSAKALSAYWLEIEFDKASLLGEFIAFNENKIHSESEIKNYIKVYLSGTIILELLYKERYSLSKQDLQKAKFLNEFMASELLLAPTKESLSVLYEEQLEFLKPQIAACKRLSALLLEQECLEHANFYDLLNG

SEQ ID NO: 6203 - protein, 336 aa, Helicobacter pylori
  misc_feature (B) LOCATION 1...336
  hypothetical: YES
LKIAIVRLSALGDIIVSAVFLAAIKERFTDAQIEWFVDERFSAILEHSPYIDKLHPIPLKSALTTFNPLKIFKLFKNLRAYEYDIIIDMQGLIKSALITQMLKAPKKVGFDYASAREGLSAFFYSQKVSIAYDEPILKRNSTLLSQALNLPEKEISQGLSSRAKAFSYQPSPKINALNLNGNKPKILFVLETSKINKTYPTERFKELALMLENFQICLLWHANEKKAITLYHALKYQRDVLLLPKLTLNEVKALLFKMDVIIGGDTGITHLAWALQKPSITLYGNTPMERFKLESPINVSLTGNSNANYHKKDFSIQNIDPKKIKECVLNVLKEKE

SEQ ID NO: 6204 - protein, 345 aa, Helicobacter pylori
  misc_feature (B) LOCATION 1...345
  hypothetical: YES
AHSLDDRVCLKIAIVRLSALGDIIVSAVFFTGLKKRFTDAQIEWFVDERFSAILEHSPYIDKLHPIPLKSALTTFNPLKIFKLFKNLRAYEYDIIIDMQGLIKSALITQMLKAPKKVGFDYASAREGLSAFFYSQKVSIAYDEPILKRNSTLLSQALNLPEKEISQGLSSRAKAFSYQPSPKINALNLNGNKPKILFVLETSKINKTYPTERFKELALMLENFQICLLWHANEKKAITLYHALKYQRDVLLLPKLTLNEVKALLFKMDVIIGGDTGITHLAWALQKPSITLYGNTPMERFKLESPINVSLTGNSNANYHKKDFSIQNIDPKKIKECVLNVLKEKE

SEQ ID NO: 6205 - protein, 145 aa, Helicobacter pylori
  misc_feature (B) LOCATION 1...145
  hypothetical: YES
ECRYCELVSECEADLLRAFYAGSIQKHQMAFALFSACATDETFALLNLYAPKKGVNETDFMFSISLLNHSYWIFGSLVGSLVGSHFSFDTQGMEFVMTAIFIVLFMEQYKRNTNHKNAWLGIAIAVVCLALFGTEYFLLITLVLM

SEQ ID NO: 6206 - protein, 144 aa, Helicobacter pylori
  misc_feature (B) LOCATION 1...144
  hypothetical: YES
CRYCELVSECEADLLRAFYAGSIQKHQMAFALFSACATDETFALLNLYAPKKGVNETDFMFSISLLNHSYWIFGSLVGSLVGSHFSFDTQGMEFVMTAIFIVLFMEQYKRNTNHKNAWLGIAIAVVCLALFGTEYFLLITLVLM

SEQ ID NO: 6207 - protein, 229 aa, Helicobacter pylori
  misc_feature (B) LOCATION 1...229
  hypothetical: YES
LMHDFLKAFKDAFPHTISIFLGYLLMGMTFGMLLAQQGYDYKVALFMSLFIYAGAIQFVAITLLSAQASLMNVVIVSLLVNARQTCYALSMLDRFKNTKWRLPYLAHALTDETFALLNLYAPKKGVNETDFMFSISLLNHSYWIFGSLVGSLVGSHFSFDTQGMEFVMTAIFIVLFMEQYKRNTNHKNAWLGIAIAVVCLALFGTEYFLLIALVLMVLALILFRKQLEC

SEQ ID NO: 6208 - protein, 83 aa, Helicobacter pylori
  misc_feature (B) LOCATION 1...83
  hypothetical: YES
IAFDFPLYPKPSSRSFKVKSMIFFTLINAIAVILSSLIPIYMWVVIIYSLISFVQPNPNNPIMQILARWEPEFYFLRSRFKLS

SEQ ID NO: 6209 - protein, 97 aa, Helicobacter pylori
  misc_feature (B) LOCATION 1...97
  hypothetical: YES
MIFSTLINAIAVILSSLITIYMWVVIIYSLISFVQPNPNNPIMQILARLCEPVFYFLRSRFKLVFNGLDFAPLVVVIVLKFLDLTLIQWLFALAKSL

SEQ ID NO: 6210 - protein, 142 aa, Helicobacter pylori
  misc_feature (B) LOCATION 1...142
  hypothetical: YES
RKKASVRKPFKRAVSLFTLKAFITDIFMIYTPMLYIMTYAILGSAKDFRENQSAIFLCLLFYALTHSFFIAFKSQSPGMRYARFKLVKNNGEKVDFFLALWRFVLWVLSMGLLVGFVAPFIFKFFLHDKFSSTHIEIIKEEI

SEQ ID NO: 6211 - protein, 152 aa, Helicobacter pylori
  misc_feature (B) LOCATION 1...152
  hypothetical: YES
VATKKTKKNKEKKQALENPLKGLYLSLRLKAFITDIFMIYTPMLYIMTYAILGSAKDFRENQSAIFLCLLFYALTHSFFIAFKSQSPGMRYARFKLVKNNGEKVDFFLALWRFVLWVLSMGLLVGFVAPFIFKFFLHDKFSSTHIEIIKEEI

SEQ ID NO: 6212 - protein, 149 aa, Helicobacter pylori
  misc_feature (B) LOCATION 1...149
  hypothetical: YES
LLLSMRQEIDLKTFAPLALIGLPLFIKSVLNSLRVRLKEFRGQYYLCVFSLYLLMLTETLFLWGSKISGANEKLLNRHFLAKEVATALQLRGIHQIRTNDKQLALRLQFYGIKEGGRLRLINTKISKKRPDITIIYADKILQSYSLVRH

SEQ ID NO: 6213 - protein, 165 aa, Helicobacter pylori
  misc_feature (B) LOCATION 1...165
  hypothetical: YES
KAIVTSLYGASGWLFPLLLSMRQEIDLKTFAPLALIGLPLFIKSVLNSLRVRLKEFRGQYYLCVFSLYLLMLTETLFLWGSKISGANEKLLNRHFLAKEVATALQLRGIHQIRTNDKQLALRLQFYGIKEGGRLRLINTKISKKRPDITIIYADKILQSYSLVRH

SEQ ID NO: 6214 - protein, 268 aa, Helicobacter pylori
  misc_feature (B) LOCATION 1...268
  hypothetical: YES
MQLSPLQSALLYFRYFIYPEKKTRSFDLSDLIFIVMVFLVLALGLLMSEEISISYNEAKDFFYSDAWFVKIAQKSVAILGQNDLALRLPFLIAHVINMFLFYLIGRKILKKPKDALYVVLTYALLPGVNLFAILLAKSVLVLSLGLLISYLYIKTQKIPYLTLSACAFLDGAFIPLLLGVFAYALRKRYFKSAIFALVVLIVNTALFSGDFNKGLPSGYFIDTCLELMLLYSPLLFLYYPYTLYKALLDKKPSLLAFMARAAGFSLCF

SEQ ID NO: 6215 - protein, 269 aa, Helicobacter pylori
  misc_feature (B) LOCATION 1...269
  hypothetical: YES
VMQLSPLQSALLYFRYFIYPEKKTRSFDLSDLIFIVMVFLVLALGLLMSEEISISYNEAKDFFYSDAWFVKIAQKSVAILGQNDLALRLPFLIAHVINMFLFYLIGRKILKKPKDALYVVLTYALLPGVNLFAILLAKSVLVLSLGLLISYLYIKTQKIPYLTLSACAFLDGAFIPLLLGVFAYALRKRYFKSAIFALVVLIVNTALFSGDFNKGLPSGYFIDTCLELMLLYSPLLFLYYPYTLYKALLDKKPSLLAFMARAAGFSLCF

SEQ ID NO: 6216 - protein, 415 aa, Helicobacter pylori
  misc_feature (B) LOCATION 1...415
  hypothetical: YES
MQLSPLQSALLYFRYFIYPEKKTRSFDLSDLIFIVMVFLVLALGLLMSEEISISYNEAKDFFYSDAWFVKIAQKSVAILGQNDLALRLPFLIAHVINMFLFYLIGRKILKKPKDALYVVLTYALLPGVNLFAILLAKSVLVLSLGLLISYLYIKTQKIPYLTLSACAFLDGAFIPLLLGVFAYALRKRYFKSAIFALVVLIVNTALFSGDFNKGLPSGYFIDTCLELMLLYSPLLFLYYPYTLYKALLDKKPSLLAFMSASGWLFPLLLSMRQEIDLKTFAPLALIGLPLFIKSVLNSLRVRLKEFRGQYYLCVFSLYLLMLTETLFLWGSKISGANEKLLNRHFLAKEVATALQLRGIHQIRTNDKQLALRLQFYGIKEGGRLRLINTKISKKRPDITIIYADKILQSYSLVRH

SEQ ID NO: 6217 - protein, 115 aa, Helicobacter pylori
  misc_feature (B) LOCATION 1...115
  hypothetical: YES
VGLFIVLFLIIMKHQTSPYAFTHNQALVTQTPPYFTQLTIPKPNDALSAHASSLISLPNDNLLSAYFSGTKEGARDVKISANLFDSKTNRWSEAFILLTKEELSHHSHEYIKKIR

SEQ ID NO: 6218 - protein, 372 aa, Helicobacter pylori
  misc_feature (B) LOCATION 1...372
  hypothetical: YES
LEPSRNRLKHAAFFVGLFIVLFLIIMKHQTSPYAFTHNQALVTQTPPYFTQLTIPKPNDALSAHASSLISLPNDNLLSAYFSGTKEGARDVKISANLFDSKTNRWSEAFILLTKEELSHHSHEYIKKLGNPLLFLHDNKILLFVVGVSMGGWATSKIYQFESALEPIHFKFARKLSLSPFLNLSHLVRNKPLNTTDGGFMLPLYHELATQYPLLLKFDQQNNPRELLRPNTLNHQLQPSLTPFKDCAVMAFRNHSFKDSLMLETCKTPTDWQKPISTNLKNLDDSLNLLNLNGILYLIHNPSDLSLRRKELWLSKLENSNSFKTLKVLDKANEVSYPSYSLNPHFIDIVYTYNRSHIKHIRFNMAYLNSLLK

SEQ ID NO: 6219 - protein, 384 aa, Helicobacter pylori
  misc_feature (B) LOCATION 1...384
  hypothetical: YES
KNRYLKRGRNAILEPSRNRLKHAAFFVGLFIVLFLIIMKHQTSPYAFTHNQALVTQTPPYFTQLTIPKPNDALSAHASSLISLPNDNLLSAYFSGTKEGARDVKISANLFDSKTNRWSEAFILLTKEELSHHSHEYIKKLGNPLLFLHDNKILLFVVGVSMGGWATSKIYQFESALEPIHFKFARKLSLSPFLNLSHLVRNKPLNTTDGGFMLPLYHELATQYPLLLKFDQQNNPRELLRPNTLNHQLQPSLTPFKDCAVMAFRNHSFKDSLMLETCKTPTDWQKPISTNLKNLDDSLNLLNLNGILYLIHNPSDLSLRRKELWLSKLENSNSFKTLKVLDKANEVSYPSYSLNPHFIDIVYTYNRSHIKHIRFNMAYLNSLLK

SEQ ID NO: 6220 - protein, 54 aa, Helicobacter pylori
  misc_feature (B) LOCATION 1...54
  hypothetical: YES
MEFLGLILSLAAILIAFKKPEKENWAFGILIVVWLVELIIFIAHSSSVLPNMNL

SEQ ID NO: 6221 - protein, 68 aa, Helicobacter pylori
  misc_feature (B) LOCATION 1...68
  hypothetical: YES
FVFEYNPTKILRNGMEFLGLILSLAAILIAFKKPEKENWAFGILIVVWLVELIIFIAHSSSVLPNMNL

SEQ ID NO: 6222 - protein, 254 aa, Helicobacter pylori
  misc_feature (B) LOCATION 1...254
  hypothetical: YES
VMLGFLSVRGESIPLVDVKRWLHYNANDPSRDLKECSVKDDHNLVIVCHFSNHSIALKVLKIERIIHKNWTEISAGDKQGINEEGKLSAITRFDEQRVVQILDVEKMISDVFPSLKDLDDLTLRCIEAIQSQKLILIAEDSLSALKTLEKIVQTLELRYLAFPNGRELLDYLYEKEHYQQVGVVITDLEMPVISGFEVLKTIKADSRTEHLPVIINSSMSSDSNRQLAQSLEADGFVVKSNILEIHEMLKKTLS

SEQ ID NO: 6223 - protein, 296 aa, Helicobacter pylori
  misc_feature (B) LOCATION 1...296
  hypothetical: YES
VVRDIDKTTSLHLNNEAQFLCFRLDAEKDAQLYGMNIFKIREIIHYDGEVTEILGGSDGVMLGFLSVRGESIPLVDVKRWLHYNANDPSRDLKECSVKDDHNLVIVCHFSNHSIALKVLKIERIIHKNWTEISAGDKQGINEEGKLSAITRFDEQRVVQILDVEKMISDVFPSLKDLDDLTLRCIEAIQSQKLILIAEDSLSALKTLEKIVQTLELRYLAFPNGRELLDYLYEKEHYQQVGVVITDLEMPVISGFEVLKTIKADSRTEHLPVIINSSMSSDSNRQLAQSLEADGLG

SEQ ID NO: 6224 - protein, 232 aa, Helicobacter pylori
  misc_feature (B) LOCATION 1...232
  hypothetical: YES
VQFFDFSLESVITTLMKILALLIAIIGHEIMHGLSAFLFGDRSAKDAKRLSLNPIRHLDMMGSVLLPALLLIFQAPFLFGWAKPVPVDMRYIVSQKGSLACVVVSLAGVIYNFTLAVLLAFITHWSFQRLGINALSINELNLYQLALVTFLIQGILYNLVLGVFNSLPIPPLDGSKALGFLALHFKSAFLLEWFSKMERYGLLIVLIFLFIPPLSEFFIHAPTRFLFSLLLS

SEQ ID NO: 6225 - protein, 242 aa, Helicobacter pylori
  misc_feature (B) LOCATION 1...242
  hypothetical: YES
KRKSNALRFFVQFFDFSLESVITTLMKILALLIAIIGHEIMHGLSAFLFGDRSAKDAKRLSLNPIRHLDMMGSVLLPALLLIFQAPFLFGWAKPVPVDMRYIVSQKGSLACVVVSLAGVIYNFTLAVLLAFITHWSFQRLGINALSINELNLYQLALVTFLIQGILYNLVLGVFNSLPIPPLDGSKALGFLALHFKSAFLLEWFSKMERYGLLIVLIFLFIPPLSEFFIHAPTRFLFSLLLS

SEQ ID NO: 6226 - protein, 678 aa, Helicobacter pylori
  misc_feature (B) LOCATION 1...678
  hypothetical: YES
MKPLSNALFSLFLKGFYFTFFMSLLFVFNRIGFILYTGYYKHALKNPVFDEIIKTLLNGARYDNRVVSSLAILFILIGLLGLLAPKHQTRILNIMACFSIAIILFLNIANIVYYGIYGNVFDENLLEFLHEDTLTILKMSGEYPIFSSFSLFLILSVLISFIYFKLQNALFKPKNVYQTARTKPLKTFILFALFSLTQMFYINAQLSFVGASLDLSIEPAKDPFLMKITPGAFRNLYLLARNYRQSHNLKFSDFAKETPLEVAKNYFHLKENPQNNLYELLTQTSHNNSIQTIQHVFYIVSESLSSWHFDKKFDSIGLTSALQDLVKKEHAYMLSAFIESAPRTVKSLDVQITGLPYINDNNLVNSGVILPSFPMAIGNITKTLGYKNNFYYGGSGIWNKLTSFTKKQGFHAIYFNNHLLEFAKNKPYPKPIESNWGVHDNILFDYILENTNPHEKTFSMVMTLSNHAIKNVNLKAFGVPLEKIQQFVEKTPKSENLPDANSLGHIYWYDKVVVDFIKKASQKFPNSLFIITGDHFDRSYEYAKNDLYTIKSVPLILYAPTLKPKKISQVGSHLDIAPTIIELVAPKGFQFVSFGKPLFSNNTTNPPSHPNYALGYEAIATKDYFYNPSLGLRYLNESPKEPEDKQNDKIEASKFYQQLESLKALSYYLLYHGANLKD

SEQ ID NO: 6227 - protein, 685 aa, Helicobacter pylori
  misc_feature (B) LOCATION 1...685
  hypothetical: YES
KKVIVTLMKPLSNALFSLFLKGFYFTFFMSLLFVFNRIGFILYTGYYKHALKNPVFDEIIKTLLNGARYDNRVVSSLAILFILIGLLGLLAPKHQTRILNIMACFSIAIILFLNIANIVYYGIYGNVFDENLLEFLHEDTLTILKMSGEYPIFSSFSLFLILSVLISFIYFKLQNALFKPKNVYQTARTKPLKTFILFALFSLTQMFYINAQLSFVGASLDLSIEPAKDPFLMKITPGAFRNLYLLARNYRQSHNLKFSDFAKETPLEVAKNYFHLKENPQNNLYELLTQTSHNNSIQTIQHVFYIVSESLSSWHFDKKFDSIGLTSALQDLVKKEHAYMLSAFIESAPRTVKSLDVQITGLPYINDNNLVNSGVILPSFPMAIGNITKTLGYKNNFYYGGSGIWNKLTSFTKKQGFHAIYFNNHLLEFAKNKPYPKPIESNWGVHDNILFDYILENTNPHEKTFSMVMTLSNHAIKNVNLKAFGVPLEKIQQFVEKTPKSENLPDANSLGHIYWYDKVVVDFIKKASQKFPNSLFIITGDHFDRSYEYAKNDLYTIKSVPLILYAPTLKPKKISQVGSHLDIAPTIIELVAPKGFQFVSFGKPLFSNNTTNPPSHPNYALGYEAIATKDYFYNPSLGLRYLNESPKEPEDKQNDKIEASKFYQQLESLKALSYYLLYHGANLKD

SEQ ID NO: 6228 - protein, 134 aa, Helicobacter pylori
  misc_feature (B) LOCATION 1...134
  hypothetical: YES
GGYMNKETRFYNLFSLAVLGILIFPVGLANFYFGYVLKDSPCIFCWAQRINMILIGAVALLVVRFGFKPKYIALLLLMASSGLYESFYHTGSHALEDVGQGFALAILGLHTQFWALFVFFSVAGAFSGFALFCP

SEQ ID NO: 6229 - protein, 199 aa, Helicobacter pylori
  misc_feature (B) LOCATION 1...199
  hypothetical: YES
ACTRSFGRFLSFLAWLALLAVLLFFAPNAQPFKDRLLNTLQKSAFYVFFIVVGSNAVQAFVSTGPFPYIGQSDPVRFSWNLKESVWSMENWDHLKFPRSVLGRRDVGEPLKLSALPKDNDYEHSPLEIAKILKIGKKEELPLKLNGAITDLNFNEDKAILTTENQGLYLVGNDLKTIHSYMVLDSYYSATVGAFRGGGF

SEQ ID NO: 6230 - protein, 212 aa, Helicobacter pylori
  misc_feature (B) LOCATION 1...212
  hypothetical: YES
KPFIATWCWIAITARRWGLFVGADFNDDEHIVIMGNNKTSVEITPNKNANALKNFPYFLEGADSFDEVERSRLKTSRAKNYYISAARRGTKFTYLITAPNKHYKDLMIISMLNSDKQVHGEFLLELGNAKLKEKRGLGELVISALVLKDNKLYAFSKEFNTLLVIDPTKEEILEVYGLPKEIKNISAGGFKNDELVLVSYENNKNILYTLNF

SEQ ID NO: 6231 - protein, 490 aa, Helicobacter pylori
  misc_feature (B) LOCATION 1...490
  hypothetical: YES
MNKETRFYNLFSLAVLGILIFPVGLANFYFGYVLKDSPCIFCWAQRINMILIGAVALLVVRFGFKPKYIALLLLMASSGLYESFYHTGSHALEDVGQGFALAILGLHTQFWALFVFFSVVALLAVLLFFAPNAQPFKDRLLNTLQKSAFYVFFIVVGSNAVQAFVSTGPFPYIGQSDPVRFSWNLKESVWSMENWDHLKFPRSVLGRRDVGEPLKLSALPKDNDYEHSPLEIAKILKIGKKEELPLKLNGAITDLNFNEDKAILTTENQGLYLVGNDLKTIHSYMVLDSYYSATVGAFVGADFNEDENIVIMGNNKTSVEITPNKNANALKNFPYFLEGADSFDEVERSRLKTSRAKNYYISAARRGTKFTYLITAPNKHYKDLMIISMLNSDKQVHGEFLLELGNAKLKEKRGLGELVISALVLKDNKLYAFSKEFNTLLVIDPTKEEILEVYGLPKEIKNISAGGFKNDELVLVSYENNKNILYTLNF

SEQ ID NO: 6232 - protein, 373 aa, Helicobacter pylori
  misc_feature (B) LOCATION 1...373
  hypothetical: YES
MFSKSLEALHHVKRYRKRELFDPLLKDYASNDYLGLSVKKDLLQNAFDKLQSFDCHSPKASMLVNGYHPLHAELEERLADLLEFESALLVGSGFLGNLALIDTLLVKNALLFMDAHYHASGIFSTKIKPNQVIFFSHNDIKDLKQKLFNAPKNKLKFIAIEGVYSMDASIAPYDFYEIIQETPNAFLIVDEAHSFGTIGENLLGFLEYHRIKEKDKIIKLSTFSKALASYGACVLAPLQVIEFLTNRAKSVIYTTALSLLDTALTLAHLEYFIAQKQELKNELSKHQQIIFETLGVRTPTGFFTLEFENNPALLNAQYFLKEKGFLVGAIRPPTVSKPLLRVSLSLKNSLEDTKELANALLDYSKIQSSFKSG

SEQ ID NO: 6233 - protein, 376 aa, Helicobacter pylori
  misc_feature (B) LOCATION 1...376
  hypothetical: YES
SVLMFSKSLEALHHVKRYRKRELFDPLLKDYASNDYLGLSVKKDLLQNAFDKLQSFDCHSPKASMLVNGYHPLHAELEERLADLLEFESALLVGSGFLGNLALIDTLLVKNALLFMDAHYHASGIFSTKIKPNQVIFFSHNDIKDLKQKLFNAPKNKLKFIAIEGVYSMDASIAPYDFYEIIQETPNAFLIVDEAHSFGTIGENLLGFLEYHRIKEKDKIIKLSTFSKALASYGACVLAPLQVIEFLTNRAKSVIYTTALSLLDTALTLAHLEYFIAQKQELKNELSKHQQIIFETLGVRTPTGFFTLEFENNPALLNAQYFLKEKGFLVGAIRPPTVSKPLLRVSLSLKNSLEDTKELANALLDYSKIQSSFKSG

SEQ ID NO: 6234 - protein, 183 aa, Helicobacter pylori
  misc_feature (B) LOCATION 1...183
  hypothetical: YES
YFSRLHGFIYLLSVAKAYVESGMYEHVLLVGAEKTSSVLDFQDRVTCILFGDGAGACVIGRTKRLKESVLDVQISANGNFSNYLYTPRTLKPTPFNAKEEALEPFLRMKGNEVFKLAVKTLLKDVETILEKNALKPEDVRLFIPHQANFRIIQAVREHLDFKDEQVVLTVHKYGNTSAASIPT

SEQ ID NO: 6235 - protein, 182 aa, Helicobacter pylori
  misc_feature (B) LOCATION 1...182
  hypothetical: YES
YFSRLHGFIYLLSVAKAYVESGMYEHVLLVGAEKTSSVLDFQDRVTCILFGDGAGACVIGRTKRLKESVLDVQISANGNFSNYLYTPRTLKPTPFNAKEEALEPFLRMKGNEVFKLAVKTLLKDVETILEKNALKPEDVRLFIPHQANFRIIQAVREHLDFKDEQVVLTVHKYGNTSAASIP

SEQ ID NO: 6236 - protein, 292 aa, Helicobacter pylori
  misc_feature (B) LOCATION 1...292
  hypothetical: YES
MEFYASLKSIAMHVPSERVKNAEFQQFLDTSDEWIEKRTGIKERRFANDEEKSSDLGVIAAKQAIERAHLTPQDIDLVVVATLSPDFLAMPSTACVLSAKLGIENKPAFDISAACTGFIYLLSVAKAYVESGMYENVLIVGAEKTSSVLDFKDRGTCILFGDGAGACVIGRTKRLKESVLDVQISANGNFSNYLYTPRTLKPTPFNAKEEALEPFLRMKGNEVFKLAVKTLLKDVETILEKNALKPEDVRLFIPHQANFRIIQAVREHLDFKDEQVVLTVHKYGNTSAASIP

SEQ ID NO: 6237 - protein, 53 aa, Helicobacter pylori
  misc_feature (B) LOCATION 1...53
  hypothetical: YES
TLLLNLNTILAKHLNAPVVAVAQTSLDHLKAMHSHILKKEAPFAIGLFVGETP

SEQ ID NO: 6238 - protein, 58 aa, Helicobacter pylori
  misc_feature (B) LOCATION 1...58
  hypothetical: YES
GYLWAKRLEKPHFLSASLCKQQCELEASAIENLLQTKSEIITPLAFQRSLEKKAKKPD

SEQ ID NO: 6239 - protein, 128 aa, Helicobacter pylori
  misc_feature (B) LOCATION 1...128
  hypothetical: YES
QVFVFGDCAIIPNPSPKELAEIATTSAQTAKQFNIAPKVALLSYATGNSAQGEMIDKINEALTIVQKLDPQLEIDGPLQFDASIDKGVAKKKMPNSQVAGQASVFIFPDLNAGNIAYKAVQRSAKPCG

SEQ ID NO: 6240 - protein, 127 aa, Helicobacter pylori
  misc_feature (B) LOCATION 1...127
  hypothetical: YES
VFVFGDCAIIPNPSPKELAEIATTSAQTAKQFNIAPKVALLSYATGNSAQGEMIDKINEALTIVQKLDPQLEIDGPLQFDASIDKGVAKKKMPNSQVAGQASVFIFPDLNAGNIAYKAVQRSAKPCG

SEQ ID NO: 6241 - protein, 519 aa, Helicobacter pylori
  misc_feature (B) LOCATION 1...519
  hypothetical: YES
MQSLWIYPEDTEVLGAACKSLLKALKPRYQKIALFSPISGGCEGFGECESLSSLEVHSAIDKQKALELVSTAQEELLFETILKRYDELQSTHDFVINLGYAPKFFLNALLDLNTILAKHLNAPVVAVAQTSLDHLKAMHSHILKKEAPFAIGLFVGETLEKPHFLSASLCKQQCELEASAIENLLQTKSEIITPLAFQRSLEKKAKKQIKKVVLPESEDERILKAAHRLNLMGAVGLILLGDKEAINSQAKNLNLNLENVEIINPNTSHYREEFAKSLYELRKSKGLSEQEAERLALDKTYFATMLVHLGYAHAMVSGVNHTTAETIRPALQIIKTKPGVSLVSSVFLMCLDTQVFVFGDCAIIPNPSPKELAEIATTSAQTAKQFNIAPKVALLSYATGNSAQGEMIDKINEALTIVQKLDPQLEIDGPLQFDASIDKGVAKKKMPNSQVAGQASVFIFPDLNAGNIAYKAVQRSAKAVAIGPILQGLNKPINDLSRGALVEDIVNTVLISAIQAQDY

SEQ ID NO: 6242 - protein, 136 aa, Helicobacter pylori
  misc_feature (B) LOCATION 1...136
  hypothetical: YES
MWSFIQKIFKALVIAPLDFITKYFKSFVLLLIVLVFFSAKESAPSEPPNLAKLYLNGAIFSTEDFDKEVDKILKTPSIKGVLLLIDSPGGAVSASVELSEKIADLKQKMPVLAYAKGGYGERELLCGHASERSLCL

SEQ ID NO: 6243 - protein, 151 aa, Helicobacter pylori
  misc_feature (B) LOCATION 1...151
  hypothetical: YES
SLKHLKYNTLLWSNIKFRKSCMWSFIQKIFKALVIAPLDFITKYFKSFVLLLIVLVFFSAKESAPSEPPNLAKLYLNGAIFSTEDFDKEVDKILKTPSIKGVLLLIDSPGGAVSASVELSEKIADLKQKMPVLAYAKGGYGERELLCWHAS

SEQ ID NO: 6244 - protein, 258 aa, Helicobacter pylori
  misc_feature (B) LOCATION 1...258
  hypothetical: YES
SERALESVKQFQEPNDLEAIVKLILKSQEKGGKLVIVGVGKSALVAQKIVASMLSTGNRSAFLHPTEAMHGDLGMVEKNDVILMISYGGESLELLNLVSHLKRLSHKIITFTKSPTSSLSKLGDYYLSLKIKKEACPINTAPTTSTTLTLALGDVLMACLMRAKNFSQEDFASFHPGGLLGKKLFVKVKDLLQTTNLPLIAPSTSFKDALIEMSEKRLGSAILVNDNNELVGVLSDGDVRRALLKGLSLESEVKHLPL

SEQ ID NO: 6245 - protein, 329 aa, Helicobacter pylori
  misc_feature (B) LOCATION 1...329
  hypothetical: YES
MPILFDCNATAIQVLRDEASALLESVKQFQEPNDLEAIVKLILKSQEKGGKLVIVGVGKSALVAQKIVASMLSTGNRSAFLHPTEAMHGDLGMVEKNDVILMISYGGESLELLNLVSHLKRLSHKIITFTKSPTSSLSKLGDYYLSLKIKKEACPINTAPTTSTTLTLALGDVLMACLMRAKNFSQEDFASFHPGGLLGKKLFVKVKDLLQTTNLPLIAPSTSFKDALIEMSEKRLGSAILVNDNNELVGVLSDGDVRRALLKGLSLESEVKHFATLKPKSFKNLDALLLEALEFLERHKIQLLVCVDDRNKVLGVLHLHQLLELGLKA

SEQ ID NO: 6246 - protein, 202 aa, Helicobacter pylori
  misc_feature (B) LOCATION 1...202
  hypothetical: YES
GKKFASMLKASKGFANALNHESKDLKTCVDNLTKTAHKQERSLKNTTQSLEEITNIITMIDSKSQEMISQGEDIMSVVDMNRDIADQTNLLALNAAIEAARAGEHGRGFAVVADEVRKLAERTQKSLSEIEANINILVQSIADNAESIKMQNKGVENIHNSINALQQDVQDNLTIANHSLQVSTKIDGISQDILEDVSKKKF

SEQ ID NO: 6247 - protein, 216 aa, Helicobacter pylori
  misc_feature (B) LOCATION 1...216
  hypothetical: YES
PYSPLIFLKKKGITANHWRWAIGKYVNKSLVFKEATNTKFIIITTLILGVLVLAFLVFIIISNLITKRISRVNNTLNDFFNLLNNPKNNHAISLTPPSAYDEIGQMQASINENILKTQESIQADNKAIQNSIEVTNYVENGDFTQEIACVPKNKDLQALRNTINSIIQYFRNQIGADIESLNNALEHYKNLDFTHHIQNPKANMEKALNTLGQEIC

SEQ ID NO: 6248 - protein, 299 aa, Helicobacter pylori
  misc_feature (B) LOCATION 1...299
  hypothetical: YES
SFSINSFKKAKGMKSTRIGSKIVMMVCAVVIVISAVMGVIISYKVESVLQSQATELLQKKAQLVSFKIQGIMKRIFMGANTLERFLSDENGAINDTLKRRMLSEFLLANPHVLLVSAIYTNNNERMITAMNMDSKIAYPNTALNENMTNQIHSLKSITRSDPYYKEVNGDKIYGMDITLPLMGKNQNVIGALNFFLNIDAFYTDVVGKKKSNTFLMGKDGRILINPNREIQDKILSAINPDKRVAKAVEYYNQNEAGTLSYHSLSGNTETFLAIQPFDFFEEKGNNGQSLALGNWEICQ

SEQ ID NO: 6249 - protein, 673 aa, Helicobacter pylori
  misc_feature (B) LOCATION 1...673
  hypothetical: YES
MKSTRIGSKIVMMVCAVVIVISAVMGVIISYKVESVLQSQATELLQKKAQLVSFKIQGIMKRIFMGANTLERFLSDENGAINDTLKRRMLSEFLLANPHVLLVSAIYTNNNERMITAMNMDSKIAYPNTALNENMTNQIHSLKSITRSDPYYKEVNGDKIYGMDITLPLMGKNQNVIGALNFFLNIDAFYTDVVGKKKSNTFLMGKDGRILINPNREIQDKILSAINPDKRVAKAVEYYNQNEAGTLSYHSLSGNTETFLAIQPFDFFEEKGNNGNHWRWAIGKYVNKSLVFKEATNTKFIIITTLILGVLVLAFLVFIIISNLITKRISRVNNTLNDFFNLLNNPKNNHAISLTPPSAYDEIGQMQASINENILKTQESIQADNKAIQNSIEVTNYVENGDFTQEIACVPKNKDLQALRNTINSIIQYFRNQIGADIESLNNALEHYKNLDFTHHIQNPKANMEKALNTLGQEISSMLKASLGFANALNHESKDLKTCVDNLTKTAHKQERSLKNTTQSLEEITNIITMIDSKSQEMISQGEDIKSVVDMIRDIADQTNLLALNAAIEAARAGEHGRGFAVVADEVRKLAERTQKSLSEIEANINILVQSIADNAESIKMQNKGVENIHNSINALQQDVQDNLTIANHSLQVSTKIDGISQDILEDVSKKKF

SEQ ID NO: 6250 - protein, 72 aa, Helicobacter pylori
  misc_feature (B) LOCATION 1...72
  hypothetical: YES
SVAWCCPGVSHVLDRFVHGGVVDYVYYHYGFDFAIFNFADVMIDVGVGVLLLRQFFFKQKQNKIKGIITLFK

SEQ ID NO: 6251 - protein, 105 aa, Helicobacter pylori
  misc_feature (B) LOCATION 1...105
  hypothetical: YES
RAVVLNTTQKSLLVFMGVFFLIFGVNQAIKHAILEGFHYESLVIDIVLVFNKGVAFSLLSFLEGGLKYLQILLILGLFIFLMRQKELFKSHAIEFGMVFGAGVSN

SEQ ID NO: 6252 - protein, 163 aa, Helicobacter pylori
  misc_feature (B) LOCATION 1...163
  hypothetical: YES
VLNTTQKSLLVFMGVFFLIFGVDQAIKHAILEGFHYESLVIDIVLVFNKGVAFSLLSFLEGGLKYLQILLILGLFIFLMRQKELFKSHAIEFGMVFGAGVSNVLDRFVHGGVVDYVYYHYGFDFAIFNFADVMIDVGVGVLLLRQFFFKQKQNKIKGIITLFK

SEQ ID NO: 6253 - protein, 97 aa, Helicobacter pylori
  misc_feature (B) LOCATION 1...97
  hypothetical: YES
SKRECILMKTEKQKFLEMRKDGANSVLILRGDWDFRTSVFRLDELKKNLLDHQGSLKMDFSGCQKIDFVFGMFLFDLVKERSLNIELCNVSENNACA

SEQ ID NO: 6254 - protein, 154 aa, Helicobacter pylori
  misc_feature (B) LOCATION 1...154
  hypothetical: YES
ARITLALESGLKTGLEKEDDLESKKAGKKYELMITKLGKSLVETYNTFLNAFNFCGMILFYFIKSVFNPKRFCIIPLLYHINESGFKVLPVSILTVFIVGFAVALQGALQLQDLGAPLMSVEMTAKLALREIGPFILTLVVAGRSASSFTAQIG

SEQ ID NO: 6255 - protein, 377 aa, Helicobacter pylori
  misc_feature (B) LOCATION 1...377
  hypothetical: YES
MKTEKQKFLEMRKDGANSVLILRGDWDFRTSVFRLDELKKNLLDHQGSLKMDFSGCQKIDFVFGMFLFDLVKERSLNIELCNVSENNACALKVVKDWLEKEDDLESKKAGKKYELMITKLGKSLVETYNTFLNAFNFCGMILFYFIKSVFNPKRFCIIPLLYHINESGFKVLPVSILTVFIVGFAVALQGALQLQDLGAPLMSVEMTAKLALREIGPFILTLVVAGRSASSFTAQIGVMKITEELDAMKTMGFNPFEFLVLPRVLALVIVLPLLVFIADAFAILGGMFAIKYQLDLGFPSYIDRLHDTVGWNHFLVGIVKAPFWGFAIAMVGCMRGFEVKGDTESIGRLTTISVVNALFWIIFLDAIFSILFSKLNI

SEQ ID NO: 6256 - protein, 260 aa, Helicobacter pylori
  misc_feature (B) LOCATION 1...260
  hypothetical: YES
MQKDYQKLIVYLCDFLEKEVQKKGFKKVVYGLSGGLDSAVVGVLCQKVFKENAHALLMPSSVSMPESRTDALNLCEKFSIPYTEYSIAPYDKIFGSHFKDASLTRKGNFCARLRMAFLYDYSLKSDSLVIGTSNKSERMLGYGTLFGDLACAINPIGELFKTEVYELAYYLNIPKKILNKPPSADLFVGQSDEKDLGYPYSVIDPLLKDIEALFQTKPIHLETLIQLGYAEILVKNIISRIQKNAFKLELPTIAKRFNPE

SEQ ID NO: 6257 - protein, 261 aa, Helicobacter pylori
  misc_feature (B) LOCATION 1...261
  hypothetical: YES
GMQKDYQKLIVYLCDFLEKEVQKKGFKKVVYGLSGGLDSAVVGVLCQKVFKENAHALLMPSSVSMPESRTDALNLCEKFSIPYTEYSIAPYDKIFGSHFKDASLTRKGNFCARLRMAFLYDYSLKSDSLVIGTSNKSERMLGYGTLFGDLACAINPIGELFKTEVYELAYYLNIPKKILNKPPSADLFVGQSDEKDLGYPYSVIDPLLKDIEALFQTKPIHLETLIQLGYAEILVKNIISRIQKNAFKLELPTIAKRFNPE

SEQ ID NO: 6258 - protein, 220 aa, Helicobacter pylori
  misc_feature (B) LOCATION 1...220
  hypothetical: YES
MAENSFKNVSIQPKPFFLLPVKTLFLLGGVFSAFFILIAGLVFFDYANSMDNAIFNLMRSNSSNPILDQTLQRIVFLGSSQFVLPLSLLVGVFLSLYRKNLALGVWFVLSVVIFEALLESLKHLLAHSIQWLSHSANFPSTIALSLALFYGLLILLIPHFIAHQIFQNILSYSLFGLILLIGLALIVLGVSFSSVLGGVCLGALGACFSIGIYLSVFQKI

SEQ ID NO: 6259 - protein, 220 aa, Helicobacter pylori
  misc_feature (B) LOCATION 1...220
  hypothetical: YES
CWRFFPKCFQNNPKPFFLLPVKTLFLLGGVFSAFFILIAGLVFFDYANSMDNAIFNLMRSNSSNPILDQTLQRIVFLGSSQFVLPLSLLVGVFLSLYRKNLALGVWFVLSVVIFEALLESLKHLLAHSIQWLSHSANFPSTIALSLALFYGLLILLIPHFIAHQIFQNILSYSLFGLILLIGLALIVLGVSFSSVLGGVCLGALGACFSIGIYLSVFQKI

SEQ ID NO: 6260 - protein, 77 aa, Helicobacter pylori
  misc_feature (B) LOCATION 1...77
  hypothetical: YES
IRGHAGFRKRKEVLHIQFDKECEQVTLGGYVFSLLERMPIEGDTIVSHGYAFEVLSVDGARIKRLKAVKQDQGENEA

SEQ ID NO: 6261 - protein, 119 aa, Helicobacter pylori
  misc_feature (B) LOCATION 1...119
  hypothetical: YES
IRFRDESKLSTYLSATQLGITLSSLALGWVGEPAIAKLLAALFESMDLRENPIFIHSMSVVIAFLSITFLHVVLGEIVPKSLAIAKSEKATLFAARPLHVFWVVFYPVVRLFDVIALFF

SEQ ID NO: 6262 - protein, 210 aa, Helicobacter pylori
  misc_feature (B) LOCATION 1...210
  hypothetical: YES
SAEGMHSEEELKIIVGESLREGIIDSVEGEIIKNAVNFSDTSAKEIMTPRKDMVCLDEENSYEENIDIVLKSHFTRYPYCKGSKDNIIGMVHIRDLLSRSIFTPKMHDFKQIVRKMIIVPESASISQILIKMKKEQIHTALVIDEYGGTAGLLTMEDIIEEIMGEISDEYDLKQEGVNKLEEGVFELEGMLDLESVKKCFISNLTKNASR

SEQ ID NO: 6263 - protein, 449 aa, Helicobacter pylori
  misc_feature (B) LOCATION 1...449
  hypothetical: YES
MGRNQGAYLDPSESILMLMVAFLLVLLNAFFVLSEFALVKVRKTRLEELVKIGNSNAKLALEMSQRLDTYLSATQLGITLSSLALGWVGEPAIAKLLAALFESMDLRENPIFIHSMSVVIAFLSITFLHVVLGEIVPKSLAIAKSEKATLFAARPLHVFWVVFYPVVRLFDVIAHFFLKKMGVNPKEHEGMHSEEELKIIVGESLREGIIDSVEGEIIKNAVDFSDTSAKEIMTPRKDMVCLDEENSYEENIDIVLKSHFTRYPYCKGSKDNIIGMVHIRDLLSRSIFTPKMHDFKQIVRKMIIVPESASISQILIKMKKEQIHTALVIDEYGGTAGLLTMEDIIEEIMGEISDEYDLKQEGVNKLEEGVFELEGMLDLESVEEVLHIQFDKECEQVTLGGYVFSLLERMPIEGDTIVSHGYAFEVLSVDGARIKRLKAVKQDQGENEA

SEQ ID NO: 6264 - protein, 211 aa, Helicobacter pylori
  misc_feature (B) LOCATION 1...211
  hypothetical: YES
MSKELILKRIKEARAKHAIQGANPIYRNIIKVEFEDLVEEYKHFQVLNKAELIESAKENLEQAILKALENFQSKKVLHSTDLNLNFEAFKDFTLQPYDKEIEAMREELFEIDTALLHGVCGISSLGMIGAVSSHASPRLLSLITLNCIILLKKESIVRNLSEGVQALKNQGQNGALPTNMLLIGGPSRTADIELKTVFGVHGPQKVAVILY

SEQ ID NO: 6265 - protein, 212 aa, Helicobacter pylori
  misc_feature (B) LOCATION 1...212
  hypothetical: YES
FMSKELILKRIKEARAKHAIQGANPIYRNIIKVEFEDLVEEYKHFQVLNKAELIESAKENLEQAILKALENFQSKKVLHSTDLNLNFEAFKDFTLQPYDKEIEAMREELFEIDTALLHGVCGISSLGMIGAVSSHASPRLLSLITLNCIILLKKESIVRNLSEGVQALKNQGQNGALPTNMLLIGGPSRTADIELKTVFGVHGPQKVAVILY

SEQ ID NO: 6266 - protein, 47 aa, Helicobacter pylori
  misc_feature (B) LOCATION 1...47
  hypothetical: YES
YPEVLKILEKLDSKISDEKMQDLNYQVEALKKSPQIVAKDFLESIGL

SEQ ID NO: 6267 - protein, 102 aa, Helicobacter pylori
  misc_feature (B) LOCATION 1...102
  hypothetical: YES
HFIIVALSSLIVLVFGVLIGVFVFYNSKARAFLLPVVNFLYTIPSLALFALFIPVIGVYKSYYFSYFFKYSMTFSKNFGLSLNLPSPVLQLSQIHSLPQPVS

SEQ ID NO: 6268 - protein, 170 aa, Helicobacter pylori
  misc_feature (B) LOCATION 1...170
  hypothetical: YES
TQLRKTFLYQISLVIMPNMGVFKQLIKKLYEWLLHSIDMVIQHWVAMALKISVVKYVIKEFHDRFIYFIDLLAQQFIIVALSSLIVLVFGVLIGVFVFYNSKARAFLLPVVNFLYTIPSLALFALFIPVIGVGLKNALLVLVLYGLLPIVHSTYNALKEAREEVLKPLLG

SEQ ID NO: 6269 - protein, 339 aa, Helicobacter pylori
  misc_feature (B) LOCATION 1...339
  hypothetical: YES
PQRVVFRVRFLLAIPQILVGLRIAVVMLVAMAGIGALIGAGGLGQAIFRGLNTQNTTILVAGSFIIALFSVLADQFVSVFQHENALQRLFSQNATQKQKRRVYVNLAVFLFLLLASALWLIPRSAIEEKPLVVATKPSSEQYILGEILSLLLEKHHIPIKRAFGIGGGTMNIHPALIRGDFDLYVEYTGTAWVNTLKNPLTQKVDFETIKKRYEKEFNLLWVGLLGFNNTYSLAISKEDAQKYAIETFSDLAFHSPNFDFGAEFDFFEREDAFKGLIKAYRFHFRSLHEMDINLRYKSFESHKINALDVFTTDAQIKELDLKVLKDDKGFFPNYQAGIV

SEQ ID NO: 6270 - protein, 553 aa, Helicobacter pylori
  misc_feature (B) LOCATION 1...553
  hypothetical: YES
MPNMGVFKQLIKELYEWLLHSVDMVIQHLVAMALKISVVKYLIKEFHDRFIYFIDLLAQHFIIVALSSLIVLVFGVLIGVFVFYNSKARAFLLPVVNFLYTIPSLALFALFIPVIGVGLKNALLVLVLYGLLPIVHSTYNALKEAREEVIKAAIGLGCNPKELFFRVRFLLAIPQILVGLRIAVVMLVAMAGIGALIGAGGLGQAIFRGLNTQNTTLLVAGSFIIALFSVLADQFVSVFQHENALQRLFSQNATQKQKRRVYVNLAVFLFLLLASALWLIPRSAIEEKPLVVATKPSSEQYILGEILSLLLEKHHIPIKRAFGIGGGTMNIHPALIRGDFDLYVEYTGTAWVNTLKNPLTQKVDFETIKKRYEKEFNLLWVGLLGFNNTYSLAISKEDAQKYAIETFSDLAFHSPNFDFGAEFDFFEREDAFKGLIKAYRFHFRSLHEMDINLRYKSFESHKINALDVFTTDAQIKELDLKVLKDDKGFFPNYQAGIVIRKETIKKYPEVLKILEKLDSKISDEKMQDLNYQVEALKKSPQIVAKDFLESIGL

SEQ ID NO: 6271 - protein, 556 aa, Helicobacter pylori
  misc_feature (B) LOCATION 1...556
  hypothetical: YES
LVIMPNMGVFKQLIKKLYEWLLHSIDMVIQHLVAMALKISVVKYLIKEFHDRFIYFIDLLAQHFIIVALSSLIVLVFGVLIGVFVFYNSKARAFLLPVVNFLYTIPSLALFALFIPVIGVGLKNALLVLVLYGLLPIVHSTYNALKEAREEVIKAAIGLGCNPKELFFRVRFLLAIPQILVGLRIAVVMLVAMAGIGALIGAGGLGQAIFRGLNTQNTTLLVAGSFIIALFSVLADQFVSVFQHENALQRLFSQNATQKQKRRVYVNLAVFLFLLLASALWLIPRSAIEEKPLVVATKPSSEQYILGEILSLLLEKHHIPIKRAFGIGGGTMNIHPALIRGDFDLYVEYTGTAWVNTLKNPLTQKVDFETIKKRYEKEFNLLWVGLLGFNNTYSLAISKEDAQKYAIETFSDLAFHSPNFDFGAEFDFFEREDAFKGLIKAYRFHFRSLHEMDINLRYKSFESHKINALDVFTTDAQIKELDLKVLKDDKGFFPNYQAGIVIRKETIKKYPEVLKILEKLDSKISDEKMQDLNYQVEALKKSPQIVAKDFLESIGL

SEQ ID NO: 6272 - protein, 185 aa, Helicobacter pylori
  misc_feature (B) LOCATION 1...185
  hypothetical: YES
SNLNQSLRGGILFKRMVLIALLGVFSSVSLSAKSLLRDDGILVSDLKGMKSELSDAPAWVFEDPKVPYEEMGVAYIPVNNKYLGIEQATLNAKLSLIVVFHEIMLKYKKRFMEQFHESEQTATNISYAIYNYLATKIRVSDTYTNLKSEVAVVKIKLEGCQIEQIKRYLKASVENLNDNEIAYIG

SEQ ID NO: 6273 - protein, 188 aa, Helicobacter pylori
  misc_feature (B) LOCATION 1...188
  hypothetical: YES
LFKRMVLIALLGVFSSVSLSAKSLLRDDGILVSDLKGMKSELSDAPAWVFEDPKVPYEEMGVAYIPVNNKYLGIEQATLNAKLSLIVVFHEIMLKYKKRFMEQFHESEQTATNISYAIYNYLATKIRVSDTYTNLKSEVAVVKIKLEGCQIEQIKRYLKASVENLNDNEIAYIAKVAQKEFGSVCTLR

SEQ ID NO: 6274 - protein, 63 aa, Helicobacter pylori
  misc_feature (B) LOCATION 1...63
  hypothetical: YES
RWRYSGVVGPNGGSKANPVGTIYIGAQRLGSQAFIDRCFFEGDRESIQNKSVEHALNMLARML

SEQ ID NO: 6275 - protein, 165 aa, Helicobacter pylori
  misc_feature (B) LOCATION 1...165
  hypothetical: YES
GFERLKMKFKFLNMDNESGFILIEKELERLNVTAQVKEDGIELKGKNTEQARIYLQTLFNSNIVELDDNKKSANAVIERLKSLGLKMAVAESCSGGLLSHAFTSISGASAVFMGGVVCYSEEVKRELLKVNATTLKVFGVYSEECVKEMLSGVFLNFKVDLALAI

SEQ ID NO: 6276 - protein, 218 aa, Helicobacter pylori
  misc_feature (B) LOCATION 1...218
  hypothetical: YES
MKFKFLNMDNESGFILIEKELERLNVTAQVKEDGIELKGKNTEQARIYLQTLFNSNIVELDDNKKSANAVIERLKSLGLKMAVAESCSGGLLSHAFTSISGASAVFMGGVVCYSEEVKRELLKVNATTLKVFGVYSEECVKEMLSGVFLNFKVDLALAISGVAGPNGGSKANPVGTIYIGAQRLGSQAFIDRCFFEGDRESIQNKSVEHALNMLARML

SEQ ID NO: 6277 - protein, 121 aa, Helicobacter pylori
  misc_feature (B) LOCATION 1...121
  hypothetical: YES
RLWGCGSIHLIHDETTKAKTPYIANWIQFLEPIKEELKNHPQFSNHFAKRSWLTERLNARLQLNNLLSYDFIQERVINNELKIFGWHYIIKTCRIYNYNFESHFFEPIEETIKQRISHENF

SEQ ID NO: 6278 - protein, 221 aa, Helicobacter pylori
  misc_feature (B) LOCATION 1...221
  hypothetical: YES
VEAFLGALEFQENEYEEFKELYESLKTKQKPHTLFISCVDSRVVPNLITGTQPGELYVIRNMGNVIPPKTSYKESLSTIASVEYAIAHVGVQNLIICGHSDCGACGSIHLIHDETTKAKTPYIANWIQFLEPIKEELKNHPQFSNHFAKRSWLTERLNARLQLNNLLSYDFIQERVINNELKIFGWHYIIETGRIYNYNFESHFFEPIEETIKQRISHENF

SEQ ID NO: 6279 - protein, 221 aa, Helicobacter pylori; identical to SEQ ID NO: 6278
  misc_feature (B) LOCATION 1...221
  hypothetical: YES

SEQ ID NO: 6280 - protein, 228 aa, Helicobacter pylori
  misc_feature (B) LOCATION 1...228
  hypothetical: YES
MRFKGSRVEAFLGALEFQENEYEEFKELYESLKTKQKPHTLFISCVDSRVVPNLITGTQPGELYVIRNMGNVIPPKTSYKESLSTIASVEYAIAHVGVQNLIICGHSDCGACGSIHLIHDETTKAKTPYIANWIQFLEPIKEELKNHPQFSNHFAKRSWLTERLNARLQLNNLLSYDFIQERVINNELKIFGWHYIIETGRIYNYNFESHFFEPIEETIKQRISHENF

SEQ ID NO: 6281 - protein, 92 aa, Helicobacter pylori
  misc_feature (B) LOCATION 1...92
  hypothetical: YES
FPFAQIKPFNACKRDDRLRKNQRNLQNSHRKEVSFLFLWRWDADFMNPLLQDYARILLEWNQTHNLSGARNLSELEPQIHRRSKALRICQRF

SEQ ID NO: 6282 - protein, 128 aa, Helicobacter pylori
  misc_feature (B) LOCATION 1...128
  hypothetical: YES
LDIGSGAGLPAIPLALEKPEAQFILLEPRVKRAAFLNYLKSVLPLNNIEIIKKRLEDYQNLLQVDLITSRAVASSSFLIEKSQRFLKDKGYFLFYKGEQLKNEIAYKTTECFMHQKRVYFYKSKESLC

SEQ ID NO: 6283 - protein, 148 aa, Helicobacter pylori
  misc_feature (B) LOCATION 1...148
  hypothetical: YES
NPRFTDALKPLEFVKDFKSCLDIGSGAGLPAIPLALEKPEAQFILLEPRVKRAAFLNYLKSVLPLNNIEIIKKRLEDYQNLLQVDLITSRAVASSSFLIEKSQRFLKDKGYFLFYKGEQLKNEIAYKTTECFMHQKRVYFYKSKESLC

SEQ ID NO: 6284 - protein, 178 aa, Helicobacter pylori
  misc_feature (B) LOCATION 1...178
  hypothetical: YES
MNPLLQDYARILLEWNQTHNLSGARNLSELEPQITDALKPLEFVKDFKSCLDIGSGAGLPAIPLALEKPEAQFILLEPRVKRAAFLNYLKSVLPLNNIEIIKKRLEDYQNLLQVDLITSRAVASSSFLIEKSQRFLKDKGYFLFYKGEQLKNEIAYKTTECFMHQKRVYFYKSKESLC

SEQ ID NO: 6285 - protein, 154 aa, Helicobacter pylori
  misc_feature (B) LOCATION 1...154
  hypothetical: YES
VGVLLALFFFYAKNNLLENTQIRMQYTADAIAKSLLELNNASSLEPLKILEERFKNTPFVLLDADNRVKFSNIGVFVASFKNDALIKTPYFALKKQGFYLTDSAPTNRLGVSKIIIAEEEIQKIFIPLYKMIGYVFLGASLFVALIAMWLYKIP

SEQ ID NO: 6286 - protein, 174 aa, Helicobacter pylori
  misc_feature (B) LOCATION 1...174
  hypothetical: YES
MPHSLKKRFLIVYTLSTLLLVGVLLALFFFYAKNNLLENTQIRMQYTADAIAKSLLELNNASSLEPLKILEERFKNTPFVLLDADNRVKFSNIGVFVASFKNDALIKTPYFALKKQGFYLTDSAPTNRLGVSKIIIAEEEIQKIFIPLYKMIGYVFLGASLFVALIAMWLYKIP

SEQ ID NO: 6287 - protein, 188 aa, Helicobacter pylori
  misc_feature (B) LOCATION 1...188
  hypothetical: YES
KAVLFNPLPTKRSVMPHSLKKRFLIVYTLSTLLLVGVLLALFFFYAKNNLLENTQIRMQYTADAIAKSLLELNNASSLEPLKILEERFKNTPFVLLDADNRVKFSNIGVFVASFKNDALIKTPYFALKKQGFYLTDSAPTNRLGVSKIIIAEEEIQKIFIPLYKMIGYVFLGASLFVALIAMWLYKIP

SEQ ID NO: 6288 - protein, 146 aa, Helicobacter pylori
  misc_feature (B) LOCATION 1...146
  hypothetical: YES
MPYALRKRFFKRLLLFFLIVCMINLHAKSYLFSPLPPAHQQIIKTEPCSLECLKDLMLQNQIFSFVSQYDDNNQDESLKTYYKDILNKLNPVFIASQTPAKESYEPKIELAILLPKKVVGRYAILVMNTLLAYFEHQKQRFQYPSL

SEQ ID NO: 6289 - protein, 429 aa, Helicobacter pylori
  misc_feature (B) LOCATION 1...429
  hypothetical: YES
MPYALRKRFFKRLLLFFLIVCMINLHAKSYLFSPLPPAHQQIIKTEPCSLECLKDLMLQNQIFSFVSQYDDNNQDESLKTYYKDILNKLNPVFIASQTPAKESYEPKIELAILLPKKVVGRYAILVMNTLLAYLNTRNNDFNIQVFDSDEESPEKLEETYKEIEKEKFPFIIALLTKEGVENLLQNTTINTPTYVPTVNKTQLENHTELSLSERLYFGGIDYKEQLGMLATFISPNSPVIEYDDDGLIGERLRQITESLNVEVKHQENISYKQATSFSKNFRKHDAFFKNSTLILNTPTTKSGLILSQIGLLEYKPLKILSTQINFNPSLLLLTQPKDRKNLFIVNALQNSDETLIEYASLLESDLRHDWVNYSSAIGLEMFLNTLDPHFKKSFQESLEDNQVRYHNQIYQALGYSFEPIKNESETKKE

SEQ ID NO: 6290 - protein, 430 aa, Helicobacter pylori
  misc_feature (B) LOCATION 1...430
  hypothetical: YES
KMPYALRKRFFKRLLLFFLIVCMINLHAKSYLFSPLPPAHQQIIKTEPCSLECLKDLMLQNQIFSFVSQYDDNNQDESLKTYYKDILNKLNPVFIASQTPAKESYEPKIELAILLPKKVVGRYAILVMNTLLAYLNTRNNDFNIQVFDSDEESPEKLEETYKEIEKEKFPFIIALLTKEGVENLLQNTTINTPTYVPTVNKTQLENHTELSLSERLYFGGIDYKEQLGMLATFISPNSPVIEYDDDGLIGERLRQITESLNVEVKHQENISYKQATSFSKNFRKHDAFFKNSTLILNTPTTKSGLILSQIGLLEYKPLKILSTQINFNPSLLLLTQPKDRKNLFIVNALQNSDETLIEYASLLESDLRHDWVNYSSAIGLEMFLNTLDPHFKKSFQESLEDNQVRYHNQIYQALGYSFEPIKNESETKKE

SEQ ID NO: 6291 - protein, 122 aa, Helicobacter pylori
  misc_feature (B) LOCATION 1...122
  hypothetical: YES
RRSLYYVFIKSYAILAEATARFAGDYATENLTSRIALPCSDYVGRVIGKDGKNIEAFKKISGVDIEFSEDSSELCLSSFNIYRREVASETIKILIEDGRIQPNRIEEVYPKIHPQHGKRIAF

SEQ ID NO: 6292 - protein, 200 aa, Helicobacter pylori
  misc_feature (B) LOCATION 1...200
  hypothetical: YES
RIIKGNIMSSGLIYISLEVLVACLITALIMYYVMKKIYYARGQAILKGASAKAKLMEFQAKSFVEAEEMRMKSQECKLQQQYENKNLQLQTHFDKKEAHLKHLEAQHKEFVRDEKRYLEKEKKELEKERQILEQERENFKKQRAICKEAQAKALDAMLNYMAYTKDEIKSMILEQLEQELEAQKSALIRRYEEEAFIMCL

SEQ ID NO: 6293 - protein, 250 aa, Helicobacter pylori
  misc_feature (B) LOCATION 1...250
  hypothetical: YES
KTAVSSLTGLKRFILKFTRNMEKELLSEGESVVLELELGTMEDELKILIGKMRYRFSFGQNALQHSKEIALLSGLIAEQLGGDKKLARRAGILHDIGKALTQELGRDHVNLGVEVCKRHKEDPVVINAIYAHHGHEEIMSVECASVCAADALSAGRPGARRKSDEEYAKRMQALEEIALEFDGVEKAYAMESGRELRVIVKSNQVRDNQVPIIARKIAKRIEESTQYVGEVGVQVVRENRFKTTATLSND

SEQ ID NO: 6294 - protein, 529 aa, Helicobacter pylori
  misc_feature (B) LOCATION 1...529
  hypothetical: YES
MSSGLIYISLEVLVACLITALIMYYVMKKIYYARGQAILKGASAKAKLMEFQAKSFVEAEEMRMKSQECKLQQQYENKNLQLQTHFDKKEAHLKHLEAQHKEFVRDEKRYLEKEKKELEKERQILEQERENFKKQRAICKEAQAKALDAMLNYMAYTKDEIKSMILEQLEEELEAQKSALIRRYEKEAKEEGKKKSYAILAEATARFAGDYATENLTSRIALPCSDYVGRVIGKDGKNIEAFKKISGVDIEFSEDSSELCLSSFNIYRREVASETIKILIEDGRIQPNRIEEVYHRVARNMEKELLSEGESVVLELELGTMEDELKILIGKMRYRFSFGQNALQHSKEVALLAGLIAEQLGGDKKLARRAGILHDIGKALTQELGRDHVNLGVEVCKRHKEDPVVINAIYAHHGHEEIMSVECASVCAADALSAGRPGARRKSDEEYAKRMQALEEIALEFDGVEKAYAMESGRELRVIVKSNQVRDNQVPIIARKIAKRIEESTQYVGEVGVQVVRENRFKTTATLKQ

SEQ ID NO: 6295 - protein, 114 aa, Helicobacter pylori
  misc_feature (B) LOCATION 1...114
  hypothetical: YES
MATIQPFNHSTIQPFNHSTIQPFNHSIIQSFNHSTIQATLPYFYNYLSFYKNLFKNPLFFIIPPFINPFINPFINPFINPFINPFINPFINPFINPFINPFINPFINPFINPFI

SEQ ID NO: 6296 - protein, 124 aa, Helicobacter pylori
  misc_feature (B) LOCATION 1...124
  hypothetical: YES
EWQPFNHSTIQPFNHSTIQPFNHSIIQSFNHSIIQSFNHSTIQATLPYFYNYLSFYKNLFKNPLFFIIPPFINPFINPFINPFINPFINPFINPFINPFINPFINPFINPFINPFINPFINPFI

SEQ ID NO: 6297 - protein, 138 aa, Helicobacter pylori
  misc_feature (B) LOCATION 1...138
  hypothetical: YES
IKRIIKSNASLNQLNTTRYNTPSHLFFKKGVGMATIQPFNHSTIQPFNHSTIQPFNHSIIQSFNHSTIQATLPYFYNYLSFYKNLFKNPLFFIIPPFINPFINPFINPFINPFINPFINPFINPFINPFINPFINPFI

SEQ ID NO: 6298 - protein, 143 aa, Helicobacter pylori
  misc_feature (B) LOCATION 1...143
  hypothetical: YES
IQYPKSSFFQKRGRNGNHSTIQPFNHSTIQPFNHSIIQSFNHSIIQSFNHSIIQSFNHSTIQATLPYFYNYLSFYKNLFKNPLFFIIPPFINPFINPFINPFINPFINPFINPFINPFINPFINPFINPFINPFINPFINPFI

SEQ ID NO: 6299 - protein, 174 aa, Helicobacter pylori
  misc_feature (B) LOCATION 1...174
  hypothetical: YES
IKRIIKSNASLNQLNTTRYNTPSHLFFKKGVGMATIQPFNHSTIQPFNHSTIQPFNHSIIQSFNHSTIQATLPYFYNYLSFYKNLFKNPLFFIIPPFINPFINPFINPFINPFINPFINPFINPFINPFINPFINPFINPFINPFINPFINPFINPFISPSLTHATTFSNHLIP

SEQ ID NO: 6300 - protein, 128 aa, Helicobacter pylori
  misc_feature (B) LOCATION 1...128
  hypothetical: YES
MRQYSQSALNTNHGAWGILFDVSSALALDDHALLQSSANRWQEWVFKAIDENGVIASAITRSDTSDYHGGPTKGIKGIAYTNFALLAITISGELLFENGYDLWGSGAGQRLSVAYNKAATWILNPETF

SEQ ID NO: 6301 - protein, 128 aa, Helicobacter pylori
  misc_feature (B) LOCATION 1...128
  hypothetical: YES
RMRQYSQSALNTNHGAWGILFDVSSALALDDHALLQSSANRWQEWVFKAIDENGVIASAITRSDTSDYHGGPTKGIKGIAYTNFALLAITISGELLFENGYDLWGSGAGQRLSVAYNKAATWILNPET

SEQ ID NO: 6302 - protein, 175 aa, Helicobacter pylori
  misc_feature (B) LOCATION 1...175
  hypothetical: YES
MKRFVLFLLFICVCVCVQAYAEQDYFFRDFKSIDLPQKLHLDKKLSQTIQPCAQLNASKHYTATGVREPDACTKSFKKSAMVSYDLALGYLVSQNKPYGLKAIEILNAWANELQSVDTYQSEDNINFYMPYMNMAYWFVKKEFPSPEYEDFISGCVSILNQLLTLTMGRGGFSLM

SEQ ID NO: 6303 - protein, 331 aa, Helicobacter pylori
  misc_feature (B) LOCATION 1...331
  hypothetical: YES
MKRFVLFLLFICVCVCVQAYAEQDYFFRDFKSIDLPQKLHLDKKLSQTIQPCAQLNASKHYTATGVREPDACTKSFKKSAMVSYDLALGYLVSQNKPYGLKAIEILNAWANELQSVDTYQSEDNINFYMPYMNMAYWFVKKEFPSPEYEDFIRRMRQYSQSALNTNHGAWGILFDVSSALALDDHALLQSSANRWQEWVFKAIDENGVIASAITRSDTSDYHGGPTKGIKGIAYTNFALLAITISGELLFENGYDLWGSGAGQRLSVAYNKAATWILNPETFPYFQPNLIGVHNNAYFIILAKHYSSPSADELLEQGDLHEDGFRLKLRSP

SEQ ID NO: 6304 - protein, 72 aa, Helicobacter pylori
  misc_feature (B) LOCATION 1...72
  hypothetical: YES
KKFGLGVYLLLLGILGGSLIILGAIVAPIVFKASSILPELNLTPFESGKLIGANLCAFQLCFRRDRFCGVTL

SEQ ID NO: 6305 - protein, 105 aa, Helicobacter pylori
  misc_feature (B) LOCATION 1...105
  hypothetical: YES
AQIFVRFNYVLGAIGFVVLLYEIISFIYYKRSLVYLILGVAIGALCLLFVFYYTPYILNAQKVGEVALQSAEFARSHAQSEWLFKELFVLVCALFFWRLFGKNAL

SEQ ID NO: 6306 - protein, 157 aa, Helicobacter pylori
  misc_feature (B) LOCATION 1...157
  hypothetical: YES
MKKFGLGVYLLLLGILGGSLIILGAIVAPIVFKASSILPELNLTPFESGKLMAQIFVRFNYVLGAIGFVVLLYEIISFIYYKRSLVYLILGVAIGALCLLFVFYYTPYILNAQKVGEVALQSAEFARSHAQSEWLFKELFVLVCALFFWRLFGKNAL

SEQ ID NO: 6307 - protein, 86 aa, Helicobacter pylori
  misc_feature (B) LOCATION 1...86
  hypothetical: YES
LYQNDKGFKTELRILSVFIVEFLVNILGFMLAHMLHFWFLRCVKALAWLMKTFDRRRYFDAKANLDFVFGDSKSEEEKKRIIKKGV

SEQ ID NO: 6308 - protein, 266 aa, Helicobacter pylori
  misc_feature (B) LOCATION 1...266
  hypothetical: YES
KLLIGAVILTLRPIWILCLEILKAKKRKKGSLKKGYENFAFIILETIRVIFIPKDEYDARFTLINEENVWKSLNKEGQAITLCMHFGYWEAVGTTLAQYYENYGRGCLGRLTKFAPINHMIMSRREAFGVRFVNKIGAMKELIKMYNQGNGLVGILVDQNVVPKDGVVVKFFNKDATTTTIASILSRRYNIDIQPVFIDFNDDYSHYTATYYPSIRSQITDNAQNDILECTQAQASLCEEVIRNHPESYFWFHRRFKSTHPEIYQR

SEQ ID NO: 6309 - protein, 328 aa, Helicobacter pylori
  misc_feature (B) LOCATION 1...328
  hypothetical: YES
MTYKERLIHEKILNQNDKGFKTELRILSVFIVEFLVNILGFMLAKMPHFWFLRCVKALAWLMKTFDRRRYFDAKANLDFVFGDSKSEEEKKRIIKKGYENFAFIILETIRVIFIPKDEYDARFTLINEENVWKSLNKEGQAITLCMHFGYWEAVGTTLAQYYENYGRGCLGRLTKFAPINHMIMSRREAFGVRFVNKIGAMKELIKMYNQGNGLVGILVDQNVVPKDGVVVKFFNKDATTTTIASILSRRYNIDIQPVFIDFNDDYSHYTATYYPSIRSQITDNAQNDILECTQAQASLCEEVIRNHPESYFWFHRRFKSTHPEIYQR

SEQ ID NO: 6310 - protein, 58 aa, Helicobacter pylori
  misc_feature (B) LOCATION 1...58
  hypothetical: YES
KRFGVGGTIRALSKVLMKRFDYPIDSLHGYEIDAHKNLAFIEKIVMLKEDKLRLFRGE

SEQ ID NO: 6311 - protein, 70 aa, Helicobacter pylori
  misc_feature (B) LOCATION 1...70
  hypothetical: YES
MRSDVEVLSPLHKIDEKYLFHLKIAGELASMGKILSVYLAHKHSAYFILNALSYGFSHQDRAIICLLGAI

SEQ ID NO: 6312 - protein, 70 aa, Helicobacter pylori
  misc_feature (B) LOCATION 1...70
  hypothetical: YES
MSAMMPSLLTLQWLSFILSLAENLCLTDSHHLKYTLEKNKLVIHSNDALYLAKEMLPKLIKPIPLTIEFA

SEQ ID NO: 6313 - protein, 79 aa, Helicobacter pylori
  misc_feature (B) LOCATION 1...79
  hypothetical: YES
KALPQGRNRMRSDVEVLSPLHKIDEKYLFHLKIAGELASMGKILSVYLAHKHSAYFILNALSYGFSHQDRAIICLLGAI

SEQ ID NO: 6314 - protein, 101 aa, Helicobacter pylori
  misc_feature (B) LOCATION 1...101
  hypothetical: YES
VTALATRIGRSFAYWAQFSHKKILKDYVIAHMSAMMPSLLTLQWLSFILSLAENLCLTDSHHLKYTLEKNKLVIHSNDALYLAKEMLPKLIKPIPWTIEFA

SEQ ID NO: 6315 - protein, 107 aa, Helicobacter pylori
  misc_feature (B) LOCATION 1...107
  hypothetical: YES
KRLAVCKSKSLMGKKKRSMVGSRARICCIKIQGITIDIGGGSTECALIEKGKIKDLISLDVGTIRIKEMFLDKDLDVKLAKAFIQKEVSKLPFKHKNALGWGGRSEP

SEQ ID NO: 6316 - protein, 110 aa, Helicobacter pylori
  misc_feature (B) LOCATION 1...110
  hypothetical: YES
LINLLPHHYHKFPPNINPSLISLKDRFLPHEKHSQKVKKECVNLFEVLSPLHKIDEKYLFHLKIAGELASMGKILSVYLAHKHSAYFILNALSYGFSHQDRAIICLLGAI

SEQ ID NO: 6317 - protein, 140 aa, Helicobacter pylori
  misc_feature (B) LOCATION 1...140
  hypothetical: YES
MAKITTVIDIGSNSVRLAVFKKTSQFGFYLLFETKSKVRISEGCYAFKGVLQEIPMQRAVKALSEFKEIALKYKSKKILCVATSAVRDAPNRLEFVARVKKACGLQIKIIDGQKEALYGGIACANLLHKNSGHHDRHWRG

SEQ ID NO: 6318 - protein, 143 aa, Helicobacter pylori
  misc_feature (B) LOCATION 1...143
  hypothetical: YES
RLAMAKITTVIDIGSNSVRLAVFKKTSQFGFYLLFETKSKVRISEGCYAFKGVLQEIPMQRAVKALSEFKEIALKYKSKKILCVATSAVRDAPNRLEFVARVKKACGLQIKIIDGQKEALYGGIACANLLHKNSGHHDRHWGG

SEQ ID NO: 6319 - protein, 256 aa, Helicobacter pylori
  misc_feature (B) LOCATION 1...256
  hypothetical: YES
LMGKKKRSMVGSRARICCIKIQGITIDIGGGSTECALIEKGKIKDLISLDVGTIRIKEMFLDKDLDVKLAKAFIQKEVSKLPFKHKNAFGVGGTIRALSKVLMKRFDYPIDSLHGYEIDAHKNLAFIEKIVMLKEDKLRLLGVNEERLDSIRSGALILSVVLEHLKTSLMITSGVGVREGVFLSDLLRHHYHKFPPNINPSLISLKDRFLPHEKHSQKVKKECVKLFEVLSPLHKIDEKYLFHLKIAGELASMGKI

SEQ ID NO: 6320 - protein, 484 aa, Helicobacter pylori
  misc_feature (B) LOCATION 1...484
  hypothetical: YES
MAKITTVIDIGSNSVRLAVFKKTSQFGFYLLFETKSKVRISEGCYAFKGVLQEIPMQRAVKALSEFKEIALKYKSKKILCVATSAVRDAPNRLEFVARVKKACGLQIKIIDGQKEALYGGIACANLLHKNSGITIDIGGGSTECALIEKGKIKDLISLDVGTIRIKEMFLDKDLDVKLAKAFIQKEVSKLPFKHKNAFGVGGTIRALSKVLMKRFDYPIDSLHGYEIDAHKNLAFIEKIVMLKEDKLRLLGVNEERLDSIRSGALILSVVLEHLKTSLMITSGVGVREGVFLSDLLRHHYHKFPPNINPSLISLKDRFLPHEKHSQKVKKECVKLFEVLSPLHKIDEKYLFHLKIAGELASMGKILSVYLAHKHSAYFILNALSYGFSHQDRAIICLLAQFSHKKIPKDNAIAHMSAMMPSLLTLQWLSFILSLAENLCLTDSHHLKYTLEKNKLVIHSNDALYLAKEMLPKLIKPIPLTIEFA

SEQ ID NO: 6321 - protein, 224 aa, Helicobacter pylori
  misc_feature (B) LOCATION 1...224
  hypothetical: YES
MIRLKGLNKTLKTSLLAGVLLGATAPLMAKPLLSDEDLLKRVKLHNIKEDTLTSCNAKVDGSQYLNSGWNLSKEFPQEYREKIFECVEEEKHKQALNLINKEDTKDKEELAKKIKEIKEKAKVLRQKFMAFEMKEHSKEFPNKKQLQTMLENAFDNGAESFIDDWHERFGGISRENTYKALGIKEYSDEGKILPLAKEVILDNIKKILKKALMILDNPYLLWLV

SEQ ID NO: 6322 - protein, 337 aa, Helicobacter pylori
  misc_feature (B) LOCATION 1...337
  hypothetical: YES
MIRLKGLNKTLKTSLLAGVLLGATAPLMAKPLLSDEDLLKRVKLHNIKEDTLTSCNAKVDGSQYLNSGWNLSKEFPQEYREKIFECVEEEKHKQALNLINKEDTEDKEELAKKIKEIKEKAKVLRQKFMAFEMKEHSKEFPNKKQLQTMLENAFDNGAESFIDDWHERFGGISRENTYKALGIKEYSDEGKILAFGERSYIRQYKKDFEESTYDTRQTLSAMANMSGENDYKITWLKPKYQLHSSNNIKPLMSNTELLNMIELTNIKKEYVMGCNMEIDGSKYPIHKDWGFFGKAKVPETWRNKIWECIKNKVKSYDNTTAEIGIVWKKNTYSISHH

SEQ ID NO: 6323 - protein, 351 aa, Helicobacter pylori
  misc_feature (B) LOCATION 1...351
  hypothetical: YES
MISEIIKFQLKGIKMIRLKGLNKTLKTSLLAGVLLGATAPLMAKPLLSDEDLLKRVKLHNIKEDTLTSCNAKVDGSQYLNSGWNLSKEFPQEYREKIFECVEEEKHKQALNLINKEDTEDKEELAKKIKEIKEKAKVLRQKFMAFEMKEHSKEFPNKKQLQTMLENAFDNGAESFIDDWHERFGGISRENTYKALGIKEYSDEGKILAFGERSYIRQYKKDFEESTYDTRQTLSAMANMSGENDYKITWLKPKYQLHSSNNIKPLMSNTELLNMIELTNIKKEYVMGCNMEIDGSKYPIHKDWGFFGKAKVPETWRNKIWECIKNKVKSYDNTTAEIGIVWKKNTYSISHH

SEQ ID NO: 6324 - protein, 373 aa, Helicobacter pylori
  misc_feature (B) LOCATION 1...373
  hypothetical: YES
LNTDKITKYLIIIDIFLKLYVIMISEIIKFQLKGIKMIRLKGLNKTLKTSLLAGVLLGATAPLMAKPLLSDEDLLKRVKLHNIKEDTLTSCNAKVDGSQYLNSGWNLSKEFPQEYREKIFECVEEEKHKQALNLINKEDTKDKEELAKKIKEIKEKAKVLRQKFMAFEMKEHSKEFPNKKQLQTMLENAFDNGAESFIDDWHERFGGISRENTYKALGIKEYSDEGKILAFGERSYIRQYKKDFEESTYDTRQTLSAMANMSGENDYKITWLKPKYQLHSSNNIKPLMSNTELLNMIELTNIKKEYVMGCNMEIDGSKYPIHKDWGFFGKAKVPETWRNKIWECIKNKVKSYDNTTAEIGIVWKKNTYSISHH

SEQ ID NO: 6325 - protein, 221 aa, Helicobacter pylori
  misc_feature (B) LOCATION 1...221
  hypothetical: YES
SLDRFFWSQVVLNQVELLSPAGNLKKLKIALNYGADAVYGGVSHFSLRNRAGKEFTLETFKEGIDYAHALDKKVYATINGFPFNSQLKLLEEHLYKMAELEPDAFIIAAPGVIKLASKIAPHIPVHLSTQANVLNTLDAQVFYDLGVKRIVCARELSLNDAVEIKKALPDLELEIFVHGSMCFAFSGRCLISALQKGRVPNKGSCANDCRFDYEYYVEKPR

SEQ ID NO: 6326 - protein, 222 aa, Helicobacter pylori
  misc_feature (B) LOCATION 1...222
  hypothetical: YES
LNQVELLSPAGNLKKLKIALNYGADAVYGGVSHFSLRNRAGKEFTLETFKEGIDYAHALDKKVYATINGFPFNSQLKLLEEHLYKMAELEPDAFIIAAPGVIKLASKIAPHIPVHLSTQANVLNTLDAQVFYDLGVKRIVCARELSLNDAVEIKKALPDLELEIFVHGSMCFAFSGRCLISALQKGRVPNRGSCANDCRFDYEYYVKNPDNGVMMRLVEEAA

SEQ ID NO: 6327 - protein, 190 aa, Helicobacter pylori
  misc_feature (B) LOCATION 1...190
  hypothetical: YES
LNLSGHIAEILSSNAISALKIEGRTKSSYYAAQTTRIYRLAVDDFYHNTLKPSFYASELNTLKNRGFTDGYLMRRPFERLDTQNHQTAISEGDFQVNGEITEDGRFFACKFTTTTNTAYEIIAPKNAAITPIVNDIGKIYTFEKRSYLVLYKILLENNTELETIHSGNVNLVRLPAPLPAFSFLRTQVRV

SEQ ID NO: 6328 - protein, 190 aa, Helicobacter pylori; identical to SEQ ID NO: 6327
  misc_feature (B) LOCATION 1...190
  hypothetical: YES

SEQ ID NO: 6329 - protein, 243 aa, Helicobacter pylori
  misc_feature (B) LOCATION 1...243
  hypothetical: YES
FRLYKRGACLIKGVARMIAGLIMNIMLKNPDNGVIMKLVDKKGVGTHIFNAKDLNLSGHIAEILSSNAISALKIEGRTKSSYYAAQTTRIYRLAVDDFYHNTLKPSFYASELNTLKNRGFTDGYLMRRPFERLDTQNHQTAISEGDFQVNGEITEDGRFFACKFTTTTNTAYEIIAPKNAAITPIVNDIGKIYTFEKRSYLVLYKILLENNTELETIHSGNVNLVRLPAPLPAFSFLRTQVRV

SEQ ID NO: 6330 - protein, 412 aa, Helicobacter pylori
  misc_feature (B) LOCATION 1...412
  hypothetical: YES
MESVKTVKTNKVGKNTETANTEASKETHFKQASAITNTLRSIGGIFTKIAKKVRELVKKHPKKSSVALVVLTHIACKRAKELDDKVQDKSKQAEKENQINWWKYSGLTIAASLLLAACSTGDIDKQIELEQEKKEANKSGIKLEQERQKTEQERQKTNKSEIELEQERQKTNKSGIELANSQIKAEQERQKTEQEKQKANKSEIELEQQKQKTINTQRDLIKEQKDFIKETEQNCQEKHGQLFIKKARIKTGITTGIAIEIEAECKTPKPAKTNQTPIQPKHLPNSKQPRSQRGSKAQELIAYLQKELESLPYSQKAIAKQVDFYKPSSIAYLELDPRDFKVTEEWQKENLKIRSKAQAKMLEMRNPQAHLPTSQSLLFVQKIFADINKEIEAVANTEKKTEKAGYGYSKRM

SEQ ID NO: 6331 - protein, 423 aa, Helicobacter pylori
  misc_feature (B) LOCATION 1...423
  hypothetical: YES
WVRLFFEKRLVMESVKTVKTNKVGKNTETANTEASKETHFKQASAITNTLRSIGGIFTKIAKKVRELVKKHPKKSSVALVVLTHIACKRAKELDDKVQDKSKQAEKENQINWWKYSGLTIAASLLLAACSTGDIDKQIELEQEKKEANKSGIELEQERQKTEQERQKTNKSEIELEQERQKTNKSGIELANSQIKAEQERQKTEQEKQKANKSEIELEQQKQKTINTQRDLIKEQKDFIKETEQNCQEKHGQLFIKKARIKTGITTGIAIEIEAECKTPKPAKTNQTPIQPKHLPNSKQPRSQRGSKAQELIAYLQKELESLPYSQKAIAKQVDFYRPSSIAYLELDPRDFKVTEEWQKENLKIRSKAQAKMLEMRNPQAHLPTSQSLLFVQKIFADINKEIEAVANTEKKTEKAGYGYSKRM

SEQ ID NO: 6332 - protein, 126 aa, Helicobacter pylori
  misc_feature (B) LOCATION 1...126
  hypothetical: YES
LVSEYWLKFFTRSFSKSTMLFKTLLRSFFTFPVELSENITLGSTVVLIVAEAVSALNKKVVAAKKNKIRFTPNSYIHNRNKNRRYSSLSPLLKSSSIYKNPPRIQAILIILKYRLSKGIYHLGMIL

SEQ ID NO: 6333 - protein, 163 aa, Helicobacter pylori
  misc_feature (B) LOCATION 1...163
  hypothetical: YES
QIFCSTQSSKLPLKKAPKADKSPLLILVSEYWLKFFTRSFSKSTMLFKTLLRSFFTFPVELSENITLGSTVVLIVAEAVSALNKKVVAAKKNKIRFTPNSYIHNRNKNRRYSSLSPLLKSSSICKNPPRIQAILIILKYRLSKGFNPVVVILRIQKMRTLQKL

SEQ ID NO: 6334 - protein, 86 aa, Helicobacter pylori
  misc_feature (B) LOCATION 1...86
  hypothetical: YES
MNALKKLSFCALLSLGLFAQTVHAQHLKDTINYPDWLKINLFDKKNPPNQYVGSASISGKRNDFYSNYIPYDDKLPPERTLKKSLF

SEQ ID NO: 6335 - protein, 102 aa, Helicobacter pylori
  misc_feature (B) LOCATION 1...102
  hypothetical: YES
MNAYSTLESALLTKMCNRIVKALQVKNNVISHLFGFVDFLTSKSILAKRFVDTTNHRVYVMVQFPFIQPEDLIAYFKAKRIDLSLASATNLSAILNRALFHL

SEQ ID NO: 6336 - protein, 124 aa, Helicobacter pylori
  misc_feature (B) LOCATION 1...124
  hypothetical: YES
KNAEEIALLRARMNAYSTLESALLTKMCNRIVKALQVKNNVISHLFGFVDFLTSKSILAKRFVDTTNHRVYVMVQFPFIQPEDLIAYFKAKRIDLSLASATNLSAILNTGVVPPLRVWDLSCGF

SEQ ID NO: 6337 - protein, 192 aa, Helicobacter pylori
  misc_feature (B) LOCATION 1...192
  hypothetical: YES
MNALKKLSFCALLSLGLFAQTVHAQHLKDTINYPDWLKINLFDKKNPPNQYVGSASISGKRNDFYSNYIPYDDKLPPEKNAEEIALLRARMNAYSTLESALLTKMCNRIVKALQVKNNVISHLFGFVDFLTSKSILAKRFVDTTNHRVYVMVQFPFIQPEDLIAYFKAKRIDLSLASATNLSAILNKALFHL

SEQ ID NO: 6338 - protein, 318 aa, Helicobacter pylori
  misc_feature (B) LOCATION 1...318
  hypothetical: YES
QQYPCRSSLNGVFQPYNHQKRIKMDSVTLACGNGGKETNALIERVFMPYLKEWIVAFDEDAPKFEASGEYCVSTDSFVITPLIFNGGDIGKLCVCGSANDVSVQGGEPLYLNMGFILEEGLEIPLLKQILQSIQKELFKANLKLLSLDTKVVPKGSVDKLFINTTCIGKIIKPGISSRHLQQGQAIILSDTIANHGASLFATRHEIKLKTNLQSDCQLLYPLLKPLFLSDLKIDALRDATRGGLASVLNEWANSSRVKIVIEEEKIPLKEETKGICEILGLEPYALANEGVFVLALNQKDAPKALEILKSNEKAKTLA

SEQ ID NO: 6339 - protein, 332 aa, Helicobacter pylori
  misc_feature (B) LOCATION 1...332
  hypothetical: YES
MDSVTLACGNGGKETNALIERVFMPYLKEWIVAFDEDAPKFEASGEYCVSTDSFVITPLIFNGGDIGKLCVCGSANDVSVQGGEPLYLNMGFILEEGLEIPLLKQILQSIQKELFKANLKLLSLDTKVVPKGSVDKLFINTTCIGKIIKPGISSRHLQQGQAIILSDTIANHGASLFATRHEIKLKTNLQSDCQLLYPLLKPLFLSDLKIDALRDATRGGLASVLNEWANSSRVKIVIEEEKIPLKEETKGICEILGLEPYALANEGVFVLALNQKDAPKALEILKSNEKAKNACVIGGVFENPYPSVVLKNAWGFERILEMPEGELLPRIC

SEQ ID NO: 6340 - protein, 208 aa, Helicobacter pylori
  misc_feature (B) LOCATION 1...208
  hypothetical: YES
LVRKAIEYAIDNDKPSVTFVHKGNIMKYTEGAFMKWGYALAQKEFNAQVIDKGPWCSLKNPKTGKEIIIKDMIADAFLQQILLRPSEYSVIATMNLNGDYISDALAAMVGGIGIAPGANLNDTVGMFEATHGTAPKYAGLDKVNPGSIILSAEMMLRHMGWVEAADLIVSAMEKAIKSKKVTYDFARLMDGAKEVKCSEFASVMIENM

SEQ ID NO: 6341 - protein, 90 aa, Helicobacter pylori
  misc_feature (B) LOCATION 1...90
  hypothetical: YES
MAYNPKILQKPKEGEEITIKDGKLHVPNYPIIPFIEGDGIGSDITPAMIKVVDSAVQKAYKGEKKIAWYEVFVGEKCYQKFKDHKELSPE

SEQ ID NO: 6342 - protein, 90 aa, Helicobacter pylori
  misc_feature (B) LOCATION 1...90
  hypothetical: YES
TMAYNPKILQKPKEGEEITIKDGKLHVPNYPIIPFIEGDGIGSDITPAMIKVVDSAVQKAYKGEKKIAWYEVFVGEKCYQKFKDHKELSP

SEQ ID NO: 6343 - protein, 223 aa, Helicobacter pylori
  misc_feature (B) LOCATION 1...223
  hypothetical: YES
MAYNPKILQKPKEGEEITIKDGKLHVPNYPIIPFIEGDGIGSDITPAMIKVVDSAVQKAYKGEKKIAWYEVFVGEKCYQKFKDHKELSPEEQWLLPDTIEAINHYKVSIKGPLTTPIGEGFRSLNVALRQKMDLYVCLRPVRWYGSPSPVKEPQKVDMVIFRENSEDIYAGIEWQEGSAEAKKLIHFLQNELKVEKIRFPESSGVGIKPISKEGTGEVGEKSD

SEQ ID NO: 6344 - protein, 381 aa, Helicobacter pylori
  misc_feature (B) LOCATION 1...381
  hypothetical: YES
MKEKIALITGVTGQDGSYLAEYLLNLGYEVHGLKRRSSSINTSRIDHLYEDLHSEHKRRFFLHYGDMTDSSNLIHLIATTKPTEIYNLAAQSHVKVSFETPEYTANADGIGTLRILEAMRILGLEKKTRFYQASTSELYGEVLETPQNENTPFNPRSPYAVAKMYAFYITKNYREAYNLFAVNGILFNHESRVRGETFVTRKITRAASAIAYNLTDCLYLGNLDAKRDWGHAKDYVKMMHLMLQAPTPQDYVIATGKTTSVRDFVKMSFEFIGIDLEFQNTGIKEIGLIKSVDEKRANALQLNLSHLKTGKIVVRIDEHYFRPTEVDLLLGDPTGAEKELGWVREYDLKELVKDMLEYDLKECQKNLYLQDGGYTLRNFYE

SEQ ID NO: 6345 - protein, 389 aa, Helicobacter pylori
  misc_feature (B) LOCATION 1...389
  hypothetical: YES
IKFNKGTIMKEKIALITGVTGQDGSYLAEYLLNLGYEVHGLKRRSSSINTSRIDHLYEDLHSEHKRRFFLHYGDMTDSSNLIHLIATTKPTEIYNLAAQSHVKVSFETPEYTANADGTGTLRILEAMRILGLEKKTRFYQASTSELYGEVLETPQNENTPFNPRSPYAVAKMYAFYITKNYREAYNLFAVNGILFNHESRVRGETFVTRKITRAASAIAYNLTDCLYLGNLDAKRDWGHAKDYVKMMHLMLQAPTPQDYVIATGKTTSVRDFVKMSFEFIGIDLEFQNTGIKEIGLIKSVDEKRANALQLNLSHLKTGKIVVRIDEHYFRPTEVDLLLGDPTGAEKELGWVREYDLKELVKDMLEYDLKECQKNLYLQDGGYTLRNFYE

SEQ ID NO: 6346 - protein, 69 aa, Helicobacter pylori
  misc_feature (B) LOCATION 1...69
  hypothetical: YES
KKRNVFKRNHLIFWLIIRSWILSKLKEITMSVTLINNENNARYEFETIECTRGPKAVDFSKLFETTGFF

SEQ ID NO: 6347 - protein, 325 aa, Helicobacter pylori
  misc_feature (B) LOCATION 1...325
  hypothetical: YES
LEFELELRHRSFVHESLLNMFSAFRSNAHPMAKLSSGVSILSTLYSTHQNMHTEEDYQTMARRIVAKIPTLAAICYRNEVGAPIIYPDIARSYVENILFMLRGYPYSRLKHTTQGEVGITPLEVEAFDKILTLHADHGQNASSTTVRNVASTGVHPYAAISAGISALWGHLHGGANEKVLLQLEEIGDVKNVDKYIARVKEQNDNFKLMGFGHRVYKSYDPRAKILKGLKDELHQKGVKMDERLSEIAAKVEEIALKDEYFIERNLYPNVDFYSGTILRALKIPVRFFTPVFVIGRTVGWCAQLLEHVKSPQARITRPRQVYVGD

SEQ ID NO: 6348 - protein, 126 aa, Helicobacter pylori
  misc_feature (B) LOCATION 1...126
  hypothetical: YES
SFKKAEGLISKVACFFSKRAFFLDELKKHAPTILKGCERAFEPLENTHFFEQKIARLSEKSMQDLEDMSIDIALMQQSHKIKMVELNAKWSDLGNFNALFEEAANGTKENVSLNQTPIFAKESTTI

SEQ ID NO: 6349 - protein, 187 aa, Helicobacter pylori
  misc_feature (B) LOCATION 1...187
  hypothetical: YES
RKCQPESNAYFCQREHNNLVFSHKVSALLGVEDLAIIDTKDALLVAHRQAKDLKALVSEIETHNQELLQTHTKVYRPWGSYEVLHESGCYKVKILEVKPNARLSLQKHFHRSEHWVVISGMASVELDHQSFELQANESTYIPKNTLHRLANYGKIPLIIIEVQVGEYVGEDDIVRVDDDFNRQNQNA

SEQ ID NO: 6350 - protein, 225 aa, Helicobacter pylori
  misc_feature (B) LOCATION 1...225
  hypothetical: YES
KTKESLARKPMKIKNVLLSGGSGKRLWPLSRSLYPKQFLKLFDHKSLFELSFKRNASLVDETLIVCNEKHYFLALEEIKNEIKNKSVGFLLESLSKNTANAIALSALMSDKEDLLIVTPSDHLIKDFQAYENAIKKAINLAQKGFLVTFGISIEKPNTEFGYIESPNGLDVKRFIEKPSLEKAIEFQKSGGFNFKSGMFFFQAGVFFRRTKKACPYYFKGVRKSV

SEQ ID NO: 6351 - protein, 470 aa, Helicobacter pylori
  misc_feature (B) LOCATION 1...470
  hypothetical: YES
MKIKNVLLSGGSGKRLWPLSRSLYPKQFLKLFDHKSLFELSFKRNASLVDETLIVCNEKHYFLALEEIKNEIKNKSVGFLLESLSKNTANAIALSALMSDKEDLLIVTPSDHLIKDFQAYENAIKKAINLAQKGFLVTFGISIEKPNTEFGYIESPNGLDVKRFIEKPSLEKAIEFQKSGGFYFNSGMFVFQAGVFLDELKKHAPTILKGCERAFESLENTHFFEQKIARLSEKSMQDLEDMSIDIALMQQSHKIKMVELNAKWSDLGNFNALFEEAANGTKENVSLNQTPIFAKESTNNLVFSHKVSALLGVEDLAIIDTKDALLVAHKDKAKDLKALVSEIETHNQELLQTHTKVYRPWGSYEVLHESGCYKVKILEVKPNARLSLQKHFHRSEHWVVISGMASVELDHQSFELQANESTYIPKNTLHRLANYGKIPLIIIEVQVGEYVGEDDIVRVDDDFNRQNQNA

SEQ ID NO: 6352 - protein, 186 aa, Helicobacter pylori
  misc_feature (B) LOCATION 1...186
  hypothetical: YES
MFQIRWHARAGQGAITGAKGLADVISKTGKEVQAFASYGSAKRGAAMMAYNRVDDEPILNHERFMQPDYVLVIDPGLVFIENIFANEKEDTTYIITSYLNKEELFEKKPELKTRKVFLVDCLKISMETLKRPIPNTPMLGALMKVSGMLEIEAFKEAFKKVLGKKLTQEVIDANMLAIQRAYEEVQ

SEQ ID NO: 6353 - protein, 201 aa, Helicobacter pylori
  misc_feature (B) LOCATION 1...201
  hypothetical: YES
FRLNLFYTILGRHITMFQIRWHARAGQGAITGAKGLADVISKTGKEVQAFASYGSAKRGAAMMAYNRVDDEPILNHERFMQPDYVLVIDPGLVFIENIFANEKEDTTYIITSYLNKEELFEKKPELKTRKVFLVDCLKISMETLKRPIPNTPMLGALMKVSGMLEIEAFKEAFKKVLGKKLTQEVIDANMLAIQRAYEEVQ

SEQ ID NO: 6354 - protein, 124 aa, Helicobacter pylori
  misc_feature (B) LOCATION 1...124
  hypothetical: YES
VVVVENIKDAVPLAQSLIXGGIPIIEVTLRSNCALEAIELIAKNVPKMRVGAGTILNLTQLEQAQNRGAEFLISPGLTIKLLEHAKKKDMPLIPGVSSSSEVMQALELGYNALKFFPAEYCGGR

SEQ ID NO: 6355 - protein, 208 aa, Helicobacter pylori
  misc_feature (B) LOCATION 1...208
  hypothetical: YES
MQDKIIEILQISPIVPVVVVENIKDAVPLAQSLIEGGIPIIEVTLRSNCALEAIELIAKNVPKMRVGAGTILNLTQLEQAQNRGAEFLISPGLTIKLLEHAKKKDMPLIPGVSSSSEVMQALELGYNALKFFPAEYCGGVKLLNAFNGPFKGVKFCPTGGISADNMRSYLALENVVCVGGSWLTPKDLIQNKEWDKITEICKRALALR

SEQ ID NO: 6356 - protein, 214 aa, Helicobacter pylori
  misc_feature (B) LOCATION 1...214
  hypothetical: YES
KYKGDKMQDKIIEILQISPIVPVVVVENIKDAVPLAQSLIEGGIPIIEVTLRSNCALEAIELIAKNVPKMRVGAGTILNLTQLEQAQNRGAEFLISPGLTIKLLEHAKKKDMPLIPGVSSSSEVMQALELGYNALKFFPAEYCGGVKLLNAFNGPFKGVKFCPTGGISADNMRSYLALENVVCVGGSWLTPKDLIQNKEWDKITEICKRALALR

SEQ ID NO: 6357 - protein, 138 aa, Helicobacter pylori
  misc_feature (B) LOCATION 1...138
  hypothetical: YES
GKNMAKSIELQEIEVWDGNTASSNALRQAQIDVIAAYPITPSTPIVQNYGSFKDNGYVDSEFVLVESEHAAMIACVGAAAAGGRVSTATSSQGLALMVEVLYQASGMHLPIVLNLVNRALAAPLNIHGDHSDMYLSTD

SEQ ID NO: 6358 - protein, 171 aa, Helicobacter pylori
  misc_feature (B) LOCATION 1...171
  hypothetical: YES
YLSRDSGWISLCTCNPQEAYDFTLMAFRIAEHQKVRVPTIVNQDGFLCSHTVQNVRPLSDAVAYQFVGEYQTKHSLLDFDKPVSYGPQAEEEWHYEHKAQLHHAIMSASSVIEEVFNDFAKLTGRQYHLTKTFQLEDAEIAIFALGTTYESAIVAAKEMRKKGIRPAWPLS

SEQ ID NO: 6359 - protein, 174 aa, Helicobacter pylori
  misc_feature (B) LOCATION 1...174
  hypothetical: YES
MYLSRDSGWISLCTCNPQEAYDFTLMAFRIAEHQKVRVPTIVNQDGFLCSHTVQNVRPLSDAVAYQFVGEYQTKHSLLDFDKPVSYGPQAEEEWHYEHKAQLHHAIMSASSVIEEVFNDFAKLTGRQYHLTKTFQLEDAEIAIFALGTTYESAIVAAKEMRKKGIRPAWPLSIP

SEQ ID NO: 6360 - protein, 309 aa, Helicobacter pylori
  misc_feature (B) LOCATION 1...309
  hypothetical: YES
MAKSIELQEIEVWDGNTASSNALRQAQIDVIAAYPITPSTPIVQNYGSFKDNGYVDGEFVLVESEHAAMSACVGAAAAGGRVSTATSSQGLALMVEVLYQASGMRLPIVLNLVNRALAAPLNIHGDHSDMYLSRDSGWISLCTCNPQEAYDFTLMAFRIAEHQKVRVPTIVNQDGFLCSHTVQNVRPLSDAVAYQFVGEYQTKHSLLDFDKPVSYGPQAEEEWHYEHKAQLHHAIMSASSVIEEVFNDFAKLTGRQYHLTKTFQLEDAEIAIFALGTTYESAIVAAKEMRKKGIKAGVATIHSLRPFPL

SEQ ID NO: 6361 - protein, 133 aa, Helicobacter pylori
  misc_feature (B) LOCATION 1...133
  hypothetical: YES
MASHGVPYVAQLSPNKWKDMNKKIKTALDTEGPCFINALSPCTTEWKFNSNKTIELADMAVDSLMFPLFEVFNGRELKITYRPRNIIPVRDYLGAQKRFKHLFKKENEHIIEELQKDVNERWEYLQRREEAKV

SEQ ID NO: 6362 - protein, 158 aa, Helicobacter pylori
  misc_feature (B) LOCATION 1...158
  hypothetical: YES
VSTSTTPAGSVSFGKKEKKKDIVNIMASHGVPYVAQLSPNKWKDMNKKIKTALDTEGPCFINALSPCTTEWKFNSNKTIELADMAVDSLMFPLFEVFNGRELKITYRPRNIIPVRDYLGAQKRFKHLFKKENEHIIEELQKDVNERWEYLQRREEAKV

SEQ ID NO: 6363 - protein, 157 aa, Helicobacter pylori
  misc_feature (B) LOCATION 1...157
  hypothetical: YES
STSTTPAGSVSFGKKEKKKDIVNIMASHGVPYVAQLSPNKWKDMNKKIKTALDTEGPCFINALSPCTTEWKFNSNKTIELADMAVDSLMFPLFEVFNGRELKITYRPRNIIPVRDYLGAQKRFKHLFKKENEHIIEELQKDVNERWEYLQRREEAKV

SEQ ID NO: 6364 - protein, 314 aa, Helicobacter pylori
  misc_feature (B) LOCATION 1...314
  hypothetical: YES
MVKEVKTLKGFSQSAEKFQGSHLLCPGCGHGIIVREVLNAVDGPIVLGNSTGCLEVCSAVYPHTSWDVPWIHIGFENGSTAISGVEAMYKALVNKGRYQGQRPKFVAFGGDGASYDIGFQFISGCMERGHDMTYICLDNENYANTGGQRSGSTPLGASTSTTPAGSVSFGKKEKKKDIVNIMASHGVPYVAQLSPNKWKDMNKKIKTALDTEGPCFINALSPCTTEWKFNSNKTIELADMAVDSLMFPLFEVFNGRELKITYRPRNIIPVRDYLGAQKRFKHLFKKENEHIIEELQKDVNERWEYLQRREEAKV

SEQ ID NO: 6365 - protein, 318 aa, Helicobacter pylori
  misc_feature (B) LOCATION 1...318
  hypothetical: YES
LGQDLKNLKALAILDKSSPAGAMGAMFNEVTSAVYQTQGTKHPVVSNYIYGLGERDMTIVHLCEIFEEINEDALKGTLTHPTQQFVGLRGPKMSFFKKGNIMVKEVKTLKGFSQSAEKFQGSHLLCPGCGHGIIVREVLNAVDGPIVLGNSTGCLEVCSAVYPHTSWDVPWIHIGFENGSTAISGVEAMYKALVNKGRYQGQRPKFVAFGGDGASYDIGFQFISGCMERGHDMTYICLDNENYANTGGQRSGSTPLGATTSTTPAGSVSFGKKEKKKDIVNIMASHGVPYVAQLSPNKWKDMNKKIKTALDTEGPCFY

SEQ ID NO: 6366 - protein, 130 aa, Helicobacter pylori
  misc_feature (B) LOCATION 1...130
  hypothetical: YES
MKDWNEFEMGAVLFPFEKNAQSEMEKHNDERHYTEQSYFTTSVAHWRVAKPVHNNNICINCFNCWVYCPDAAILSREGKLKGVDYSHCKGCGVCVDVCPTNPKSLWMFEEQIEPATALTQWPQKQEKKKS

SEQ ID NO: 6367 - protein, 133 aa, Helicobacter pylori
  misc_feature (B) LOCATION 1...133
  hypothetical: YES
GLKMKDWNEFEMGAVLFPFEKNAQSEMEKHNDERHYTEQSYFTTSVAHWRVAKPVHNNNICINCFNCWVYCPDAAILSREGKLKGVDYSHCKGCGVCVDVCPTNPKSLWMFEEQIEPATALTQWPQKQEKKKS

SEQ ID NO: 6368 - protein, 48 aa, Helicobacter pylori
  misc_feature (B) LOCATION 1...48
  hypothetical: YES
TNDRAIQASLIANNSKILQNTPFKPLYNNLDTIIKSALSWEEHLLKFQ

SEQ ID NO: 6369 - protein, 64 aa, Helicobacter pylori
  misc_feature (B) LOCATION 1...64
  hypothetical: YES
MIWLTHLASYHTLLEKNKSEIYNGGYNQGHSVKEVIEKVKEISNKDFLVEILDKRQGDPSKPYR

SEQ ID NO: 6370 - protein, 212 aa, Helicobacter pylori
  misc_feature (B) LOCATION 1...212
  hypothetical: YES
LLFFHFKRGFMALLFTGACGYIGSHTARVFLEKTKENIIIIDDLSTGFLEHIKALERYYPNRVAFIQANLNETQKLDAFLNKQQLKDPIEAVLHFGAKISVKESMRLPLEYYTNNTLNTLGLVKLCLKHAIKRFIFSSTAVVYGESGSSLSEESPLNPINPYGASKMMSERILLDASKVADFKCVILRYFNVAGACMHNDYTTPYTWGAAHA

SEQ ID NO: 6371 - protein, 344 aa, Helicobacter pylori
  misc_feature (B) LOCATION 1...344
  hypothetical: YES
MALLFTGACGYIGSHTARVFLEKTKENIIIIDDLSTGFLEHIKALERYYPNRVAFIQANLNETQKLDAFLNKQQLKDPIEAVLHFGAKISVEESMRLPLEYYTNNTLNTLGLVKLCLKHAIKRFIFSSTAVVYGESGSSLSEESPLNPINPYGASKMMSERILLDASKVADFKCVILRYFNVAGACMHNDYTTPYTLGQRTLNATHLIKIACECAVGKRKKMGIFGTNYPTRDGTCIRDYIHVDDLANGHLASYHTLLEKNKSEIYNGGYNQGHSVKEVIEKVKEISNKDFLVEILDKRQGDPASLIANNSKILQNTPFKPLYNNLDTIIKSALSWEEHLLKFQ

SEQ ID NO: 6372 - protein, 344 aa, Helicobacter pylori
  misc_feature (B) LOCATION 1...344
  hypothetical: YES
MALLFTGACGYIGSHTARVFLEKTKENIIIIDDLSTGFLEHIKALERYYPNRVAFIQANLNETQKLDAFLNKQQLKDPIEAVLHFGAKISVEESMRLPLEYYTNNTLNTLGLVKLCLKHAIKRFIFSSTAVVYGESGSSLSEESPLNPINPYGASKMMSERILLDASKVADFKCVILRYFNVAGACMHNDYTTPYTLGQRTLNATHLIKIACECAVGKRKKMGIFGTNYPTRDGTCIRDYIHVDDLANAHLASYHTLLEKNKSEIYNVGYNQGHSVKEVIEKVKEISNKDFLVEILDKRQGDPASLIANNSKILQNTPFKPLYNNLDTIIKSALSWEEHLLKFQ

SEQ ID NO: 6373 - protein, 72 aa, Helicobacter pylori
  misc_feature (B) LOCATION 1...72
  hypothetical: YES
MLINAVIEKDENGYFAFVPFLKGCVSQGKSYEEALRNIKEAIELYLGDLEADELAFLSKKNSVIAPIEIAFA

SEQ ID NO: 6374 - protein, 106 aa, Helicobacter pylori
  misc_feature (B) LOCATION 1...106
  hypothetical: YES
NALNENVNENIFEEVGDTCVKCAKCVPGCTIYRIHKDEATSPRGFLDLMRLNAQNKLQLDTNLKHLLETCFLCTACVETCPFHLPIDTLIEKARVKNRSKIRHRLV

SEQ ID NO: 6375 - protein, 176 aa, Helicobacter pylori
  misc_feature (B) LOCATION 1...176
  hypothetical: YES
GLFRFDALKRSKQAPIRHEFKTPFRNLFFMHRLRRNLPLSFAHRHFNRKSQGKKSLKNTASLGIKNPIFSLLKNRKKMDRVFSVAHFLAPCVFKQVGDNLEPRAVFKGLFKRFKKSALLPLNQKSFLQKHTEVKPFRKPHSKSGDLYRVLEQLPLPASGGKLVVYFGKTQCSSDHP

SEQ ID NO: 6376 - protein, 213 aa, Helicobacter pylori
  misc_feature (B) LOCATION 1...213
  hypothetical: YES
IKKVFYKSTQRLSLLENPIQKVAIFIGCLSNYHYQQVGESLLYILEKLNVQAIIPKQECCSAPAYFTGDKDTTLFLVKKNIEWFESYLNEVDAIIVPEATCAIMLINDYYKVFLGETDKDLYVKRLEKITPKIYLASVFLEKHTPLKSLLEKIPKGKKETITYHNPCHAKKTLNAHKEGRSLLNSHYEIKEMPGTIVVVLGGLRCKPKRRSFL

SEQ ID NO: 6377 - protein, 373 aa, Helicobacter pylori
  misc_feature (B) LOCATION 1...373
  hypothetical: YES
MNENVNENIFEEVGDTCVKCAKCVPGCTIYRIHKDEATSPRGFLDLMRLNAQNKLQLDTNLKHLLETCFLCTACVETCPFHLPIDTLIEKAREKIAQKYGIAWYKKSYFSLLKNRKKMDRVFSVAHFLAPCVFKQVGDNLEPRAVFKGLFKRFKKSALPPLNQKSFLQKHTEVKPLENPIQKVAIFIGCLSNYHYQQVGESLLYILEKLNVQAIIPKQECCSAPAYFTGDKDTTLFLVKKNIEWFESYLNEVDAIIVPEATCASMLINDYYKVFLGETDKDLYVKRLEKITPKIYLASVFLEKHTPLKSLLEKIPKGKKETITYHNPCHAKKTLNAHKEVRSLLNSHYEIKEMPDNSAVLGGLRCKPKRRSFL

SEQ ID NO: 6378 - protein, 69 aa, Helicobacter pylori
  misc_feature (B) LOCATION 1...69
  hypothetical: YES
MQTEKTEFSLKVGLLRAKEIMDTKARILSAECGACHMQLNNALKSLDDPNTPSFSHPLELIAKALKSTE

SEQ ID NO: 6379 - protein, 83 aa, Helicobacter pylori
  misc_feature (B) LOCATION 1...83
  hypothetical: YES
RNAWYNCCGFGGITMQTEKTEFSLKVGLLRAKEIMDTKARILSAECGACHMQLNNALKSLDDPNTPSFSHPLELIAKALKSTE

SEQ ID NO: 6380 - protein, 209 aa, Helicobacter pylori
  misc_feature (B) LOCATION 1...209
  hypothetical: YES
QGVMKSLRGSSHPHALNLPMQAFDASAKAYLNLAQKLGYFSSQIHKGVCQKIELSLCGEINQFKDALVAFTLVGVLKPVVGDKINYINAPFVAKERGIEIKVSLKESASPYKNMLSLTLNAANGAISVSGTVFEEDILKLTEIDGFHIDIEPKGKMLLFRNTDIPGVIGSVGNAFARHGTNIADFRLGRNTQKEALALIIVDEEVSLKF

SEQ ID NO: 6381 - protein, 208 aa, Helicobacter pylori
  misc_feature (B) LOCATION 1...208
  hypothetical: YES
GVMKSLRGSSHPHALNLPMQAFDASAKAYLNLAQKLGYFSSQIHKGVCQKIELSLCGEINQFKDALVAFTLVGVLKPVVGDKINYINAPFVAKERGIEIKVSLKESASPYKNMLSLTLNAANGAISVSGTVFEEDILKLTEIDGFHIDIEPKGKMLLFRNTDIPGVIGSVGNAFARHGTNIADFRLGRNTQKEALALIIVDEEVSLKF

SEQ ID NO: 6382 - protein, 221 aa, Helicobacter pylori
  misc_feature (B) LOCATION 1...221
  hypothetical: YES
HELPAVELTMAHLINAVRSFPSRTINQTPKVMEREDWYGTELKNKKLGIIGFGNIGSRVGIRAKAFEMEVLAYDPYIPSSKATDLGVIYTKNFEDILQCDMITIHTPKNKETINMIGAKEIERMKKGVILINCARGGPYNEDALYEALETKKVRWLGIDVFSKEPGIHNKLLDLPNVYATPHIGANTLESLHYFSIYVVQGVMESFWVHATPCSIFFFASF

SEQ ID NO: 6383 - protein, 378 aa, Helicobacter pylori
  misc_feature (B) LOCATION 1...378
  hypothetical: YES
LFLGKIGYRVGGGAKSLGGEGGGEGKRRCERGEAGGGGVGDAENFEDILQCDMITIHTPKNKETINMIGAKEIERMKKGVILINCARGGLYNEDALYEALETKKVRWLGIDVFSKEPGIHNKLLDLPNVYATPHIGANTLESQEEISKQAAQGVMESLRGSSHPHALNLPMQAFDASAKAYLNLAQKLGYFSSQIHKGVCQKIELSLCGEINQFKDALVAFTLVGVLKPVVGDKINYINAPFVAKERGIEIKVSLKESASPYKNMLSLTLNAANGAISVSGTVFEEDILKLTEIDGFHIDIEPKGKMLLFRNTDIPGVIGSVGNAFARHGINIADFRLGRNTQKEALALIIVDEEVSLEVLEELKNIPACLSVHYVVI

SEQ ID NO: 6384 - protein, 524 aa, Helicobacter pylori
  misc_feature (B) LOCATION 1...524
  hypothetical: YES
MYQVAICDPIHAKGIQILEAQKDIVLHDYSKCPKKELLEKLIPMDALITRSMTPITSDFLKPLTHLKSIVRAGVGVDNIDLESCSQKGIVVMNIPTANTIAAVELTMAHLINAVRSFPCANDQIKHQRLWKREDWYGTELKNKKLGIIGFGNIGSRVGIRAKAFEMEVLAYDPYIPSSKATDLGVIYTKNFEDILQCDMITIHTPKNKETINMIGAKEIERMKKGVILINCARGGLYNEDALYEALETKKVRWLGIDVFSKEPGIHNKLLDLPNVYATPHIGANTLESQEEISKQAAQGVMESLRGSSHPHALNLPMQAFDASAKAYLNLAQKLGYFSSQIHKGVCQKIELSLCGEINQFKDALVAFTLVGVLKPVVGDKINYINAPFVAKERGIEIKVSLKESASPYKNMLSLTLNAANGAISVSGTVFEEDILKLTEIDGFHIDIEPKGKMLLFRNTDIPGVIGSVGNAFARHGINIADFRLGRNTQKEALALIIVDEEVSLEVLEELKNIPACLSVHYVVI

SEQ ID NO: 6385 - protein, 129 aa, Helicobacter pylori
  misc_feature (B) LOCATION 1...129
  hypothetical: YES
LNALDYAHKHSHEAGALISLNTRIENMGKIGIFFGTDSGNAEAIAEKISKAIGNAEVIDVAKASKEQFNGFTKVILVAPTAGAGDLQTDWEDFLGTLEASDFANKTIGLVGLGDQDTYSETFAEGIFHI

SEQ ID NO: 6386 - protein, 164 aa, Helicobacter pylori
  misc_feature (B) LOCATION 1...164
  hypothetical: YES
MGKIGIFFGTDSGNAEAIAEKISKAIGNAEVIDVAKASKEQFNGFTKVILVAPTAGAGDLQTDWEDFLGTLEASDFANKTIGLVGLGDQDTYSETFAEGIFHIYEKAKAGKVVGQTPTDGYHFEASKAVEGGKFVGLVIDEDNQDDLTDERIAKWVEQVKGSFA

SEQ ID NO: 6387 - protein, 121 aa, Helicobacter pylori
  misc_feature (B) LOCATION 1...121
  hypothetical: YES
LNEDVTVPRASLPSLLQEVAKISQKYGFKIPCFGHTGDGNVHVNIMLEDPKRDLEKGHKAMEEIFQAAISLEGTLSGEHGIGLSKAKFMPLAFNHSEMELFRNIKKALDPNNILNPFKMGL

SEQ ID NO: 6388 - protein, 145 aa, Helicobacter pylori
  misc_feature (B) LOCATION 1...145
  hypothetical: YES
QEEQDLWFSRRNASQSISVYGKKKLNEDVTVPRASLPSLLQEVAKISQKYGFKIPRFGHTGDGNVHVNIMLEDPKRDLEKGHKAMEEIFQAAISLEGTLSGEHGIGLSKAKFMPLAFNHSEMELFRNIKKALDPGNVLNPFKMGL

SEQ ID NO: 6389 - protein, 165 aa, Helicobacter pylori
  misc_feature (B) LOCATION 1...165
  hypothetical: YES
GGISFANADPMRVVKYGLTKDYVTALRCLLANGEIIRAGKKTIKDVAGFNIAGLMTASEGCLGVISEITLKLLAKPPLKQSAMGVFNHIEDAMNAVYKTMSSGVTPVAMEFLDNLSIKAVEERFSKGLPKDAGAILITQVDGVVKEQIAWQLNEIEKHFKANGCV

SEQ ID NO: 6390 - protein, 166 aa, Helicobacter pylori
  misc_feature (B) LOCATION 1...166
  hypothetical: YES
GGISFANADPMRVVKYGLTKDYVTALRCLLANGEIIRAGKKTIKDVAGFNIAGLMTASEGCLGVISEITLKLLAKPPLKQSAMGVFNHIEDAMNAVYKTMSSGVTPVAMEFLDNLSIKAVEERFSKGLPKDAGAILITQVDGVVKEQIAWQLNEIEKHFKANGCVG

SEQ ID NO: 6391 - protein, 212 aa, Helicobacter pylori
  misc_feature (B) LOCATION 1...212
  hypothetical: YES
VAMEFLDNLSIKAVEERFSKGLPKDAGAILITQVDGVVKEQIAWQLNEIEKHFKANGCVGFKIAQNEQEEQDLWFSRRNASQSISVYGKKKLNEDVTVPRASLPSLLQEVAKISQKYGFKIPCFGHTGDGNVHVNIMLEDPKRDLEKGHKAMEEIFQAAISLEGTLSGEHGIGLSKAKFMPLAFNHSEMELFRNIKKALDPNNILNPFKMGL

SEQ ID NO: 6392 - protein, 316 aa, Helicobacter pylori
  misc_feature (B) LOCATION 1...316
  hypothetical: YES
MSSANAGGMRAAKYGITKDYVMALRVVLANGEIIRAGKKTIKDVAGFNIAGLMIASEGCLGVISEITLKLLAKPPLKQSAMGVFNHIEDAMNAVYKTMSSGVTPVAMEFLDNLSIKAVEERFSKGLPKDAGAILITQVDGVVKEQIAWQLNEIEKHFKANGCVGFKIAQNEQEEQDLWFSRRNASQSISVYGKKKLNEDVTVPRASLPSLLQEVAKISQKYGFKIPCFGHTGDGNVHVNIMLEDPKRDLEKGHKAMEEIFQAAISLEGTLSGEHGIGLSKAKFMPLAFNHSEMELFRNIKKALDPNNILNPFKMGL

SEQ ID NO: 6393 - protein, 117 aa, Helicobacter pylori
  misc_feature (B) LOCATION 1...117
  hypothetical: YES
MHEYSVVSSLIALCEEHAKKNQAHKIERVVVGIGERSAMDKSLFVSAFETFREESLVCKDAILDIVDEKVELECKDCSHVFKPNALDYGVCEKCHSKNVIITQGNEMRLLSLEMLAE

SEQ ID NO: 6394 - protein, 122 aa, Helicobacter pylori
  misc_feature (B) LOCATION 1...122
  hypothetical: YES
RLRFSMHEYSVVSSLIALCEEHAKKNQAHKIERVVVGIGERSAMDKSLFVSAFETFREESLVCKDAILDIVDEKVELECKDCSHVFKPNALDYGVCEKCHSKNVIITQGNEMRLLSLEMLAE

SEQ ID NO: 6395 - protein, 41 aa, Helicobacter pylori
  misc_feature (B) LOCATION 1...41
  hypothetical: YES
MVNKDVKQTTAFGAPVWDDNNVITAGPRGPVLLQSTWFLES

SEQ ID NO: 6396 - protein, 62 aa, Helicobacter pylori
  misc_feature (B) LOCATION 1...62
  hypothetical: YES
SPQVIGLVSDYEDLRSNKGKKMVNKDVKQTTAFGAPVWDDNNVITAGPRGPVLLQSTWFLES

SEQ ID NO: 6397 - protein, 108 aa, Helicobacter pylori
  misc_feature (B) LOCATION 1...108
  hypothetical: YES
TKDITKYTKAKIFSKVGKKTECFFRFSTVAGEKGSADAVRDPRGFAMKYYTEEGNWDLVGTTRLFSLSVMRSNSLISSTLKNEILKPICLTLTWYGIFGVMFLKACIK

SEQ ID NO: 6398 - protein, 158 aa, Helicobacter pylori
  misc_feature (B) LOCATION 1...158
  hypothetical: YES
LGFSGNNTPVFFIRDAIKFPDFIHTQKRDPQTNLPNPDMVWDFWSNVPESLYQVTWVMSDRGIPKSFRHMDGFGSHTFSLINAKGERFWVKFHFETMQGVKHLTNEEAAEVRKYDPDSNQRDLFDAIAGGEFPKWEIGIQVRPEEDVKKYRFHPFEVN

SEQ ID NO: 6399 - protein, 206 aa, Helicobacter pylori
  misc_feature (B) LOCATION 1...206
  hypothetical: YES
SKILKTISQKWNKRHSLRLMSFPGIGYSPDRMLQGRLFSYGDTHRYRLGVNYPQIPVNRPRCPFHSSSRDGYMQNGYYGSLQNYTPSSLPGYKEDKSARDPKFNLAHIEKEFEVWNWDYRAEDSDYYTQPGDYYRSLPADEKERLYDTIGGSLAHVTHKEIVDKQLEHFKKADPKYAEGVKKALEKHQKMMKDMHAKDMHHMKKKK

SEQ ID NO: 6400 - protein, 422 aa, Helicobacter pylori
  misc_feature (B) LOCATION 1...422
  hypothetical: YES
VGKKTECFFRFSTVAGEKGSADAVRDPRGFAMKYYTEEGNWDLVGNNTPVFFIRDAIKFPDFIHTQKRDPQTNLPNPDMVWDFWSNVPESLYQVTWVMSDRGIPKSFRHMDGFGSHTFSLINAKGERFWVKFHFETMQGVKHLTNEEAAEVRKYDPDSNQRDLFDAIAGGDFPKWKMSIQVMPEEDAKKYRFHPFDVTKIWYLQDYPLMEVGIVELNKNPENYFAEVEQAAFTPANVVPGIGYSPDRMLQGRLFSYGDTHRYRLGVNYPQIPVNRPRCPFHSSSRDGYMQNGYYGSLQNYTPSSLPGYKEDKSARDPKFNLAHIEKEFEVWNWDYRAEDSDYYTQPGDYYRSLPADEKERLYDTIGGSLAHVTHKEIVDKQLEHFKKADPKYAEGVKKALEKHQKMMKDMHAKDMHHMKKKK

SEQ ID NO: 6401 - protein, 505 aa, Helicobacter pylori
  misc_feature (B) LOCATION 1...505
  hypothetical: YES
MVNKDVKQTTAFGAPVWDDNNVITAGPRGPVLLQSTWFLEKLAAFDRERIPERVVHAKGSGAYGTFTVTKDITKYTKAKIFSKVGKKTECFFRFSTVAGEKGSADAVRDPRGFAMKYYTEEGNWDLVGNNTPVFFIRDAIKFPDFIHTQKRDPQTNLPNPDMVWDFWSNVPESLYQVTWVMSDRGIPKSFRHMDGFGSHTFSLINAKGERFWVKFHFETMQGVKHLTNEEAAEVRKYDPDSNQRDLFDAIAGGDFPKWKMSIQVMPEEDAKKYRFHPFDVTKIWYLQDYPLMEVGIVELNKNPENYFAEVEQAAFTPANVVPGIGYSPDRMLQGRLFSYGDTHRYRLGVNYPQIPVNRPRCPFHSSSRDGYMQNGYYGSLQNYTPSSLPGYKEDKSARDPKFNLAHIEKEFEVWNWDYRAEDSDYYTQPGDYYRSLPADEKERLYDTIGGSLAHVTHKEIVDKQLEHFKKADPKYAEGVKKALEKHQKMMKDMHAKDMHHMKKKK

SEQ ID NO: 6402 - protein, 339 aa, Helicobacter pylori
  misc_feature (B) LOCATION 1...339
  hypothetical: YES
MRHGDISSSPDTVGVAVVNYKMPRLHTKNEVLENCRNIAKVIGGVKQGLPGLDLIIFPEYSTHGIMYDRQEMFDTAASVPGEETAILAEACKKNKVWGVFSLTGEKHEQAKKNPYNTLILVNDKGEIVQKYRKILPWCPIECWYPGDKTYVVDGPKGLKVSLIICDDGNYPEIWRDCAMRGAELIVRCQGYMYPAKEQQIAIVKAMAWANQCYVAVANATGFDGVYSYFGHSSIIGFDGHTLGECGEEENGLQYAQLSVQQIRDARKYDQSQNQLFKLLHRGYSGVFASGDGDKGVAECPFEFYKTWVNDPKKAQENVEKFTRPSVGVAACPVGDLPTK

SEQ ID NO: 6403 - protein, 350 aa, Helicobacter pylori
  misc_feature (B) LOCATION 1...350
  hypothetical: YES
ELSSKKNKEHNMRHGDISSSPDTVGVAVVNYKMPRLHTKNEVLENCRNIAKVIGGVKQGLPGLDLIIFPEYSTHGIMYDRQEMFDTAASVPGEETAILAEACKKNKVWGVFSLTGEKHEQAKKNPYNTLILVNDKGEIVQKYRRILPWCPIECWYPGDKTYVVDGPKGLKVSLIICDDGNYPEIWRDCAMRGAELIVRCQGYMYPAKEQQIAIVKAMAWANQCYVAVANATGFDGVYSYFGHSSIIGFDGHIVGECGEEENGLQYAQLSVQQIRDARKYDQSQNQLFKLLHRGYSGVFASGDGDKGVAECPFEFYKTWVNDPKKAQENVEKFTRPSVGVAACPVGDLPTK

SEQ ID NO: 6404 - protein, 84 aa, Helicobacter pylori
  misc_feature (B) LOCATION 1...84
  hypothetical: YES
MSLLVNDECIACDACREECPSEAIEEGDPIYSIDPDRCTECYGYDDDEPRCVSVCPVDAILPDPNNAESKEELKYKYEILKEQD

SEQ ID NO: 6405 - protein, 85 aa, Helicobacter pylori
  misc_feature (B) LOCATION 1...85
  hypothetical: YES
KELVISLLVNDECIACDACREECPSEAIEEGDPIYSIDPDRCTECYGYDDDEPRCVSVCPVDAILPESNNAESKEELKYKYEILK

SEQ ID NO: 6406 - protein, 54 aa, Helicobacter pylori
  misc_feature (B) LOCATION 1...54
  hypothetical: YES
MACGGPRCGLGELNIPENEPGSSIMPGKVNPTQVEAMTMVAVQVMGNDTAIGIA

SEQ ID NO: 6407 - protein, 63 aa, Helicobacter pylori
  misc_feature (B) LOCATION 1...63
  hypothetical: YES
TTNFREFGAFKGIAIGGSLVGTGLNAHKELSEKVAEELSQFSGVKFISAPNKFHALTSHDAIA

SEQ ID NO: 6408 - protein, 235 aa, Helicobacter pylori
  misc_feature (B) LOCATION 1...235
  hypothetical: YES
GFKIKFQRISMQFRIEHDTMGEIKVDDSQYWGAQTQRSLENFKIGTEKMPKELIGAFAKLKRSLAVVNHKLGKLSLEKSQAIIKACDCILKGELCGEFPLAIWQTGSGTQTNMNLNEVIANKATEILGGNFREKKLIHPNDDVNMSQSSNDTFPTAMHVVSVLEITHKLLPSLENLLKTFKEKSQQFKEIVKIGRTHLQDATPLTLGQEFSGYASMLEHSKQQILESLEHLRELP

SEQ ID NO: 6409 - protein, 351 aa, Helicobacter pylori
  misc_feature (B) LOCATION 1...351
  hypothetical: YES
MQFRIEHDTMGEIKVDDSQYWGAQTQRSLENFKIGTEKMPKELIGAFAKLKRSLAVVNHKLGKLSLEKSQAIIKACDCILKGELCGEFPLAIWQTGSGTQTNMNLNEVIANKATEILGGNFREKKLIHPNDDVNMSQSSNDTFPTAMHVVSVLEITHKLLPSLENLLKTFKEKSQQFKEIVKIGRTHLQDATPLTLGQEFSGYASMLEHSKQQILESLEHLRELAIGGTAVGTGLNAHKELSEKVAEELSQFSGVKFISAPNKFHALTSHDAIAYAHGAFKALAANLMKIANDIRWLASGPRCGLGELNIPENEPGSSIMPGKVNPTQCEAMTMVAVQVMGNDTAIGIATN

SEQ ID NO: 6410 - protein, 68 aa, Helicobacter pylori
  misc_feature (B) LOCATION 1...68
  hypothetical: YES
THERGFKTYGMGGLSSLEGASHFVIYLARKGVTYDSDYVKKVMHEVKKRDYDTHSRFAQIIKISKRTI

SEQ ID NO: 6411 - protein, 79 aa, Helicobacter pylori
  misc_feature (B) LOCATION 1...79
  hypothetical: YES
KKENIKMDREQIIALQHQRFATKKYDPNRRISEKDWEVLVEVGRLAPSSIGLEPWKMLLLKNERMKEDLKPMAWGGFLV

SEQ ID NO: 6412 - protein, 90 aa, Helicobacter pylori
  misc_feature (B) LOCATION 1...90
  hypothetical: YES
LNSEHPLFDWASKQTYIQMANMMMAAAMLGIDSCPIEGYDQEKVAAYLEEKGYLNTAEFGVSVMASFGYRNQEITPKTRWKTEVIYEVIE

SEQ ID NO: 6413 - protein, 217 aa, Helicobacter pylori
  misc_feature (B) LOCATION 1...217
  hypothetical: YES
MDREQIIALQHQRFATKKYDPNRRISEKDWEVLVEVGRLAPSSIGLEPWKMLLLKNERMKEDLKPMAWGGLSSLEGASHFVIYLARKGVTYDSDYVKKVMHEVKKRDYDTHSRFAQIIKNFQENDIKLNSERSLFDWASKQTYIQMANMMMAAAMLGIDSCPIEGYDQEKVEAYLEEKGYLNTAEFGVSVMASFGYRNQEITPKTRWKTEVIYEVIE

SEQ ID NO: 6414 - protein, 239 aa, Helicobacter pylori
  misc_feature (B) LOCATION 1...239
  hypothetical: YES
LPMRFKFGDAFECLIEQYLKEHSFSPLSKKIPYYNKDKEKRESLELDQFAKKDNTIYFMEQKMRDDHDSAKKRGQIDNFERKLEALIHRYGENIQGYFYFIDEGLNKNQNYYKEELQKLSADYGVPLSLRYGKGLFESLNIPQVWDEVLTHLARWRETLPDLPSLNFDENPLESFREIKDLAPSVYRKLLDNDEIFNLVLILFPEQKVLKMLVEHFRQQNKTIYQQLASKLVQKLLSLR

SEQ ID NO: 6415 - protein, 290 aa, Helicobacter pylori
  misc_feature (B) LOCATION 1...290
  hypothetical: YES
MDYQTFNEIFNRFVFGTSKAKLLENIAENPERYLGIFRPTKPKTKLLQNLLTSHEIKFGDAFECLIEQYLKEHSFSPLSKKIPYYNKDKEKRESLELDQFAKKDNTYYFMEQKMRDDHDSAKKRGQIDNFERKLEALIHRYGENIQGYFYFIDEGLNKNQNYYKEELQKLSADYGVPLSLRYGKGLFESLNIPQVWDEVLTHLARWRETLPDLPSLNFDENPLESFREIKDLAPSVYRKLLDNDEIFNLVLILFPEQKVLKMLVEHFRQQNKTIYQQLASKLVQKLLSLR

SEQ ID NO: 6416 - protein, 59 aa, Helicobacter pylori
  misc_feature (B) LOCATION 1...59
  hypothetical: YES
KLIDLAHPLDKRRSRAAASNIIPTTTKAALALHKVLPNLKNKMHGHSVRVPSLDVSMID

SEQ ID NO: 6417 - protein, 79 aa, Helicobacter pylori
  misc_feature (B) LOCATION 1...79
  hypothetical: YES
PVQTEAQNVSLSALFIGEYDEKQYPTLVYGVNHFLYQNQAIVSNASCTTNAIAPICAILDKAFSIKEGMLTTIHSYTSD

SEQ ID NO: 6418 - protein, 78 aa, Helicobacter pylori
  misc_feature (B) LOCATION 1...78
  hypothetical: YES
VQTEAQNVSLSALFIGEYDEKQYPTLVYGVNHFLYQNQAIVSNASCTTNAIAPICAILDKAFSIKEGMLTTIHSYTSD

SEQ ID NO: 6419 - protein, 112 aa, Helicobacter pylori
  misc_feature (B) LOCATION 1...112
  hypothetical: YES
TMKIFINGFGRIGRCVLRAILERNDTNPQLEVIGINDPANWEILAYLLEHDSTHGLLNKEVRYSNGKLIIGSLEIPVFNSIKDLKGVGVIIECSGKFLEPKTLENYLLLGAK

SEQ ID NO: 6420 - protein, 111 aa, Helicobacter pylori
  misc_feature (B) LOCATION 1...111
  hypothetical: YES
MKIFINGFGRIGRCVLRAILERNDTNPQLEVIGINDPANWEILAYLLEHDSTHGLLNKEVRYSNGKLIIGSLEIPVFNSIKDLKGVGVIIECSGKFLEPKTLENYLLLGAK

SEQ ID NO: 6421 - protein, 130 aa, Helicobacter pylori
  misc_feature (B) LOCATION 1...130
  hypothetical: YES
LVYGVNHFLYQNQAIVSNASCTTNAIAPICAILDKAFSIKEGMLTTIHSYTSDQKLIDLAHPLDKRRSRAAASNIIPTTTKAALALHKVLPNLKNKMHGHSVRVPSLDVSMIDLSLFLEKKALKDPIMIY

SEQ ID NO: 6422 - protein, 260 aa, Helicobacter pylori
  misc_feature (B) LOCATION 1...260
  hypothetical: YES
MKIFINGFGRIGRCVLRAILERNDTNPQLEVIGINDPANWEILAYLLEHDSTHGLLNKEVRYSNGKLIIGSLEIPVFNSIKDLKGVGVIIECSGKFLEPKTLENYLLLGAKKVLLSAPFMGEYDEKQYPTLVYGVNHFLYQNQAIVSNASCTTNAIAPICAILDKAFSIKEGMLTTIHSYTSDQKLIDLAHPLDKRRSRAAASNIIPTTTKAALALHKVLPNLKNKMHGHSVRVPSLDVSMIDLSLFLEKKALKDPIMIY

SEQ ID NO: 6423 - protein, 332 aa, Helicobacter pylori
  misc_feature (B) LOCATION 1...332
  hypothetical: YES
MKIFINGFGRIGRCVLRAILERNDTNPQLEVIGINDPANWEILAYLLEHDSTHGLLNKEVRYSNGKLIIGSLEIPVFNSIKDLKGVGVIIECSGKFLEPKTLENYLLLGAKKVLLSAPFMGEYDEKQYPTLVYGVNHFLYQNQAIVSNASCTTNAIAPICAILDKAFSIKEGMLTTIHSYTSDQKLIDLAHPLDKRRSRAAASNIIPTTTKAALALHKVLPNLKNKMHGHSVRVPSLDVSMIDLSLFLEKKALKDPINDLLITASKGTLKGVLEIDLKERVSSDFISNPNSVIIAPDLTFTLENMVKIMGWYDNEWGYSNRLVDMAQFMYHY

SEQ ID NO: 6424 - protein, 159 aa, Helicobacter pylori
  misc_feature (B) LOCATION 1...159
  hypothetical: YES
MQQAPVILSTLDKLLNWGRSNSLWPLTYGLACCAIEMMATGGSRFDFDRFGTIFRASPRQSDVMIIAGTLTKKHAEFMRRLYDQMPEPKWVISMGSCANTGGMFNTYATVQGADRVVPVDIYLPGCAPRPETLQYALMVLQDKIRRSKAIKQDAPKRLV

SEQ ID NO: 6425 - protein, 133 aa, Helicobacter pylori
  misc_feature (B) LOCATION 1...133
  hypothetical: YES
LSFLYRSANWSEREAYDMLGIVFDKHPYLKRLIMPHDWVGHPLLRSYPLKGDEFAQWYEVDKIFGKEYREVVGKEQRDSARVDEKDTFNFAKIGYEQGKGEELKETEEKHAFKKIPFVKDLHKIAPTILKKRL

SEQ ID NO: 6426 - protein, 132 aa, Helicobacter pylori
  misc_feature (B) LOCATION 1...132
  hypothetical: YES
SFLYRSANWSEREAYDMLGIVFDKHPYLKRLIMPHDWVGHPLLRSYPLKGDEFAQWYEVDKIFGKEYREVVGKEQRDSARVDEKDTFNFAKIGYEQGKGEELKETEEKHAFKKIPFVKDLHKIAPTILKKRL

SEQ ID NO: 6427 - protein, 266 aa, Helicobacter pylori
  misc_feature (B) LOCATION 1...266
  hypothetical: YES
VMVRKQSPYEDVQKQSRQHDPYKIIEPTPKKYLEGSAYEVIYNHLSYKHEVLDKYIETNTAVFWIKKDDIFSVATILKHLGYECLSEMSAIDLCAKKGHFELFYQFVGFSDSCKNRRRVRVKCVLLPNESVDSLSFLYRSANWSEREAYDMLGIVFDKHPYLKRLIMPHDWVGHPLLRSYPLKGDEFAQWYEVDKIFGKEYREVVGKEQRDSARVDEKDTFNFAKIGYEQGKGEELKETEEKHAFKKIPFVKDLHKIAPTILKKRL

SEQ ID NO: 6428 - protein, 61 aa, Helicobacter pylori
  misc_feature (B) LOCATION 1...61
  hypothetical: YES
DNIYNLGHRGYVAKPGGEHDAGLTYIKDLAAGKYKLPWEDHMKIKDGSIYGYPTTGGRFGK

SEQ ID NO: 6429 - protein, 286 aa, Helicobacter pylori
  misc_feature (B) LOCATION 1...286
  hypothetical: YES
LLLLLRQNFLEGVIMGSIGSMGKPIEGFLVAAIQFPVPIVNSRKDIDHNIESIIRTLHATKAGYPGVELIIFPEYSTQGLNTAKWLSEEFLLDVPRKETELYAKACKQAKVYGVLSIMERNPDSNENPYNTAIIIDPQGKIILKYRKLFPWNPIEPWYPGDLGMPVCEGPGGSKLAVCICHDGMIPELAREAAYKGCNVYIRISGYSTQVNDQWILTNRSNAWHNLMYTVSVNLAGYDNVFYYFGERQICNFDGTTLVQGHRNPWEIVTGEIYPKMANNARLSWGL

SEQ ID NO: 6430 - protein, 334 aa, Helicobacter pylori
  misc_feature (B) LOCATION 1...334
  hypothetical: YES
MGSIGSMGKPIEGFLVAAIQFPVPIVNSRKDIDHNIESIIRTLHATKAGYPGVELIIFPEYSTQGLNTAKWLSEEFLLDVPGKETELYAKACKEAKVYGVLSIMERNPDSNENPYNTAIIIDPQGKIILKYRKLFPWNPIEPWYPGDLGMPVCEGPGGSKLAVCICHDGMIPELAREAAYKGCNVYIRISGYSTQVNDQWILTNRSNAWHNLMYTVSVNLAGYDNVFYYFGEGQICNFDGTTLVQGHRNPWEIVTGEIYPKMADNARLSWGLENNIYNLGHRGYVAKPGGEHDAGLTYIKDLAAGKYKLPWEDHMKIKDGSIYGYPTTGGRFGK

SEQ ID NO: 6431 - protein, 346 aa, Helicobacter pylori
  misc_feature (B) LOCATION 1...346
  hypothetical: YES
LLLRQNFLEGVIMGSIGSMGKPIEGFLVAAIQFPVPIVNSRKDIDHNIESIIRTLHATKAGYPGVELIIFPEYSTQGLNTAKWLSEEFLLDVPGKETELYAKACKEAKVYGVLSIMERNPDSNENPYNTAIIIDPQGKIILKYRKLFPWNPIEPWYPGDLGMPVCEGPGGSKLAVCICHDGMIPELAREAAYKGCNVYIRISGYSTQVNDQWILTNRSNAWHNLMYTVSVNLAGYDNVFYYFGEGQICNFDGTTLVQGHRNPWEIVTGEIYPKMADNARLSWGLENNIYNLGHRGYVAKPGGEHDAGLTYIKDLAAGKYKLPWEDHMKIKDGSIYGYPTTGGRFGK

SEQ ID NO: 6432 - protein, 99 aa, Helicobacter pylori
  misc_feature (B) LOCATION 1...99
  hypothetical: YES
FLQQRLMDYASLKSVKNLEGMPSVVLEVKEPNACLLIQSESDDPLILENHMQTILNALNAVPVVLDSQISSDPDIYQSWWKIRKAFSLSQRQKEKAKAL

SEQ ID NO: 6433 - protein, 273 aa, Helicobacter pylori
  misc_feature (B) LOCATION 1...273
  hypothetical: YES
YLSIVVEDQKGIFPIAASKRKSQSSVIIEDVCFSKEDFVEGAKAIEGLLKKHGFKDNGIIFGHALSGNLHFVVTPILENEAERKAFENLVSEMFLMVSKSSGSIKAEHGTGRMVAPFVEMEWGEKAYKIHKQIKELFDPNGLLNPDVIITNDKEIHTKNLKSIYPIEEHLDMCMECGFCERICPSKDLSLTPRQRIVIHREVERLKERVSHGHDEDQVLLDELLKESEYLAHATCAVCHMCSTLCPLGIDTGSIALNHYQKNPKGEKICFKDS

SEQ ID NO: 6434 - protein, 286 aa, Helicobacter pylori
  misc_feature (B) LOCATION 1...286
  hypothetical: YES
KALSWFQKLIGPHNLVSLTKGIKKFIKPFPKAFHYMPKNNAYPLENKTLKGGEKVIYFSTCINRSFAPSTKMADKRCIQEVFESLCQKAKVSVVYPNGLNALCCGKAFINYTALTKQNNEKNHAIFLQLSDEGKIPIVLDHSACSTHFIKQMKAYKDLKVYDLSVYIEEVLSPKLKFNPINEDIGLYTMCALKLENKEELLLNLAKKCTLGEIVIHKKTGCCGFAGNKGFFTPELNESALNGFQAFYQSYDLKRGFSTSSTCEIGLSEKTQFAWQHIAYLVDACTL

SEQ ID NO: 6435 - protein, 324 aa, Helicobacter pylori
  misc_feature (B) LOCATION 1...324
  hypothetical: YES
GVCVEENYHAFFTEASGFLNERIFKDYLRRLAYGIDASCYRYIPKIVAWVKNEEEVQKLCALAKKHGVTLTFRAAGSSLSGQASCDGVLVVVAHFFKDAHILDNAQSIQLSCGVIGSHANDLLKPYHKKIGPDPATINTAMIGGIVANNASGMCCGVEQNSYKTLKSLRVILADGTLLDTADQESVENFKNARKDLIEGVLNLRKEILKDKELHALIKKKYEIKNTTGYSLNALIDFEDPIEIISHLFIGSEGTLGFISSVGLECVKDYAYKTCALLFYENLEQCAKAAQILAALKAKQPEMISSAEAYGLCVLKKREKFRGHA

SEQ ID NO: 6436 - protein, 948 aa, Helicobacter pylori
  misc_feature (B) LOCATION 1...948
  hypothetical: YES
VCVEENYHAFFTEASGFLNERIFKDYLRRLAYGIDASCYRYIPKIVAWVKNEEEVQKLCALAKKHGVTLTFRAAGSSLSGQASCDGVLVVVAHFFKDAHILDNAQSIQLSCGVIGSHANDLLKPYHKKIGPDPATINTAMIGGIVANNASGMCCGVEQNSYKTLKSLRVILADGTLLDTADQESVENFKNARKDLIEGVLNLRKEILKDKELHALIKKKYEIKNTTGYSLNALIDFEDPIEIISHLFIGSEGTLGFISSVGLECVKDYAYKTCALLFYENLEQCAKAAQILAALKAKQPEMISSAELMDYASLKSVKNLEGMPSVVLEVKEPNACLLIQSESDDPLILENNMQTILNALNAVPVVLDSQISSDPDIYQSWWKIRKGIFPIAASKRKSQSSVIIEDVCFSKEDFVEGAKAIEGLLKKHGFKDNGIIFGHALSGNLHFVVTPILENEAERKAFENLVSEMFLMVSKSSGSIKAEHGTGRMVAPFVEMEWGEKAYKIHKQIKELFDPNGLLNPDVIITNDKEIHTKNLKSIYPIEEHLDMCMECGFCERICPSKDLSLTPRQRIVIHREVERLKERVSHGHDEDQVLLDELLKESEYLAHATCAVCHMCSTLCPLGIDTGSIALNHYQKNPKGEKIASKILNHMQTTTSVARFSLKSAFVVQKLIGPHNLVSLTKGIKKFIKPFPKAFHYMPKNNAYPLENKTLKGGEKVIYFSTCINRSFAPSTKMADKRCIQEVFESLCQKAKVSVVYPNGLNALCCGKAFINYTALTKQNNEKNHAIFLQLSDEGKIPIVLDHSACSTHFIKQMKAYKDLKVYDLSVYIEEVLSPKLKFNPINEDIGLYTMCALKLENKEELLLNLAKKCTLGEIVIHKETGCCGFAGNKGFFTPELNESALNGFQAFYQSYDLKRGFSTSSTCEIGLSEKTQFAWQHIAYLVDACTL

SEQ ID NO: 6437 - protein, 126 aa, Helicobacter pylori
  misc_feature (B) LOCATION 1...126
  hypothetical: YES
TVGHMYGKVQIPDLEEVQKMTINRKEFAGDKKDYKPYGVAQDEPAVLNPFFKGYRYHVSGLHHGPIGFPTEDAKIGGDLIDRLFHKIESKQDIINENEEMDLEGTEIVIIAYGSVSLAVKSLERLQ

SEQ ID NO: 6438 - protein, 154 aa, Helicobacter pylori
  misc_feature (B) LOCATION 1...154
  hypothetical: YES
SLKRRLRGVSVFGGYPITPSSDIMHAMSVALPKCGGHFIQMEDEISGISVSLGASMSGTKSMTAKYSPGISLKVEQIGYSFMAEIPLVIADVMRSGPSTGMPTRVAQGDVNFLRHPIHGDIKPFGLGEKLKAPTKQKKRKGTEIAEIIVRGPRG

SEQ ID NO: 6439 - protein, 296 aa, Helicobacter pylori
  misc_feature (B) LOCATION 1...296
  hypothetical: YES
MREIISDGNELVAKAAIEVGCRFFGGYPITPSSDIMHAMSVALPKCGGHFIQMEDEISGISVSLGASMSGTKSMTASSGPGISLKVEQIGYSFMAEIPLVIADVMRSGPSTGMPTRVAQGDVNFLRHPIHGDFKAVALAPANLEEAYTETVRAFNLAEMLMTPVFLLMDETVGHMYGKVQIPDLEEVQKMTINRKEFAGDKKDYKPYGVAQDEPAVLNPFFKGYRYHVSGLHHGPIGFPTEDAKIGGDLIDRLFHKIESKQDIINENEEMDLEGTEIVIIAYGSVSLAVKSLERLQ

SEQ ID NO: 6440 - protein, 238 aa, Helicobacter pylori
  misc_feature (B) LOCATION 1...238
  hypothetical: YES
MPTLWCWGCGDGVILKSTIRTIDALGWKMDDVCLVSGIGCSWRMSSYVNCNTVHTTHGRAVAYATGIKLANPSKHVIVVSGDGDGFAIGGNHTMHACRRNIDLNFILVNNFIYGLTNSQTSPTTPNGMWTVTAQWGNIDNQFDPCALTTAAGASFVARESVLDPQKLEKVLKEGFTHKGFSFFDVHSNCHINLGRKNKMGEASQMLKWMESRLVSKRQFEAMSPEERVDKFPTGGFKA

SEQ ID NO: 6441 - protein, 237 aa, Helicobacter pylori
  misc_feature (B) LOCATION 1...237
  hypothetical: YES
PTLWCWGCGDGVILKSTIRTIDALGWKMDDVCLVSGIGCSWRMSSYVNCNTVHTTHGRAVAYATGIKLANPSKHVIVVSGDGDGFAIGGNHTMHACRRNIDLNFILVNNFIYGLTNSQTSPTTPNGMWTVTAQWGNIDNQFDPCALTTAAGASFVARESVLDPQKLEKVLKEGFTHKGFSFFDVHSNCHINLGRKNKMGEASQMLKWMESRLVSKRQFEAMSPEERVDKFPTGGFKA

SEQ ID NO: 6442 - protein, 260 aa, Helicobacter pylori
  misc_feature (B) LOCATION 1...260
  hypothetical: YES
MPTLWCWGCGDGVILKSTIRTIDALGWKMDDVCLVSGIGCSGRMSSYVNCNTVHTTHGRAVAYATGIKLANPSKHVIVVSGDGDGFAIGGNHTMHACRRNIDLNFILVNNFIYGLTNSQTSPTTPNGMWTVTAQWGNIDNQFDPCALTTAAGASFVARESVLDPQKLEKVLKEGFTHKGFSFFDVHSNCHINLGRKNKMGEASQMLKWMESRLVSKRQFEAMSPEERVDKFPTGVLKHDTDRKEYCEAYQEIIEKAQGKQ

SEQ ID NO: 6443 - protein, 273 aa, Helicobacter pylori
  misc_feature (B) LOCATION 1...273
  hypothetical: YES
MAFNYDEYLRVDKMPTLWCWGCGDGVILKSIIRTIDALGWKMDDVCLVSGIGCSGRMSSYVNCNTVHTTHGRAVAYATGIKLANPSKHVIVVSGDGDGFAIGGNHTMHACRRNIDLNFILVNNFIYGLTNSQTSPTTPNGMWTVTAQWGNIDNQFDPCALTTAAGASFVARESVLDPQKLEKVLKEGFTHKGFSFFDVHSNCHINLGRKNKMGEASQMLKWMESRLVSKRQFEAMSPEERVDKFPTGVLKHDTDRKEYCEAYQEIIEKAQGKQ

SEQ ID NO: 6444 - protein, 83 aa, Helicobacter pylori
  misc_feature (B) LOCATION 1...83
  hypothetical: YES
LKDYNKESKQKVGFFRPKTLWPSPAKRLKEIGDKYEKILVIELNKGQYLEEIERVMQRKVHFFGQANGRTISPKQIIAKLKEL

SEQ ID NO: 6445 - protein, 94 aa, Helicobacter pylori
  misc_feature (B) LOCATION 1...94
  hypothetical: YES
RALKDYNKESKQKVGFFRPKTLWPSPAKRLKEIGDKYEKILVIELNKGQYLEEIERVMQRKVHFFGQAQWAYDFAQTNHRKVEGALKWRLIMMN

SEQ ID NO: 6446 - protein, 83 aa, Helicobacter pylori
  misc_feature (B) LOCATION 1...83
  hypothetical: YES
MEAQLRFTGVGGQGVLLAGEILAEAKIVSGGYGTKTSTYTSQVRGGPTKVDILLDKDEIIFPYAKEGEIDFMLSVAQISYNQF

SEQ ID NO: 6447 - protein, 171 aa, Helicobacter pylori
  misc_feature (B) LOCATION 1...171
  hypothetical: YES
KSTRKTIMEAQLRFTGVGGQGVLLAGEILAEAKIVSGGYGTKTSTYTSQVRGGPTKVDILLDKDEIIFPYAKEGEIDFMLSVAQISYNQFKSDIKKGGIVVIDPNLVTPTKEDEEKYQLYKIPIISIAKDEVGNIITQSVVALAITVELTKCVEENIVLDTMLKKVPCKSR

SEQ ID NO: 6448 - protein, 184 aa, Helicobacter pylori
  misc_feature (B) LOCATION 1...184
  hypothetical: YES
MEAQLRFTGVGGQGVLLAGEILAEAKIVSGGYGTKTSTYTSQVRGGPTKVDILLDKDEIIFPYAKEGEIDFMLSVAQISYNQFKSDIKKGGIVVIDPNLVTPTKEDEEKYQLYKIPIISIAKDEVGNIITQSVVALAITVELTKCVEENIVLDTMLKKVPAKVAETNKKAFEIGKKHALEALKK

SEQ ID NO: 6449 - protein, 187 aa, Helicobacter pylori
  misc_feature (B) LOCATION 1...187
  hypothetical: YES
VCRAGICGSCAMMVNGRPRLACKTLTSSFENGVITLMPMPSFTLIKDLSVNTGDWFSDMTKRVESWAHSKEEVDITKPEKRVEPDEAQEVFELDRCIECGCCIASCGTKLMRPNFIGAAGMNRAMRFMIDSHDERSDDDFYELVGDDDGVFGCMSLIACHDTCPKELPLQSSIATLRNRMLKVGKSR

SEQ ID NO: 6450 - protein, 191 aa, Helicobacter pylori
  misc_feature (B) LOCATION 1...191
  hypothetical: YES
SFDFVGRAGICGSCAMMVNGRPRLACKTLASSFENGVITLMPMPSFTLIKDLSVNTGDWFSDMTKRVESWAHSKEEVDITKPEKRVEPDEAQEVFELDRCIECGCCIASCGTKLMRPNFIGAAGMNRAMRFMIDSHDERSDDDFYELVGDDDGVFGCMSLIACHDTCPKELPLQSSIATLRNRMLKVGKSR

SEQ ID NO: 6451 - protein, 190 aa, Helicobacter pylori
  misc_feature (B) LOCATION 1...190
  hypothetical: YES
FDFVGRAGICGSCAMMVNGRPRLACKTLASSFENGVITLMPMPSFTLIKDLSVNTGDWFSDMTKRVESWAHSKEEVDITKPEKRVEPDEAQEVFELDRCIECGCCIASCGTKLMRPNFIGAAGMNRAMRFMIDSHDERSDDDFYELVGDDDGVFGCMSLIACHDTCPKELPLQSSIATLRNRMLKVGKSR

SEQ ID NO: 6452 - protein, 245 aa, Helicobacter pylori
  misc_feature (B) LOCATION 1...245
  hypothetical: YES
MSDNERTIVVRVLKFDPQSAVNKPHFKEYQLKETPSMTLFIALNLIREHQDPDLSFDFVCRAGICGSCAMMVNGRPRLACKTLTSSFENGVITLMPMPSFTLIKDLSVNTGDWFSDMTKRVESWAHSKEEVDITKPEKRVEPDEAQEVFELDRCIECGCCIASCGTKLMRPNFIGAAGMNRAMRFMIDSHDERSDDDFYELVGDDDGVFGCMSLIACHDTCPKELPLQSSIATLRNRMLKVGKSR

SEQ ID NO: 6453 - protein, 68 aa, Helicobacter pylori
  misc_feature (B) LOCATION 1...68
  hypothetical: YES
LKEKFDFFKGKNFKIVYCIGEDLTTREKGFRAVKEFLSEQLENIDLNYSNLIVAYEPIWAIGTKKARF

SEQ ID NO: 6454 - protein, 71 aa, Helicobacter pylori
  misc_feature (B) LOCATION 1...71
  hypothetical: YES
PSFLKEKFDFFKGKNFKIVYCIGEDLTTREKGFRAVKEFLSEQLENIDLNYSNLIVAYEPIWAIGTKKARF

SEQ ID NO: 6455 - protein, 70 aa, Helicobacter pylori
  misc_feature (B) LOCATION 1...70
  hypothetical: YES
SFLKEKFDFFKGKNFKIVYCIGEDLTTREKGFRAVKEFLSEQLENIDLNYSNLIVAYEPIWAIGTKKARF

SEQ ID NO: 6456 - protein, 113 aa, Helicobacter pylori
  misc_feature (B) LOCATION 1...113
  hypothetical: YES
MTKIAMANFKSAMPVFKSHAYLKELEKTLKPQHFDRVFVFPDFLGLLPNAFLHFTLGAQNAYPKDCGAFTGEITSKHLEKLKIHTLLIGHTERRVLLKDSPTFLKEKFEFFKG

SEQ ID NO: 6457 - protein, 234 aa, Helicobacter pylori
  misc_feature (B) LOCATION 1...234
  hypothetical: YES
MTKIAMANFKSAMPVFKSHAYLKELEKTLKPQHFDRVFVFPDFLGLLPNAFLHFTLGAQNAYPRDCGAFTGEITSKHLEELKIHTLLIGHSERRVLLKESPSFLKEKFDFFKGKNFKIVYCIGEDLTTREKGFRAVKEFLSEQLENIDLNYSNLIVAYEPIWAIGTKKSASLEDIYLTHGFLKQILNQKTPLLYGGSVNAQNAKEILGIDSVDGLLIGSASLELENFKTIISFL

SEQ ID NO: 6458 - protein, 261 aa, Helicobacter pylori
  misc_feature (B) LOCATION 1...261
  hypothetical: YES
MIMPLGFESFKEALRASAEVYHTLKKLLDEKNQLTSVGDEGGFAPNFNNNVEPLEIISQAIEKAGYKLGEEIALALDVASSELVDEHFNYHLKGENKILDSHELVAYYKELVAKYPIVSIEDGLSEDDWEGWAFLSKELGRQIQLVGDDLFVTNASILQKGIEKNVANAILIKPNQIGTISETLETIRLAKHHAYQCVISHRSGESEDSFIADFAVALNTGEIKTGSTARSERIAKYNRLLEIEHELKGGIYIGKELFKHG

SEQ ID NO: 6459 - protein, 268 aa, Helicobacter pylori
  misc_feature (B) LOCATION 1...268
  hypothetical: YES
SIDFQEYMIMPLGFESFKEALRASAEVYHTLKKLLDEKNQLTSVGDEGGFAPNFNNNVEPLEIISQAIEKAGYKLGEEIALALDVASSELVDEHFNYHLKGENKILDSHELVAYYKELVAKYPIVSIEDGLSEDDWEGWAFLSKELGWEIQLVGDDLFVTNASILQKGIEKNVANAILIKPNQIGTISETLETIRLAKHHAYQCVISHRSGESEDSFIADFAVALNTGEIKTGSTARSERIAKYNRLLEIEHELKGGIYIGKELFKHG

SEQ ID NO: 6460 - protein, 267 aa, Helicobacter pylori
  misc_feature (B) LOCATION 1...267
  hypothetical: YES
IDFQEYMIMPLGFESFKEALRASAEVYHTLKKLLDEKNQLTSVGDEGGFAPNFNNNVEPLEIISQAIEKAGYKLGEEIALALDVASSELVDEHFNYHLKGENKILDSHELVAYYKELVAKYPIVSIEDGLSEDDWEGWAFLSKELGWEIQLVGDDLFVTNASILQKGIEKNVANAILIKPNQIGTISETLETIRLAKHHAYQCVISHRSGESEDSFIADFAVALNTGEIKTGSTARSERIAKYNRLLEIEHELKGGIYIGKELFKHG

SEQ ID NO: 6461 - protein, 426 aa, Helicobacter pylori [sequence omitted]

SEQ ID NO: 6462 - protein, 426 aa, Helicobacter pylori [sequence omitted]

SEQ ID NO: 6463 - protein, 77 aa, Helicobacter pylori
  misc_feature (B) LOCATION 1...77
  hypothetical: YES
LRWSWGGERLETGVAKLGNMEAVQFHPTALVPSGILMTEGCRGDGGVLRDKFGRRFMSAYEYGEKRACERDVVSRRS

SEQ ID NO: 6464 - protein, 81 aa, Helicobacter pylori
  misc_feature (B) LOCATION 1...81
  hypothetical: YES
MLYAVANEALHHKVDIQDRKDMLAFIHHDNKCYGAVVRDLITGEISAYVSKGTLLATGGYGRVYKHTTNAVICDGAGAASA

SEQ ID NO: 6465 - protein, 90 aa, Helicobacter pylori
  misc_feature (B) LOCATION 1...90
  hypothetical: YES
LTADATGHTMLYAVANEALHHKVDIQDRKDMLAFIHHDNKCYGAVVRDLITGEISAYVSKGTLLATGGYGRVYKHTTNAVICDGAGAASA

SEQ ID NO: 6466 - protein, 89 aa, Helicobacter pylori
  misc_feature (B) LOCATION 1...89
  hypothetical: YES
TADATGHTMLYAVANEALHHKVDIQDRKDMLAFIHHDNKCYGAVVRDLITGEISAYVSKGTLLATGGYGRVYKHTTNAVICDGAGAASA

SEQ ID NO: 6467 - protein, 95 aa, Helicobacter pylori
  misc_feature (B) LOCATION 1...95
  hypothetical: YES
RRDLRWSWGGERLETGVAKLGNMEAVQFHPTALVPSGILMTEGCRGDGGVLRDKFGRRFMSAYEYGEKRACERDVVSRRILEHIQKGYGAKSPYG

SEQ ID NO: 6468 - protein, 714 aa, Helicobacter pylori
  misc_feature (B) LOCATION 1...714
  hypothetical: YES
MKITYCDALIIGGGLAGLRASIACKQKGLNTIVLSLVPVRRSHSAAAQGGMQASLANAKKSEGDNEDLHFLDTVKGSDWGCDQQVARMFVTTAPKAIRELASWGVPWTRIKKGDRPAVVNGEHVIITERDDRHGYILSRDFGGTKKWRTCFTADATGHTMLYAVANEALHHKVDIQDRKDMLAFIHHDNKCYGAVVRDLITGEISAYVSKGTLLATGGYGRVYKHTTNAVICDGAGAASALETGVAKLGNMEAVQFHPTALVPSGILMTEGCRGDGGVLRDKFGRRFMPAYEPEKKELASRDVVSRRILEHIQKGYGAKSPYGDHVWLDIAILGRNHVEKNLRDVRDIAMTFAGIDPADSEEQTKDNMQGAPTNEPEYGQAMAKQKGWIPIKPMQHYSMGGVRTNPKGETHLKGLFCAGEAACWDLHGFNRLGGNSVSEPVVAGMIIGDYFASHCLEAQIEINTQKVEAFIKESQDYMHFLLHNEGKEDVYEIRERMKEVMDEKVGVFREGKKLEEALKELQELYARSKNICVKNKVLHNNPELEDAYRTKKMLKLALCITQGALLRTESRGAHTRIDYPKRDDEKWLNRTLASWPSAEQDMPTIEYEELDVMKMEISPDFRGYGKKGNFIPHPKKEERDAEILKTILELEKLGKDRIEVQHALMPFELQEKYKARNMRLEDEEVRARGEHLYSFNVHDLLDQHNANLKGEHHE

SEQ ID NO: 6469 - protein, 376 aa, Helicobacter pylori
  misc_feature (B) LOCATION 1...376
  hypothetical: YES
VRYIKFFKELNNKNVNLVGGKNASIGEMFQELVPIGIKVPDGFAITSEAYWYLLEQGGAKQKIIELLENVDATEIDVLKIRSKQIRELIFGTPFPSDLRDEIFQAYEILSQQYHMKEADVAVRSSATAEDLPDASFAGQQDTYLNIKGKTELIHYIKSCLASLFTDRAISYRASRGFDHLKVALSVGVQKMVRADKGSAGVMFSIDTETGFKDAVFITSAWGLGENVVGGTINPDEFYVFKPTLEQNKRPIIKRQLGNKTQKMVYAPRGSEHPTRNIKTTKKEWQSFSLSDEDVLILAKYAIEIEKHYSKEAKQYRPMDIEWAKDGESGEIFIVQARPETVQSQKTKEENQVFEKFKFKNPNGKKRNYLTRQSDWE

SEQ ID NO: 6470 - protein, 785 aa, Helicobacter pylori
  misc_feature (B) LOCATION 1...785
  hypothetical: YES
MFQELVPIGIKVPDGFAITSEAYWYLLEQGGAKQKIIELLENVDATEIDVLKIRSKQIRELIFGTPFPSDLRDEIFQAYEILSQQYHMKEADVAVRSSATAEDLPDASFAGQQDTYLNIKGKTELIHYIKSCLASLFTDRAISYRASRGFDHLKVALSVGVQKMVRADKGSAGVMFSIDTETGFKDAVFITSAWGLGENVVGGTINPDEFYVFKPTLEQNKRPIIKRQLGNKTQKMVYAPRGSEHPTRNIKTTKKEWQSFSLSDEDVLILAKYAIEIEKHYSKEAKQYRPMDIEWAKDGESGEIFIVQARPETVQSQKTKEENQVFEKFKFKNPNEKKEIILQGRAIGSKIGSGKVRIINDLEHMNSFKEGEILVTDNTDPDWEPCMKKASAVITNRGGRTCHAAIVAREIGVPAIVGVSGATDSLYTGMEITVSCAEGEEGYVYAGIYEHEIERVELSNMQETQTKIYINIGNPEKAFSFSQLPNHGVGLARMEMIILNQIKAHPLALVDLHHKKSVKEKNEIENLMAGYANPKDFFVKKIAEGIGMISAAFYPKPVIVRTSDFKSNEYMRMLGGSSYEPNEENPMLGYRGASRYYSESYNEAFSWECEALALVREEMGLTNMKVMIPFLRTIEEGKKVLEILRKNNLESGKNGLEIYIMCELPVNVILADDFLSLFDGFSIGSNDLTQLTLGVDRDSELVSHVFDERNEAMLKMFKKAIEACKRHNKYCGICGQAPSDYPEVTEFLVKEGITSISLNPDSVIPTWNAVAKLEKELKDHGLTAR

SEQ ID NO: 6471 - protein, 408 aa, Helicobacter pylori
  misc_feature (B) LOCATION 1...408
  hypothetical: YES
LIGEMMEILVLNLGSSSIKFKLFDMKENKPLASGLAEKIGEEIGQLKIKSHLHHNDQELKEKLVIKDHAIGLLMIRENLTKMGIIKDFNQIDAIGHRVVQGGDKFHAPVLVDEKVMREIGNLSILAPLHNPANLAGIEFVQKAHPHIPQIAVFDTAFHASMPSYAYMYALPYELYEKYQIRRYGFHGTSHHYVAKEAAKFLNIPYEEFNAISLHLGNGSSAAAIQNGKSVDTSMGLTPLEGLIMGTRCGDIDPTVVEYIAQCANKSLEEVMKILNHESGLKGICGDNDARNIEVRKEKGDKQAKLAFEMCVYRIKKYIGAYMVVLKKVDAIIFTGGLGENYSALRESVCEGLENLGIALHKPTNDNPGSALVNLSQPNTKIQILRIPTDEELEIALQAKEMVEKIKVV

SEQ ID NO: 6472 - protein, 104 aa, Helicobacter pylori
  misc_feature (B) LOCATION 1...104
  hypothetical: YES
MLEVINGKNYAEKTAHQAVVVNVGASWCPDCRKIEPIMENLAKTYKGKVEFFKVSFDESQDLKESLGIRKIPTLIFYKNAKEVGERLVEPSSQKPIEDALKALL

SEQ ID NO: 6473 - protein, 109 aa, Helicobacter pylori
  misc_feature (B) LOCATION 1...109
  hypothetical: YES
KIRIIMLEVINGKNYAEKTAHQAVVVNVGASWCPDCRKIEPIMENLAKTYKGKVEFFKVSFDESQDLKESLGIRKIPTLIFYKNAKEVGERLVEPSSQKPIEDALKALL

SEQ ID NO: 6474 - protein, 143 aa, Helicobacter pylori
  misc_feature (B) LOCATION 1...143
  hypothetical: YES
RIFMKLVLGISGASGIPLALRFLEKLPKEIEVFVVASKNAHVVALEESNINLKNAMKDLRPSATFFNEQDIHASIASGSYGIHKMAIIPASMDMVAKIAHGFGGDLISRSASVMLKEKRPLLIAPREMPLSAIMLENLLKLAR

SEQ ID NO: 6475 - protein, 144 aa, Helicobacter pylori
  misc_feature (B) LOCATION 1...144
  hypothetical: YES
RIFMKLVLGISGASGIPLALRFLEKLPKEIEVFVVASKNAHVVALEESNINLKNAMKDLRPSATFFNEQDIHASIASGSYGIHKMAIIPASMDMVAKIAHGFGGDLISRSASVMLKEKRPLLIAPREMPLSAIMLENLLKLARS

SEQ ID NO: 6476 - protein, 187 aa, Helicobacter pylori
  misc_feature (B) LOCATION 1...187
  hypothetical: YES
MKLVLGISGASGIPLALRFLEKLPKEIEIFVVASKNAHVVALEESNINLKNAMKDLRPSATFFNEQDIHASIASGSYGIHKMAIIPASMDMVAKIAHGFGGDLISRSASVMLKEKRPLLIAPREMPLSAIMLENLLKLAHSNAIIAPPMMTYYTQSKTLEAMQDFLVGKWFDSLGIENDLYPRWGMN

SEQ ID NO: 6477 - protein, 70 aa, Helicobacter pylori
  misc_feature (B) LOCATION 1...70
  hypothetical: YES
KFHRRRYKQRIHTNSPKKITTISTRLIRMLKNDDFVIAKNQLGNIVQILWVSLELSMENLQWCYLSDLMS

SEQ ID NO: 6478 - protein, 174 aa, Helicobacter pylori
  misc_feature (B) LOCATION 1...174
  hypothetical: YES
YCPNSVGVIRAVNGKSAMVLFIGLNELKRVDFSELEAIDIYRTGKGYDKKICNICHILKNTDGFEINQTDAKGRKTTRPSCRECRKNIDGVKLSSTEKKKMDEIAPPKGSVFTCPICEKRSIVGVTANLVHDHNHDTGWGREWICDSCNTGLGRFKDNPKFLEKVIEYLKKYEK

SEQ ID NO: 6479 - protein, 190 aa, Helicobacter pylori
  misc_feature (B) LOCATION 1...190
  hypothetical: YES
MLKNDDFVIAKNQLGNIVPNSVGVIRAVNGKSAMVLFIGLNELKRVDFSELEAIDIYRTGKGYDKKICNICHILKNTDGFEINQTDAKGRKTTRPSCRECRKNIDGVKLSSTEKKKMDEIAPPKGSVFTCPICEKRSIVGVTANLVHDHNHDTGWGREWICDSCNTGLGRFKDNPKFLEKVIEYLKKYEK

SEQ ID NO: 6480 - protein, 49 aa, Helicobacter pylori
  misc_feature (B) LOCATION 1...49
  hypothetical: YES
PTTPAGSVYCFVLGNGVKSIKNGALNNIASSVLKLMGIKAPATMDEPLF

SEQ ID NO: 6481 - protein, 427 aa, Helicobacter pylori
  misc_feature (B) LOCATION 1...427
  hypothetical: YES
KVLKMAQKTLLIITDGIGYRKDSDHNAFFHAKKPTYDLMFKTLPYSLIDTHGLSVGLPKGQMGNSEVGHMCIGAGRVLYQDLVRISLSLQNDELKNNPAFLNTIQKSHVVHLMGLMSDGGVHSHIEHFIALALECEKSHKKVCLHLITDGRDVAPKSALTYLKQMQNICNENIQIATISGRFYAMDRDNRFERIELAYNSLMGLNHTPLSPSEYIQSQYDKNITDEFIIPACFKNYCGMQDDESFIFINFRNDRAREIVSALGQKEFNSFKRQAFKKLHIATMTPYDNSFPYPVLFPKESVQNTLAEVVSQHNLTQSHIAETEKYAHVTFFINGGVETPFKNENRVLIQSPKVTTYDLKPEMSAKGVTLAVLEQMRLGTDLIIVNFANGDMVGHTGNFEASIKAVEAVDACLGETLHWLKNWITPCF

SEQ ID NO: 6482 - protein, 491 aa, Helicobacter pylori
  misc_feature (B) LOCATION 1...491
  hypothetical: YES
MAQKTLLIITDGIGYRKDSDHNAFFHAKKPTYDLMFKTLPYSLIDTHGLSVGLPKGQMGNSEVGHMCIGAGRVLYQDLVRISLSLQNDELKNNPAFLNTIQKSHVVHLMGLMSDGGVHSHIEHFIALALECEKSHKKVCLHLITDGRDVAPKSALTYLKQMQNICNENIQIATISGRFYAMDRDNRFERIELAYNSLMGLNHTPLSPSEYIQSQYDKNITDEFIIPACFKNYCGMQDDESFIFINFRNDRAREIVSALGQKEFNSFKRQAFKKLHIATMTPYDNSFPYPVLFPKESVQNTLAEVVSQHNLTQSHIAETEKYAHVTFFINGGVETPFKNENRVLIQSPKVTTYDLKPEMSAKGVTLAVLEQMRLGTDLIIVNFANGDMVGHTGNFEASIKAVEAVDACLGEILSLAKELDYAMLLTSDHGNCERMKDENQNPLTNHTAGSVYCFVLGNGVKSIKNGALNNIASSVLKLMGIKAPATMDEPLF

SEQ ID NO: 6483 - protein, 91 aa, Helicobacter pylori
  misc_feature (B) LOCATION 1...91
  hypothetical: YES
MKFLDHEERRQLLNERHSCKMFDSHYEFSSTELEEIAEIARLSPSSYNTQPWHFVMVTNKDLKKQIAAHSYFNEEMIKSASAVNGGMLFKT

SEQ ID NO: 6484 - protein, 97 aa, Helicobacter pylori
  misc_feature (B) LOCATION 1...97
  hypothetical: YES
KNKGEIMKFLDHEERRQLLNERHSCKMFDSHYEFSSTELEEIAEIARLSPSSYNTQPWHFVMVTNKDLKKQIAAHSYFNEEMIKSASAVNGGMLFKT

SEQ ID NO: 6485 - protein, 127 aa, Helicobacter pylori
  misc_feature (B) LOCATION 1...127
  hypothetical: YES
MVVCSLKPSELLPTSHYMQNLYPESYKVRVIPSFAQMLGVRFNHSMQKLESYILEQCYIAVGQICMGVSLMGLDSCIIGGFDPLKVGEILEERINKPKIVCLIALGKRVAEASKKSRKSKVDAITWL

SEQ ID NO: 6486 - protein, 134 aa, Helicobacter pylori
  misc_feature (B) LOCATION 1...134
  hypothetical: YES
LKALQLLMVVCSLKPSELLPTSHYMQNLYPESYKVRVIPSFAQMLGVRFNHSMQKLESYILEQCYIAVGQICMGVSLMGLDSCIIGGFDPLKVGEILEERINKPKIVCLIALGKRVAEASKKSRKSKVDAITWL

SEQ ID NO: 6487 - protein, 210 aa, Helicobacter pylori
  misc_feature (B) LOCATION 1...210
  hypothetical: YES
MKFLDHEKRRQLLNERHSCKMFDSHYEFSSTELEEIAEIARLSPSSYNTQPWHFVMVTNKDLKKQIAAHSYFNEEMIKSASALMVVCSLKPSELLPTSHYMQNLYPESYKVRVIPSFAQMLGVRFNHSMQKLESYILEQCYIAVGQICMGVSLMGLDSCIIGGFDPLKVGEILEERINKPKIVCLIALGKRVAEASKKSRKSKVDAITWL

SEQ ID NO: 6488 - protein, 193 aa, Helicobacter pylori
  misc_feature (B) LOCATION 1...193
  hypothetical: YES
VSVPATSANLGPGFDCLGLSLNLRNRFFIEPSNIHAVKLVGEGEGIPKFLTNNIFTKVFYEILKKHGNDGSFKFLLHNKVPITRGMGSSSAMIVGAVASAFAFLGFAFDRENILNTALIYENHPDNITPAVFGGYNAAFVEKKKVISLKTKIPSFLKAVMVIPNRVISTKQSRHLCPSVTACKKACLTFRMRV

SEQ ID NO: 6489 - protein, 293 aa, Helicobacter pylori
  misc_feature (B) LOCATION 1...293
  hypothetical: YES
LVVSVPATSANLGPGFDCLGLSLNLRNRFFIEPSNIHAVKLVGEGEGIPKFLTNNIFTKVFYEILKKHGNDGSFKFLLHNKVPITRGMGSSSAMIVGAVASAFAFLGFAFDRENILNTALIYENHPDNITPAVFGGYNAAFVEKKKVISLKTKIPSFLKAVMVIPNRVISTKQSRHLLPKRYSVQESVFNLSHASLMTMAIVQGKWDLLRCCSKDRMHQYKRMQTYPVLFAIQKLALENNALMSTLSGSGSSFFNMCYEEDAPKLKQVLSKKFPKFRVAVLDFDNDGVLIEKD

SEQ ID NO: 6490 - protein, 294 aa, Helicobacter pylori
  misc_feature (B) LOCATION 1...294
  hypothetical: YES
NLVVSVPATSANLGPGFDCLGLSLNLRNRFFIEPSNIHAVKLVGEGEGIPKFLTNNIFTKVFYEILKKHGNDGSFKFLLHNKVPITRGMGSSSAMIVGAVASAFAFLGFAFDRENILNTALIYENHPDNITPAVFGGYNAAFVEKKKVISLKTKIPSFLKAVMVIPNRVISTKQSRHLLPKRYSVQESVFNLSHASLMTMAIVQGKWDLLRCCSKDRMHQYKRMQTYPVLFAIQKLALENNALMSTLSGSGSSFFNMCYEEDAPKLKQVLSKKFPKFRVAVLDFDNDGVLIEKD

SEQ ID NO: 6491 - protein, 122 aa, Helicobacter pylori
  misc_feature (B) LOCATION 1...122
  hypothetical: YES
LKGRFLCQPLFKHFAYTLNALSMQAQQYISSPLTVAKMTQYLEIDHVDSVLEIGCGSGYQAAVLSQIFRRVFSIERIESLYIEARLRLKTLGLDNVHVKFADGNKGWERYAPYDRILFSGLR

SEQ ID NO: 6492 - protein, 139 aa, Helicobacter pylori
  misc_feature (B) LOCATION 1...139
  hypothetical: YES
GRLWKALKGRFLCQPLFKHFAYTLNALSMQAQQYISSPLTVAKMTQYLEIDHVDSVLEIGCGSGYQAAVLSQIFRRVFSIERIESLYIEARLRLKTLGFRQRSMFKSLMGIRAGSDTPPTIGFILWLAQKYSPSVYRSA

SEQ ID NO: 6493 - protein, 164 aa, Helicobacter pylori
  misc_feature (B) LOCATION 1...164
  hypothetical: YES
GRLWKALKGRFLCQPLFKHFAYTLNALSMQAQQYISSPLTVAKMTQYLEIDHVDSVLEIGCGSGYQAAVLSQIFRRVFSIERIESLYIEARLRLKTLGLDNVHVKFADGNKGWERYAPYDRILFSACAKNIPQALIDQLEEGGILVDTHSRKQRASDQTLCETK

SEQ ID NO: 6494 - protein, 209 aa, Helicobacter pylori
  misc_feature (B) LOCATION 1...209
  hypothetical: YES
MIRLAAFFLALACAITPKSRLLLKNVLLNPTRIEAFEVLKKMGAHIEYVIQSKDLEVIGDIYIEHAPLKAISIDQNIASLIDEIPALSIAMLFAKGKSMVRNAKDLRAKESDRIKAVVSNFKALGIECEEFEDGFYIEGLGDASQLKQHFSKIKPPIIKSFNDHRIAMSFAVLTLALPLEIDNLECANISFPTFQLWLNLFKKRSLNGN

SEQ ID NO: 6495 - protein, 429 aa, Helicobacter pylori
  misc_feature (B) LOCATION 1...429
  hypothetical: YES
VIELDINASDKSLSHRAVIFSLLAQKPCFVRNFLMGEDCLSSLEIAQNLGAKVENTAKNSFKITPPTTIKEPNKILNCNNSGTSMRLYSGLLSAQKGLFVLSGDNSLNARPMKRIIEPLKAFGAKILGREDNHFAPLAIVGGPLKACDYESPIASAQVKSAFILSALQAQGISAYKESELSRNHTEIMLKSLGANIQNQDGVLKISPLEKPLESFDFTIANDPSSAFFLALACAITPKSRLLLKNVLLNPTRIEAFEVLKKMGAHIEYVIQSKDLEVIGDIYIEHAPLKAISIDQNIASLIDEIPALSIAMLFAKGKSMVRNAKDLRAKESDRIKAVVSNFKALGIECEEFEDGFYIEGLGDASQLKQHFSKIKPPIIKSFNDHRIAMSFAVLTLALPLEIDNLECANISFPTFQLWLNLFKKRSLNGN

SEQ ID NO: 6496 - protein, 430 aa, Helicobacter pylori
  misc_feature (B) LOCATION 1...430
  hypothetical: YES
YVIELDINASDKSLSHRAVIFSLLAQKPCFVRNFLMGEDCLSSLEIAQNLGAKVENTAKNSFKITPPTTIKEPNKILNCNNSGTSMRLYSGLLSAQKGLFVLSGDNSLNARPMKRIIEPLKAFGAKILGREDNHFAPLAIVGGPLKACDYESPIASAQVKSAFILSALQAQGISAYKESELSRNHTEIMLKSLGANIQNQDGVLKISPLEKPLESFDFTIANDPSSAFFLALACAITPKSRLLLKNVLLNPTRIEAFEVLKKMGAHIEYVIQSKDLEVIGDIYIEHAPLKAISIDQNIASLIDEIPALSIAMLFAKGKSMVRNAKDLRAKESDRIKAVVSNFKALGIECEEFEDGFYIEGLGDASQLKQHFSKIKPPIIKSFNDHRIAMSFAVLTLALPLEIDNLECANISFPTFQLWLNLFKKRSLNGN

SEQ ID NO: 6497 - protein, 57 aa, Helicobacter pylori
  misc_feature (B) LOCATION 1...57
  hypothetical: YES
IGICIRLHSGGTGVWAKSGGINFIFGLSSTEVLEAMRLLEENDLLGISTEKAGLFPK

SEQ ID NO: 6498 - protein, 170 aa, Helicobacter pylori
  misc_feature (B) LOCATION 1...170
  hypothetical: YES
LNWSFFQSLPDYWGLRQNFPVMPLNKLDEKPTRSASLWDITCDSDGEIAFDSTKPLFLHDIDIDEEEYFLAFFLVGAYQEVLGMKHNLFTHPTEFSVVFDEKGDYEVEDICEAQTILDVLDDLDYDTKEIERLLKQKIEDNNQLDMEEKKEIMGRLYVMLSENGYLRTIS

SEQ ID NO: 6499 - protein, 173 aa, Helicobacter pylori
  misc_feature (B) LOCATION 1...173
  hypothetical: YES
MQEVHDYGINFWSNNEFKIEKGLVKVCHGKNPSLLEIVQSVHDKGYRGPLLVRFPHLVQKQIKSLFDAFSLAIKEYQYSGAFKAVFPLKVNQMPSFVLPLVQGAKGLNYGLEAGSKSELIIAMSYTNPTAPITVNGFKDKEMIELGFIAKSMQHEITLTIEGLNELKTIIRRG

SEQ ID NO: 6500 - protein, 174 aa, Helicobacter pylori
  misc_feature (B) LOCATION 1...174
  hypothetical: YES
KMQEVHGYGINFWSNNEFEIERGLVKVCHGKNPSLLEIVQSVHDKGYRGPLLVRFPHLVQKQIKSLFDAFSLAIKEYQYSGAFKAVFPLKVNQMPSFVLPLVQGAKGLNYGLEAGSKSELIIAMSYTNPTAPITVNGFKDKEMIELGSTAKSMQHEITLTIEGLDEVKTIIRRG

SEQ ID NO: 6501 - protein, 262 aa, Helicobacter pylori
  misc_feature (B) LOCATION 1...262
  hypothetical: YES
VAKQNDFVACPKIGIRIRLHSAGTGVWAKSGGINSKFGLSSTEVLEAMRLLEENDLLEHFHMIHFHIGSQISDISPLKKALREAGNLYAELRKMGAKNLNSVNIGGGLAVEYTQHKHHQDKNYTLEEFSADVVFLLREIVKNKQEIEPDIFIESGRYISANHAVLVAPVLELFSHEYNEKSLKIKENNNPPLIDEMLDLLANINEKNAIEYLHDSFDHTESLFTLFDLGYIDLIDRSNTEVLAHLIVKKAVQLFMLRIITIF

SEQ ID NO: 6502 - protein, 343 aa, Helicobacter pylori
  misc_feature (B) LOCATION 1...343
  hypothetical: YES
TIGGGLAVEYTQHKHHQDKNYTLEEFSADVVFLLREIVKNKQEIEPDIFIESGRYISANHAVLVAPVLELFSHEYNEKSLKIKENNNPPLIDEMLDLLANINEKNAIEYLHDSFDHTESLFTLFDLGYIDLIDRSNTEVLAHLIVKKAVQLLYVKDHKRDIKRIKEQFQERYLLNCVVIQSLPDYWGLRQNPPLMPLNKLDEKPTRSASLWDITCDSDGEIAFYSTKPLFLHDIDIDEEEYFLAFFLVGAYQEVLGMKHNLFTHPTEFSVVFDEKGDYEVEDICEAQTILDVLDDLDYDTKEIERLLKQKIEDNNQLDMEEKKEIMGRLYVMLSENGYLRTIS

SEQ ID NO: 6503 - protein, 445 aa, Helicobacter pylori
  misc_feature (B) LOCATION 1...445
  hypothetical: YES
MQEVHDYGINFWSNNEFKIEKGLVKVCHGKNPSLLEIVQSVHDKGYRGPLLVRFPHLVQKQIKSLFDAFSLAIKEYQYSGAFKAVFPLKVNQMPSFVLPLVQGAKGLNYGLEAGSKSELIIAMSYTNPTAPITVNGFKDKEMIELGFIAKSMQHEITLTIEGLNELKTIIAVAKQNDFVACPKIGIRIRLHSAGTGVWAKSGGINSKFGLSSTEVLEAMRLLEENDLLEHFHMIHFHIGSQISDISPLKKALREAGNLYAELRKMGAKNLNSVNIGGGLAVEYTQHKHHQDKNYTLEEFSADVVFLLREIVKNKQEIEPDIFIESGRYISANHAVLVAPVLELFSHEYNEKSLKIKENNNPPLIDEMLDLLANINEKNAIEYLHDSFDHTESLFTLFDLGYIDLIDRSNTEVLAHLIVKKAVQLFMLRIITIFYAFKSRSKSAIY

SEQ ID NO: 6504 - protein, 153 aa, Helicobacter pylori
  misc_feature (B) LOCATION 1...153
  hypothetical: YES
PKYTPTENYPKGGNAIWHVPCFAAFPSATENELSVLDAKTLLSNGCKCVAEGANMPSSNEAIELFLQAKISYGIGKAANAGGGSVSGLEMAQNASMHPWSFEVVDAKLHHIMKEIYKNVSQTAKEFKDPTNFVLGANIAGFRKVASAMIAQGV

SEQ ID NO: 6505 - protein, 190 aa, Helicobacter pylori
  misc_feature (B) LOCATION 1...190
  hypothetical: YES
RMPLMYVEKILQSLQKKYPYQKEFHQAVYEAITSLKPLLDSDKSYEKHAVLERLIEPEREIFFRVCWLDDNHQIQVNRGCRVEFNSAIGPYKGGLRFHPSVNESVIKFLGFEQVLKNSLTTLAMGGAKGGSDFDPKEKSEHEIMRFCQAFMNELYRHIGATTDVASWGYWSGRKRDWLSVWAIQKISQSF

SEQ ID NO: 6506 - protein, 448 aa, Helicobacter pylori
  misc_feature (B) LOCATION 1...448
  hypothetical: YES
MYVEKILQSLQKKYPYQKEFHQAVYEAITSLKPLLDSDKSYEKHAVLERLIEPEREIFFRVCWLDDNHQIQVNRGCRVEFNSAIGPYKGGLRFHPSVNESVIKFLGFEQVLKNSLTTLAMGGAKGGSDFDPKEKSEHEIMRFCQAFMNELYRHIGATTDVPAGDIGVGEREIGYLFGQYKKLVNRFEGVLTGKGLTYGGSLCRKEATGYGCVYFAEEMLQERNSSLEGKVCSVSGSGNVAIYTIEKLLQIGAKPVTASDSNGMIYDKDGIDLELLKEIKEARRGRIKEYALEKTSAKYTPTENYPKGGNAIWHVPCFAAFPSATENELSVLDAKTLLSNGCKCVAEGANMPSSNEAIELFLQAKISYGIGKAANAGGVSVSGLEMAQNASMHPWSFEVVDAKLHHIMKEIYKNVSQTAKEFKDPTNFVLGANIAGFRKVASAMIAQGV

SEQ ID NO: 6507 - protein, 390 aa, Helicobacter pylori
  misc_feature (B) LOCATION 1...390
  hypothetical: YES
MPYSSKVQSLSESATIAISTLAKELKSQGKDILSFSAGEPDFDTPQAIKDAAIKALNDGFTKYTPVAGIPELLKAIAFKLKKENNLDYEPSEILVSNGAKQSLFNAIQALIGEGDEVVIPVPFWVTYPELVKYSGGVSQFIQTDEKSHFKITPKQLKDALSPKTKMLILTTPSNPTGMLYSKAELEALGEVLKDTKVWVLSDEIYEKLVYKGEFVSCAAVSEEMKKRTITINGLSKSVAMTGWRMGYAASKDKKLVKLMSNLQSQCTSNINSITQMASIVALEGLVDKEIETMRQAFEKRCHLAHAKINAIEGLNALKPDGAFYLFINIGSLCGGDSMRFCHELLEKEGVALVPGKAFGLEGYVRLSFACSEEQIEKGIERIARFVKSKG

SEQ ID NO: 6508 - protein, 393 aa, Helicobacter pylori
  misc_feature (B) LOCATION 1...393
  hypothetical: YES
GLSMPYSSKVQSLSESATIAISTLAKELKSQGKDILSFSAGEPDFDTPQAIKDAAIKALNDGFTKYTPVAGIPELLKAIAFKLKKENNLDYEPSEILVSNGAKQSLFNAIQALIGEGDEVVIPVPFWVTYPELVKYSGGVSQFIQTDEKSHFKITPKQLKDALSPKTKMLILTTPSNPTGMLYSKAELEALGEVLKDTKVWVLSDEIYEKLVYKGEFVSCAAVSEEMKKRTITINGLSKSVAMTGWRMGYAASKDKKLVKLMSNLQSQCTSNINSITQMASIVALEGLVDKEIETMRQAFEKRCHLAHAKINAIEGLNALKPDGAFYLFINIGSLCGGDSMRFCHELLEKEGVALVPGKAFGLEGYVRLSFACSEEQIEKGIERIARFVKSKG

SEQ ID NO: 6509 - protein, 152 aa, Helicobacter pylori
  misc_feature (B) LOCATION 1...152
  hypothetical: YES
GSQMNTLGRFLRLTTFGESHGDMIGGVLDGMPSGIKIDYDLLENEMKRRQGGRNIFTTPRKEDDKVEITSGVFEGFSAGTPIGFLIHNQRARSKDYDNIKNLFRPSHADFTYFHKYGIRNFRGGGRSSARESAIRVAAGAFAKMLLREIGVV

SEQ ID NO: 6510 - protein, 153 aa, Helicobacter pylori
  misc_feature (B) LOCATION 1...153
  hypothetical: YES
GSQMNTLGRFLRLTTFGESHGDMIGGVLDGMPSGIKIDYDLLENEMKRRQGGRNIFTTPRKEDDKVEITSGVFEGFSAGTPIGFLIHNQRARSKDYDNIKNLFRPSHADFTYFHKYGIRNFRGGGRSSARESAIRVAAGAFAKMLLREIGVVC

SEQ ID NO: 6511 - protein, 194 aa, Helicobacter pylori
  misc_feature (B) LOCATION 1...194
  hypothetical: YES
KSEIFALDKEQEEAQKTAIQNAIKNHDSIGGVALIRARGAKTNQKLPIGLGQGLYAKLDAKIAEAMMGLNGVKAVEIGKGVESSLLKGSEYNDLMSQKGFLSNHSGGVLGGMSNGEEIIVKVHFKPTPSIFQPQRTIDIKGNECECLLKGRHDPCIAIRGSVVCESLLSLVLADMVLLNLTSKIEYLKTIYNEN

SEQ ID NO: 6512 - protein, 193 aa, Helicobacter pylori
  misc_feature (B) LOCATION 1...193
  hypothetical: YES
SEIFALDKEQEEAQKTAIQNAIKNHDSIGGVALIRARGAKTNQKLPIGLGQGLYAKLDAKIAEAMMGLNGVKAVEIGKGVESSLLKGSEYNDLMSQKGFLSNHSGGVLGGMSNGEEIIVKVHFKPTPSIFQPQRTIDIKGNECECLLKGRHDPCIAIRGSVVCESLLSLVLADMVLLNLTSKIEYLKTIYNEN

SEQ ID NO: 6513 - protein, 365 aa, Helicobacter pylori
  misc_feature (B) LOCATION 1...365
  hypothetical: YES
MNTLGRFLRLTTFGESHGDMIGGVLDGMPSGIKIDYDLLENEMKRRQGGRNIFTTPRKEDDKVEITSGVFEGFSAGTPIGFLIHNQRARSKDYDNIKNLFRPSHADFTYFHKYGIRDFRGGGRSSARESAIRVAAGAFAKMLLREIGVVCESGIIKIGGIEAKNYDFNHALKSEIFALDKEQEEAQKTAIQNAIKNHDSIGGVALIRARGAKTNQKLPIGLGQGLYAKLDAKIAEAMMGLNGVKAVEIGKGVESSLLKGSEYNDLMSQKGFLSNHSGGVLGGMSNGEEIIVKVHFKPTPSIFQPQRTIDIKGNECECLLKGRHDPCIAIRGSVVCESLLSLVLADMVLLNLTSKIEYLKTIYNEN

SEQ ID NO: 6514 - protein, 59 aa, Helicobacter pylori
  misc_feature (B) LOCATION 1...59
  hypothetical: YES
KGLSTGHMMYSYSKGEMLLALQRLLNISKDRTLVVGDGANDLSSSNMHISKSLSTLKKS

SEQ ID NO: 6515 - protein, 89 aa, Helicobacter pylori
  misc_feature (B) LOCATION 1...89
  hypothetical: YES
KQEILILGYWVQKLAVFDFDSTLVNAETIESLARAWGVFDEVREITLKAMNGETDFHKSLILRVSKLKYMPLPLAPALRETYPTLKSKP

SEQ ID NO: 6516 - protein, 90 aa, Helicobacter pylori
  misc_feature (B) LOCATION 1...90
  hypothetical: YES
KQEILILGYWVQKLAVFDFDSTLVNAETIESLARAWGVFDEVREITLKAMNGETDFHKSLILRVSKLKYMPLPLAPALRETYPTLKSKPR

SEQ ID NO: 6517 - protein, 207 aa, Helicobacter pylori
  misc_feature (B) LOCATION 1...207
  hypothetical: YES
VQKLAVFDFDSTLVNAETIESLARAWGVFDEVREITLKAMNGETDFHKSLILRVSKLKNMPLKLAKEVCESLPLFEGAFELISALKEKNYKVVCFSGGFDLATNHYRDLLNLDAAFSNTLIVENNALNGLVTGHMMFSYSKGEMLLALQRLLNISKDRTLVVGDGANDLSMFKHAHIKIAFNAKEILKQHATHCIDKPNLALIKPLI

SEQ ID NO: 6518 - protein, 231 aa, Helicobacter pylori
  misc_feature (B) LOCATION 1...231
  hypothetical: YES
DTGGFILSISITSWGFKKGCVMEILQFIGYGNMAQAILEGSHEILSKRFILEITGRNPEKIAPFLQEKNIQAQIVPYKDAIDIHQKFVFLLFKPYNLKDFNYQGQAKSVLSALAGVNFEALSNAINSLHYLKCMPNIASKFALSSTAVCEKSVAPSISEKALNIIESFGNCVRVGNEEQVDSSVATNGSALAFLSLVASSLKDAGIREGLNAKDSLELVKMSFKGFAKLVR

SEQ ID NO: 6519 - protein, 257 aa, Helicobacter pylori
  misc_feature (B) LOCATION 1...257
  hypothetical: YES
MEILQFIGYGNMAQAILEGSHEILSKRFILEITGRNPEKIAPFLQEKNIQAQIVPYKDAIDIHQKFVFLLFKPYNLKDFNYQGQAKSVLSALAGVNFEALSNAINSLHYLKCMPNIASKFALSSTAVCEKSVAPSISEKALNIIESFGNCVRVGNEEQVDSSVATNGSALAFLSLVASSLKDAGIREGLNAKDSLELVKMSFKGFAKLLEKERPEMIIEQICTPKGATIEGLSVLEKKGVRGAFIKACHESVKKMRL

SEQ ID NO: 6520 - protein, 72 aa, Helicobacter pylori
  misc_feature (B) LOCATION 1...72
  hypothetical: YES
KLLSFIMKSRQAQGEVGVKFGDLVEAADNVQKLKYVVKMVAHLNGKTATFMPKPLYGDNGSGMHSPCEYLEE

SEQ ID NO: 6521 - protein, 223 aa, Helicobacter pylori
  misc_feature (B) LOCATION 1...223
  hypothetical: YES
MGKRLLSCQNPYMGIMGVGCTAHVSIWKNNENLFGGETYKGLSEFALYFLGGVLRHARGLAAFTNASTNSYKRLIPGYEAPSILTYSASNRSASVRIPYGISKNSARFEFRFPDSSSNPYLAFGAILMAGIDGIKNKMDPGEAMDINLFKLTLDEIREKGIKQMPHTLRRSLEEMLADKQYLKEGQVFSEEFIQAYQSLKFHSEVFPWESKPHPFEFITTYSC

SEQ ID NO: 6522 - protein, 245 aa, Helicobacter pylori
  misc_feature (B) LOCATION 1...245
  hypothetical: YES
RWLMVVRTQNSESKIKEFFEFCKENEVEFVDFRFSDIKGTWNHIAYSFGALTHDMFKEGIPFDASSFKGWQGIEHSDMILTPDLVRYFIDPFSADVSAVVFCDVYDVYKNQPYEKCPRSIAKKALKHLRDLGLGDVAYFGAENEFFIFDSIKIKDASNSQYYEVDSEEGEWNRDKSFENGVNFGHRPGKQGGYMPVPPTDTMMDIRTEIVKVLNQVGLETFVVHHEVAASARRSGREIWGFSGSR

SEQ ID NO: 6523 - protein, 481 aa, Helicobacter pylori
  misc_feature (B) LOCATION 1...481
  hypothetical: YES
MVVRTQNSESKIKEFFEFCKENEVEFVDFRFSDIKGTWNHIAYSFGALTHDMFKEGIPFDASSFKGWQGIEHSDMILTPDLVRYFIDPFSADVSAVVFCDVYDVYKNQPYEKCPRSIAKKALKHLRDLGLGDVAYFGAENEFFIFDSIKIKDASNSQYYEVDSEEGEWNRDKSFENGVNFGHRPGKQGGYMPVPPTDTMMDIRTEIVKVLNQVGLETFVVHHEVAQAQGEVGVKFGDLVEAADNVQKLKYVVKMVAHLNGKTATFMPKPLYGDNGSGMHTHVSIWKNNENLFGGETYKGLSEFALYFLGGVLRHARGLAAFTNASTNSYKRLIPGYEAPSILTYSASNRSASVRIPYGISKNSARFEFRFPDSSSNPYLAFGAILMAGIDGIKNKMDPGEAMDINLFKLTLDEIREKGIKQMPHTLRRSLEEMLADKQYLKEGQVFSEEFIQAYQSLKFHSEVFPWESKPHPFEFITTYSC

SEQ ID NO: 6524 - protein, 155 aa, Helicobacter pylori
  misc_feature (B) LOCATION 1...155
  hypothetical: YES
PFWVWRTLELMQALEEEKFYALKPKELALLQEHFSCASCSDEDCLKTIQEVYAEHQYLIDPHTATALNASLKTHEKTLVSATASYEKFPKTTLLALNEQKKNDDDKAALETLKNSYNTPDSQRLDDLFERGIKHQEVLKLNEIKSSILLWLENTH

SEQ ID NO: 6525 - protein, 325 aa, Helicobacter pylori
  misc_feature (B) LOCATION 1...325
  hypothetical: YES
FIEAVLNPNAPKGGLYTLEHFETLEWQDCLGMSYSELVEHVFEALNLEIPKNLLASALKRYENFDNPKNPAPIFALNERLFVQELYHGPSLAFKDMALQPLASLFSNLAVGKNEKYLVLVSTSGDTGPATLEGLAGMPNVFVVCLYPKDGTSLVQKLQMVTQNASNLKVFGVSGDFDDAQNALKNLLKDDDFNEALKARQLKLSVANSVNFGRIAFQIVYHIWGFLELYKKGAINFKEKITLAIPSGNFGNALGAFYAKKMGLNIAKIKVVTNSNDVLSELIETGRYDLTKRSLKQTFSPAMDILKSSNVERALFSLFGFGERWN

SEQ ID NO: 6526 - protein, 486 aa, Helicobacter pylori
  misc_feature (B) LOCATION 1...486
  hypothetical: YES
MPFVPTRSLKERKIDFIEAVLNPNAPKGGLYTLEHFETLEWQDCLGMSYSELVEHVFELLNLEIPKNLLASALKRYENFDNPKNPAPIFALNERLFVQELYHGPSLAFKDMALQPLASLFSNLAVGKNEKYLVLVSTSGDTGPATLEGLAGMPNVFVVCLYPKDGTSLVQKLQMVTQNASNLKVFGVSGDFDDAQNALKNLLKDDDFNEALKARQLKLSVANSVNFGRIAFQIVYHIWGFLELYKKGAINSKEKITLAIPSGNFGNALGAFYAKKMGLNIAKIKVVTNSNDVLREFIETGRYDLTKRSLKQTFSPAMDILKSSNVERALFSLFGFERTLELMQALEEEKFYALKPKELALLQEHFSCASCSDEDCLKTIQEVYAEHQYLIDPHTATALNASLKTHEKTLVSATASYEKFPKTTLLALNEQKKNDDDKAALETLKNSYNTPDSQRLDDLFERGIKHQEVLKLNEIKSSILLWLENTH

SEQ ID NO: 6527 - protein, 170 aa, Helicobacter pylori
  misc_feature (B) LOCATION 1...170
  hypothetical: YES
MKILVIQGPNLNMLGHRDPRLYGMVTLDQIHEIMQTFVKQGNLDVELEFFQTNFEGEIIDKIQESVGSDYEGIIINPGAFSHTSIAIADAIMLAGKPVIEVHLTNIQAREEFRKNSYTGAACGGVIMGFGPLGYNMALMAMVNILAEMKAFQEAQKNNPNNPNNPINNQK

SEQ ID NO: 6528 - protein, 171 aa, Helicobacter pylori
  misc_feature (B) LOCATION 1...171
  hypothetical: YES
IIEILVIQGPNLNMLGHRDPRLYGMVTLDQIHEIMQTFVKQGNLDVELEFFQTNFEGEIIDKIQESVGSDYEGIIINPGAFSHTSIAIADAIMLAGKPVIEVHLTNIQAREEFRKNSYTGAACGGVIMGFGPLGYNMALMAMVNILAEMKAFQEAQKNNPNNPNNPINNQK

SEQ ID NO: 6529 - protein, 64 aa, Helicobacter pylori
  misc_feature (B) LOCATION 1...64
  hypothetical: YES
RRVKNDCASVLQHAYCGSRKKTIEHTANLLEQALKKHPKTNLVVLQELNPYSYFCQSENPKFFD

SEQ ID NO: 6530 - protein, 106 aa, Helicobacter pylori
  misc_feature (B) LOCATION 1...106
  hypothetical: YES
RRKKRQQNAWETIQRGHAIANGLPLIATNRVGVELDPSGAIKGGITFFGSSFVVGALGEFLAKASDKEEILYAEIELERTEEVRRMWPFLRDRRIDFYNDLLKRYI

SEQ ID NO: 6531 - protein, 155 aa, Helicobacter pylori
  misc_feature (B) LOCATION 1...155
  hypothetical: YES
PNFFDLGEYFEEDKAFFSALAQKFQVVLIASLFEKRAKGLYHNSAVVFEKDGSIAGVYRKMHIPDDPGFYEKFYFTPGDLGFEPIATSVGKLGLMVCWDQWYPEAARIMALKGAEILIYPSAIGFLEEDSNEEKSVSKTHGRRSKEGMRSLMACL

SEQ ID NO: 6532 - protein, 154 aa, Helicobacter pylori
  misc_feature (B) LOCATION 1...154
  hypothetical: YES
NFFDLGEYFEEDKAFFSALAQKFQVVLIASLFEKRAKGLYHNSAVVFEKDGSIAGVYRKMHIPDDPGFYEKFYFTPGDLGFEPIATSVGKLGLMVCWDQWYPEAARIMALKGAEILIYPSAIGFLEEDSNEEKSVSKTHGRRSKEGMRSLMACL

SEQ ID NO: 6533 - protein, 292 aa, Helicobacter pylori
  misc_feature (B) LOCATION 1...292
  hypothetical: YES
MIRASVLQHAYCGSRKKTIEHTANLLEQALKKHPKTNLVVLQELNPYSYFCQSENPKFFDLGEYFEEDKAFFSALAQKFQVVLIASLFEKRAKGLYHNSAVVFEKDGSIAGVYRKMHIPDDPGFYEKFYFTPGDLGFEPIATSVGKLGLMVCWDQWYPEAARIMALKGAEILIYPSAIGFLEEDSNEEKKRQQNAWETIQRGHAIANGLPLIATNRVGVELDPSGAIKGGITFFGSSFVVGALGEFLAKASDKEEILYAEIELERTEEVRRMWPFLRDRRIDFYNDLLKRYI

SEQ ID NO: 6534 - protein, 102 aa, Helicobacter pylori
  misc_feature (B) LOCATION 1...102
  hypothetical: YES
MLLFTPGPVAINEEMRSSFSQPMPHHRTKDFEKIFQSVRENLKKMTGLEEVLLLSSSGTGAMEASVISLCQKELLFVNAGKFGERFGKIAKAHSIKAHELVL

SEQ ID NO: 6535 - protein, 91 aa, Helicobacter pylori
  misc_feature (B) LOCATION 1...91
  hypothetical: YES
EHLEITHVDASIGESQKAFMLPHAMRLIALSQKAIDSIEERNVGYYFNLKSELKNQKNNTTRYTARILHTLGLQRYFELVQNLGGFEALYQ

SEQ ID NO: 6536 - protein, 90 aa, Helicobacter pylori
  misc_feature (B) LOCATION 1...90
  hypothetical: YES
HLEITHVDASIGESQKAFMLPHAMRLIALSQKAIDSIEERNVGYYFNLKSELKNQKNNTTRYTARILHTLGLQRYFELVQNLGGFEALYQ

SEQ ID NO: 6537 - protein, 112 aa, Helicobacter pylori
  misc_feature (B) LOCATION 1...112
  hypothetical: YES
TERVALVSQKAVLALGLKIFPKSPSLSMTTIVSEHAKELKNPLKEKYQVQFAGGQEPYKRHAPFCIQPQWLIIPVYKSAYALNALELALNDLDLREFDGMANTTFLKQYYEI

SEQ ID NO: 6538 - protein, 268 aa, Helicobacter pylori
  misc_feature (B) LOCATION 1...268
  hypothetical: YES
MNGNTPAQVDGILNALKANPNIDAFCIQACESSGGLRHPVEKIAQAIKETNPNVFVIVDAITALGVEPLEITHVDALIGGSQKAFMLPPAMSLIALSQKAIDRIEERNVGFYFNLKSELKNQKNNTTSYTAPILHTLGLQRYFELVQNLGGFEALYQETKRVALASQKAVLALGLKIFPKSPSLSMTTIVSEHAKELKNLLKEKYQVQFAGGQEPYKDTLIRINHMGIIPVYKSAYALNALELALNDLDLREFDGMANTTFLKQYYEI

SEQ ID NO: 6539 - protein, 88 aa, Helicobacter pylori
  misc_feature (B) LOCATION 1...88
  hypothetical: YES
KGIQKKQNLKEVALDAFLPKSINYYHFNGSLTAPPCTEGVAWFVIEEPLEVSAKQLAEIKKRMKNSPNQRPVQPDYNTVIIKSSAETR

SEQ ID NO: 6540 - protein, 150 aa, Helicobacter pylori
  misc_feature (B) LOCATION 1...150
  hypothetical: YES
RIIKMKKTFLIALALTASLIGAENTKWDYKNKENGPHRWDKLHKDFEVCKSGKSQSPINIEHYYHTQDKADLQFKYAASKPKAVFFTHHTLKASFEPTNHINYRGHDYVLDNVHFHAPMEFLINNKTRPLSAHFVHKDAKGRLLVLAIGF

SEQ ID NO: 6541 - protein, 247 aa, Helicobacter pylori
  misc_feature (B) LOCATION 1...247
  hypothetical: YES
MKKTFLIALALTASLIGAENTKWDYKNKENGPHRWDKLHKDFEVCKSGKSQSPINIEHYYHTQDKADLQFKYAASKPKAVFFTHHTLKASFEPTNHINYRGHDYVLDNVHFHAPMEFLINNKTRPLSAHFVHKDAKGRLLVLAIGFEEGKENPNLDPILEGIQKKQNLKEVALDAFLPKSINYYHFNGSLTAPPCTEGVAWFVIEEPLEVSAKQLAEIKKRMKNSPNQRPVQPDYNTVIIKSSAETR

SEQ ID NO: 6542 - protein, 247 aa, Helicobacter pylori; identical to SEQ ID NO: 6541
  misc_feature (B) LOCATION 1...247
  hypothetical: YES

SEQ ID NO: 6543 - protein, 122 aa, Helicobacter pylori
  misc_feature (B) LOCATION 1...122
  hypothetical: YES
KWCMKPIKSWAWISLSARLACAWPVLRSHSESLSIAFEKEFDLKEVYEVLKNAPSVVVCDDPSHNLYPTPLKASHTDSVFIGRLRKDLFDKKTLHGFCVADQLRVGAATNALKIALHYIKNA

SEQ ID NO: 6544 - protein, 262 aa, Helicobacter pylori
  misc_feature (B) LOCATION 1...262
  hypothetical: YES
KPLKSLEKTMKTYNVAIVGASGAVGQELIKGLENSFFPIKKFVPLASARSAGKKIRAFNKDYEILETTHEVFEKEEIDIAFFSAGGSVSEEFAISASKTALVIDNTSFFRLNKDVPLVVPEINAQEIFNAPLNIIANPNCSTIQMTQILNPLHLHFKIKSVIVSTYQAVSGAGNKGIESLKNELKTALEHLEKDPAIDLNQVLQAGAFAYPIAFNAIAHIDTFKENGYTKEELKMVHETHKIMGVDFPISATCVRVAGIKES

SEQ ID NO: 6545 - protein, 346 aa, Helicobacter pylori
  misc_feature (B) LOCATION 1...346
  hypothetical: YES
MKTYNVAIVGASGAVGQELIKGLENSFFPIKKFVPLASARSAGKKIRAFNKDYEILETTHEVFEKEEIDIAFFSAGGSVSEEFAISASKTALVIDNTSFFRLNKDVPLVVPEINAQEIFNAPLNIIANPNCSTIQMTQILNPLHLHFKIKSVIVSTYQAVSGAGNKGIESLKNELKTALEHLEKDPAIDLNQVLQAGAFAYPIAFNAIAHIDTFKENGYTKEELKMVHETHKIMGVDFPISATCVRVPVLRSHSESLSIAFEKEFDLKEVYEVLKNAPSVVVCDDPSHNLYPTPLKASHTDSVFIGRLRKDLFDKKTLHGFCVADQLRVGAATNALKIALHYIKNA

SEQ ID NO: 6546 - protein, 353 aa, Helicobacter pylori
  misc_feature (B) LOCATION 1...353
  hypothetical: YES
LKSLEKTMKTYNVAIVGASGAVGQELIKGLENSFFPIKKFVPLASARSAGKKIRAFNKDYEILETTHEVFEKEEIDIAFFSAGGSVSEEFAISASKTALVIDNTSFFRLNKDVPLVVPEINAQEIFNAPLNIIANPNCSTIQMTQILNPLHLHFKIKSVIVSTYQAVSGAGNKGIESLKNELKTALEHLEKDPAIDLNQVLQAGAFAYPIAFNAIAHIDTFKENGYTKEELKMVHETHKIMGVDFPISATCVRVPVLRSHSESLSIAFEKEFDLKEVYEVLKNAPSVVVCDDPSHNLYPTPLKASHTDSVFIGRLRKDLFDKKTLHGFCVADQLRVGAATNALKIALHYIKNA

SEQ ID NO: 6547 - protein, 150 aa, Helicobacter pylori
  misc_feature (B) LOCATION 1...150
  hypothetical: YES
MQEILIPLKEKSYKVFLGELPEIKLKQKALIISDSIVAGLHLPYLLERLNALEVRVCVIESGEKYKNFHSLERILNNAFEMQLNRHSLMIALGGGVISDMVGFASSIYFRGIDFINIPYDFTRSSGCERGGENRDQHALWQEPNRIVPPA

SEQ ID NO: 6548 - protein, 343 aa, Helicobacter pylori
  misc_feature (B) LOCATION 1...343
  hypothetical: YES
MQEILIPLKEKSYKVFLGELPEIKLKQKALIISDSIVAGLHLPYLLERLNALEVRVCVIESGEKYKNFHSLERILNNAFEMQLNRHSLMIALGGGVISDMVGFASSIYFRGIDFINIPTTLLAQVDASVGGKTGINTPYGKNLIGSFHQPKAVYMDLAFLKTLEKREFQAGVAEIIKMAVCFDKNLVERLETKDLKDCLEEVIFQSVNIKAQVVVQDEKERNIRAGLNYGHTFGMLIENETNYERFLHGEAIAIGMRMANDLALSLGMLTLKEYERIENLLKKFDLIFNYQITDIQKFYERLFLDKKSENQTLKFILPKGVGAFEIASHIPKETILKVLEKWH

SEQ ID NO: 6549 - protein, 347 aa, Helicobacter pylori
  misc_feature (B) LOCATION 1...347
  hypothetical: YES
RSERMQEILIPLKEKSYKVFLGELPEIKLKQKALIISDSIVAGLHLPYLLERLNALEVRVCVIESGEKYKNFHSLERILNNAFEMQLNRHSLMIALGGGVISDMVGFASSIYFRGIDFINIPTTLLAQVDASVGGKTGINTPYGKNLIGSFHQPKAVYMDLAFLKTLEKREFQAGVAEIIKMAVCFDKNLVERLETKDLKDCLEEVIFQSVNIKAQVVVQDEKERNIRAGLNYGHTFGMLIENETNYERFLHGEAIAIGMRMANDLALSLGMLTLKEYERIENLLKKFDLIFNYQITDIQKFYERLFLDKKSENQTLKFILPKGVGAFEIASHIPKETILKVLEKWH

SEQ ID NO: 6550 - protein, 375 aa, Helicobacter pylori
  misc_feature (B) LOCATION 1...375
  hypothetical: YES
MTFEPYPFERLRALFKEITPKKKGLDLGIGEPRFETPKFIQDALKSHTHSLNIYPKSAFEESLREAQRGFFKRRFKIELKENELVSTLGSREVLFNFPSFVLFDYPNPTIAYPNPFYQIYEGSAQFARAKSLLMPLVKENDFTPSLNEKELQEVDLVILNSPNNPTGRTLSLEELIAWVKLALKHDFILINDECYSEIYENTPPSSLLEACMLADNGAFKNVLVIHSLSKRSSAPGLRSGFIAGDSSLLEKYKAFRTYLGYTSANAIQKASEVAWLDDRHAEFFRNIYANNLKLARKIFKETLIYPYSFYAYLPVKDGENFAKTLYQNEGITTLPALYLGRNHIGADYVRLALVYDTSLLEKPLEIIEAYRENYA

SEQ ID NO: 6551 - protein, 378 aa, Helicobacter pylori
  misc_feature (B) LOCATION 1...378
  hypothetical: YES
SSPMTFEPYPFERLRALFKEITPKKKGLDLGIGEPRFETPKFIQDALKSHTHSLNIYPKSAFEESLREAQRGFFKRRFKIELKENELVSTLGSREVLFNFPSFVLFDYPNPTIAYPNPFYQIYEGSAQFARAKSLLMPLVKENDFTPSLNEKELQEVDLVILNSPNNPTGRTLSLEELIAWVKLALKHDFILINDECYSEIYENTPPSSLLEACMLADNGAFKNVLVIHSLSKRSSAPGLRSGFIAGDSSLLEKYKAFRTYLGYTSANAIQKASEVAWLDDRHAEFFRNIYANNLKLARKIFKETLIYPYSFYAYLPVKDGENFAKTLYQNEGITTLPALYLGRNHIGADYVRLALVYDTSLLEKPLEIIEAYRENYA

SEQ ID NO: 6552 - protein, 159 aa, Helicobacter pylori
  misc_feature (B) LOCATION 1...159
  hypothetical: YES
VKCLLIKKSLLFALKPLPDLKTTTPILAPMSVVAGRLXXHLVQHYLLALEHVKGFMGKGVILGGLSGAQRAKIVVIGGGVVGMESAKVLXQMGXKVTILELDYAKLQNHPYYHLYDLEVLSVNEANIIQALNGXVGLVGAVLVTXSQTPKVXLRRHLKY

SEQ ID NO: 6553 - protein, 328 aa, Helicobacter pylori
  misc_feature (B) LOCATION 1...328
  hypothetical: YES
VGAKIVDSKTAWGQDLVVKCKEPLEHEYPLLKEKATLFSYLDLAYQKSLCEMFINKKITSICTETIAGPKNDYPILAPMSVVAGRLAAHLVQHYLLALEHVKGFMGKGVMLGGLSGAQRAKIVVIGGGVVGMESAKVLSQMGAKVTILELDYAKLQNHPYYHLYDLEVLSVNEANIIQALNGAVGLVGAVLVTASQTPKVILRRHLKYMQKQGVVIDVACDLGGCIETIRQTSHSNPVYVEEDLLHYGVPNMPGIVAKTSSTAYSHASVPYLLYYLEHGLKGFLTANTKIVANTLGGLSAYNGYITQEGIAKAFNLAFKSPLEILKEL

SEQ ID NO: 6554 - protein, 358 aa, Helicobacter pylori
  misc_feature (B) LOCATION 1...358
  hypothetical: YES
CGANRSKGRGGFSSKCAGANSGYSNEAYESVGAKIVDSKTAWGQDLVVKCKEPLEHEYPLLKEKATLFSYLDLAYQKSLCEMFINKKITSICTETIAGPKNDYPILAPMSVVAGRLAAHLVQHYLLALEHVKGFMGKGVMLGGLSGAQRAKIVVIGGGVVGMESAKVLSQMGAKVTILELDYAKLQNHPYYHLYDLEVLSVNEANIIQALNGAVGLVGAVLVTASQTPKVILRRHLKYMQTQGVVIDVACSLGGCIRAIRQASHSNPVYVEESLLHYGVPNMPGIVAKTSSTAYSHASVPYLLYYLEHGLKGFLTANTKIVANTLGGLSAYNGYITQEGIAKAFNLAFKSPLEILKEL

SEQ ID NO: 6555 - protein, 68 aa, Helicobacter pylori
  misc_feature (B) LOCATION 1...68
  hypothetical: YES
EKTCKEWFKNQRIVTAVDIIYLSLDLDIMDGKLFTSTGVRENNGLSFDELRQLLGLLLESFKDLIRSR

SEQ ID NO: 6556 - protein, 218 aa, Helicobacter pylori
  misc_feature (B) LOCATION 1...218
  hypothetical: YES
SVKEAPIKGLGFERSFSKTHGDVIKGMQTITQERCVLYKEFRYAKNFEDYYLFCKENLIPCMKEVFEKKEFPLILSSEHANMFGIFQAFRSVHKDKKIGILYLDAHADIHTAYDSDSKHIHGMPLGMVLNRVRSGFNRMNESEEKAWQKLCSLGLEKGALEIDPKCLVYFGVRSTEQSERDVIKELEIPLFSVGAIRENMQGVVQKPKNCYSGGYYLP

SEQ ID NO: 6557 - protein, 234 aa, Helicobacter pylori
  misc_feature (B) LOCATION 1...234
  hypothetical: YES
MILVGLEAELGASKRGTDKGVRRLREVLSKTHGDVIKGMQTITQERCVLYKEFRYAKNFEDYYLFCKENLIPCMKEVFEKKEFPLILSSEHANMFGIFQAFRSVHKDKKIGILYLDAHADIHTAYDSDSKHIHGMPLGMVLNRVRSGFNRMNESEEKAWQKLCSLGLEKGALEIDPKCLVYFGVRSTEQSERDVIKELEIPLFSVGAIRENMQGVVQKTKELLQRWILFTLAWI

SEQ ID NO: 6558 - protein, 322 aa, Helicobacter pylori
  misc_feature (B) LOCATION 1...322
  hypothetical: YES
MILVGLEAELGASKRGTDKGVRRLREVLSKTHGDVIKGMQTITQERCVLYKEFRYAKNFEDYYLFCKENLIPCMKEVFEKKEFPLILSSEHANMFGIFQAFRSVHKDKKIGILYLDAHADIHTAYDSDSKHIHGMPLGMVLNRVRSGFNRMNESEEKAWQKLCSLGLEKGALEIDPKCLVYFGVRSTEQSERDVIKELEIPLFSVGAIRENMQGVVQKTKELLKAVDIIYLSLDLDIMDGKLFTSTGVRENNGLSFDELRQLLGLLLESFKDRLGAVEVTEYNPTVSAKHTDEEEKQVLEILDLIINRCKIKDRERSFAMSS

SEQ ID NO: 6559 - protein, 597 aa, Helicobacter pylori
  misc_feature (B) LOCATION 1...597
  hypothetical: YES
MCGIVGYIGDSEKKSILLEGLKELEYRGYDSAGLAVLSANRLEVFKTQGKLENLRTELKNKEFLNFGVSIAHTRWATHGKPSSANAHPHFTENLALVHNGIIENYASLKKELENKGHAFLSQTDTEVIAHLLEETLKSEGDLLKAFEKSISLLKGSYAILMLHKRAKESLFYAKSSSPLIVGKGKEGVFFASSLSVLAPKVDQFVILEENSVGQISLENFKDLNNIENMKDYAFENKDYSKGNFRNYLEKEIYEQHSSLLECLEGRLEALSVYCEIDPEFLENVSEITLCSCGSSYHASLASVYLFERLAKIRARAILASEYRYAHFKSNPNELFIAISQSGETADTLEALKLAKAQGLKTISLCNAPFSMMSRISDHTLLIRAGVERSVASTKAFSSQVMLLWLLSVYLGKQLGTISKEEERIQAKNMLNSVKAMKVEPKLHEKIKRLSKRYLHGHGFFYIGRDVFYPLALEGALKLKEISYLHAEGYASAEMKHGPIALVDSNLFTIALLSKHLLFDKTKSNIEELSARDSTICVLSSEILEIADDFIQLEESESYMEEFFRMNLAMQLLALEIAMRLNHDVDHPRNLAKSVTVE

SEQ ID NO: 6560 - protein, 597 aa, Helicobacter pylori
  misc_feature (B) LOCATION 1...597
  hypothetical: YES
MCGIVGYIGDSEKKSILLEGLKELEYRGYDSAGLAVLSANRLEVFKTQGKLENLRTELKNKEFLNFGVSIAHTRWATHGKPSSANAHPHFTENLALVHNGIIENYASLKKELENKGHAFLSQTDTEVIAHLLEETLKSEGDLLKAFEKSISLLKGSYAILMLHKRAKESLFYAKSSSPLIVGKGKEGVFFASSLSVLAPKVDQFVILEENSVGQISLENFKDLNNIENMKDYAFENKDYSKGNFRNYLEKEIYEQHSSLLECLEGRLEALSVYCEIDPEFLENVSEITLCSCGSSYHASLASVYLFERLAKIRARAILASEYRYAHFKSNPNELFIAISQSGETADTLEALKLAKAQGLKTISLCNAPFSMMSRISDHTLLIRAGVERSVASTKAFSSQVMLLWLLSVYLGKQLGTISKEEERIQAKNMLNSVKAMKVEPKLHEKIKRLSKRYLHGHGFFYIGRDVFYPLALEGALKLKEISYLHAEGYASAEMKHGPIALVDSNLFTIALLSKHLLFDKTKSNIEELSARDSTICVLSSEILEIADDFIQLEESESYMAGFFRMNLAMQLLALEIAMRLNHDVDYPRNLAKSVTVE

SEQ ID NO: 6561 - protein, 204 aa, Helicobacter pylori
  misc_feature (B) LOCATION 1...204
  hypothetical: YES
KVEQRHTLLFESAEIESKAHTKSLLMAKACLKLVCNHNIVTITSLTPNGGAFLQTLSAFFKTPIQDNALTLTYTKDKKIQDEFLKLFEPSPFDALRGLFKSVKTRPKHPFTLFSAGVFSFEMLNFFEDLPHLKANDNTANDFIFYVAQNLIIIDHKEKSAEILGACFDERFKTEIAKELQDLKELVKNIKSDFIPKKAKQRHRS

SEQ ID NO: 6562 - protein, 213 aa, Helicobacter pylori
  misc_feature (B) LOCATION 1...213
  hypothetical: YES
KNWLKTLKAILSLKKLSKGIEVSVSCDDSEFEKKVLFLQEEIKKGEIFQAVLSRSFYMECLEGLSAYYHLKLSNPSPYMFYIKDSDFILFGASPESALKYNALTNTAEIYPIAGTRLRGKDKQGNIDYDLDSKMEFDLQHDYKERAEHIMLVDLARNDMARVSKKRYCDKLLKVDKYSNVMHLVSRVVGELKKGCDSLHAYRSFMNAGTLRSA

SEQ ID NO: 6563 - protein, 501 aa, Helicobacter pylori
  misc_feature (B) LOCATION 1...501
  hypothetical: YES
LMISLIEKAPYIPYPLALYEKLEQRHTLLFESAEIESKAHTKSLLMAKACLKLVCNHNIVTITSLTPNGGAFLQTLSAFFKTPIQDNALTLTYTKDKKIQDEFLKLFEPSPFDALRGLFKSVKTRPKHPFTLFSAGVFSFEMLNFFEDLPHLKANDNTANDFIFYVAQNLIIIDHKEKSAEILGACFDERFKTEIAKELQDLKELVKNIKSDFIPKKAKQSIEVSVSCDDSEFEKKVLFLQEEIKKGEIFQAVLSRSFYMECLEGLSAYYHLKLSNPSPYMFYIKDSDFILFGASPESALKYNALTNTAEIYPIAGTRLRGKDKQGNIDYDLDSKMEFDLQHDYKERAEHIMLVDLARNDMARVSKKRYCDKLLKVDKYSNVMHLVSRVVGELKKGCDSLHAYRSFMNAGTLSGAPKISAIKLIYQLENQRRGSYGGSVGYLNSEGSMDSCITIRSCFVKNNRAVIQAGAGIVLDSVPQNEANETRAKVQALIDAIRKTIS

SEQ ID NO: 6564 - protein, 86 aa, Helicobacter pylori
  misc_feature (B) LOCATION 1...86
  hypothetical: YES
IGGGSNAIGIFSAFLNDKEVKLISVKPAGLWLETNKHGATLNKRRVGNLHGNKTYLLQNDESQIAKSHSISAGLDYPRVGPENTYL

SEQ ID NO: 6565 - protein, 189 aa, Helicobacter pylori
  misc_feature (B) LOCATION 1...189
  hypothetical: YES
ESIKMNQKAYFGEFGGSFVSELLVPALRELEQAFDTCLKDEEFQKEYFRLLKDFVGRPSPLTLCQNIVSNPKVKLYLKREDLIHGGAHKTNQALGQALLAKKMGKTRIIAETGAGQHGVATAIACALLNLKCVIFMGGKDIKRQEMNVFRMRLLGAEVREVNSGSATLKDAVNEALRNGRAVTRTRIIC

SEQ ID NO: 6566 - protein, 393 aa, Helicobacter pylori
  misc_feature (B) LOCATION 1...393
  hypothetical: YES
MNQKAYFGEFGGSFVSELLVPALRELEQAFDTCLKDEEFQKEYFRLLKDFVGRPSPLTLCQNIVSNPKVKLYLKREDLIHGGAHKTNQALGQALLAKKMGKTRIIAETGAGQHGVATAIACALLNLKCVIFMGGKDIKRQEMNVFRMRLLGAEVREVNSGSATLKDAVNEALRDWASSYKDTHYLLGTSAGPHPYPTMVKTFQKMIGDEVKSQILEKENRLPDYVIACVGGGSNAIGIFSAFLNDKEVKLIGVEPAGLGLETNKHGATLNKGRVGILHGNKTYLLQDDEGQIAESHSISAGLDYPGVGPEHSYLKEIGRAVYESASDIEALEAFRLLCQKEGIIPALESSHALAYALKLAQKCAQEKIIVVNLSGRGDKDLSTVYNALKGGLK

SEQ ID NO: 6567 - protein, 266 aa, Helicobacter pylori
  misc_feature (B) LOCATION 1...266
  hypothetical: YES
MKLKSFGVFGNPIKHSKSPLIHNACFLTFQKELGFLGHYHPILLPLESRIKNEFLHLGLSGANVTLPFKERAFQICDKIKGIALECASVNTLVLENDELVGYNTDALGFYLSLKHQNYQNDQNALILGAGGSAKALACGLQKQGLKVSVLNRSARGLDFFQRLGCDCFMEPPKSAFDLIINATSASLHNELPLNKEVLKGYFKESKLAYDLAYGFLTPFLSLAKELKIPFQDGKDMLIYQASLSFEKFSDSQIPYSKAFEVMRSVF

SEQ ID NO: 6568 - protein, 273 aa, Helicobacter pylori
  misc_feature (B) LOCATION 1...273
  hypothetical: YES
KRLNERIMKLKSFGVFGNPIKHSKSPLIHNACFLTFQKELGFLGHYHPILLPLESRIKNEFLHLGLSGANVTLPFKERAFQICDKIKGIALECASVNTLVLENDELVGYNTDALGFYLSLKHQNYQNDQNALILGAGGSAKALACGLQKQGLKVSVLNRSARGLDFFQRLGCDCFMEPPKSAFDLIINATSASLHNELPLNKEVLKGYFKESKLAYDLAYGFLTPFLSLAKELKIPFQDGKDMLIYQASLSFEKFSDSQIPYSKAFEVMRSVF

SEQ ID NO: 6569 - protein, 110 aa, Helicobacter pylori
  misc_feature (B) LOCATION 1...110
  hypothetical: YES
KHHDFTREGVIRTKRGVFKRVVMKDILNALYHQKDLNDEEVKKLFTLIIDEKVSPAQLGAVLCALKIKGESFKEISVAATTLLEHAPKPFNSGLDLIDNCGTGGDGAKND

SEQ ID NO: 6570 - protein, 227 aa, Helicobacter pylori
  misc_feature (B) LOCATION 1...227
  hypothetical: YES
SVSSHSGSADLLENLGVNIEMNPMQLENCFKQSHFGFLFAPLYHQSFKKSAPLRKELFTKTIFNCLGPLINPLRPKIQLLGVYDKSLCKTMALALKALGVKRAMVVNGGGTDEIVLHDITHACELKNNEILEYDLSAKDFDLPPYDLKELQIENAKESVQACLDILENKGKDSHTMVVAANVASLLYLSHRAKGFKRGREHDFRAFKNQSALCAFTKNHKAKPCLAC

SEQ ID NO: 6571 - protein, 226 aa, Helicobacter pylori
  misc_feature (B) LOCATION 1...226
  hypothetical: YES
VSSHSGSADLLENLGVNIEMNPMQLENCFKQSHFGFLFAPLYHQSFKKSAPLRKELFTKTIFNCLGPLINPLRPKIQLLGVYDKSLCKTMALALKALGVKRAMVVNGGGTDEIVLHDITHACELKNNEILEYDLSAKDFDLPPYDLKELQIENAKESVQACLDILENKGKDSHTMVVAANVASLLYLSHRAKGFKRGREHDFRAFKNQSALCAFTKNHKAKPCLAC

SEQ ID NO: 6572 - protein, 335 aa, Helicobacter pylori
  misc_feature (B) LOCATION 1...335
  hypothetical: YES
MKDILNALYHQKDLNDEEVKKLFTLIIDEKVSPAQLGAVLCALKIKGESFKEISVAATTLLEHAPKPFNSGLDLIDNCGTGGDGLKTINISTIAALIASSMGLSMAKHGSRSVSSHSGSADLLENLGVNIEMNPMQLENCFKQSHFGFLFAPLYHQSFKKSAPLRKELFTKTIFNCLGPLINPLRPKIQLLGVYDKSLCKTMALALKALGVKRAMVVNGGGTDEIVLHDITHACELKNNEILEYDLSAKDFDLPPYDLKELQIENAKESVQACLDILENKGKDSHTMVVAANVASLLYLSHRAKDLKEGVSMTLEHLKTKAPYAHLQKIIRLSHA

SEQ ID NO: 6573 - protein, 148 aa, Helicobacter pylori
  misc_feature (B) LOCATION 1...148
  hypothetical: YES
PKTPLLFISPGPGNPNSSGNLLKIIAMAKKKFPILGVCLGLQALAQSYGAKIIRSKEIVHGKATTIALKKHAVFKGLGESMVVGRYHSLMASGLPKNLEVIAEHDNIPMAIVNEEDKILAYQFHPESIMTLQGRALLEQSVGFLRELS

SEQ ID NO: 6574 - protein, 147 aa, Helicobacter pylori
  misc_feature (B) LOCATION 1...147
  hypothetical: YES
KTPLLFISPGPGNPNSSGNLLKIIAMAKKKFPILGVCLGLQALAQSYGAKIIRSKEIVHGKATTIALKKHAVFKGLGESMVVGRYHSLMASGLPKNLEVIAEHDNIPMAIVNEEDKILAYQFHPESIMTLQGRALLEQSVGFLRELS

SEQ ID NO: 6575 - protein, 194 aa, Helicobacter pylori
  misc_feature (B) LOCATION 1...194
  hypothetical: YES
MKIFFIDNFDSFSYNLVYELECLGYEVAVYQNDIDPSYLMGLMNEEPKTPLLFISPGPGNPNSSGNLLKIIAMAKKKFPILGVCLGLQALAQSYGAKIIRSKEIVHGKATTIALKKHAVFKGLGESMVVGRYHSLMASGLPKNLEVIAEHDNIPMAIVNEEDKILAYQFHPESIMTLQGRALLEQSVGFLRELS

SEQ ID NO: 6576 - protein, 66 aa, Helicobacter pylori
  misc_feature (B) LOCATION 1...66
  hypothetical: YES
AMPSVLENILKDKLLEVAVLKKNHALPINIAPSDRDFKKALLEKKTSFILEYKKALAFQRFDQKRF

SEQ ID NO: 6577 - protein, 120 aa, Helicobacter pylori
  misc_feature (B) LOCATION 1...120
  hypothetical: YES
GYSQKEIAQLEKSLPKTCAIWQVVSVADSKDLAPKTKEASLILYDTKGDKMGGNGVSFDWEILENAKTPFMLAGGLNLDNIQKALKIKALGLDFNSGLEISPGIKNKDKIKQLARILREY

SEQ ID NO: 6578 - protein, 176 aa, Helicobacter pylori
  misc_feature (B) LOCATION 1...176
  hypothetical: YES
ALMKTLRSFRSIPLSPILCKDFIIDAFQIKLARVMGSNAVLLMLSVLDDKNYLELFNLAKSLNMSVLTEVSNQQEIERLLKLQYDIIGINNRDLHTLKTDIFHTLELRPLLPKDAIIISESGIYSHAQIKALAPCVNGFLVGSSLMKEKDLKKACIKLILGENKVCGLTRIKDAKT

SEQ ID NO: 6579 - protein, 452 aa, Helicobacter pylori
  misc_feature (B) LOCATION 1...452
  hypothetical: YES
MPSVLENILKDKLLEVAVLKKNHALPINIAPSDRDFKKALLEKKTSFILEYKKASPSKGLIRKDFDLLEITKTYEKFASCVSVLADSKYFLGSYENIKIVSQHSTKPILCKDFIIDAFQIKLARVMGSNAVLLMLSVLDDKNYLELFNLAKSLNMSVLTEVSNQQEIERLLKLQYDIIGINNRDLHTLKTDIFHTLELRPLLPKDAIIISESGIYSHAQIKALAPCVNGFLVGSSLMKEKDLKKACIKLILGENKVCGLTRIKDAKAVYKNHFIYGGLIFEKSSPRYIKPKEALKITKAVKKLDFVGVFVKDKIKKIAKIAKKLDLKAVQLYGYSQKEIAQLKKSLPKTCAIWQVVSVADSKDLAPKTKEASLILYDTKGDKMGGNGVSFDWEILENAKTPFMLAGGLNLDNIQKALKIKALGLDFNSGLEISPGIKNKDKIKQLARILREY

SEQ ID NO: 6580 - protein, 252 aa, Helicobacter pylori
  misc_feature (B) LOCATION 1...252
  hypothetical: YES
KNTKKWRLSPFVTLGDPNYELSFEIVKTLIISGVSALELGLAFSDPVADGTTIQASHLRALKHASMAKNFQLLKKIRGYNHDIPIGLLAYANLIFSYGVDGFYAQAKECGVDSVLIADMPLIEKELVIKSAQKHQIKQIFIASPNASSKDLEQVATHSQGYIYTLARSGVTGASHTLENDASAIIKTLKTFSSTPALLGFGISKKEHITNAKGMGADGVICGSALVKIIEENLNNEDAMLEKIKGFVGGMIS

SEQ ID NO: 6581 - protein, 262 aa, Helicobacter pylori
  misc_feature (B) LOCATION 1...262
  hypothetical: YES
MRYQNMFETLKKHKKMAFIPFVTLGDPNYELSFEIVKTLIISGVSALELGLAFSDPVADGTTIQASHLRALKHASMAKNFQLLKKIRGYNHDIPIGLLAYANLIFSYGVDGFYAQAKECGVDSVLIADMPLIEKELVIKSAQKHQIKQIFIASPNASSKDLEQVATHSQGYIYTLARSGVTGASHTLENDASAIIKTLKTFSSTPALLGFGISKKEHITNAKGMGADGVICGSALVKIIEENLNNEDAMLEKIKGFVGGMIS

SEQ ID NO: 6582 - protein, 371 aa, Helicobacter pylori
  misc_feature (B) LOCATION 1...371
  hypothetical: YES
FRKTGFFCNRKVLGASGTQLGELVFNTSMSGYQEVINDPSYKGQFVVFNMPEIGVVGANPKNDESFFSCAGVLPRHYNEFFSNSRADSSLSTYLEKRGVLGISGVDTRSLIKTLRHHGCLMMIASTIEHDRNKLEEVLKNAPKISHSPLVSSVSTPKIITHQRATFDFNTLDYKPFDEKIPHKIIAVLDFGAKGNILNELQNVGLKALIYPHHTKANELIKAYEKKEISGIFLSNGPGDPLSLQQEIGEIKRLINAKIPMFGICLGHQLLSIAQGYPTYKLKFGHHGSNHPVKNLETNAVEITAQNHNYCVPEEIEEIATITHRNLFDNTIEGVRYKNAPIISVQHHPESSPGPKESHYIFKEFVGLLEGF

SEQ ID NO: 6583 - protein, 375 aa, Helicobacter pylori
  misc_feature (B) LOCATION 1...375
  hypothetical: YES
MVSLYLENGLFLQAQSFGATGTQVGELVFNTSMSGYQEVISDPSYKGQFVVFSMPEIGVVGANPKDDESFFSCAGVLARHYNEFFSNSRADSSLSTYLEKRGVLGISGVDTRSLIKTLRHHGCLMMIASTIEHDRNKLEEVLKNAPKISHSPLVSSVSTPKIITHQRATFDFNTLDYKPFDEKIPHKIIAVLDFGAKGNILNELQNVGLKALIYPHHTKANELIKAYEKKEISGIFLSNGPGDPLSLQQEIGEIKRLINAKIPMFGICLGHQLLSIAQGYPTYKLKFGHHGSNHPVKNLETNAVEITAQNHNYCVPEEIEEIATITHRNLFDNTIEGVRYKNAPIISVQHHPESSPGPKESHYIFKEFVGLLEGF

SEQ ID NO: 6584 - protein, 375 aa, Helicobacter pylori
  misc_feature (B) LOCATION 1...375
  hypothetical: YES
MVSLYLENGLFLQAQSFGATGTQVGELVFNTSMSGYQEVISDPSYKGQFVVFSMPEIGVVGANPKDDESFFSCAGVLARHYNEFFSNSRADSSLSTYLKKRGVLGISGVDTRSLIKTLRHHGCLMMIASTIEHDRNKLEEVLKNAPKISHSPLVSSVSTPKIITHQRATFDFNTLDYKPFDEKIPHKIIAVLDFGAKGNILNELQNVGLKALIYPHHTKANELIKAYEKKEISGIFLSNGPGDPLSLQQEIGEIKRLINAKIPMFGICLGHQLLSIAQGYPTYKLKFGHHGSNHPVKNLETNAVEITAQNHNYCVPEEIEEIATITHRNLFDNTIEGVRYKNAPIISVQHHPESSPGPKESHYIFKEFVGLLEGF

SEQ ID NO: 6585 - protein, 146 aa, Helicobacter pylori
  misc_feature (B) LOCATION 1...146
  hypothetical: YES
LDKNQARVSMEGVEDRPGIAAEIFGALAEYRINVDMIVQTIGRDGKTDLDFTIVKTQIEETKQALKPFLAQMDSIDYDENIAKVSIVGVGMKSHSGVASIAFKALAKDNINIMMISTSEIKISVLIDIKYAELAVRTLHAVYQLDQ

SEQ ID NO: 6586 - protein, 145 aa, Helicobacter pylori
  misc_feature (B) LOCATION 1...145
  hypothetical: YES
DKNQARVSMEGVEDRPGIAAEIFGALAEYRINVDMIVQTIGRDGKTDLDFTIVKTQIEETKQALKPFLAQMDSIDYDENIAKVSIVGVGMKSHSGVASIAFKALAKDNINIMMISTSEIKISVLIDIKYAELAVRTLHAVYQLDQ

SEQ ID NO: 6587 - protein, 180 aa, Helicobacter pylori
  misc_feature (B) LOCATION 1...180
  hypothetical: YES
VLIVQKYGGTSMGSIERIHNVAQRVLESVKLGHQVVVVVSAMSGETDRLLEFGKNFSHNPNKREMDRIVSAGEWISSAALSMALERYGHRAISLSGKEAGILTSSHFQNAVIQSIDTQRITELLEKNYIVVIAGFQGADIQGETTTLGRGGSDLSAVALAGALKAHLCEIYTDVDGVYTT

SEQ ID NO: 6588 - protein, 185 aa, Helicobacter pylori
  misc_feature (B) LOCATION 1...185
  hypothetical: YES
KRGVFGVLIVQKYGGTSMGSIERIHNVAQRVLESVKLGHQVVVVVSAMSGETDRLLEFGKNFSHNPNKREMDRIVSAGEWISSAALSMALERYGHRAISLSGKEAGILTSSHFQNAVIQSIDTQRITELLEKNYIVVIAGFQGADIQGETTTLGRGGSDLSAVALAGALKAHLCEIYTDMEGVYT

SEQ ID NO: 6589 - protein, 405 aa, Helicobacter pylori
  misc_feature (B) LOCATION 1...405
  hypothetical: YES
VLIVQKYGGTSMGSIERIHNVAQRVLESVKLGHQVVVVVSAMSGETDRLLEFGKNFSHNPNKREMDRIVSAGEWISSAALSMALERYGHRAISLSGKEAGILTSSHFQNAVIQSIDTQRITELLEKNYIVVIAGFQGADIQGETTTLGRGGSDLSAVALAGALKAHLCEIYTDVDGVYTTDPRIEEKAQKIAQISYDEMLELASMGAKVLLNRSVELAKKLSVKLVTRNSFNHSEGTLIVAEKDFKGERMETPIVSGIALDKNQARVSMEGVEDRPGIAAEIFGALAEYRINVDMIVQTIGRDGKTDLDFTIVKTQIEETKQALKPFLAQMDSIDYDENIAKVSIVGVGMKSHSGVASIAFKALAKDNINIMMISTSEIKISVLIDIKYAELAVRTLHAVYQLDQ

SEQ ID NO: 6590 - protein, 89 aa, Helicobacter pylori
  misc_feature (B) LOCATION 1...89
  hypothetical: YES
RFKGMDIVKKQAKECYMWITQEITPYLRKEYTIEAKLLDVRSEHNILEIFKSKDFGEIAMLNRQLLFKNFLHIESELLAHMGGLHQERA

SEQ ID NO: 6591 - protein, 231 aa, Helicobacter pylori
  misc_feature (B) LOCATION 1...231
  hypothetical: YES
RFLNLRILVKLRCSTASCCSRIFCTLKASCSLIWGGCTKKELREVLIVDGFDLELAHQLFKYDTRIDFVQADEKILDSFISFFPHFHEVKNNKNFTHAKQLLDLDIKKYDLILCLQEPDIHKIDGLKRMLKEDGVFISVAKHPLLEHVSMQNALKNLGDFFPITIPFVAPLRILSNKGYIYASFKTHPLKDLMTPKIEALKSVRYYNEDIHRAAFALPKNLQEVFKDNIKS

SEQ ID NO: 6592 - protein, 262 aa, Helicobacter pylori
  misc_feature (B) LOCATION 1...262
  hypothetical: YES
MWITQEITPYLRKEYTIEAKLLDVRSEHNILEIFKSKDFGEIAMLNRQLLFKNFLHIESELLAHMGGCTKKELREVLIVDGFDLELAHQLFKYDTRIDFVQADEKILDSFISFFPHFHEVKNNKNFTHAKQLLDLDIKKYDLILCLQEPDIHKIDGLKRMLKEDGVFISVAKHPLLEHVSMQNALKNLGDFFPITIPFVAPLRILSNKGYIYASFKTHPLKDLMTPKIEALKSVRYYNEDIHRAAFALPKNLQEVFKDNIKS

SEQ ID NO: 6593 - protein, 416 aa, Helicobacter pylori
  misc_feature (B) LOCATION 1...416
  hypothetical: YES
MAYFLEQTDSEIFEFIVEEFKRQNEHLEMIASENYTFPSVMEAMGSILTNKYAEGYPNKRYYGGCEVVDKIESLAIERAKKLFNCQFANVQAHSGSQANNAVYHALLKLYDKILGMDLSCGGHLTHGAKVSLTGKHYQSFSYGVGLDGYIDYEEALKIAQSVKPQIIVCGFSAYPREIDFKKFREIADAVGALLLGDIAHVAGLVVANEHAHPFPHCHVVSSTTHKTLRGPRGGLILTNDEEIAAKIDKAIFPGTQGGPLMHVIAAKAVGFKENLKPEFKAYAKLVKSNMQVLAKTLKEKNHKLVSGGTSNHLLLMDFLDKPYSGKDADIALGNAGITVNKNTIPGETRNPFVTSGIRIGSAALSARGMGAKEFEIIGNKISDILNDINNVSLQLHVKEELKTMANQFPVYHQPIF

SEQ ID NO: 6594 - protein, 418 aa, Helicobacter pylori
  misc_feature (B) LOCATION 1...418
  hypothetical: YES
RIMAYFLEQTDSEIFEFIVEEFKRQNEHLEMIASENYTFPSVMEAMGSILTNKYAEGYPNKRYYGGCEVLDKIESLAIERGKKLFNCQFANVQAHSGSQANNAVYHALLNLYDKILGMDLSCGGHLTHGDKVSLTGKHYQSFSYGVGLDGYIDYEEALKIAQSVKPQIIVCGFSAYPREIDFKKFREIADAVGALLLGDIAHVAGLVVANEHAHPFPHCHVVSSTTHKTLRGPRGGLILTNDEEIAAKIDKAIFPGTQGGPLMHVIAAKAVGFKENLKPEFKAYAKLVKSNMQVLAKTLKEKNHKLVSGGTSNHLLLMDFLDKPYSGKDADIALGNAGITVNKNTIPGETRNPFVTSGIRIGSAALSARGMGAKEFEIIGNKISDILNDINNVSLQLHVKEELKTMANQFPVYHQPIF

SEQ ID NO: 6595 - protein, 60 aa, Helicobacter pylori
  misc_feature (B) LOCATION 1...60
  hypothetical: YES
VLKNEISYNKPILNTNDYLNKDNTMKDSFLFTSESVTEGHPDKMADQISDAVLDYMIERD

SEQ ID NO: 6596 - protein, 111 aa, Helicobacter pylori
  misc_feature (B) LOCATION 1...111
  hypothetical: YES
KTKVACKTLVSNGLCMITGELETSVYAPMLEIARHMVRKIGYTNALYCFDYRSAAVLNGIGEQSPDINQGVDREDGEIGAGDQGLMFGYACKETETLMPLPIHLAHQLAFA

SEQ ID NO: 6597 - protein, 253 aa, Helicobacter pylori
  misc_feature (B) LOCATION 1...253
  hypothetical: YES
NAHAFTHPFSAPARFRLAQKRKDNTLPFLRPDGKSQVSVRYENNKPVSVDTIVISTQHSPEVSQKHLKEAVIEEIVYKVLPKEYLHDNIKFFINPTGKFVIGGPQGDAGLTGRKIIWDTYGGFCPHGGGAFTGKDPYKVDMSAAYAARYVAKNLVASGVCDKATVQLAYAIGVIEPVSIYVNTHNTSKHSSAELEKCVKSVFKLTPKGIIESLDLLRPIYSLTSAYGHFGRELEEFTWEKTNKVEEIKAFFKR

SEQ ID NO: 6598 - protein, 385 aa, Helicobacter pylori
  misc_feature (B) LOCATION 1...385
  hypothetical: YES
MKDSFLFTSESVTEGHPDKMADQISDAVLDYIIERDKKAKVACETLVSNGFCMITGELKTSVYAPMQEIAREVVKKIGYTDALYGFDYRSAAVLNGIGEQSPDINQGVDREDGEIGAGDQGLMFGYACKETETLMPLPIHLAHQLAFALAQKRKDNTLPFLRPDGKSQVSVRYENNKPVSVDTIVISTQHSPEVSQKHLKEAVIEEIVYKVLPKEYLHDNIKFFINPTGKFVIGGPQGDAGLTGRKIIVDTYGGFCPHGGGAFSGKDPSKVDRSAAYAARYVAKNLVASGVCDKATVQLAYAIGVIEPVSIYVNTHNTSKHSSAELEKCVKSVFKLTPKGIIESLDLLRPIYSLTSAYGHFGRELEEFTWEKTNKVEEIKAFFKR

SEQ ID NO: 6599 - protein, 62 aa, Helicobacter pylori
  misc_feature (B) LOCATION 1...62
  hypothetical: YES
MQHLVLIGFMGSGKSSLAQELGLALKLEVLDTDMIISERVGLSVRGIFEELGEDNFRMFEKI

SEQ ID NO: 6600 - protein, 162 aa, Helicobacter pylori
  misc_feature (B) LOCATION 1...162
  hypothetical: YES
MQHLVLIGFMGSGKSSLAQELGLALKLEVLDTDMIISERVGLSVRGIFEELGEDNFRMFEKNLIDELKTLKTPHIISTGGGIVMHENLKGLGTTFYLKMDFETLIKRLNQKEREKRPLLNNLTQAKELFEKRQALYEKNASFIIDARGGLNNSLKQVLQFIA

SEQ ID NO: 6601 - protein, 165 aa, Helicobacter pylori
  misc_feature (B) LOCATION 1...165
  hypothetical: YES
NKSMQHLVLIGFMGSGKSSLAQELGLALKLEVLDTDMIISERVGLSVRGIFEELGEDNFRMFEKNLIDELKTLKTPHIISTGGGIVMHENLKGLGTTFYLKMDFETLIKRLNQKEREKRPLLNNLTQAKELFEKRQALYEKNASFIIDARGGLNNSLKQVLQFIA

SEQ ID NO: 6602 - protein, 172 aa, Helicobacter pylori
  misc_feature (B) LOCATION 1...172
  hypothetical: YES
PPPLMGRARWLPSVLSYAKNHLFENLSQKSINDFLLTSAAIGYLYKKNASLSGAEAGCQAEIGVASSMAAGGLAHLCQATTQQVLIASEIAMEHHLGLTCDPVGGLVQIPCIERNVLGAIKAISASKLALEDEYKPKVSLDEVIATMYATGKDMNEKYKETSLGGLAKTLKC

SEQ ID NO: 6603 - protein, 331 aa, Helicobacter pylori
  misc_feature (B) LOCATION 1...331
  hypothetical: YES
KLQSGYFCVCLWELDGFERVFRTILMASFSILSIFKIGVGPSSSHTIGPMEAGARFCGLLKGILEQVERVQITLHGSLALTGKGHLSDEAVLIGLHGIYANELDITTKKALLHEAFENKVLKLANQHHIPFDYAKDLIFDNKPLARHQNALILKAFNAKNEVLKEETYYSVGGGFVYTEKELDNLSEEGENESVAYDFSSAKELLELCQKHQKSIAEIVRLRENALKNHPDATMTKIYHAMLECYHNGANSKERYLPGSLKVTRLAPSVKTRLEKHPTSGKDPLALIDYISLYARSIAEENSCGGKVVTAPTNGACAVAAKRAFIRQKPFV

SEQ ID NO: 6604 - protein, 455 aa, Helicobacter pylori
  misc_feature (B) LOCATION 1...455
  hypothetical: YES
MASFSILSIFKIGVGPSSSHTIGPMEAGARFCGLLKGILEQVERVQITLHGSLALTGKGHLSDEAVLIGLHGIYANELDITTKKALLHEAFENKVLKLANQHHIPFDYAKDLIFDNKPLARHQNALILKAFNAKNEVLKEETYYSVGGGFVYTEKELDNLSEEGENESVAYDFSSAKELLELCQKHQKSIAEIVRLRENALKNHPDATMTKIYHAMLECYHNGANSKERYLPGSLKVTRLAPSVKTRLEKHPTSGKDPLALIDYISLYARSIAEENASGGKVVTAPTNGACAVVPSVLSYAKNHLFENLSQKSINDFLLTSAAIGYLYKKNASLSGAEAGCQAEIGVASSMAAGGLAHLCQATTQQVLIASEIAMEHHLGLTCDPVGGLVQIPCIERNVLGAIKAISASKLALEDEYKPKVSLDEVIATMYATGKDMNEKYKETSLGGLAKTLKC

SEQ ID NO: 6605 - protein, 106 aa, Helicobacter pylori
  misc_feature (B) LOCATION 1...106
  hypothetical: YES
RRWAANFFGITHDDAFITPHSPSILPSVTRKSLMGLAKEHLKLKVEEREILIDELGAFKEAGACGTAAIITPIKEIAHNNKSYSFEAPGNITKQLYDLLLSIQQGE

SEQ ID NO: 6606 - protein, 129 aa, Helicobacter pylori
  misc_feature (B) LOCATION 1...129
  hypothetical: YES
LLMPKVSEELFLKACAEVIKANQKWLAPYKSGASLYLRPFVIGVGDNLGVKPASEYLFIVFCAPVGAYFKGGIEKGGARFITTAFDRAAPKGTGGVKVGGNYAASLLAHKIATEQGYDDCIYLRPHHAH

SEQ ID NO: 6607 - protein, 128 aa, Helicobacter pylori
  misc_feature (B) LOCATION 1...128
  hypothetical: YES
LMPKVSEELFLKACAEVIKANQKWLAPYKSGASLYLRPFVIGVGDNLGVKPASEYLFIVFCAPVGAYFKGGIEKGGARFITTAFDRAAPKGTGGVKVGGNYAASLLAHKIATEQGYDDCIYLRPHHAH

SEQ ID NO: 6608 - protein, 248 aa, Helicobacter pylori
  misc_feature (B) LOCATION 1...248
  hypothetical: YES
MPKVSEELFLKACAEVIKANQKWLAPYKSGASLYLRPFVIGVGDNLGVKPASEYLFIVFCAPVGAYFKGGIEKGGARFITTAFDRAAPKGTGGVKVGGNYAASLLAHKIATEQGYDDCIYLDPTTHTKIEEVGAANFFGITHDDAFITPHSPSILPSVTRKSLMVLAKEHLKLKVEEREILIDELGAFKEAGACGTAAIITPIKEIAHNNKSYSFEAPGNITKQLYDLLLSIQQGEQEAPKDWIFEVG

SEQ ID NO: 6609 - protein, 340 aa, Helicobacter pylori
  misc_feature (B) LOCATION 1...340
  hypothetical: YES
MPNLENLDWKNLGFSYIKTDFRFIATYKNGSWSQGELVSENALQLSEGSPVLHYGQACFEGLKAYRSQKGKALLFRPLENAKRLQTSCERLLMPKVSEELFLKACAEVIKANQKWLAPYKSGASLYLRPFVIGVGDNLGVKPASEYLFIVFCAPVGAYFKGGIEKGGARFITTAFDRAAPKGTGGVKVGGNYAASLLAHKIATEQGYDDCIYLDPTTHTKIEEVGAANFFGITHDDAFITPHSPSILPSVTRKSLMVLAKEHLKLKVEEREILIDELGAFKEAGACGTAAIITPIKEIAHNNKSYSFEAPGNITKQLYDLLLSIQQGEQEAPKDWIFEVG

SEQ ID NO: 6610 - protein, 86 aa, Helicobacter pylori
  misc_feature (B) LOCATION 1...86
  hypothetical: YES
GVEGLRKHISNTAEFGAIKAREPMGNLLEKRMQKILKKIQNGAFAKDFLLEKSLNYPRLNTERKALKETKIEQIGEILRAPFNHKK

SEQ ID NO: 6611 - protein, 101 aa, Helicobacter pylori
  misc_feature (B) LOCATION 1...101
  hypothetical: YES
VHFNQVVLPKGVGAILVAPKGPGSALREEYLKNRGLYHLIAIEQESSIHNAKAVALSYAKAMGGGRMGVLETSFKEECESDLFGEQAVLCGGLEVDRKNGV

SEQ ID NO: 6612 - protein, 256 aa, Helicobacter pylori
  misc_feature (B) LOCATION 1...256
  hypothetical: YES
IPPSTPFLNILHVFKHYRSHYGKINTCLNTLGDLILALPVYYDKDIDLGVIQSLQVGIIGYGVQGEAQALNLRDSKVKVRIGLYQGSLSVSKAKKEGFEVLGVKELVQQSDVIMALLPDELHKEVLEKEVIPFLKEGQIIGFAHGFSVHFNQVVLPKGVGAILVAPKGPGSALREEYLKNRGLYHLIAIEQESSIHNAKAVALSYAKAMGGGRMGVLETSFKEECESDLFGEQAVLCGGLEAIVRMGFETLIKAGY

SEQ ID NO: 6613 - protein, 257 aa, Helicobacter pylori
  misc_feature (B) LOCATION 1...257
  hypothetical: YES
IPPSTPFLNILHVFKHYRSHYGKINTCLNTLGDLILALPVYYDKDIDLGVIQSLQVGIIGYGVQGEAQALNLRDSKVKVRIGLYQGSLSVSKAKKEGFEVLGVKELVQQSDVIMALLPDELHKEVLEKEVIPFLKEGQIIGFAHGFSVHFNQVVLPKGVGAILVAPKGPGSALREEYLKNRGLYHLIAIEQESSIHNAKAVALSYAKAMGGGRMGVLETSFKEECESDLFGEQAVLCGGLEAIVRMGFETLIKAGYP

SEQ ID NO: 6614 - protein, 330 aa, Helicobacter pylori
  misc_feature (B) LOCATION 1...330
  hypothetical: YES
LALPVYYDKDIDLGVIQSLQVGIIGYGVQGEAQALNLRDSKVKVRIGLYQGSLSVSKAKKEGFEVLGVKELVQQSDVIMALLPDELHKEVLEKEVIPFLKEGQIIGFAHGFSVHFNQVVLPKGVGAILVAPKGPGSALREEYLKNRGLYHLIAIEQESSIHNAKAVALSYAKAMGGGRMGVLETSFKEECESDLFGEQAVLCGGLEAIVRMGFETLIKAGYPEELAYFECVHEVKLVADLLHYKGVEGLRKHISNTAEFGAIKAREPMGNLLEKRMQKILKKIQNGAFAKDFLLEKSLNYPRLNTERKALKETKIEQIGEILRAPFNHKK

SEQ ID NO: 6615 - protein, 67 aa, Helicobacter pylori
  misc_feature (B) LOCATION 1...67
  hypothetical: YES
MINAVSSLTPVQSVGNYKRVEKNEKVENNEAALDRVAEIKQAIENNQYKINLHETSHKMAQDLLGIS

SEQ ID NO: 6616 - protein, 79 aa, Helicobacter pylori
  misc_feature (B) LOCATION 1...79
  hypothetical: YES
SNELNIRLKDFKMINAVSSLTPVQSVGNYKRVEKNEKVENNEAALDRVAETKQAIENNQYKINLHETSHKMAQDLLGIS

SEQ ID NO: 6617 - protein, 136 aa, Helicobacter pylori
  misc_feature (B) LOCATION 1...136
  hypothetical: YES
DEEVLSYRGDIINGISKKEREPKPERMLKAYHQSVATLNLIRAFAQGGLADLEQVHRFNLDFVKNNDFGQKYQQIADRITQALGFMRACGVEIERTPILREVEFYTSHEALLLHYEEPLVRKDSLTNQSYDCSATC

SEQ ID NO: 6618 - protein, 135 aa, Helicobacter pylori
  misc_feature (B) LOCATION 1...135
  hypothetical: YES
EEVLSYRGDIINGISKKEREPKPERMLKAYHQSVATLNLIRAFAQGGLADLEQVHRFNLDFVKNNDFGQKYQQIADRITQALGFMRACGVEIERTPILREVEFYTSHEALLLHYEEPLVRKDSLTNQSYDCSATC

SEQ ID NO: 6619 - protein, 396 aa, Helicobacter pylori
  misc_feature (B) LOCATION 1...396
  hypothetical: YES
VVKIIDNKAFLLQGGDCAESFSQFSANRIRDMFKVMMQMAIVLTFAGSIPIVKVGRIAGQFAKPRSNATEILDDEEVLSYRGDIINGISKKEREPKPERMLKAYHQSVATLNLIRAFAQGGLADLEQVHRFNLDFVKNNDFGQKYQQIADRITQALGFMRACGVEIERTPILREVEFYTSHEALLLHYEEPLVRKDSLTNQFYDCSAHMLWIGERTRDPKGAHVEFLRGVCNPIGVKIGPNASVSEVLELCDVLNPHNLKGRLNLIVRMGSKIIKERLPKLLQGVLKEKRHILWSIDPMHGNTVKTNLGVKTRAFDSVLDEVKSFFEIHRAEGSLASGVHLEMTGENVTECIGGSQAITEEGLSCHYYTQCDPRLNATQALELAFLIADMLKKQRT

SEQ ID NO: 6620 - protein, 71 aa, Helicobacter pylori
  misc_feature (B) LOCATION 1...71
  hypothetical: YES
PCKNGGVLKAFIGYDHNALHAKLALTLGLVDECVEFEKILECDVIFLAIPVEGIIECLKKMTPIKKGATIY

SEQ ID NO: 6621 - protein, 161 aa, Helicobacter pylori
  misc_feature (B) LOCATION 1...161
  hypothetical: YES
MCGTEFYGPKASVKGLYENALVILCDLEDSGTEQVEIAKEIFLGIKARLIKMKSNEHDTHVAYISHLPHVLSYALANSVLKQNDPEMILSLAGGGFRDMSRLSKSSPLMWKDIFKQNRDNVLEAIEKCEKEIAQAKAWIENNDYESLAEWMAQANKLQEFM

SEQ ID NO: 6622 - protein, 197 aa, Helicobacter pylori
  misc_feature (B) LOCATION 1...197
  hypothetical: YES
LLSKKAQRFIDLGGAKAQILHNIPKSIRQNFIAAHPMCGTEFYGPKASVKGLYENALVILCDLEDSGTEQVEIAKEIFLGIKARLIKMKSNEHDTHVAYISHLPHVLSYALANSVLKQNDPEMILSLAGGGFRDMSRLSKSSPLMWKDIFKQNRDNVLEAIEKCEKEIAQAKAWIENNDYESLAEWMAQANKLQEFM

SEQ ID NO: 6623 - protein, 275 aa, Helicobacter pylori
  misc_feature (B) LOCATION 1...275
  hypothetical: YES
MKAGIIGLGLMGGSLGLALQEWGRFKSVIGYDHNALHAKLALTLGLVDECVEFEKILECDVIFLAIPVEGIIECLKKMTPIKKSATIIDLGGAKAQILHNIPKSIRQNFIAAHPMCGTEFYGPKASVKGLYENALVILCDLEDSGTEQVEIAKEIFLGIKARLIKMKSNEHDTHVAYISHLPHVLSYALANSVLKQNDPEMILSLAGGGFRDMSRLSKSSPLMWKDIFKQNRDNVLEAIEKCEKEIAQAKAWIENNDYESLAEWMAQANKLQEFM

SEQ ID NO: 6624 - protein, 206 aa, Helicobacter pylori
  misc_feature (B) LOCATION 1...206
  hypothetical: YES
MLDNIPITIQKSKKIKTLSLNVTPSLEVILKMPDSCPQARANAFLKEQEAWLKKTLLAMQEKHSLLRTNLEKYKNKILVFDEMRNANDYTLTDLKKILKTYLEQKLPLIAQKMQTSYTHFSIRNNAKVLGSCSYHNRLSFALLLVCAKKEAIDYVIIHELAHTIHKNHSKNFWRCVQIFCPNYRALRERLKQRVVFYTQLLKPLQP

SEQ ID NO: 6625 - protein, 225 aa, Helicobacter pylori
  misc_feature (B) LOCATION 1...225
  hypothetical: YES
TALHSSANFSKIRIMLDNIPITIQKSKKIKTLSLNVTPSLEVILKMPDSCPQARANAFLKEQEAWLKKTLLAMQEKHSLLRTNLEKYKNKILVFDEMRNANDYTLTDLKKILKTYLEQKLPLIAQKMQTSYTHFSIRNNAKVLGSCSYHNRLSFALLLVCAKKEAIDYVIIHELAHTIHKNHSKNFWRCVQIFCPNYRALRERLKQRGCFLYPTAQAITAIKIKP

SEQ ID NO: 6626 - protein, 195 aa, Helicobacter pylori
  misc_feature (B) LOCATION 1...195
  hypothetical: YES
MGYIPYVIENTERGERSYDIYSRLLKDRIVLLSGEINDSVASSIVAQLLFLEAEDPEKDIGLYINSPGGVITSGLSIYDTMNFIRPDVSTICIGQAASMGAFLLSCGAKGKRFSLPHSRIMIHQPLGGAQGQASDIEIISNEILRLKGLMNSILAQNSGQSLEQIAKDTDRDFYMSAKEAKEYGLIDKVLQKNVK

SEQ ID NO: 6627 - protein, 196 aa, Helicobacter pylori
  misc_feature (B) LOCATION 1...196
  hypothetical: YES
MMGYIPYVIENTERGERSYDIYSRLLKDRIVLLSGEINDSVASSIVAQLLFLEAEDPEKDIGLYINSPGGVITSGLSIYDTMNFIRPDVSTICIGQAASMGAFLLSCGAKGKRFSLPHSRIMIHQPLGGAQGQASDIEIISNEILRLKGLMNSILAQNSGQSLEQIAKDTDRDFYMSAKEAKEYGLIDKVLQKNVK

SEQ ID NO: 6628 - protein, 199 aa, Helicobacter pylori
  misc_feature (B) LOCATION 1...199
  hypothetical: YES
KGKMMGYIPYVIENTERGERSYDIYSRLLKDRIVLLSGEINDSVASSIVAQLLFLEAEDPEKDIGLYINSPGGVITSGLSIYDTMNFIRPDVSTICIGQAASMGAFLLSCGAKGKRFSLPHSRIMVHQPLGGAQGQASDIEIISNEILRLKGLMNSILAQNSGQSLEQIAKDTDRDFYMSAKEAKEYGLIDKVLQQNVK

SEQ ID NO: 6629 - protein, 119 aa, Helicobacter pylori
  misc_feature (B) LOCATION 1...119
  hypothetical: YES
WAKKDNESVRYAQVHLESEYEFSKYHFEVASVERLLEMFKNAQAEALHCLENKLPLPAYDLVMLCSHFFNILDARKAISVAERQNYILQIRDLAKGCAVLYKEQEEEREERLKNALTKA

SEQ ID NO: 6630 - protein, 298 aa, Helicobacter pylori
  misc_feature (B) LOCATION 1...298
  hypothetical: YES
MQDFSSLLLKLQEYWKDQGCLVIQPYDIPAGAGTFHPATLLRSLDKKPWNVAYVAPSRRPTDGRYGENPNRLGSYYQFQVVIKPSPSNIQELYLKSLEVLGINLNEHDIRFVEDNWESPTLGAWGLGWEVWLDGMEVTQFTYFQQVGGIPCSPIPVEITYGLERLTMYVQKVENILEIEWAKKDNESVRYAQVHLESEYEFSKYHFEVASVERLLEMFKNAQAEALHCLENKLPLPAYDLVMLCSHFFNILDARKAISVAERQNYILQIRDLAKGCAVLYKEQEEEREERLKNALTKA

SEQ ID NO: 6631 - protein, 206 aa, Helicobacter pylori
  misc_feature (B) LOCATION 1...206
  hypothetical: YES
MFSGLINQIAKVKSFHNNILSIESNLNPKLGDSIAINGACLTAIESSKTHFSVELSQKTQNSVALENYKDLVHIEPALKANASLDGHFVQGHIDAIGVIEKIIHNSNQVDFFISASKETLLLCVEQGSIAIDGVSLTLSKVEEKGFWLTIIPYTLENTLFKTYKLKRRVNIETDMLVRSVASILKKTKGLEKKFSWNEADALTLGY

SEQ ID NO: 6632 - protein, 208 aa, Helicobacter pylori
  misc_feature (B) LOCATION 1...208
  hypothetical: YES
LTMFSGLINQIAKVKSFHNNILSIESNLNPKLGDSIAINGACLTAIESSKTHFSVELSQKTQNSVALENYKDLVHIEPALKANASLDGHFVQGHIDAIGVIEKIIHNSNQVDFFISASKETLLLCVEQGSIAIDGVSLTLSKVEEKGFWLTIIPYTLENTLFKTYKLKRRVNIETDMLVRSVASILKKTKGLEKKFSWNEADALTLGY

SEQ ID NO: 6633 - protein, 307 aa, Helicobacter pylori
  misc_feature (B) LOCATION 1...307
  hypothetical: YES
MAKKKIAISCGDIQGVGLELILKSHKEVSALCEPLYLVHSELLERANQLLDNAYETKTLNAIAIDAPLPLLNSSTIGKVSTQSGAYSFESFKKACELADSKEVDGICTLPINKLAWQQAQIPFVGHTDFLKQRYKDHQIIMMLGCSKLFVGLFSDHVPLSAVSQLIQVKALVKFLLAFQKSTQAKIVQVCGFNPHAGEEGLFGEEDEKILKAIQESNQTLGFECFLGPLPADSAFAPNKRKITPFYVSMSHDVGLAPLKALYFDESINVSLNAPILRASTDHGTAFDIAYQNKANHKSYLNAIKYLA

SEQ ID NO: 6634 - protein, 307 aa, Helicobacter pylori; identical to SEQ ID NO: 6633
  misc_feature (B) LOCATION 1...307
  hypothetical: YES

SEQ ID NO: 6635 - protein, 316 aa, Helicobacter pylori
  misc_feature (B) LOCATION 1...316
  hypothetical: YES
KWRNSSSDKMAKKKIAISCGDIQGVGLELILKSHKEVSALCEPLYLVHSELLERANQLLDNAYETKTLNAIAIDAPLPLLNSSTIGKVSTQSGAYSFESFKKACELADSKEVDGICTLPINKLAWQQAQIPFVGHTDFLKQRYKDHQIIMMLGCSKLFVGLFSDHVPLSAVSQLIQVKALVKFLLAFQKSTQAKIVQVCGFNPHAGEEGLFGEEDEKILKAIQESNQTLGFECFLGPLPADSAFAPNKRKITPFYVSMSHDVGLAPLKALYFDESINVSLNAPILRASTDHGTAFDIAYQNKANHKSYLNAIKYLA

SEQ ID NO: 6636 - protein, 116 aa, Helicobacter pylori
  misc_feature (B) LOCATION 1...116
  hypothetical: YES
SQDLLLDIEIAPCEIVRDSDNLALSSKNVYLNATERKQALAIPKALEKIQQAIDRGEKACEKLKKLGLEILKNLEVDYLECCNHKLEPLKTIEPANTLVLVAARVGKTRLLDNLWV

SEQ ID NO: 6637 - protein, 179 aa, Helicobacter pylori
  misc_feature (B) LOCATION 1...179
  hypothetical: YES
RNGFRAFKGLLMRALETIATLREYRISLKDSVGYVPTMGALHRGHQSLIERSLKENSHTIVSVFVNPTQFGANEDFSAYPRPLEKDLALCEKSGVNAVFAPKIGEMYPYEAKQRLKLYAPAFLSHSLEGAVRKGHFDGVVQVVLRLFHLTNPTRAYFGKKDAQQLLIIHHLIPRFAFRH

SEQ ID NO: 6638 - protein, 278 aa, Helicobacter pylori
  misc_feature (B) LOCATION 1...278
  hypothetical: YES
LLMRALETIATLREYRKSLKESVGFVPTMGALHRGHQSLIERSLKENSHTIVSVFVNPTQFGANEDFSAYPRPLEKDLALCEKSGVNAVFAPKIGEMYPYEAKQRLKLYAPAFLSHSLEGAVRKGHFDGVVQVVLRLFHLTNPTRAYFGKKDAQQLLIIQHLVQDLLLDIEIAPCEIVRDSDNLALSSRNVCLNATERKQALAIPKALEKIQQAIDRGEKACEKLKKLGLEILKNLEVDYLECCNHKLEPLKTIEPANTLVLVAARVGKTRLLDNLWV

SEQ ID NO: 6639 - protein, 76 aa, Helicobacter pylori
  misc_feature (B) LOCATION 1...76
  hypothetical: YES
AIIIGGTPHFDYVSAETTQGIASAMLKYSMPVSFGVLTTDNIEQAIERAGSKAGNKGFEAMSTLIELLSLCQTLKD

SEQ ID NO: 6640 - protein, 156 aa, Helicobacter pylori
  misc_feature (B) LOCATION 1...156
  hypothetical: YES
MQIIEGKLQLQGNEKIAILTSRFNHIITDRLKEGAMDCFKRHGGDEELLDLVLVPGAYELPLILDKLLESGKYDGVCVLGAIIRGGTPHFDYVSAEATKGIASAMLKYSMPVSFGVLTTDNIEQAIERAGSKAGNKGFEAMSTLIELLSLCQTLKD

SEQ ID NO: 6641 - protein, 262 aa, Helicobacter pylori
  misc_feature (B) LOCATION 1...262
  hypothetical: YES
MRFGLNIDHIVTLREVRKTYEPEILEALFIAKNTHKVDLITIHLREDKRHIQNEDVLRLLEISPLPINIECSINAEITDFLCSLKNKPSKVTIVPENRNEVTTEGGLDCSLKGLEEVIRAYHNKGIEVSLFVDPLKDALHFAKEHQVKQVEFHTGVYANLHNALYSNANNQIHAISTLKDKCPKELKEELHNAFLQLRRMSKEAFFMGIVVCAGHGLNYSNVKELLKIPSLRELNIGHSVVSKAVLVGLEKAILEMAQLIKR

SEQ ID NO: 6642 - protein, 262 aa, Helicobacter pylori
  misc_feature (B) LOCATION 1...262
  hypothetical: YES
PCVGLNIDHIVTLREVRKTYEPEILEALFIAKNTHKVDLITIHLREDKRHIQNEDVLRLLEISPLPINIECSINAEITDFLCSLKNKPSKVTIVPENRNEVTTEGGLDCSLKGLEEVIRAYHNKGIEVSLFVDPLKDALHFAKEHQVKQVEFHTGVYANLHNALYSNANNQIHAISTLKDKCPKELKEELHNAFLQLRRMSKEAFFMGIVVCAGHGLNYSNVKELLKIPSLRELNIGHSVVSKAVLVGLEKAILEMAQLIKR

SEQ ID NO: 6643 - protein, 39 aa, Helicobacter pylori
  misc_feature (B) LOCATION 1...39
  hypothetical: YES
MKVEIVDVNNGERFSTYVILGKKKGKNWCQWCSMPERWP

SEQ ID NO: 6644 - protein, 56 aa, Helicobacter pylori
  misc_feature (B) LOCATION 1...56
  hypothetical: YES
GKKRAKIGVNGAAARKVAIGDVVIILAYASMNEDEINTHKPSIVLVDEKNEILEKG

SEQ ID NO: 6645 - protein, 80 aa, Helicobacter pylori
  misc_feature (B) LOCATION 1...80
  hypothetical: YES
MTFEMLYSKIHRATITDANLNYIGSITIDEDLAKLAKLREGMKVEIVDVNNGERFSTYVILGKKKGKNWCQWCSMPERWP

SEQ ID NO: 6646 - protein, 89 aa, Helicobacter pylori
  misc_feature (B) LOCATION 1...89
  hypothetical: YES
SKTIYAHRATITDADLNYIGSITIDEDLAKLAKLREGMKVEIVDVNNGERFSTYVILGKKKGKNWCQWCSSQKGGHRRCGDHFSLCEHE

SEQ ID NO: 6647 - protein, 88 aa, Helicobacter pylori
  misc_feature (B) LOCATION 1...88
  hypothetical: YES
KTIYAHRATITDADLNYIGSITIDEDLAKLAKLREGMKVEIVDVNNGERFSTYVILGKKKGKNWCQWCSSQKGGHRRCGDHFSLCEHE

SEQ ID NO: 6648 - protein, 117 aa, Helicobacter pylori
  misc_feature (B) LOCATION 1...117
  hypothetical: YES
MTFEMLYSKIHRATITDANLNYIGSITIDEDLAKLAKLREGMKVEIVDVNNGERFSTYVILGKKRGKICVNGAAARKVAIGDVVIILAYASMNEDEINTHKPSIVLVDEKNEILEKG

SEQ ID NO: 6649 - protein, 218 aa, Helicobacter pylori
  misc_feature (B) LOCATION 1...218
  hypothetical: YES
MLFISATNTNAGKTTCARLLAQYCNACGVKTILLKPIETGVNDAINHSSDAHLFLQDNRLLDRSLTLKDISFYRYHKASAPLIAQQEEDPNAPIDTDNLTQRLHNFTKTYDLVIVEGAGGLCVPITLEENMLDFALKLKAKMLLISHDNLGLINDCLLNDFLLKSYQLDYKIAINLRGNNTAFYSVSLPYIELFNKRSNNPIVIFQQSLKELMSFALK

SEQ ID NO: 6650 - protein, 219 aa, Helicobacter pylori
  misc_feature (B) LOCATION 1...219
  hypothetical: YES
TMLFISATNTNAGKTTCARLLAQYCNACGVKTILLKPIETGVNDAINHSSDAHLFLQDNRLLDRSLTLKDISFYRYHKASAPLIAQQEEDPNAPIDTDNLTQRLHNFTKTYDLVIVEGAGGLCVPITLEENMLDFALKLKAKMLLISHDNLGLINDCLLNDFLLKSYQLDYKIAINLRGNNTAFYSVSLPYIELFNKRSNNPIVIFQQSLKELMSFALK

SEQ ID NO: 6651 - protein, 91 aa, Helicobacter pylori
  misc_feature (B) LOCATION 1...91
  hypothetical: YES
VCLGLADVMVVLSLHLNLNPTNPKWLNRDRLVFSGGHASALVYSLLHLWGFDLSLDDLKRFRQLHSKTPGHPELHHTEGIEITTXFRARFC

SEQ ID NO: 6652 - protein, 641 aa, Helicobacter pylori
  misc_feature (B) LOCATION 1...641
  hypothetical: YES
MQLSNADLERLKSMANTLRFLCADMIDKANSGHPGVCLGLADVMVVLSLHLNLNPTNPKWLNRDRLVFSGGHASALVYSLLHLWGFDLSLDDLKRFRQLHSKTPGHPELHHTEGIEITTAPLGQGFANAVGFSMASQYAQTLLDKEAISHKVYCLCGDGDLQEGISYESTSLAGHLRLDNLIVIYDSNQISIEGAINISFSEQVKTRFLAQNWEVLECDGHDYQAIHNALEEAKKSHKPTLLIAHTIIGKGAIGLEGSEKTHGSPLSKEVLKQSKENAQINPNESFIISPKNKMHFEEVKVRGISLEALWEKSLSPKTKEKIHALKNFDFNAINYPAFKKGESLATRVSNGMILNAIAKECEGFLGGSADLAPSNNTHLKHSGDFPLGQNLHFGIREHAMGAITNALAAYGLFVPFCATFFVFSDYLMPSIRLSALMKLKALFIFTHDSIGVGEDGATHQPIEQLSHLRALPHFYAFRPSDAFENKACMQVALSLNAPSALILSRQNLSVLDEVSKEQVLKGAYVKHHSKDPIITLVASGSEVSLALESAKILERENIPTQVVSAPCFDLLVEQDESYFKELFKGKVLVIEASRAIEWYRFADKIIGMDSFGSSAKGDKLFEKFGFSVENITAQAKRLLNA

SEQ ID NO: 6653 - protein, 642 aa, Helicobacter pylori
  misc_feature (B) LOCATION 1...642
  hypothetical: YES
LMQLSNADLERLKSMANTLRFLCADMIDKANSGHPGVCLGLADVMVVLSLHLNLNPTNPKWLNRDRLVFSGGHASALVYSLLHLWGFDLSLDDLKRFRQLHSKTPGHPELHHTEGIEITTAPLGQGFANAVGFSMASQYAQTLLDKEAISHKVYCLCGDGDLQEGISYESTSLAGHLRLDNLIVIYDSNQISIEGAINISFSEQVKTRFLAQNWEVLECDGHDYQAIHNALEEAKKSHKPTLLIAHTIIGKGAIGLEGSEKTHGSPLSKEVLKQSKENAQINPNESFIISPKNKMHFEEVKVRGISLEALWEKSLSPKTKEKIHALKNFDFNAINYPAFKKGESLATRVSNGMILNAIAKECEGFLGGSADLAPSNNTHLKHSGDFPLGQNLHFGIREHAMGAITNALAAYGLFVPFCATFFVFSDYLMPSIRLSALMKLKALFIFTHDSIGVGEDGATHQPIEQLSHLRALPHFYAFRPSDAFENKACMQVALSLNAPSALILSRQNLSVLDEVSKEQVLKGAYVKHHSKDPIITLVASGSEVSLALESAKILERENIPTQVVSAPCFDLLVEQDESYFKELFKGKVLVIEASRAIEWYRFADKIIGMDSFGSSAKGDKLFEKFGFSVENITAQAKRLLNA

SEQ ID NO: 6654 - protein, 646 aa, Helicobacter pylori
  misc_feature (B) LOCATION 1...646
  hypothetical: YES
KWKNLMQLSNADLERLKSMANTLRFLCADMIDKANSGHPGVCLGLADVMVVLSLHLNLNPTNPKWLNRDRLVFSGGHASALVYSLLHLWGFDLSLDDLKRFRQLHSKTPGHPELHHTEGIEITTAPLGQGFANAVGFSMASQYAQTLLDKEAISHKVYCLCGDGDLQEGISYESTSLAGHLRLDNLIVIYDSNQISIEGAINISFSEQVKTRFLAQNWEVLECDGHDYQAIHNALEEAKKSHKPTLLIAHTIIGKGAIGLEGSEKTHGSPLSKEVLKQSKENAQINPNESFIISPKNKMHFEEVKVRGISLEALWEKSLSPKTKEKIHALKNFDFNAINYPAFKKGESLATRVSNGMILNAIAKECEGFLGGSADLAPSNNTHLKHSGDFPLGQNLHFGIREHAMGAITNALAAYGLFVPFCATFFVFSDYLMPSIRLSALMKLKALFIFTHDSIGVGEDGATHQPIEQLSHLRALPHFYAFRPSDAFENKACMQVALSLNAPSALILSRQNLSVLDEVSKEQVLKGAYVKHHSKDPIITLVASGSEVSLALESAKILERENIPTQVVSAPCFDLLVEQDESYFKELFKGKVLVIEASRAIEWYRFADKIIGMDSFGSSAKGDKLFEKFGFSVENITAQAKRLLNA

SEQ ID NO: 6655 - protein, 104 aa, Helicobacter pylori
  misc_feature (B) LOCATION 1...104
  hypothetical: YES
DFSMSMQTAPIKKIILSHLQAKKNQEKIIAITAYDALFAQIFDPLVDVILVGDSLNMSFFNQNDTLSASVKMMLYHTKAVCAGANTPFIITDMPFGDCEDYIQP

SEQ ID NO: 6656 - protein, 152 aa, Helicobacter pylori
  misc_feature (B) LOCATION 1...152
  hypothetical: YES
MSMQTAPIKKITLSHLQAKKNQEKIIAITAYDALFAQIFDPLVDVILVGDSLNMSLFNQNDTLSASVKMMLYHTKTVCAGAKIPFIITDMPFGSYKDEKTALKNAIRVYKETQASAIKLEGGKEKAKLVKTLTDEGVIVVGHIGLMPQFVRS

SEQ ID NO: 6657 - protein, 97 aa, Helicobacter pylori
  misc_feature (B) LOCATION 1...97
  hypothetical: YES
LSLEEAGVGLLVLEGITTPIAQTITQKIKIPTIGIGSGKDCDGQILVWSDMLGFFDSFKPKFVREYLKGKELIQNAIQQYADDVKKGNFPNELESYH

SEQ ID NO: 6658 - protein, 213 aa, Helicobacter pylori
  misc_feature (B) LOCATION 1...213
  hypothetical: YES
PRASRFLYQSSLKKSARNAILSLSPYYNRPTQQGLFEHYKTIAQSVEIPVMLYDVPSRTGVSIEVPTALKLFREVPNIKAIKEASGSLKRVTELHYYEKDFKIFSGEDSLNHSIMFSGGCGVISVTGNLMPNLISQMVNCALKFEYQQALEIQNKLLICIKALFVETNPIPIKMAMHLAGLIENPSYRLPLVAPSKETIKLLEKTLQQYEVIA

SEQ ID NO: 6659 - protein, 212 aa, Helicobacter pylori
  misc_feature (B) LOCATION 1...212
  hypothetical: YES
RASRFLYQSSLKKSARNAILSLSPYYNRPTQQGLFEHYKTIAQSVEIPVMLYDVPSRTGVSIEVPTALKLFREVPNIKAIKEASGSLKRVTELHYYEKDFKIFSGEDSLNHSIMFSGGCGVISVTGNLMPNLISQMVNCALKFEYQQALEIQNKLLICIKALFVETNPIPIKMAMHLAGLIENPSYRLPLVAPSKETIKLLEKTLQQYEVIA

SEQ ID NO: 6660 - protein, 300 aa, Helicobacter pylori
  misc_feature (B) LOCATION 1...300
  hypothetical: YES
MQFHSSSALITPFKKDLSVDEAAYETLIKRQIFQGMDACVPVGTTGESATLTHKEHMRCIEIAIETCKSTKTPSNSRMKVLAGVGSNATSESLSLAKFAQKIGADAILCVSPYYNRPTQQGLFEHYKTIAQSVEIPVMLYDVPSRTGVSIEVPTALKLFREVPNIKAIKEASGSLKRVTELHYYEKDFKIFSGEDSLNHSIMFSGGCGVISVTGNLMPNLISQMVNCALKFEYQQALEIQNKLFDLHQALFVETNPIPIKMAMHLAGLIENPSYRLPLVAPSKETIKLLEKTLQQYEVIA

SEQ ID NO: 6661 - protein, 96 aa, Helicobacter pylori
  misc_feature (B) LOCATION 1...96
  hypothetical: YES
RTEMAHILVSGATSGFGLEIAKAFLQKNHVVFGTGRRQENLQKLQLAYPKRFIPLCFDLQNKPETKRAIETIFSMTDRIDALINNAGLALGLEQGL

SEQ ID NO: 6662 - protein, 163 aa, Helicobacter pylori
  misc_feature (B) LOCATION 1...163
  hypothetical: YES
GLNKAYECELDDWEVMIDTNIKGLLHLTRLILPSMIEHDQGTIINLGSIAGTYAYPGGNVYGASKAFVKQFSLNLRADLAGTNIRVSNVEPGLCGETEFSMVRFKGDKIKAQSVYENTLYLKPQDIANIVTRIYEQPSHVNINRIEIMPTSQTFAPLPTHKNP

SEQ ID NO: 6663 - protein, 231 aa, Helicobacter pylori
  misc_feature (B) LOCATION 1...231
  hypothetical: YES
MAHILVSGATSGFGLEIAKAFLQKNHVVFGTGRRQENLQKLQLAYPKRFIPLCFDLQNKPETKRAIETIFSMTDRIDALINNAGLALGLNKAYECELDDWEVMIDTNIKGLLHLTRLILPSMIEHDQGTIINLGSIAGTYAYPGGNVYGASKAFVKQFSLNLRADLAGTNIRVSNVEPGLCGETEFSMVRFKGDKIKAQSVYENTLYLKPQDIANIVLGFTNNPRMSISTA

SEQ ID NO: 6664 - protein, 61 aa, Helicobacter pylori
  misc_feature (B) LOCATION 1...61
  hypothetical: YES
VRTTYKIQGRGPVMITELDANKLGIRHGEIVEVFNARGRLLAGAFVTKNIRQGVLSIQEGA

SEQ ID NO: 6665 - protein, 88 aa, Helicobacter pylori
  misc_feature (B) LOCATION 1...88
  hypothetical: YES
MITELDANKLGIRHGEIVEVFNARGRLLAGAFVTKNIRQGVLSIQEGAWYDPEDVNTRNPRCNAGSVNTLTSSRPTSSMTRSYFTSIR

SEQ ID NO: 6666 - protein, 115 aa, Helicobacter pylori
  misc_feature (B) LOCATION 1...115
  hypothetical: YES
MITELDANKLGIRHGEIVEVFNARGRLLAGAFVTKNIRQGVLSIQEGAWYDPEDVNTRNPRCNAGSVNTLTSSRPTSSMTQAISVNTALVNIRRLRKYELVKPYHSISTPSIIGA

SEQ ID NO: 6667 - protein, 209 aa, Helicobacter pylori
  misc_feature (B) LOCATION 1...209
  hypothetical: YES
NGRPNHWSEPEKIQELADLFVSKRTFLAGNWTIQRAQHGEQPDWALIVLASMIGQVGLSGGGFGFSMHYGGNAQASSGARVVPMISQGNNAVKSVIPASRVSEAILNPDKEIDFKGKKLKLPKIKMIYNCGANLLGHEADTNELIRALRTLDCVIVHEPWWTPTAKFADIIFASTSTMERDDITFGGSYSKNVVYAMRKVVEPVYESKD

SEQ ID NO: 6668 - protein, 305 aa, Helicobacter pylori
  misc_feature (B) LOCATION 1...305
  hypothetical: YES
RRTMSISRRSILKKIPIALASTNVLKAVGVFEKVKSIPHATHFGPFIAKVQNGVIKDIVPQKSDYNPTMMLKAMADRVYSDSRVKYPCVRKSFLENKKNHKELRGREEFVRVSWDMALDLAAKKVKEIPKENISNASYGGWGHAGSLHRCNNLAWRFFNTTLGGAIGTDGEYSNGAAARINPMIVGDMEVYSQQTTHEEMIKNCKVYVMWGADLFKCNRIDYFVPNHVNDSYYPKYKRAGIKLVRIDPIYAETAQAFNAEWIPIDPNTDVALMLGMMHHLYTSNQYDKAFIAKYTDGLIDFYPIF

SEQ ID NO: 6669 - protein, 557 aa, Helicobacter pylori
  misc_feature (B) LOCATION 1...557
  hypothetical: YES
MSISRRSILKKIPIALASTNVLKAVGVFEKVKSIPHATHFGPFIAKVQNGVIKDIVPQKSDYNPTMMLKAMADRVYSDSRVKYPCVRKSFLENKKNHKELRGREEFVRVSWDMALDLAAKKVKEIPKENISNASYGGWGHAGSLHRCNNLAWRFFNTTLGGAIGTDGEYSNGAAARINPMIVGDMEVYSQQTTHEEMIKNCKVYVMWGADLFKCNRIDYFVPNHVNDSYYPKYKRAGIKFISIDPIYTETAQAFNAEWIPIRPNTDVALMLGMMHHLYTSNQYDKAFIAKYTDGFDRFLPYLLGESDKAPKTLEWASQITGVSAEKIQELADLFVSKRTFLAGNWTIQRAQHGEQPDWALIVLASMIGQVGLSGGGFGFSMHYGGNAQASSGARVVPMISQGNNAVKSVIPASRVSEAILNPDKEIDFKGKKLKLPKIKMIYNCGANLLGHEADTNELIRALRTLDCVIVHEPWWTPTAKFADIIFASTSTMERDDITFGGSYSKNVVYAMRKVVEPVYESKDDYEIFRQLALRVGGNETEQRFTELRVTWNGLRSL

SEQ ID NO: 6670 - protein, 558 aa, Helicobacter pylori
  misc_feature (B) LOCATION 1...558
  hypothetical: YES
MSISRRSILKKIPIALASTNVLKAVGVFEKVKSIPHATHFGPFIAKVQNGVIKDIVPQKSDYNPTMMLKAMADRVYSDSRVKYPCVRKSFLENKKNHKELRGREEFVRVSWDMALDLAAKKVKEIPKENISNASYGGWGHAGSLHRCNNLAWRFFNTTLGGAIGTDGEYSNGAAARINPMIVGDMEVYSQQTTHEEMIKNCKVYVMWGADLFKCNRIDYFVPNHVNDSYYPKYKRAGIKFISIDPIYTETAQAFNAEWIPIRPNTDVALMLGMMHHLYTSNQYDKAFIAKYTDGFDRFLPYLLGESDKAPKTLEWASQITGVSAEKIQELADLFVSKRTFLAGNWTIQRAQHGEQPDWALIVLASMIGQVGLSGGGFGFSMHYGGNAQASSGARVVPMISQGNNAVKSVIPASRVSEAILNPDKEIDFKGKKLKLPKIKMIYNCGANLLGHEADTNELIRALRTLDCVIVHEPWWTPTAKFADIIFASTSTMERDDITFGGSYSKNVVYAMRKVVEPVYESKDDYEIFRQLALRVGGNETEQRFTESKSYMEWIKGLY

SEQ ID NO: 6671 - protein, 67 aa, Helicobacter pylori
  misc_feature (B) LOCATION 1...67
  hypothetical: YES
AKSDNEPYLALQKADLRRNFQGYTTKKFTQTIGIGVTKYWRKGAIITRKIIRICTIMKKPLIWGIYR

SEQ ID NO: 6672 - protein, 66 aa, Helicobacter pylori
  misc_feature (B) LOCATION 1...66
  hypothetical: YES
KSDNEPYLALQKADLRRNFQGYTTKKFTQTIGIGVTKYWRKGAIITRKIIRICTIMKKPLIWGIYR

SEQ ID NO: 6673 - protein, 113 aa, Helicobacter pylori
  misc_feature (B) LOCATION 1...113
  hypothetical: YES
LHYYEKALDLGHLPVERGVALSQEDVLRKEVIMQMMSNLKLDYSKIEEKFSIDFKAHFKKELEKLKPYEEAGLLSFNSKGFEMTRTGGMLVRNMAMEFDAYLRGGEKHFSKTL

SEQ ID NO: 6674 - protein, 147 aa, Helicobacter pylori
  misc_feature (B) LOCATION 1...147
  hypothetical: YES
FSRLYHEKIHSNHWHWRYEVLAKGSDYYTQNYKDLHYYEKALDLGHLPVERGVALSQEDVLRKEVIMQMMSNLKLDYSKIEEKFSIDFKAHFKKELEKLKPYEEAGLLSFNSKGFEMTRTGGMLVRNMAMEFDAYLRGGEKHFSKTL

SEQ ID NO: 6675 - protein, 183 aa, Helicobacter pylori
  misc_feature (B) LOCATION 1...183
  hypothetical: YES
LKTAFFNHDNLKNPMPLSLYADLPFCRSACYFCACSVIYTSLEEKKVRYISYLKKELALLKNAMDTNREVAQFHYGGGTPTFFSPPQLDGITQSIQEVFPNFSQDIEMSCEIDPRHFTKEHMQTLFDRGFNRLSFGVQDFDLEVQKAIHRIQPFEMVQESVKLARDYGIKSINFDLIYGLPSQ

SEQ ID NO: 6676 - protein, 181 aa, Helicobacter pylori
  misc_feature (B) LOCATION 1...181
  hypothetical: YES
KTAFFNHDNLKNPMPLSLYADLPFCRSACYFCACSVIYTSLEEKKVRYISYLKKELALLKNAMDTNREVAQFHYGGGTPTFFSPPQLDGITQSIQEVFPNFSQDIEMSCEIDPRHFTKEHMQTLFDRGFNRLSFGVQDFDLEVQKAIHRIQPFEMVQESVKLARDYGIKSINFDLIYGLPS

SEQ ID NO: 6677 - protein, 220 aa, Helicobacter pylori
  misc_feature (B) LOCATION 1...220
  hypothetical: YES
MQTIDFEKFSQYSKPGPRYTSYPTAVEFKENFNEESLKTAFFNHDNLKNPMPLSLYTHLPFCRSACYFCACSVIYTSLEEKKVRYISYLKKELALLKNAMDTNREVAQFHYGGGTPTFFSPPQLDGITQSIQEVFPNFSQDIEMSCEIDPRHFTKEHMQTLFDRGFNRLSFGVQDFDLEVQKAIHRIQPFEMVQESVKLARDYGIKSINFDLIYGLPSQT

SEQ ID NO: 6678 - protein, 457 aa, Helicobacter pylori
  misc_feature (B) LOCATION 1...457
  hypothetical: YES
MQTIDFEKFSQYSKPGPRYTSYPTAVEFKENFNEESLKTAFFNHDNLKNPMPLSLYTHLPFCRSACYFCACSVIYTSLEEKKVRYISYLKKELALLKNAMDTNREVAQFHYGGGTPTFFSPPQLDEITQSIQEVFPNFSQDIEMSCEIDPRHFTKEHMQTLFDRGFNRLSFGVQDFDLEVQKAIHRIQPFEMVQESVKLARDYGIKSINFDLIYGLPNQTKEGFLKTLEWVLKLDPDRLAVFNYAHVPWVKKTMRKIDETLLPSPRDKLEILESLISFLEKANYQMIGMDHFAKSDNELYLALQKAELRRNFQGYTTKKFTQTIGIGVTSIGEGSDYYTQNYKDLHYYEKALDLGHLPVERGVALSQEDVLRKEVIMQMMSNLKLDYSKIEEKFSIDFKAHFKKELEKLKPYEEAGLLSFNSKGFEMTRTGGMLVRNMAMEFDAYLRGGEKHFSKTL

SEQ ID NO: 6679 - protein, 111 aa, Helicobacter pylori
  misc_feature (B) LOCATION 1...111
  hypothetical: YES
KQGKRMKVGVYGASGRIGKLLLEELKGGYKGLELSSVFVRQKCETDFSFFSHAPLVTNDLKAFVKACECVVDFSLPKGVDHLLDVLLECPKILGFGTTGFRKRNVLKKCKN

SEQ ID NO: 6680 - protein, 159 aa, Helicobacter pylori
  misc_feature (B) LOCATION 1...159
  hypothetical: YES
KKKRLEKMQKLALKAPLLHAHNMSIGIMMLNQLAFLTSLKLKDADIEIVETHHNLKKDAPSGTALSLYETCTKARGYDEKNALITHREGLRSKESIGIATLRGGDVAGKHTIGFYLEGEYIELSHTATNRSIFAKGALEVALWLKDKAAKKYEISEMFG

SEQ ID NO: 6681 - protein, 254 aa, Helicobacter pylori
  misc_feature (B) LOCATION 1...254
  hypothetical: YES
MKVGVYGASGRIGKLLLEELKGGYKGLELSSVFVRQKCETDFSSFSHAPLVTNDLKAFVKACECVVDFSLPKGVDHLLDVLLECPKILVSGTTGLEKETLEKMQKLALKAPLLHAHNMSIGIMMLNQLAFLTSLKLKDADIEIVETHHNLKKDAPSGTALSLYETCTKARGYDEKNALITHREGLRSKESIGIATLRGGDVAGKHTIGFYLEGEYIELSHTATNRSIFAKGALEVALWLKDKAAKKYEISEMFG

SEQ ID NO: 6682 - protein, 112 aa, Helicobacter pylori
  misc_feature (B) LOCATION 1...112
  hypothetical: YES
RANKGEGMEKLVIGSRGSELALWQANHIKERLKKECSMESEIRIVKTTGDKILDAPLNKIGGKGLFTKELEELLLKGAIDLAVHSLKDVPVVFEKGLDLACITKRADVRDTF

SEQ ID NO: 6683 - protein, 206 aa, Helicobacter pylori
  misc_feature (B) LOCATION 1...206
  hypothetical: YES
CEGHFLSVKFPDLMSLPKGAKVGTTSLRRSMQIKFKRKDLDTESLRGNVQTRLKKLECGEFDAIILAEAGLCRLNVQGAKYRKAFSVKEMIPSMGQGALGVEMLKNHKHFITLQKLNNEESAFCCHLEREFIKGLNGGCQIPIGVHANLMGDEVKIRAVLGLPNGKEVIAKEKQGDKTKAFDLVQELLEEFLQSGAKEILEKAQLF

SEQ ID NO: 6684 - protein, 306 aa, Helicobacter pylori
  misc_feature (B) LOCATION 1...306
  hypothetical: YES
MEKLVIGSRGSELALWQANHIKERLKKECSMESEIRIVKTTGDKILDAPLNKIGGKGLFTKELEELLLKGAIDLAVHSLKDVPVVFEKGLDLACITKRADVRDTFLSVKFPDLMSLPKGAKVGTTSLRRSMQIKFKRKDLDTESLRGNVQTRLKKLECGEFDAIILAEAGLCRLNVQGAKYRKAFSVKEMIPSMGQGALGVEMLKNHKHFITLQKLNNEESAFCCHLEREFIKGLNGGCQIPIGVHANLMGDEVKIRAVLGLPNGKEVIAKEKQGDKTKAFDLVQELLEEFLQSGAKEILEKAQLF

SEQ ID NO: 6685 - protein, 445 aa, Helicobacter pylori
  misc_feature (B) LOCATION 1...445
  hypothetical: YES
DFLMELETHLSKYFTLAFTHKSMSLEMREKLAINSPIMLKELLQTIKTHCPNIKECMVLSTCNRFEIYASLKHGANTHEQKSALLKILAQNKKMSVSDLEKCVLINTDESAVHHVFSVCSSLDSLVVGETQITGQMKNAYKFAFEEKFCSKDLTRLLHFAFKCAAKVRNLTGISKQGVSISSVAVKEVLSIFEKERIKDKKALVIGLGEMAQLVIKHLLNKQFEVLILGRNAAKFEDFVKELEEPKKVGFQNVENLNAYINEYELLFCATSSPNFIVRNSMLKETIFRRFWFDLAVPRNIEKPTLNHIFLYSVDDLEPMVKENVGNRQESRTKAYEIVGLATMEFYQWIQSLEVEPLIKDLRELARISAQKELQKALKKRYVPKEYEGNIEKILHNAFNTFLHHPTIALKKNAQKEESDVLVGAIKNLFNLDKSNAKPCPEFESL

SEQ ID NO: 6686 - protein, 449 aa, Helicobacter pylori
  misc_feature (B) LOCATION 1...449
  hypothetical: YES
MELETHLSKYFTLAFTHKSMSLEMREKLAINSPIMLKELLQTIKTHCPNIKECMVLSTCNRFEIYASLKHGANTHEQKSALLKILAQNKKMSVSDLEKCVLINTDESAVHHVFSVCSSLDSLVVGETQITGQMKNAYKFAFEEKFCSKDLTRLLHFAFKCAAKVRNLTGISKQGVSISSVAVKEALSIFEKERIKDKKALVIGLGEMAQLVIKHLLNKQFEVLILGRNAAKFEDFVKELEEPKKVGFQNVENLNAYINEYELLFCATSSPNFIVRNSMLKETIFRRFWFDLAVPRNIEKPTLNHIFLYSVDDLEPMVKENVGNRQESRTKAYEIVGLATMEFYQWIQSLEVEPLIKDLRELARISAQKELQKALKKRYVPKEYEGNIEKILHNAFNTFLHHPTIALKKNAQKEESDVLVGAIKNLFNLDKSNANHAQNLNLYKCEYYEE

SEQ ID NO: 6687 - protein, 163 aa, Helicobacter pylori
  misc_feature (B) LOCATION 1...163
  hypothetical: YES
MMREILTNRFFPSLFKKRLDFSNRVVLGLGSNLKNPLKILKSCFLYFKNHSKIGKIFSSPIYINPPFGYTNQPNFYNATIILKTSLGLRHFFALVFYIERRFGRARKRDFKDAPRTLDIDIIAFNQVILRQNDLTLPHPKWSERDSVLVPLTLQQILFKREEW

SEQ ID NO: 6688 - protein, 167 aa, Helicobacter pylori
  misc_feature (B) LOCATION 1...167
  hypothetical: YES
GRAFMMREILTNRFFPSLFKKRLDFSNRVVLGLGSNLKNPLKILKSCFLYFKNHSKIGKIFSSPIYINPPFGYTNQPNFYNATIILKTSLGLRHFFALVFYIERRFGRARKRDFKDAPRTLDIDIIAFNQVILRQNDLTLPHPKWSERDSVLVPLTLQQILFKREEW

SEQ ID NO: 6689 - protein, 321 aa, Helicobacter pylori
  misc_feature (B) LOCATION 1...321
  hypothetical: YES
VLVDSFNRVIDYIRVSVTKQCNFRCQYCMPTTPLDFFDDEELLPLDNVLEFLKIAIDEGVKKIRITGGEPLLRKGLDEFIAKLHAYNKEVALVLSTNGFSLKKMAKGLKDAGLSRVNVSLDSLKSDRVLKISQKDALKNTLEGIEESLKVGLKLKLNTVVMKGVNDDEILELLEYAKNRSIQIRYIEFMENTHAKSLVKGLKEKEILDLIAQKYKIMGMEKPKQGSSKIYTLENGYQFGIIAPHSDDFCQSCNRIRLASDGKICPCLYYQDAIDAKEAIINKDTKMMKRLLKQSIINKPEKNMWNDKNGGTPTRAFYYTGG

SEQ ID NO: 6690 - protein, 325 aa, Helicobacter pylori
  misc_feature (B) LOCATION 1...325
  hypothetical: YES
GIKGVLVDSFNRVIDYIRVSVTKQCNFRCQYCMPTTPLDFFDDEELLPLDNVLEFLKIAIDEGVKKIRITGGEPLLRKGLDEFIAKLHAYNKEVALVLSTNGFSLKKMAKGLKDAGLSRVNVSLDSLKSDRVLKISQKDALKNTLEGIEESLKVGLKLKLNTVVMKGVNDDEILELLEYAKNRSIQIRYIEFMENTHAKSLVKGLKEKEILDLIAQKYKIMGMEKPKQGSSKIYTLENGYQFGIIAPHSDDFCQSCNRIRLASDGKICPCLYYQDAIDAKEAIINKDTKMMKRLLKQSIINKPEKNMWNDKNGGTPTRAFYYTGG

SEQ ID NO: 6691 - protein, 223 aa, Helicobacter pylori
  misc_feature (B) LOCATION 1...223
  hypothetical: YES
MINNDLTTSKWINLLKNPIINNIPCVLLAGGKSSRFIINNIPINKALMPLKSYPSLLEYQYTRLLKLFKQVIISAKKSYELNAPYLLEKEGGLFSPLFGIHNAFLTLQTPYIFFIAIDTPLVSFESIKILCGIQNFSVVYAKSPTKEHYLISLWHQSILNALNYTLKTQNYRLSDLIKNASSTAIHFDKEEEFLNLNTLKDYELAVQILKEGSNGRRRKDRTP

SEQ ID NO: 6692 - protein, 225 aa, Helicobacter pylori
  misc_feature (B) LOCATION 1...225
  hypothetical: YES
CNMINNDLTTSKWINLLKNPIINNIPCVLLAGGKSSRFIINNIPINKALMPLKSYPSLLEYQYTRLLKLFKQVIISAKKSYELNAPYLLEKEGGLFSPLFGIHNAFLTLQTPYIFFIAIDTPLVSFESIKILCGIQNFSVVYAKSPTKEHYLISLWHQSILNALNYTLKTQNYRLSDLIKNASSTAIHFDKEEEFLNLNTLKDYELAVQILKEGSNGRRRKDRTP

SEQ ID NO: 6693 - protein, 69 aa, Helicobacter pylori
  misc_feature (B) LOCATION 1...69
  hypothetical: YES
KRQVFIKEYRTLEPLKSLEIRLSEAPIDKHNDFLYHKTTYAPFYQNARALIKKGVIFDEIFYNLGFGTH

SEQ ID NO: 6694 - protein, 56 aa, Helicobacter pylori
  misc_feature (B) LOCATION 1...56
  hypothetical: YES
LSEAPIDKHNDFLYHKTTYAPFYQNARALIKKALFLMKSFITRIWNSLRALGVILF

SEQ ID NO: 6695 - protein, 83 aa, Helicobacter pylori
  misc_feature (B) LOCATION 1...83
  hypothetical: YES
DLELTEGARSNLILGIHNGLLTPYFSVGALTGTGVVGLLKKGLVEHAPLKLQNLTSEAKIYCINALYGLVEVGIIGYPMEQKS

SEQ ID NO: 6696 - protein, 401 aa, Helicobacter pylori
  misc_feature (B) LOCATION 1...401
  hypothetical: YES
MIFGDFKYQKSVKKLTATNLNELKNALDFISQNRGKGYFVGYLLYEARLAFLDENFQSQTPFLYFEQFLERKKYPLEPLKEHAFYPKIHSSLDQKTYFKQFKAVKEHLKNGDTYQVNLTMDLLLNTKAKPKRVFKEVIHNQNTPFKAFIENEFGSVLSFSPELFFELEFLDTAIKIITKPMKGTIARSNNPLIDEKNRLFLQNDDKNRSENVMIVDLLRNDLSRLALKNSVKVNQLFEIISLPSVYQMISEIEAQLPLKTSLFEIFKALFPCGSVTGCPKIKTMQIIESLEKRPRGVYCGAIGMVGGKKALFSVPIRTLEKRAHEDFLHLGVGSGVTYKSKASKEYEESFLKSFFVMPKIEFEIVETMRVIKRDQKLEINNKNAHKERLMHSAQYFNFKYR

SEQ ID NO: 6697 - protein, 420 aa, Helicobacter pylori
  misc_feature (B) LOCATION 1...420
  hypothetical: YES
MIFGDFKYQKSVKKLTATNLNELKNALDFISQNRGKGYFVGYLLYEARLAFLDENFQSQTPFLYFEQFLERKKYLVEHLKEHAFYPKIHSSLDQKTYFKQFKAVKEHLKNGDTYQVNLTMDLLLNTKAKPKRVFKEVIHNQNTPFKAFIENEFGSVLSFSPELFFELEFLDTAIKIITKPMKGTIARSNNPLIDEKNRLFLQNDDKNRSENVMIVDLLRNDLSRLALKNSVKVNQLFEIISLPSVYQMISEIEAQLPLKTSLFEIFKALFPCGSVTGCPKIKTMQIIESLEKRPRGVYCGAIGMVGGKKALFSVPIRTLEKRAHEDFLHLGVGSGVTYKSKASKEYEESFLKSFFVMPKIEFEIVETMRVIKRDQKLEINNKNAHKERLMHSAQYFNFNTDENLLDFELEGEGVLRVLIQ

SEQ ID NO: 6698 - protein, 567 aa, Helicobacter pylori
  misc_feature (B) LOCATION 1...567
  hypothetical: YES
MIFGDFKYQKSVKKLTATNLNELKNALDFISQNRGKGYFVGYLLYEARLAFLDENFQSQTPFLYFEQFLERKKYPLEPLKEHAFYPKIHSSLDQKTYFKQFKAVKEHLKNGDTYQVNLTMDLLLNTKAKPKRVFKEVIHNQNTPFKAFIENEFGSVLSFSPELFFELEFLDTAIKIITKPMKGTIARSNNPLIDEKNRLFLQNDDKNRSENVMIVDLLRNDLSRLALKNSVKVNQLFEIISLPSVYQMISEIEAQLPLKTSLFEIFKALFPCGSVTGCPKIKTMQIIESLEKRPRGVYCGAIGMVGGKKALFSVPIRTLEKRAHEDFLHLGVGSGVTYKSKASKEYEESFLKSFFVMPKIEFEIVETMRVIKRDQKLEINNKNAHKERLMHSAQYFNFKYDENLLDFELEKEGVLRVLLNKRGKLIKEYRTLEPLKSLEIRLSEAPIDKHDDFLYHKTAYAPFYQNARALIKKGVIFDEIFYNQDLELTEGARSNLILEIHNRLLTPYFSVGALTGTGVVGLLKKGLVEHAPLKLQDLQRAAKIYCINALYGLVEVGIIGYPMEQKS

SEQ ID NO: 6699 - protein, 310 aa, Helicobacter pylori
  misc_feature (B) LOCATION 1...310
  hypothetical: YES
LNMGGPNSLYEVGVFLKNMFDDPFILTIKNNFMRKMVGKMIVNSRIEKSKKIYEKLGGKSPLTPITFALTERLNELDPSRFYTYAMRYTPPYASMVLQDLALKEIESLVFFSMYPQYSSTTTLSSFNDAFNALKSLETFRPKVRVIERFYADKKLNEIILNTILSALNNCKSQDFVLIFSVHGLPKSIVDAGDTYQQECEHHVSLLKELMQQKNIPFKEVLLSYQSKLGPMKWLEPSTEELIEKHRKSNIIIYPLAFTIDNSETLYELDMQYRLMAERLAVKEYLVCPCLNDSIEFAKFIIELVKNLKSE

SEQ ID NO: 6700 - protein, 325 aa, Helicobacter pylori
  misc_feature (B) LOCATION 1...325
  hypothetical: YES
FRNSATKSPKEAVVLLNMGGPNSLYEVGVFLKNMFDDPFILTIKNNFMRKMVGKMIVNSRIEKSKKIYEKLGGKSPLTPITFALTERLNELDPSRFYTYAMRYTPPYASMVLQDLALKEIESLVFFSMYPQYSSTTTLSSFNDAFNALKSLETFRPKVRVIERFYADKKLNEIILNTILSALNNCKSQDFVLIFSVHGLPKSIVDAGDTYQQECEHHVSLLKELMQQKNIPFKEVLLSYQSKLGPMKWLEPSTEELIEKHRKSNIIIYPLAFTIDNSETLYELDMQYRLMAERLAVKEYLVCPCLNDSIEFAKFIIELVKNLKSE

SEQ ID NO: 6701 - protein, 333 aa, Helicobacter pylori
  misc_feature (B) LOCATION 1...333
  hypothetical: YES
LINEKLNNLENSATKSPKEAVVLLNMGGPNSLYEVGVFLKNMFDDPFILTIKNNFMRKMVGKMIVNSRIEKSKKIYEKLGGKSPLTPITFALTERLNELDPSRFYTYAMRYTPPYASMVLQDLALKEIESLVFFSMYPQYSSTTTLSSFNDAFNALKSLETFRPKVRVIERFYADKKLNEIILNTILSALNNCKSQDFVLIFSVHGLPKSIVDAGDTYQQECEHHVSLLKELMQQKNIPFKEVLLSYQSKLGPMKWLEPSTEELIEKHRKSNIIIYPLAFTIDNSETLYELDMQYRLMAERLAVKEYLVCPCLNDSIEFAKFIIELVKNLKSE

SEQ ID NO: 6702 - protein, 153 aa, Helicobacter pylori
  misc_feature (B) LOCATION 1...153
  hypothetical: YES
MNLEVALKAFETLLPCNKQEVLKNLKPLDLIGRCELLSPNILIDVGHNPHSAKALKEEIKRIFNAPIVLIYNCYQDKDAFLVLEILKSVVKKVLILELHNERIIQLEKLKGILETLGLEHALFEELKENENYLVYGSFLVANAFYERYPKKRD

SEQ ID NO: 6703 - protein, 389 aa, Helicobacter pylori
  misc_feature (B) LOCATION 1...389
  hypothetical: YES
MKNSHGLKAFLETKPKEYHKFDPSRFIQIYKDFKNAFFEIQAKVIHVVGTNGKGSTGRFLTLLLADQGFKVLHFTSPHVFEFRERFYLNGSVVKESVLENAHQQLQSHAFSNACSYFEYATLLAVMLAKDCDYLVLEAGLGGEFDSTNALEKTLSVFTPIDYDHKEFLGDSLESIATTKLKAMGSLNIIAPQQELVLNVAQKIAKDKHAQLIVVQNEISKGVSDYIERHHLAHFLAMNLEVALKAFETLLPCNKQEVLKNLKPLDLIGRCELLSPNILIDVGHNPHSAKALKEEIKRIFNAPIVLIYNCYQDKDAFLVLEILKSVVKKVLILELHNERIIQLEKLKGILETLGLEHALFEELKENENYLVYGSFLVANAFYERYPKKRD

SEQ ID NO: 6704 - protein, 401 aa, Helicobacter pylori
  misc_feature (B) LOCATION 1...401
  hypothetical: YES
LWLKSLMRGNSIMKNSHGLKAFLETKPKEYHKFDPSRFIQIYKDFKNAFFEIQAKVIHVVGTNGKGSTGRFLTLLLADQGFKVLHFTSPHVFEFRERFYLNGSVVKESVLENAHQQLQSHAFSNACSYFEYATLLAVMLAKDCDYLVLEAGLGGEFDSTNALEKTLSVFTPIDYDHKEFLGDSLESIATTKLKAMGSLNIIAPQQELVLNVAQKIAKDKHAQLIVVQNEISKGVSDYIERHHLAHFLAMNLEVALKAFETLLPCNKQEVLKNLKPLDLIGRCELLSPNILIDVGHNPHSAKALKEEIKRIFNAPIVLIYNCYQDKDAFLVLEILKSVVKKVLILELHNERIIQLEKLKGILETLGLEHALFEELKENENYLVYGSFLVANAFYERYPKKRD

SEQ ID NO: 6705 - protein, 403 aa, Helicobacter pylori
  misc_feature (B) LOCATION 1...403
  hypothetical: YES
LNLWLKSLMRGNSIMKNSHGLKAFLETKPKEYHKFDPSRFIQIYKDFKNAFFEIQAKVIHVVGTNGKGSTGRFLTLLLADQGFKVLHFTSPHVFEFRERFYLNGSVVKESVLENAHQQLQSHAFSNACSYFEYATLLAVMLAKDCDYLVLEAGLGGEFDSTNALEKTLSVFTPIDYDHKEFLGDSLESIATTKLKAMGSLNIIAPQQELVLNVAQKIAKDKHAQLIVVQNEISKGVSDYIERHHLAHFLAMNLEVALKAFETLLPCNKQEVLKNLKPLDLIGRCELLSPNILIDVGHNPHSAKALKEEIKRIFNAPIVLIYNCYQDKDAFLVLEILKSVVKKVLILELHNERIIQLEKLKGILETLGLEHALFEELKENENYLVYGSFLVANAFYERYPKKRD

SEQ ID NO: 6706 - protein, 273 aa, Helicobacter pylori
  misc_feature (B) LOCATION 1...273
  hypothetical: YES
MEIKTFLECALKEDLGHGDLFERVLEKDFKATAFVRAKQEGVFSGEKYALELLQMTGIECVQNIKDKERFKPKDTLMEIRGDFSMLLKIERTLLNLLQHSSGIATLTSRFVEALNSPKVRLLDTRKTRPLLRIFEKYSVLNGGASNHRLGLDDALMLKDTHLKHVKDLKSFLTHARKNLPFTAKIEIECESFEEAKNAMSAGADIVMCDNMSVGETKEIAAYREAHYPFVLLEASGNISLESINAYAKSGVDAISVGALIHQATFIDMHMKMA

SEQ ID NO: 6707 - protein, 279 aa, Helicobacter pylori
  misc_feature (B) LOCATION 1...279
  hypothetical: YES
NDGVILMEIKTFLECALKEDLGHGDLFERVLEKDFKATAFVRAKQEGVFSGEKYALELLQMTGIECVQNIKDKERFKPKDTLMEIRGDFSMLLKIERTLLNLLQHSSGIATLTSRFVEALNSPKVRLLDTRKTRPLLRIFEKYSVLNGGASNHRLGLDDALMLKDTHLKHVKDLKSFLTHARKNLPFTAKIEIECESFEEAKNAMSAGADIVMCDNMSVGETKEIAAYREAHYPFVLLEASGNISLESINAYAKSGVDAISVGALIHQATFIDMHMKMA

SEQ ID NO: 6708 - protein, 70 aa, Helicobacter pylori
  misc_feature (B) LOCATION 1...70
  hypothetical: YES
MEKFFNQFFENIGEDKNREGLKETPKRVQELWKFLYKGYKEDPRVALKSAYFQGVCDEMIVAQNISSCLF

SEQ ID NO: 6709 - protein, 180 aa, Helicobacter pylori
  misc_feature (B) LOCATION 1...180
  hypothetical: YES
MEKFFNQFFENIGEDKNREGLKETPKRVQELWKFLYKGYKEDPRVALKSAYFQGVCDEMIVAQNIEFYSTCEHHLLPFFGNISVGYIPKEKIVGISAIAKLIEIYSKRLQIQERLTTQIAETFDEIIEPRGVIVVCEAKHLCMSMQGVQKQNAIIKTSVLRGLFKKDPKTRAEFMQLLKS

SEQ ID NO: 6710 - protein, 180 aa, Helicobacter pylori; identical to SEQ ID NO: 6709
  misc_feature (B) LOCATION 1...180
  hypothetical: YES

SEQ ID NO: 6711 - protein, 79 aa, Helicobacter pylori
  misc_feature (B) LOCATION 1...79
  hypothetical: YES
DSFYSFNQHAFNQHAFNRHAKTYHLFAHIQQQIAIYLVQFLKQKHYAKVLDLGSESGAVFNALEQQNIVIEILSLWIIP

SEQ ID NO: 6712 - protein, 142 aa, Helicobacter pylori
  misc_feature (B) LOCATION 1...142
  hypothetical: YES
NFIALDNSMNMLKLHPTHSINIQKISLEHANFEEHVFCDYDLVVSSSSLQWARDLKSVLEKIALSSKEAALAIHTDFSLHEVHEFLGTPSPLRDLKTLKSLIKNAFKHFQIELENKRFALYFNRKQDCLNYLKKCDLLGVQR

SEQ ID NO: 6713 - protein, 246 aa, Helicobacter pylori
  misc_feature (B) LOCATION 1...246
  hypothetical: YES
VLDSFYSFNQHAFNQHAFNRHAKTYHLFAHIQQQIAIYLVQFLKQKHYAKVLDLGSGSGAVFNALEQQNIVIENFIALDNSMNMLKLHPTHSINIQKISLEHANFEEHVFCDYDLVVSSSSLQWARDLKSVLEKIALSSKEAALAIHTDFSLHEVHEFLGTPSPLRDLKTLKSLIKNAFKHFQIELENKRFALYFNRKQDCLNYLKKCGLLGGSTLSFKQKKHFFQNMAFEKLSYEVLLFSGIRRS

SEQ ID NO: 6714 - protein, 57 aa, Helicobacter pylori
  misc_feature (B) LOCATION 1...57
  hypothetical: YES
ALRILKQEAISVGGDFATPRDCILAKEPFYDGVLIASAKQLERLIVKCHSQPFGLNI

SEQ ID NO: 6715 - protein, 312 aa, Helicobacter pylori
  misc_feature (B) LOCATION 1...312
  hypothetical: YES
LAKEPFYDGVLIASAKQLERLIVKCHSQPFGLKHLAQELKSHLKAKKPNAPQIMAILNLTPDSFYEKSRFDSKKALEEIYQWLEKGITLIDIGAASSRPQSEIIDPKVEQDRLKEILLEIKSQKLYQRAQFSIDTYHATTAQMALEHYFSILNDVSGFNSIEMLEVARDYQPTCILMHAQKTPKDMQENVFYHNLFDEMDRFFKEKLEVLEKYTLQDIILDIGFGFAKLKEHNLALIKHLSHFLKFKKPLLVGASRKNTIGLITGREVQDRLAGTLSLHLMALQNGASILRAHDIDEHIDLIKVFKSLEETD

SEQ ID NO: 6716 - protein, 380 aa, Helicobacter pylori
  misc_feature (B) LOCATION 1...380
  hypothetical: YES
MIVKRLNPDALKSALQKIGPEKIAQTHMRQKGVSFVFEIQHLPLSAALILKQEAISVGGDFATPRDCILAKEPFYDGVLIASAKQLERLIVKCHSQPFGLKHLAQELKSHLKAKKPNAPQIMAILNLTPDSFYEKSRFDSKKALEEIYQWLEKGITLIDIGAASSRPQSEIIDPKVEQDRLKEILLEIKSQKLYQRAQFSIDTYHATTAQMALEHYFSILNDVSGFNSIEMLEVARDYQPTCILMHAQKTPKDMQENVFYHNLFDEMDRFFKEKLEVLEKYTLQDIILDIGFGFAKLKEHNLALIKHLSHFLKFKKPLLVGASRKNTIGLITGREVQDRLAGTLSLHLMALQNGASILRAHDIDEHIDLIKVFKSLEETD

SEQ ID NO: 6717 - protein, 345 aa, Helicobacter pylori
  misc_feature (B) LOCATION 1...345
  hypothetical: YES
MILYIHIPFCENKCGYCAFNSYENKHGLKEEYIQALCLDLKHALSQTDEPIESIFIGGGTPNTLSVKAFERIFESIHQHASLSMDCEITTEANPELISKAWCQGLKDLGINRLSLGVQSFREDKLLFLERQHSKNIAPVIEIIFKSGIENISIDLIYNTPLDNETSLKEELKLAKELPINHLSAYALSIEKNTNLEKNAKKPSSVDFDNVVREVLEGFFFKQYEVSNYARNYQVKHNLAYWGAKDYLGCGAGAVGCVANERFYAKKLIENYIKDPLKRQVETLNKQDKCLEKLFLGLRCELGVELSLLDENKVKFLIEENKAFIKNNRLIASDFFMADEMALWLL

SEQ ID NO: 6718 - protein, 352 aa, Helicobacter pylori
  misc_feature (B) LOCATION 1...352
  hypothetical: YES
MKMGEINMILYIHIPFCENKCGYCAFNSYENKHGLKEEYIQALCLDLKHALSQTDEPIESIFIGGGTPNTLSVKAFERIFESIHQHASLSMDCEITTEANPELISKAWCQGLKDLGINRLSLGVQSFREDKLLFLERQHSKNIAPVIEIIFKSGIENISIDLIYNTPLDNETSLKEELKLAKELPINHLSAYALSIEKNTNLEKNAKKPSSVDFDNVVREVLEGFFFKQYEVSNYARNYQVKHNLAYWGAKDYLGCGAGAVGCVANERFYAKKLIENYIKDPLKRQVETLNKQDKCLEKLFLGLRCELGVELSLLDENKVKFLIEENKAFIKNNRLIASDFFMADEMALWLL

SEQ ID NO: 6719 - protein, 364 aa, Helicobacter pylori
  misc_feature (B) LOCATION 1...364
  hypothetical: YES
YNYKFKLCLKNEMKMGGINMILYIHIPFCENKCGYCAFNSYENKHGLKEEYIQALCLDLKHALSQTDEPIESIFIGGGTPNTLSVKAFERIFESIHQHASLSMDCEITTEANPELISKAWCQGLKDLGINRLSLGVQSFREDKLLFLERQHSKNIAPVIEIIFKSGIENISIDLIYNTPLDNETSLKEELKLAKELPINHLSAYALSIEKNTNLEKNAKKPSSVDFDNVVREVLEGFFFKQYEVSNYARNYQVKHNLAYWGAKDYLGCGAGAVGCVANERFYAKKLIENYIKDPLKRQVETLNKQDKCLEKLFLGLRCELGVELSLLDENKVKFLIEENKAFIKNNRLIASDFFMADEMALWLL

SEQ ID NO: 6720 - protein, 217 aa, Helicobacter pylori
  misc_feature (B) LOCATION 1...217
  hypothetical: YES
VHSQRIAPYKTLILNELHYYPLESDLTPFNALIFTSKNAVFSLLETLNNSPKLKMLQNIPAYALSEPTAKTLQDHHFKTAFIGKKAHGKEFAKEILPLLEKKSVLYLRAKEIASSLDTILLEHGINLQQAVVYENKLKHLTLSEQNALKPQEKSVLIFTAISHAKAFLHYFEFLKSYTAISIGNTTAHYLQEQGIQSYTAQKPSLESCLELALNLKS

SEQ ID NO: 6721 - protein, 223 aa, Helicobacter pylori
  misc_feature (B) LOCATION 1...223
  hypothetical: YES
MREIVWVHSQRIAPYKTLILNELHYYPLESDLTPFNALIFTSKNAVFSLLETLNNSPKLKMLQNIPAYALSEPTAKTLQDHHFKTAFIGKKAHGKEFAKEILPLLEKKSVLYLRAKEIASSLDTILLEHGINLQQAVVYENKLKHLTLSEQNALKPQEKSVLIFTAISHAKAFLHYFEFLKSYTAISIGNTTAHYLQEQGIQSYTAQKPSLESCLELALNLKS

SEQ ID NO: 6722 - protein, 227 aa, Helicobacter pylori
  misc_feature (B) LOCATION 1...227
  hypothetical: YES
KKLGMREIVWVHSQRIAPYKTLILNELHYYPLESDLTPFNALIFTSKNAVFSLLETLNNSPKLKMLQNIPAYALSEPTAKTLQDHHFKTAFIGKKAHGKEFAKEILPLLEKKSVLYLRAKEIASSLDTILLEHGINLQQAVVYENKLKHLTLSEQNALKPQEKSVLIFTAISHAKAFLHYFEFLKSYTAISIGNTTAHYLQEQGIQSYTAQKPSLESCLELALNLKS

SEQ ID NO: 6723 - protein, 217 aa, Helicobacter pylori
  misc_feature (B) LOCATION 1...217
  hypothetical: YES
MFDANCLKLMFVAGSQDFYHIKGDRTNALLDTLELALQSKITAFQFRQKGDLALQDPVEIKRLALECQKLCKKYGTPFIINDEVRLALELKADGVHVGQEDMAIEEVVTLCQKRLFIGLSVNTLEQALKARHLDHIAYLGVGPIFPTPSKKDAKEVVGVNLLKKIHDSGVEKPLIAIGGITTDNASKLQKFSGIAVISAITQAKDKALAVEKLLKNA

SEQ ID NO: 6724 - protein, 224 aa, Helicobacter pylori
  misc_feature (B) LOCATION 1...224
  hypothetical: YES
ICGASKSMFDANCLKLMFVAGSQDFYHIKGDRTNALLDTLELALQSKITAFQFRQKGDLALQDPVEIKRLALECQKLCKKYGTPFIINDEVRLALELKADGVHVGQEDMAIEEVVTLCQKRLFIGLSVNTLEQALKARHLDHIAYLGVGPIFPTPSKKDAKEVVGVNLLKKIHDSGVEKPLIAIGGITTDNASKLQKFSGIAVISAITQAKDKALAVEKLLKNA

SEQ ID NO: 6725 - protein, 69 aa, Helicobacter pylori
  misc_feature (B) LOCATION 1...69
  hypothetical: YES
TLLHQISKTAPLNGFSCKIKESLRRFVMLKELRQKRPLVHNITNYVVAQFVANGLLALGVSPLMSDAIA

SEQ ID NO: 6726 - protein, 107 aa, Helicobacter pylori
  misc_feature (B) LOCATION 1...107
  hypothetical: YES
WVFLRESKGLDSKHSATPIEIVKRAAQKYSVIAVMTGKTDYVSDGKKVLSITGGSEYLAAITGAGCLHAAACASFLSLKKDPLDSMVQLCAFYKQAAFTCAKKSVRK

SEQ ID NO: 6727 - protein, 252 aa, Helicobacter pylori
  misc_feature (B) LOCATION 1...252
  hypothetical: YES
MLKELRQKRPLVHNITNYVVAQFVANGLLALGVSPLMSDAIAEMPDLAKISDALAINIGTLNERTILCAKEAIKRYKALNKPIVLDPVGCSASALRYDTSLELLESKGISTLRGNAAELGSLVGISCESKGLDSKHSATPIEIVKRAAQKYSVIAVMTGKTDYVSDGKKVLSITGGSEYLAAITGAGCLHAAACASFLSLKKDPLDSMVQLCAFYKQAAFSAQKKALENNGSNGSFLFYFLDALRLAHRVRK

SEQ ID NO: 6728 - protein, 277 aa, Helicobacter pylori
  misc_feature (B) LOCATION 1...277
  hypothetical: YES
LHQISKTAPLNGFSCKIKESLRRFVMLKELRQKRPLVHNITNYVVAQFVANGLLALGVSPLMSDAIAEMPDLAKISDALAINIGTLNERTILCAKEAIKRYKALNKPIVLDPVGCSASALRYDTSLELLESKGISTLRGNAAELGSLVGISCESKGLDSKHSATPIEIVKRAAQKYSVIAVMTGKTDYVSDGKKVLSITGGSEYLAAITGAGCLHAAACASFLSLKKDPLDSMVQLCAFYKQAAFSAQKKALENNGSNGSFLFYFLDALRLAHRVRK

SEQ ID NO: 6729 - protein, 284 aa, Helicobacter pylori
  misc_feature (B) LOCATION 1...284
  hypothetical: YES
LHQISKTAPLNGFSCKIKESLRRFVMLKELRQKRPLVHNITNYVVAQFVANGLLALGVSPLMSDAIAEMPDLAKISDALAINIGTLNERTILCAKEAIKRYKALNKPIVLDPVGCSASALRYDTSLELLESKGISTLRGNAAELGSLVGISCESKGLDSKHSATPIEIVKRAAQKYSVIAVMTGKTDYVSDGKKVLSITGGSEYLAAITGAGCLHAAACASFLSLKKDPLDSMVQLCAFYKQAAFSAQKKALENNGSNGSFLFYFLDALSLPIELENSLIKEEL

SEQ ID NO: 6730 - protein, 329 aa, Helicobacter pylori
  misc_feature (B) LOCATION 1...329
  hypothetical: YES
MTTKRVNTATNKIMTLNTFLDTCFLFFISILFYLSIPIYPNKVVVVPQGSLKKVFFSLKEQGVDINALDLLLLRLMGMPKKGYIDMGDGALRKGDFLVRLIKAKTAQKSVTLIPGETRYFFTQILSETYQLETSDLNEAYESIAPRLNGAVIEDGVIWPDTYHLPLGEDAFKIMQTLIGQSMKKHEALSKQWLGYYHKEEWFEKIILASIVQKEAANVEEMPLIASVIFNRLKKGMPLQMDGALNYQEFSHAKVTKERIKTDNTPYNTYKFKGLPKNPVGSVSLEAVRAVVFPKKTDFLYFVKMPDKKHAFSATYKEHLKNINISNNHF

SEQ ID NO: 6731 - protein, 329 aa, Helicobacter pylori; identical to SEQ ID NO: 6730
  misc_feature (B) LOCATION 1...329
  hypothetical: YES

SEQ ID NO: 6732 - protein, 44 aa, Helicobacter pylori
  misc_feature (B) LOCATION 1...44
  hypothetical: YES
GVEKILKVMGNQGHIFNLGHGMLPDLPRENAKYLVQLVHAKTRR

SEQ ID NO: 6733 - protein, 293 aa, Helicobacter pylori
  misc_feature (B) LOCATION 1...293
  hypothetical: YES
GFMMIFIDACFRKETPYTPIWMMRQAGRYLSEYQESRKKAGSLLELCKNSDLATEVTLQPVEILGVDAAILFSDILVVPLEMGLNLEFIPKKGPHFLETITDLKSVESLKVGVYKQLNYVYDTISQTRQKLSKEKALIGFCGSPWTLATYMIEGEGSKSYAKSKKMLYSEPEVLKALLEKLSLELIEYLSLQIQAGVNAVMIFDSWASALEKEAYLEFSWDYLKKISKELKKRYAHIPVILFPKGIGAYLDSIDGEFDLFGLDGGTPLTAAKKKLAVIIFLQGIYNPPAFMIK

SEQ ID NO: 6734 - protein, 292 aa, Helicobacter pylori
  misc_feature (B) LOCATION 1...292
  hypothetical: YES
GFMMIFIDACFRKETPYTPIWMMRQAGRYLSEYQESRKKAGSLLELCKNSDLATEVTLQPVEILGVDAAILFSDILVVPLEMGLNLEFIPKKGPHFLETITDLKSVESLKVGVYKQLNYVYDTISQTRQKLSKEKALIGFCGSPWTLATYMIEGEGSKSYAKSKKMLYSEPEVLKALLEKLSLELIEYLSLQIQAGVNAVMIFDSWASALEKEAYLEFSWDYLKKISKELKKRYAHIPVILFPKGIGAYLDSIDGEFDLFGLDGGTPLTAAKKKLAVIIFLQGIYNPPAFMI

SEQ ID NO: 6735 - protein, 339 aa, Helicobacter pylori
  misc_feature (B) LOCATION 1...339
  hypothetical: YES
MIFIDACFRKETPYTPIWMMRQAGRYLSEYQESRKKAGSFLELCKNSDLATEVTLQPVEILGVDAAILFSDILVVPLEMGLNLEFIPKKGPHFLETITDLKSVESLKVGVYKQLNYVYDTISQTRQKLSKEKALIGFCGSPWTLATYMIEGEGSKSYAKSKKMLYSEPEVLKALLEKLSLELIEYLSLQIQAGVNAVMIFDSWASALEKEAYLEFSWDYLKKISKELKKRYAHIPVILFPKGIGAYLDSIDGEFDVFGVDWGTPLTAAKKILGGKYVLQGNLEPTRLYDKNALEEGVEKILKVMGNQGHIFNLGHGMLPDLPRENAKYLVQLVHAKTRR

SEQ ID NO: 6736 - protein, 112 aa, Helicobacter pylori
  misc_feature (B) LOCATION 1...112
  hypothetical: YES
MPGVYQMSIEPLLKECEELVGLGIKAVLLFGIPKHKDATGSHALNKDHIVAKATREIKKRFKDLIVIADLCFCEYTDHGHCGILENASVSNDKTLKILNLQGLILLKAVWIF

SEQ ID NO: 6737 - protein, 323 aa, Helicobacter pylori
  misc_feature (B) LOCATION 1...323
  hypothetical: YES
MFKRLRRLRSSENLRAMVRETRLNINDFIAPLFVIESDSGIKNEISSMPGVYQMSIEPLLKECEELVGLGIKAVLLFGIPKHKDATGSHALNKDHIVAKATREIKKRFKDLIVIADLCFCEYTDHGHCGILENASVSNDKTLKILNLQGLILAESGVDILAPSNMMDGNVLSLRKALDKAGYFHTPIMSYSTKFASSYYGPFRDVANSPPSFGDRKSYQMDYANQKEALLESLEDEKQGADILMVKPALAYLDIVKEIRDHTLLPLALYNVSGEYAMLKLAQKHNLINYESVLLETMTCFKRAGADMIISYHAKEVANLLQRN

SEQ ID NO: 6738 - protein, 330 aa, Helicobacter pylori
  misc_feature (B) LOCATION 1...330
  hypothetical: YES
RKTKRENMFKRLRRLRSSENLRAMVRETRLNINDFIAPLFVIESDSGIKNEISSMPGVYQMSIEPLLKECEELVGLGIKAVLLFGIPKHKDATGSHALNKDHIVAKATREIKKRFKDLIVIADLCFCEYTDHGHCGILENASVSNDKTLKILNLQGLILAESGVDILAPSNMMDGNVLSLRKALDKAGYFHTPIMSYSTKFASSYYGPFRDVANSPPSFGDRKSYQMDYANQKEALLESLEDEKQGADILMVKPALAYLDIVKEIRDHTLLPLALYNVSGEYAMLKLAQKHNLINYESVLLETMTCFKRAGADMIISYHAKEVANLLQRN

SEQ ID NO: 6739 - protein, 339 aa, Helicobacter pylori
  misc_feature (B) LOCATION 1...339
  hypothetical: YES
MDGYGFKMQDLGQKTQVIQHIFAGDDVSALEVKENECVKIMTGAMVPKGIETIVPIECMLESHKDFALAPKDFKIHANIRQKGENASLNSVLVPKNTRLNYGHIALIASQGFKEIKAFRKLKIALFSSGDELVPLGQNALECQVYDVNSVGVFNMLKNYNTHFLGVLKDDKNLQLKILELQGYDVILSSAGVSVGDKDFFKDALKERNALFYYEKVNLKPGKPVTLAQLNQSIIIGLPGNPLSCLLVLRVLILPLLERLSLNKDFKLKPFKAQINAPLKLNNKRTHLILGNYSNHQFIPYNNRYESGAIQALAQVDSITLIDEGVGLVQGEIEILRFEN

SEQ ID NO: 6740 - protein, 357 aa, Helicobacter pylori
  misc_feature (B) LOCATION 1...357
  hypothetical: YES
LAEDIICVHALPKFNQSAMDGYGFKMQDLGQKTQVIQHIFAGDDVSALEVKENECVKIMTGAMVPKGIETIVPIECMLESHKDFALAPKDFKIHANIRQKGENASLNSVLVPKNTRLNYGHIALIASQGFKEIKAFRKLKIALFSSGDELVPLGQNALECQVYDVNSVGVFNMLKNYNTHFLGVLKDDKNLQLKILELQGYDVILSSAGVSVGDKDFFKDALKERNALFYYEKVNLKPGKPVTLAQLNQSIIIGLPGNPLSCLLVLRVLILPLLERLSLNKDFKLKPFKAQINAPLKLNNKRTHLILGNYSNHQFIPYNNRYESGAIQALAQVDSIALIDEGVGLVQGEIEILRFEN

SEQ ID NO: 6741 - protein, 362 aa, Helicobacter pylori
  misc_feature (B) LOCATION 1...362
  hypothetical: YES
SAGRILAEDIICVHALPKFNQSAMDGYGFKMQDLGQKTQVIQHIFAGDDVSALEVKENECVKIMTGAMVPKGIETIVPIECMLESHKDFALAPKDFKIHANIRQKGENASLNSVLVPKNTRLNYGHIALIASQGFKEIKAFRKLKIALFSSGDELVPLGQNALECQVYDVNSVGVFNMLKNYNTHFLGVLKDDKNLQLKILELQGYDVILSSAGVSVGDKDFFKDALKERNALFYYEKVNLKPGKPVTLAQLNQSIIIGLPGNPLSCLLVLRVLILPLLERLSLNKDFKLKPFKAQINAPLKLNNKRTHLILGNYSNHQFIPYNNRYESGAIQALAQVDSIALIDEGVGLVQGEIEILRFEN

SEQ ID NO: 6742 - protein, 390 aa, Helicobacter pylori
  misc_feature (B) LOCATION 1...390
  hypothetical: YES
MISFKEALKIHSNIPLKPLEVEVVSLFESAGRILAEDIICVHALPKFNQSAMDGYGFKMQDLGQKTQVIQHIFAGDDVSALEVKENECVKIMTGAMVPKGIETIVPIECMLESHKDFALAPKDFKIHANIRQKGENASLNSVLVPKNTRLNYGHIALIASQGFKEIKAFRKLKIALFSSGDELVPLGQNALECQVYDVNSVGVFNMLKNYNTHFLGVLKDDKNLQLKILELQGYDVILSSAGVSVGDKDFFKDALKERNALFYYEKVNLKPGKPVTLAQLNQSIIIGLPGNPLSCLLVLRVLILPLLERLSLNKDFKLKPFKAQINAPLKLNNKRTHLILGNYSNHQFIPYNNRYESGAIQALAQVDSIALIDEGVGLVQGEIEILRFEN

SEQ ID NO: 6743 - protein, 212 aa, Helicobacter pylori
  misc_feature (B) LOCATION 1...212
  hypothetical: YES
MKKCEKRVFDSLPSTQTYLLEKLKSNKLKAPVLVLAKNQSAGIGSRGNIWEIVESALTFSLALNASDLPKDLPMQASALYLGFLFKEVLKELGSQTWLKWPNDLYLGDQKIGGVMVNVYKGMRVCGIGVNRVSTKWACLDIGASDDWIIESFLKKIEENLFWGEVLSKYALEFHRSNSFNFHNDWGEAVSLKDAELLEDGRICIKGKIYDRM

SEQ ID NO: 6744 - protein, 233 aa, Helicobacter pylori
  misc_feature (B) LOCATION 1...233
  hypothetical: YES
KAFESEGLFEWQAFESGRYSNMKKCEKRVFDSLPSTQTYLLEKLKSNKLKAPVLVLAKNQSAGIGSRGNIWEIVESALTFSLALNASDLPKDLPMQASALYLGFLFKEVLKELGSQTWLKWPNDLYLGDQKIGGVMVNVYKGMRVCGIGVNRVSTKWACLDIGASDDWIIESFLKKIEENLFWGEVLSKYALEFHRSNSFNFHNDWGEAVSLKDAELLEDGRICIKGKIYDRM

SEQ ID NO: 6745 - protein, 55 aa, Helicobacter pylori
  misc_feature (B) LOCATION 1...55
  hypothetical: YES
MQEIFLCSISNVRSGDCKEDCAYCTQSSHHQGAIKRYKFKDEKVVLQEARDFKGD

SEQ ID NO: 6746 - protein, 63 aa, Helicobacter pylori
  misc_feature (B) LOCATION 1...63
  hypothetical: YES
NKGMIMQEIFLCSISNVRSGDCKEDCAYCTQSSHHQGAIKRYKFKDEKVVLQEARALREIRGL

SEQ ID NO: 6747 - protein, 192 aa, Helicobacter pylori
  misc_feature (B) LOCATION 1...192
  hypothetical: YES
LHLIACCGRADLEQLEFLRDAGIHSYNHNLETSQNFFPKICTTHTWEERFITCENALRAGLGLCSGGIFGLNESWEDRIEMLRALASLSPHTTPINFFIKNPVLPIDAETLSADEALECVLLAKEFLPNARLMVAGGREVVFKDNDKQEAKLFEYGINAVVLGDYLTTKGKAPKKDIEKLLSYGLTMATSCH

SEQ ID NO: 6748 - protein, 227 aa, Helicobacter pylori
  misc_feature (B) LOCATION 1...227
  hypothetical: YES
GTLGFCLVTSGRELDDEKCEYIAKLAKAINKEELGLHLIACCGRADLEQLEFLRDAGIHSYNHNLETSQNFFPKICTTHTWEERFITCENALRAGLGLCSGGIFGLNESWEDRIEMLRALASLSPHTTPINFFIKNPVLPIDAETLSADEALECVLLAKEFLPNARLMVAGGREVVFKDNDKQEAKLFEYGINAVVLGDYLTTKGKAPKKDIEKLLSYGLTMATSCH

SEQ ID NO: 6749 - protein, 284 aa, Helicobacter pylori
  misc_feature (B) LOCATION 1...284
  hypothetical: YES
MIMQEIFLCSISNVRSGDCKEDCAYCTQSSHHQGAIKRYKFKDEKVVLQEARALRELGALGFCLVTSGRELDDEKCEYIAKLAKAINKEELGLHLIACCGRADLEQLEFLRDAGIHSYNHNLETSQNFFPKICTTHTWEERFITCENALRAGLGLCSGGIFGLNESWEDRIEMLRALASLSPHTTPINFFIKNPVLPIDAETLSADEALECVLLAKEFLPNARLMVAGGREVVFKDNDKQEAKLFEYGINAVVLGDYLTTKGKAPKKDIEKLLSYGLTMATSCH

SEQ ID NO: 6750 - protein, 73 aa, Helicobacter pylori
  misc_feature (B) LOCATION 1...73
  hypothetical: YES
MVEVRFFGPIKEENFFIKANGLKELRAILQEKEGLKEWLGVCAIALNDHLIDNLDMPLKDGDVISLLPPVCGG

SEQ ID NO: 6751 - protein, 81 aa, Helicobacter pylori
  misc_feature (B) LOCATION 1...81
  hypothetical: YES
KAQYRGKIMVEVRFFGPIKEENFFIKANGLKELRAILQEKEGLKEWLGVWPIALNDHLIDNLDMPLKDGDVISLLPPVCGG

SEQ ID NO: 6752 - protein, 106 aa, Helicobacter pylori
  misc_feature (B) LOCATION 1...106
  hypothetical: YES
MSHYIELTEENFESTIKKGVALVDFWAPWCGPCKMLSPVIDELASEYEGKAKICKVNTDEQEELSAKFGIRSIPTLLFTKDGEVVHQLVGVQTKVALKEQLNKLLG

SEQ ID NO: 6753 - protein, 107 aa, Helicobacter pylori
  misc_feature (B) LOCATION 1...107
  hypothetical: YES
PMSHYIELTEENFESTIKKGVALVDFWAPWCGPCKMLSPVIDELASEYEGKAKICKVNTDEQEELSAKFGIRSIPTLLFTKDGEVVHQLVGVQTKVALKEQLNKLLG

SEQ ID NO: 6754 - protein, 37 aa, Helicobacter pylori
  misc_feature (B) LOCATION 1...37
  hypothetical: YES
VAMIDCAIIGGGPAGLSAGLYATRGGVKNAVLFEKGM

SEQ ID NO: 6755 - protein, 311 aa, Helicobacter pylori
  misc_feature (B) LOCATION 1...311
  hypothetical: YES
MIDCAIIGGGPAGLSAGLYATRGGVKNAVLFEKGMPGGQITGSSEIENYPGVKEVVSGLDFMQPWQEQCFRFGLKHEMTAIQRVSKKGSHFVILAEDGKTFEAKSVIIATGGSPKRTGIKGESEYWGKGVSTCATCDGFFYKNKEVAVLGGGDTAVEEAIYLANICKKVYLIHRRDGFRCAPITLEHAKNNSKIEFLTPYVVEEIKGDASGVSSLSIKNTATNEKRELVVPGLFIFVGYDVNNAVLKQEDNSMLCECDEYGSIVVDFSMKTNVQGLFAAGDIRIFAPKQVVCAASDGATAALSVISYLEHH

SEQ ID NO: 6756 - protein, 326 aa, Helicobacter pylori
  misc_feature (B) LOCATION 1...326
  hypothetical: YES
SRFKRAIEQAFRLVAMIDCAIIGGGPAGLSAGLYATRGGVKNAVLFEKGMPGGQITGSSEIENYPGVKEVVSGLDFMQPWQEQCFRFGLKHEMTAIQRVSKKGSHFVILAEDGKTFEAKSVIIATGGSPKRTGIKGESEYWGKGVSTCATCDGFFYKNKEVAVLGGGDTAVEEAIYLANICKKVYLIHRRDGFRCAPITLEHAKNNSKIEFLTPYVVEEIKGDASGVSSLSIKNTATNEKRELVVPGLFIFVGYDVNNAVLKQEDNSMLCECDEYGSIVVDFSMKTNVQGLFAAGDIRIFAPKQVVCAASDGATAALSVISYLEHH

SEQ ID NO: 6757 - protein, 49 aa, Helicobacter pylori
  misc_feature (B) LOCATION 1...49
  hypothetical: YES
LIINLPGKPKSIRECLEAVFPAIPYCVDLILGNYMQVNEKNIQAFRPKQ

SEQ ID NO: 6758 - protein, 61 aa, Helicobacter pylori
  misc_feature (B) LOCATION 1...61
  hypothetical: YES
NTCLQRFYGQSAGIRNKSLIINLPGKPKSIRECLEAVFPAIPYCVDLILGNYMQVNEKKIK

SEQ ID NO: 6759 - protein, 61 aa, Helicobacter pylori
  misc_feature (B) LOCATION 1...61
  hypothetical: YES
NDKSSIHMDCLNHSKASSSKARLKQLNPGIEVETFEERFKAHNALPLIEPYDFIIDATDNV

SEQ ID NO: 6760 - protein, 66 aa, Helicobacter pylori
  misc_feature (B) LOCATION 1...66
  hypothetical: YES
LLSRLDKERYLRHIMLEDVGEEGQLKLLKSSVLVIGAGGLGSAVWMYLCTAGIGKIGLWICFRRYE

SEQ ID NO: 6761 - protein, 204 aa, Helicobacter pylori
  misc_feature (B) LOCATION 1...204
  hypothetical: YES
LLSRLDKERYLRHIMLEDVGEEGQLKLLKSSVLVIGAGGLGSAVLMYLCTAGIGKIGIVDFASGDMSNLKRQIIHSQDCLNHSKASSAKARLKQLNAGIEVETFEERFKAHNALPLIEPYDFIIDATDNFNAKFLINDACVLAQKPYSHAGVLKYRGQSMSVLPHSACLACVFDKPPKKGFNPTSRALGGLARGFRVYPSERMP

SEQ ID NO: 6762 - protein, 204 aa, Helicobacter pylori
  misc_feature (B) LOCATION 1...204
  hypothetical: YES
LLSRLDKERYLRHIMLEDVGEEGQLKLLKSSVLVIGAGGLGSAVLMYLCTAGIGKIGIVDFDSVDMSNLKRQIIHSQDCLNHSKASSAKARLKQLNAGIEVETFEERFKAHNALPLIEPYDFIIDATDNFNAKFLINDACVLAQKPYSHAGVLKYRGQSMSVLPHSACLACVFDKPPKKGFNPTSRALGGLARGFRVYPSERMP

SEQ ID NO: 6763 - protein, 138 aa, Helicobacter pylori
  misc_feature (B) LOCATION 1...138
  hypothetical: YES
RTTERIALASGRISMNKDAYDAIINHGVKKGPVLQTAIIAGIMAAKKTSELIPMCHPIMLNGVDIDILEEKETCSFKLYARVKTQAKTGVEMEALMSVSIGLLTIYDMVKVIDKSMTISGVMLEHKSGGKSGDYNAKK

SEQ ID NO: 6764 - protein, 158 aa, Helicobacter pylori
  misc_feature (B) LOCATION 1...158
  hypothetical: YES
MPLTHLNEENQPKMVDIGDKETTERIALASGRISMNKEAYDAIINHGVKKGPVLQTAIIAGIMAAKKTSELIPMCHPIMLNGVDIDILEEKETCSFKLYARVKTQAKTGVEMEALMSVSIGLLTIYDMVKVIDKSMTISGVMLEHKSGGKSGDYNAKK

SEQ ID NO: 6765 - protein, 125 aa, Helicobacter pylori
  misc_feature (B) LOCATION 1...125
  hypothetical: YES
RVFNMNFQENLAALDLEYLWHPCSQMQEHQNFPIIPIKKAQGIYLYDFNDNAYMDLISSWWVNLFGHNNAYISQQLKNQIDNLEHVLLASFSHKPIITLSQGFASSPVWINAFMRITAHLVLKSL

SEQ ID NO: 6766 - protein, 349 aa, Helicobacter pylori
  misc_feature (B) LOCATION 1...349
  hypothetical: YES
AHHYALSRLCQLTGMDKCFYADNGSSCIEIALKMSYHAHFLKNQTRRKKLFLSLYNSYHGETLGALSVGDVKLYKDTYTPLLLKNLITPVPKNDSEIENSLNALKRLLDKHGEEICAFIAEPLLQCAGNMHIYSAKYLKQAVLWCKQKNIHIIFDEIATGFGRTGSMFAYEQCGIKPDFLCLSKGISGGYLPLSALLTHNEIYNQFYAPYEENKAFLHSHSYTGNALACACANATLDIFEKENVIEKNKALSEFIFSALQNALKPLIERQVVSDLRHLGMVFAFEVFLQTKERLSLAVFKKALKKGLLLRPLNNTIYLMPPYIITHEEIKKAIAGLVEAIDELKKAENK

SEQ ID NO: 6767 - protein, 439 aa, Helicobacter pylori
  misc_feature (B) LOCATION 1...439
  hypothetical: YES
MNFQENLAALDLEYLWHPCSQMQEHQNFPIIPIKKAQGIYLYDFNDNAYMDLISSWWVNLFGHNNAYISQQLKNQIDNLEHVLLASFSHKPIITLSQRLCQLTGMDKCFYADNGSSCIEIALKMSYHAHFLKNQTRRKKLFLSLSNSYHGETLGALSVGDVKLYKDTYTPLLLKNLITPVPKNDSEIENSLNALKRLLDKHGEEICAFIAEPLLQCAGNMHIYSAKYLKQAVLWCKQKNIHIIFDEIATGFGRTGSMFAYEQCGIKPDFLCLSKGISGGYLPLSALLTHNEIYNQFYAPYEENKAFLHSHSYTGNALACACANATLDIFEKENVIEKNKALSEFIFSALQNALKPLIERQVVSDLRHLGMVFAFEVFLQTKERLSLAVFKKALKKGLLLRPLNNTIYLMPPYIITHEEIKKAIAGLVEAIDELKKAENK

SEQ ID NO: 6768 - protein, 75 aa, Helicobacter pylori
  misc_feature (B) LOCATION 1...75
  hypothetical: YES
VALTLGARGGVYLCGGIIPRFIDYFKTSPFRARFETKGRMGAFLASIPVHVVMKKTPGLDGAGIALENYLLHDRI

SEQ ID NO: 6769 - protein, 336 aa, Helicobacter pylori
  misc_feature (B) LOCATION 1...336
  hypothetical: YES
MPKTETYPRLLADIGGTNARFGLEVAPRQIECVEVLRCEDFESLSDAVRFYLSKCKESLKLHPIYGSFAVATPIMGDFVQMTNNHWTFSIETTRQCLNLKKLLVINDFVAQAYAISAMQENDLAQIGGIKCEINAPKAILGPGTGLGVSTLIQNSDGSLKVLPGEGGHVSFAPFDDLEILVWQYARSKFNHVSAERFLSGSGLVLIYEALSKRKGLEKVAKLSKAELTPQIISERALNGDYPICRLTLDTFCSMLGTLAADVALTLGARGGVYLCGGIIPRFIDYFKTSPFRARFETKGRMGAFLASIPVHVVMKKTPGLDGAGIALENYLLHDRI

SEQ ID NO: 6770 - protein, 360 aa, Helicobacter pylori
  misc_feature (B) LOCATION 1...360
  hypothetical: YES
KKTPPILCRLLGFYILKKLPQRCFMPKTETYPRLLADIGGTNARFGLEVAPRQIECVEVLRCEDFESLSDAVRFYLSKCKESLKLHPIYGSFAVATPIMGDFVQMTNNHWTFSIETTRQCLNLKKLLVINDFVAQAYAISAMQENDLAQIGGIKCEINAPKAILGPGTGLGVSTLIQNSDGSLKVLPDEGGHVSFAPFDDLEILVWQYARSKFNHVSAERFLSGSGLVLIYEALSKRKGLEKVAKLSKAELTPQIISERALNGDYPICRLTLDTFCSMLGTLAADVALTLGARGGVYLCGGIIPRFIDYFKTSPFRARFETKGRMGAFLASIPVHVVMKKTPGLDGAGIALENYLLHDRI

SEQ ID NO: 6771 - protein, 53 aa, Helicobacter pylori
  misc_feature (B) LOCATION 1...53
  hypothetical: YES
MLDFDLVLFGATGDLAMRKLFVSLYEIYISFMVLKTILGLSHRGVRSYPMKSF

SEQ ID NO: 6772 - protein, 251 aa, Helicobacter pylori
  misc_feature (B) LOCATION 1...251
  hypothetical: YES
MLDFDLVLFGATGDLAMRKLFVSLYEIYIHYGFKNDSRIIASGRKELSNEEFLALLCEKTQLHSREKGEEFLTHISYLRVRLDNPKDFEELSKIATNNKPLIFYFSISPSFFATTAQNLAQNALNHANTRLILEKPLGHDLKTCKEIFQSISAFFKEEQIFRIDHYLGKKGVQNILELRLNNPILNILWDQISAVEICVYETLGVEERGEFYDKIGALRDMVQNHLLQVLSLIATDLPNDLKDLRQEKSKF

SEQ ID NO: 6773 - protein, 260 aa, Helicobacter pylori
  misc_feature (B) LOCATION 1...260
  hypothetical: YES
LKNTLKGLLMLDFDLVLFGATGDLAMRKLFVSLYEIYIHYGFKNDSRIIASGRKELSNEEFLALLCEKTQLHSREKGEEFLTHISYLRVRLDNPKDFEELSKIATNNKPLIFYFSISPSFFATTAQNLAQNALNHANTRLILEKPLGHDLKTCKEIFQSISAFFKEEQIFRIDHYLGKKGVQNILELRLNNPILNILWDQISAVEICVYETLGVEERGEFYDKIGALRDMVQNHLLQVLSLIATDLPNDLKDLRQEKSKF

SEQ ID NO: 6774 - protein, 350 aa, Helicobacter pylori
  misc_feature (B) LOCATION 1...350
  hypothetical: YES
MRVPSKGFAIFSKDGHFKPHDFSRHAVGPKDVLIDILYAGICHSDIHSAYSEWKEGIYPMVPGHEIAGVIKEVGKEVKKFKVGDVVGVGCFVNSCKTCKPCKEHQEQFCANHKTVFTYDCLDYFHDNEPHMGGYSNNIVVDENYVISVDKNAPLEKVAPLLCAGITTYSPLKFSKVTKGTKVGVAGFGGLGSMAVKYAVAMGAEVSVFARNDHKKQDALNMGVKHFYTDPKQCKEELDFIISTIPTHYDLKDYLKLLTYSGELALVGLPPVEVAPALNVFEFIHLGNRKVYGSLIGGIKETQEMMDFSIKHNIYPEVDLILGKDIDTAYHNLTHGKAKFRYVIDMKKSFD

SEQ ID NO: 6775 - protein, 356 aa, Helicobacter pylori
  misc_feature (B) LOCATION 1...356
  hypothetical: YES
MKQGVFMRVPSKGFAIFSKDGHFKPHDFSRHAVGPKDVLIDILYAGICHSDIHSAYSEWKEGIYPMVPGHEIAGVIKEVGKEVKKFKVGDVVGVGCFVNSCKTCKPCKEHQEQFCANHKTVFTYDCLDYFHDNEPHMGGYSNNIVVDENYVISVDKNAPLEKVAPLLCAGITTYSPLKFSKVTKGTKVGVAGFGGLGSMAVKYAVAMGAEVSVFARNDHKKQDALNMGVKHFYTDPKQCKEELDFIISTIPTHYDLKDYLKLLTYSGELALVGLPPVEVAPALNVFEFIHLGNRKVYGSLIGGIKETQEMMDFSIKHNIYPEVDLILGKDIDTAYHNLTHGKAKFRYVIDMKKSFD

SEQ ID NO: 6776 - protein, 364 aa, Helicobacter pylori
  misc_feature (B) LOCATION 1...364
  hypothetical: YES
KRYNSGILMKQGVFMRVPSKGFAIFSKDGHFKPHDFSRHAVGPKDVLIDILYAGICHSDIHSAYSEWKEGIYPMVPGHEIAGVIKEVGKEVKKFKVGDVVGVGCFVNSCKTCKPCKEHQEQFCANHKTVFTYDCLDYFHDNEPHMGGYSNNIVVDENYVISVDKNAPLEKVAPLLCAGITTYSPLKFSKVTKGTKVGVAGFGGLGSMAVKYAVAMGAEVSVFARNDHKKQDALNMGVKHFYTDPKQCKEELDFIISTIPTHYDLKDYLKLLTYSGELALVGLPPVEVAPALNVFEFIHLGNRKVYGSLIGGIKETQEMMDFSIKHNIYPEVDLILGKDIDTAYHNLTHGKAKFRYVIDMKKSFD

SEQ ID NO: 6777 - protein, 227 aa, Helicobacter pylori
  misc_feature (B) LOCATION 1...227
  hypothetical: YES
MGYQLFEFENLEDCHKALIERFKEFFNAALKKHHQVSVAFSGGRSPISLLQKLSVLDLKWHECLISLVDERIIEASHEDSNAKLLHDYLLQNNALKASFTPLLPEKISGDTNELLDFANQHFKQPHLAILGMGTDGHTASLFPETSAFLNEEKENIVLTKPTNAPYERLSMSINALENCEKLFLSISGVEKRGVLEKALKENAPYSLPIARILHSKKVTTEVFYAKN

SEQ ID NO: 6778 - protein, 236 aa, Helicobacter pylori
  misc_feature (B) LOCATION 1...236
  hypothetical: YES
NHSINKRDFMGYQLFEFENLEDCHKALIERFKEFFNAALKKHHQVSVAFSGGRSPISLLQKLSVLDLKWHECLISLVDERIIEASHEDSNAKLLHDYLLQNNALKASFTPLLPEKISGDTNELLDFANQHFKQPHLAILGMGTDGHTASLFPETSAFLNEEKENIVLTKPTNAPYERLSMSINALENCEKLFLSISGVEKRGVLEKALKENAPYSLPIARILHSKKVTTEVFYAKN

SEQ ID NO: 6779 - protein, 48 aa, Helicobacter pylori
  misc_feature (B) LOCATION 1...48
  hypothetical: YES
YKITYNNFAHQLELEAPWVFIDTLIEGFINNATPYIPMKATISTNQNF

SEQ ID NO: 6780 - protein, 83 aa, Helicobacter pylori
  misc_feature (B) LOCATION 1...83
  hypothetical: YES
LDTPKFKGVPFYLKHAKKMPRNQASVKIHFNAVNTLEFFLSQDKITLTLKDHQNPLILETHNKQEFLQPYANCPYDVIQNNLQ

SEQ ID NO: 6781 - protein, 131 aa, Helicobacter pylori
  misc_feature (B) LOCATION 1...131
  hypothetical: YES
LDTPKFKGVPFYLKHAKKMPRNQASVKIHFNAVNTLEFFLSQDKITLTLKDHQNPLILETHNKQEFLQPYAKLLYDAIPNNHYNFAHQLELEASWVFIDTLIEGFINNATPLYSYESHNLNESEFLKPLYQ

SEQ ID NO: 6782 - protein, 163 aa, Helicobacter pylori
  misc_feature (B) LOCATION 1...163
  hypothetical: YES
NRGFKGYGSKPSLASFIPYRYRFTQRFKRFEARKIKVLKTLQPPKDFTKQVIRAQYQGYRDENKVHKESQTETFVAIKAFLDTPKFKGVPFYLKHAKKMPRNQASVKIHFNAVNTLEFFLSQDKITLTLKDHQNPLILETHNKQEFLQPYANCPYDVIQNNLQ

SEQ ID NO: 6783 - protein, 211 aa, Helicobacter pylori
  misc_feature (B) LOCATION 1...211
  hypothetical: YES
NRGFKGYGSKPSLASFIPYRYRFTQRFKRFEARKIKVLKTLQPPKDFTKQVIRAQYQGYRDENKVHKESQTETFVAIKAFLDTPKFKGVPFYLKHAKKMPRNQASVKIHFNAVNTLEFFLSQDKITLTLKDHQNPLILETHNKQEFLQPYAKLLYDAIPNNHYNFAHQLELEASWVFIDTLIEGFINNATPLYSYESHNLNESEFLKPLYQ

SEQ ID NO: 6784 - protein, 64 aa, Helicobacter pylori
  misc_feature (B) LOCATION 1...64
  hypothetical: YES
MESNGKRISKKGEIIPYDTCPVVWGDMGINAQHAFFQLLHQGTHLIPIDFIASLDKKPNAKGHP

SEQ ID NO: 6785 - protein, 75 aa, Helicobacter pylori
  misc_feature (B) LOCATION 1...75
  hypothetical: YES
GNFPKFIQQLDMESNGKRISKKGEIIPYDTCPVVWGDMGINAQHAFFQLLHQGTHLIPIDFIASLDKKPNAKGHP

SEQ ID NO: 6786 - protein, 113 aa, Helicobacter pylori
  misc_feature (B) LOCATION 1...113
  hypothetical: YES
KKKKNDEKHIAKHFVAVSTNKEAVQQFGIDEHNMFGFWDFVGGRYSLWSAIGLSIMIYLGKKNFNALLKGAYLMDEHFRNAPFESNLPVLMGLIGVWYINFFQSKGHLIAPYD

SEQ ID NO: 6787 - protein, 131 aa, Helicobacter pylori
  misc_feature (B) LOCATION 1...131
  hypothetical: YES
GVLMLTQLKTYPKLLKHYEEIKEVHMRDWFSKDKERASRYFVQLESLSLDYSKNRLNDTTLKLLFELAKDCSLKEKIEAMFKGEKINTTEKRAVLHTALRSLNDAEILLDNMEVLKSVRSVLKRMRAFAIA

SEQ ID NO: 6788 - protein, 132 aa, Helicobacter pylori
  misc_feature (B) LOCATION 1...132
  hypothetical: YES
MRFYSACFSTAQAFMKGKSYEEALGELLSKGLDKDEAKDLAHHRVFFGNRPSNILLLEKISPSNIGALVALYEHKVFVQGVIWDINSFDQWGVELGKELAVPILQELEGHKSNAYFDSSTRHLIELYKNYNQ

SEQ ID NO: 6789 - protein, 135 aa, Helicobacter pylori
  misc_feature (B) LOCATION 1...135
  hypothetical: YES
RPPMRFYSACFSTAQAFMKGKSYEEALGELLSKGLDKDEAKDLAHHRVFFGNRPSNILLLEKISPSNIGALVALYEHKVFVQGVIWDINSFDQWGVELGKELAVPILQELEGHKSNAYFDSSTRHLIELYKNYNQ

SEQ ID NO: 6790 - protein, 342 aa, Helicobacter pylori
  misc_feature (B) LOCATION 1...342
  hypothetical: YES
MLTQLKTYPKLLKHYEEIKEVHMRDWFSKDKERASRYFVQLESLSLDYSKNRLNDTTLKLLFELAKDCSLKEKIEAMFKGEKINTTEKRAVLHTALRSLNDAEILLDNMEVLKSVRSVLKRMRAFSDSVRSGKRLGYTNQVITDIVNIGIGGSDLGALMVCTALKRYGHPRLKMHFVSNVDGTQILDVLEKINPASTLFIVASKTFSTQETLTNALTARKWFVERSGDEKHIAKHFVAVSTNKEAVQQFGIDEHNMFEFWDFVGGRYSLWSAIGLSIMIYLGKKNFNALLKGAYLMDEHFRNAPFESNLPVLMGLIGVWYINFFQSKSHLIAPYDQYLRQFP

SEQ ID NO: 6791 - protein, 545 aa, Helicobacter pylori
  misc_feature (B) LOCATION 1...545
  hypothetical: YES
MLTQLKTYPKLLKHYEEIKEVHMRDWFSKDKERASRYFVQLESLSLDYSKNRLNDTTLKLLFELAKDCSLKEKIEAMFKGEKINTTEKRAVLHTALRSLNDAEILLDNMEVLKSVRSVLKRMRAFSDSVRSGKRLGYTNQVITDIVNIGIGGSDLGALMVCTALKRYGHPRLKMHFVSNVDGTQILDVLEKINPASTLFIVASKTFSTQETLTNALTARKWFVERSGDEKHIAKHFVAVSTNKEAVQQFGIDEHNMFEFWDFVGGRYSLWSAIGLSIMIYLGKKNFNALLKGAYLMDEHFRNAPFESNLPVLMGLIGVWYINFFQSKSHLIAPYDQYLRHFPKFIQQLDMESNGKRISKKGEIIPYDTCPVVWGDMGINAQHAFFQLLHQGTHLIPIDFIASLDKKPNAKGHHEILFSNVLAQAQAFMKGKSYEEALGELLSKGLDKDEAKDLAHHRVFFGNRPSNILLLEKISPSNIGALVALYEHKVFVQGVIWDINSFDQWGVELGKELAVPILQELEGHKSNAYFDSSTRHLIELYKNYNQ

SEQ ID NO: 6792 - protein, 262 aa, Helicobacter pylori
  misc_feature (B) LOCATION 1...262
  hypothetical: YES
GMQKRVVILLLDSFGIGASEDAKDFGDLGANTLGNIAKACFNNLADSNDRNGVLKLPNLEGLGLGLSALKAANELPLGFQLKPNLIGAYAYAKELSSAKDTISGHWEMMGAPVLFEWGYFKDKNDSFPKEILDEIMHKTKIKGYLGNCHASGTEIIKDLGEKHLETLYPIFYTSADSVFQIAAHEERFGLDHLYALCEEAFQILEPLKIARVIARPFIGTNRENFKRTANRKDYAIKPHKKLLFETFIEEKQGEVISIGKNR

SEQ ID NO: 6793 - protein, 413 aa, Helicobacter pylori
  misc_feature (B) LOCATION 1...413
  hypothetical: YES
MQKRVVILLLDSFGIGASEDAKDFGDLGANTLGNIAKACFNNLADSNDRNGVLKLPNLEGLGLGLSALKAANELPLGFQLKPNLIGAYAYAKELSSAKDTISGHWEMMGAPVLFEWGYFKDKNDSFPKEILDEIMHKTKIKGYLGNCHASGTEIIKDLGEKHLETLYPIFYTSADSVFQIAAHEERFGLDHLYALCEEAFQILEPLKIARVIARPFIGTNRENFKRTANRKDYAIKPHKKLLFETFIEEKQGEVISIGKIADIYAHVGITQKFKAGSLMELCDVTLDQVKNAPNNSLIFTNFVHFDSDYGHRRDVSGYANALEYFDARLKEVLDNLRENDLLILCADHGCDPSFKGTDHTREYIPVLFYHKDLQPAFLGKSETFADIGQSIAYFLGLSPLDYGKNLLNFKGQP

SEQ ID NO: 6794 - protein, 115 aa, Helicobacter pylori
  misc_feature (B) LOCATION 1...115
  hypothetical: YES
EVKLFEFGEQLRDSVYIEDVIQANVKAMKAQKSGVYNVGYSQARSYNEIVSILKEHLGDFKVSYIKNPYTFFQKHTQAHIEPTILDLDYTPLYDLESGIKDYLPHIHAIFKEQHA

SEQ ID NO: 6795 - protein, 114 aa, Helicobacter pylori
  misc_feature (B) LOCATION 1...114
  hypothetical: YES
VKLFEFGEQLRDSVYIEDVIQANVKAMKAQKSGVYNVGYSQARSYNEIVSILKEHLGDFKVSYIKNPYTFFQKHTQAHIEPTILDLDYTPLYDLESGIKDYLPHIHAIFKEQHA

SEQ ID NO: 6796 - protein, 180 aa, Helicobacter pylori
  misc_feature (B) LOCATION 1...180
  hypothetical: YES
WPWEQLSRLTHIMDLDKFRTNTLSSNNRPSSLGHFKNLIGFKGEVIIADINNPLDLRRLEKLHFDYLFHQAAVSDTTMLNQELVMKTNYQAFLNLLEIARSKKAKVIYASSAGVYGNTKAPNIVGSNESPENVYGFSKLCMDEFVLSHSSDNVVGLRYFNVYGSREFYKKKNASMDCNSL

SEQ ID NO: 6797 - protein, 179 aa, Helicobacter pylori
  misc_feature (B) LOCATION 1...179
  hypothetical: YES
PWEQLSRLTHIMDLDKFRTNTLSSNNRPSSLGHFKNLIGFKGEVIIADINNPLDLRRLEKLHFDYLFHQAAVSDTTMLNQELVMKTNYQAFLNLLEIARSKKAKVIYASSAGVYGNTKAPNIVGSNESPENVYGFSKLCMDEFVLSHSSDNVVGLRYFNVYGSREFYKKKNASMDCNSL

SEQ ID NO: 6798 - protein, 329 aa, Helicobacter pylori
  misc_feature (B) LOCATION 1...329
  hypothetical: YES
MRYIDDGLENQTILITGGAGFVGSNLAFYFQENHPKAKVVVLDKFRSNTLSSNNRPSSLGHFKNLIGFKGEVIIADINNPLDLRRLEKLHFDYLFHQAAVSDTTMLNQELVMKTNYQAFLNLLEIARSKKAKVIYASSAGVYGNTKAPNIVGSNESPENVYGFSKLCMDEFVLSHSSDNVVGLRYFNVYGSREFYKEKTASMVLQLALSAMAFKEVKLFEFGEQLRDFVYIEDVIQANVKAMKAQKSGVYNVGYSQARSYNEIVSILKEHLGDFKVSYIKNPYTFFQKHTQAHIEPTILDLDYTPLYDLESGIKDYLPHIHAIFKEQHA

SEQ ID NO: 6799 - protein, 192 aa, Helicobacter pylori
  misc_feature (B) LOCATION 1...192
  hypothetical: YES
MIDDLIQKEFLAHKEALEKSLESLQDALKQSVHLLIETLENQGKILICGNGGSASDAQHFAAELTGRYKLERKGLSVISLSTDTSALTAIANDYGYEEVFARQVEALGNKEDILIGISTSGNSKNVLKAYEKAKDLGMKTLSLAGRDGGKMKPLSDIALIVPSGDTPRIQEMHILMIHILCDCIERHFARKN

SEQ ID NO: 6800 - protein, 208 aa, Helicobacter pylori
  misc_feature (B) LOCATION 1...208
  hypothetical: YES
KKLKGHIMIDDLIQKEFLAHKEALEKSLESLQDALKQSVHLLIETLENQGKILICGNGESASDAQHFAAELTGRYKLERKGLSVISLSTDTSALTAIANDYGYEEVFARQVEALGNKEDILIGISTSGNSKNVLKAYEKAKDLGMKTLSLAGRDGGKMKPLSDIALIVPSGDTPRIQEMHILMIHILCDCIERHFARKNWLYCFIDLF

SEQ ID NO: 6801 - protein, 64 aa, Helicobacter pylori
  misc_feature (B) LOCATION 1...64
  hypothetical: YES
VSVSKLVNSLKGVSSRLTRQHHFKSVEASLWGKHLWSPSYFAGSCGGTPLEMIKQYIQEQETPH

SEQ ID NO: 6802 - protein, 64 aa, Helicobacter pylori; identical to SEQ ID NO: 6801
  misc_feature (B) LOCATION 1...64
  hypothetical: YES

SEQ ID NO: 6803 - protein, 89 aa, Helicobacter pylori
  misc_feature (B) LOCATION 1...89
  hypothetical: YES
DQANFYRRRRLGGDAPISTQSMTFSKTADIESTKNQIDRLKLAGADLVRVAVSNEKDALALKELKKVSPLPLISGYSFHYKFALIAAQS

SEQ ID NO: 6804 - protein, 119 aa, Helicobacter pylori
  misc_feature (B) LOCATION 1...119
  hypothetical: YES
YAKLLEDLDFTDFKISLKASDVVRTIEAYRMLRPLVIYPFHLGVTEAGNLFSSSIKSAMALGGLLMEGIGDTMRVSITGELENEIKVARAILRHSGRLKEGINWISCPTCGRIEANLVD

SEQ ID NO: 6805 - protein, 118 aa, Helicobacter pylori
  misc_feature (B) LOCATION 1...118
  hypothetical: YES
YAKLLEDLDFTDFKISLKASDVVRTIEAYRMLRPLVIYPFHLGVTEAGNLFSSSIKSAMALGGLLMEGIGDTMRVSITGELENEIKVARAILRHSGRLKEGINWISCPTCGRIEANLV

SEQ ID NO: 6806 - protein, 348 aa, Helicobacter pylori
  misc_feature (B) LOCATION 1...348
  hypothetical: YES
MLENRVKTKQIFIGGVAIGGDAPISTQSMTFSKTADIESTKNQIDRFKLAGADLVRVAVSNEKDALALKELKKVSPLPLIADIHFHYKFALIAAQSVDAIRINPGNIGSKDKIKAVVDACKEKNIPIRIGVNAGSLEKQFDQKYGPTPKGMVESALYNAKLLEDLDFTDFKISLKASDVVRTIEAYRMLRPLVIYPFHLGVTEAGNLFSSSIKSAMALGGLLMEGIGDTMRVSITGELENEIKVARAILRHSGRLKEGINWISCPTCGRIEANLVDMASKVEKRLSHIKTPLDISVMGCVVNALGEAKHADMAIAFGNRSGLIIKEGKVIHKLAEKDLFETFVIEVEI

SEQ ID NO: 6807 - protein, 273 aa, Helicobacter pylori
  misc_feature (B) LOCATION 1...273
  hypothetical: YES
MIKKCLFPAAGYGTRFLPITKTIPKEMLPIVDKPLIQYAVEEAMEAGCEVMAIVTGRNKRSLEDYFDTSYEIEHQIQGTNKENALKSIRNIIEKCCFSYVRQKQMKGLGHAILTGEALIGNEPFAVILADDLCISHEYPSVLKQMTSLYQKYQCSIVAIEEVVLEEVSKYGVIRGEWLEERVYEIKDMVEKPSQEDAPSNLAVIGRYILTPDIFDILRETKPGKNNEIQITDALLTQAKRKRIIAYQFKGKRYDCGSVEGYIEASNAYYKKRL

SEQ ID NO: 6808 - protein, 226 aa, Helicobacter pylori
  misc_feature (B) LOCATION 1...226
  hypothetical: YES
MRFVYHPLAKEPTLKIEGESYIHLYRSRRIKSASRLDLRNLKDGFLYTYEHAEIAKKHALLRLVGVQPLEIMANKKTHLILSVIEIKNIEKILPFLNQLGVSKLSLFYADFSQRNEKIDSAKLERFQKILIHSCEQCGRSVLMELEAFSNTKEALKAYPKASVLDFNGETLPASADFEKGVIIGPEGGFSEQERGYFKEREIYRIPLDMVLKSESACVFVASIAQI

SEQ ID NO: 6809 - protein, 226 aa, Helicobacter pylori; identical to SEQ ID NO: 6808
  misc_feature (B) LOCATION 1...226
  hypothetical: YES

SEQ ID NO: 6810 - protein, 219 aa, Helicobacter pylori
  misc_feature (B) LOCATION 1...219
  hypothetical: YES
VKSVFSEEKETPVTKENGSYLIAYDPLDGSSVMEANFLVGTIIGVYEKDYKAQNLVASLYVVFGHKIELVVALEEVYRYAFYQNKFHFIETIVLENKGKIIASGGNQKDFSLGLKKALEGFFAENYRLRYSGSMVADVHHVLVKKGGMFSYPQKKLRKLFEVFPLALMVEKAKGEAFYFDKGVKKRLLDQSVESYHEKSECYLASPHEAQILEKHLKGE

SEQ ID NO: 6811 - protein, 290 aa, Helicobacter pylori
  misc_feature (B) LOCATION 1...290
  hypothetical: YES
MDYKRFKGKHANIVIEIISLLEKGVKKAQEILEKPDAGSYTQLENSSGDTPIKADLALDKFLEETFLSLENVKSVFSEEKETPVTKENGSYLIAYDPLDGSSVMEANFLVGTIIGVYEKDYKAQNLVASLYVVFGHKIELVVALEEVYRYAFYQNKFHFIETIVLENKGKIIASGGNQKDFSLGLKKALEGFFAENYRLRYSGSMVADVHHVLVKKGGMFSYPQKKLRKLFEVFPLALMVEKAKGEAFYFDKGVKKRLLDQSVESYHEKSECYLASPHEAQILEKHLKGE

SEQ ID NO: 6812 - protein, 297 aa, Helicobacter pylori
  misc_feature (B) LOCATION 1...297
  hypothetical: YES
SNHKRVFMDYKRFKGKHANIVIEIISLLEKGVKKAQEILEKPDAGSYTQLENSSGDTPIKADLALDKFLEETFLSLENVKSVFSEEKETPVTKENGSYLIAYDPLDGSSVMEANFLVGTIIGVYEKDYKAQNLVASLYVVFGHKIELVVALEEVYRYAFYQNKFHFIETIVLENKGKIIASGGNQKDFSLGLKKALEGFFAENYRLRYSGSMVADVHHVLVKKGGMFSYPQKKLRKLFEVFPLALMVEKAKGEAFYFDKGVKKRLLDQSVESYHEKSECYLASPHEAQILEKHLKGE

SEQ ID NO: 6813 - protein, 89 aa, Helicobacter pylori
  misc_feature (B) LOCATION 1...89
  hypothetical: YES
LKVAPSLLSADFMHLAKEIESVSNADFLHVDVMDGHYVPNLTMGPVILENVTQMSQVPLDVHLMVENASFFVELFAPLNPQIISIHVRK

SEQ ID NO: 6814 - protein, 92 aa, Helicobacter pylori
  misc_feature (B) LOCATION 1...92
  hypothetical: YES
GSILKVAPSLLSADFMHLAKEIESVSNADFLHVDVMDGHYVPNLTMGPVILENVTQMSQVPLDVHLMVENASFFVELFAPLNPQIISIHVRK

SEQ ID NO: 6815 - protein, 162 aa, Helicobacter pylori
  misc_feature (B) LOCATION 1...162
  hypothetical: YES
KLNITDDTRIRESLPTIQFCIDNKAKDIILVSHLGRPKGVEEKLSLKPFLKRLERLLNHEVVFSQNIAQLKQALNENAPTRIFLLENIRFLKGEEENDENLAKDLASLCDVFVNDAFGTSHRKHASTYGTAKFAPIKVSGFLLKKEIDSFYQAFNHPLRPLL

SEQ ID NO: 6816 - protein, 163 aa, Helicobacter pylori
  misc_feature (B) LOCATION 1...163
  hypothetical: YES
KLNITDDTRIRESLPTIQFCIDNKAKDIILVSHLGRPKGVEEKLSLKPFLKRLERLLNHEVVFSQNIAQLKQALNENAPTRIFLLENIRFLKGEEENDENLAKDLASLCDVFVNDAFGTSHRKHASTYGTAKFAPIKVSGFLLKKEIDSFYQAFNHPLRPLLL

SEQ ID NO: 6817 - protein, 168 aa, Helicobacter pylori
  misc_feature (B) LOCATION 1...168
  hypothetical: YES
FNHPLRPLLLIVGGAKVSSKLTLLKNILDLIDKLIIAGAMSNTFLKALGYDVQDSSVEDALINDALELLQSAKEKKVKVYLPIDAVTTDDILNPKHIKISPVQDIEPKHKIADIGPASLKLFSEVIESAPTILWNGPLGVHEKQEFARGTTFLAHKIANTYAFSLIGG

SEQ ID NO: 6818 - protein, 167 aa, Helicobacter pylori
  misc_feature (B) LOCATION 1...167
  hypothetical: YES
NHPLRPLLLIVGGAKVSSKLTLLKNILDLIDKLIIAGAMSNTFLKALGYDVQDSSVEDALINDALELLQSAKEKKVKVYLPIDAVTTDDILNPKHIKISPVQDIEPKHKIADIGPASLKLFSEVIESAPTILWNGPLGVHEKQEFARGTTFLAHKIANTYAFSLIGG

SEQ ID NO: 6819 - protein, 371 aa, Helicobacter pylori
  misc_feature (B) LOCATION 1...371
  hypothetical: YES
VPLDENLNITDDTRIRESLPTIQFCIDNKAKDIILVSHLGRPKGVEEKLSLKPFLKRLERLLNHEVVFSQNIAQLKQALNENAPTRIFLLENIRFLKGEEENDENLAKDLASLCDVFVNDAFGTSHRKHASTYGTAKFAPIKVSGFLLKKEIDSFYQAFNHPLRPLLLIVGGAKVSSKLTLLKNILDLIDKLIIAGAMSNTFLKALGYDVQDSSVEDALINDALELLQSAKEKKVKVYLPIDAVTTDDILNPKHIKISPVQDIEPKHKIADIGPASLKLFSEVIESAPTILWNGPLGVHEKQEFARGTTFLAHKIANTYAFSLIGGGDTIDAINRAGEKDNMSFISTGGGASLELLEGKILPCFEVLDKRH

SEQ ID NO: 6820 - protein, 402 aa, Helicobacter pylori
  misc_feature (B) LOCATION 1...402
  hypothetical: YES
MLAKMSFMQNVKNIQEVDVNHKRVLIRVDFNVPLDENLNITDDTRIRESLPTIQFCIDNKAKDIILVSHLGRPKGVEEKLSLKPFLKRLERLLNHEVVFSQNIAQLKQALNENAPTRIFLLENIRFLKGEEENDENLAKDLASLCDVFVNDAFGTSHRKHASTYGTAKFAPIKVSGFLLKKEIDSFYQAFNHPLRPLLLIVGGAKVSSKLTLLKNILDLIDKLIIAGAMSNTFLKALGYDVQDSSVEDALINDALELLQSAKEKKVKVYLPIDAVTTDDILNPKHIKISPVQDIEPKHKIADIGPASLKLFSEVIESAPTILWNGPLGVHEKQEFARGTTFLAHKIANTYAFSLIGGGDTIDAINRAGEKDNMSFISTGGGASLELLEGKILPCFEVLDKRH

SEQ ID NO: 6821 - protein, 51 aa, Helicobacter pylori
  misc_feature (B) LOCATION 1...51
  hypothetical: YES
FLNASCTNNANAPLLKILDEAFKVENALLTTIHSYTDDQNLLDTKHKGIAR

SEQ ID NO: 6822 - protein, 116 aa, Helicobacter pylori
  misc_feature (B) LOCATION 1...116
  hypothetical: YES
RRNMPIKIAVNGTGRIGLCAIRVASQRKDVEIVAVNSTAELETLLHLIRHDSVHGHFEARLNANRTLNIGHSKNILVLSERDINKLDFSVANAEIIIECTGKFNSLEVQALILKTA

SEQ ID NO: 6823 - protein, 231 aa, Helicobacter pylori
  misc_feature (B) LOCATION 1...231
  hypothetical: YES
MPIKIAINGTGRIGLCAIRVASQRKDVEIVAVNSTAELETLLHLIRHDSVHGHFEAKLNANRTLNIGHSKNILVLSERDINKLDFSVANAEIIIECTGKFNSLEASSAHLKNSVKKVIISAPAQNAPTFVYGVNHTNYHNESVISNASCTTNATAPLLKILDEAFKVENALLTTIHSYTNDQNLLDTKHKDIRRARAASLNLIPTSTGVSKAISLVLPHLGPKITGLAIRV

SEQ ID NO: 6824 - protein, 273 aa, Helicobacter pylori
  misc_feature (B) LOCATION 1...273
  hypothetical: YES
MPIKIAINGTGRIGLCAIRVASQRKDVEIVAINSTAELETLLHLIRHDSVHGHFEAKLNANRTLNIGHSKNILVLSERDINKLDFSVANAEIIIECTGKFNSLEASSAHLKNSVKKVIISAPAQNAPTFVYGVNHTNYHNESVISNASCTTNATAPLLKILDEAFKVENALLTTIHSYTNDQNLLDTKHKDIRRARAASLNLIPTSTGVSKAISLVLPHLGPKITGLAIRVPTPNVSLVDLSLNFKKVVSKASVQHALKDASKHAFKGIVSVD

SEQ ID NO: 6825 - protein, 339 aa, Helicobacter pylori
  misc_feature (B) LOCATION 1...339
  hypothetical: YES
MITGSHNPKEYNGFKITLNQNPFYGKDIQALKNTLLNAKHEIKPLKETPEKVNALEAYHRYLIKDFKHLKNLKYKIALDFGNGVGALGLEPILKALNIDFSSLYSDPDGDFPNHHPDPSEAKNLKDLEKHMRENAILIGFAFDGDADRIAMLSSHHIYAGDELAILFAKRLHAQGITPFVIGEVKCSQVMYNAINTFGKTLMYKTGHSNLKIKLKETNAHFAAEMSGHIFFKERYFGYDDALYACLRALELLLEQSPSDLENTIKNLPYSYTTPEEKIAVSEEEKFEIIRNLQEALKNPPSHFPTIKEIISIDGVRVVFEHGFGLIRASNTHPLFSQPL

SEQ ID NO: 6826 - protein, 459 aa, Helicobacter pylori
  misc_feature (B) LOCATION 1...459
  hypothetical: YES
MDISIFREYDIRGIYPTTLDENTAFSIGVELGKIMREYDKSVFVGHDARVHGRFLFEVLSAGLQSSGLKVYDLGLIPTPVAYFAAFNEIDNIQCPNSIMITGSHNPKEYNGFKITLNQNPFYGKDIQALKNTLLNAKHEIKPLKETPEKVNALEAYHRYLIKDFKHLKNLKYKIALDFGNGVGALGLEPILKALNIDFSSLYSDPDGDFPNHHPDPSEAKNLKDLEKHMRENAILIGFAFDGDADRIAMLSSHHIYAGDELAILFAKRLHAQGITPFVIGEVKCSQVMYNAINTFGKTLMYKTGHSNLKIKLKETNAHFAAEMSGHIFFKERYFGYDDALYACLRALELLLEQSPSDLENTIKNLPYSYTTPEEKIAVSEEEKFEIIRNLQEALKNPPSHFPTIKEIISIDGVRVVFEHGFGLIRASNTTPYLVSRFEGKDETTALEYKRALLGLLEKL

SEQ ID NO: 6827 - protein, 468 aa, Helicobacter pylori
  misc_feature (B) LOCATION 1...468
  hypothetical: YES
IYSKTRSHDMDISIFREYDIRGIYPTTLDENTAFSIGVELGKIMREYDKSVFVGHDARVHGRFLFEVLSAGLQSSGLKVYDLGLIPTPVAYFAAFNEIDNIQCPNSIMITGSHNPKEYNGFKITLNQNPFYGKDIQALKNTLLNAKHEIKPLKETPEKVNALEAYHRYLIKDFKHLKNLKYKIALDFGNGVGALGLEPILKALNIDFSSLYSDPDGDFPNHHPDPSEAKNLKDLEKHMRENAILIGFAFDGDADRIAMLSSHHIYAGDELAILFAKRLHAQGITPFVIGEVKCSQVMYNAINTFGKTLMYKTGHSNLKIKLKETNAHFAAEMSGHIFFKERYFGYDDALYACLRALELLLEQSPSDLENTIKNLPYSYTTPEEKIAVSEEEKFEIIRNLQEALKNPPSHFPTIKEIISIDGVRVVFEHGFGLIRASNTTPYLVSRFEGKDETTALEYKRALLGLLEKL

SEQ ID NO: 6828 - protein, 58 aa, Helicobacter pylori
  misc_feature (B) LOCATION 1...58
  hypothetical: YES
FKIAFIAEVRKVANEDKSQFDLRKFFSPAQLALKNVVKERMKLLAALIKFNQQGKSVT

SEQ ID NO: 6829 - protein, 193 aa, Helicobacter pylori
  misc_feature (B) LOCATION 1...193
  hypothetical: YES
CERYPHTPVALHLDHGTTFESCEKAVKAGFTSVMIDASHHAFEENLELTSKVVKMAHNAGVSVEAELGRLMGIEDNISVDEKDAVLVNPKEAERFVKESQVDYLAPAIGTSHGAFKFKGEPKLDFERLQEVKRLTNIPLVLHGASAIPDDVRKSYLDAGGDLKGSKGVPFEFLQESIKGGINLVNTGTDLTFS

SEQ ID NO: 6830 - protein, 192 aa, Helicobacter pylori
  misc_feature (B) LOCATION 1...192
  hypothetical: YES
ERYPHTPVALHLDHGTTFESCEKAVKAGFTSVMIDASHHAFEENLELTSKVVKMAHNAGVSVEAELGRLMGIEDNISVDEKDAVLVNPKEAERFVKESQVDYLAPAIGTSHGAFKFKGEPKLDFERLQEVKRLTNIPLVLHGASAIPDDVRKSYLDAGGDLKGSKGVPFEFLQESIKGGINLVNTGTDLTFS

SEQ ID NO: 6831 - protein, 214 aa, Helicobacter pylori
  misc_feature (B) LOCATION 1...214
  hypothetical: YES
VKAGFTSVMIDASHHAFEENLELTSKVVKMAHNAGVSVEAELGRLMGIEDNISVDEKDAVLVNPKEAERFVKESQVDYLAPAIGTSHGAFKFKGEPKLDFERLQEVKRLTNIPLVLHGASAIPDDVRKSYLDAGGDLKGSKGVPFEFLQESIKGGINKVNTDTDLRIAFIAEVRKVANEDKSQFDLRKFFSPAQLALKNVVKERMKLLGSANKI

SEQ ID NO: 6832 - protein, 307 aa, Helicobacter pylori
  misc_feature (B) LOCATION 1...307
  hypothetical: YES
MLVKGNEILLKAHKEGYGVGAFNFVNFEMLNAIFEAGNEENSPLFIQASEGAIKYMGIDMAVGMVKIMCERYPHIPVALHLDHGTTFESCEKAVKAGFTSVMIDASHHAFEENLELTSKVVKMAHNAGVSVEAELGRLMGIEDNISVDEKDAVLVNPKEAERFVKESQVDYLAPAIGTSHGAFKFKGEPKLDFERLQEVKRLTNIPLVLHGASAIPDDVRKSYLDAGGDLKGSKGVPFEFLQESIKGGINKVNTDTDLRIAFIAEVRKVANEDKSQFDLRKFFSPAQLALKNVVKERMKLLGSANKI

SEQ ID NO: 6833 - protein, 307 aa, Helicobacter pylori; identical to SEQ ID NO: 6832
  misc_feature (B) LOCATION 1...307
  hypothetical: YES

SEQ ID NO: 6834 - protein, 290 aa, Helicobacter pylori
  misc_feature (B) LOCATION 1...290
  hypothetical: YES
MPVKILCDAFLTSGLGHVRRCEKILSFIEKLGVEASLYLHKQDNISAFLEGVGGNDLLITDSYRLNSKDFYLLKEKAKSLMVIEDEEHAKEFYPKNTKIMNFTLNALKHYHHLSKDYQYYLGVGFYPIDARFVYERPINTENKEVLITLGGSEQKTLKEIVKILENKNVNLHIISSYIPKNSPKNTRYYSPLNPLEFSSLMKSCAYAISAAGQTLYELALSQTPSLILPIASNQIIQSKEFESLGIFKQTSLKTLAKDFENLQIQKNQAWAKTLTFGSELEGALREFLEI

SEQ ID NO: 6835 - protein, 308 aa, Helicobacter pylori
  misc_feature (B) LOCATION 1...308
  hypothetical: YES
HFRRFRISQAQIQPFEKRMPVKILCDAFLTSGLGHVRRCEKILSFIEKLGVEASLYLHKQDNISAFLEGVGGNDLLITDSYRLNSKDFYLLKEKAKSLMVIEDEEHAKEFYPKNTKIMNFTLNALKHYHHLSKDYQYYLGVGFYPIDARFVYERPINTENKEVLITLGGSEQKTLKEIVKILENKNVNLHIISSYIPKNSPKNTRYYSPLNPLEFSSLMKSCAYAISAAGQTLYELALSQTPSLILPIASNQIIQSKEFESLGIFKQTSLKTLAKDFENLQIQKNQAWAKTLTFGSELEGALREFLEI

SEQ ID NO: 6836 - protein, 91 aa, Helicobacter pylori
  misc_feature (B) LOCATION 1...91
  hypothetical: YES
RFAYRSFSLENGVQMAFKEHSNTRTQDLKTLYHDAGLLYMGKAQAFKEMRPIFSPNSIALELSPLEVQDIDTLEDLELAKLKYSRLKNACQ

SEQ ID NO: 6837 - protein, 99 aa, Helicobacter pylori
  misc_feature (B) LOCATION 1...99
  hypothetical: YES
KLSMRAIAIVLARSSSKRIKNKNMIDFFNKPMLAYPIETALNSKLFEKVFISSDSMEYVNLAKNYGASFLNLRPKNLADEQGHDFRSDGLSHERIRIKR

SEQ ID NO: 6838 - protein, 229 aa, Helicobacter pylori
  misc_feature (B) LOCATION 1...229
  hypothetical: YES
MRAIAIVLARSSSKRIKNKNMIDFFNKPMLAYPIETALNSKLFEKVFISSDSMEYVNLAKNYGASFLNLRPKNLADDRATTLEVMAYHMKELELKDEDIACCLYGVSVFLQEKHLQNAFETLKQNQNTDYVFTCSPFSASPYRSFSLENGVQMAFKEHSNTRTQDLKTLYHDAGLLYMGKAQAFKEMRPIFSPNSIALELSPLEVQDIDTLEDLELAKLKYSRLKNACQ

SEQ ID NO: 6839 - protein, 95 aa, Helicobacter pylori
  misc_feature (B) LOCATION 1...95
  hypothetical: YES
YSLYHGKCALECAKLDIDMLTVHLSSAKSALTILMQRLNALKKRPLIMGVSALTSFSEEEFLMVYNAPLKTQAITLSAIGKESGIDGVVCRCLKV

SEQ ID NO: 6840 - protein, 159 aa, Helicobacter pylori
  misc_feature (B) LOCATION 1...159
  hypothetical: YES
MQLCVALDLEKKEDNLSLLQELKGLDLWAKVGLRSFIRDGATFLDEIRKIDGNFKIFLDLKLYDIPYTMANAALECAKLDIDMLTVHLSSAKSALTILMQRLNALKKRPLIMGVSALTSFSEEEFLMVYNAPLKTQAITLSAIGKESGIDGVVCRCLKV

SEQ ID NO: 6841 - protein, 74 aa, Helicobacter pylori
  misc_feature (B) LOCATION 1...74
  hypothetical: YES
VSVFESLAIKEALGKGFLTLTPGIRLDKNDKEDQERVANAKEAKQNLSDFIVVGRPIYQAKEPREVVLELLKDC

SEQ ID NO: 6842 - protein, 77 aa, Helicobacter pylori
  misc_feature (B) LOCATION 1...77
  hypothetical: YES
WGGVSVFESLAIKEALGKGFLTLTPGIRLDKNDKEDQERVANAKEAKQNLSDLIVVGRPIYQAKEPREMVLELLKDC

SEQ ID NO: 6843 - protein, 145 aa, Helicobacter pylori
  misc_feature (B) LOCATION 1...145
  hypothetical: YES
GILTRLYQIVLRKIRNRMEVSRKKIYNPNSTESVNERKIFGGNPTSMFDLNKIKYQWADHLWKTMLANTWFAEEVSMNDDKRDYLKLSAEEKIGYDRALAQLIFMDSLQANNLIDNINPFITGPESICVWCVKLMKKPYTAMRMR

SEQ ID NO: 6844 - protein, 180 aa, Helicobacter pylori
  misc_feature (B) LOCATION 1...180
  hypothetical: YES
MEVSRKKIYNPNSTESVNERKIFGGNPTSMFDLNKIKYQWADHLWKTMLANTWFAEEVSMNDDKRDYLKLSAEEKIGYDRALAQLIFMDSLQANNLIDNINPFITSPEINLCLVRQAYEEALHSHAYAVMVESISANTEEIYDMWRNDMQLKSKNELYRTSVYGISQKPHRRKHPQSAFC

SEQ ID NO: 6845 - protein, 181 aa, Helicobacter pylori
  misc_feature (B) LOCATION 1...181
  hypothetical: YES
VYMELAKNPTEENILKALFANQILEGIYFYSGFSYFYTLARSGKMLGSAQMIRFIQRDEVTHLILFQNMINALRNERADLFTPQLINEVIEMFKKAVEIEASWGDYITQGKILGLTSSLIEQYIQFLADSRLSKVGIAKVYGVQHPIKWVESFSSFNEQRSNFFEARVSNYAKGSVSFDDF

SEQ ID NO: 6846 - protein, 233 aa, Helicobacter pylori
  misc_feature (B) LOCATION 1...233
  hypothetical: YES
VNLCLVRQAYEEALHSHAYAVMVEGISANTEEIYDMWRNDMQLKSKNDYIAQVYMELAKNPTEENILKALFANQILEGIYFYSGFSYFYTLARSGKMLGSAQMIRFIQRDEVTHLILFQNMINALRNERADLFTPQLINEVIEMFKKAVEIEASWGDYITQGKILGLTSSLIEQYIQFLADSRLSKVGIAKVYGVQHPIKWVESFSSFNEQRSNFFEARVSNYAKGSVSFDDF

SEQ ID NO: 6847 - protein, 301 aa, Helicobacter pylori
  misc_feature (B) LOCATION 1...301
  hypothetical: YES
MFDLNKIKYQWADHLWNTMLANTWFAEEVSMNDDKRDYLKLSAEEKIGYDRALAQLIFMDSLQANNLIDNINPFITSPEINLCLVRQAYEEALHSHAYAVMVESISANTEEIYDMWRNDMQLKSKNDYIAQVYMELAKNPTEENILKALFANQILEGIYFYSGFSYFYTLARSGKMLGSAQMIRFIQRDEVTHLILFQNMINALRNERADLFTPQLINEVIEMFKKAVEIEASWGDYITQGKILGLTSSLIEQYIQFLADSRLSKVGIAKVYGVQHPIKWVESFSSFNEQRSNFFEARVSN

SEQ ID NO: 6848 - protein, 341 aa, Helicobacter pylori
  misc_feature (B) LOCATION 1...341
  hypothetical: YES
MEVSRKKIYNPNSTESVNERKIFGGNPTSMFDLNKIKYQWADHLWKTMLANTWFAEEVSMNDDKRDYLKLSAEEKIGYDRALAQLIFMDSLQANNLIDNINPFITSPEINLCLVRQAYEEALHSHAYAVMVESISANTEEIYDMWRNDMQLKSKNDYIAQVYMELAKNPTEENILKALFANQILEGIYFYSGFSYFYTLARSGKMLGSAQMIRFIQRDEVTHLILFQNMINALRNERADLFTPQLINEVIEMFKKAVEIEASWGDYITQGKILGLTSSLIEQYIQFLADSRLSKVGIAKVYGVQHPIKWVESFSSFNEQRSNFFEARVSNYAKGSVSFDDF

SEQ ID NO: 6849 - protein, 124 aa, Helicobacter pylori
  misc_feature (B) LOCATION 1...124
  hypothetical: YES
LMTKSLKLIQKGVKNLYETLKNRALEHQDTLMVGRSHGVFGEPITFGLVLALFADEIKRHLKALDLTMEFIXVGAISGAMGNFAHAPLELEELACGFLGLKTANISNQVIQRDRYAGLHAIWLF

SEQ ID NO: 6850 - protein, 440 aa, Helicobacter pylori
  misc_feature (B) LOCATION 1...440
  hypothetical: YES
VLERYANEEMKALWNEQTKFETYLEVEKAVVRAWNKLGQIQDSDCEKICLKAAFNLERIKEIEKTTKHDLIAFTTCVAESLGEESRFFHYGITSSDCIDTAMALLMTKSLKLIQKGVKNLYETLKNRALEHQDTLMVGRSHGVFGEPITFGLVLALFADEIKRHLKALDLTMEFISVGAISGAMGNFAHAPLELEELACGFLGLKTANISNQVIQRDRYARLACDLALLASSCEKIAVNIRHLQRSEVYEVEEAFSAGQKGSSAMPHKRNPILSENITGLCRVIRSFTTPMLENVALWHERDMSHSSVERFALPDLFITSDFMLSRLNSVIENLVVYPKNMLKNLALSGGLVFSQRVLLELPKKGLSREESYSIVQENAMKIWEVLQQGAFKNADENLFLNALLNDERLKKYLNESEIRACFDYSYYTKNVGAIFKRVFG

SEQ ID NO: 6851 - protein, 443 aa, Helicobacter pylori
  misc_feature (B) LOCATION 1...443
  hypothetical: YES
GLSVLERYANEEMKALWNEQTKFETYLEVEKAVVRAWNKLGQIQDSDCEKICLKAAFNLERIKEIEKTTKHDLIAFTTCVAESLGEESRFFHYGITSSDCIDTAMALLMTKSLKLIQKGVKNLYETLKNRALEHQDTLMVGRSHGVFGEPITFGLVLALFADEIKRHLKALDLTMEFISVWAISGGLGNFAHAPLELEELACGFLGLKTANISNQVIQRDRYARLACDLALLASSCEKIAVNIRHLQRSEVYEVEEAFSAGQKGSSAMPHKRNPILSENITGLCRVIRSFTTPMLENVALWHERDMSHSSVERFALPDLFITSDFMLSRLNSVIENLVVYPKNMLKNLALSGGLVFSQRVLLELPKKGLSREESYSIVQENAMKIWEVLQQGAFKNADENLFLNALLNDERLKKYLNESEIRACFDYSYYTKNVGAIFKRVFG

SEQ ID NO: 6852 - protein, 76 aa, Helicobacter pylori
  misc_feature (B) LOCATION 1...76
  hypothetical: YES
VLLNVNSVGVMGDNRTYENAICLRAVNASDGMTASFSFLEHSFLEKVSNRITNEVNGINRVVYDITSKPPGTIEWE

SEQ ID NO: 6853 - protein, 80 aa, Helicobacter pylori
  misc_feature (B) LOCATION 1...80
  hypothetical: YES
QAFCVLLNVNSVGVMGDNRTYENAICLRAVNASDGMTASFSFLEHSFLEKVSNRITNEVNGINRVVYDITSKPPGTIEWE

SEQ ID NO: 6854 - protein, 210 aa, Helicobacter pylori
  misc_feature (B) LOCATION 1...210
  hypothetical: YES
VFEKEAKKHHLKGKIEFLAQGTLYPDVIESVSVKGPSKVIKTHHNVGGLPEWMDFKLIEPLRELFKDEVRLLGKELGVSQDFLMRHPFPGPGLAIRILGEINENKIKRLQEADAIFIEELKKANLYDKVWQAFCVLLNVNSVGVMGDNRTYENAICLRAVNASDGMTASFSFLEHSFLEKVSNRITNEVNGINRVVYDITSKPPGTIEWE

SEQ ID NO: 6855 - protein, 288 aa, Helicobacter pylori
  misc_feature (B) LOCATION 1...288
  hypothetical: YES
MILVLDFGSQYTQLIARRLRESGIYAEIVPFFESVENIQKKAPKGLILSGGPASVYAKDAYKPSEKIFDLNLPILGICYGMQYLVDFFGGVVAYANEQEFGKAILEIVQNSVIFEGVKIKSLVWMSHMDKVIELPKGFTTLAKSPNSPYCAIESDKIFGLQFHPEVIQSEEGGKILENFALLVCGCEKTWGMQHFAQREIVRLKEKIANAKVLCAVSGGVDSTVVATLLHRAIKDNLIAVFVDHGLLRKNEKEKVQAMFKDLQIPLNTIDAKEVFLSKLKGVSEPELK
